United States Patent Application Publication US 2008/0066199 A1 - sequence listing, part 5

SEQ ID NO: 30097 - DNA, 435 bp, Glycine max
  Clone ID: jC-gmst02400034e02d2
gcagagaacaattagggttatatattaaactcaacaaaaacaaataatatgagatgtttatgagaatttcatccacccaagaccgttgtgttccttaattaatggacaaaagctaaacttagctcaatttcttctatcccaagcatttgagtttcaagcacaggcaaatttccatcttatgaagtttattttgcacacatgtatcggagaatatactacctgttggcaacataagaggaaaaagcgggctttcagctttagctacagccatagcatcatattaattttggggaccgatgtccttagggacaaaatcggtctttttccattggcggccttaccggaaccaccagaaccttttcttcagaaaaaccattttttatctgagcaagccatggcttatcagtaggaagcttcagaacatccttggttttt

SEQ ID NO: 30098 - DNA, 497 bp, Glycine max
  Clone ID: jC-gmst02400034e03d2
ataaagcaacttcaaaagtgaactattattaaaaacagcagtccagcaccttgtagaaggaaaaaagtcactgacatttccaaacacattattctcaagtcactgacaatcctagtaagttaataactagatgaaatatgaccaaatgccaaaaataaaagagtacttatggaccaagaaagaaaacacgaggaatatacagtgatcaaaatgggatttcccctacttttccaaatgttactcaaataaaaaattttaagcctgaactccacatagttgagcattaacttgctcctagcatggtctttgcatcaaaaaagaccccagtcatgaaccctgaagcttgtaacagcaagtttaaagacctcatccatgggcatgcatccggcttgagcagctggaacagctacaccagcaccaactgtgtctgcactttcactcaaagggtttataacattgggctcatatgcagagactagtacatcagtttcaactcc

SEQ ID NO: 30099 - DNA, 431 bp, Glycine max
  Clone ID: jC-gmst02400034e05d2
aagcacaaaagacgagggtaacttgatattatggtattacatacatgcatagatagcctgctctaaaataagtcggcaggaacaaagattgagagattcaacgatcttcaaatttcacatttgccagaaatatataacagaaaagaggggtatgggatatgagttaagttctgatcacattcaactgcactgtcccaaaccgttactgttaagactttgaactgcacttgaactctaggatcatgttgttgttaggagctaatactacacatgcccttaggatgttttgcagcataggttgctgctttgacaacgcattcaccactggtgtacccggtggaaccagaggggccttggccatgtaactaaggatggtcgcaactgggtggaatgagaggaatttttccttgttttcagggataaactcgatt

SEQ ID NO: 30100 - DNA, 451 bp, Glycine max
  Clone ID: jC-gmst02400034e07d2
aatagcgggttgtagaaaaactcctttaatttgcactatatcttacaattggtgccgtaaaaataagaatttgcaccaagagaaatcagaatcggtcctaaagattttacagtgaagaagttgtaaaaaaatttgaaaagaactgcccctgatgattaaaaattaaactcatggaaagggtaagaaaagaaaatggctaacataaggacaaaagaaggttctattagacctagtgataacaatggcttaataattcaaggggtcgttcaaattaaatcccttcttgttgtgtacagcagtagtctttctattcctccaagcttcaattcagccgtaatgaatggtgatcagagcttgattttcataggggtacttgatttgagccgttgaaactctgagattgtattggtgttatcctatttgcattttggccaaattccatctgaataat

SEQ ID NO: 30101 - DNA, 509 bp, Glycine max
  Clone ID: jC-gmst02400034e08d2
agtaacaattgacaaattcttgttattgacaataacattggattttgaggatacatcattatgacaaatgacaacacaatagtattgaacccaagtgttgattactttctatctctctctcattctctctctctaattaacatcttattctgttggaaattatgaactggaaactggacatatgacgcacataactcttttgcttgcttaagtatatagaaacatgaaatggtagatgtatagagatctcactgagatgatcccttaagcttcttagcaatgccagcaaagtactttccttgatgaaaagcttgagccaattctaacttagttgggtgtctggaaccatccccggaattggtacctgcaccataaggggatccacccttgacattctacatcttaaacattccagcaccaaatgtgttaccaatgggcacaaaaattcatcccatggtgaacaagctgagtaatagatgtcaacggagtatttttttgtcaccttcttg

SEQ ID NO: 30102 - DNA, 411 bp, Glycine max
  Clone ID: jC-gmst02400034f02d2
aggtcaaaattttcctcatgctggaatttccaattcattcatcaaactgatagtaacaccatactaatcaaataaaataaaaaaatccttataaactcaaaacatccaaatagtagtgatgacttgcagtacaaggaaacccaaaacatatgacctcctactttcccaaaatttatactcatttatgccaactattatgggaaagtgaaaaatggcaaccaagaaaattgttccaaaaaacaattgccagtagtaataaaattgaaccaaactgaataatgcctcaaaatccttgagatgaaatgtctttcttatgccacagctggcatgtccttgagccatggatccaatggcttgccaattgagtacacaatgaaaccaatcttacgtagcttttccacatccacaatg

SEQ ID NO: 30103 - DNA, 462 bp, Glycine max
  unsure (1)..(462): unsure at all n locations
  Clone ID: jC-gmst02400034f03d2
aatattaaacaataattttggcatcataaattcttccggaataattatacaaaagtgaccagggaaaacccgatctgccagttgcccactgaataaaaacacacatcatattactatgtgttgtcatacatgcattgtaatgagtggatattccaaagcaattggtccctttatccctccttaatccttatgccgtaaatggcaccatcccttgtaaattgtaattgcttcttcagaaatagaattatacaaaggtagttgcaatatctatttgccaaactataaatgtaaagacccttcttcccaatcctagtagtgtcccaattgtatttacaaaggtgggacaagatatgtatatacaagtacaaccatggtacataatgtaacaataatcatactttggtctttactagngcacattacagggagttattatgcactgaaacccctttgcagagaact

SEQ ID NO: 30104 - DNA, 271 bp, Glycine max
  Clone ID: jC-gmst02400034f05d2
ctcattaaagttggaggggcacttggggatcatatattctttacatactccttgaagttcttcgactcttgcacacatttttttagcgaaaaagggctgttcaatattgggggctctgtttcccaggacaatctaacttgctgggggcccggcccccaaaaagaatggaaaagcccgcagaagggggttgcccttttgcgggcccccttctgggacaaaacactgaccgaagagccccgcctttcttttccaaccccccgggacaagctcc

SEQ ID NO: 30105 - DNA, 549 bp, Glycine max
  Clone ID: jC-gmst02400034f07d2
aatattcatagccaagttcgacggtggactccacgctcacaatgcccgagaaagacattccagtagccttgagcacacattttaaacattggcttcattctataatttttggagcagtatcgcacttaaaatagtaactattagaaggagctatctctaattaattgaaacattaaaacatgtaaaccacatcagctcattttcagtaaaatgacagatccgagattttccgcagcaataaagaagcaatgtacaaattaccaacatacgaaacattccttgagtgctatggggcaatatgcaccatgttgctgtaaaggacctgaacgttaagtgcataattctcgggtcaccatgagtccagaacaactgcttacagcatcaagcagtgcttggcatagactcaataaggatctgataacctttggaacagaagtctgtgtcttggcacattccggctatgcaggaacatcagctttcagggcttaaacccttgttattccagaaggagatgataatcagaacttccctttcaaaaggaaggatttt

SEQ ID NO: 30106 - DNA, 496 bp, Glycine max
  Clone ID: jC-gmst02400034f08d2
aataaagcaaaatgcacacatcccccaaacaaaacaagccttattcaacccaaattggtttcatatcacagaaaccaacaggatgccgccttcctccttactggtcccacccactcgaacaaaagttctacagaaataaaaatggctacaattcttctaccacaaatctgaaaagtctaacaccaaaaatcaaaaaaaggaaaattaaacaatcaaatccgattgataaaaccgatttttgtctttccctcactcacttttcagttgatcatctcaatcacttagtacctgtagtgagcaggcttgtatggaccctcaacaggcacactgatgtaatcagcctgggacttgctaagctgggtcagcttagctccaagtttgcccaggtgaagtgcagccaccttctcatcaaggtgcttgggcaaaacgtaaacctttttctcgtacttgccgggactcttcttctttcacaactcaagctgagcaatgacctggt

SEQ ID NO: 30107 - DNA, 489 bp, Glycine max
  Clone ID: jC-gmst02400034f09d2
gcgttaaaaacaggatccattaatagaaaaataaagacaaaaaataattgtacaacttcaactactagctcaaacactcaagtctccaaaaacaggagaagatctacacccctgaagcaaataatcttttctttttcttaaaaaaaaagggaaaaaaggaaacgaatgaaaacagagtgcacctaaaatgaaactaaagcccaaaatttatctgtagctgtggtgatgatagttgacagggcgccatttaaaagattcaaccatttcaatcttctcgccttggcctccgacgcggagcattagatgcttcctctttctctttgttttcttcattctctgcaccaccttggttattggaagcttctgtgcgttctggtttcttctccacctttgcaggtttcttgccaccaaatatgagcctgatgaaaattgacacgaagacaaccacaaccgctacagaattccaatagtgagatttggctggttctc

SEQ ID NO: 30108 - DNA, 479 bp, Glycine max
  Clone ID: jC-gmst02400034g02d2
atattaacttggtctgatttgaattttattttaaatgaaaactgaatcgaaccaaatcacaagttttttaagtttgatttggatgattttttaacaaaaaatccaacctaatcaaaccatgaacacccctaacaaatattgtatctactttgcttctcttatgatagagatcaaatattgtacatactttgcttctcttatagatagggaaattgtgcaggtccaacttaaaaacccctcccgaaagggacataatacacccaaacaatatctgagagctgcaattgccattagagatacttcaatcccattccagaatcaaaattagattattttgtctggcagcttggagcggtaaacgagcccctgttgcttgaaaagggtctccttttgggtctgccaatttgccgggttttaatgttaaagaacccttcaatagaaacctgtatggtgtttggttgagagcgttgcaacttttg

SEQ ID NO: 30109 - DNA, 389 bp, Glycine max
  Clone ID: jC-gmst02400034g04d2
caaggcaaacaaaaacacttgtggaatttttagaaaaaggaatttacatcaatactcttctaaaaatatattcacctatactactacgaatgaacccggaatgcataaaactttaacgccaaaccaaaaccaaaccccaatccaaatcatcactttttagccttagccttagtcttcttcgctggggattccaccctcttaggtttcttcacgacacttttgggctttttcacggcctttacgggtgtcttctttttagctggcttagcagcgacctttttggccgcgaccttagcgggcttaaacttgggcttggcagtcggggccccagctttggccttgggcttggcaacagcctttttcttaggagtagcagctttgggcttgga

SEQ ID NO: 30110 - DNA, 487 bp, Glycine max
  Clone ID: jC-gmst02400034g05d2
catgagaagtttttaaattctgtatagaaacactacattatggattatccaaatgaaataccggatccgacaaggagaaaaacctaatctaaagttgaggtattatatttccaactgaaatggacttctactaaaaggcacaggtaagctgaaataacattgtaatgatgggcagcacccatgaaactgactgagaatggcgattacaataataaaaaacagattgaggagtccaaactaaaagaactcaaagtccagatttttacccccagacttcatgttgtcagtacctgctatcctcttactagtgctgccaaccccaacaggatcaactggtcccacaaccttccctgctggtacttaattttccatcggtctcggttcttttggcggtgtggtgtacctaatcaatgcccagtttacaccttcaaagaagggatgctgcttgattcttagttgctacccttttaaaccccaagacgatgct

SEQ ID NO: 30111 - DNA, 467 bp, Glycine max
  Clone ID: jC-gmst02400034g06d2
aaataaataaatacaattattgtattgaatcatatctttggaaatccaaaatacaaactatgtctttttataggatacataaacagtatccatcaacattcaaaaagaagaaaagcccaatattctaaacttcttagaatcttatgtaaaccaaacagcatatatgtggaaaatttgcattagtatgaactaatcatggctagcagtcaaatcttgatgccttattttctcttttgcaactactatcatatagaagtccattaattattactgcattggatctaccataaccttgatgcagctcccttgtctaagaaccatttcaactctccttctctaggtgaaaccaattgagcagggagcttataatcactaggagcttcctccagtgcagagtagactgcatctgctctaccagcaccagtcaccaccattgctatgtttgaagaagcattgatcactggcaa

SEQ ID NO: 30112 - DNA, 470 bp, Glycine max
  Clone ID: jC-gmst02400034g07d2
aaagcacacatatatcctctttctaattaaccaagagttgtggaagtaaatcacataagaaaaaagtcacttgcatatagaacgtttaattgtccacagttttccacacgagtaatagagaaaagtacagacacatatttttttttgaaagaaaagtattgattgcttttaaatgcattagcaggtgccactcaatgatgaccagtcatcactatagggtgtgcagaagaagcaacggtggtccacgattatgatgatcagaaatcacttgatccgacggcagatagtgattccatcaccaaccgggagcatgcaaatctcgatcctggggtccacagcgagggctttgttgagctccagcacgaagtccctgtagtacctaacatactttctaagaggagcatcagggggtgccaccacagatccgtttcatagggtgttggcgtgcccgatcacgcccccaactttta

SEQ ID NO: 30113 - DNA, 425 bp, Glycine max
  Clone ID: jC-gmst02400034h01d2
cttctcataaattcctgttggcatcagcaacgtacaaaattactaattgctgattccactaatactgtatacatgcaggcagcaacttaaaaaaaaaaaaaaggaaattaacataatagtatatgattacatttgggatcattgtcaaaacaaatctcccaaaattttattcctactctctacacattgctaatgtcccagaacaaaactagaggagacaccaccaccaaaatatatacaaaggagtttgtttgtttgtttctatcttgatattatgaactcccaggattcatgaaagagaaattgacctgattgattccattgcaaatagagaaagttggatatatatttttatatatgtcttcctttcctcatgttttcttccacagcttggtttttaacaaacgacacaagcattaggattc

SEQ ID NO: 30114 - DNA, 161 bp, Glycine max
  Clone ID: jC-gmst02400034h03d2
catcttatagggcattccttaccacattataccaaaccaattcaaacaaattacttaaaaccaaatatacattgcctctaagacaaaaaacaacctacccccttaaattaacaacactatgtgcacccaaaaaacacgcattcccccccctaaagaactcc

SEQ ID NO: 30115 - DNA, 375 bp, Glycine max
  Clone ID: jC-gmst02400034h04d2
acagttgataattatatatcagctccacaaattgataacaaacagtagtaacattaatgggacaatagagttcaacacaaaccaaacttattttcaaaggtcattacagacccattacacatcacatttgttcttaaaatgtttgggaaaatccaacatcgaacatcacacagaaatcagctccagcttaaaaccccccacgaagacgcaacaccaagtgcagagttgactccttctggatgttgtagtcagcgagggtccttccatcctttagctgtttgccagcaaaaataagcctttgttggtccggtgggattccttccttgtcctggatcttcgccttcacattgtcaatggtgtcggagctctccacct

SEQ ID NO: 30116 - DNA, 402 bp, Glycine max
  Clone ID: jC-gmst02400034h05d2
gcataatagagatcaattcataaataagtattcagcaagcaatttatggatacaaaagacggctccgataaaatttaatgttactaagcaaacaaaggaaaaaagtagcagagtgggttttccacgagataagagatacgcaagtcgataagtatcataaaagattacagaagaaaaggaacagactcttctcaactatatcctatttgctgctgttgttgaggagcttggtaaccaggatatcccggataactgccatacatgttgggatcctgtccagcaggagcataaccataattttcatatccttgagcagcatacccataatatccaccaccagaaccagcaccagcagcaccattccactggtttggatctgcctgagcctgtatgtttgaagga

SEQ ID NO: 30117 - DNA, 450 bp, Glycine max
  Clone ID: jC-gmst02400034h07d2
actgaaaattaaattactttgatacaacagaaccaatggctcttttaaacaatacaaattatctcaagtccttataaaggaatgtttataaacaaatgcaagccatatactcactgctttgtgagtatttatatatatctctctctcttccctactcaatgtacaaaatgcttattgctttgttaacctctcaaggacttcaaagtagtcaggaaatgtcttcctggtgcaaccaggatccttgatggttactggaacatccccacaagcagcaagagagaatgccatggccattctgtggtcatcatatgtgtttatagctgtgacattcaatttctcaggtggagttatcacacagtcctcaggaccttcttcaactgttgctcctagcttcctgagctctgcgcagattgctttcatcctttcagcctcttttaactcttccaactt

SEQ ID NO: 30118 - DNA, 560 bp, Glycine max
  Clone ID: jC-gmst02400034h08d2
cttgtcaaaatcaatggattcaaacagtgagaaggaaatacataatatgcacatccacttctacattgcaaaaatatctttacattgttatcccattaccagagaaaaaaaacatggccagggcttaccaaaactgattacagcacaacactactttaatttgactccaaacacatatacaagacagactaatcactaattatggcatgacatgtttggtaggggactaaaaatgaaagtgaaaaaaagtatcacttcagtttacccctacaccaaactggtcccaaaattgaatatttttctgtgggctaagactattagtgccatgaagtacattcagttttgtgaggcagaacatctcatccttgctggtgaaaacacagctgtgagtctagcatgatcagaaagagaataatcttctggccatagtcctttctccacttcacgcggatacagcattgcattcttcaccttaaaaccaatagcttcttgctcctgttctgtgttacaatcttccgtgcaaccattcagattttccacacatgctctggacatgtaga

SEQ ID NO: 30119 - DNA, 416 bp, Glycine max
  Clone ID: jC-gmst02400036a04d2
gtccccccaaaactaatccccccagaaaaaaaatttggttaaaacatttccgggaacggggggaccccgggtaaaaatttgggggcccggggaaaaaggacccccccccttgggtaaagccattaaccaaaaaaaacaagggccggaaccaatttcaaaaaacgggggggcccccccccaaaatcccccctccccaaggtcccccttggccccagaggggcccccaagattctttttaggggacaaaaatgggggtaaattttaaaccccaaaccggggcccccttttgccccccccctttttgcccctctgggcccgggaacaaaagggggttccagagattttgccttatcgccccgggtgtccgccgcttttttaaaaagctggggcggacaccgttttttttttaaaagggg

SEQ ID NO: 30120 - DNA, 521 bp, Glycine max
  Clone ID: jC-gmst02400036a05d2
agaagaaaacgggtttcatccatcctgctaacaaaataaactaataataacaattaagcttatcaaaagaagaagaagaaagcatagcgtagcaataaccccatcaaaggctcgcactctgagcaggaggaggctctggcaccacataatcaaccacgaccacactctcgatttgatccctaaccttatccttctgggaattcaccaactcctcgttcgaatccactgcctctaactccctcggccccgggaaaaccgcgagcgaagcaatcgagaaacccttggctctccccggcgaaaaattctccccaagactgaactcactaatctgcttaaaactctctggaattcctctcaccacgcccaacaccgtgttcttatccgcgtcctccttcaatttcaagaagctgactcgaaccgcggaccccggcggcggaacgagactggcggtggcgaggtcatcggcgacccaatcgacggacatgatgtcgtcgatgatggggagcacgtatcccttgacg

SEQ ID NO: 30121 - DNA, 514 bp, Glycine max
  Clone ID: jC-gmst02400036a06d2
agttgtgtaataactttggctaattcaatgccttaggaatgttccatgaaagatgtagttttttttctagataagacattatgaacatgaacactcaggtagtgggaaaactacagccatgcgggattcttcaaagcagtgacaacagctttaacttgaaggtagcttctaaggctgtagattccccttactctcccttgaccactcatcttatatccaccaaaaggtattgctgcatcaaagacatcatagcagttgatccataccgttccagcttgcaatgctcgcatcaaggtgttggcagtgtccatatttttagtaaaaactccagcagccaggccataggaagttgcattggctcttcttatcacttcctctagatccttgaatttcaagatagattgtactggaccaaatatctcatcttttgctatcaacatgatgttctgaacatttgagaaaacagtgggttggatgtagtaacctttggagccaattttttggccaccagatt

SEQ ID NO: 30122 - DNA, 399 bp, Glycine max
  Clone ID: jC-gmst02400036a07d2
gggggggcccgaaaaaataaaaaaatgcctttttttgactttggggttatttttgattttgccaattaaatttcccattcacagccgtccattacacatgagttgggccttttccaacttaaaagcaggggataacattggcccatgacccgacacatgccccccctaaaaatcataattttacatttttacattcaaaatacaaagacttttaatttttaaaagaagaaaagagattaaccgatccttttaatgaaatgaaacccaaacccccaaacattggcttgatttttggtgttggtggtggtcccaacttgattaaacatgaaccctttgattgaatcacttggacttgaagggaaaggcccttattaccacctggtggtaaagtgcttcaaa

SEQ ID NO: 30123 - DNA, 524 bp, Glycine max
  Clone ID: jC-gmst02400036a08d2
aatggaaatttcagtgtcattaagaaaataggcagttcagaaacgcgtataaatggaaggacaaactaaaatagcccagtacatccacaattcataacgaagaacacgaatgcccaaaatctcagtaacattgagattagcattcaacaccttctccctttgaaaacattacagaagggaagttcaatgactaataagcagagagtatggtatgtttaattttgttccccgtcacctttgggtgcggcttctttaatttcatctgcaccatcgtcctgcatgtcagaggtccagagggtgaggttatcacgtagcagttgcatgatcaaagtgctatccttgtatgactcctctcccaatgtatccaattcagcaatagcctcatcaaaagcctgttttgcaaggctgcaagcccgatcaggagagttaagaatctcatagtaaaacacggagaagttcagagcaagacccaacctgatagggtgagttggaggcaactcggttttagcaatgtcctgagcggc

SEQ ID NO: 30124 - DNA, 577 bp, Glycine max
  unsure (1)..(577): unsure at all n locations
  Clone ID: jC-gmst02400036a09d2
aaaacaacatagttcaatattgccattcagtttaggtacgtaacaggagcagcgaagcataaaagcaatgcatccaaattaaaaccacatcggtactggtacacatctgaacatcaaacacaacagaaaacagaccacaagaacaagaatctgaagtagattctagtagtcttcatcctcttcctggccctcaccagactcagcacccacttcttcataatccttctcaagggctgcaaggtcctcacgggcttcagaaaattcaccttcttccataccctcacccacgtaccagtggacaaaagcacgcttggcatacatgagatcaaacttgtgatcaatgcggccaaacacttcagccacactggtggagtttgaaatcatgcaaactgccctctgcaccttggcaaggtcgcctccaggaacaacggtaggtggctggtagttaataccacacttgaaaccagtagggcaccaatccacaaactgaatggtcctcttggtcttgatggtggcaacagcagncgttacatctttgggcacaacatcaccacggtacatcaggcaacacgccatg

SEQ ID NO: 30125 - DNA, 534 bp, Glycine max
  Clone ID: jC-gmst02400036a10d2
caagcgacaagtaactaatacacagattgaataatttaatttctttatccacaaagtagttggtatatacacgccaacatgtcggttttcacgcataataaatgaacatgaactaaatctccaacatataaactaaaaacacacttgtattgatgagagttaataaccaaagatactcaataaaaattaaccatttttttttgtttcccacaatgcttaagatttaaagcattagaaacaaccaaggagtttttttggagctgttccagttgctctatactttgcagcttgctcctctgccttaagaagatcttcccctttctttgcctcaattattgctcttctttcttcagcttccttgtggattgtagcaattttgttttttattttctctgcagcttctgcctttttcttctccagttcttcttcaatctttttcaggtccgcctccactgcagctttcttactgttttcccatgcagaaactgatgaaagctttttgtgagccttgttttcagcttttgattttcactt

SEQ ID NO: 30126 - DNA, 523 bp, Glycine max
  Clone ID: jC-gmst02400036a11d2
gggaataggcatgtgccctgcattacatttggctgaatgagggtctatttctaagcaacatccaataattagacaatctaccagagttactgtgtctatgaccacaccaatgtaatgaggtaataagatttccaggataataatatcaatgtaaaatagtagcaataaacccacagctgactaggtacaaaattgcttcatgaagtattctacacacgaagcattttattacctaggattggctatcctttacagcagcaagcatctcctctttctttaacatttcgaacagatcaaacacctgaatatggcacaagataaacattttttcaatatgaaaaatgaaccatttcaagcacccaagaaagatcaacaagaaaccatctttactcaatggtatcttaataaaccaatacagagtacatgcttgataggtccatgaatttgctatagtttacttcggtgttaatattcttgagaaacaggtggtctcacttgataccaacaaaactaataaaataca

SEQ ID NO: 30127 - DNA, 494 bp, Glycine max
  Clone ID: jC-gmst02400036a12d2
ggcctgtccacacttatttgtaataaatatcaatcagttgataaattcaacagtaacacccatttcacatgccatgtactctcacttttattaatacagatagacccacaacaaaaccacggaagagattaatccaatccaaaatctgaacacgtaaggagctacaatttttttacaaaaacaaagcaaaactccacataatttggaagtcaatattggcaatagatgccgggtcaagaaggtaatcctgttaccagtttcctcatagagctcctccatcggcttagatacccacgtggatgaggacatgagggggccccacttaaaccaccaccttccagacaaggtctccgtctctctcacccttccagctaaagtgttctaaaaacaaaaacactgataatgttttttaaaaataatttcacccaaatgacaaaacttattgtcaagtaatatttttcttttgattttagagacaaaaaaatatatttttt

SEQ ID NO: 30128 - DNA, 532 bp, Glycine max
  unsure (1)..(532): unsure at all n locations
  Clone ID: jC-gmst02400036b04d2
agcattcaaatgcagagtatgtattcatcatgtaaatacaacacaataacaagtcatccataagcagcatataggatttcttgagaggtacatataaagccagaagaaaaatatataagatacttttcttccacagtgtctctagtaaaaggaccctaaaaaaataaaatatgacatcatagggttcctgaaaccccactacaacatatttgtcagaatctagtgcccacttcaatctttctttttatctttcagaggtcctctgggtatcttgctcaataccttcgcatcaaacactgcatattgcttcttaatctcggcaattgctttctcaccaaaagagtcgacatgatcttcatatttctcataaagcacaggcacagtgtgaagcaaaacaaaagctatgtagaacaaggtcaagaagttggcccaacaacccagaatagagaaaacccataatccagcaatcactgataagaacttcttgagatcccttccagaagcaatatctcctaacaccgcanaagcccga

SEQ ID NO: 30129 - DNA, 501 bp, Glycine max
  Clone ID: jC-gmst02400036b06d2
atcaaaagccattttgaattatttcggtaaagcgcttcgacatgcatgcacttaattattttgtgcgagtaaaataccactacctttacaacataaaagttgtaaacaagtaaacaacacatacgcatgatgacgcatacccaatatatactaatcttatctattccatgttcttagtcttagctgaataataataatattaatacatcaagcaaagtcacttttatcattgatcaccaccatctttgcttttactttcccacaaacaaagtcaaggttgtaaaacacgggcaacattgcaatagagcacaagaaaaccagcactggcccaaagatccaaagcaaaagaggaagtgctgagtagaagatcctgttcccaacagtgttcaaaaaagatcctttctccaaaatctcggttaagtactctggggtcaccaatgacattgcatcttgtggtgcgcaaatgacgatggtcaattggttgaggaacctaattgagag

SEQ ID NO: 30130 - DNA, 427 bp, Glycine max
  Clone ID: jC-gmst02400036b07d2
aaaacaagaaaaaactgatatttattattacttctcaacacaagaggctttttaaataacaagttataactaatggactcaacacctaatcacactgctcaataattataaatttatgttttcaccatccaatgttatttttcaagaagaggaaaagatccaaatccaaaaaaaactaccggtccacatcttgcagatagcctccattatattctcaaacaggtatcaaaaaacactgaaggcacatcccttacaccattttggaatgttggggtagatcgaactaactagaccgggtatttatatagctgaaaaaccttttgccaagcaggtttgttactaattatcccaccaagcactcacatgcttcctgtgtctgaccaaattttctctcccgggttggttcaccacaatgggaccaaatggg

SEQ ID NO: 30131 - DNA, 399 bp, Glycine max
  Clone ID: jC-gmst02400036b08d2
aaacaacaaactaacattagaagccctaaaatcaattggcaagcctttacatccatttcctttagaaaaacaaaaaagttggaatgcataaattttttgaaaaatagccattaactataacactactgggcacatatgaaaattttttataaattaaaaaagaagcttagcctggcctcctattttgggccccagggttttccaacaggtaatgaccaaatccacccaaaagcttggccaaacttgataggatcaatcatttgaattttgaaaaaagaccacttgcttactggggagagaaaactttttagggatcaggcggcatttgagcctgagtgtcactttttgtcttaaaagaaccaaaaagtttacagattttactatgtgcccgtatatggg

SEQ ID NO: 30132 - DNA, 557 bp, Glycine max
  Clone ID: jC-gmst02400036b09d2
cttaattggttccccaaattatagtctatagagcatctgcaactaggtgtcatctacaattgaatagctttgtacacaacaaccttaaaatacacattctattccatacaaggcaaagcttattttcccccaaagaaaatcttctactctatatataatctataatatgcttataactcaaatcttttacaaggatttttacaatttaacaagagaaagaaaaaaaaaaatgggccagacaatacatgcacccccagacccttcaaaatcgcctggttccaggttgtttcctaacagaagatacagccaaaacatgtcagactgacatgagtgatacacagctaaggagatgaactatcatcatcatctgaggaattgtattgtctctttccaacaagtcctggaaggggttgtggaagcatagggttcactgggacagggaatctatgtgctgaactaaccatggttctctcatttatcataccaacttctttgcacaccctatcaagaaactgtaagaagtctcttactaccatgaagattctaaatggatgagc

SEQ ID NO: 30133 - DNA, 509 bp, Glycine max
  Clone ID: jC-gmst02400036b11d2
attattactagacaaatcttacatttcacactgaccaccatgaggtagacactgaaactacctcaattattcgttttatatataagttttcacagtacaaacacaatattaggtattactaatagaggatgacagcttataaacagcacaatttcttctccgtctttcacagctctagaactaagtaatctgcatctgttttgatccagtactccctgttgacagatgaatcttcctctggatgcaccaggtcacttttgttgtagcctccatcattgattgttttcttcttcttctggttcttgtggtgtttagcagatttttgtgcagctgttgaactttcagggtgaactttcttgcggaacatatggagaatcttattcagttttgtctcagcagaagcagaatcaataggcccaccatttattgaagtagaattcttagaataagcatggagcattcttttcttcagcttttctttcatcaggttcatggcagacttgtccact

SEQ ID NO: 30134 - DNA, 532 bp, Glycine max
  Clone ID: jC-gmst02400036b12d2
aaacacacacatctgcactcctttttattgcaagagcaattcactgtctcggtagaaaatgaggaatcaaaagagtagaaggaaagccccagcaaagaaatttcaacagtaataatgtcttgggagagatgaaggcggagtggcgtaggagttgtgccataaaaccttttccatgatccataaaaccaaaaaagcagaaaatccctgctctactcatactttacaagtgtagcaaccaaagcactgtaagtaggggggaggacaaatctttatcctcagtatgatttcccacaatgtatcaagcttccagcacccaagaaaagaccaaaaatagcagcacttccaagtgtagtttgtccaatatgcctaattttcaatagtccaggcaccttgtacctaatagctttatatgttccatacacagcaccgacggcgccgccgacagcgccgcccatagcggcgccggctgtgacacgagtgaggcaactatcccttgccatggaagtcggcgtgagaggcacactgcgagtga

SEQ ID NO: 30135 - DNA, 534 bp, Glycine max
  Clone ID: jC-gmst02400036c04d2
atagacaaaccaaatgcttaatatcaacacaaacacgtgtacagaaaagaaaccactcttcaagaaaacagaaaataagaaaaactaacatattggaagaggtgccccattccactccccaaggcattccaaaagtggatcaatgagcttcccttggcacaaagcagtgaacactttgtcacactcttcacccggtgagataaccctttcaccagttagcaatgctgtccccaactcctctctcacaaacttgtacaaggggtaagacctgcattccttgatcttgtttggaattgcacattggtcattctcatatgcaactcttgcaccttccacttccttaggcaaaagggtcttcaactcttcctcaaatgttgcaatcttttggaagattgatgtgtttgtgttcttctcgttctctccattggccaatgcatagtccacaagcacttgccttagcttttgcatcaaagggtatgttccactgcaggggtcatcaatgtatgcaaatgtgtactccctatcaacaacctt

SEQ ID NO: 30136 - DNA, 522 bp, Glycine max
  Clone ID: jC-gmst02400036c06d2
ggccagggagcggacacaaatttaccataaagaaactactacatacggcacctaactagccaacgttccaaaatttcgaaaattcaaaaaacataaaacatagtaaaaagactgtttctccaatcattgtttctaaaaacgtaacaggcaattaagtcagatttaatcaacttcttccatcttgctaccctcagcatctgcatcagcgtcctaaagaggaggcatgtcagcatctgcttcaccagcatcttcatcaatgctcagtccaagcttcagcatcctgtgaatcctgttaccgaaagtgttgggatcatcaaggctgaacccagaagttagaagagcagtctcaaagagcaagagcacgagatccttcacagacttgtcattcttatcagcatgtgctcgctttctcagctcctccatgatggggttctcagggataatctccatcgacttcttgcttgacatgtatccagccatgctgctgtcccttaatgcctgtgctttcataatcctttccat

SEQ ID NO: 30137 - DNA, 558 bp, Glycine max
  Clone ID: jC-gmst02400036c07d2
aaagtaaatatcatttattcaaacctaaagaaacacaataacacatcatcacaaactcatgtaaccctgccaataaaataaaccctcatccctaaactccagcaccagcagcagcttgctcacttcaatacacaactcctagaatttctcatgtcaccacgtggtaagcacgctgatgtggagccaagtgttgtgctcacacgtaggtataccctccataatacaaccaaagacttaaccatcatataataataatatattaataataaagtaaactaaagaaataaataaaaaaaaaagcttttcaacatgacatgcaaaatggtagacctaatgatccccacaactaggaccatttttaaacttgtttttctcactcacactgtccataagtctaagcttcagttttctcaacaggaacctctactggggcttccactgtctcagctggtttgttctcttcctctgagggtgctgctggtgctgattctgtttctgtttcagcagtttctttaggctcttctgcttcttctttcacttcttcagttttctcctctg

SEQ ID NO: 30138 - DNA, 537 bp, Glycine max
  Clone ID: jC-gmst02400036c09d2
ccaaagaaaaatggataattttttgggaaactataaagaattcacatgtccatattttatggtttcattaaaaaacttatcaagtttggaaaattgttttaaaaactaaacagaaacaactaggacatgttttctcatctttttgttttctgtttatttagcctcccttcgatttcacactatgctccatgtcttgtttcaccctttaccagttgtatgagcaaaccttgtttaattatattttgaaaactaaaaagttaagcacacccaaagactttcaactcaagacaacttcgttgggcacattgccatcctccatccttatccaagattgaagggaaaagggtgtctgagtgatctttaaaattcgggctcctctaggccaatctccatagccaccataaccagtgtgcctagcatagcataaccatagtttctcggaagggcagcaccaggccaatccatggttgtgtccaacaaaaattgccttgacagaatttctgttacaagaagggccatcatacccgttcaactttt

SEQ ID NO: 30139 - DNA, 353 bp, Glycine max
  Clone ID: jC-gmst02400036c12d2
aaacgtaaacaagttaatacaaatatgaagaaaatcaatacaaggtatcctgcggaaaccatgccccaggaactcactgtttatcctatgaaggaattttatttcaaaaccagactttaagctaccgggagtgttctttatacactccatataagtgaacaaatatacgaacagaaaatgttataggttttaacaaccaaactgatataagtggaatcccgaagcaaaaaatccagtctctctgaggccactttcccttacacctgctgtgccctagaatcatacccatttgttccattgacgccatgtgctgacttgatctctgagttcctcctcttcaacacaacgatcca

SEQ ID NO: 30140 - DNA, 445 bp, Glycine max
  Clone ID: jC-gmst02400036d04d2
ggggggcccccaaaaaaaaattttttccaaaaaaaaagggacattaacccaaaaaccccggggacaacaagggaatccatgtttaccccccaaaaaaaaaaaggcctaaaaacccccccggggtttaaaaaatacccccccccgaagggggggaaattatgggggaaaaaaaaaaaagccgaatctttccccccaacccccggggtaaaagacctttttaaacaaaaattgagaaaagatttcttttttcccccccccactttataaaaacggcttgaaaaaggggggaaaactattgaaaggcctgggcaaaaaaatttttaaaggaaaaaagggggggaaaaaaaaaaaaaatatctttaaaaaaaaaaataataagggggcccccccctttaaataattaagaaggggggggccacacgggggagggggcaaaaccccaaaa

SEQ ID NO: 30141 - DNA, 525 bp, Glycine max
  Clone ID: jC-gmst02400036d07d2
aataataataattaaatacattcagcctttcaagattaaaacacgtcacgggtgtttgatacaaaaccatgagagcaacctagttacaagggagaaaaaggtccaaaatcataagacaagtagctgaaattaacgttttggcatccaaatagtgccactaaagatgaaaagcactaggttgtgcctttgtcatccttgcttcaccatagggctcatcgttatccatcttgcggttgtttctatatgctgcataagcaattatgtaaacaatcacaaggatgatcataacaacaatgttgatcactgagaccttcctccaactcttcttgagacttgccagcacaccagccttgcaagaatcacaggcatagcaaagctgctcttggtcattgctccaccttgtgcaatctgcgttggttcccatcaatcctgatcctgggatccacactgtctcattctgatacacatatccacaatctgttgggggcttgcagcaaccagactgaataagcgtgaggtgggtga

SEQ ID NO: 30142 - DNA, 408 bp, Glycine max
  Clone ID: jC-gmst02400036d08d2
aacaaaaagagttacgccctgacccaaatcaaatatgaattcacccctccctaaaggggggagcccaaacctccccccatacgattttacaccgggatctgggtaaaaaaaaaccataaaaatctcttgaggcatttggggccatgcatgaaaatgggctgtaaaaaaccaaaggcaggatttgagggggaacactgtgtttttaaaaggggggaggagccaacagggtacaaaaaaagagccaaaaaattttttccaggaggccctaatggaaggggggagactcttgcatggtgcggggaccttaggggaaggggagccaatctgggattttccccagtggatgggaagacttaaagctcgtttagggggtaacatttgatagaagcctgcagtatggatttttaa

SEQ ID NO: 30143 - DNA, 455 bp, Glycine max
  Clone ID: jC-gmst02400036d10d2
aatgcataagaagccagagttcacaacatctcacactccgcgcatcctgttcaagcaattctagaccttctcggaacttaggtgagtttcttgcaactcatcatcatcctcataaactcattcaagtctataaagccatccccatttttatccacccccatcaccattttcttacaagcactaaggctgcaactttcccctaggcttttgagaacttgtgacaattcctctgcactgattttcccatcgccattcaaatcaaacacttgaaaagcactcttgatctccgtctctttcaccctctcctccacgttgaacatgtccatgaactctttgaagtcaatgaagccatctccatcagagtccatcacctgaaaagactcatcagtctcagtgccttcgattcccaccccattgttctcactgctgctttgtactcttcgagggtaatcttg

SEQ ID NO: 30144 - DNA, 432 bp, Glycine max
  Clone ID: jC-gmst02400036e05d2
aacttgaacactctttttttgatattgatattaagagacacattggttgggcatacatacaaacagagagtacatgtttttagttgatcacgtaaaaaaattcataagaacatacaaataacaaaatgggggggagaggagagaaacacacagagtaagagacgcggaaagttatggatattaaacatattataagggcaacgctcaaaaaactttcagcatacagcagcggtatgaattacttacgccttataccacttgaggggtttgaccacttaccatgggatgtaggggcttatatttctagcgtgcataggctgcatactttaaaaacctgttatttgcacccctctcgagatcaacgatgatggggactataccaggtctgaaatcaaagttatgattctcaatgtagagaatgtccttatcatg

SEQ ID NO: 30145 - DNA, 472 bp, Glycine max
  Clone ID: jC-gmst02400036e06d2
aaagcaaattactccaatggctgcattttttattccatattttacatccacaaaccatgctgtgatacatacacatactacaagcacatgttatgttgattgatatatcaactacaccacagtaacaaaccacagaagtacaaaacccagagattaaaattgatattatgctgagaatgtaaatatattgatattacacataagattgggatatctcggacgggatttttggctgatacttacaacttagtaagtaaaggttctttttggatatcaacaaactgactgcggtgaattcccttatcagaaaatgcctctacaagcttggggaagagcttagcaagcataattttaaattctgttgaagtccccttcaggttttcatgttcagatttatcactaccaaaagcacatccaatagaagcttcttaagagaagccttgcaagcaagaagaatatgttgggagcattt

SEQ ID NO: 30146 - DNA, 401 bp, Glycine max
  Clone ID: jC-gmst02400036e07d2
aaagcacaaaaaactccgaaaactttatattattttacatgcgggcctagaaaaaaaaggccgctttcaaattagtcaggcggaacaaagatggggagatcccacgatctttaaatttgacatttgccctaaatatttaacaaaaaaggggggttgggaaatgagataaggtttggtctcattcaaatacagggtcccaaacctttacttttaagaatttggactttccttgtactccaggaaaatggggttttaaggggctaatccaacccaggcccttgggggggtttccagcataacttggtgttttgacggggcattaacccctggccttctccgtggaaccaaaggggccttggtcaagcaactggaggagggcccaaatgggtggaacgagggga

SEQ ID NO: 30147 - DNA, 454 bp, Glycine max
  Clone ID: jC-gmst02400036e10d2
aaaggaagcttaagtttacattcacacaataataagtacacaatctcatggttatgaacctaatgtcagagctacaagagtaactgtttcggtacacatacaaggcacacaggaaattgcagtaccatctgcaatacatttcttattcataatttatattctaatcacaattcatttattggcagctccagtcattcatagcttcattcatgcatccaacaacttcagcaagtccttctcaatgctcagaggagaagttgtgggtgcatagcgatcaaccacatttccctctttatgcaacaaggaacttggagaagttccatttgataccatccccaaagaggccacctttgcttgattttagatacttgtacaggggagcaggtttgtcaccattcacatcaaccttgccaaaaacgggaaactcagccttgaagcgagtacaaacaaactc

SEQ ID NO: 30148 - DNA, 367 bp, Glycine max
  Clone ID: jC-gmst02400036f04d2
cattcaatatataacatactggaaagagattgtcgttacatccattagcaggtttaacaacagaactataaaaatgtgaacaaacgcagtttatgtgaccactttaacagggaagcaggaaaggggttggagaaaagccaaaatgctcacacaagccatgtgccttaccattcattttcagaatattaacctaagccatgactgaggatattgaatatacaacactatgcacaagaaatatggcaagcgtaattaaacataagctacctaatgtcctctgtgaaaaacaatgcgagtgattgctgtacctaccttattaacatccctcatggatgattcagcacttgccctcatagtgcctttatac

SEQ ID NO: 30149 - DNA, 549 bp, Glycine max
  Clone ID: jC-gmst02400036f05d2
gaagaataaaaaacccactaatatacgccaattcactggattgagaacaaaattcaaacacaatatgccagcatacagttgataattatatatcagctccacaaattgataacaaacagtggtaacattaatgggacaatagagttcaacacaaaccaaacttattttcaaaggtcattacagacccattacacatgacatttcttcttaaaatgtttgggaaaattcaacatcgaacatcacacagaaatcagctccagcttaaaaccccccacgaagacgcaacaccaagtgcagagttgactccttctggatgttgaagtcagcgagggtccttccatcctctagctgtttgccagcaaaaataagcctttgctggtccggagggattccttccttgtcctggatcttcgccttcacattgtcaatggtgtcggaactctccacctcgagggtaatagtcttacccgtaagggtcttgacgaagatctgcataccaccacgaagacgcaacaccaagtggagagttgactccttctggatgttgta

SEQ ID NO: 30150 - DNA, 433 bp, Glycine max
  Clone ID: jC-gmst02400036f10d2
gtgaattggcatgtgccttgtattacattttggctgaatgaggttttatttttaagctacatccaataattatacaatctaccagaaaaaaagtgggggggaccacaccaatgtaaggaggtaaaaagacatccaggaaaataatatcaaagtaaaatcgttggggggggcttttagctgactaggcacaaaaatgcttcatgaagaatgccacacacgaagcattttattacctaggacagaaaaaacctctacagcagcaaagcagtgtgctctttcttataacatttcgaacagaacaaacacctgaatggggcccaagagaaacattgggtcaatttgaaaaatgaaccattacaagcacccaagaaagaccaacaagaaaccatcttgacggaatggtataaaaataaaccaatgcagagcacatgct

SEQ ID NO: 30151 - DNA, 449 bp, Glycine max
  Clone ID: jC-gmst02400036f11d2
gggggggccaactcaaaaatgttttttttccttaaagggcagcccccaacttaaaagaaaaaaaaaaggggacatggaaactttaaagctgatgaaaaaagcttggaacgtaaacaaaaacctttcaaagaaaattttgttccccttcaaaccataaaaaaaaatccggataaattggtggggtgaaaataaaaataaaattgggacatgcccacaactgggtaaaactaagggttttggggctgaaatttttttttagttttcacaagcaaaggtttattcgaaagccgcagttttgtctttgaaatgttcaaggggtttttcaatacctaaaaccttatggttgggcgagtctttaacttggacactcacctggcctgaaataactttctcctttccaacaaccaatttgaagttgagttgggctaactgggctttttggacctttt

SEQ ID NO: 30152 - DNA, 498 bp, Glycine max
  Clone ID: jC-gmst02400036f12d2
aaaaaagcaaccacagaaaccttattatatattgcaaatccagggatacactacaattcactattttataaactgtcacattaaaagtccccaacgatttactataaccatgaaaactgaaaaccaaagccatatccctacaataagggtctatgacagaactgacaaatgaacttaacatgaaattttaaaaaagctaacataactttttgcatccaaattgaatattctccccctaaatggcatctaatagttctgggaatagtcaaagctcaacggctgttgaccaaatggagcctggaaaacaccatgtttaaattggtcatatgaatgagcatacattattgcagcactaggccactgtagggaagcaccctcactagatgtctgattcaatcctggggggccaaaaggacttattatcggggttgaaggaggtgcataacccagtgaggcttgagtttgtgacatttgacccaactgggtaaatgtagcatt

SEQ ID NO: 30153 - DNA, 526 bp, Glycine max
  Clone ID: jC-gmst02400036g07d2
gaaaggaaatacaaatattatttaaaccaaaaatagagaattagttctattcttggaataatacatacaaatcaatttacaacggcaatgctgagaagattattgaggcaaatgaactgcatatattctaatacaatgcacaagagtacgataggatttctacagaaaccccgttgatgttttagaacaaacgtagctatattggaaatagaatgggataacgttctaagtacaataattttataggacacggccaaatcatcttatggagttgaaattgtaggaattgtattgtgaattggaaaatgtagaagaccgtgctttatcagatttgggtgaagtttaggaataggttttctgaagaaagtctctggcttaaaaaatgactttggcttaagggataggtttaacaattggaaatggtttaggtatgggtttaaaaactggaataggaataggtttaacaataggaacaggctttggtataggcttaaaaaaaggaattggtgttggtactggcttaaaa

SEQ ID NO: 30154 - DNA, 149 bp, Glycine max
  Clone ID: jC-gmst02400036g10a1
caataattagtttgagggattacccttattaaaaaaaaaaaaaaaaaaaaaaaaaaaaaaaacaaaaaaaaaaaaaaaaaaaaaaaaaaaaaaaaaaaaaaaaaaaaagggggcggccgcccactaggaagccactctacccggaaata

SEQ ID NO: 30155 - DNA, 542 bp, Glycine max
  Clone ID: jC-gmst02400036g10d2
gctcgctcacatattggtcagttattagaagataaagttgatcatacatctcaaacttcaacaagatttttcaattcgacttctctctctctctgaatatatacatattgttctagctagctaggttattttacagtggtacagtgcttattgttgtctgggaatttgcagacaaaatcaaactcatgcaacacaaaaactaacaccaaggaagctaaaagtactagcactggacccagcatccataacatcaaaggaacagcaacacaaagcaccctattaccaacaagagctaaggtgaaccctctttctaatatagtttgtgtgtaacccccagacaagaactccccatatgcattcatcagaaaattggcatcaatcagatatcctatggccatggagctgaacatgaagctcatcaccaaacaaattgatgctgatccatactttaaaacaaagattttatctgactttgacccaaaaaattcactgctaaaaagatggctagcattgtaggtgttattggtcaaagctgcccaacc

SEQ ID NO: 30156 - DNA, 359 bp, Glycine max
  Clone ID: jC-gmst02400036g12d2
aaacaccaaaacacatttattaaacaaaaataaagaccatatataaatcgattggtttatttatgcctgtcggcaaataaattttttatgtaaaaaaaaaaaaccccaattaaagatctaaaaaattgacactattatatacatcttaatatcaatcattacatatcaccctgatcggtttgatccaccggagttgttgtacggcccctccttcgagattgccgggggtgactgcccccaaattttaaccttccggtctccttaaacctttgttttttggagggtacaatgacacactcgggttggggtacagggtaccttaaagtttcatagcaatatgaatagtccatgtaacgctg

SEQ ID NO: 30157 - DNA, 525 bp, Glycine max
  Clone ID: jC-gmst02400036h05d2
aaaaccacaacaaaattcacttgattattgaatatgtgagcaacctcatacataatagtacatccacccaaactcttgcctacttttcatattatgggtgtacaaaagctgttgtcagtaattctaaagtgtacatcattctacatcaacttgctcattctcttttgcagcagcagcaccattgataccaggaactagttcagattcaccagccctagaagacaacctttggtatctgaaagttggaagaatcttataccgcccaaatgtcagaaactgactcaacttctcatagccccacctttgttgaatatagaccacaattgcaagaacgatagcagtcacaggaatggcaatatccccaaattttgagtaaaaatccaaattaggattgacaaattcagattcctcataaaagtaaggatttgaaactggagctcgaatgtagtcatatatgtgaggaagaagtctgaccagagtgattccaataaaatatagttttctgagtggtttgcaattgatatg

SEQ ID NO: 30158 - DNA, 497 bp, Glycine max
  Clone ID: jC-gmst02400036h09d2
gggggaacacaaattaattttattcaggttacttgcaataactatcgataaccgtgggtaatatttgtagctagactagctagcatagagaattacagcataaaagcataaacatgggcttagcagtttcctcctccataacattatacatcatgtaaattatttacatacacactatactggtgcccctaccatgtttaggcatccatccttatatttaatggttagaaacatgtatagcagctacagttgagaccatcgagtccaccccacatacattgcgacctctgcagatcttgtaatatccttcttctccccagctctccccccatgaattctttatgatccagtaaggcttttccttaaaacgaattggagcataagcaccagatccatagcccaccaaaagaaccccatgatccaaatgcttgccgcagatgtatgggcatgagacgccaccaatatatgtttgcataaaaactgcattgataccaact

SEQ ID NO: 30159 - DNA, 353 bp, Glycine max
  Clone ID: jC-gmst02400036h10d2
ctgggggggggggaaaaaaacttttcaagccccaaaaaaaggcctatttaaaaattatccccggggggtcttcccccaaaaaaaaaaagaaaacccccttgccccaaaaaggttcccacccccctttttttcccccccaaaagaaaaaaaaaaccccccccccaactgaaaaaaactaaggggggcgtgtgtttcttttttttgaaaccccccaaaccgggtccaaccccacaaaaaactgttttttaaaaaaaaggaaaaatttgaaatctctcccccccttgacccaggtttacaaaccacaccttaaaaggggaggggtttattccccacaaaaaaaaacaaaacccatt

SEQ ID NO: 30160 - DNA, 415 bp, Glycine max
  Clone ID: jC-gmst02400036h12d2
gatatattgaaaaggtggacagaaacacataatttagtatttaataaagcaaaagcaaaatgcacacacattccccaaacaaaacatgcttattcaacccaaattggtttcatatcacagaaaccaacaggatgtcttcctccttacccgtcccacccactcgaacagaaattctacggaaattaaaaataaaaaaagctaaacttcttctacctcaaatctgaaaagtctaacaacaaaaattcaaaaaaaggaaaattaaacaatcaatccgattcataaaaccgattttgtctttccctcactttccgttgataatctcaattacttagtacctgtaatgagcaggcttgtatggaccctcaacaggcacactgatgtaatcagcctgggccgggctaagcttggtgagctt

SEQ ID NO: 30161 - DNA, 494 bp, Glycine max
  Clone ID: jC-gmst02400037a08d2
gtcaaagatgaaatcattcctagcctttcatataaaccataatgttagaaacaaacaattatggtttaacagcataatcgttaaccattcaaggattctttcccttttcataacattaacacacaagaaaccacaaaagatgcaaaaatttaaacaaaaataaaaagcagaaaaaagaaattaaggacaaagaaaactcaaaatgcagctgccatatggatcaactccacatggttgccactgtgaccaaagctatcccaatcgacatcaacattgctccaccaaggctaaccaaactcactgccccggatttattgtgattttggtctgtttcttcttgatcatcgtcagaagagttttccttggcagctttaggagcctttgcaagagttgttggagccaaagctggagccttattggtttgaaagaaatctagaggaagaagaaccttgttcacatgataaatgccaagcttgttatccgagtagactact

SEQ ID NO: 30162 - DNA, 433 bp, Glycine max
  Clone ID: jC-gmst02400037a09d2
acaagcagtattttattttttatcataaaatgcttagtttgatcgttggaaagtaaaggcttacctgaaaagaatagtgcagcaaagatgatttattcttgacggggaagacatacaatagcgaaaatgagtagttttgttacaattagatgatggggtcttgttcttcagtttcagtagttctcccgaaaaaggtaattgattgagagcactcggcaaagatgttaagacaaaacaagcatagtccggcataggcaactgtaatccctctggcgagtcttccaagagcagagaagagatttagggaaagaatgaccttcagaaacagcctcttgtcgtgcccagtagccgccaccctgaacactgactcggggccaccaattgtattggccaaccatgccacgatcgcggtcgcactctcctgagatatttg

SEQ ID NO: 30163 - DNA, 334 bp, Glycine max
  Clone ID: jC-gmst02400037a10d2
gggaaaaagcaagtaacattaagttggtttgggatacccaaaataattcacattttttgaaggacattggaataacattttctttaccaaacacaaattttaaaacttttaaaagtcccaaaggcatccttttttttcatgcccacttgccggggaccaatttgggggcgtaagcccaagcattgttgttgactgggtccccaaggggaatcaacaagggtcttcaatggacccttaccggggacaatgggctggaccaagaacccaaactttgagaacatggcccatctcccggttttgggttcctttcccttaagccaacaaaaacctttgg

SEQ ID NO: 30164 - DNA, 501 bp, Glycine max
  Clone ID: jC-gmst02400037a11d2
aattataactcattatgtatggtaatcaattgacacagataccctcttgatgatttcattttcatccggaaaagggaaaactacattgcaatatgaaactctctctcactctcacactctctccttttgcatgatgatcaattgaaatgttgctgctccaaccaaggccaaaggccagattgatcatcaatgccacaaaacatgttgcttaagctctcttctttgaccatgtgatcaatcttttggcactgaatctctggccttggagtggtttggaaaagctgagccactcctgttggtctagcacaagatggaaagagggttctgctgttgctctgctgagtggatagaggactgtcaatagctggtgttcttgagatatccaacttgatctctgagctgttctcacttctattgctgctggatccctcagtttctttgttgaggttgatggattcatatgttctctgtttttagtgccaatatctcagtctgaagttt

SEQ ID NO: 30165 - DNA, 388 bp, Glycine max
  Clone ID: jC-gmst02400037b03d2
gcctgtctcccttttttttgtcgattcaaacaaataaaaacgatcatttgggagaaattaaacccgagtaatttctcattctgtggtgcctaaaaaaaaatattgctcatgcaagatcaaaatttagaacatttaagatgaagactaatatttctttctttcactagaaattgccgaactctgagccctagaaccccatacatagttcgaactgtctggaaccgtaggcgattttcgctcggttggcttggacaggaactggcgcctatgtgagtcatcaaagacccgcaacattttttaacagtggacacgctccggaatttgagcttgtactccttttgctcccgcctggcctgtgggtcaacaagatgggccaatgggtttacga

SEQ ID NO: 30166 - DNA, 486 bp, Glycine max
  Clone ID: jC-gmst02400037b05d2
aaaataaaaatggaaaacttcaataatggctatgccaaagttgagtagtataattagagtcaccagccaactaaaataaatggaaaaataaatcgtaacaaaacaaattacactcttatcctctgtttaagatcaaaaaattccacctgaataaaatctagatactcagataattgcttcactcaattggcctcaacgaacaaccaaaccttgggctgcctgggacccatcctccgttattttgttggcctgaatggtactgataacatttacaatatttcccctccatgtcactagctttgttctcagtgcttgccattggtgctgaccaaacacacgctcagtaggatgactgacaactacaacttgattcatttggtccatcttacagtcaattaacttagcagttaattctctaaccacccatagttccacctcatcatcgttgatctgaagtgtgtccctaataagttcatatggaatttg

SEQ ID NO: 30167 - DNA, 480 bp, Glycine max
  Clone ID: jC-gmst02400037b07d2
agtgaaagttttcaaagaacatataataactctatatcacatatattggtacatacaggtccatactttaactaattctgttcaatacacattcacccatgctaaaatgttaataactaaagtctaaacttatatgatggaaatatacaacacataatgatccatcatcatttcattatccatactggccatgatctcaaaaccaatacacaatattaccctccaaatgcttcaccccttgtaccaaattttttgatatcaatgtaacgtctatgatggtgttttcttcttcacactcaagaatggtttgaacatcaacagtactccaagtccttcaacaacattcagggcaaggaagactatatgggtgcctggcaggaaaaaagaatgtatatgcttttctgaccaagttaatattgcaccgccactagcaggaccaactgttttgaatgctgacatacaagtcataacaaaaccatt

SEQ ID NO: 30168 - DNA, 435 bp, Glycine max
  Clone ID: jC-gmst02400037b08d2
atctcaactcgtaagtcatttattatttttcaacctttcaaggtggaacattctacacatgaaaggcgagattacatcacatagggattttttgacataaaacacaatttttcacttttcaaatgaacaacctagattatttaaatatccgatcacaagagcatttttctccttttaaattctcaagcgaaccgaccaagggattctttcacggtggggtagttgacatccgggtacaacttataagcctcaaccccgaaagatgggtcaatctcaaagttggggggggcaccctctacgaacactgagtggttgattgctaataccacattgattggaagaggggcctctttgatgtccttgagaaccttttcctctgggacataaattttttcgagggacttgccaaccttgttcttccacaaggccacaagt

SEQ ID NO: 30169 - DNA, 425 bp, Glycine max
  Clone ID: jC-gmst02400037b10d2
gaacaaataaaacagtttcgattacttcaaccaaaggtctatcaaactacacgattataagcttaagacatgtaataaccaactaaaattcaagttttgcaaaactatgttttgttaatatagagcccttacattcggggaaacttcaaaaccactatttttcatccaaattattcaaagcaaaggggaagcaacatcattgcctcagatagttgtcgtcatcattatctgtatattaacctccaccgccagaaccgtatttctttccgaacaagatgagctgtagcttatcataaccagcaagcactccagcacctgcaacagcacgtaatatgtttgcaccagcacctttaaagagtgacttagtaccctcttttgcgacgattatcttgaatgcttccaaagagctcttgtattttacagct

SEQ ID NO: 30170 - DNA, 482 bp, Glycine max
  Clone ID: jC-gmst02400037b11d2
acatgaaactagattgccagagcagtttattgctgagaactgtataacagaatacaagttgacataagacggagttcttaaaccaaagacattcacaaacagtacttactctcctattcctaaggcttaataatgcttctccacaccctgataagccagttgggaagctagctccaagttcttccaactgatttgctccatttaagtcctcttggaactaacgtattcttctggcaagtaaatctctccgccagcttcaccatgttgctccccgctgatagttttcttggcagcttgaaattcagcactcatagcatccatcccacgctgcaaagcttcatcagttccatagccatgttcctcagcatacttccttacattcttcgttatcttcatagagcagaatttagggccacacattgagcagaaatgagccactcttgcaccatctgctggcagggtttcgtatggaaggacatggc

SEQ ID NO: 30171 - DNA, 488 bp, Glycine max
  Clone ID: jC-gmst02400037c01d2
cttataatgccgggttcaactcaaggcaattacacctttcatgccacggtcatactattcaaaacaatttttacaagacaccaatatgtatatatatagctgaagaccccacaccctaaactaaattactgggtgacttgcacttcagcaatttcattaattgatcgtcgccatatccttctaggagacgtacttctcttcacaaaataaaattttggttcttccaactgaatttctagattggacaaatctaatgttagcttttgcttaatgaaagcatccaaatcaaagtcactttttccatttgcatcatcatcatcctcgtcttcactagaagaatcaactctgtttttatttgttcccgcaatgttcctcaaagaatccagtggcatgttgtacgaatttgggttcagcttgaggattctctttaaactgtcaatagccgggtctaaaatacctaggaatcccataacccatgaagcattatt

SEQ ID NO: 30172 - DNA, 388 bp, Glycine max
  Clone ID: jC-gmst02400037c05d2
aggggaaaaatccgggtttcattcatgaaatttaaccctaacccttaagagaaaatggtaaaacaaattttgggactttttttaaacttggagggggtcaaatttaaaaattttttcccttgtttagaaagggcaaaaagggggaaaaggttttttttagttttttacaaaaaacttcggggttgatccccccatttttttgggaacaaaacccttttattttttttacttcaaaggggggggggccccctaaggttccggtttcaagccatttagggggggggacccccaaaaaaagattttttttttatttgaaaaaggggtttaggggaatacaatttttcacctcaaacccttttgggttgggttttggaaaattttataaaac

SEQ ID NO: 30173 - DNA, 544 bp, Glycine max
  Clone ID: jC-gmst02400037c07d2
ccaagtaaaaatatatcttctattactctcagtaaattttctccttgtgtttatttttaattttgagacattctaagtacatttgtttcacatccctcagaaaatttccaaaccacgacggtggttttcctatgtctagtctctctagtaatttgaataattaaaaacagaactgtcaccaattatagcctaagttttagatacataggaccaaatttttttccatgagctaatcaatgttcttgtatgagcagaaaaatgtcctccttccatgattctttcagctgtaggtcccatttcttggatgaatttgacagattctgagagtcgattgagaaggttcgtcaatgcaattacctcattcctttgcagctgcagtgtatgacttgagttttcttgaccatcaacagagaagagaatctttaatgcagttccgagaccaagaacctgaagtttgccccataatcgacatttttcacatcctacacaatccattattgcactgatgttttctgaattgttgttgaattttctgttttagctc

SEQ ID NO: 30174 - DNA, 336 bp, Glycine max
  Clone ID: jC-gmst02400037c11d2
gcaaattaaattacacaatcacagccgtacatcacacatgagttgggcctcttccaacttaaaagcagaggataacattggcccatgacgcgacacatgcaccacctaataatcataattttacatctttacatacaaaatacaaagactttaaattttaaaaagaagaaaagagataaacagatcatcttaatgaaatgaaaccaaaacccacaaacattggcttgatttttgttgttgttgttgttcccaacttgattaagcatgaaccgtttgattgaatcacttggacttgaagggaatggccctgattacgacccggtggtagagtgctgc

SEQ ID NO: 30175 - DNA, 557 bp, Glycine max
  unsure (1)..(557): unsure at all n locations
  Clone ID: jC-gmst02400037d01d2
ggacagagaataaaatgttcatattattgcaacaactaagagattcaatcatagtaatacgagttcggcaacagaacatcatcaaacaaacaaagcaataaaaacatatagtgaatatcacacactcacagctgatcacacgacgtaggaacaaaagaaatggtctccttttcaagatcatgattcaccaaaatgttctgctgttgaacatttccgaatatagacattccactagaagcacccatggctaaacaagccacacccaaattggagtcaccaatcatgtagttctcagcaggaagctccaaatccccacccttgaaatggaaaacaatctttggaatctccacttgtgttgaccctgatggcagagagaagcaaagatccaaccctgttgagctagttttgtccaaaggaagnttggtttgagaaatgaactcttttttgagtgcctcaaaggccttttgttcaatgtaggtgattgtggtgccagagtctatgatcacaccaccattccatcattcccacttcaaaagtggacttctcaatggacaatc

SEQ ID NO: 30176 - DNA, 507 bp, Glycine max
  Clone ID: jC-gmst02400037d02d2
gattaaatgtcatttttgattgaaatccaaatatgatagaagaaggatactcttccgtcttcacataacaactttaataaagttttgatagacacaaaatatgcaatgtggaaccaaaataggaatttagtaatggtttgtttcactgggaatttttgttaggtccataccgtcgaaccctctcatcaatccactctctcatgtcccccaacacgagattcgcagactcatcgggctctccctgaatcaaagagtgatacattccatcgtagagcttcaacgtcttatcctcactggaacccttctcatacagcagcttggacgaggaagggcaggtaacgccgtcagaagttccgtgagcagtgaaaaacggcgtcgttaccttggagaaattatcctgtacatactgtgtcaccctaagcagctcccgcatggtccccaccctgggtgggcccgtgtagcgccttgggttcgacgctatgaccttaacttctcgggatccctgat

SEQ ID NO: 30177 - DNA, 530 bp, Glycine max
  Clone ID: jC-gmst02400037d04d2
agtccaaattcaaagaagtaacaacaggtattgtctccttcatcattcacatttttaaaaatttattctaaaattcaaatcataagcagagacaaaacagaaaagaaaaggtatataatttgaaacttaatttaagcatcaacaatttcctcagtgtccgcagaagccaaaataagctggggttcttcccttccaactccacacgttccatcaattgcattgttcctacccaaagccttcaacgccaaatgagccgccttctgccctgatatcatcatcgccccaaacgtcggacccattctcggggagccatcaatttctgcaacctccatgccagtgacaatcatgccaggcacaatctccctagtgagcctgacaatagcgtcctcagcagcattcatatccaaagccttcattccaggaacgctatcaatcatcccaatactcttcaacctcttaaccccagtggcgccaaagggtccatcgtgcccacaagagcttaccacaacctttggcttcattacgttggg

SEQ ID NO: 30178 - DNA, 379 bp, Glycine max
  Clone ID: jC-gmst02400037d06d2
ggggacaaagaaaggttaccccccttttttttttttccccccacccccaagaaaaaagaaacccctccccaaatttaaaaaaaaaaggggaaaaaaaaaaaaattaaggggggggttgacaaaaaaaaaagaaagggccgggcccaaaggggaaaaaccaaacgggggggcaccaaaaggtttaaaagggcctaaaacgggggccccccaagggtaaccccccttccgggcccaaaattatttggagggggatttggtctttttggggcggcctaaaaaaagttgcccctaccgcttttgggaaaatctgccaaaatggagggggcctaaactggggcccctttgggtttaaaaaaaaccgggggaagaaacccccttg

SEQ ID NO: 30179 - DNA, 502 bp, Glycine max
  Clone ID: jC-gmst02400037d08d2
agaggaaataatagtgttattaatgaattaaacttacagaaaataccaaatgttaaaagaactagaataaaacaaataaaagttataagagtaaataaaaaaacaaaaataaattaacgaaccaaaagattaatttggctctaaaaataaaggcatgaaataaattacatgaataatgatattccgttccattctgaaatcttagcatcttgacgagagcgaaattccattgtactctcctctccctccaaaaatttagtattagacaactatgcaatacacccgcaaagcttaaacaaagtaaatttcaatgtaaagaatttcatttagatgacagtatctaaaactaatctaactaggaggacgtttatttaacctacaacatgaaactattaccaaatctattatgtatctaatagaaaccggatgtcataatgaggtaatcgacacgggtgaacaagaatacccaatgataatgacctaaaatttctcccattttttt

SEQ ID NO: 30180 - DNA, 460 bp, Glycine max
  Clone ID: jC-gmst02400037d12d2
caaaaaatccctttgtattaatggttactgataaattaatgtataccgaataaatgtacaaatgtgaatgactaaaaaaatagggcaataaactaattctggttctaaaaaaattaattttatcctgaataaagggtcgaagaacaattattaaattatttcaaggaattaaattaaaacaataattattttgatcaactaaatctaccatatgaaaatttcattctttacttgtaaagagccgaaattatcttcaccttaataattggagatgtagaaaaataatcagaatcttcctaaatccacgttatttcttcgaaaatgctttgcccaacacaatgatattggcacaccagaagctttgcggggtcttccatttgattttccatttatcgcctggagatttacaatgttaatgacctatttctgcattacaaacgttgttgcccgaaattggact

SEQ ID NO: 30181 - DNA, 207 bp, Glycine max
  Clone ID: jC-gmst02400037e01d2
ataaatctatcaatactaattccaacattacaaaatgagaatcttcaaagcaaaaacagaagttgcaaagtaagcaaatataatagtaataattaaatacattcagcccttcaagattaaaaccaaatccttgttacaactaggatagtttgatacaaagccctgagatgagagcaaccttttttcaaggggaaaaggggggcaaaa

SEQ ID NO: 30182 - DNA, 173 bp, Glycine max
  Clone ID: jC-gmst02400037e02d2
gatacgttaatccagctagcaaggttattccatagaaatatttactgcataagtcacaacacacaaattgaatgttaacatctttaaaactgaacatatttcaatcaaattcgactgaaaaaatctttctttcatattacagaagatcttgtcagcataagattaattatttt

SEQ ID NO: 30183 - DNA, 448 bp, Glycine max
  Clone ID: jC-gmst02400037e04d2
tcgcgatctagaacctagctcactgcccccaacgaaacaaaccccaaaccctaaacagtttcagcaaaattcaccaatggctttctccaaagcattgttcctcgccgtcgtaatgtcggtgttcgtcgccgtcatctccgccgctgaagctccggctccgagccctacctctcccgctgccgccgtgtcgccgtcattcgtcgccggtgttctcgccgccggagccgctctcgcgttcggatctacactccggatctgagcgtagctcatggattttatttgtggatttttagtagaagccgagatttgagtagcattagtatataattctctctattgatattgctatgtagcgattattgctagatatgttgatttctggatctatattgcttttatggtttgactagtattcttattgtcgttatcattggttctaggacataat

SEQ ID NO: 30184 - DNA, 372 bp, Glycine max
  Clone ID: jC-gmst02400037e05d2
acgggataaataatccagcttttatttcagagtaggtagggatttacaggcaatgatggaaaaaaaagggggagagttggaaagcatccttgctaatggcaaatcttggtggagactaaaattttacaattattggcccacttgggaacgcctttggtctaagcagttactattaaaacattcaacagtgcaggagatggatgcggtttaatccaacttttgattggagttcactacagctgctgatgatgtaagcatttgcttgaaaatgttcacaggagactccacttggccataaacatgtgcgcatattggcgaaacttcatttaatcgactctgacccatttttattattaagatttaagggtacat

SEQ ID NO: 30185 - DNA, 405 bp, Glycine max
  Clone ID: jC-gmst02400037e06d2
aaaaacgggaagccaagactggttcccagggcatatatagcatatgagataatccttatggtcatgaaacaggaaattcccctgaaaacgaggtttcttgagttttacacaaaggcttccctattaaaacctatctatagctctatgctgcattggctccaagataaattaactccacttatgccttatggaggatggttatatggctggggatccctttaccaacaccacgatcacagctcttggatctttatttacatgaaaagggatataaaggtgctgagaatactcccggcatggaaggcaggtctgctaatgtcccaagggtcatagggctttcagcttgatgctgaaatgcatattgactgagcgaagacgtcaatggggacgcagtccaaggtttat

SEQ ID NO: 30186 - DNA, 473 bp, Glycine max
  Clone ID: jC-gmst02400037e11d2
gataaagagtgaaacgtgaatctttttcaaactttgccggagattacctacaattgcgctaatatgactatggcatgttgatgacaactttgacacaattgggttgttttagtagctcaaatgctttgtttatgcctgctaatgggacctcatgggcgaagagttcttgatgagggaattcctttttgtggcctttgtcagctaaaatggaaaggtctgaaatggccctgagtcctccaaaaacagaaccttttaaagttctaccaagcagaatggcaaaaagacccaatggcaaagtaatttcaattcctacacctattactattgctttatctgttccaacttttgtggcttccaaggattcatagagtatagtggaaactccagtatactcaaaagaatagtcggtacccattccaccacttagtttcttgaccaattctgtagcagatttattagaattacccgggttt

SEQ ID NO: 30187 - DNA, 287 bp, Glycine max
  Clone ID: jC-gmst02400037f02d2
gggaagaggagatttcttttaactaaaaaaaaacaggccccattaaaaaaggtttccagttgggcctagggggacacattttcttttccggccattaagaccctggacctttcatttatttttttaaggaacccattgtttttttgtccacacaaaacttttggtgcggactgattaccctttttggtttttatttcacataacggagaaaggttcttccgggctgtttaacccttatttaagttaaattctgagggtggggcaacgccgaaacttgtttggggggg

SEQ ID NO: 30188 - DNA, 427 bp, Glycine max
  Clone ID: jC-gmst02400037f03d2
gtaaaaagcaagtaacattaagttggattgggatacacaagataattcacattatctgaagtacattgcaataacatatacttcaccaaacacaaatctaaaaactcttaaaagtccacaagtcatccttttctttcatgctcacttgccggggacgaagttggtggcgtatgcccaggcattgttgttgactgggtccgcaaggtgatcagcaaggttctccaatggacccttaccggtgacaatggcctgaacaaagaacccaaacatagagaacatggccaatctcccgttcttgagttccttcaccttaagctcagtaaaagcctctgggtcatcagcaaggcccaatgggtcaaagctgccaccagggtagattgggtcagtgacctcaccgaggggcccaccagcaatacgattacccctt

SEQ ID NO: 30189 - DNA, 489 bp, Glycine max
  Clone ID: jC-gmst02400037f05d2
cttaagagtaaagatatattcatcattaattaaattatagtacccatccaacggctacatacaacttcatcttcctttactttgtagtacgaagcatcattattaggtatccagattacgacagatgcacccactaattaaaatctcaaaatgccaaatcaaaacacattcagatacactgaaatgacaatgaagcataacaagaagttggaaagagggagcttttatttgcaaaatgatggcgttccatgccataaaaatctacatccacacaatttataatgaacaagaatggaatacttctttctttaaaccatgataacacagattgtccggagagattatggccttctacatggtggcaatggacacgggctctcggaggatcctctccatctgttgtgccctgggcttaattgacatgtcaaagaccttgtggctgaattcaagcacaagcccaccaagtatgcttggatcaatcttctgttc

SEQ ID NO: 30190 - DNA, 441 bp, Glycine max
  Clone ID: jC-gmst02400037f06d2
aattcaaaatcttcattgcataaataaccgaataagtaaattgtcagacagaacaaacaacttttgggagaggggaacttttattaactccaatgacagccttatctgcaaaaacttgagcacatataatttatatttaagaaggaatgtttgatctagtcggtgccccattacctccggaaccacgaccgttgccaggccttccgcctggaccacccccaaaagaaggcctgtggtcaggaggagcttcacccttgtcaccgaaatcaccgacaggtccgcgtggacctccacggttttcatcaagggtaccggcgaatcttctctctttgtgaaagcgaggtgggcccctgtggcgatcaccgggtgggccaccgaatggtctttctgcggacttggcccgcttctcgagagtggtagggacaacttttgatggaaggt

SEQ ID NO: 30191 - DNA, 427 bp, Glycine max
  Clone ID: jC-gmst02400037f07d2
ggaaacgggaaaataggcatctcatgattaaaatgaagaacaagtagctgcacgttttggggaataatgctttctcacattccaaaaactgtttgatcaagttccctttacttttggtctcatcattcccttgaattcatcaaatttggatggctgatagaagaaatgagaattcatcaatggtcataatcatcaaaatcggaatctatctactgagacaatttcatcagttatcattggactacgggcagatccatatcgaattgatcgttggaagaccaaagatgaccaacttaatgtgccactgcatattgtgccaatggtttactgctttaggaaattcgtcggaatacacaccctgggtaacatgatggaaccacatactaggtgtatagagaaccttggcagccttttcagtacattgaaa

SEQ ID NO: 30192 - DNA, 428 bp, Glycine max
  Clone ID: jC-gmst02400037f09d2
ataaagtaaatatcatttattcaaacctaaagaaacacagggacacaccatctcaaactcatgttaccctgccaataaaccatcacccctaaacttcagcaccagcagcttgttcacttcaatacacaactaccagaatgtgtcatgtgaccacgtggcatgcacgctgatgtggagccaagtgttgtgcttacacgtaggtgtaccctccataatacaaccaaagacttaagcatcatattataatatttgtacagttaactagagaaattatacgaaaagaaaaaatgaggcttttcaacatggcttgcaaaatggtagacctgatccccacaactaggaccatatttaaacttgtttttctcactcacactcgggcatgggctaagcttcaggtctttgaacaggaacctttactggggtttcaa

SEQ ID NO: 30193 - DNA, 441 bp, Glycine max
  Clone ID: jC-gmst02400037f10d2
agcatctaatccagacaagtaaactagaatttaggaattcaggtccaaatctacacattaaatgtcaccaagatggcctaacagagaactaggaactacaagtaaaatacaagcacctaccatcatacataaagagtgcaaccacctaaacgagaacttgcaggtttataaaatatcgcaatgcatgttgtgggctttctttcacatacccttcacattgtaaggtccaacagtgggctttccaaccctcttctaaaccaaaattacatgaaaataaaatctagaactccattttcacgagcgcattggaagcttcggctgctccatactgcatccagtctttcgcacatacaagggcctccactgtctctggccgcaaggaacttttatattgatccatctttttgactcttgtatcaaagacagattcaggaggaagac

SEQ ID NO: 30194 - DNA, 511 bp, Glycine max
  Clone ID: jC-gmst02400037f12d2
attaaggatgaaaagagcagtaatggaattgaactcatcagttcaagaacttttcgtgtacaatgtaaggtaaagtcctgatacgtacatattttctgatggttccatctttaaaaataaactgtgcctcaacgtatcaaaccataaagtcaataagccatatccatacaacaagcatagttacgaatttctgtgaacattattttctttctctcttctttggctgaaaggattatgtttattgttgtactatatagacgcagccattacagatcagtgtttgatttttggcttcttcacgatcatcacagtgcagtgagcatgatgagcacaatagtcactgacactacctaaaaccgccctttttatagccccataaccatgactacccacaaccaacattgcagcacggtacttatctacagcatcacaaagaacatttctaggatcaccttccaccacttttgctgtcacatcatttacggatttgttgatgcaaagttgtttagcg

SEQ ID NO: 30195 - DNA, 433 bp, Glycine max
  Clone ID: jC-gmst02400037g02d2
aatacaaaatcaaacttttgataagttgcaagagcggtaatcaattgctaagatgagatccacagtttaaaagttgttgaaattcaatttgtaatatttagcattactctttacatatatatgttagcttcagacctgataaacaaatcagactagaacacatcctaatttcatatacaatcattattttcatggttcgttgaagaccttctcctcagactcatcacatttttctcaagttatttaacctagcctgtagatcatcatatattccactgtcttcatttgcggttgattcagcttgagcaaccctgttctttgctgctggtgcgctgacagaggttgtggcaggtgcattcacaagctcagagttgttgtcaattccaatctcttcaagaaactgtttcacaagctcttctgtgctttccttctc

SEQ ID NO: 30196 - DNA, 516 bp, Glycine max
  Clone ID: jC-gmst02400037g03d2
gataacaaacagtagtaacattaatgggacaatagagttcaacacaaaccaaacttattttcaaaggtcattacagacccattacacatcacatttctttttaaaatgtttgggaaaatccaacatcgaacatcacacagaaatcagctccagcttaaaaccccccacgaagacgcaacaccaagtgcagagttgtctccttctggatgttgtagtcagcgagggtccttccatcctctagctgtttgccagcaaaaattagcctctgctggtccggtgggattccttccttgtcctggatcttcgccttcacattgtcaatggtgtcggagctctccaccttgagggttatagttcttacccatatgggtcttgactaagatctgcattccaccacgatgacgcatcaccaagtggagaggtgactccttctggatgttgttttcagcaagggttctttccgcccttcaactgcttgcccgagaaaatcagccttttgttgttctggggggatac

SEQ ID NO: 30197 - DNA, 534 bp, Glycine max
  Clone ID: jC-gmst02400037g04d2
aacctaacaaattaaagtggtacattctttcattgtcgaaaaaaaaaacaagcacagttcgttaaactaaacaacttcctgatagaaacaaagcgtatatcataaaataaggtaagacatcaattcatgttgacacgaaattgaccaaaaatacggcttactcaacttcaaaaagtatccaaaattttggacctagaaaataaacagcacatgtaaataaaatgattgactgaacgcaaaataagagagttttagttgtgcaacgatgacatggaatctgcaatgaactttcactcatcatcttcatcattatcagcagcagagttgatagccgccacacgagcaatcaacttagccttcctctcctcataagtgagtttcttcagattgtacctcttgtgttccttcgggggctgcttctcagatttcttgagagaaggatcagcacggatggcagcatgaacctttttgtacagtgcctcaataccatcagcttttattccacgcttgatgtattcactgaagtgtgactga

SEQ ID NO: 30198 - DNA, 348 bp, Glycine max
  Clone ID: jC-gmst02400037g10d2
aaatgaattgaattgaattgaattgccactgccaaaagggcaatgactacaatctaaaagctaaaactagcgaataagggccaagtactatatatgtacaagaacaaattaatctcaaattactttaaaaaagaaagaagaaaaaaacactgaatattttttggatctatggatcattagtattgagggatttcaatcttgggtatggtaaaattgagacgggattttttggatggatgaggactggtaaccttgttattaacaaagaaccttgttgaaaagtccggaaaagccgggaggttcagatcgaaatcgcggcggcttcctgtgtgagtggaccccactttc

SEQ ID NO: 30199 - DNA, 378 bp, Glycine max
  Clone ID: jC-gmst02400037h03d2
ctacacaacggggttaccattaaattgaaacaaagcgtgggcttacaaacacggaattgtgccctgtcgtattaattagaagttccaagggtgcttatggttccactgcctttccccaagtaaaagtaaaatgtctttgttacagcatctattttgcaggaaactataatgtaaagaggtttccccagcgtcccatttgtatttacagggttggtattagaaatcatgagcagagagtacagcccataacactcgttaagaataatgtttcaacgactattctcggtcttctatggagcgcattctaggaattatgcactgaaacccctgtgcattagaacttctggatctagcagggatattgtcacatgcttgtgc

SEQ ID NO: 30200 - DNA, 549 bp, Glycine max
  Clone ID: jC-gmst02400037h04d2
aaaacaaatgatatccgttgtataaaaaatccctcagtactcatttattacaataaaccaggtcaacaaataaggatttttagcgagctaaagacaataatatactttggcaattaagctctctctaccttggggtaaaacctgatcaaataaaagtaacatcaaagacaaaaacagcaacagaaaactaaactataagaatagcatgataatcatcatatataagaggaggatgggggcattctctctgaaagaccaacaacaaattcaacatccctaaaggaagctccagattgtgctttttccctttaagccactgcaggcatgtccttgagccatgaatctagaggtttgccaatggagtaaacaatgaaaccaatttccctcagcttgttaacattcacgacgttgcggccatcgaaaatgaatgcaggcttttgcatgctgtcataaaccttttggtaatcaaggtttcttatactcattccactcagtcataatgcagatgccatgtgcattcttgattgcctataggcatcccagactaca

SEQ ID NO: 30201 - DNA, 546 bp, Glycine max
  Clone ID: jC-gmst02400037h05d2
atcaagtgcaaaaaattgaaggcattcaccgctgcaatggaaggctagttatagtgtcacataccatgagatcattcttgaaatacaatggaagaccaatctaaggtgagaaaagaaaggggaaaaaaagagcctatatgaaattacttgtatgataagatagaaagaaagcacggcaaaaaaaaaacagagcagaaagcatccaagctttcagctattagcattttctctatttgaaccttggttgttagtgtctgcaagagaaggccctgaccctaaaagcaaagggatctctttcttttcattgtttgagtctttcttggaagatggattcgcagtcgaagatctaagaggaggctcaaaaaatttgctagcaacatctggagggggtgcatcttcacctggaagcacaagaagacctttctctcgaagagaaaatggctcgttgaagcatgtgctccacagggagttcacaagttgcctctccttcctgactacacccaggtcctcagctgacattaaactgatattggttattcgttcttg

SEQ ID NO: 30202 - DNA, 381 bp, Glycine max
  Clone ID: jC-gmst02400037h06d2
ccaacagggaaaggagtccactcattattgaaataatcactcaaaatacaataatgccctcgtataacatatcaatggggcgtgcggaaaacacaggccccgtgatttgtcccgagagcatgatgaaggagtcaaacccaaccccaaattaaatagatatttagtcctaggcagaactgaacttatgagactacaagccaatttcttatctaatggtccaagggctgcaaaacaagatatttttttcagccctagccctgaacctccaccagacttactcctccttttcagcctcctccagccaattaacaaagggttcgagcgccttcacaaaggtttgcctgcccttggagtttgttccttttcggaaccaatgaaaaa

SEQ ID NO: 30203 - DNA, 499 bp, Glycine max
  Clone ID: jC-gmst02400037h08d2
ggcttcctcatcaatggaggcttgttctggagttttcttgatgtcagccgcttcgtttaatactgcttcaatcacgtcagtgatgcttgattctttcttgtcatcaacctcttcaacaaccttttctgctgcttcaggagaaggttccacaatacttgcttgaggttcctcatttgatgaaaattgtgcagcatttacagtcaaactagtttcctcttctgtgaccgtgtcagctgaagtttcttcactcttggaagtctcaagcacaacttctggagaagtttccccaggattttgttgaggttccacatttgataaaacttgctcagcattttcagtgaggctagtttcctcgtctttatcagttttctcttctgtgaccgcgccagccgaagtttcttcactcttggcagtctcaagcacaatttcttgcttagtctccacttccttaccagcttctgctactttctcatctacttgtaagtgctctcttggcttt

SEQ ID NO: 30204 - DNA, 393 bp, Glycine max
  Clone ID: jC-gmst02400037h09d2
aaaagaactgtgcacagggaggcaagttttatacaataaatttgataaatgtatcaaattttacaggatgtttgacacaagatggtggctcgttaaccctcagaaacatcaattggggagcataataattagacaatcaagacatgaataatgaattatcaacatatctcgtttgaagctcctgaatgaactatgcttaaccaatgaacaaatgcaaccttgacagtaacttatctacgtttggcatccccctttgattgaggaggaggaaccgttccaaaaactttatcccacagtggtgatgtgatcccaaagccatagttctggagccgataatgatgattcaagtgatatttcttgagacttttgggcacatcagactttggttgacca

SEQ ID NO: 30205 - DNA, 369 bp, Glycine max
  Clone ID: jC-gmst02400037h10d2
aaaaaaactgttcgcagggcggcaacttttatacaattactttgataaccgtttaaaactttacacgatgtaagacacaacatggtggatctttcaccctcaaaaacatcatttggggcgcctcttacttagaccgtctaaacatgcattgtgaattatctgcatcttttggttgccgctcccgaaggacctctgcttcaccaatgggcaaattcaaacttgactgttacttttgtacatgaggggtccccctctgatctgacgaagaggatcggttccaagaacttaatcgctcggcggtgctgtgctcccacccccagagttctggagcctgttaaacagattcaagtcatggttcttgccgctttt

SEQ ID NO: 30206 - DNA, 319 bp, Glycine max
  Clone ID: jC-gmst02400037h11d2
aaagcttatattttgaacttcaaaataagttttaagggtgaacataatattgggcgaaacatagccttattcttgaatgaatcgatctaatggctacatattaaagttcacataaatttagaacgattcaaaaagttgtaccaacaccaacagagtttcacaatatgtctagctaccatgacacatatccaagcttagaaaaactaacacaagacacacaccaccaccacttaaacgagatcttcctccttgtgggtgtgaatcacacaatctgatttcgggtttgaaacaacatgtaaaagggtaacctttttggatt

SEQ ID NO: 30207 - DNA, 305 bp, Glycine max
  Clone ID: jC-gmst02400040a10a1
cgtatgctgctagaggagcttcacggaactaacaaagcaaccctatgtctaaggtgggtggagtgaccagagcgatgaaagccattttatcttgtgtggtgctaggtgctactccatcagagattactgtcgtctcaggacatagttgaagatatctatggagagaatgagacgaaacatttggagggaatggcaggagcgtagactcaatttcattcatttgaaacacgagaatgggacttcaagtagattgaccatagtataaagggttgtagcatgctaataaactttgacagatcgaacag

SEQ ID NO: 30208 - DNA, 57 bp, Glycine max
  Clone ID: jC-gmst02400040b06a1
aaaaaaaaaaaaaaaaaaaaaaaaaaaaaaaaaaaaaaaaaaaaaaaaaaaaaaaaa

SEQ ID NO: 30209 - DNA, 491 bp, Glycine max
  Clone ID: jC-gmst02400040c10d1
aatcaagcaacacactttgtagccatgacatgtagcactttcttatcatagttcagacaacaacaacacaattttatataattaactagtttccgagcacactttccaccagtaactttagaaaaaacacaatagactgaatggataacttacacaaaaataaaacgcatacaaaaaagaagtggatgctattgctaaccactttatgcaactggaggtcgaagaaggtgatcctttgatgtatcaactgcagcaggggacataaactgccacatggcaattccagggtatccaatgaaaggtatcagcttgtggctaccaacttgtcctttagcatctggggcttgaggcaggaagctgggttgtatatttgccacttttacttgctgctccaacttttcttttttttccttcaacctattcttctcatcacgaagctcattcttctcacccttcaattctttaacttttgccctgagttcatcattcat

SEQ ID NO: 30210 - DNA, 422 bp, Glycine max
  Clone ID: jC-gmst02400040c11d1
aattaactctcatatactattaattccagatagtcaataatagtatagccggatattattattattatgtatatacgtagtagctataggtatattattcatagcttagactcatcaatctctggtgaattaatttatttccgcacccagagagtaacgctaaagcgcaagaatcccagttgaaaatatctgttcccttgcatatggcgagcttgacatttccacagaccttgaagcttctgacctacaccgttccttccgttcgtccatcattatttgactcgaacgacactctgggctacaaaacgctttctctcctctgtacatgtatatgtctttgccgtggagtttctttccgcataagtgacatgaactgagaaaattcgatgtggggtacaatgattcggcctcaacaatcaaag

SEQ ID NO: 30211 - DNA, 429 bp, Glycine max
  Clone ID: jC-gmst02400040d11d1
ataagaaaaaaagtcatttgcatataattaattgtccaccggtttccacatgaataatagagaaaagaaaagtacaaacacaaatattttgaagaaaaaaaaataaaaggaaaatatcgattgcttttaaatgcattagcaggtgccactcaatgatgaccaatcatcactagggtgcagaagaagcaacggtggtcttggtccacgattgtgtgattatcagaaaatcagaatcacttgatccgacggcatatagtgattccatcaccaaccgggagcatgcaaatctcgatcctggggtccacagcgagtgccttgttgagctcgagcacgaagtccctgtggtatctaacgtacttcctgagaggagcatctgggggtgccaccacagagccggtccatagggtgttgtggtacccgataattccc

SEQ ID NO: 30212 - DNA, 386 bp, Glycine max
  Clone ID: jC-gmst02400040e05a1
gctcgagctgctggagaattctaaagaaactactccatgaaaatgtgatcaagctgaaggaaatggggactgatgcacgtactgatagagatgaacacgggaagccagatggggcaaagtatatggatcacgttcatcaggaataagcgtacatggaccacgattcaacaggtgtagctgacacacctggaatgagatgtacagttatacagattaagtgctacatgacacagataggagctgagttctgcttatgaacatgctgatcagggctttaatgcagatatctacacgctgaaactgtggttatttacaatgtctgatgctcacaagctagctattttggaactcggatgcccatgatctgatgaccaacacgcacattt

SEQ ID NO: 30213 - DNA, 479 bp, Glycine max
  Clone ID: jC-gmst02400040f11d1
atatatatatatatatatatataatcgggcaatttttcattttggaagtccaaatttacagaaaaataaaaaacataaaagcatttcaataagaatatattaactatgctccctgctttatttctttttctgcactcttttcttaatagattttttcttcttctcttattcacaccaatgaacaatgagaatttttctccctttgcactaggcaatctataaacaacttgggtgttgtccaattattccttggcagggctgtttctttgccctgatgatgccattagcacagcaacagccactataaacataaacaacatactccctagcagtatatatgttcttcttgatgatttcctgtactctccaaacagaatcacgccccaaaaagtgcttacaagtggaagtgcctggactgcatttgctgctgcatatcccgctgcttgaccacccataaattgaagaccattcccaaaccc

SEQ ID NO: 30214 - DNA, 515 bp, Glycine max
  Clone ID: jC-gmst02400040h10d1
aagataacatctctggactcaataattcagatttgttttctgcaatgcaacatacataaaactcgcagtattcaactgcatgcaatagatcaaaaccgcgcacagtccacatatttttacgtaggcagggttcaatctaagacttactgtagaacttgagcacatggaatagttataacaattactaaattccaagagtccaagcaaatagagactttacgtgttaagcacttccaaccatatataacagtaacctaaacataaatatctttagtttctttcatccccaactttacattccaccaaggaaccaaacaagtgtgtcaacacaatgtactcgaacaagggtaaccaaccataatgcctgattaagttaaaatcaaatgtgacaggtcacaccaaagcagatcttcaatcacaccactccagagggaagacgtataacaagctgttccccgaagacacttttgacataatagtaacagaaatctgctaagatgaaagtctggacaatt

SEQ ID NO: 30215 - DNA, 68 bp, Glycine max
  Clone ID: jC-gmst02400041e07a1
aaaaaaaaaaaaaaaaaaaaaaaaaaaaaaaaaaaaaaaaaaaaaaaaaaaaaaaaaaaaaaaaaaag

SEQ ID NO: 30216 - DNA, 508 bp, Glycine max
  Clone ID: jC-gmst02400043a05d1
acacaatgaaaagtcatgaattctcattcagaacaaataaagaaaatgttgaatacatagagaacactgatccgcaactatcacaagtcgaacaaacatcacactaaaagaaaatattacgagaccacccaacattttcttacacaatcacattcacaacatcaacactcaacacctctggttcctatgacgtattctgaacaattaataaaatatctaaaagtatctctacaagactacatctaacacgtaaaaacaagttgaaattcagataattacatcaaacaggtgctgttctcgaacattgagacaatgcatcttcaacccgatcatcatctatcttctcagacctcaagcttggtggaatgtaagctctgaaaatcaattccatattgggaacttccttaagtgtattagctgcaacctcaagtgctggatgttgaaaggcggggtaaaatttttttgccagaccaaaccaaagatcaatgacaatatgggaagaggaagc

SEQ ID NO: 30217 - DNA, 403 bp, Glycine max
  Clone ID: jC-gmst02400043a07d1
gggggctgatcttctatgaaaatatttttaagtgcacaaaacttttatgcaccagttgtaaagggattatttgctaaattggtgattcctgggaaattaaattaagaaacaagaaattgaccttttgcatattttatcttgaattgggggaaagaaaactcctatattaatggctgaaaatagatactagatatgggaatatccacgtgttggaaaaaggactaaagagcgtagaattttccaagattgacctttgcttgtagtatggaatgggatctttgaaagcataacgtcacactggatattggttggccacgaatttcatttagtgccccacttgaaagggtggtttatagaaatttagctatagcgacttcactggttacaaaggcagctaaaaact

SEQ ID NO: 30218 - DNA, 382 bp, Glycine max
  Clone ID: jC-gmst02400043a08d1
ggaaaaaagaaagggatgttaacctctaaacgacattaacatccttatataatcattacataaaacaatgctggaataattgacctcttaagactgctgatggacagaacaaaatgaccagtggacgtgttcaataaggcagcattcaggctttccgaccaaaactattagatcttgggagagcagccagcatatttgagctcagttacataataaactacttgacatgtgatcaaatatttcttaattgaaagtccatttgatgaaactttgaaaaagatactgctaaagtctgaaaaggatcactatctactaagatctcctcaatgggttgccctttgggaacaaatcgatctttgagccacatgaaaattggaaccaa

SEQ ID NO: 30219 - DNA, 426 bp, Glycine max
  Clone ID: jC-gmst02400043a10d1
ataaaaaaaccctttaaaatttataaattgtttggagggaaggaacaacaaaactattactactgtattttataagaaccgtggtatggtacctataacaaccaattggaattgacatttataactggtaagggcacgatccaacggggccgggcccacactgttatactattaccactattctccctaacataatggggaaaaggaaaaagaggggaccctaagcaaccccagggctcgggggctcgttgggcgccggcacaaagacaatacaccatgggccccgtcacttgtttaacatagttttccggatcccgaaccatctgatggctcaggcgggcatatagatttggagtcttattcttacttgtggtgggagagggcaattcctttacgcacccgggggaacacaacaggtttttcccc

SEQ ID NO: 30220 - DNA, 521 bp, Glycine max
  unsure (1)..(521): unsure at all n locations
  Clone ID: jC-gmst02400043a11d1
catggttaacatcggaaccaaccctgatgggaaaaatggaattaaacttttactataaaagtaacagtaacattttctgtcttaaaaaaatggaacataacgtagatttttccatcccttaacaacgctgtttcctctcatttctctcccaaacaattcattaacacacaagataggatatgactatgatctataaataattgggaattcactcctggtgtgaagaaaatgaatcagctcgcctaatgggcatctgatttttccatgcagttcaccagaagtttcagcactttctctctaatgaatctctattattttctattccttcgnatctggttcagaggacacaggtagtgaactataatcttgtgttttggggagggaaaagctacgacgctcttttccccctggcttagaagaagcattgccataccaaaccattcctgctattgcgatgatcatgcctagaacaacatgtagattgagaccctctttttcaaagaaaatgaatcctaagatca

SEQ ID NO: 30221 - DNA, 257 bp, Glycine max
  Clone ID: jC-gmst02400043a12d1
cgggaaaaaatggggggggattttttttcaaaaccaaaaaaattttttggggtttgaacgggccaacccctttttttatgtggaaaaaccctggaccgtaaaaaaaacactttttggcttttacaaaaataaaccgccaaaaaaaggggtaaagggggggccactctgaataaaaaaatgggtggggggaatttcgaggtttcacacccggggagggggaggaataaatctttttttgggggccctaaaaataaaaa

SEQ ID NO: 30222 - DNA, 467 bp, Glycine max
  Clone ID: jC-gmst02400043b04d1
aaagtaaatatcagttattcaaacctaaagaaacacgctaacacatcatgacaaactcatgtaaccctgccaataaaataaacccttatacctaaactccagcaccagcagcagcttgctcacttcagtacacaactcctagaatttctcatgtgaccacgtggaaagcacgctgatgtggagccaagtgttgcgctcacacgtaggtataccctccataatacaaccaaagacttgaccatcatatggtaataatatattcattataaagttaactgaagaaataaattaataaaaaagcttttgaacatcacatgcaaaggggtagacctaatgatccccacaactaggaccatttttaaacttgtttttttcactcacactgtccataagcttaagcttcagttttgtgaacaggaacctctgctggggcttccactgactcagctggttagctctcttcctct

SEQ ID NO: 30223 - DNA, 467 bp, Glycine max
  Clone ID: jC-gmst02400043b05d1
gaattaaaaattctgatcgcatattaaattcccaagtcgtattcaaatccttatcaataaaaccatgaagccaaattaaaatatttctagtacacacccaaaaattcttcaaaagaaacttccgggaatctagcacgaccaaaatcataaattaatgaaattctaacccatcgataattaaatttgatgggaattatgatgtagcagtagcacacgtctcaccattaaaatcaaaataccaggtcaaagtttcaagtaacttaggacagaacgtaaaaaaaaactagataaaatgagtagatagctcggtacattaagtcacttagcacttgaccttctttaaggcatatgcaaagtacaggaatgttggatcagcagcgccgtccttgtagtaggcaaagaccaagcaagcatcatcacccatgctctcaccaacaaaaaattggaaatctttaatcttagagagc

SEQ ID NO: 30224 - DNA, 509 bp, Glycine max
  Clone ID: jC-gmst02400043b06d1
ccacaaaagcattattatgttgataactgggcaggaccacgttcataacaagaacaaacctaggtcttttgcgtaatatatttgtatagtcattcttaatacttacagaacaattaaagagggaagtggagcatcttggttttgcagaataatcagtggagcatcagcactaggcattttgcagaattagtataagcaaaaaactaagatgcaaattacatttttgcatcagacatcaatgaatcaaaacttagtgagacacttaagaagtgtgaactattgtatacacacaatatgccgataaattccttgaccaatgatttttaatcattagcgctaactgattaatgaaatagcaaaactaccataaccattcatttctagcgctaactgctttcacattagttgatacaagtggaagagttccgtaaagtgatatcaagtcattgagacatttgcttctcctgtggctatgccctctcagactgctaatagctgatgcgccaatc

SEQ ID NO: 30225 - DNA, 465 bp, Glycine max
  Clone ID: jC-gmst02400043b07d1
aaatataaccaattatcgctaatataaccaaatgaaaatatgaattgagcatcattacaaaatagattacaaagccaatattggttggctcggcccagaaagactaaaaaagtcatcaattgaaactctataaatgaagagtaatgccaaaataaaatagaagaggtgatagcaccaaccaggcaagttgcaatagacattcctacatacatcctgccacatcaaaagagaccaaacaatatgatagaaaggagaaagaaacgagatttcataataatcactgaatgagcaactgaaacatgtagctaaaactgcatcaaagctcaaacgtttcattgacaaacctaaggtgaaatccttgaggttcatcatctgtgtagaaaggattttaacaaataagccaataggctatcagcaaagtatgagaaatatttatcccattgattcgggcagagatgccttcac

SEQ ID NO: 30226 - DNA, 462 bp, Glycine max
  Clone ID: jC-gmst02400043b10d1
ccagcaatagtactagtttaatattataagcagagattcataattcagattaactagccgaactttatacagaagcgaccaattaccaaacatttatatatatatatatatataaaaaaaaaggcaaccatgaccttaacacacccatcacaagtccaaaacacttgaacttgctcaagggcaagaaatgaccactttattctaagggtgtttgtttagacacaaaacaccagagtgcaacataatacatactacataattttgaagttttgaaactacatatagtttttatcattatttctaagggccatttctgcttgaagctttagctctccaacacctcacttgcaagtgcaggggttgcaggtgcagttagctccacatttgcagccatcgttctcagcgggaacacccatttcagcactctcgaattgagccttaactggtgccactcccatgacc

SEQ ID NO: 30227 - DNA, 527 bp, Glycine max
  Clone ID: jC-gmst02400043c04d1
gagctacatacaaacagtttattcaaccaacaagcaatggtagattttttttacaatttttctgcggcagcttcatgtattagtttttagaattgttcttgaatcattcatacaatggcttttgcatttgtttttgagggggaaacaaaatctttaggcaaagctttttgaacaacgttaaggggacatcaggaatgtgcccttcaatccaaaaacctactaaaaatgaatctgaaatccacaaataatgaaccaacaacaaatctacacaatttgcaagcaaggaaagctcacaagcctaggcatcatcactccaattaaatgtctcggccattaaattcaaactagataacctcagcagcaacagaattcaaattcttcgaattggaaccagaaaccccatcctgtttcgaagtagtctcactctgacctaaaatctggcctttactcaagcctaatgcatccttgtcgctccaacaaggccggtacagattccttcctcttatggaatatcttccactcccaaa

SEQ ID NO: 30228 - DNA, 469 bp, Glycine max
  unsure (1)..(469): unsure at all n locations
  Clone ID: jC-gmst02400043c08d1
gcttccaatagtcctttaaactttccaatcaccaaatttatatttgatgagtcaaagattaatattgtacaatcaacaaagcatcctcaaatacaagtccctgatctaatcatacctaagttgttaaagaaaatctagcccattccatataaatcttattaataccttactccaggacctgtaagacaacctacccaactattattaaacaatttagtctatgccacctatgcccaaattgatattgatatattgaaacaaaccaggtggaagaggaataacagagaagtgtataaaataaatatgcaacttcagacttgtatgctcaagccgcaagcttatatttgaagatgtntatcccacaatttcagatccaccaaaagattcatgacattaataataggatccatgcccatgtgagccatcacccccgtgatacgatgaatatgaacctctaccataatcagaa

SEQ ID NO: 30229 - DNA, 429 bp, Glycine max
  Clone ID: jC-gmst02400043c09d1
cccaaaagaagatattcgaaagggtattattaaggaaacagtgtccctccaaatattaacaaaagtcaattcctctacaatgagacaaatgttatttgttctctacatgcttttttcttttttctgttggcttcaaaataatagtttagaaaacattagtgtaaacatacatatttcaaaagtgcatgaattccaaatttagagtaactgtacaaattatcatccaactcttatttgtgttataatattaatgtctcaacttgaatcagtggatgtaattgccatttctgcccaccaaagtggtgatgcttttggatttgctccatcaggccccatagctgggatttccttgagtctagatgtaacttctttcatagctggcctttttttcggatctggttgtacacagtttcttatcactttagacca

SEQ ID NO: 30230 - DNA, 492 bp, Glycine max
  Clone ID: jC-gmst02400043c10d1
aatattaaacaataattttggcatcataaattcttccggaataattatacaaaagtgaccagggaaaacccgatctgccagttgcccactgaataaaaacacacatcatattactatgtgttgtcatacatgcattgtaatgagtggatattccaaagcaattggtccctttatccctccttaatccttatgccgtaaatggcaccatcccttgtaaattgtaattgcttcttcagaaatagaattatacaaaggtagttgcaatatctatttgccaaactataaatgtaaagacccttcttcccaatcctagtagtgtcccaattgtatttacaaaggtgggacaagatatgtatatacaagtacaaccatgtaacataatgtaacaataatcatactttggtctttactagtgcacattacagggagttattatgcactgaaacccctttgcagagaactccagggattggaaggaatactgacacaagc

SEQ ID NO: 30231 - DNA, 409 bp, Glycine max
  Clone ID: jC-gmst02400043c11d1
gggaaggcaaactttacttggaaacccatgtttgaaacttaattggccccggtccaaatcaaaccaagaaggggttttttcagtacttataccaatcttgatttaaggcttatttaatagtaagtttgttcaaaagcatgagcattacaagccaagtgaccaaccccacaagggttttattattaacgttttctccttttggggatttcacaaattaaaagtggggaaactttttttttttcaagctatccacaggtttcttgggggttactttcaaaggggtattttcaatccccaagctctttgccttttttttggatacctgatatattggcacatatgggttatcatctgcacacttctttggaagtagtaatgtcgggtcaaattacgtaaaattttcacaatt

SEQ ID NO: 30232 - DNA, 68 bp, Glycine max
  unsure (1)..(68): unsure at all n locations
  Clone ID: jC-gmst02400043d04a1
atttccncggtcgacctgcccactacttatttttctttaatagaaacccacaaagatgaccttggggg

SEQ ID NO: 30233 - DNA, 491 bp, Glycine max
  Clone ID: jC-gmst02400043d06d1
caacaacaaaattaaagaataatagcctttaaaccataaacagtttataaaacttcgttataaattaaatgcaacttaaaacatccctcagcagcaaaggaaatggactaaaaccctatagctgcttgtgaaattcgaaatatctcagactcttcttaccatcaaaacaaaaaacagtactcatcaaaaacaaacagcaatgaaaattgaccaccgccgatcaagaacctagttttgaaagttacggctacatgaaatcggcagaaacttaaaaatataacttaaacaaaacacctaagactctgcaaggataaaactactataaaggagtaaccacgatgatgatcacatgtgctagcaaaattgcccaaatgcaatcacttcttcttggcagcggccttggtgaccttggctccggtggggtctttcttctcaacactcttgatgactccgacagccacagtttgacgcatgtcccttacagcaaaacg

SEQ ID NO: 30234 - DNA, 233 bp, Glycine max
  Clone ID: jC-gmst02400043d08d1
atccaaaaccagactttattagattgaaaagcgtaactgtgcattgagagaaacacataaatgctaatttaatgaacaaagatacacccctattatcccccaagagcagtgttcgctccccatgccctttgaatacattggacgtgatggaagcctaagacagtcttcttaattaatgattatatgggtttgcaccaggagggaggacaatcaacagtgcggctgcaacatct

SEQ ID NO: 30235 - DNA, 321 bp, Glycine max
  Clone ID: jC-gmst02400043d09d1
atggatcgtaataaagggaaaccctataggtcgaaacattaaacgatcatccctagatagacatctttgcctgttctactcacagaaatagtcaaatgtgatcgaagcaaaagctccagcttttactagcagttttccacggcctgcttatcttgggaaaacaaaaaacactgctagtgacatatacccatccggaatataacttccggtcgctctttatacgttttgcaaacacactagagttcatcaagcacagccactttcttggagtcttccccagctgccgtctttgattcagcacctgaggcagtggcagcttca

SEQ ID NO: 30236 - DNA, 451 bp, Glycine max
  Clone ID: jC-gmst02400043d11d1
gggggagcaaacacaatatcattgccaaatactatttattccaaacaaagatacaagttattgattcagccccccagcgacaacacctttcaaagaagcacaacttatttattcatctggcacaaattacattaataaacacatcatactccacgaataacgcaacataaattttccataaattccatgtctacaaacaacaatggcgaactcaaaccactcattgaattattgcctattttttgggtccacctgcattattccctcctgcatcctgggccgctttctttgccgccttttcctgcagcgccttagcatctctttccctgcgctggtcaggggtcaacccatcatctttctgcttgcctttaccaccggttctagcctgagccctttcgcgaacacgatccctctggttaccgcgagtcattatcggagatcgatttttgag

SEQ ID NO: 30237 - DNA, 472 bp, Glycine max
  Clone ID: jC-gmst02400043e03d1
cttgccaacaatcaaaataattaaaaacatttaacatgttcataatctcacacaatttcactctttaaaatgtatatatagtacaaaacaattttcgtcccaaagggattataaccaagcttaagcaattgcacaccccacacttaattgcttatttatcaaggaatagcgtagctaaatccttgaaacaaaaactcattacggaaaacacatataatgcttaaagaaattattatcaattctcaatctttatctcttgccccatgtacgttcagtatctgaagtctgaatcaccgcatgcatatttcttttatttactcaaaagcttggcttcaccgggtttccaaggccaattacaaatcgatatttcacatctgctttggcgaggcgctctattgcagtgttcacataatctatgggaataacctcaatatcaggcttcactccatgcttagcagcaaaatcaatcatt

SEQ ID NO: 30238 - DNA, 401 bp, Glycine max
  Clone ID: jC-gmst02400043e04d1
aggtcataaaaaatatcttgttacttttattgatgatgcatgaaggtattgttatgtatatttattaaatacaaaagatgaagctcttgataaatttaaaatttataagagagaggtagaactttatcaaaatgggctaatcaaaactcttctgacgaataggggaggtgagtattatgatccggtttattttcaatctactggaataatacatcaaattacagctccctatacaccacaacacacacatataacttcagatttatccagtctcatctcgattttcaaattaaccaacactattcagcatctgataagcacttgtgaatcacaacacacacattcatgagtccggcttggattttttcaagccattccgttagattcttcatacctgatgt

SEQ ID NO: 30239 - DNA, 427 bp, Glycine max
  Clone ID: jC-gmst02400043e06d1
gggggaaaaattgccccccttaaaccccccaccctatattcctttaaaaggcccaagaaaactccttggaaaaggccaataaaaaccaaattggccaaaaacaacccaaggggggagggggcataaaaagcggggggaaaaaaaaaactttttcccacccaagggaaccaatccgggggccctttggtttttttcatctccccaaagggaacttttggaaaacccgggggttttttttggggacacccggtaaaaaaccaaaaatgggggggggggaaaaatttttacccccaaaggcccctttttttaccctttgggccgggggaaaccacccaaaatttttccccttaatggggtgggaaatattaaccccccccattttaaccccaagaaaacacccttttttgcggttttttgggtttaaaaa

SEQ ID NO: 30240 - DNA, 509 bp, Glycine max
  Clone ID: jC-gmst02400043e10d1
gaatggaagaaggcatatctttaaattgaattgatggggtggaaaacccgaatttaaagatttccaatcatacacaatattgcaacaacaaaaagaattttaaaaaaaaaagactttctttttttactttttttacccaaaacctaagcaaaatataaaaacaaacgacacttttttttagactctttaaatccaaaagctgatcacaatcaaaatcaatggcgttatttatgaaagctccataagacttcaaacgaccaaaagccggtttctccattgatgttctcttcaaacatgaatttactcttcaatagcaaggggcacagactcagccaatttgcggtacttgagagcatagaacatctcgaggtaacgtttgctctcacggcgttcaagattggtcacgtgctttcagaagccatacacaccagtgagtgtcaagagcctgtccgagtaaatttgcatgtgtacttctcatgaatacgctggagtccaccctgggagatttt

SEQ ID NO: 30241 - DNA, 489 bp, Glycine max
  Clone ID: jC-gmst02400043e11d1
agataaccactttttaccatatatatatagagagagagaatacgaagcacactgatcacaggatgatgctctctttaagtagggaagcagatcttatcagtacacataggtaggttgaaattctagctctagcaatctagctagagaaggtagtacttgcacaacacacagcacatgataatttattttatacacaatctcattctcatggtgctcaagatgcatggactaattaagcaacaatgttggtctgataggcagtgtccacagataaattgggtacccataaaatggccttgcttccaaggaaatggcaaacagggttagttccaggatcaactcccataagttgatgaagcatttgatgattcattccagaagtatttgagtggcaaatagcaagtgcctgagtgttggttccatcaccagccaccaatggaaccatgaaagctgttgtttcacggacttcatggcagtaaaatactgcag

SEQ ID NO: 30242 - DNA, 483 bp, Glycine max
  Clone ID: jC-gmst02400043e12d1
agataaccactttttaccatatatatatagagagagagaatacgaagcacactgatcacaggatgatgctctctttaagtagggaagcagatcttatcagtacacataggttggttgaaattctagctctagcaatctagctagagaaggtagtacttgcacaacacacagcacatgatgatttattttatacacaatctcattctcatggtgctcaagatgcatggactaattaagcaacaatgttggtctgattggcagtgtccacagataaattgggtacccataaaatggccttgcttccaaggaaatggcaaacaggggtagttccaggatcaactcccataagttgatgaagcatttgatgattcattccagaagtatttgagtggcaaatagcaagtgcctgagttgtggttccatcaccagccaccaatggtaccatgaaagctgttgttcacggacttcatggcagaaaatact

SEQ ID NO: 30243 - DNA, 479 bp, Glycine max
  Clone ID: jC-gmst02400043f03d1
gagtgttgtgagttgtgacagctaaaccacatctcaaatatgatactacataaatctgtttattcatttttaaacgaccgctatgtctacaagtgaactgagaattaccaaatatgaaatctacagagtgaaagtatttaaagacacaatatacatgtgtatgttattgcgcatatggctacaaggacttttttcctactgatcataagtgctcaagaagccaccaacaaagcctgctccattgcaattcccgcataacatctccttcccgcaaagccaacaagagtcaccggctttaaactgtccattgaaaatatcaacagagttcaccccactgcctttgcattgagagcatagaacagctccatttccatcacagtcagcacaaatcacactattcggttttgtgtttcggtttgtgctttggttgtcttttgcagccttggtaatgacatagcgatatttggtagcaataggga

SEQ ID NO: 30244 - DNA, 467 bp, Glycine max
  Clone ID: jC-gmst02400043f04d1
atcacaagatatatcaatttaactttaacattagacaatttcaacatttccatttggcaatgcactcatctgcagtgttctgccactgtttgatgccaaaaaccgcacagagggtaaggaaggatccgtaacagattcaatctcaagaaagtttaggtcaaccgcgccagatctcttcaaactcaaaacaaagacaagtgcaatccatcccaacaaggaaagtgcccagtaattgctcatcccatgaatcaaaccccatgctatagcatatccaacaacaatccccgataaatggccaagaaaactcgcctgaggaacaatgatcgaagtgaagataagtgattcaaacggtgcaaaactgataggaagagaaagaaacccaaagagatccaacttggaagatggttgcttcacagaaagaattgtcattcacccaaaaacaacacaggaatacccaacagccgtca

SEQ ID NO: 30245 - DNA, 423 bp, Glycine max
  Clone ID: jC-gmst02400043f05d1
ggggaaaaatttgccccctttaaccccccccccctaatttcttaaaaaaaccccaacacaactcctttaaaaagcccaaaaaaaaccaatttgcccaaaaaccaccaaagggggaacgggtcaataaaacccgtttgtaaaaaaaaaacttttttcctaccaatgggaccaacccggggattatttagtttttttccctaccccaaaggaaactaatgaaaaaacccggggttttttttgggggacaccggcaaaaaacccataatgggggggggggaaaaatttttacccccaaagacccctttttttaccccttgaccccggggaaaacactcaaaattttccccccaaagggggggaaaaaaaaaaccccgcacctttacccccaaaaaaaacccctttttgggcttttttttttaaaaa

SEQ ID NO: 30246 - DNA, 377 bp, Glycine max
  Clone ID: jC-gmst02400043f06d1
gttcagggaatcggggaaaaccccccggaaaaccaaatgaggggaaccccccccccaaaaggggtggctacaccaggttttttcccccccacacaagggggcccccgaaaaggataacccctcctataaaccagggcggaaaaacaaagggcgggggacacggggcgggccttttccctcccggggggggggcctttttttttctggcgggggggggcaaaaacccttatggttgggacaatcgcccaatggggggggaacacacgcccccaaaatggttctcctggggaaaaaatccccccaaaaggaaggggggccccccccccccaaaaaaaaaccccccttttcggggggggaggggggtcgtaggggggggg

SEQ ID NO: 30247 - DNA, 394 bp, Glycine max
  Clone ID: jC-gmst02400043f08d1
aggatagcaaaattccaaaatatatatatataaacatgtttatacggtttatgagcacgtttggtttgcagttgaaattgttatgacactcattctaatgcagatccgacgaataaaagcaaaattaagggtcctaatcttgtggcaaaagtacttcgaacttttccacctgattttcaaacatgcactattatgcacataacattcctaatcaaacaggattcctcattcttttatggtaaggaaggaaaattgtcagctttccttcttgggatgtatagcttggagaacagcttcaaatccttcttttactctttcaaagacatgtggacccttaacttcatcggtaggggtcttgtcattaataacatcattacttccatgaatttcttta

SEQ ID NO: 30248 - DNA, 348 bp, Glycine max
  Clone ID: jC-gmst02400043f09d1
gctctaaggactgccatatcatatcctagtgaagttaattggaagtgatcgtacatacacaaaggcactgcttctccaacttgttgctccctcaaacaaataggactagagcaagataggcattcaaataagctaaaagttgatgatactatagctttgggtcctctttgtttattactatgatggatgagcagtttcatttccaatggagggacttgaaatctttattggtgcagcaaaggcacaatgctgctggagatcagtcaatgaaaatgatctccacggggagaaattacgcgcggaagacactttgcttcatggatggagtggcgtatttggttaaggctg

SEQ ID NO: 30249 - DNA, 399 bp, Glycine max
  Clone ID: jC-gmst02400043f10d1
ggggcagaaagggaaaaaacattaacattacaaccctttttttggataaaattaccagacaaactaagaagggtcagttccactacagcctattagcaggacttgccactaattgacattttaagggtggattcaaaaaccatcaaataaaaatgtgggaagaaaaaagggcaaggactactacatcactgttataccacccaaacccttggcctttctcctacccctttttttggcggttccttttaaacaacatttcttcatttaggtttttggggccataatgggatgaatacttggccatttttaccttaacgaactcctcgtagtttatttggccattgccataaacattggccttgcgaattatctcattaacctttttattggtgagctttt

SEQ ID NO: 30250 - DNA, 455 bp, Glycine max
  Clone ID: jC-gmst02400043f12d1
ggtcaacaacaccactttaacttccattatatggaacaatatacatattccatccttaaaaagaagggttcagttaaaaatctcgttctcaattctcaataagagaatataaaaaaaaaaccttctctgccccttcatacacggcatcatcctcataaccccttcccttaaaaaacccacttccaaaatactcaacaacgtctacttaggcaacataataccaagaaccagaaacagaaagagaacaaagagattgagaactacgaatgaaggaggggccataacgattccaacgatcgattgagatcactttttgaggcttccgcgaacaccggggcgaggcttggaggactcgggaacgctgagggtggcgtgaagattgacaactctgccctccccgaaggggatcttggggtgacgcgcgtcgtggtggatctgcatcgatttcacgtccc

SEQ ID NO: 30251 - DNA, 475 bp, Glycine max
  Clone ID: jC-gmst02400043g04d1
caaagccaattgtgctatttacaagttaaaatacaataagggcccctggtttgtcctcgaatctgtgacctattgacctcatgcaattcgaaaaaaaagcagggatgaactgtgggcaagtagacctggcgtgataagaaaatttctgctgctccttttctgatgatcatcagaaaaaatttgtttcccaccaggaagcttattcaaatttatgtaaatcatcacttgatcccatgaaaaatgtccaggagtttccgtgaatatttgagttcaatttgtcccccgtgatgttacaaagctggcagtggacatactatgcagatgccccctaactttaaaaaatttcctcatgataagatattttaataattctggttagaattatgctccttgttacttcatattaaccgatgatatattgtttaaactttgcgccgatgaaatttaactttaccttggagaaacacttaccact

SEQ ID NO: 30252 - DNA, 514 bp, Glycine max
  Clone ID: jC-gmst02400043g05d1
cataaaataagcaattatcttcttgttcttgaacaattctccatcctagagcttaacgatctcaggaatatcgaccgggtaacgatcaatgcaatcagcccaaggcccatcaaccggtgtcttaatgcttctgttgcacttccacacagcactgttgcatttaaagccactcccaaacgctatctgccacaccctatcacccttcttcatcctccccttggactcaatgtagttgagctcataccacagcgaagaagacgaagtgttcccaaacctgtgaagggtcattctagaagcctcaacgtgttcagtagaaagctgaagattcttctgaagctcatcaatcacagcacgtccaccagcgtggatgcagaagtgctcaaaggcttgtttgaagtcaggaatataaggcttccatttggggttgaagattttcctcccaatgagagtgagaaggaacagcaactgctcggaagccggaagaacaagaggacccatagtagtaatgttagac

SEQ ID NO: 30253 - DNA, 304 bp, Glycine max
  Clone ID: jC-gmst02400043g08d1
aaattgctaaaccaaccgtattattaatggggggggaagatttaccaattgatagtgtaccaagatgtaaataaatgcaaaaggccctgggggtttttatcacaagaaacactcactgagatgtatacatacaaaatgtgaacctccgaataggttataatacatagctactggcacaaaactgcaaggcacgttggtattacaaataaaacattaccaccaagtttagctctagtgggtttccttatgcatcttctataaacaactgcggggaactgaaacatcacggtttcaaaacagcaat

SEQ ID NO: 30254 - DNA, 457 bp, Glycine max
  Clone ID: jC-gmst02400043g12d1
gagagaacatttttttttgtttcatcatataaaatatatatgttctgaaagaacacatacaagtacacaaaaaaaagggggaaattcataaaaaaatacagaaaaaaaaaaacagatttgagttagagggaaggaaacatagagaaaattttagcaatcagataataagaagccagttgttgtgcaaaagtcccttgccaagagtgttggaaccccttttagttaagcaggtaccttctcccccttgagtggcttcaccacttcccatgtgaagtcagggtcatctctgccaaagtgtccatatgcagcagtcttcaagaacctgccatttccacccctcttgagatcaaggttgatggagatcatgccaggcctgaagtcaaaactctccttcacaatgctgaggatttccttgtcagggatcttcccagtgccataagtgtcaacaaacacagac

SEQ ID NO: 30255 - DNA, 315 bp, Glycine max
  Clone ID: jC-gmst02400043h03d1
atgaggcgctcaacattatttacccgccaaatgttatgggagttacactatttttgcattcaaaaatttaatcaaaaaccaattggtcgcctatggatgagatctcaaaggaaagcgtggtttttcagtactaaacagagttcaaaacattggccccaaagcacagatccaaaacttaaaaacagcaatttccgaagcagcttgaaagggaacattatatcagttcctaactaccaatttcaattcttttttacagtggcaggatttattatgtccaccaactccggcttcagggggggcccccccaccaaaaat

SEQ ID NO: 30256 - DNA, 494 bp, Glycine max
  Clone ID: jC-gmst02400043h04d1
atatgactctggtgttatttttgattttgcaaattaaattacacaatcgcggccgtacatcacacatgagttgggcctcttccaacttaaaagcagaggataacattggcccatgacgcgacacatgcaccacctaataatcataattttacatctttacatacaaaatacaaagactttaaattttaaaaagaagaaaagagataaacagatcatcttaatgaaatgaaaccaaaacccacaaacattggcttgatttttgttgttgttgttgttcccaacttgattaagcatgaaccgtttgattgaatcacttggacttgaagggaatggccctgattacgacctggtggtagagtgctgcaagagctgcaccgatgaatggtcccacccagaagatccagtgttcatcccaaccaaggtccttgttgaagatgatagcagctccaagactacgagcagggttgataccagttcccgtgatggggatggtt

SEQ ID NO: 30257 - DNA, 456 bp, Glycine max
  Clone ID: jC-gmst02400043h05d1
aaaaaaaagacaaaaatttattgcattaggtttcagagctacaccagtatatcaaaatggcaaaacacatccaagaaacgaaacccaacacagtacccacaaacactcgcacacgtttttgtttttggttttgtttttttaaaaaaaaattcaaatactaaattgaagtggtaacgtggtattctaaaagaatactataggaatacacaattcgatatcatatttttgtcttcaacagggacctaaaccctccctgaggggaccaaaagttgaaccctgattcacacaagctggtttcccctttcgctttcggagggttcttcattcgctcgcacccaaacaaatcaaaatcattcgctcgtcgagaccgcgcttttaaattaaacgatcaagaaagatctcaacagccggttcttctcacgtgacttttacgtgcgtgcgatcaacaccgaaatt

SEQ ID NO: 30258 - DNA, 530 bp, Glycine max
  Clone ID: jC-gmst02400043h06d1
aaaaaaagacaaaaatttattgcattaagtttcagaactacaccagtatatcaaaatggcaaaacacatccaagaaacgaaacccaacacagcacccacaaacacttgcacacgtttttgtttttggttttgtttttttaaaaaaaaattcaaatactaaattgaagtggtaacgtggtattctaaaagaatactataggaatacacaattcgatatcatattcttgtcttcaacagggacctaaaccctcccttaggggaccaaaagttgaaccctgatccacacaagctgctttcccctttcgctttcggaggtttcttcattcgctcgcacccaaacaaatcaaaatcattcgctcgtcgagaccgtgctatcaaattaaacgatcaagaaagatcttaacagccggtccttcttacgtgactttcacgtgcgtgcgatcaacaccgaaattcaacagcttaatcaatcaaccaatttatcattaccgccttaacgcgaggaacaccaggaccggaacggagcttga

SEQ ID NO: 30259 - DNA, 192 bp, Glycine max
  Clone ID: jC-gmst02400043h07d1
gaaaagaatgaacaattcccatcaatttatttggataatagttttgtttaattaacacccaaattggtcacaattttttgctttaaaccaccctagatgatgattttggctcaaaaggtctttcgccctggtccgctctgaaaagcattttattccaatttggggccctttgaacaattctggggggaaccc

SEQ ID NO: 30260 - DNA, 452 bp, Glycine max
  Clone ID: jC-gmst02400043h08d1
aaattaaaacaataattatattgatcaactaaagctaccatatgaaaatttcattctttacttgtaaagagccgaaattatcttcaccttaataattgtagatgtagaagaataatcagaatcttcctaaatccacgtaatttcttcgaaaatgctttgcccaacacaatgatattgtcacaccagaagctatgcggcgtcttccatttgatattccatttatcgcctggagatttacaatgctaatgacctatttctgcattacaaacgttgttgcccgaaattggacttcttacaagtagataattgtgcacaaagccggccatacaaatgatccatcttatttggagaaaagtagccgtgtttgccaaatcaaataaaaaaagaagggcacaatatagttgatacaatgataacagttcattttcacaatttctatcaaaaaagactta

SEQ ID NO: 30261 - DNA, 511 bp, Glycine max
  Clone ID: jC-gmst02400043h09d1
gtgcgggggggaaaagggccccaacccccccggcggtatgggggcaaagggattaaaaaacccttttgtctcccaaggggggggggggttaaaaaacacagaggaaaaaagaaactcttttcggggggggaaaaaaaacgggggggttcaagggcggggggcgcctccccgggggaaaaaagaaatttttttgaaattaggggggccccccgggggacggggctcaaaatttggggggggggggggttaaaaaactcctccccccccttttaaaaaagggatttttggggggggggaaaaagaggggggggcccaaaaaagggggggggggatcttctcggggggtggggggggggacctcctccccggggggttttttggggggaaaccgggggggggggggggtctcctcttccccaatagagggcccggggaaaccgttggggggggggggcccccccccgccaggggggggggtgtcacaccccggggagaattcgggggggggggg

SEQ ID NO: 30262 - DNA, 448 bp, Glycine max
  Clone ID: jC-gmst02400043h10d1
aggacacatttttattttattttgggataaaacaatagagtcaagttttagtgttacaaacttacagttcatcacttcatttttattctccagggtcgtttaagacttataatcacacacattacataataaatagaatagaacaatgtatttcaccactaactgtatagaccacacgcacaactcgtttttttattcacacacaaacaaatataataaaactgggccactttgtttttttttttcggtaggcaccaggccacttaattcgttgatctcctctaaccattttctttctggtgaatcaatctcctctaactctaatattggagtcattgcccttgccagaaatgcctatcggatttgcatggcagagttcagatcagtttccaatgggatatgatctttccattcgaatatcacttttaacagcttgtctgttttgact

SEQ ID NO: 30263 - DNA, 451 bp, Glycine max
  Clone ID: jC-gmst02400043h11d1
agtataaaactattaaatatattcacatgaatatgaatcttgagttttccctggcaagtaaaataatttatagaactaaatgaaatatttaacactaccctcaaaggcatagctacagtccaagtccaatttcatgcaacaaaaaaaatatatttatataaaaaaaaaagagagagagaagaaaaaaggactacaaagtatcgttttcctccgacttctgagaaacttctgggaatcggtcccaaacggttaaacgacgcacgtgacgtctccgcgtgccggtctcggattccctacgccactacgtaatctaatctaaaatgtttcctttgcttaaccgtcgccgcgtgtcagttgcacactctttgatttgtcctgtaacacggacttaaccacggcgttttctgattctcgcgatggttctggaaatccaacggctcagatttcacgt

SEQ ID NO: 30264 - DNA, 363 bp, Glycine max
  Clone ID: jC-gmst02400044a01d1
aggtgaacgcacaaatttgcttgggcaaagaacaggtcagcatccacgaaagccagaactaattacttattcacaacattactctacctaccctttgattgattatttgacacctgaactgggggggcctacgcaccaacaccgactgaaccgtgatacagtccgtgtcatgctttgtgcacgtggaccccactgttgggcacttaccacccaatgccccccgccaccattattagtgtctattttcagccacgacaaagagctaggacagtgctcagcttcaacagaaaggtgccatgctctgcattgaaacttaaccttttttttaatgatttgagttggcgagaggacatggaataggat

SEQ ID NO: 30265 - DNA, 391 bp, Glycine max
  Clone ID: jC-gmst02400044a03d1
cattataccaggaggtggaaccctgcccctacatgcgaagccttatttactacatattctttgttgggcgcactatatctatcatgctttggttaaatgacctgctgcccgattgtgcccttctctgcaaacagaacgtgtatttttgcggtaccataaatgcgggggacatgggggaagtgctgatgccccagataatgagctgtgacactgccaagacacaaggacctggggcagactgcctagctcacacaacttaagcacggaacgccgagggttgtgtgttgagctgctcacacaatcacatctatacccccccctttgcaacatccaagatcatgaatagggcagtaacggcggggccctcctcggaccctgctggaaagcttaa

SEQ ID NO: 30266 - DNA, 269 bp, Glycine max
  Clone ID: jC-gmst02400044a05d1
aacccccccaaaaaaaacccctttttaaaaaaaggggggtaaaaccccccccggagcccttttttttaaaaggggggcgggcttcagggggggtaaaatttttaacaaacccccttttccccaaaaaaaattggggtggggaaaaaaaaaagggggggttttaaaaaaaattgcgcctgggaaaaaaaaggggggggcctcccccccccatctcttgtgaaaaaacgggggggctttgggggggtttgtaaacaccccaaaagggggga

SEQ ID NO: 30267 - DNA, 312 bp, Glycine max
  Clone ID: jC-gmst02400044a07d1
ctcaaaaaaagcattccacggggcatactttttaatcctaggcttcctgcatacattttaaccagaacacaaaacacaacactttccatccctatacgttctaaacctcaaacatcacatttgaacctcttaccctttcacggtacaccatggtttcacccattataccctccccaagaacaaacgcaaccactcctaacttgaaactcacggaagaacctgcataataagcctcagcgggcaagctccttgttatcaccattgtcactatcatccccagagggaccggcacttatgttttacctcgtactt

SEQ ID NO: 30268 - DNA, 488 bp, Glycine max
  Clone ID: jC-gmst02400044a08d1
agacaataattgaagttcccattaaaatttcaaacaaaaacttatcaaacatgcattcaccttcaacactaccacaataccacggtttactgggccgaaaaacaaggacagatgcctaacgtccttaggaaactcactctattacataagccaaaaataatacatgaatgagtcataaccaacagcaaaaatatcactgaccaccatgctttgccttgttatgttgttgcagaccactttcattggtgaaagacttgctgcaggttttgcaagagagtccaccagacttaggagtcttggctttggcttcactgttgggagtcttggctttggcttcgctgttgggagtctttccgcctttctttgcagggtgaggagttgctgtatgtccacctttcttaccatcagtcttttcaagagtagcatttttggctttcttggaagaaactggagtttttgatgcagactcattgggtctcttctttccc

SEQ ID NO: 30269 - DNA, 563 bp, Glycine max
  Clone ID: jC-gmst02400044b01d1
acaggacaataaaagaagcaatgcattaaagctgaaagtagaaagtacgttcatcttcaaaggagtgtaaaagagggtaatatatattttacagaatttctgaaagagcagaaaaaggaagtaaagacaagaatgatttgtgactcaaatcctggaagggatcataggaatagtgttctgtaagtatgcactggcagcagcaactccacttccaagctttacaggataacccacatctttgagtatcatctctacaccagctagacatcccaacagttgcaactcattcaagtggccaagatgtccaattctgaaaaccttcccagcaactttgttcagtccaagacctaagctcaaattgtatctcttccatgccctcctaactatttcagtactatcaatgtaagcaggaacaagaacagcagtcacagtgtcactgtaccactcttccttttgggtgcaattcttcaaaccccatgcctctacagcaagtctggttgctttgcctaaacgactgtgccttgcgatcacattttcgagtccttcctcaaaatcagatcaag

SEQ ID NO: 30270 - DNA, 464 bp, Glycine max
  Clone ID: jC-gmst02400044b02d1
cccttgatgatgaacatagacaatgggcttttgaaatgtgctctactcaatgatccgtaattaagcaacagacatatgctcgttccaatcagcaggggaactcaacaatgggaacacgtgaaataactacccgagtaaaatcactttccaacatgctaccaatatgcctaccaaaggaatactacaaataaaaccacaatgagactattaagattattttttctcctcttcatttggtggctggtcttcattcttctgctgtggctcaaactgattttgcatggaagccagcaaatctttgacagatgggtcatttgggtcaaccccaggaagcgatgcaaggatagaagatacaaaggactgatctgccaacagtttactcacgtaagactggctagccgagtcctttgagctgtcttctactgacaattggagagctagagccaactcgggatcttcagcag

SEQ ID NO: 30271 - DNA, 436 bp, Glycine max
  Clone ID: jC-gmst02400044b03d1
aaaaaaaaacccctcactgttttaaccacatgaattttacgttcaaagagaaaacaaaaacgattaaatccttcttttaagtttggaaaacaaaagaaagttgcttgttatcccaaattaatagaaccttattttgcctgacacaaaaaacaaaggcaggggattgagctgagttaactagcaattcttgaattgagaaaaccatttttttttttatataagggggggttatcgcttttttttagcaactcaatcattcccttccctttgatttgagttcactcccagtcttcggcactcaattcatcattttcttgtttgggaggggtaacaaccaataacacagttcctaaactttgagtgaaacccttttcctttaatcccgaaccccttttgacctttaaacccttaccatgaggatttacaagataaaacc

SEQ ID NO: 30272 - DNA, 500 bp, Glycine max
  Clone ID: jC-gmst02400044b04d1
ggggcagaagtttctgcttccttggctaacaatttttctgccttggtttctttctcttcaaaatcaccctcctccttatctttcataggctttcttgactcagaagattcctctttaacttccttatttgagatcctttccttctttgcatcttcagcacttgtttcctctgtcttcttttcctccaattgctccttaactgatggcttccttgtaacatttgttattgaaggtcttgactcttcttcctctacacccttgtggggtctttcagcagttttgactttggtcagcattgttggtgtttgttttgcttcaaattcctcttcacccttttgtggcctttcagctgttttggctttggtcaacattgctggtgttgattttgcttcaaattcctcttcacccttttggggtctttcagctgttttgactttggtcagcattgttggtgttcgctttgcttcaaattcctcttcacccttttgtggtctttcagc

SEQ ID NO: 30273 - DNA, 388 bp, Glycine max
  Clone ID: jC-gmst02400044b06d1
aaggacaaactcatgtaaccctgccaataaaataaaccctcatccctaaactccagcaccagcagcagcttgctcacttaaatacacaactcctaaaatttctaatgtcaccacggggtaagcaccctgatggggagccaagggttgggctcacccgtgggtttaccctccataatacaaccaaagacttacccaccatataataataatttattaataataaggtaacctaaagaaataattaaaaaaaaaggcttttcaccatgacatgcaaaagggtagacctaatgatccccacaactgggaccatttttaaactggtttttctcactcacactggccataagtttaagcttcagttttctcaacaggaacctctacgggggct

SEQ ID NO: 30274 - DNA, 137 bp, Glycine max
  Clone ID: jC-gmst02400044b07d1
ccctttatactatttcatctccctattattacgtgttaaaacatttgagaaaatgctataatagaagacacccaactgatcttaagttagaattaaataggttttatatgggtccgtcatgtcagccggtccggaat

SEQ ID NO: 30275 - DNA, 450 bp, Glycine max
  Clone ID: jC-gmst02400044c05d1
acacgttccaatgtaaagctttgtactttaaattaaattaaacatagtacatctcaacattgtttagctcaaaatcagtttttttaaaaattcaaatggccactgagatatcttttattttgagcccgttaataataatttataagccaccaaacagctttcatattaccactctataagatagaactccaagttctcatgatcaaggaaaactgaaaacagactcaagcaaaatcaacacagattatcaccatcaaccatcacacacacacaagtatagcttggtgtcctaaactcgtaatcacaaatgccctcagagaaaaaatatttagtcttctttccccaacagagtgagaaggaacttcttgtagtcccctgagatttccttggcaatagcatgctcaagaagaacgctgtttctcttgtagtaaacctctgagattattctta

SEQ ID NO: 30276 - DNA, 470 bp, Glycine max
  Clone ID: jC-gmst02400044c07d1
acaccatccaattggcacgaacaattttatatattgttgggctgtatgtataggatcaaaaacgacactaaaggaaattataccctacataccacaatgccgatgtacttgcaattgcaagtgatagccctgttaaaaattgtgaattgtcagtgcttaaaaatggtcccatttaacaacatacacttgaaaggaaatttggcaatgacctatagaaaatagatactaccttgctcccttggttcattaacgatagtatccccacggccggccgcagaatcgacttgcatcgcaagggataaccggccccacccctaatgttcctgtgcactcccgtgtgctgctggccatagatagctagaagattgctgattcatgaggcctcctcacctagaacttggcagacccactgtgcccggacctgatgattgctagctgcatactaccaaacaggccacacctggcactgg

SEQ ID NO: 30277 - DNA, 467 bp, Glycine max
  Clone ID: jC-gmst02400044c08d1
aaaacaacatagttcaatattgccattcagtttaggtacgtaacaggagcagcgaagcataaaagcaatgcatccaaattaaaaccacatcggttctggtacacatctgaacatcaaacacaacagaaaacagaccacaagaacaagaatctgaagtagattctagtagtcttcatcctcttcctggccctcaccagactcagcacccacttcttcataatccttctcaagggctgcaaggtcctcacgggcttcagaaaattcaccttcttccataccctcacccacgtaccagtggacaaaagcacgcttggcatacatgagatcaaacttgtgatcaatgcggccaaacacttcagccacactggtggagtttgaaatcatgcaaactgccctctgcaccttggcaaggtcgcctccaggaacaacggtaggtggctggtagttaataccacacttgaaaccag

SEQ ID NO: 30278 - DNA, 368 bp, Glycine max
  Clone ID: jC-gmst02400044d01d1
ggatggaaaacttctattttataaaaacccatacattcaccatggacttaataagataaaggataatctttaacaaagaggatcataatacaagcatctctacaaaccctttcagtcacccaatgaaactcaattccgcagggattgatccaccagctgccacaatctgttgctcaagcctgaacattgtttcaagcttattcttgactatgcagtactcttgtttcacttgttgcagacatctgaggcacgcatctgtgttctgctcctcacagaagttgcggaaagcaatgcaggcatttttcaccctttgcgcgcctatgcttgaactgctaccctttaactggtgcacatgagcatcaactttt

SEQ ID NO: 30279 - DNA, 486 bp, Glycine max
  Clone ID: jC-gmst02400044d02d1
gtaaaaagcaagtaacattaagttggattgggatacacaagataattcacattatctgaagtacattgcaataacatatacttcaccaaacacaaatctaaaaactctcaaaagtccacaagtcatccttttctttcatgctcacttgccggggacgaagttggtggcgtaggcccaggcattgttgttgactgggtccgcaaggtgatcagcaaggttctccaatggacccttaccggtgacaatggcctgaacaaagaacccaaacatagagaacatggccaatctcccgttcttgagttccttcaccttaagctcagcaaaagcctctgggtcatcagcaaggcccaatgggtcaaagctgccaccagggtagattgggtcagtgacctcaccgaggggcccaccagcaatacgataaccctcaacagcacccattaggataacttgggtggcccagatggcgaggatgctctgggcgtggac

SEQ ID NO: 30280 - DNA, 439 bp, Glycine max
  Clone ID: jC-gmst02400044d04d1
aaaacggcaagcataggaatagtttttcattcgatttctaattctgcgcagcgattcaacacaaatatatttatatttatagaaaaaaaaaagaggaaacgaggggtaaaagtaataacaaatcgatcataacaaacaggcatagatttattattcaagagggattgggccttgcccagcctagctataaacatcaaatccaaagcgcctaatcggttttttcttcgccattgctagcattttcacgattggtgctcatcatccgcttgaactcggggaagttgacgttgccgtcgccgtcggaatccacggatttgatcatgttgtggcattcctcgacggagcacttcattccgaggcggttcagcacctggcagagctccgtggcggagatatggccgttcttgtcatgatcgtacaggttgaaagcatcgtggag

SEQ ID NO: 30281 - DNA, 430 bp, Glycine max
  Clone ID: jC-gmst02400044d06d1
ggcgccgaaagggaactcaaacattttaattttaagccttttaatcgaagtcgttataatattcacacatgataacgccctgagggcttcgccaactggggtcccaagaccggggatggggttaccagaaagcagagggaccaccttaaaaaaagggctttgaatcaagctgatcataccatatgccttgaatcttaacatccttaggagctgtagcccccatatcaacatcagaagggtgaacactttttaacaccccaataacctcaccagtctcagggttggacctggtgacacccaaggggactctcccttgggaagaggaagcacttttattgttctccttggcaagttcctgttgatcttctatttcaccagcaggcaaagtaacagctttgtgataacccgttgaggcgcccccttccttggg

SEQ ID NO: 30282 - DNA, 308 bp, Glycine max
  Clone ID: jC-gmst02400044e01d1
caaaaaatcttttctattacagcaaacaaaggtgggggggggggggaaggataattcatctacctattactagtctcctcacttcactaaacatacaagattgacaaaagaaaaaccactcaccacatcacacatttgcaagactaggggtcattttctatccctcaaggctttgatttccacccacatacatataccctaattgcctgtaagcaatccaatgaataaagaacaacagattgcttttttatctgtacacacaccctcacacacactggctgtaaccccttgaacacagcacttgactc

SEQ ID NO: 30283 - DNA, 401 bp, Glycine max
  Clone ID: jC-gmst02400044e03d1
gaaacaaaggtgtggatgggacaccacccttttcatttataatagaaaaaagacccaattaaattagggttcaaggaaagtaagacacaataaatctcttgcaacacccttaaagcttcatattgtggtaacaaactttatagagccgctttaaccaccccaatagagcactactaacacctttaaagcttaatttcctaagtacaagtttacaattattttttttagtggcaagcattgatactattttaacccaatttgttggaacattaattaagcctcaaaaatttcaggggattcagcatttgcttggacaagctcaggatgaacgttccccactgaatccaaagcattgggaagtcccaatgatgtcaaagccagatgggccggtttttgccctg

SEQ ID NO: 30284 - DNA, 335 bp, Glycine max
  Clone ID: jC-gmst02400044e04d1
cttagaatgagttcggataaaactaatttgaattaggttcagatacaatttggttcaatccgaaccaattattttgcacactttcaagtgagtcaatatcttttccatgacatgatctgtggaaacgctcacataatcctattatttacacacacaacaagtctatgatgttccaggattgttacacattttaaacatatcaagagagcaaattgttacatttagacagaacctgttcaggaaggcaggttatcacatctaggaatgcaccctgccattctcccttcaatcaatgcgcggcaacaccgaccgacttggagtccaattcaggagca

SEQ ID NO: 30285 - DNA, 454 bp, Glycine max
  Clone ID: jC-gmst02400044f01d1
ggcaaatgctttcaagtgtgggcctttaaaatatagatactgtacattaccgaaaagcttggatatcaaagcaatctgacttgaaatttttacaaaagtcaaaattcaaagacagtaaaagggggcagcactagagagaagagacattgtcaaagatagaatctacaaactacttgtctagaaaaaaaaaagattatactaatttggtctctactctacaatgagtctctcagttacatcttgagagactgcttatcttagttgtcatatgctccctcttaccctttctttaagctactcaaatcattataattataattcatatggattctttattacggtgacatttgatacatcattggttgacaacttgcaagaatcggaaccgcgtggctctgcctcaatcagaagctgaacaaccttcttcatgggaggtctacttgttggggatttg

SEQ ID NO: 30286 - DNA, 530 bp, Glycine max
  Clone ID: jC-gmst02400044f02d1
acagggttcaatgttataggttttcataaacacaaacaagaaatatcctagtggtcctacgttttaatgcacaacaccaatgtaaaggtgtgcacctccaatgttgatctatataaataacaaccgctaagaaacaataatttccatgaacagtgtaataaaaagatggaaaagatgacaaagcataaattatgtcaatataagcaatttcacctgcagtaaaaacccaaaatgagagataaacctttgggtcaaaactcaattgtaatagcgtgaaccagtgtcatagacacggccaccaggatatggacctctaggttcaaatccttgatctctaccacccccaagaaatcgagctctctctcggtaaggatcaaggtgatcggcagaatatcctcgttgcacttcacctgtacctgaagcattcacattgttgtaaccatgagggtctccgggtgccatgccaccactggggtaaggatcccttatgatttgctggtacttgctgtgcctagcatgtgattcccttt

SEQ ID NO: 30287 - DNA, 491 bp, Glycine max
  Clone ID: jC-gmst02400044f03d1
aatcataaaaaaagcataccaataatttatttaataataataataatatattcttggacattatacattttcgaatccggtaagctagacaatcaaatcaattgatgatgttgcccttcttcagtgatagaagaaattacatgaaatactataacagcaataacacttaatttacccggcccccctttctagctacttgttaaccctaaaaaaatggagttaatcttgatctcttctatcattacatataatcaaatgtaatgtaacccttgttttaattttccaagtactactgaagcctgcctaaaataagcttcatttcaagatcccaaaataaacttggtcatgaagagatataagcggagccagatatacatataaggaattgacagaagaggaaaagaaactcatgtatgaatcgatcctatcagctgttagccagttatgaagaaatccaaacaagtgtagtccccacatgatctgacggaaac

SEQ ID NO: 30288 - DNA, 370 bp, Glycine max
  Clone ID: jC-gmst02400044f05d1
aaaactgatctgaaatatcattccttaaattaacgacagcaatcttaagactaaataagcaaagactgtcccataagaaaactgcaccgcagccaattgttcaatggtgtcaaaataaaaattaaaacctcccgtaaaccccaaagattcactctcagaagacaaaatcactcttcaacaacattcactaattcatattcaactaacgaaaggttgttatcctctttaacgtcaaaatttgcggggtctgtgggctcaatacgcccccatttatccactgcaggtctcatagatcccttgaacatgtcaatctttgcattacgcagaattacagttgcgccagcatttatatggtccacctgttctttgc

SEQ ID NO: 30289 - DNA, 451 bp, Glycine max
  Clone ID: jC-gmst02400044g01d1
gggaagacaaatttcataatttcaggcaagcaaaaatttatggaatcttgctctcaagttctaaccgatgaatcataaccataaaaaagatgggaggtaaacaagccataggaaactcattggccaactcaactaaacattatttagaaacctacaaaatttaacaaaatagccgccgttgtgtaaaatgacaaaactcaattgcacaagcccatcgtcgatgatagatactctgctaacagagtaagagtcaagtagttgggataccaatctcacaacaacttactactcaatgatggattggataacacccgctccaacagttttgcctccttctctaataacaaaccttattccttgttcacaagccacaggcccaataagttcaaccaccagcttaacacggtcgcccggcataaccatcttggactcttcatccctgggattcata

SEQ ID NO: 30290 - DNA, 413 bp, Glycine max
  Clone ID: jC-gmst02400044g02d1
aagcacaaaagacggggataacttgatattattttattacatacatgcatagatagcctgctctcaaataagtcggcgggaacaaagattgagagattcaacgatcttcaaatttcacatttgccagaaatttttaacagaaaagagggggttgggatatgagttaagttttgatcacattcaactacactatcccaaaccggtactcttaaaactttgaacttcacttgtactctaggatcatgttgttctcaggagctaatccaacacaagccctcaggatgttttccaacatagctcgctggtttgacaacgcattcaccactggtgtacccggtggaaccagaggggccttggtcaggtaactaaggatgggcgcaactgggtggaatgagtggaattttccctcattt

SEQ ID NO: 30291 - DNA, 332 bp, Glycine max
  Clone ID: jC-gmst02400044g05d1
accccactctagaacatcatgatttatttatttatttatttatttatagcccttaacacatataattccctggatacaacatgttttctgggcatattcaactctagagagctttatctgatatgatcatcctttacatattcaaagatagctaaatacttaactgtataatatatcacacacaacgagagggacctatatagagtaaataataaatttaagtttaatttatacacacaaaccttgagtatataacatcgtgatccaaatattcaacaagaatttactttattaccgcatcatgttaaaatgttgcgataaaaggggggaac

SEQ ID NO: 30292 - DNA, 468 bp, Glycine max
  Clone ID: jC-gmst02400044g08d1
ggagcatacaatcacggttgtattggatggacaagtcattcttgcatacaggctatacaaaaataataagaataataattatgctgtgttcacaatgaaaattgcatctttaattgagccaagagaaaagaataataatatacatgcctagctattttgatcaagcaattaaatattgaagacagcctagcagtagcgcaatcagagatgaaatgaaatatggagcagcagaaagagagaatgaggtttactgcagcttttcccccttacccaccaaagtaacacaaattagaaggatataaagatatgtagattgattggacagacacaagcaaaactctccccaggggccagaataagtctaaacatagcaaggagactgatgcaactccaaccgttaaccatttcaaaatcttaggtgctttctgctggaacctggttcacaacaccaatgttgttcataggttt

SEQ ID NO: 30293 - DNA, 538 bp, Glycine max
  Clone ID: jC-gmst02400044h01d1
attatgtgactttaaaacaaacatgagctaattctcattgatgatcatttccaggattgcatacatacaagatcatcgtcgtcgtttctgagtattggtagaagcacgacaatcttctacaaggtttaagacattcaaattcatttggtgtacacaaagtggggtcgacgactataatacacagctgtacaacacttaattttgctagtttccttcatttctgtaacttattccccaatatactcctgatgaaaaattatcaggaataagatacccataatacccctatattcttcagaactgaccctaacaagctaattagagctcatgggctgatttacgaagattagcaagtttgtctctccatatagctgcatctttaaatctttcctgtttgatagctatacgcatattatgcatcatacttagttcttgagctaccaaatctggaccatctacagcactgtcaagcaatacatcataaatagtctttttattacacactccggccattccataaccaattctgatagcatct

SEQ ID NO: 30294 - DNA, 369 bp, Glycine max
  Clone ID: jC-gmst02400044h03d1
aggggggttggggatttttagggtactaaagcaaaaaacacaaaggagagaaaacacagaaaccaaggaaccacacgaaatggcaactcgggcgaaataggcgggggccggacgccggcaagggggggggggagccgaaaaccaggggggagcgctaagaaagaaagcggggcggggacggagggagggggccggggaacctaggcctcgcccaaggaaagcgcgattggtcaggacgggctatgggcaggggagagcaggggggccagcccggagccgggaacaagggcaagcgggggccccgcgagccaggcgtgagggcaagggccggaaacacctggggggcaccgggggcgggtgggagccggc

SEQ ID NO: 30295 - DNA, 348 bp, Glycine max
  Clone ID: jC-gmst02400044h04d1
actgataattgaaaatttttatttctctaggataagatacaatcaaacataacccaagttgcggggttacaaaccaaccaaaccacagactaatagcactcgaattagcaaccagatgcacgcacaatttctcacttttgtttttctcactcataaatagatcacacgatggggaaaaaggaaaaagagagagagagagagagagagagagagagagagagagaaattaaggcacagccctcggtactatggtcccataaaccttttaaatatataggtgatgcagcagtctaatcactgtcactgctgctgctgctgtgatggccatgctcatggacatgcgccctc

SEQ ID NO: 30296 - DNA, 492 bp, Glycine max
  Clone ID: jC-gmst02400044h07d1
cgccctaaatatttgatttttttttcttcaggtcctaaaacataattctcctaacaaggaacaaaccatagcagtcatcatggatgaaaaaaaaaagtaaatatttcgatatgttaaactgactttcagagatcttccacttaggaaatgaaaaattcactttttgaaaaaggaaatgataatgaaagttcttcaaaaggaaaagatgagcaaacgttggaaatgaaggtatccagatagcaattcatagggtgaaaaaaaacaattatcagaaatcatcgtcatcctcctctgcaatatgcttagccagctcttgctcttgctgttgactctctcttctcttttcagcactttccttctctttgtgtgtgttgggaggaaatcgaagtgctcgaaccgcctcattgtgcatgttaagacagaaagcaatccgagaattaaaggctaactgaggctcatttgtggagtaaatatctccagtttctttggaca

SEQ ID NO: 30297 - DNA, 496 bp, Glycine max
  unsure (1)..(496): unsure at all n locations
  Clone ID: jC-gmst02400045a12d1
cttccaaggaaggctttcccgtcatcactgtatgacgtcctccttctttgggggggggggggggggggcatgggtaaatagagcatggtacaaccttaaagttctatggatatattagagaaagaaagacgagttgcgtggatgaagagtatatggttaaataaaccaagaacgggtattaaacccaatgttggtacggatatcgttgtgtgactaaaaatagcaggggtcggcgaaccaagggcaaattaaacggtaaggcacgttggtgacgagtcgtaccagttaataccaaagaagacaaagtgcagatgtagacgcgataagcatagttcggggaagaacaagagcaggaataacgtacttatttagagcggatactgcgatagtgccaagctgccngaccaaaacaaagtacctgcatgccaggtgcggctgcgatagagcagatctaccacatgctttactaaaggaaaaaaaaaaaatgtggtgcaag

SEQ ID NO: 30298 - DNA, 192 bp, Glycine max
  Clone ID: jC-gmst02400045b11d1
cttccaaggaagcgtttcccgtcatcactgtatgacgtcctccttctttggggggggaggggtgggtggggcgatggggataatggagcgtgggacactttaaacgctaaaagattggattagggtaatttgggaggaccagaaaagattaagattatttggcaacctgtacaggtatggtatttgaccatg

SEQ ID NO: 30299 - DNA, 356 bp, Glycine max
  Clone ID: jC-gmst02400045d02a1
tgtatatgagactacactgagcatcgtctagctatctcgatcgaactgtccaaggtcctgtcactcctgtcactgtcacttcggtaaaatagaaaagcattacgtaggggcagcctggtgcgtacgaagtgaccgtcggtgtgtttgcgatagggggtggttaacgtatttgaaagcccctgcactagcataaatgtaagctttattaataagggcggcttgcgatgcccatgggacgtgttgaacgtgaattaaagacaagtagtccaaacgaagagggtcaacggaaaggccacatagacatagccagttacataacacgggttaggtacgtgcgttttgcatgtgcccatagt

SEQ ID NO: 30300 - DNA, 546 bp, Glycine max
  Clone ID: jC-gmst02400046a03d1
agtttccgtcatcactgtatgacgtcctccttctttgggggggggggggggggggggcgcgagccaatgcgtaatgaccaataatagagaggccccatctgagagaggagtacaatagataacagagggtaaggtgcactgaatatacaaaactacaaaacaaccgggccggggtgcgcgccccacaccccccagaacaatattgaaaggtataacgatgatgacgaaggcccggaatagatagggataaaatgatatttctagggcgcgtagatttaaccttgagaagtagccaaagcattaatacgtagacgcacgggtggcgtgtaacgtttgttgcgcaggttgaggttagcataaagagcaccccagtgttaacggcttggcctggcataaaagagataatccgaaaagttaagcttaaaaacaaatataatttggtaatcgcacagacgtaagctttacaacgtaggtggtttattaacttactgcgacggcagacaatacgtgggggtggcttaggaaactgcgagcgcggcgacggag

SEQ ID NO: 30301 - DNA, 616 bp, Glycine max
  Clone ID: jC-gmst02400046a04d1
agtttccgtcatcactgtatgacgtcctccttctttgggggggggggggggatcgaaagtgcggagggtaggtagtatggaagagcgccatgcgcgggataaagaagggggggacacgaagagttatcagcccgttaaaaagaggcatggtaagaggggtatgaaaggccgagcagcgagagtaccgatagacagaaggataaaacacaaaaaagccggagcgatttgagcagtacaagaaccgacaaaaccatgaagaacgtgagatcgaatagcagtggaccctggttgtagtcaggtgccgtattgcagcgagcgtaggcgttaacgaagttatagcgtgacaccgtatattgcatacgtgtaggtggttagtaccccgtagcgagagagccaatacgtggtgttagtgcggcaattgcagtacccggaagttacaaaaatacaatagcttaattgcagtacggagcgcatgtttaaggcaaacagcaagctaacggtgtaacataagcttgaaccgacggtctagacgggcaagttcgggactttgcattgggagtgtggggtgttaacgctgggcgagtgcctgtctggagagtagacgatgcgcaaagat

SEQ ID NO: 30302 - DNA, 518 bp, Glycine max
  Clone ID: jC-gmst02400046a05d1
agtttccgtcatcactgtatgacgtcctccttctttgggggtgggggggcgggagagtgccaagacagccagccaccaacgaacagcaacaagcgcgtacagacggcgtacagacggctgacatagctaacagagcgtagcagtgcccctagctaatataactaaatggcccctggaaaggaggtacatacctgaaatggcgtgccgttagagttgttaaaaggaagggaacatgatggacaattgaggggagtgatacggtgatatgccgcgaacctacatcgacaagaaatgtcaagaattagattaagtggcgtgggcatggcgtgtgataagtggggggtgtggtgtaggaggtagagggggttttaggttggtggcccggccagggacaaattggccacggatgctacagcaacgataccaggtatatttcaataagacgccggggaggttgtagccagcggggcggggcgtgccgcttaatttaagatatgggcacagtaattaagagtggt

SEQ ID NO: 30303 - DNA, 572 bp, Glycine max
  Clone ID: jC-gmst02400046b04d1
agtttccgtcatcactgtatgacgtcctccttctttggggggggggggggggtctttagaatatacaaggtgagatgagagaaataacaaaaggataacccaaacaaagtagggaagacctttgattattgggttgttagagacgagcggcgggaagggcccccacagcggtatgtggtacgtggtattaagcacttataagacttagactggggaatagtccaggtgctgggggcaccccgttaccataaaaataaaatatggcgcggcgaggcgaacgccgccacggttagtaagcaacgtaggggaaaagcatcgctagcgtggcgcacgcacgacgcatgagccgggtaatggcgcgcccattatgtcgatcgacgaaaggaaataacgccgccagacccgtttattaggggggacgtataaaaatagccatagcccttgacggacgacaccgcctataacacttaaatagtcagccgcagatgaataaacgttttaagccgggcacaggttcgtttagccgatgattgcctcattgaaggtatgggtagttaggtgattgatagaga

SEQ ID NO: 30304 - DNA, 348 bp, Glycine max
  Clone ID: jC-gmst02400046b11d1
ctcaaactctaaacatatttcttttatgcaaatatatataatcagaagagcaattacaagatgatagtagtttcacgataatgcaaataataattatggaaatacttttgttacataaaaatcacgagttgataacaacgtgcttagaattaatggtgatgatatgattgttacgttattaattattatgatcctgttattaatagcatacttattattcttgatacgcgaaaggggacacttgcacatctattgtgcattgaagagtagttcttagggaacatagccaccatggccaccaccacttccaccacctcctccaaaaccaccaccatgtgctccaccagc

SEQ ID NO: 30305 - DNA, 349 bp, Glycine max
  Clone ID: jC-gmst02400046b12d1
aaagtaaatatcatttattcaaacctaaggaaacgcaggaacacaccatcacaaactcatgttaccctgccaataaaccatcacccctaaactccagcaccagcagcttgctcacttcaatacacaactcccagaatttcttatgttaccacgtggcaagcacgctgatgtggagccaagtgttgtgcttacacgtaggtgtaccctccattatacaaccaaagacttaagcatcatataataatatctataaagccttctaccggaatccaaggaaaaataccacaggaggctcttctacatggcatgcaaaatggtagacctgatccccacaactaggaccattttt

SEQ ID NO: 30306 - DNA, 445 bp, Glycine max
  Clone ID: jC-gmst02400046c11d1
aagtaaaagcatggatttatatatatttttttccacgttgagtacaagagattaaattacctaaaagaaaatatcacacactgaaagaaaggaaagtgcttgaaaatactaaagggtatttaccaatggctcttgtcttgaaaagaacctttaatctacataataggatcaaagaaaaggttgcaataaaagcacaagcaattgccattattgacaatatttttattattcttataatttcctcttcattttgaactcatcatgaagaagaaattaaattgactcaaatagcggggttgctcctgaatgatccaagagccttagcagcacctgctctcaagatgaattggtggtagaaggctgcaatggctgctccaataaatggtccaacccaaaagatccaatggtcatcccaggccttctgttggttgtacatgacagcagc

SEQ ID NO: 30307 - DNA, 509 bp, Glycine max
  Clone ID: jC-gmst02400046c12d1
gcaattacaacttcctcaagcaacttgaccaaactaaatcacatgaaacagaatgataccaaacactagttgaatgagtaaacttacgggagagacaggtagaaaggggaacaaactgtagttcgcatagcaacataaaattgagtggcaactatttactgcaatcagcaaggcatctatttcaccactcaacatgctgcaaatcaagctacaaaaagaattaagcaaaagttacactatttaagaaaaattcctcttccagcatgccttttgctttagctggtgagagatagcaaagcaaacttcaatctatctttactgatgagaacaagtagtgcacaaagtaaaatgacataaggaagccaacggttccagttgacaacatgattgcaattgccatgagcagggaatagccgagataaagtatagctgagacaggtccactcaaactctgcaggtcgaaaaccaagtagttaatggagtacaggaagacataaagagcatcagag

SEQ ID NO: 30308 - DNA, 449 bp, Glycine max
  Clone ID: jC-gmst02400046d11d1
agttgacaaaccagtagagtatttatctgcttttcacatactatcatacagtacattccacaactataagtggcattctttcacactactacacatgacacatctataatcatatgtaacatacaagaccatataacagtctatttccccccacaagtattattactcaagtgattacaaatcacttgtgaagtcttgagcacatgatcaaggtattccaatgatggggaagaaaggaacataatagctacttggtgccaatccccactctggaggcagagggagatccacagttttggatgaaccaacctttttcccagccttgcattttgtgtttagggggcatgatgtcctgaaactaaggggagtggagatggtgtaactgttttgctctttgcccttaataatttgggataccctggttttcccttgagacataaagctgaact

SEQ ID NO: 30309 - DNA, 460 bp, Glycine max
  Clone ID: jC-gmst02400046d12d1
caggaaaaatacagaagtttgaataaacaaattttgagtctacatttccaatttttgcataaacaccttgaccttgtctacataataatccataataaattaattttagcttcccatatttatccactccatacaaatgcaaccacgttcatggagttggtcagttgggtagggagagaaccataaaaaacgtgagattgaatcatgttaaacttgggtgtataggctgtcctttatttaactcagcccattactaaagcttggtacagcaattcaaaatttatatcacccttgttaaacaagattaatttatttcgattatgggaagctagaagagaatattttttgaaaagacacatcacaaacaagggaggcctcagggggaaccaatcccctttttaatgagcatatcatacaccctgtcaattttcatggcatccatcttgaacaattgatgagc

SEQ ID NO: 30310 - DNA, 506 bp, Glycine max
  Clone ID: jC-gmst02400046e04d1
agtttccgtcatcactgtatgacgtcctccttctttgggggggggggggggcaaaagaagccgggtatccgggtaagggctaggtaggggctagatagtaaagtcatggtgttaagtttaatgtgtgtatgcgaacacgcgaggatacagaaacaaagaaaaagagtaacgattagaggctgctatgaatattagggcagagtatggaaaagtaggagaggttgagcatcacggcgaaataaagcttattaaaatattttacgatacaaattgggttaacgagcgtcgagcaaggccagacgaagcgacagcaacggaaacaatgcataatgttcagcagtaaggcaggggttagaacgtagcacaagtaaaacccgatgaaaaaccacggcgaaaagcaagataaaaattgggggttgggttaggggttgggcaagaaaagcaggagcataaggtgagattagtacaaggtacacggaccgtgttagagcacacgaggggtggga

SEQ ID NO: 30311 - DNA, 361 bp, Glycine max
  Clone ID: jC-gmst02400046e05d1
agtttcccgtcatcactgtatgacgtcctccttctttgggggggggggggggattaaataggctagaagagaggcagcggagtagtggagataaggacccgtgtaaacaggaagaacgtggagtgaatggctcgattaaaaaccttgtggaactaatttgattatgttaagatggggtaacttgataagcggcgaatcgcgcagaaaaagtgtatgtgattggaattgcagggtgcgatcaacgtgggcagcgtaaacgtagtattcgtacagcgtggtcgaacgatatttggtgtagcagcagttttcagaggacaggacttaccacgaatagtaaaagtgcccggttatatacaaaggt

SEQ ID NO: 30312 - DNA, 515 bp, Glycine max
  Clone ID: jC-gmst02400046e11d1
agacaatgacattgcagctctataatatccggaaaactcgaatccctcgtgttgtcatacgtaaaattgtatcaaaacaactctgatgaattgttctgctagcattaacataattgatgacaattccatactaaataaaaaattatataataccattcccataacaaatcgttaccgcaactttatccatttatatgtctgcagcaagaaagttaccggacagtgcaaccttctcgcccaatttgaaggcaggcagtcccttgtaagggcaggtactgcacctgaaagcatcccctagcccacaattgccacaagctgattgaggattatcaatctgttctgttgtcaatcctaacttcaatactttttcctcttcttcagccctcccacaggtgcaatttttgcaggcttttcttgtgctcccaatttcacaatcaccaggtggaagctggggtttctttaaatcttcctcagtcaaaagactatcttcatcaatcagatctgaatcaaaatca

SEQ ID NO: 30313 - DNA, 587 bp, Glycine max
  unsure (1)..(587): unsure at all n locations
  Clone ID: jC-gmst02400046f02d1
agtttccgtcatcactgtatgacgtcctccttctttggggggggggggggggcaacaatttttaggggggcgtgcagaatataaaatagggataaaggtaatgacgaacccagaacatcatgaaaagcctatgtaaatctaaaccggcgagaaagtataaagtagaagaaaatatatgccaataactaaactggcgtaaaaccgctaagacaaggggagcttataatggccaaaaggcacacgggcgccattagaatgatttaacggcattagtttataaatgacnagaggggttagagcacgaatgaacgtggtacccgcgtgcgtgtttattacaacgttgatgaggggagagaagtaggggacggcctatcgtggggcaatatagtaacatttagtgtacgaccagtacgggtggctaatgtgatggcaaggttagttactgtttgtggcaagtgcgtgggccagtggctagaaagtagtggctgttgtatttggcagcgcngtacccgattatgtaaggaaaaaaaggtgctggggacccataggtttggacgtacagatgaaaagagaaatctagaatctat

SEQ ID NO: 30314 - DNA, 472 bp, Glycine max
  Clone ID: jC-gmst02400046f03d1
agtttccgtcatcactgtatgacgtcctccttctttgggggggggggggggggcagaaggagagagtactgttataaaggcagaataaatacgacgaataggaagcccataagacacggtaatataaattaaatggaggggtaaaccgtaggatacatttaggatatagtatagggtggtggaaaagcgggcccaaaagttaatagtcaatagtatatacaaagtactgttactggaaaattttttatcacatctaatattaaagcgtacacggcatgttggtgccagcgcgacgtagcacccgttggttagttgtgaatgcgggcttagtaaaaagaagttgtggtgccgttcgccccaggttggttggcgttgccagtggtcttggtatagcggtaagcgcgcgctcaatgtgttattgcacccgaagacgtggatttcgaacccgtggcatcaacagtgctagattatt

SEQ ID NO: 30315 - DNA, 481 bp, Glycine max
  unsure (1)..(481): unsure at all n locations
  Clone ID: jC-gmst02400046f04d1
agtttccgtcatcactgtatgacgtcctccttctttgggggggggggggggggcagcaaagcttcagacgctagcttacgcgaccacaattgggaatagaatgtcaagataggagataatctaagatggaaaaagaaaaaaagaacctacttgtgtatgttgtgcgatagagataaaggtatttggaggggaaaagacgcgccgagcgacgtctcaatgtatgttaagcgctgcggtggcgttaccagggagtagcaacgcgtaaagcagcggtgcgcgtgctaatcgagaagcgaggcgtgacttttctggtagcttggtggtatggccaatagcatgaaagccaaggtgcaggcaagcgtaaaatttagtaaccccncgttggttagtaaantgcagagcacaagtaaagcagtaaaggcgtaggtgacaggcgctactatagtgctggtggggaaatgagtgttcacggctaaaaggt

SEQ ID NO: 30316 - DNA, 79 bp, Glycine max
  Clone ID: jC-gmst02400046f05a1
aaaaaaaaaaaaaaaaaaaaaaaaaaaaaaaaaaaaaaaaaaaaaaaaaaaaaaaaaaaaaaaaaaaaaaaaaaaaagg

SEQ ID NO: 30317 - DNA, 466 bp, Glycine max
  Clone ID: jC-gmst02400046f12d1
aaaatcagataaaccgcccttgtatatgacacttaattacattaacgagtttgggtactaaggatgcgagtaaaactatgtacaaggtaggattgttgaaaaatgcaaggccgatacaccccctatcaccttgcacaagggacaataacatactactatattaggagtgtataacagggaaggcatatatatatactactactactactactaattccacgacacgggccaaaattggatggatactcattcatgccatccatattcagattccaaacacaagcagtcacttgataaagcagtcagattcagaattagaattttcttcatcaggtcatattctccaactggatggctttatgacagtcacctactttccactccagtccggaatctggaagctatggaaatcaaatctacaaattatcaggtatctgaagctgaattattgagctgacacttgatt

SEQ ID NO: 30318 - DNA, 529 bp, Glycine max
  Clone ID: jC-gmst02400046g02d1
agtttccgtcatcactgtatgacgtcctccttctttgggggggggggaggggggggagaccaatataacctgtataaatctgcaggaaggaatagccaaaatgataggcccacgggatctaaatgaaccgagatacgccgtattaatccgtaatatggaagaaataatataaacgcacagactcttaagcaggtgataattatgattaaaaaggaaggtaaatatgcctactactacagaacggggtacgaggtgacaatatataacacgagttagggatactagctggagcgcacacaacctaattgatcgaacaaaggtattccactacgtcatattgcgtgttcaagtaccccacattgtagtaacgaaaagttacgtacaacaagacgtacggccaacccgcgcatagataatatgagagtacttataacgtacaagattagcaatagcatccacgtatcaccagtatcttaaggtataacactggccagttgtgtgttgcacgactgaaagtgctgataatatg

SEQ ID NO: 30319 - DNA, 459 bp, Glycine max
  Clone ID: jC-gmst02400046g11d1
cagagcgaaagtaatttatactattcgatttcgatttcttggttgccaattgccgtgctttacaatatctaaacatttctcacaccccttagactacagaaaaaaataaaattacacaactttactcattgccttgcttctttctattcagactcagagtccatgtggcccattgctttaaaccctctgggtctttttttttctcctacctttatggatatcttcttctccctaacttcatatggttccagagtaagatcgcacaggcatgttcctggactaacgagatagagggttcgctgtatgaatatggctctctttttgggcctctgtggaagctttgaacccttcaacagcagaaaatcttcttccttctccttgatggtcaaggcaatcacgaactttggggggcacaccggcggagccactgcaccactgccggacggtgagccaccaccc

SEQ ID NO: 30320 - DNA, 497 bp, Glycine max
  Clone ID: jC-gmst02400046g12d1
ggcataattcacatgctacattccatcgaagccgctccattaatgtaaaatatagattacagcagaagcaacatccggtgagttaccgacatattttcatacaactcttacaactacagaacaaactcgcctaaggcgtaaatgacaaggaaaaaaaattgaatgattcaaagtcacttatagttacatcccccaaaagttctcaatagcagatcagaataatcaatgtacccactatgaaaatccaataagaataacacagggcaacagtaaattcaatactacattcatcagttagaccagacatgaactagcccaagcctgttgcctgtatagatttcattgcgctcttcatcatagaagagagcagtaatgtcttccaaagcttctgcaactgtgctcctcatcttggagccatgttttctcttctttgaattacaacaatagctacgagaaggtttgtcactgcaactgcaattgttatccactggaaagct

SEQ ID NO: 30321 - DNA, 393 bp, Glycine max; identical to SEQ ID NO: 8055
  Clone ID: jC-gmst02400046h02a1

SEQ ID NO: 30322 - DNA, 465 bp, Glycine max
  Clone ID: jC-gmst02400046h12d1
ggaaggaaacaaaatttaattcatatattttttctcctaagacatattatcacttttacataattaccattactccaagtccaggccatgagcttgaatttattttcacactctatagttagaaattttggggaaaggaactaagccaagtttgtttaagctgcaacttggtccatgtttcagtttcttcaattctgcaatgatcaaaacttcaccaaaacttctatatatatatattgggtcaatcatcatgcatggctacaccttgctatctgcttctgttacatgttcggacaatttctctgacagaaggggttgttccaaatctatcctactacttatatcatgatcatcttgtaagtttgatgattgtggtgccgcctctggtttaatctcagcaaactctttggctttaccccaaagcacaatatataaaccagcaataactccaacaggacctaccaa

SEQ ID NO: 30323 - DNA, 466 bp, Glycine max
  Clone ID: jC-gmst02400047a01d1
ccagaaaaaaaaagatagttaaaaataaaataaatactgaagtaaaaaatgtaaattgtaaaattattttacccacaatacatgaaaattaaactcctgaatatatacattgcacaaactacacagatgttcatttatgttaacaagatagaatataaatagacttgaagcagacaagattcatggcttccacaacttcattgtgcagtcttcactaaaagttgcaacaagattcctatggggatgatgagtgacacctataactttcttctcgtggaccttcattagatgctccaatttgccagatagatagctgaagcagtatatattcctatcttcaccaacacaggaaatccattctcctttaggtgaaacacatgctgcaacaaagtttccgccttttcttttaccagatgagaagctcttcacaacctgtcctttgagtgtcatgatatatatggatgac

SEQ ID NO: 30324 - DNA, 448 bp, Glycine max
  Clone ID: jC-gmst02400047a03d1
agacaaaacctggtggcacattgaattagtatctccattacagttatgggcgttgcatccaaacccaatagaaagctcagagtattacacatcccaaaaagtaaaatcctactacagtttagcaccgagatgtcctaaaccacattacatgaacacaaattcgagttgtcttggaagaggaccaagaaataaaagctagataatgttcaaccctgcatccagaaataccaatccgcaagactcccgtctcccaaaggcattaagccttattggcaatgttgttggaaagccagtccagaccttcgtaaaggccctccccagaggttgcacaggtgctctgaatgtaccagtgacgctgtctcagagagtggagacccaacttgtcagtaatctcagcagcattcattgcattaagaagatcttgtttgtttgcaaacacaagcaatac

SEQ ID NO: 30325 - DNA, 522 bp, Glycine max
  unsure (1)..(522): unsure at all n locations
  Clone ID: jC-gmst02400047a05d1
ataaaacaatctgatatcatttccattattcttttttttctgacacaaattcaatacatctgaaaccactataagatgtgttagcgaggagctaacactcatccacagatttattaaaccactacaagatgtgttagtgaggagctaacactcatccatataaattaaaccactataagatatgtgttagcgaggagctaacacacattcacaaatttattctcactgataggaaggcaagaaaaccttataatttggcactgatcttccttgttggtcaactaggcattgaccaacatttggtagtgccattgtcctacacacttaattttacaagtcttcttcacaccaactttgtattatccttttttgttttctatgcccaatgcaatgcactctagaataaaatatatcactgactggaacagaagcctaagaatcccatgaactcatggttgtttatcattngaatgctgttctcaatgcccaccacacccatggtgagggcgctaagcaaaatga

SEQ ID NO: 30326 - DNA, 477 bp, Glycine max
  Clone ID: jC-gmst02400047a06d1
aagcaaaaccctcaagccaaaactccttcaatagcgtgatattagaaaatatacaaaatggcatatgatcacaaataccaggtataggcatgagtataagcaaaataaacgagaataaatcttgaagttcctgcccccaatacttttcaaagcaaagtgataggataccatactgccaaagataactacctcaacaactggtctatagatgggttttatatgaactaagtaaatctagtagtcttcatcactgtattcttcttcatcatcgtcgtcatcttcatcttccatattagaatgcatcatcattgataacaaggcagcctccataggattgaaatcttcatcaccgaaatcttcgggaccaaaatcatccacaccagaagccagcacttctgacaatgcagccatctgaaaaatatccaagtcctcctcatcagaatcaaaaggacctaaacaaggacctgaatcaccagc

SEQ ID NO: 30327 - DNA, 507 bp, Glycine max
  Clone ID: jC-gmst02400047b01d1
attattattattattattattatataggaaaggagggtgacaaattacagtaatggcccatgccccatgccccatttacggaaccagcacctaacattaacaatcccacccgtttttatgatacacattcattattaatattattccttatcaccatcatatggtagtgattacaatttctcgacagactcaaacccagaagaagaagaagaagaaatcctcatcaaatctcagagatgaagcatctcaatcaatactgcaatatgtctgcagaagccataataggctggttcagataccccatattcaacgggttgaagttgaagaagctattattattattattcattggctcaacgaaggtgctcgatgctgctgctccaaaacccgccacagtggtggtggcattcaacacgtcaacgatctcgttcagagactccaacctgtgactcaactcacccacctgagccctaagcaccgagttctcagcctcaacgcttaagtact

SEQ ID NO: 30328 - DNA, 207 bp, Glycine max
  Clone ID: jC-gmst02400047b02d1
gggacaaaaaatcatttgatatttcacacattcataacaaacgtaggggggatattaaagaactattattaatgggacactattgagttcaacacaaaccgaacttatttttaagggacatttttccagacccataaaacatcaaagttctttaaatgttttgggaacacatccaaaattccccaccgggcttaaaaccccccccgg

SEQ ID NO: 30329 - DNA, 516 bp, Glycine max
  Clone ID: jC-gmst02400047b04d1
aaataataaaaactatcaaattctgatttttattcatatctcaaagccaaagaggtgaaatctagtgtgcagtggcaagtacataaactggtttaacattattacaacggtttaagcttgcaaattaaacatcattacatcgtttttctcaatttgcaaattccagattaaaaaaaagaagtggttgatggtcagcttacaaagagtggttctggctccacttttcgtctgatccaattttctggtgcccatttgcagccaactgtatccaccacatgcaagctgtaggcatgtcttgatttttgagactggttttcaaagctttggtgtataagatccccatggatgacaaccaatgacccagcttttacttcaataggaacaaaatccttttgatcataagatggtgatggttgatcgaatttgacaccatctttatctcttaagaaccttctaactagcccatttttatgagatccaggaattgcccaaaggcaaccatttaatatgtttgca

SEQ ID NO: 30330 - DNA, 276 bp, Glycine max
  Clone ID: jC-gmst02400047b07d1
gagggtgacaaaatcattgactttagattctcaaggatgaaatgaagacactttatctttaaaatcacacgtgagatcctctatacagaaaaaagaacagccacttgctcaaaagttacaattaggcatgcctgggtatattctgtattcctaatcttgcgaacagatagcatgcaaactggataaaagagcaaaacggaacacttgggaaatatgatcactcacattttccagcaagggaatagtcccccacagggaaaataacaggctgaccaa

SEQ ID NO: 30331 - DNA, 478 bp, Glycine max
  Clone ID: jC-gmst02400047c01d1
aatatcaaaatatgcaactactagattattgaaatttaatatatacaaaaaagttattgaaagtaataactcaaacaagaattgctcctattcccaccctatacatatatataagatgaaagcagtaccaccagagtgagaacatcctaccattctttgacaatgtaacaaaagtcttacaatctattcgaaaaatcatatcgccagctgttttcgcttgtagtatccagctatcactttaaaacattctaattgataaaactataaacagagaatatttcctttaatttcctgtatgctgcaacgcaggggactgagtaaaaaatggaataaacccagaaaactcggaaaacgaaacaatcaaaatacagccataagctcgggttgctatcatatcaaactcatgactttgtaaccttgcttctcaaacactacgcagtatatttgaactcccacgttgatgtcttattcaatggga

SEQ ID NO: 30332 - DNA, 444 bp, Glycine max
  Clone ID: jC-gmst02400047c03d1
attgtagaaaatctcccatacaaatccaatatactcacctcttacaatgagaataagaaataataaaaacatgtgtatttttatattatgaaagttaatacatgttatgattggaagacgacttttcaccaatggatcgtacaacactagtctaacagctaaaaaatccctccagcttatttcagatgcatgatttcccaatttgaagcatggcaaagttcttatagtcagacaaaacttcctcactttgtgtagaagaacatcttcccatgggtgacggtaaagtggttgcttcaatcgcttttggtcaaaagtgtgcccaatcaaaccattgcagggtgccagcccaaaaaagcctttaaaatagccaatcttcacattttcttaattttttggttggtggacaagtcacttgccaccaaaaagatccaggaaaagagatgc

SEQ ID NO: 30333 - DNA, 468 bp, Glycine max
  Clone ID: jC-gmst02400047c06d1
gaaataaaaagacgattatatatgatagcagtcagctagaatgataagaattgcacatatagcgaagctcgaaaacacaagcagcatccaaattacaacacataagcataaaagcgaatgcaaaagaaggatttggataaaaagtaggcgtaggagagagtgaaattgaggtgtaactctggaatctaggcctggggctgggactcgaagggaatggaaagctcatcgggctggggctcgggcctgttggaggacctcttgggaacggggagtgcgagaaaggccttggtcttgctgatgggcctggtcttctggagctggacgatgtcgccgacattgaattggttatcgggatcgtgggcctggtacttcttcttcttcctcacgcgcctcttgtactttgggtgaggggccagccgcaccaccttcactggcaccgtcttgtcgttcgtggagcacaccactttt

SEQ ID NO: 30334 - DNA, 288 bp, Glycine max
  Clone ID: jC-gmst02400047c12d1
atatatacctatcatatgtatgtatctatgactctaaaaaaaaggtaaccattaccttaacctagaacttgcaagtgcggaacacttgaaccagtttaatggcaagatgttggccccgatactataagggtgattgcttcaacacaaaaactccgtatgcttcaagttacgtacctccttattgtgaagatcagtaactacaaagggcatttatgattatagctataggcctttaacgcctgaaattctagcgcatgggcagcttgttcagataggtccagatttgca

SEQ ID NO: 30335 - DNA, 528 bp, Glycine max
  Clone ID: jC-gmst02400047d01d1
aacaatcacaagggaaatccctacattttatctaaacttgataattcagtattacttgcaaattcacacagccaattcaaccaaaaaaaaaaaaaaaactctcgaactacataattgtctattgatgacaaagatatctgactaactaaaaaagataataaggtcatatacacgaatttatagaaagccgattctcaaaaatgtgaacaatcacctgctcctattattctttctctggagccttgtaaaaaatgtcaatgctgtatgagaagaaaaagtgaacatatgtaaagaaagcagtgaccaacattcaacaccattttagttagatagagtaatttcatgcagtccagctccgggaggcagaattctaaatcccggaagttgcagtgtaatcaaatgaataaaatgccttgagttaaactacttccaccaatgagctcattcacctatagctcatgcatccaccgtgggataaaaacctgacatgaatggccttccacttcattggaatctgcattgcatgca

SEQ ID NO: 30336 - DNA, 361 bp, Glycine max
  Clone ID: jC-gmst02400047d02d1
aacaatcacaagggaaatccctacattttatctaaacttgataattcagtattacttgcaaattcacacagccaattcaaccaaaaaaaaaaaaaaaactctcgcactacccaatcgtttattgatgacaaagatatctggctaactaaaaaagataataaggccatatacactaatttatagagggccgattctcaaaaatgtgaacaatcacctgctcctattattctttgtctggagccttgtgaaagatgtccatgctgtatgagaagaaaaagtgaacatatgtaaagaaagccgttgccaacattcaacaccattttagttagatagagcatatttatgcctttcagcttcggga

SEQ ID NO: 30337 - DNA, 250 bp, Glycine max
  Clone ID: jC-gmst02400047d04d1
ggttggggtttggtttgttttttacaacaaatttcaacatgaaaaatgaaacaacaggagctcgccgaggcgccagcaccggtagagagaaaaaaaaaaaacaatggcccggaacaaacataaggggggggaaggaccaacacaaaaaaagggggggggagaaaaaaaaaaaaaaaacaaggcggggcacaaccacaaccaaaacaaagaagctcgacgcaggggcctcccaggcatggcccacacccac

SEQ ID NO: 30338 - DNA, 464 bp, Glycine max
  Clone ID: jC-gmst02400047d06d1
gtacaatgtttatagttgttttacatgtaattctttacagcgccacaccaaggaacaaaatgtccacatgatatataaaggttgaaaggtagttgagttctggcaacgttacgaatatgtgaaataacatataatacattcagtggaacttgagactggtcaagatgttgttgggcacggggtcagccaaatgatctaggaggttttggtatgggccaacacctgtgacaagagcttgaacagagtaacccaagattgccagcatagccaaccttgcattcttcactttcttgagcttcaaatcctataaggacttctcatccttacgaaagcctagtgggttgaagaaaggtcctcctgtataagctgtctcaccagatcctggaagacccttttctagacctatgaagtattgattgcccatagagcctgcccaggcccacacttggaatcttgtgtgctct

SEQ ID NO: 30339 - DNA, 584 bp, Glycine max
  Clone ID: jC-gmst02400047e01d1
atcaattgatttctttatacgctcataccggggttaacaaagaacaaaccaagaaaagaataactgaatcaatgaggctgattttcttatttcacctcgtatgaccagtttgcaaaccgcagtgtggagaattatatcaaataatgagagaacagaagaaacttaaagttctttgcagaactacaccattcaaagttgctgcaacttatgaatatgttccaataatgaagtagccttccgtttggccctctctgtgccatttcgagcaagttcagagagaggtatgagagcaccaagtctacttatacaagcaagattatctgcatccctcttgcacaaggcaagtagaatagcagctgcattctctttattgcgaggcaatccggtcctcaaaagatctatcaaaactggtatagtgctggcttttactatggcaacttttgcctcttggtggcttgcaagaactgacattatcgttagggcttcatcaaccatcgatttgcttgaatctgtaagcatctttcacaatgctgtgatgatacctgccctaatggccctgcccttgttcccttgataaatgcata

SEQ ID NO: 30340 - DNA, 525 bp, Glycine max
  Clone ID: jC-gmst02400047e02d1
agaattcaacatcattctgtgattcaataaaattagtttacgaacccttgtaaacaaagtactcatcttagtatgcaacaattttgatctctaaggaacttattttgttttgtaaattattcttccaagaatcctatatataattttacaattgagtttcacccctctgtagtatctatatatcccccaaataataaagaaattctaaaaacactagctgaatatataaccaagggatgaagaaaaggatcaatttgtatggggccttcaccttcatttggtgagagctgcatataggagctggttccaagtgtccggtaatcctggtaggcaccagtggctgcagtcattgcctgcatggtccccactataagcagaagggtgagcatccttccttaattgtgagaggagtgttatatcaagtagataaactggagtactcatcttccttaacacattgttcaatatggtagttgctggaggtagacctgctggatatgttgatccagacaatggttgaagctc

SEQ ID NO: 30341 - DNA, 429 bp, Glycine max
  Clone ID: jC-gmst02400047e04d1
gattctggaacagcacccccgtctttttttaacttagcaacaaggacccacatatttgctaaatcgttctccaaggcttcttctcttctcttggcctcttcagtttttttccggtactgttcttccacaaattccttctcggctaatgcagcttccagagctgcctctcgttgtttcctagcctgtagttctatctttaaatcatcagcatcaagactccttgactcaaaatcatctacaccagttcctgaaatttcattagcacggctagaaatcctccccttccttccagctcttggatcattgtacttgcggttgacaccattaaccgtttgcacaacagcactacgagagttgaccaagtctcgcgcggccatcaattctttttccaactttgcattctgcaatgaaagttttgtcactttcccc

SEQ ID NO: 30342 - DNA, 158 bp, Glycine max
  Clone ID: jC-gmst02400047e06d1
agtaaaatattagtactagatctatctattctaggagaattattgttgaagaaaaaagaagacagcacaatcttgctaggctaacatacagtatatatactaagtccaaaacaagacaacacatatatgaagacacatgggtgtctaaagagtgcatc

SEQ ID NO: 30343 - DNA, 517 bp, Glycine max
  Clone ID: jC-gmst02400047f02d1
aaaggtgaaatttatcaaaataagctcatgataaactctaacttaacaagcgcctaattaaattgttttgcccaagccctcctaacagctaactcaggaatcagttgacatctcaaattcactaactatccacaaggaattaaacatcaagccatgaaaaacaagaaagaaatttgtgataaacagtgatttcatacctccaccaccactcatgatcctcagcagcaagctggaagtatgtcaatgccacagtgatgaaagcagtaacaatcaagagaatgatgaagacaatgaacaggatgctgtagatggtgtaaattctgtggccccaaacactggcaaatatatagtaaagttcaatgtatatagcactgaaaggcaaaaatcctgccatcgccatctgaggaattgttccacgataccaaggcagaggtggaatctcccttggatatttagttgtccgaacaggagcttgaaattcagccttgctattcttcccagcaatccctcccaatac

SEQ ID NO: 30344 - DNA, 501 bp, Glycine max
  Clone ID: jC-gmst02400047f03d1
ggtattgaaggagatgcttttgatgattaaactgagcaatgaagatgagaccgctcaatctttcactaataactgcaagagtaaattaaaactctcgcaaaacattgatatcgttacaaccactgatccaagtgacccttattttagaatacagttacacgcacaagtgcacaacacaagaccataggtaaaaacataaatggcatgaacaatgagtcaaagcaatggcagaacaataatattaacgccaccaccacttgtaacagtgcactcagttcctctgcagtagcagagaaattagacatagcccctgctcttcaaactctccactgcatccttgatgatttgctcaacaggagtgaattctagacctaaatcaatcagcttctttgatgcatcctttccacttgctctcaacaaccctggttgggtatcctttggcaacttagccacatcgtattcagggtataactcagcaaccttgtccacaagatcactaaa

SEQ ID NO: 30345 - DNA, 401 bp, Glycine max
  Clone ID: jC-gmst02400047f04d1
caatattagttgggctacttttataatatttatgcaagaaaagttaatgacacaagttttacatatcaaattaataaaaaataagattcaaaagtgtgacccataaccgacaaatcaatgtttggaaatgaccataaaagacataaaactaaattgatttttttaaaagataaaaaataaacaaaatataaacacaaaagactaaaagtgcatttttgtcattataaaacaatactgtacatagtatataggatataattgccttcgaactcgagaaaaagttcaataggggaaaaatgtacatttgaaacactgtattggtggctatagtatttgtccactttgaaaaatccatgaccttgaaagtatggaaacatcttaacatgtgtggtctttttctt

SEQ ID NO: 30346 - DNA, 489 bp, Glycine max
  Clone ID: jC-gmst02400047f05d1
gatcatcaacaaagacacatgtattccaatcaatcaattacaatacaaaagataaaagtaaaaccgtgtctgtggccgcaaagtaaaaaaaaaaaaataataatggaaaaactgtctgcaaagccagtgtcaagtgtcacccttgagcaacgacagaccacatgtatataacaccccttttttcctttttcttcattttggggtaacacttccatcaattccactatcctctacacccctttttcttatcctctttgagcagtgcagtgcaaaaccaaatatgggaaacgaacaaagaatgaatagcacaagatgagtagaacctagtaaacttcaccagccatattgctagaggggattctttgtcgtttctccacatatgcagaaggaaaccatcctgctttgccattgcattcgccttctgaccatcctgattggctcacctttcgcacaacaacaaaatcacccttagaaaagctcagttccttt

SEQ ID NO: 30347 - DNA, 406 bp, Glycine max
  Clone ID: jC-gmst02400047f06d1
aatatcgcaatcgctgaacaatgttatttaacaaaaggatcgaccacaaataaaaacaacccaactccaatcatcatcaccacgtccagcaaaatacattcaaaagctatctaaaaatttgaggaacccacagtggcgcattagaaaccatgaccatagaatttatgagagaaatattatgggcaccgtgcctctccaacaatccccaaaacgttgcttaggcttcagcaaacccaagctcagaaagcttttggtgagcctcagcgtaatcagcgaagaaggcatcttcgtccgatgcatattctcaacaagagggcggaacacagggtcagacaaaagtgccttgtcagaaggtagctgaaggaggccttttttctcaccactcaacaactccttgaagtatgag

SEQ ID NO: 30348 - DNA, 520 bp, Glycine max
  Clone ID: jC-gmst02400047g02d1
gtatgtcactctagaacatcattatttctcaatttatatagctctttaaccataattccctggatacaacatgtatactagtgtatacaccatattcaaagatagctaataaatacttgactgtataattaatatcacacaaacgtaaagtggcaatatatagtgtaaatatatataagcttaatttatacacagaaaccatgagtataaagcatctttatacaaaatattcaacaagaatttactttattaccacatcattatagtaaaatgtcatgataaagtggtgaaattctattgaatgcttgtgtcaagatgtttttataggatcaaagtgtgtatataaattaaactatattttttaatcaatatatatatattgttcacacattttatatatatatataagaggtgcttaacaagttggataggcaataccacaagaactaacggtttttttggcattaggagagttaacatactgcttcaagctagggttttgggtagccacagaagcatg

SEQ ID NO: 30349 - DNA, 523 bp, Glycine max
  Clone ID: jC-gmst02400047g03d1
acagaaatgtttggcattctttattacatggccctcataattgtctaaactgatttttaacttgtaaatcacagtaagtcggtgcatatagagcaaataaaagtgtttataaccgtataacgattatataatattacaaaatgatttgataagccactcataccagaaatgagattcatataattctgctcatgtaagttatcactcatttcaaatccagatgaatagcacttagcacgtccatgaactgaaaagggaacattttgtccaagctattatgagagtgcccaatattacaggtgatatttcatttaaattatttctgtaacgtgtggaagtttataaacctggaggatgcactagctataatttcatctgcccagaaagtcctttaaatgaaccataaagagcctgtgatcttctaaaagtaaagatattgtctattttagccaagtgtggttctgaggcttccgtttgtattcagatgaatgacggttcccatgtactcgtacacttaaagttt

SEQ ID NO: 30350 - DNA, 421 bp, Glycine max
  Clone ID: jC-gmst02400047g04d1
ataacatgaactgttcatttacaaaattaacttcacatggaaaaccagatacagcataattcaagtcaatatacaattatacatccaccaacataatatcagcgtgtttggattaacagtgagtacccaaaaatcacgcaaaatacatgaaaatctgaaagcaacaatgagttgttatgctttcaatgggaaaaagaaataatcaatccaaccttattgtgctagtattccagacacacactacaacaactacaagaattattagtatcggtagagcttggattctaggcgtaagtcaggtttccaccattggtgaatcccatgagcttctttgaaatcctttgaaggagtatgattaactggcagagaagctgaaggaatgaggtgcaggggttcatcagattccttccccaacacaccc

SEQ ID NO: 30351 - DNA, 529 bp, Glycine max
  Clone ID: jC-gmst02400047g05d1
accaaacaacaacattaccaatatttatgtacggatatttaatcatacatcttacaacaatcacctccttagaatttctaaagagagcatcttaagaactggagtctatggccatattttagaacttccataaatatatgagccaaatccccaaaaggtgatcactagggagaggatcttgaaaccactcatagggtcctttagcagtataacagctgcaatgcttggtatgggtgttcttactgcattaagcacacctgctagcacagtagagcccaagaaaattacagcagtgccccccagaacccccagctgaaaagtgattgcaccccaaatgataacaagataataagcacttctaccacctttgaaagtggtagcctcatgtgccatcccttggaaatcaccactcataatcatccctacagtggtaaacagaaatgcaaacagagaaaccatgacttgctgctccagaacaacgatgaaggatcttcttttcagcaacttcacatagacaaagctcgagaga

SEQ ID NO: 30352 - DNA, 372 bp, Glycine max
  Clone ID: jC-gmst02400047h02d1
aaaaccaaccaacctttttgggggggattttggaaccaaccaaattttaatttcccaaaaaattttccggaaaaaaattttttttttggggaaacttttgggaaacccttatcacagggggggagttttggggggtgccaaaaataaaaaaaaaattttggatttcccgggttttccccaccccgggggaaaatttggcctggacccaaggggggggggggggaaacaaattttttttacccaagagggtcagcgggggggtaaaaaagaacactggatatgggggggggggggataaagggggattggatgcctttccccagattttttgaaaaccaactggttgaaaaaagcccattggaattccctttt

SEQ ID NO: 30353 - DNA, 534 bp, Glycine max
  Clone ID: jC-gmst02400047h03d1
ataacatgaactgttcatttacaaaattaacttcacatggaaaaccagatacagcataattcaagtcaatatacaattatacatccaccaacataatatcagcgtgtttggattaacagtgagtacccaaaaatcacgcaaaatacatgaaaatctgaaagcaacaatgagttgttatgctttcaatgggaaaaagaaataatcaatccaaccttattgtgctagtattccagacacacactacaacaactacaagaattattagtatcggtagagcttggattctaggcgtaagtcaggtttccaccattggtgaatcccatgagcttctttgaaatcctttgaaggagtatgattaactgtcagagaagctgaaggaatgaggtgcaggggttcatcagattccttccccaacacacccatcagtagacaattaagggaagtttgagtggctaacttttcaatgtttcctgcaccaatctcctacatttttcttctgtgctcaaagtatccaacatactcagagcagatatg

SEQ ID NO: 30354 - DNA, 493 bp, Glycine max
  Clone ID: jC-gmst02400047h04d1
gaaagaactaattaatgaatatacaatgtataaattttaaattgaataataatacaaataaacaatttctcttgagaaaatctcggatggtggcgccttatttttttttcgattattataattatatttccagcaccgaaaaaggaactgcaattattattcaagttggttgttgcaacattgattgctgttcgccaaaagactcgtccgaaacaacaatagcgtccgcatcccaccaagtatccgcgtcagattccgttacgctctctaacggcgtgctgacctttctcatatccccgaccgtcacgccgtaacgcccgtcatctctgacgtagaccttctggacgccaccagattccacgcgcagggtctttcccacggtgggaccccactccgccaccaccgtgggcttccgccgccgcagccgcgtgtcccagatctccagcgccagattcccgcacgcgccttcccccgccgagacaaccaccgaggg

SEQ ID NO: 30355 - DNA, 537 bp, Glycine max
  Clone ID: jC-gmst02400047h07d1
ccaaattaattatttcatctgaattcatttgtaaaagctaaacttgctccagaaactacaagaggacaaccattttgtgcattaaaatcacattatattaaatcaaattagatcagatctacaacccaaaatattataaaaatgacaataaattaagaacaaatccaagaaactaaatcaagggaaatattttagcctgggggcaagcactatcaattaatctgtgtatgtgctattgagagctttatgttgacaaatctgccacattgattgcgtgcttatggttttgggattcaacgtcgatggttaagccattttcaaggtgatgctgctcctttaccagtgaagcatactccactttttcaataccatatcttgtgacatgaaccaagtagaaagacatcacgaaaatggtgactaaaatcaatagccagctgaatagaatgtcaccaaggattagcacgatgaagggcatcatatcattgatgtgacatatattcacgaagtgatgaccaactttggctgaaccctgagtca

SEQ ID NO: 30356 - DNA, 486 bp, Glycine max
  Clone ID: jC-gmst02400048f01a1
gtctcggaattcggctcgagcacaacacactctgtgaaaaagggggagtttcttattccttctagacgctgccattgatcggcgatttctgatacatggcggagcatcacgaacacgaggaagtgaagggtgagtccttgttggagatgatctctgggaagatccacgaccacgattgctcagtgtcgttggattccgactgcgacaaaaccagcgccactgatttcttcaagtctaatgttctcaggcttttcggcagagaaaagcccattcatcatgttcttggcggaggaaaaccggctgatgtctttctatggagataccagaggatgtccgcattgacgctgggagtggcgaccgttatatggggtctgtttgaatcgcttgagtaccacctactgactttgagttgccacttcctgatccttgctctggcggagttgagcttgtggtccaatgcatacactgtcatcaacaagagtccac

SEQ ID NO: 30357 - DNA, 336 bp, Glycine max
  Clone ID: jC-gmst02400049a02d1
cattggctggttaacttatgaaaagccatttctgaaaaacaaatccccaacccagtcaaaataaacgaaaaattgaatgggggggtttttccaatgtgagcccgcccccctaaagtttttgaccaattgtttacacacaatatcaaaatctcatctcatctaataattataaaccaagggggaatgggagtttcggaatcacataagcaaaccccagtttccttacttttttgggagccacctttttaagggggggcctcacttttggagatgggactggccctgttcaccacttggggtttgaaacaatgagaagccagcctttgaatggggctt

SEQ ID NO: 30358 - DNA, 516 bp, Glycine max
  Clone ID: jC-gmst02400049a03d1
acaaggcatatgtacaacttttacattcagtgttggccccgttggcatttatgtataattacaaatttacaattctcaagtgatatgtttgtcccaacaacagcatgatagaacaggttaatattgagatagaaggggtaaaactagcgaccattagccaagttaacaccttctctggaaaagatgttagccactgaagatgtccatgtagggctagcattctggttatctgtataatgactttcactatccattgcattagcattcatgttcctcccaagtttctttccaattgacattcctagtttcacagcagtaagaaagccaaatgcaatcagaacaggtctaactgcccagtggtgatcctctacatgttgatactgctctatcattttcggacaatttttaaagttaacgacatcaacctcggagggatcagccaagacagttcttggtgcatccaaaagttcaacatgcctggaaacttgacaactagacattcatttggtaggatcc

SEQ ID NO: 30359 - DNA, 497 bp, Glycine max
  Clone ID: jC-gmst02400049a04d1
aatactctctattcaattactactatcttaggggggatgtactagaaaaacaagtaaatggtcttagtgtcatatttacacaatcttagctttcaagctatcttaaactcaccaaactaggcgtaaaatgtgttacaattctatcgagccattgggagtggatgtatcactttccaatttgcaaccggagtgtaaagctgataaccatgaatccacctgtatctgggaactgcttgaacattcatatcgtaaaccatgacgagttaaaatataaaaggcgtatcgtgtctcatcatcttgttcacgcttaaaacttggcagtttgtctacttcaacaatatcagatagaagcggcgagtcacgaggacttagatctgttcacaacaaatttaagaatagacatgccccctgaagaacaacaaatcgaggaagccaatcatcctacttagtatcatcctataggaggaagttctcctggaagtgctgcccatcttttt

SEQ ID NO: 30360 - DNA, 472 bp, Glycine max
  Clone ID: jC-gmst02400049a10d1
acattgcataattcaaacaaaagaaggggtagtccatatatacagcagcaaaagcaaacataagaaaacaaaaaaggaagccttcatattcatatatgatatatatgataatcatcaacacgacggaacgacgccgtatccagccagagggtccgcatcagtgcgtttcgcgaaccttcctttgattcttggcctcgtttcggcatacgcttttctcgatgcgtaacgaaggggcttctcgaactttcgggtcttcctcttctccctgtacctcaacactctagccttcctatccgccgccgagaactgcgccgtcaccgtcaccggggccactttgctgtagctgcaagtcgatatctccgacatcgtgttcccgtccggcacaactccaactttcattgacgacggagaagatacctcgaaaaataaaaaataaattaaatccaacaagcaaatttagggtaagccgatt

SEQ ID NO: 30361 - DNA, 563 bp, Glycine max
  Clone ID: jC-gmst02400049a12d1
aaaaacacatttcaaacattaaaaaaaaaacacctttagacacgttttctttaacctgacaccattaatcgaactgctataaaagaacttatgtacgttattcgtcggaaaccattttcccggtcaagtcatgcgtcaacatataaataacttttttttgtgacgggaatacataaagaacttgatagatgacaaattgtagatatttgcgaattgcatcattgcaatatatacacaattgaagggccatgattgggactagagagcgagtttgaggtcgagagcaagatcctgttgatccttcttcttaccctttgtggcggctttgatactaggggcacatgatgcaactggatttgcaaaagtcaaaggaggctttctgaaatgaatctcgggggtgaagtcctgaaattaaaaagaaacttgggatttattgtccttggttggtgcggcggggggcttaatttttttcacctggggggggctcttgggtttttttttttcaacatcctttgccgccgatacgcgcggtctgggagctctttacaggggggaaaaccttt

SEQ ID NO: 30362 - DNA, 544 bp, Glycine max
  Clone ID: jC-gmst02400049b03d1
aaacttaattttttttcaaggtatacttgctaatgagcgtggttggaaacacgtcttggatccacgttcaagcagcaaaaccacgtcaaaatgatgcagaagttacatttacttgcttctatatggacggaacatgaatctaattcagacacgcacttagtctacatataaaacaaatcatcaaactgcatgcacccaattgtaagacaagttctggctactagtttgaggaaacaaaataaaaatagacaaatcattcacttccacctgcaggacccacaagaaccccctgagcagacccttccttcctaccagattcatccttcacctcagcatcagccttccttatcctgattttatatttagcctcaaactcagaaatttcctttttcttcttttccaacgcctcgttaagccttgccacaacctcttcgagtccttctttatttcgctgcacagcaggcaagacctctttgatggttctctccacaagcacccctccaatcatacgatagcatcgtctagattggtcaagtggttgaat

SEQ ID NO: 30363 - DNA, 511 bp, Glycine max
  Clone ID: jC-gmst02400049b04d1
ctcatgtagcattattgataaatattattaacgtaccttgtagccaagattcgttactttagattttggaatttgtatatagacacaaacataaaaagaataaaaataatgtttctttatctacatctccatacctgtattctctaaaagtccaaagacaaagacttggaaacaaataaattatacccttttgctgccaacacagaaatagccaatataaagtgaattttattggtaagacaaagtaacaagttccacaaattgcactggagttacctccagatcatcttgcatcagcagaggtaaaagagtctgcaaaaccagtaggcctagctggtatgcttccttcactgtgtgcacttgtatagcttgattctttgccttctgattccttccaatctttcagcaactgaggaagtggttgactgaagtcaatgccagagccataatcaaattcttcatcaacaggtcgccatttctccactaatgcggatagcacactgactgcatg

SEQ ID NO: 30364 - DNA, 477 bp, Glycine max
  Clone ID: jC-gmst02400049b06d1
gggcatgattagaaattaatttaaaacaaaaaataaaaagaaaaagctggctgaggaatcggcgagtcgactcagtgagcagcaaccaccgattttgtagcgagttgccacacggaggtggcaatcaagggcctagtgtgccatcccaacatgagacacccattgttctcttccactctatacccatccccacccccgaaaagcgatagcaacatgctggcctgcttgtacgcgttcgaacccaagtgaaccggagaaaacccggtcgaaccgaaccggttccgccactggttcagcgtctcgtgcctttccacgcggtccattccctcgcacgccaccacgttgcagatttgcttccctaagtaaacctccgacatggccttgtcgttcgggttcacaggcgaaccctccagcgagtcgaatagagttgaataatagtgcagtgactcggtgaaccggtcgacaaaactcagtccg

SEQ ID NO: 30365 - DNA, 518 bp, Glycine max
  Clone ID: jC-gmst02400049b09d1
aagcacaaaagatttggatattttgatattattttattacatacatgcatagatagcctgctctcaaataagtcggcaggaacaaagatagagagattcaacgatcttcaaatttcacatttgccagaaatatataacagaaaagaggggtatgggatatgagttaagttttgatcacattcaactacactatcccaaaccgttactcttaagactttgaacttcacttgtactctaggatcatgttgttctcaggagctaatccaacacaagccctcaggatgttttccagcatagctcgctgctttgacaacgcattcaccactggtgtacccggtggaaccagaggggccttggtcaggtaactaaggatggtcgcaactgggtggaatgagtggaattttccctcattttcagctttaaactcgattcgagtgctgagctcagcaagaaggaccaagtccaagataataggagcagctaacagtgaattctcacatgtgttgtgcaacacaatt

SEQ ID NO: 30366 - DNA, 543 bp, Glycine max
  Clone ID: jC-gmst02400049c02d1
agttgtcattaatattaaacaataattttggcatcataaattcttccggaataattatacaaaagtgaccagggaaaacccgatctgccagttgcccactgaataaaaacacacatcatattactatgtgttgtcatacatgcattgtaatgagtggatattccaaagcaattggtccctttatccctccttaatccttatgccgtaaatggcaccatcccttgtaaattgtaattgcttcttcagaaatagaattatacaaaggtagttgcaatatctatttgccaaactataaatgtaaagacccttcttcccaatcctagtagtgtcccaattgtatttacaaaggtgggacaagatatgtatatacaagtacaaccatgtaacataatgtaacaataatcatactttggtctttactagtgcacattacagggagttattatgcactgaaacccctttgcagagaactccagggattggaaggaatactgacacaagcttgtgctgaagcctcagccatttgttcattctttatcccta

SEQ ID NO: 30367 - DNA, 501 bp, Glycine max
  unsure (1)..(501): unsure at all n locations
  Clone ID: jC-gmst02400049c03d1
aagcacttaagtttgtggataacttgatattattttattacatacatgcatagatagcctgctctcaaataagtcggcaggaacaaagatagagagattcaacgatcttcaaatttcacatttgccagaaatatataacagaaaagaggggtatgggatatgagttaagttttgatcacattcaactacactatcccaaaccgttactcttaagactttgaacttcacttgtactctaggatcatgttgttctcaggagctaatccaacacaagccctcaggatgttttccagcatagctcgctgctttgacaacgcattcaccactggtgtacccggtggaaccagaggggccttggtcaggtaactaaggatggtcgcaactgggtggaatgagtggaattttccctcattttcagctttaaactcgattcgagtgctgagctcagcangaaggaccaagtccaagataataggagcagctaacagtgaatcctcacat

SEQ ID NO: 30368 - DNA, 392 bp, Glycine max
  Clone ID: jC-gmst02400049c05d1
catcacaatcatccttgacaatattttttttaatgatgcaacggattcacaatgttccatttagccttgaagagaacgagaaaaaaaaaataaagataaaaaagaatccaatagtgtacagggaaagggaacaacacccactactaatttctttggagattttaatgcccccctgactgactagagtagtaaagttgcaattcaattcaacacgccataattgcaccccgttgaaaacttgtaacgttgattaaatgatggcttgcgtttctaaaccttgtcacggaaaaaagatgattttggctacgaatttcaagacgattctagaatgagaatagtagcatcgggagcagagacagtgtgattgtgctctccctcgtttgttaccacca

SEQ ID NO: 30369 - DNA, 523 bp, Glycine max
  Clone ID: jC-gmst02400049c07d1
attcttaatcaattttatatatgtatcaacctaaccaaataattacatcactctgtcgttgacccttcctaaaactatgcacagaagtacaactgtgttttaagaaaaacgtgttgaaggcaagtaaatatacaactcagacatcaacatgcacctgttaagtgctaaccttttctttgaacaccctgtcacagaaatctgagcactattggtatctgaagggtgagagattacgcctgaaggctttagaactgaatgcagagaaggaaaaccacaacaactgctatcgaaaaagatcagggaatgaccacattatgaaccttgcaaaaatgtcagaatccagaaattcaatatgtgcagcccgacctattatagagtccagattcttgccttgggtagatgcatcaaagttgacatcacagcgcatgaagactcgatgttgcatggagttggcacggattttggtccaaacaagcattcaacatttctaggaacagtttacccttttttgaagtgtcacgtg

SEQ ID NO: 30370 - DNA, 562 bp, Glycine max
  Clone ID: jC-gmst02400049c10d1
aaacacaatttttagattcttatagaattgcacattgattaacaatataaactcttggtataactaacgatagcaaaacactttctaacaaattagtattaacttaaacaaagtcttgtttcaacttaacatggctaaatatagtgcccacaccagcacaacaaatcactatatgatttgcatattacgctatcatcggtcacttccgccaacataagtcgatcgaattactatgtaaatttcgtttctataagttaacgcaaagtctctgttatttattatttggtgaggtaatcggaagctgcattgtttctgtttcttttgttgttgctggtgatgacatgtcttctttatagtctttgccttttccccacaccacagagtatagacccactgcgataatgatgcctccaatgatgcttcccaggtagaggtgttctcctagaaggagggaacccaaagcagtaacaattatcatgcaaagaggattgaaggatgttacaaacactggacctctgctttggattaccaacccttgtatataatatgctaattcagaact

SEQ ID NO: 30371 - DNA, 443 bp, Glycine max
  Clone ID: jC-gmst02400049c11d1
ataaaactactagaaagaaaaaactcttgaacaatgttcattaccatgatgaaaaaacagtacaactattgggaacaagctcgacaaaacagaatgaggaaaataattttagcactctagaaaactagctcatggggcttcactcctgccttcaaggaaaacctagcacccaagtaagacttgagctctggaacactctcaatggcctttaacaaagcagtgtccacggttttttggtcatctttcttttcttggggaagcacatttttctcctccttctctgcctcaaagaattcgccttcgccctttgttttctttttcttagcttccttggcaaagtacttgtcatcaaatttatcaacattgacatcagagatatccacctttgtggatgtaccaataacatacgattgggtcacccttctcagagggaccccattgat

SEQ ID NO: 30372 - DNA, 409 bp, Glycine max
  Clone ID: jC-gmst02400049d01d1
gggggagaaagatccaacccctctttgcagggggggttggaacaatttttcattctttttttaagggtttgacccaagaaattcccgggtgggggaaaaaccagacttccgggggaggaaccttccaaggggattttttaaaaaaacttctttccaatgggcaacttaacccactttttatgggaaaggtcccacaggccttttttttgttttcaacataaaccctccaagggatgctttcaagttcaccccacttagcaatgccaattgccaaaaaaaataatctatgggaccgaagttcaaattatcaggggtccacccaggacgcccattcctaggggggatctttggcccaattggcacaaaaagaaagctcaagtcctttcccaaaaccacggtggtgtgtgaa

SEQ ID NO: 30373 - DNA, 569 bp, Glycine max
  Clone ID: jC-gmst02400049d02d1
gtctctctctttaagtagggaagcagatcttatcagtacacataggtaggttgaaattctagctctagcaatctagctagagaaggtagtacttgcacaacacacagcacatgataatttattttatacacaatctcattctcatggtgctcaagatgcatggactaattaagcaacaatgttggtctgataggcagtgtccacagataaattgggtacccataaaatggccttgcttccaaggaaatggcaaacagggttagttccaggatcaactcccataagttgatgaagcatttgatgattcattccagaagtatttgagtggcaaatagcaagtgcctgagttttggttccatcaccagccaccaatggaaccatgaaagctgttgtttcacggacttcatggcagtaaaatactgcagttctgaaatttagcctatgacacatcactgctttgtctccaagattctgcactccttccacagtgtattggtcttgcttattgacaaaggaacttgaaagtacttgaatgttctttcccagcttttgaaaggcaaaaccattac

SEQ ID NO: 30374 - DNA, 393 bp, Glycine max
  Clone ID: jC-gmst02400049d03d1
ggggcagaaacccataatttagtttttaataaagcaaaagcaaaatgcccacccattccccaaacaaaacatgcttattcaacccaaattggtttcatatcacagaaaccaacagggtgtttttcttcttacccgtcccacccacttgaacagaaatttttcggaaattaaaaataaaaaagctaaactttttttacctcaaatttgaaaaggctaacaacaaaaattcaaaaaaagggaaattaaacaatcaatccggttcataaaaccgattttggctttccctcactttccgggggtaatctcaattacttagtacctggaaagagcaggcttgtttggaccctcaacaggcccactgatgtaatcagcctgggccgggctaagcttggg

SEQ ID NO: 30375 - DNA, 423 bp, Glycine max
  Clone ID: jC-gmst02400049d04d1
aaaaaaaggggaccccctcacctttccgggggaaaaggggagctaacccttttttttccacaaattttcttttttaaagagagggccccccaaggggggggcccttaacttattatcccccccgcggggtttttttccccctaacttaattttttgccctaaggggggaaaattaaatgcccccctttcctggaaccccattaaaccggccttaaacccagaaagaagggaggggcccctggcttcccgccttggggccttttttgggtccctaattttcgcaaaaaaaaaaaaggaaaattggggggttaattggttacccccggcccctaaaaaagggggggggtcccccccttaaaaaagggggcccctatttggccctggttggaataacaacgaaccccctcttggggggaccggggg

SEQ ID NO: 30376 - DNA, 514 bp, Glycine max
  Clone ID: jC-gmst02400049d07d1
gcaatggaaggtttgttatattgtcacataccatgagatcattgttgaaatacaatggatgaccaatctaaggtgagaaaagaaaggggaaaaaaagagcctatatgaaattacttgtatgataagatagaaagaaagcacggcaaaaaaaaaacagagcagaaagcatccaagctttcagctattagcattttctctatttgaaccttggttgttagtgtctgcaagagaaggccctgaccctaaaagcaaagggatctctttcttttcattgtttgagtctttcttggaagatggattcgcagtcgaagatctaagaggaggctcaaaaaatttgctagcaacatctggagggggtgcatcttcacctggaagcacaagaagacctttctctctaagagaagatggctcgttgaagcaagtgctccacagggagtccacaagttgcctttccttcctgactacaccaagggtcctcagctgacattaaactgatattgtttattcgttcttg

SEQ ID NO: 30377 - DNA, 599 bp, Glycine max
  Clone ID: jC-gmst02400049d08d1
ggatagccgttttaagtatttaagtttattcaaaagaaaataggagtatagaataacaattgaatatataattaatctaaattctaatcacacgctagctcagcgaaaggattattagaatattctattcttcgttttttcctgagcatcgagaaacgtattacttccaataccgtgtttctaaacagaaggaatatgtacactaaagacaaaaagacttaaaaaacggaattacagggaatagaaagaaagaaggaaaggtaaccaaaaaaacaaaagaagcagcgttaaaaacttgtaaatgttggggggggaaacgggatcaaacccaaccctgtttgtaacggtcgaagaggttttctgtttgggcattcctgaaggcactacaagctatgacatagacccatatgaggaccaccactgccacaatgagaatgatatttgctttcctccattcttttctgaggttacccaatagaccagccttgcacgcattacaattgtagcatagctgattctggtcattgttcccaagtagcaattctgatcagccatagggttcacaggggttgcccttagtatggggtttacataattgt

SEQ ID NO: 30378 - DNA, 616 bp, Glycine max
  Clone ID: jC-gmst02400049d09d1
gattctactcttcattaattgtagacatttactataaatgtgagcccctgctttgtttaaaggggattggttacatgaaactatggtgcttaattgaagataagccatgcattgcatacaccgaattacatcacacaggtacaaagttacaacgtcattcactcattcaaggcttaattctccactgtgttggagtcttatatgtgggcagggtgtttcaggttctccacttgtccacaaaaccctcaaatctcctcgctttcgccccaatgtcatcagggtcccaagggtaaatggaacgatgtatagtagtgccggttggccatgcccgtccatcaagtttagtgccacgtacgtaattaaaaggccaaagccatatgcaaccattgcccacaagaaatattcacttttaaggctcttatttgccagccaatcgtacctgagtgagaatgccaccagcatttctggtaaaaggatgtctccaaaacctatgatgctgtaaccaccccatggataaaaaatacgagggaacttcagttacatggggaatttcatttttttcacttcgatcacctcgggcttccacaattatgacattttccttgaaaactttttt

SEQ ID NO: 30379 - DNA, 553 bp, Glycine max
  Clone ID: jC-gmst02400049d10d1
ctcttattcacgtctatgaattttgagaatttttctccctttgcactaggaaatctataaacaacttgtagtgtgttgtccaattattccttggcagtgctggttctttgccctgatgatgccattagcacagcaacagccacaataaacataaacaacatactccctagcagtatatatgttcttcttgatgattttctgtactccccaaacagaaccacgccccaaaaagtgcttacaagtggaagtgcctggactgcatctgctgctgcatatcctgcagcttgaccacccataaattggagaccattcccaaacccacaaagcaaaccagccaacatggcccagactctgccatctgagtccgccaaataagccttaaatgatgacttgggtaggtttaggacagggtggtagaggaaggtgatgtttagaatcatggcaataacaaaacatgagactgaaaaatagaagaaggcagtattaactgtcaaatggggaaccccttttctcaacgtattccattggtcattttgttgctatgttgaatgct

SEQ ID NO: 30380 - DNA, 551 bp, Glycine max
  Clone ID: jC-gmst02400049e03d1
aattaattcaagaaaatgttgaaatgtgactccgtgctgaaagacggtaatataacactaaagaaccactgcaatcctctctaatggaatatactgatggttctaccctgcataatcggcaggttcttaaaatcataaaattacacccttgtcttctaatagaacccctgacaactactatgcacaaaaatcacattcaatgtgatggcccatccatcgtcacacaattcaccaacattgacaactatctacaaacccaatgctggacaagactacaaagaatcatattttgattcagacgtgattttcttttttacagaagtttattcctaaaatggctgctagaaacctattccagcacccattgatccaatactactgccactcttcttgagtacaggtagtattaggtataaatacactagtgtaaatgtccaaatggaaaagcagcccgcacattccagtttccttcgccatctggagcgactcagacacaacttggtgagcatgactatatatgacctctagaatgcaaaataattaacttgcag

SEQ ID NO: 30381 - DNA, 559 bp, Glycine max
  unsure (1)..(559): unsure at all n locations
  Clone ID: jC-gmst02400049e07d1
aaaccataaactttttatatttttttcgttataaattaaatgcaacttaaaacatccctcagcagcaaaggaaatggactaaaaccctatagctgcttgtgaaattcgaaatatctcagactcttcttaccatcaaaacaaaaaacagtactcatcaaaaacaaacagcaatgaaaattgaccaccnccgatcaagaacctagttttgaaagttacggctacatgaaatcggcagaaacttaaaaatataacttaaacaaaacacctaagactctgcaaggataaaactactataaaggagtaaccacgatgatgatcacatgtgctagcaaaattgcccaaatgcaatcacttcttcttggcagcggccttggtgaccttggctccggtggggtctttcttctcaacactcttgatgactccgacagccacagtttgacgcatgtccctcacagcaaaacgaccaaggggaggatactcagagaaagtttcaaccaccatgggcttggttgggatcatcttaaccatacctgcatcaccattcttcaaaaatttgggc

SEQ ID NO: 30382 - DNA, 564 bp, Glycine max
  Clone ID: jC-gmst02400049e08d1
atccaaaactgtttttaaagatgtcttggccagaaaagatcttaatcataatggacaaattacaatttcaattacatgctaatcaattattacggctcaggctcactggccactgagttggactcttttcagtcgagtccacccagccgaatcatcgcccagaaaaaccaaaacaattgtcttaaactaaccataaattaccagctgctcaataataattattataataaacacaaaacttaaaatacagttttataagcatttttagtaccgttcatcggttaaaattggatttctattttgataacttatcataataaaaactttttattatgtgaattatcaaaataaaactccaatgataattgccaaacagaactaagattacatacaaaactgtgtgtttgtcttgtcttttatagaaccagccgaactttaaacactattgcgttcatttgtctgcacttttattaccttaaaaaattaatatactgccatagggttttttgccattaagaccgaagaaagttccaacctgagccgggtgttaacccgttgaacccg

SEQ ID NO: 30383 - DNA, 441 bp, Glycine max
  Clone ID: jC-gmst02400049e09d1
gaagccacaaagttcagcagaaccacaatgaacaccaggaaatattaattgattatctcaagtgttttttttagtagtgagacaatgcaactcaaaattataaaggataacaatccaatatgaacaagataaattatttgattatatcaagtcatagcttctcttcaagtggagaatgcttaggttctcagggtgtgtataagcaggttccatcatcacttcttgcagttgggtcgaagtttgaggcatttggatcagtacaaccttcaggaacgggaatttttacttgctgggctgctttgccatagaaagttcctcttttgatggcatcctgattagcatcaccaagagcagcctcgttcaagtacttgtctgccagttgtactctcttcacattctcttgttcttggacaagcatgttaccatactccaagagcttgc

SEQ ID NO: 30384 - DNA, 506 bp, Glycine max
  Clone ID: jC-gmst02400049e10d1
aaggggaaaaatttttaccttattccccatcaatccctgggtaaacctttaaacggggaaccccaaatgaccaaaccaagggggttggtttaataaccatttagtccatgggggaccttttaaaacaaaaacctttcctccttccccaacgtccatttccgaccttaaaaggtaaaaggaaccaggaaaccctaattgggaacaaatcctacttgagggatgggggacccaaaccggggcttcctttttttgggtttttgaggttccgggttaaggttaattggcaatggccttcccagcaccaaaaaaaccagcggaggcagccccagggaccataaggtccctccttcaatggttataatggtggtaaaaacggaccttttccccttaagtttgggcggacctacttacaagtaatttcttttgggcagccacggccaaccgttgggggacagcgggccacccaaaaataaaacctgccatggggaaggaggcctttttggcaa

SEQ ID NO: 30385 - DNA, 477 bp, Glycine max
  Clone ID: jC-gmst02400049e11d1
caacgccgggaagtaatgaacatgccaagaaatttatggcgattatggaacaaatttttgaaatggaaaccatccaggacgggtgatacaaaaattggttgagcatttaacaatctgacaatgtttcaattaaggcaagctccaacacatgcaagcctcacattattgaaggcaaaaagtatatcacacttcagcaggaatccaggtcacggcagggaggaggcttgggctcacttaacaaagtagtgttcccttcttcaggtccactcttaattcggcggggattttgggtgccgtgcgggggcttctcaccctttctcagcttttctactatcttaactactttctttggggttacatcttcaaagtaattataagtatatccctctgatccatttgaataatcagccactgtaatcataggagcattcacacagcattccatgcatttcattttcttcaaacagaaaacaaacc

SEQ ID NO: 30386 - DNA, 493 bp, Glycine max
  Clone ID: jC-gmst02400049f03d1
ggtaattatattttattttattaactcatggaacgaaaaaaaaaaaacatcactgcagtatagcatttataaccattgattaaataaccttatttttcttttcccccctcattgttttttttttctctcgtcgaattttaaataacaaaaacagagaaatactagctcattggattgaacgtgattaaacatgatgataattgagagaaattgtgaatggccaccatcatttacagatcccaacaataatgcaacgccgtggatgtaattgtcacataattgtgcatccttgtggattctcttcgctgaaatattgatcacaacggttcccataacagggtctgcctccactgtaactatcgtaaacgggccttgcatagtaaccgtcgtaacagagcatgggcccaccgtactcgtagccaggcccaacgggcctgcctccgtagcacggaggaggagcatagagcatcccaactgggaccgccatcggtgc

SEQ ID NO: 30387 - DNA, 514 bp, Glycine max
  unsure (1)..(514): unsure at all n locations
  Clone ID: jC-gmst02400049f07d1
attggttaataattatattactttgggataaaacatttgttacaagtttagttcatcctaaaaataggataaaactatacacaatgaaatcccttatttgaaaagattctgaataagtcgtacattttagtttcactaaaggatgaaaatagaaagggagggaagagagagagagagagagagagagaagattcttccaacaaaacaaaagggagaaccctgtcagtatacacgaccaattaaggtatacaaattccctgttttcttcctctgttcatggccaattaaccttttctctttagtcaatgcagaaaacaacaaaacaacagaaattttttctgcctgcttaacttctttggtacatctgaattcatactttgagttacaatggtgtttagttttttctgcctgcttgacttgtctgcatgatctaaagacctgtcttggactgaatcagngtttaattgcttgttgctgaattgtgtttggtccacaattgctccgtttcccaagg

SEQ ID NO: 30388 - DNA, 497 bp, Glycine max
  Clone ID: jC-gmst02400049f08d1
aacaagacaatttccatttttcattattccaccattacaagcgacctcgcatgcaagggaaactagaatcccgggtacaagaatacaagataaacaaccttgctactttctaaaattcaatcatacataggctgggtgtgttaaccgaaatacatgatacagaaggaagccagaacttaatagactagggagactttctcggctttggcagtcatagtggcctccaacctaaaccagaacccaaaatgctatggcgagttggtttcaaaatcacactgcagcagcaccagcaggaacgttagattcaactgacttcagtatctcctcacctagctgtttgcatcctaccagcttcgttccagcagaatatatgtcaccagttcgaaatcccctgttcaaagagtccatcactgcattctctattctttcagctgccttttcttctcctaggccatatctcaaaagcatagcagcactaagaacagtggcaaatggat

SEQ ID NO: 30389 - DNA, 487 bp, Glycine max
  Clone ID: jC-gmst02400049f09d1
gctaatattcttttgctcaggataatcataggaaagttctccgaacactgtcatggtgtattattccccagtggagacgagggagctggagaaatagaacgattaaattggagccatatgagaagatattagggagaaaataaatatgaaatgagacatcaggcatcgacaaatccacctgatcatgagtcactgtatcaaataataaaatttggcccaaaatcatatgctagatcctggatggtataataaaccagctacaaaaccctctagccattatgcaagtatttcaaaactgggtcctccttcccggagccgctttagaagatttcacaaatattactagtttctttggtttaccttatgatatgatagggcttaacacaacccaccatgggctttggaaacaatgtaaaatgatatgatggtaaaagttgaagtcgccaaatatgatttaataggcaggccaagttaagggcttgagagc

SEQ ID NO: 30390 - DNA, 553 bp, Glycine max
  Clone ID: jC-gmst02400049f10d1
aacaagtgccattttatttattataactgggaagttgagatgacaatggaagactataatgtaactgcacctgcatcctcatcaatggctcatatgcaaaaacattaacaatcaacaaggtaaaagcaaaactagtttgggatttaatttatcaaactgtgagcatgtttcaacagaaatgacataaatagactctacatgcaaaccacggtaccaaactcttagcaaaagtccaacaatggacaaaaacagaaaacatgtagataatctggatcaacctaaggccaatttcaagatcaacttgaggcatttgtattactcatagatccaagagtgctgggagctttgccagttagcagggccctcagggaaccacaatgcaatttccttgttagcactctcaactgaatcacttccatggataacattccttccaatgtcaatagcaaagtcaccacgaatagttccaggctcagattgagctgggtttgtggctccgataatctttcggccagttgtaacaacattcttaccctcccagatcatggcaaca

SEQ ID NO: 30391 - DNA, 469 bp, Glycine max
  unsure (1)..(469): unsure at all n locations
  Clone ID: jC-gmst02400049f11d1
aattatgntattagatggcttgttggtagaatcaactgagaaagaaacatagcaacattgtatgttaaaaatgctctaaaatcctattacatcagagatgcactacggttacaatttagtcatacaaaagctgagtaacaacaattgcctactcccatgatactggtaatgaaaataggaaaagaaaagaaaaacaaagggaaatataccatcaacatcattgtttcattagctcacttataacccttctgattcatgatttatcttattcacaagccaatttggtgtcaaagctgctcaagcatattgcaaaagcttggaatgcagataaagggtaccgataatccatggtgaacatgtccttcccaactttgccaaactgaagaatgatcttatcgtgctccggtggagctggttgagatggtgtaggtgcaccagcagctggttgggtggcagcaatcaactggaa

SEQ ID NO: 30392 - DNA, 525 bp, Glycine max
  Clone ID: jC-gmst02400049g02d1
cacacattcataacaaacgtaggtgggatattagagtactattattaatgggacacaattgagttcaacacaaaccgaacttattttcaagggacattattacagacccattaaacatcaaagttcttcaaatgttttgggaacacatccaacattacacaacgagcttaaaaccccccacggagacggaggacaaggtgaagggttgattccttctggatgttgtagtcagcgagggtccttccatcctcgagctgcttgccagcaaaaatcagcctctgctggtccggtgggatgccttccttgtcctgaatcttggccttcacattgtcaatggtgtcagagctctccacctcgagggtaatagtcttacccgtaagagtcttcacgaaaatctgcataccaccacgaagacgcaacaccaagtggagagttgactccttctggatgtagtagtcagcaagggtgcgtccgtcctcgagctgcttccggcgaagatcagcctctgctggtctggggggattc

SEQ ID NO: 30393 - DNA, 530 bp, Glycine max
  Clone ID: jC-gmst02400049g04d1
catatacactgctcttattgtaacaaaaaaataaggggaaaaaggacagtgcttccgctatccactgtacatgccgaccactaagtatacattttcacaacccgtatcctctcattgatgtataacaactactcaagcaggttgaataaaaccggaaaaaataattaataattaaacagataaaaaagacaagtccaactgattcaagtatctaaaactcaaaggctcctccgtctagttcctgttaccagagccaatgctctcatagaataaaatgtaaccatggtctgtattgctggaatattcttgcgaagacccaaagaatgtctgaacagcagactcatcaatcatctcaacattttcgtcgtcaaaaaataaccagtggttatggcttttcacaaggcttacataatgcccgtggttgggcccactcccacatggacaactactgcaaatagagaatactcaatatctgcatctttagcagtatcacttaatttcagcctaagagggaagacaacccggtagac

SEQ ID NO: 30394 - DNA, 546 bp, Glycine max
  Clone ID: jC-gmst02400049g05d1
aaaaaatatttggggatagcccataaaattggaaataaactgtaagtaggcttcaagtattaaagctaaatatcattaaacacctttcaaagtcttaagacataactgtcctagctctgggaatcagaactcaaattattggcaagggctttatcataccaagactaatgttccaactatcaacttatatatcacaccaaaaaccgggcacccaaatctcaatgctcaaactcgggtggatctccaggttttttccacttgaaaactttagtagggttcaacgggggtacggaagttagctccggcgtacactggttcagcaccaagctcctcctcaattctcaagagctggttatatttagcaagacgctcagacctgcatggagctccagtcttaatttgacccgtagccaaaccaacagaaagggcagcaatgaaggtatcctcagtctctccacttctgtgactggccatgacaccccatccagcttttttggacatcctgacagcttcaatactcttaagcacagaaccatttgggtgacc

SEQ ID NO: 30395 - DNA, 374 bp, Glycine max
  Clone ID: jC-gmst02400049g06d1
aaaaacgacaatatatttatataatcacgagcggtaaaaatacaacatacaaataaaaataagggagagggacatctacacaaaatccacacaaacttaagtcaaacgaggacaataatacttataatactgatgctgatgacagaaatgagaaaagcttgaacctttacacgtgagctttaacctcccgtggtggctcgaagacatacttaataagagaatccttaattgacacccgttatggaaatagcttattcaaacggggcgggtgcagctcattgaagctccttggtgacacgctaaccttggcctgtttatctaaagctataaggggcgactggaagtggggtccccactgaacagtgtgcatttac

SEQ ID NO: 30396 - DNA, 516 bp, Glycine max
  Clone ID: jC-gmst02400049g09d1
aaattataagattgtttacttctcctttgaactaacggtactataaggatacaatgatacacgaacaagcggctcagcaatgtaaggttaaacattgcactgtttttggataacatttcatgcaattccttatcttaaaaatgggttacatcatgataaataacgattcttataaaaactgggaaattgctaaagagaagcaccctgttcgaaagtggaccgtatccacgatagcaactttacacggattccaaactggcccaatcataattcctgaggacttgcaccacggcaacattctttatattagtcatctatgttcttcatgtattcctttgaaagtttagtttccattatcacaccgtgttctttgattagagaataacccgattcaagtaaagcatccaccgtttgctctggaggaataaatacaggaaggctttgggcctttcttctcttgagaaagttgttttcaaaattttcaacacctccaatatcatcaatccactttaaaat

SEQ ID NO: 30397 - DNA, 500 bp, Glycine max
  unsure (1)..(500): unsure at all n locations
  Clone ID: jC-gmst02400049g10d1
aaaatcataaattttgtattttagcattaatataatgcgcttaaaaggcaaaagtgtatctaacttatagatagcagtgcaagacaacattcattcaaactaaatgtgcaatctactattcaactaataataatagttgcatggaaagcgtaggaaacaacccttgcagaatactaaatatgcctcaatcaagcaaatcggaaactgcatttttcctaaatgcatcaactagagccaactggttagccaacgttttgttgggaaataggttatcagctttaatcctctctctgattccatacgctggaaccttggcgtttacatatgcctgtattagaacttggaactgacttattcgggacgtataacctgcttgtctcattttaaggaaaatcttctccgagttatggacgtcacccctctttgcatactgctctaaaatagccaaatagggtggtaaacatntggctgcagctgattctgttggattgccttatgca

SEQ ID NO: 30398 - DNA, 509 bp, Glycine max
  Clone ID: jC-gmst02400049g11d1
agttaaaagggtttattccgatttcataaagaatacaaggggggaaacttatacccaaatacaataatgcctttattcttatgctccctcaaacctaatttatgcaattcaaaaaaagtgggaaagaccattgagggtgaaaagccaccctttacctaaataccaaaatcttctaaaatagaaaccataggggagggtaatcaatatttctcattacaatggtaccacattttcaactcaacaccaccacacacatctaccgcagtgtgtattttagcaattattaacagagaaatggcgcttcaaatttcacgatgatttggcaaccaattgctcgagcttctctagtgtgacacttttgggcctttcaagtggcattccaagagccctatcccatatcaactgagggccaactccaaagctccttgatacaccaaagagaacagtataatagttttcctcagttagaccatagtagttcagtagcactccactgtgcgcatcaacat

SEQ ID NO: 30399 - DNA, 555 bp, Glycine max
  Clone ID: jC-gmst02400049h03d1
gtattattggccacaattagaaaatgagtacataacgctacctagctctaggtagatacatatctacagaaagtcttgaaataggacagcaaagaggagaaaattgacagactaaaacaacaatcattccaatgacttgagcagcctaaataacgcagctgcctctctaatacgtgaaaactcgatgcaaaacgcttgaacttcaatgaagagatctttaacattaataatattgttccgaatgaggctttgcagaaaaacacagacaagtctcacaagcctgttctgcatgtatttatccttgatgcccacacaagatgctatacaattagttatgtacatgtgaatgaattgagatggtagttcaacagctgttgtcagcctgttcacaacttccattgaatgtagactcatgtccatattgacaagtactggaaagtattctgctatttctggagaatttatcaacttagtgagaacgtcaactgcaataaggggattgttttccaccaggtctggcaactttcttggtgtcagtccacagtgatatacaag

SEQ ID NO: 30400 - DNA, 551 bp, Glycine max
  Clone ID: jC-gmst02400049h04d1
caagaaagtttttttcccctccccagcaagttgcatcattcaaagggagaagctaactatccaaggtttctcctgattgaaattaagaatcagacataacaacagacacggacagtaagcaagcatagctccttgcttaagttacatcaagaagttcactatgtgatgtctatttatgcacacctgtctaatttctttgggacatatccctcatgaactatgttctgcaaaattaacagctaatgcacacaaattggatgtggttagttgttaccatgtcttgcaaggtaactttccataaataacttttcaggcttgcctagtgaagtttccctttcctataatccaataattgctgctctctgtgtttatctgcagcaagtttagaggtttcccaattcagcttcctcactgcctcttcagtttcaatatagtttggaggtacatcagaacctcccgaaattagaggaaacttaacttttacatctttcctactaccaagagcaaacatgccacgtcccctattcattccaccttccaaggacaaagct

SEQ ID NO: 30401 - DNA, 534 bp, Glycine max
  Clone ID: jC-gmst02400049h05d1
aaataattatttcagtaagctaatacatactgaaagtcattcttataaaaagaaaacaatattccactttcattatatcacgttttttgcaacagttacaattgttgtaaccgtaacaacacatccttaaaatgacattacatgtaagaaaaacatgctttacaattaattccttacaataactctagtaaaattgaaattgaacttaacaatacaaattttgaaggaacaagaaaacaccttaacagatcaactcacaaaagaactaccccacttttagggtgtatatgtaacacacaaacacacaattcatataatttatttgttgtgtctcttctaattgggcctcctacattgcttccttatctgcccatttgacccagttaagggtttgatgtttcccatcttaatcattgcagtgacaaagtcagcctcaaaggccttttgattgttgctgtaagctctcactagtgaatctgtggatcctccattgaagagctcttgatcagaatgaaggagaccctttttgttgat

SEQ ID NO: 30402 - DNA, 475 bp, Glycine max
  Clone ID: jC-gmst02400049h07d1
ctctcttgtattatactcactttgtgccaatcaactttttgggtggccacttaatattttccaaggtagacgcgtaaaaaattggatgtggatccgtaggttggttttggttcccaattagcatgtgatctaactcgtttgcaaacttgtccatagctttggcgggcaaccaaattggtaataatatgccttcttctccttttgcattcttatgtgccatcagatagaatactgcaggaaagggtccagccccacctttggccactccaccatataatgccctaccccacccaaaatcaatttgtttgaaaccaaaatgtctcaaatctgacacaataaaagatctcacggcggttaacaagcatcttccattagtcaccattagatctgccacagaatgcatgtattcttctgtcacctcacctttcagtttatttattaactccactgcatacccaaatggattttcacaaag

SEQ ID NO: 30403 - DNA, 547 bp, Glycine max
  Clone ID: jC-gmst02400049h08d1
gtgtaccatacatttcactctttgtattgattaaaatagataaaagatacattaacagtaggtagtgctcttttagagagagaaagagcttattttgaacaagccaatattactcttaacaacatatttataatgtttttgggtccaccaacatatttataatgtttttttttccaatatctagagctttatgcgaccgttttggatcatccacttcatgctccattcattgaacctacacttgtaggaccaatatgcccatccaaaagttgcacgagaatacacacctagctgtgcttgggcatacctttggtagtcttccttagtcgcaccttttacagcccactcaccagtccactcccctacaaaactcagagcatttgtggaagagacgccaccaagattagagacacgttcatttcttatgaagtcaatattttcttgaacagtcatgctgtcgaaaccgttccaaaaaagattggagtaatgcacatcaatgactactctgtcaaagtctttgacaaatgagagaagcactttagaatct

SEQ ID NO: 30404 - DNA, 513 bp, Glycine max
  Clone ID: jC-gmst02400049h11d1
aaatcatgcatacttctcattcattcctttggtattacatatctatgacattcaaaatgattataattggaccaaactccgagttggataagtacaagaacaaatttttacattgaaacttttcataacaaggctttctacatgttgttggtttggttcactcatcaatgtgatccgtaattctgagaataaatgtaatttccaaaaccaactccaattttaattccatttgctactcccaacattgttcatcaccagaaaataaaagaacaatttagactagcaataaagtgttacatacaacacaacaaacaacaaagacagagaaagacaatctgcatacaactcacgaccaaaactatagatgaaaaatggaccgaacaaatgatgacatgcatatttcttactcttcaagttcaatttccttcatgtacccaaaaccaccaccagaggttattttctctcaatcagagtagggttggatcttgaacctgttaagaagcctcttttttt

SEQ ID NO: 30405 - DNA, 498 bp, Glycine max
  Clone ID: jC-gmst02400049h12d1
ggcttattatatttagtttaataatgagaaagttaaaaggatgatgagctggcagtcccatagtacatatgtacacttggacctgtttttatgaagcaagatacaacctaagaatacacatacacagctgcattcattcctggcatatgaaatgtatatacatgcagtataggatggatggatggataatgaattgcatatcatcatgattcatcaggctttggctccagaatgacgggtatcttctccttgtggtcacctctcaacacctgcacaatcaccttatcacccactttacactggtcaagaattctgtataaatcactttcattagtaaccttcttatcattcacagatgttatgatgtcacctaaaatgagtctaccataagagtcacgctttgttgattgcaagcctgctttcccagcaggaccattggcaggagcatctaagacaagcactccacttactcccaactgctccacagactgatcaggg

SEQ ID NO: 30406 - DNA, 435 bp, Glycine max
  Clone ID: jC-gmst02400050a03d1
ttggcacgcatacaaagggatttattaaaatccattcgatgttcaaatggtaatagtagaacaataaaagggccaaacgccctaacaatggtctaacataaaagggaaaaaacaccaaagaaaaacaatcactgtctggaaaaccggacttattttcgcaggggcataataaagacacttaagaaaactactcttcttcatcttcctctttccagcactttagagttgatctaggggaaccacagtcacaagttttggcaaatttttggtagacaagagaaccacccattccaagccctttgtgggtcctcttttcgcgacagtatcccttaacatccagaaaacacgtctgatcaaacaacttgcttgcaccatccacatgaactgcaacagagaactcagttgggagaaaacatgccaataccctcttaacca

SEQ ID NO: 30407 - DNA, 431 bp, Glycine max
  Clone ID: jC-gmst02400050b01d1
aaggggccgaaatcaacaataattaagaacaattattatccatctatagatggagagcaaaattaacttgcttttttaaatttgagcttgaccttaccgaggatagaaggaacataatataataactaattacactgcatccatccggggtatcaccagtgattaagatgaggggattcatagaatacacttgctgggagcagggcggagatgttctctatcatctggggcgtgaaaacgtcgtcgtcgtccagcggctcgaaattatttatactctccatcgaggaaggctgttgttgttgttcctcctcgtagcagccggcgaggctcatattttcgtcggcgactgcgggaggaacaacacaattcacactgtgaacattggcctcctcctctttgatgtgatcgacagaagaggaggaatcagggtg

SEQ ID NO: 30408 - DNA, 347 bp, Glycine max
  Clone ID: jC-gmst02400050b03d1
aaaaaacaacctttcctaaaaaagtttaaatggtttaacaaccggcaacaaaaggaaagaaacccggaacaaaaagagcaagccaatttgttcacgtgtcagcctcagagacagcccatgttatactttgtggttttactccggataatggttgggtccgaatttcatttttcatttcccatttttttttttgttttttggtgaaattttaatttcccattttgaaccataatatttcaaactgatttttgttgctttggatttttttttggggagaagggagagacccttcaatcaccacttattttctttaacaagaaaccaagcgtgaatccaaaaacttacac

SEQ ID NO: 30409 - DNA, 491 bp, Glycine max
  Clone ID: jC-gmst02400050c01d1
acaatactgtttaagttacacttcctccttgtataatgaatcaatatttcaaaatttgtcaacgtcctgtatctctccaaccataacatgaaaactgcagaaatttgagatgcctaagctaaatcagtcactcaatcattagttctgatccctttagaaactgtacatttcaaaaacactaaaaaaaaaggcccaaacctcttaaacccagtaaccatcgttccaattgggcttggaagaaggtcctccatgctcactccgacttcctgtaaatctatataaggacagcttgtttcggactgttcttaagggccctgatctattcccatgcctaatcggtaaagatatttcatccccaatcaagcttgaagttgaaaagggtctgttctccatttcttcaagtggaccggaactgtattccatagtgatgaaggaagaagcttgcccgtaagttattcgaggggttagccctcccgcattccaccaactgc

SEQ ID NO: 30410 - DNA, 407 bp, Glycine max
  Clone ID: jC-gmst02400050c02d1
cagtagcattaaacttgaaagaaattttcacatattttgacaattacaaggtttagtttttggtttggggtttggtccattgttctggtatgtgactgcacaaaggccagacaacacaatggatcaagagaatagttggatcaactaattcagagggtgccctgcattatcataagtacatacctaattcttgaaatggccagcaagccaagtatgtaaaagaaacttgtctttggctgacatggatcatctctgagcttcatctgaagaagctccaactgaagtagctgccatattgctcgttgacccattctcaatgggtggaggcacaccccatttgccttcagactcaaggggctcaaagacatgaacttccgcatctgacagttctacagcaaactggtttg

SEQ ID NO: 30411 - DNA, 479 bp, Glycine max
  unsure (1)..(479): unsure at all n locations
  Clone ID: jC-gmst02400050c03d1
gtataatagttatcatttcataaataagtattcagcaagcaatttatggatacaaaaggcggctccgataaaatttaatgttattaagcaaacaaggggaaaaaagaaaaagagtagcagagtcggttttccacgagacgagaagagacacgcaactcgataagtatcacaaaagattacagaagaaaaggaacattctcttctcaactatatcctatttgttgctgttgctgaggtggttggtaaccaggataccccggataactgccatacatgttgggatcctgtccagcagcaggagcatacccataattttcataaccttgtgcagcatacccatagtatccaccaccagaaccagcaccaccattccactggtttggatctgcctgagcctgtttgttngaaggactgcggccccatgaaagacgaacattttgaccacccaacagggtcccatttcacacccggagtgcctt

SEQ ID NO: 30412 - DNA, 522 bp, Glycine max
  Clone ID: jC-gmst02400050d02d1
aaagttctaaaaactcacaatactcggaactgaaaatggcaacattgctaagatttattatgctactaaaaattgaacatctctttggcaacaaacattggacacatgaaaaactaagttctcagctacgatgaataagactttcagtgtttgacggaggacgcatcagggacctgaccactactggcaatcaattactggttcgggctggctgatttcacattactactccggagagagggttgcgacgcgaccacgggggggagtcttaggaccctgtctccccttaggatcccaatcaagcatgatctttaccttaatgccaagaacaccctgcctcaggagcacatgtgtcactgtggagacaatgtgatctttgaccggttgcccagaagaaatcatgtaaccatcctcaaacttcatagatttggctctatgggctctcaattttgcactcacaatgacctgcgcttcctgaacagcactgtgcataacaaacctcaagacaccataacaagccct

SEQ ID NO: 30413 - DNA, 454 bp, Glycine max
  Clone ID: jC-gmst02400050e01d1
gtaaaccttataagttttttatttatagtaatctgtagtacaaaagcaccattttctctcttataattttgatttacattcacaaagaaataagtatgatgctcatgatgacttggccacatcattaatgctacgaaggattgaagtgcatgcaagagtcaagaatatgcattgctacgaagttgtaaatcacaatgctagaaaacacaaagcagttcctcttatttattaagtagataatagacctcattgcttgctttaggcatgggtgttgtcctctactggagggtactttccataaggtggtttcttgtatggtggcttcttatatggtggcttgtaaaccggtggtttcggcttgtaaaccggtggttttggcttataaaccggtggtttgtacactggtggctcgtacactggaggcttgtacactggtggctttttaattggtttg

SEQ ID NO: 30414 - DNA, 460 bp, Glycine max
  Clone ID: jC-gmst02400050e12d1
gataaaatagttttttaactttgtgataggaatacacacataagaagtacacgagagtactttgtagatgtttaggcagtgctacttcatggcattattatcagcattgcagattacagtggctggatgctttatttatattggtagatattatttccagcagattatttaattactcatggcaccaaattgggaaatcaaccatcaactttcatgtctgtctctggaagccaggggaatggcagtgttggtttagttgcttccagaagaacctcaatgggaatctttggtgcagatggcttcaatggtgttatggcgtgattatacttttgagggtttgcacagtaatcctgatctgcatgcatttttagcacaaattttttgaatatattaaaatttgatttttgcagtagatcatctgatagacgaaggtatgttacttcgaacatgcttagttttg

SEQ ID NO: 30415 - DNA, 511 bp, Glycine max
  Clone ID: jC-gmst02400050f02d1
ataaatattataaaaatttaaaaactaataactgaactatttttagtgtttgcaagagaggcaaaacaactcaccagagatcaatacctggaaagctatttttaaaaaatacaatggcacacaagattaccttcctaaatggaaacaaatccatcgagatctgagctgatcatctcatgggatctcaatctcacaaaaggatggatactgcaatttgaagccttaggaaaaggttaaacccgacttctcaactaagcatcatttccttttccttgtcttcattttattgcctatttgcgttagatgaacatttggtgaacttgctgctgagccattgatatccagctgtgcttcagataggggttctgacaaatgcttcctttttctagagtttggggtttttgatttttctccactgaactccagagatattaattcacattccttctccccctcattttcagctctgccatcagtaacttgctgtgaagcatttatacctgaattggtt

SEQ ID NO: 30416 - DNA, 503 bp, Glycine max
  Clone ID: jC-gmst02400050g02d1
gattgcacaattctaagtagtaatatatataaccactctcaaagactattcttggattttcaatcatacagaaagaaaatgacaaaatattccaaactcaaactccttacttatttcataaacgctgccataggtttaatttcataatagaagaaaggtggtagctagtggtagtgggttaaaaccatgaatcttgatctggtccttcctaacaaggcgagcatgaatgaggaagtgagaaacgttcttgcgctgatcaccctggagttggataatcttgccaagctccttgtcatgcacaacattgccattgcagcagaactctttcttgaggtctttgaggatcttctcgtagctgaactctttcttcagcccttgcactgaggtcagactcttcttcccattcctctgttgtatgcggatatgcacatactcttttgccccgggagcatctgtttcttttgccttcgcaaatgggtcgaaagtgctcgtaggggatctga

SEQ ID NO: 30417 - DNA, 525 bp, Glycine max
  Clone ID: jC-gmst02400050g12d1
agcagaaagttttatgttatttcatgtacacctcaaatacaaaatcgtgcatagctccgatttcttaacatcaaattcagatacaagcacatacgattgtgatttgtgagggatttctattgcacaaagaaataattccctcgccaaaagacttggggtaatcaaaagtgaaaaactatagaactaacctcaaaaacttcataacagtgtctccgaagaactgtcagcggcaggaaagactattatagtattattaacaggtaattttaatgaaaaccaacttcaagtgtaaaagaacctgtacggctgtactgaaaggtgtatcgtgacttcagcttaaaaaaatgggtaaggttaatgaaaactgacttaaagacctgtactaaatggtgtatcaagacttcagttaataaaaatctgaatcaaatgcttaatccaattggctactcttccatcacgctggcaccaagtataaaagtcacagaagaacaattgccgcatgtgggattgaacccgagtcagctt

SEQ ID NO: 30418 - DNA, 272 bp, Glycine max
  Clone ID: jC-gmst02400050h01d1
catattattggtggtaaaataactttgaattcaatcaacatgctgttcgattagctatgttcagccaaaaaaacaaacaaataaataaaatccaaggtttcgggttaaactataaggttagaaaaggaaaaaacagatcctcgataaaatctttcaccacttgagaaaaaaatggctaatcacatgttaaaccccatgcaatacatgccccttatgacaattgatgcactattgaagaagccttaaccgaccaccctatcaaacaagggccc

SEQ ID NO: 30419 - DNA, 457 bp, Glycine max
  Clone ID: jC-gmst02400050h02d1
atatgaacaaaaaattttctccattgctcctattttagacgaggaacagaggcaatataagcaagtataagctgtaagcatcatagcactaagagcttatacaataatatatacattgttaacaatttgtatcatcatacagtttttctatgtttaactcaaacatacaactttatttcactgcaagcaatcacagtcacagagctcaacacagcatttgattaactcaaaacaggccagggctgcacatatctgagtgcaaacgatggtgcactggtcattcacaaaagtgcaagtctgcaacagacacatgccacaacaggtatcagccaatcgaccacaacaattggaagcagccttccccagtagtccttcaggtgggtttgcttcttttatagctgggggcaagttctcaacagtttgcttttaagtcaccaaatccaagattcaacccttc

SEQ ID NO: 30420 - DNA, 447 bp, Glycine max
  Clone ID: jC-gmst02400050h12d1
aaaagaacatgccaagaaatttatggggattatggaacaaatttttgaaatggaaaccatccaggacgggtgatacaaaaattggttgagcatttaacaatctgacaatgtttcaattaagggaagctccaacacatgcaagccttacatttttgaagggaaaaagtttttcacacttcagcaggaatccaggtcacgggaggggggaggcttgggctcacttaacaaaggagggttccctccttcagggccactcttaattcgggggggattttgggtgccgggcgggggcttctcaccctttctcagcttttctactatctcaactactttctttgggggtacatcttcaaaggaattataagtatatccctctgatccatttgaataatcagccactggaatcataggagcattcacacaggatcccatgcattccattttttc

SEQ ID NO: 30421 - DNA, 500 bp, Glycine max
  unsure (1)..(500): unsure at all n locations
  Clone ID: jC-gmst02400051a04d1
atagnactagtttaatattgtaagcagagattcataattcagattaactagccgaactttatacagaagcgaccaattaccaaacatttatatatatatatatatataaaaaaaggcaaccatgaccttaacacacccatcacaagtccaaaacacttgaacttgctcaagggcaagaaatgaccactttattctaagggtgtttgtttagacacaaaacaccagagtgcaacataatacatactacataattttgaagttttgaaactacatatagtttttatcattatttctaagggccatttctgcttgaagctttagctctccaacacctcacttgcaagtgcaggggttgcaggtgcagttagctccacatttgcagccatcgttctcagcgggaacacccatttcagcactctcgaattgagccttaactggtgccactcccatgaccaaggtctcggtggtggttgactcggtgtagctcaagtctgggtaca

SEQ ID NO: 30422 - DNA, 472 bp, Glycine max
  Clone ID: jC-gmst02400051a06d1
caaaggaatatttattactttcaatctgtgcttacataataattataatgggaaaacacaattatttctggcagaatatagcaaatatactctccgacacattttgcgtgtctacaattctttccattgtatcatagtaaattaaataaatgtgtaagggctcaatcttcattgatacaagccctgtaatacatggggcaatattcagcacaatagcctgacttgactatgtacagtatacacagtctttgcgcatccaaattctcttatataaatctttgtttttggccaggcaatgcatgattaggccttggcaatcttttgaggtatacttgaacaaccagaagacaaggagcaccaattatgaacttcaaatattttttatatactgaacctaatatgatctaaaccacacgtatttggtaaattgctgcatcatagggtcctaaccgcataggactcacttgacagc

SEQ ID NO: 30423 - DNA, 572 bp, Glycine max
  unsure (1)..(572): unsure at all n locations
  Clone ID: jC-gmst02400051a07d1
gtataatntgtttcccttaggttttcaacatattagctcattgaatatctatgacagcagcaacaaatttgaatccacaacaaacaaaaattgaaaacatgtatcacaaaaggtaaacaaatccacagatctagattcaggatcaaagaatcgtttgcacccttgcaccaattaaccaggcattggacgtctaactcctctttgttccaaaacttgaacgagcctccctatgatgctattaattcggcctcagtgccgtttaggattaaacggtggatgttgtgagttggggacttgaacatgtagtcgaaatggaagccattggaggaaatgaggatgatggtaggctggactagaactggattagtgaaacccagatctgtactaaacattgagaggtacaatagcatagttttaggctgaacaaattcattacggatacaaaactagatgagaacatacgaatctcataattcggattttgccaattggccattttcagttacagcttccaagttccagcctctttctgctgctcctcttttcaattcatttatgcgattttcaactga

SEQ ID NO: 30424 - DNA, 518 bp, Glycine max
  Clone ID: jC-gmst02400051a10d1
agcaattataaaaattttattgaaaagatcaaaatccaaattacaccaagttcatagtaataataataactaataacaataagttaaacccaagataataataattatgaaaaaaaaaaaagagagtaccggaaagaaacaaggtggtggttgttatagttttggaatttcccaatgaaacgctcagttatggtcgtccttgtcatggggctttctgcagaggatcatgtgcatcggcgagaaaatgccagagtcaccccctctggtcaaatagtcagcggtcttgaagagcatctcatgaacatcgacggtccccttgggcgcgattcccaaagcggcgagaacagtgaccacaatatggttccgccagtaggcgatcctacccatcttcaatcggctccaccatgggtgagccggcggcttagccagatcccgctccttcacaacagcaaaccctaccttacgcgccgtctcggctatgtcggtgtaggttctaaggccaggcaacgcgttccccc

SEQ ID NO: 30425 - DNA, 560 bp, Glycine max
  unsure (1)..(560): unsure at all n locations
  Clone ID: jC-gmst02400051b01d1
acaaaaacattcacaattgttcagttcgagataatctcaaggtatacatggatatcgattttcacctgcggtgacattgcacttaaaaactgaacacgaaatggagaaataaaaaggaacaaaacggtaaagcaaaaatttctattatttacagtgaaaagaacaatccataaaaatcttctgtgtgttgctatatatgctactgctctctacatcctacaaagatgtgagattaaactaaaatttccatgtcaaagaatgaacatctcattctaaacatataaacatttcttcatataatcttaatgtcaaaagtcaatagcaaccttgttaccacttccaatcccttgctagaaatgttctgtttctgtttcgtcagcagtcaccggaaagaaactcaagatgacatctgcccccaggtcaaaaaatcaccaatccaaaaaatgtagattatatctgtaaatatgtacgtctaatcacatcatgaacaaatattttaaatcatccacagtgaggcgagtctgacgatcaccagttccatcctncccaaatgcagatgc

SEQ ID NO: 30426 - DNA, 518 bp, Glycine max
  Clone ID: jC-gmst02400051b03d1
gaacacaaattataagttgttatttaaaaagcaaaccaacaacgcaacggcaaagccctaaaactcgctgcgcttaacaaaaatgtaatcaggggttctcacaaacacaacacattaaaacagaatgataaaaggagtcttgccaccgtcgatcaagaacccaattctgggaacaaaagttgcgagatgatggtggagacttcaaactatgtccgaaaaacaagctacctagaaacgaagacacaagggcaagaaaccaacatttattgtaaccataagaaacgacatcccctgatgaaccaaaccgcacgattcacttcttcttctgggcagccttggtgaccttggctccagtaggatccttcttctccacgttcttgatgactcccacagcaacagtttgacgcatatccctgacagcaaagcgaccaagtggggggtactcagagaaagtttcaaccaccatgggtttggtcggaatcatcttaacaaaaccagcatcaccattcttcaaaaac

SEQ ID NO: 30427 - DNA, 329 bp, Glycine max
  Clone ID: jC-gmst02400051b05d1
acaagaaaagacaatggttgatttgctaagcatattatatgggggaaaagaattacaatccaacccgttaaatgttttggttggggaaaaaaaaaagcgttaacccccacttaatgggttggccgaacaagccacgaaaagttttccggaaagaaaggaaggatcccaaaggggaccgggaacatgtggagtaaaactttttttttctttttccaaataattaaagatctacacagaccgcaatgcaaagccaaacggggatgacaacaacctaaactaagggttctccattttccttcccaaatttggcttaccctcaattttttatt

SEQ ID NO: 30428 - DNA, 564 bp, Glycine max
  Clone ID: jC-gmst02400051b10d1
agagcacatttttcagtttatattcattcatttagtcccaacaaaagtattattcatttgaacccatctttgatcttcccatacaccccaaccacatttcccctttctctattatttcaataaacaaaattaccccacaaatgatataagttcaattattgaacaacttcattacaatcttttcaaacttcttttccgggcatcaatcttcttcttgtcagcctgagcttttgctactccacctgccttcattggtgcagcagcatgaaccatggatgtggcacaagaactgttaacagctggctcagctccaaccacagcctgttcctgcttgtttcctcttgttgtgttgctagttgagggggccaatggtgattgcaatggcaatgtcgcacccgatggtgcagttttgactttagcattaagaactgaggtgttactctgatcaacattcagagcagttgtagattcagatatagcttcagttttgaatttggactttgtgtttgcatggattcctgtgtaaagtctggcatgtctggcatactcctcttaattttcaag

SEQ ID NO: 30429 - DNA, 552 bp, Glycine max
  Clone ID: jC-gmst02400051b11d1
agtaaaacatctgttgcttcctattaaattttcagttttttcacacacagtatacaagaactgtcatgctgtccaattgtccagcgtgtggcttttctagatgaacagataaaaacactataactaaaactaagcattaaatatggaacttcacttgtacaaaaaagatatcttctgcatataaatcatcaatgagttggccaagaagctaggcattaataaagccatgccagtttcattgctatactcattcccctaaaactctaccgctcagttaagtaaagaagctattcatgtagagcagagaggtcattagtacatgctacacaaaaatggcttcaaactttgcacaaggatggctttccaagtgactcctgaaatccgcatcccctttgaagctgaagtaataaagtgcttgtctttgtgtcaaaccaactgggtatattttgtagagttttaaatcattgccccctctaaaaacttcaggtctttctgtcttccatataggtacatgattcagggatgtgaactttgaaacaactgcagacttca

SEQ ID NO: 30430 - DNA, 508 bp, Glycine max
  Clone ID: jC-gmst02400051c01d1
gcatataagtctcgggggtaatttttgattttgcaaattagacaatcacagccgtacatcacacgtgagctgggcctcttccaacttaaaagcagaggataacattggcccatgacgcaacacatgcaccacctaataatcataattttacatgtttacatacaaaatacaaagactttaaattaaaattaaaaaaaaaaagataaacagatcatcttgatgaaatgaaaccgaaacccagaaacattggtttgattttttttggtgttcccaacttgattaagcatgaacggcttgattgaatcacttggacttgaagggaatggccctgattacgacctggtggtagagtgctgcaagtgcagcaccaatgaaaggtcccacccagaagatccagtgatcatcccaaccaaggtccttgttgaagatgataggggcaccaagactacgagcatggttgataccaacgccggtgatagggatggttgccaagagaaccaagaacacc

SEQ ID NO: 30431 - DNA, 552 bp, Glycine max
  Clone ID: jC-gmst02400051c02d1
gaaaggataatttaatcatctttgctaaataaataatctaaagacaaaatcccagacgtgttactaatatcaaagaaatttaaatacaaggttaatttctattctagcctatggtaatttatattctgcagcaagtcacatgagacatgccaccttattgcatgcactttcacatgcaaaaaacaaatacctacacagtgcaactagtgctacaaaaacatacatgcttcagggtttgaaacaacaaacggcaacacactttcgccaaataattcaaccactgatgacaccaaatttcctgtatcaatgtcatccttccaagcctgagcaagagtggacgacaccttcctttgttgatctccaacctccctccccggcacgttgtcgatggatatttgacgagccattgacattgaagaaacccccatcatggaggaatatccacctgttgaaccttgcatgtcaactaacatggagttcattgctaccacacccccagggccatccgttgcaagtttcttcattggaggcagctgctgctgctgctgcatc

SEQ ID NO: 30432 - DNA, 448 bp, Glycine max
  Clone ID: jC-gmst02400051c03d1
ggtactcttaatcgaagttttattgtaatctttaccaattgaaattttatgacaccaacccatctatcccattttcaaaaattacaaaaataatatacaacctcaaataaccatagactttcaaatctctaagctatctaagaaactaaaatggttctatgcaaggtataaacctatactagagtaaaattccttctttctttacactaagattttatcactactcccaagaaacaagcacatggattagaagaaaatatgagagacccatataaccaatgtcaccaactatgatctatcccctcttcaatgtcttatttaggccacaaagtctggtagcaattgtgcagcaaacctcttcgggttctgcatgttgatactctcaaatgctgctgaattgtgagaattggaattgttcaaggcaccaaactggtttggttcaccaatg

SEQ ID NO: 30433 - DNA, 435 bp, Glycine max
  Clone ID: jC-gmst02400051c05d1
cgcacgaaaatgagattttacatccaaaattttaagaaaaggggtagggagtggggtttcttttgttacagaagcaaataagcaagcacaacagcaaatcaaggtagtcatgttagtgggtctttctacatgttactgggcaaaatggatctgtctctatagactggacaaaaccaatggcatagagaaaccctacaaatatcatatttgacaacaacacttaatccgttgaggaactggtttcagccgtttcatcctcactaaagctagatggcatctctgcagcagacctttgactttttcttggttccaactcagcaacagatgattggttaacatcatattgttcaagtggatcaactttagcccgctttgcaaccatcattttattttgtaagcgccctaacttcatctgggatcacgatattgtttttt

SEQ ID NO: 30434 - DNA, 431 bp, Glycine max
  Clone ID: jC-gmst02400051c07d1
cggacccgaataatgatactacattgaattcaattgttggggaccaagtgagagagagagagcatgcccaaaatgataataatttaactttaaagagaacttcatgatcatcaaccatccaaggatttaagacgaaaggaacaagtccaaccctcgaaagtgaattaggaagaaaacacaaggaaggaaaaccatacacagaagaagattccagagaaattcaataatacacaatttttttttttttattttcatttccccccctctagtagtcagtggggggaagctgctcgtgggtgtggctgataaagacaacctcgtaaacaaggccagcgattccaccaccgatgagaggcccggcccagtagatccagtggttggtccaggttcagctcacgacagcaggcccaaatgtcacagcggggtttatg

SEQ ID NO: 30435 - DNA, 453 bp, Glycine max
  Clone ID: jC-gmst02400051c08d1
ataaatatatgaagcaatcatatatagcatacctcagaataaattcatagagggatacaacaatctcatatccctaatccactctgataaactcaccactaaagcactcagtactcactcctttctcacaatcataacactcttgaatattaactacatggtatgcaatggtttatgatgagaatacagtcatgagaatgattccaaaaacaagggatacccactttccatgcacattgattttcactgtgccagagttctcggttgtgggattagtttgagaagattctgaggtatctggggataatggatccttatcagctttaggagcctttgctgaaggttctggtgccagagaaagtgcctttgctggtgccttggccaccgcaaagaaatccataggaagaagcaccttccccaccttatatatagcaagatgcttatcaatatata

SEQ ID NO: 30436 - DNA, 477 bp, Glycine max
  Clone ID: jC-gmst02400051c09d1
cagattctatggtaagaattttattgcacaatgagaaggcagagaaaattgatggttctgtttctcagtccaagttttagaatgaaaaatgaagcaccaagtgtttgtagtggtagtagtagtagtagtaagcatacaaaactacaatggcatggtacatacatataataattgaattaccaattcagaatttgatggctctcacttccacttgttggcaacaatgtcagccaaatccacaaccctttgggagtagccccactcattgtcataccaagcaatcaccttaaccatgtcatctcccatgaccatggtcaacgatgagtcaacggttgaggacacatcagtgcacctgaagtcaacagacacaagtggctcatcacacacagagaggattccctggagctcattgtctgcactctctctgaatgctgcattcactttttttgcaaggtcttctttgagacctgaacaacg

SEQ ID NO: 30437 - DNA, 416 bp, Glycine max
  Clone ID: jC-gmst02400051c12d1
acaaaaaaagaactgaatgggtataataatattatgataaaacatacaaaatattgtttgtaaatgaaacaaactataagcaaatttaatctgagtcagtgtcttcccaatcttggtgtcttctgataaccatttcccagactttatcaaaaggcctgaagtaaaatgaaatttcatctccatggatgaagtcattgtctgccaaaaactgataccaaggtcgaacaatgcatttttcgtcaatgccagggtcattgacgctaacgctccattgaaggggaggggcatgttttttgaggattgtcatatgttaagcacatgcatcaacatagggtacaacagagggtagaagtgccagtggataaggggcactgagcacagattgagtcacttccacagtccatacatattttctt

SEQ ID NO: 30438 - DNA, 201 bp, Glycine max
  Clone ID: jC-gmst02400051d02a1
caaatactgctcatgggtcttcagatactcgtcccctcttttattaagttttagaattcgcaggtcaaactggtcttaaggggctcattgtaatgctacgcacgaccggagttcgcctgcaaaagtcacaccaacatgccccttacccttaagagtgctcctcaaagcacgtggtttggccccgatcgtcccaagaacctt

SEQ ID NO: 30439 - DNA, 458 bp, Glycine max
  Clone ID: jC-gmst02400051d03d1
caaatacgataaattaataacttagatacattatttaacttaaacaaataaacccaaatacaagctaaattgggaaattctaatgtattatggccatctatatattcttaaaaatcaacttcgccacccttgaacaagtaagcttcttccttttacacattattgtgtctatatatattaaagaaaaaatagatcactaactaaagattgaattaattctttttgcgtgcagaattttcctttttcaacatttcaaacaagcttccatcataaacacttcggattgtttccttctgtagtaagccattcttgtctttggcaagtttgtaaaggactttccattcaaccaagccaccaatccttcctttgaaatctttgggctctctatttgcttttagcatctcctttagctcatcatatgttaaagcatttggatgagtatgtgaatgttttgtgaa

SEQ ID NO: 30440 - DNA, 533 bp, Glycine max
  Clone ID: jC-gmst02400051d05d1
caatattgccattcagtttaggtacgtaacaggagcagcgaagcataaaagcaatgcatccaaattaaaaccacatcggtactggtacacatctgaacatcaaacacaacagaaaacagaccacaagaacaagaatctgaagtagattctagtagtcttcatcctcttcctggccctcaccagactcagcacccacttcttcataatccttctcaagggctgcaaggtcctcacgggcttcagaaaattcaccttcttccataccctcacccacgtaccagtggacaaaagcacgcttggcatacatgagatcaaacttgtgatcaatgcggccaaacacttcagccacactggtggagtttgaaatcatgcaaactgccctctgcaccttggcaaggtcgcctccaggaacaacggtaggtggctggtagttaataccacacttgaaaccagtagggcaccaatccacaaactgaatggtcctcttggtcctgatggtggcaacagcagcgtttacatctttgggcacaaca

SEQ ID NO: 30441 - DNA, 464 bp, Glycine max
  Clone ID: jC-gmst02400051d06d1
caacaactatcaaaaagcacaatgcatattatccaaaagaataaaacagaacaaaacaatcaaattttacagcactgcctaatgcatggcctagttcatcttctatatacactacactctgcacacccttttgcattcaaacaaattcaagagaaaaattacaatgtataaaaaccaacaaatatgctataatgctatgcaccacgacaacgaaaaaaaagaaagaaagcaaatacgtaaatgctgcaaacttgttcactcagttccattatttgactttaatatcgcccttagcatccgaggaaaggtttttggaggatggagatttcccagtgatagctttctttgctttcactagtgactgcttaacctttgatatgatgttatttgattgcttctgagctggttttgctggagtttcttttggaaggtccttggatgtttttgttgcatcactttccttg

SEQ ID NO: 30442 - DNA, 52 bp, Glycine max
  unsure (1)..(52): unsure at all n locations
  Clone ID: jC-gmst02400051d07d1
ggacggtgtatgccatttagnntccgattttgnaggncntcccggaattaat

SEQ ID NO: 30443 - DNA, 532 bp, Glycine max
  Clone ID: jC-gmst02400051d08d1
agctaaattacattaaacacctttcaaagtcttaagacataactgtcctagctctgtgaatcagaactcaaattattggcaaggtctttatcataccaagactaatgttccaactatcaacttatatatcacaccaaaaaccgcgcacccaaatctcaatgctcaaactcgtgtggatctccaggttttttccacttgaaaactttagtagggttcaacgggggtacggaagttagctccggcgtacactgcttcagcaccaagctcctcctcaattctcaagagctggttatatttagcaagacgctcagacctgcatggagctccagtcttaatttgacccgtagccaaaccaacagaaaggtcagcaatgaaggtatcctcagtctctccacttctgtgactggccatgacaccccatccagcttttttggacatcctgacagcttcaatactcttagtcacagaaccaatttggttgaccttgaggagaagagcattgcatgctttagtatcaattgccttctgaacc

SEQ ID NO: 30444 - DNA, 562 bp, Glycine max
  Clone ID: jC-gmst02400051d09d1
aaaagtaatttttttatttttggagtattaaaacaaaaattacccatatttattggtactaaaaccatatttaaagggatttacaaatctccaatgttcccttatataattgtcctctttttgaatcaggaagtcaaatttctaggtacatacttcctctgtgtatatatacattgtaacatatttctatgatgagtccaaatttaatgtttcaatagcatggcttccatttgtctcttcctcgcagcatgttttagtttctccaatgcaacaagtccaacttgccttactctttctcttgacaaacctatccgtttactaatgtcttcccatgtaagaccttctttatccaatccataataaagtcgaataatttctctctctcgttccacaagggtcacattaatgagtttgttcacttcgtcctttagtgcccactcgtctactccattccatgggatgttctccactcgatcatccgcaatataactatgatgagtttctccttgtataccattcagagaggggaatgcttctctatcaagcgagatagttttgctga

SEQ ID NO: 30445 - DNA, 510 bp, Glycine max
  Clone ID: jC-gmst02400051d12d1
agaactacagtttaataaaatttctagaaagaaaaaactcttgaacaatgttcattaccatgatgaaaaaacagtacaactattgggaacaagctcgacaaaacagaatgaggaaaataattttagcactctagaaaactagctcatggggcttcactcctgccttcaaggaaaacctagcacccaagtaagacttgagctctggaacactctcaatggcctttaacaaagcagtgtccacggttttttggtcatctttcttttcttggggaagcacatttttctcctccttctctgcctcaaagaattcgccttcgccctttgttttctttttcttagcttccttggcaaagtacttgtcatcaaatttatcaacattgacatcagagatatccacctttgtggatgtaccaataacatacgattggttcacccttctcagaggaaccccattgatcttaaagggacctgttacaagaagcaatccagatggaagctgcttcagaaaac

SEQ ID NO: 30446 - DNA, 342 bp, Glycine max
  Clone ID: jC-gmst02400051e01d1
aacaaaaacccatagagcgattgatttcatcatccaaagtatggtttattataaagatttaagctctacacagagctgcattttagaatcatagttagatacacattcttcacttccactttttgaacccaccaccatgcttgccgaatttgccatgctttccatgctgcttgaattttccatggggcatgtgagcaccatgtgcagcatattggccataggagccatgggagccatgagagacatggtgagcaccataagcagcaacagccgcgggagcacccccggtgagcattgctcccatgccgccgtgcccatgagaacctggtgcatgagatgaac

SEQ ID NO: 30447 - DNA, 106 bp, Glycine max
  Clone ID: jC-gmst02400051e02d1
ggggcccaaaactggtaaaattccaaaacaataaggattggggggaacccccaaaaatacaacatttttttgggaaaaccgggggggggaaaaaaaaggggggtgg

SEQ ID NO: 30448 - DNA, 291 bp, Glycine max
  Clone ID: jC-gmst02400051e04d1
ccaaaaaaaaaatatgtcacattggggatatccctttttttaaaaacttattcctggtttttcataatttattatttatacaacatcccagttcttcttcctctatagtctttagcaaaagagaatttacacgttttacacgtcacactaaacgacaaaggcggggttacagaatttagaaaatttagaaaccctccgaagtccgaaccaaatccatcaccacctctattatccattccctgcttgcggtcccatcggccaatatttacaaccattacacaacctcgccac

SEQ ID NO: 30449 - DNA, 455 bp, Glycine max
  unsure (1)..(455): unsure at all n locations
  Clone ID: jC-gmst02400051e05d1
cacgnagcacatattaagacatatttcacattattactagttcataaacgaatatactaagcataaacaaatccaattccaaaatttgagaaacttggaaaacaacaacataacataaacctatcaacaccacgcgcaacttttgattaccgttacattaatcggaactcaacccataaaaatgaagcaatatactctccattttctaatatagggacacaataacaataataataatgggaaatgtctccctcaatttcacaccatctctgcaaaaggagagtgaaatttcaagggaccaaaattacagggcagaaggggcaggtgctgatgcaataatggcctctgacacgtcagaaacagggccaggggcagctcctgagctcacaagttcaaccatggcacgacgagggttggtcttgggcttttcacacagttctggcaaaaataccccc

SEQ ID NO: 30450 - DNA, 550 bp, Glycine max
  Clone ID: jC-gmst02400051e06d1
ataatgatcataaaaagagtaacacgttattgagtcaaagaaagtgcaccacaatcaaaggtcggctgtaatgtaattatttattacatatatggagtcttgccaagatgaatatcataaggtaaagaactcagggtgggaaatgcatcaaaaggaaaaaccgtgaccaccatcatgtgaaaaataagttcatggcacctacaagatccgaaaatggcatcccaatagtcctctgccttgccaaggtctaggtgtaatagttaagttgatcactgtgccttgcctcataataacaactggtactgcacaacccagatttgactgagcctcagaagaaagcctttggagcaaattatcacctgcttcaacattgccaaatttcaaaatttgatccccaagttgtaaaccatcctctactgctggtgatgcatctgctatctcatctaccattgcaaatggtctactaatcaacacgttcacattcattgagttgggagatcgtttcaaaaggacattttgtgatggtgttgatgcaacagtgtccatgttt

SEQ ID NO: 30451 - DNA, 517 bp, Glycine max
  Clone ID: jC-gmst02400051e08d1
aattaataattatgaggggatgactcatttagtgatgacaagagattgaatttggtcactaacttacaatttgcaatttgtgaccacaatgaaacttaatggtataaaagcatacaataaaagccatcaaaatcctagttctcaacctaaataattgtcattctcttccttcacaataaaatgaaaagtaacatgttttccatgtaattagctcaaccaccaagtgaaaccaattttggtctcccctagtgccacctagtttagccacaggctgaaacaacagcatcaggtaaatgggcaaatacaatagagaaagcagcaacccttattggctctgatgagttcacatatataggctccaaaggaggaatgtcaccatctgagtttacactcagagcttttccatttagtaccattgtttggctatgtatatccccatcctgtggagttagatggtactcctctcttgctgtttcacttgcaagaggcagttccatcctttttgaatgactagaca

SEQ ID NO: 30452 - DNA, 596 bp, Glycine max
  Clone ID: jC-gmst02400051e10d1
ggcaaaaatattatttcttattttcaatagatgaaaaatcatctagtagcaccaaaacacagaacatgttttcccaaacaatgacaatggctatactacaatatatggttttgttgtatcatcaaatgaatacattccaatcagacccaactttcctcttttaagactatgtacacagataactcttctaattaaggcaaaccactcaatagcagtaagaaaataaaagcatgcacacaagtgcaattaactcttatcattgggacatcaacatggcctctccacagagtcttattagcattccaccccacattgtttgagcactggaccagtttgcttgggcaagaagggatcaatcctgacccaaatcaatgagaaaatagatgctagaaggattgaccacaacactacaatggtaggagtcctgttttgctttcccatgagacctttgaggaaagggtacaagtgaacaatgacccagaaggcaaagaacagcttcccaaacaaaggtccccatgaaccatatccattgttgatggcatcagagacttcggccacgactcccacgatgttcaagatatgagagtagttgaggg

SEQ ID NO: 30453 - DNA, 561 bp, Glycine max
  Clone ID: jC-gmst02400051f02d1
gatgaattgatatccttttttttttttttgctcttggctcatgaaatcaagggattgaagtaagccctgagaattttgcaggattgaaaaggtgaaaataataagtctatcttgctaaacaattgcaaaatgagaacgtggtggcctaaggaacatggattctgaccttatgacatgactctgctattaatatgagctgcaataaggggtccaatattcccctccagaacataatttaggtctggcacctcaacgcctgtctttacatcatgtactaacttgtgcggatgagagacatacctccgaatttcttcttgccataaattgacaatgttttccttttgtatactttttatacttgcaactccttgttcctttgttgtcactagaagtttagctttcagtctgtttagtgctttcatcttatttgcaaagtggcttctctcacctcaagctgagaagattcatttggagaacctcttatcaagtagtgaactcctttttcccctgaaagatagccatatgcacactcaaattcaaactctataatagcaagaatta

SEQ ID NO: 30454 - DNA, 297 bp, Glycine max
  Clone ID: jC-gmst02400051f03d1
caaaagtctatatattgcaatattacaggggctcacatgggatcagttcttgaaaggccaacccaagaacagatcttaaccataacaggatacaaatagggaaattatgcattgcaaaccaatggtgtttttgtgtcacaaacacatgaataaaactactcaacaatagcataaaaatgaagtagatgactcaaataggccatcactcaaaaataagaatgactcaaagttgatgaggtgcagtgcaccattcagatagaggcttcactacaatgggaaaaatatgattgagaaaaa

SEQ ID NO: 30455 - DNA, 512 bp, Glycine max
  Clone ID: jC-gmst02400051f06d1
ggcattctagtccttcaaataaataagcagctggttgtcctcattcatttgccgaagttggtttacaaccatctcctggtatgatctcatgtcatatttgagtctagatttaccttggcaatgtctgttgaaaaagtccaggtcttcttttattgccatgtatccatagagctgtcgccggccaccagggagaaataatctacggtggtgactaaaccaagcatctcggtcagttccttgttctgcaaagtgcttgtgtagacgctcagcctcaagataacctatagctgatgcttcaaatatcaaaacgctcaacccccgatgaccctgggggccataagcgtgtcgagctttcacagcatcatatgcgctaaaataattaagaagctcctggttacccatacctagccacttatcattttcatcctgttcaagccttgtattctgaatgacaaccatcggaggccaaactatttcatgatctttctcctcatcttttaaccttttcactt

SEQ ID NO: 30456 - DNA, 508 bp, Glycine max
  Clone ID: jC-gmst02400051f08d1
atatcctggattatttgattcacactgtatatataattacatgaagccaaaactatctttcaaggagagagatgagaagtacaaataatgcaaaaaatgacagggaaaaaacatagaaagtgaagacatgttaattggtcttattttccctattagcagcttatccttttttatttgctccaagaaaatcttgttattagccttgatggtacacactccctttggaaattatattttctttacatgtttccccctcttcctctttaagcgaagattgtgtattagtcctcttctcaacacttgggaagatcacttggaggtggaagtagagattcatttggtcctttaccattgtccaccacaaatgccatcttcaatccccatgttgaatgaatttccaaatggcaatgcataaaccaaacacctggattatcagctcttgaatctgatagcagtccatcccccagagggaacaccaactgtgtttttcttcccaggatcccacaga

SEQ ID NO: 30457 - DNA, 513 bp, Glycine max
  unsure (1)..(513): unsure at all n locations
  Clone ID: jC-gmst02400051f12d1
aatattgatttggaaaatctttatttaaagctaactttgctcgtaaatgggtacatattgactccaacagttcagataaagctccatagctgcctcttctaggtcaattatggaagcttcacttgaaatcatagcccttatttcttataaactatatatacttctaataactaattcaaattaatagagtatttgagctgtttatttggaaggaagagcccccaaaacttctcatactctggctgcttctgattttcttcaaacatggcaaacacataagtttcaaggggtctaccaggcctttttggtgttccttgcttcacattccgaaccaagtttgtgttgtaagttcttgcattatcaagtgaagttgcagttccaccagaagaaggccatccactctcagacacaactatgttcagtgaccatcctccagatttctccaacgcagcataaacagcatcaaccatagcatcaaaaggttacggtacncaagtgaaccatcttgcacta

SEQ ID NO: 30458 - DNA, 532 bp, Glycine max
  Clone ID: jC-gmst02400051g02d1
gagtaatcatatttttctttttatcaaagttccaagagtttcgaacatgatggtgcacgttgaagtccaagattcgtaattgattggctagaagttcattaagtagaaaaggtacaagtaataatcatcattaaaaatagtgtccaagactatataaaccacaaacacaatttagacaaattaatgttggatccttgggttactgtagcatgtgtggcaagatgatcttagtaggagtaacctttgacgaacattccccgagtggcttcctcagattcaccctcggcagtgtactttccaagctgagcgagtgagttggacttggcacggaaaaggagtgcatcttgagcagccttcacgttctcagggagtccaccccatgtcttaagcaggtgttttggagagctctggcgtaggagaaggacacgtgccatgggtttggagactggttcatagcattcaagttcaaggttgcttcaacctcagattgtccgccagacagaaacatgattccagggacagcaggtgggat

SEQ ID NO: 30459 - DNA, 441 bp, Glycine max
  Clone ID: jC-gmst02400051g05d1
agatggcaactgaatgttgtccaatacagtttctaaagtggctgcaacatcccgcaggtaaaaactaaaacagaagcattctaacacatacatatgtccaaaaatcaattacaagccaattttcttaaaggaagaaaacacagtcacggacacttagcagtatttgcctatatcccaattaatgctactaccagcagaaaacctaccctccctaacaaccccatctattgaataaaaaaaggaatctgaaaaacaaaaacaccaaccgcagccaccaatcatcttcatctttccaaccaccaactcaagcacgctcaccacgaatccttcttgccagctgaatatccttgggcataatggttacacgcttggcgtgaatggcacacaggttagtgtcctcaaagagcccaacaaggtatgcctcagcagcttcttgcaatg

SEQ ID NO: 30460 - DNA, 506 bp, Glycine max
  Clone ID: jC-gmst02400051g07d1
aataatataaataatcaagctcaaccctgtggtatggtctatccagtgaacgaattttactaacaatgtgaattttcacaactctgcaagtaccttgtgcggttgtgcctagaactaagcatacttgaaacgacttctttgttgtctggaacatcttgtgattgtacggtagataaaaactctaatccagatccagagtcttcttcaaactttcatagaccacataagtaatgcttgcagctggcacaactttgaggagatttggaaagagtcccttgtagaaacctataaagccttcaagctgaaaagttctccgaaaggcatcaaacattcccttgtaagcatcggaagtgttggaaggttgtgcctgcagtcttgttcgaataacctgcaatggatagacacaagtagctccaacagccccagaaattgtcccacatcctagttgtactaaaggaccaggttcactatcctgaagaatatatctcttggatatatctttcatg

SEQ ID NO: 30461 - DNA, 499 bp, Glycine max
  Clone ID: jC-gmst02400051g10d1
atgtgggatttcaaattaattttattcagggtacttgcaataactatcgataaccgtgggtaatatttgtagctagactagctagcatagagaattacagcataaaagcataaacatgggcttagcagtttcctcctccataacattatacatcatgtaaattatttacatacacactatactggtgcccctaccatgtttaggcatccatccttatatttaatggttagaaacatgtatagcagctacagttgagaccatcgagtccaccccacatacattgcgacctctgcagatcttgtaatatccttcttctccccagctctccccccatgaattctttatgatccagtaaggcttttccttaaaacgaattggagcataagcaccagatccatagcccaccaaaagaaccccatgatccaaatgcttgccgcagatgtatgggcatgagacgccaccaatatatgtctgcataaaaactgcattgataccaact

SEQ ID NO: 30462 - DNA, 470 bp, Glycine max
  Clone ID: jC-gmst02400051g11d1
acgcaagaataattgctatttgacatttggtataccttcactgcatattacatagtactttatatatcatccaatatccatactgctttatttctgaaatgatttggaggagcgtttatgcactttgctaagcatttatgataccttgctccaaatggacacgggacaccactttatatttatttttccaacttattcgtatttaagaaaactacattgaaactcaaccttatgctcgtaattaaaacccatttccaagcataaaccactgctgcatgtcgtgtcggcatttggactgctagctgttgacttattatttgatgagaatgcatcttatgggtgatccctcagcaccagccaacctaagaggtaagcaatggaccgtatatattcctgctgccacatcatcaagcttcaagccttccacgagaatgatttccctgcctttcagaaaaacaaggtgagctgga

SEQ ID NO: 30463 - DNA, 487 bp, Glycine max
  Clone ID: jC-gmst02400051h01d1
gaaactgaagtaaatctgatatatacgttatagacgtttataatcatgggcactgtggattgttcccaggcccaccgtagtagaagtaggtgccccattcgttgctgtagtagctcttaatgtcgtaacagtttgtattttcggctaaggttgagatgccctgcacagaactcagattgttatccgtgtctacggtctgaaggttccggaagtagcttgcttttccgaaaccatcttctgcgaagtgcccagagcccatttgggtaaaggtgtgttggccgttggttcgtgagttcacaacctctcctccccactccaccatcgtggcgtggtctgctaagtgtgtgaatagctctgcgggccaataccctaccaatgtgttgtcaccaaaactcatccaccaattccccacttttggatccttccaatgaggattgtgatgtcatattggttgccatcataagaagagacaggagaaatggcagct

SEQ ID NO: 30464 - DNA, 545 bp, Glycine max
  Clone ID: jC-gmst02400051h03d1
cttaagcatgtatattgaaattctcgatatagatgctcatagttatttgcacaaaactggtaaaattccagatcaataaggattgcggcgaagccgcaaagatacaacattcattagggaaaacaggagtggggaaaaataaggggggaggggttgaggaagaatcaattgctcacagagcatgctaagacacctaaatattccacacacagttattgaaacaacccaatatagagaaaatttttctttggtgtattataatataaagcagaaccaaatgacttggaagattctactttcttataccattcacttggcaagttcgttgcggatgagttttgctgcggcaaccatgtttgtgagggctggcttcacctcagtgtacttacgggtcttgagcccacagtcagggttcacccacaagatgttcttctcgagcactgccagcatcttgttgattctgtcagcaatttcttcagttggtggtattcttggggagtggatgtcatagacaccagggccaattccagcaccatacttcacac

SEQ ID NO: 30465 - DNA, 441 bp, Glycine max
  Clone ID: jC-gmst02400051h04d1
ctgcaattcacatagtaaaaggggatactctctataatttgagattattacatatttctagcataaatcttgagagaacatttttttttgtttcatcatataaaatatatatgttctgaaagaacacatacaagtacacaaaaaaaagggggaaattcataaaaaaatacagaaaaaaaaaaaaacagaattgagtaagagggaaggaaacatagagaaaattttagcaatcagataataagaagccagtagtagtgcaaaagtcccttgccaagagtgttggaaccccttttagttaagcaggtaccttctcccccttgagtggcttcaccacttcccatgtgaagtcagggtcatctctgccaaagtgtccatatgcagcagtcttcaagaacctgccatttccaccccttttgagatcaaggttgatggagatcatgc

SEQ ID NO: 30466 - DNA, 421 bp, Glycine max
  Clone ID: jC-gmst02400051h05d1
aactaacaccagcacacacacaccttaaatcctgaattaaggtaaaaagagtgcactgtacaaaaaagggggaatggaaaagaaggtagcaaattctatttcccctaaatggaatctgaaagggtcttgcctgataagcctatcgtgatatacatttggaatattatcagggctgccagaaagttgagattgatagctagcaacttctcagtgacttgcacttaagttcagattctgaacaaccagaaatggttcaaatttacaactgacgggagatgaaagggcaactgaaataaacaagaaggcagtgctttcctgattgctgctaagagtgtgcttgagcatgctcaggtttgtgactgtactcataatcaagatgaacaaaagcacgctcaatctcgggcaaaagctcaagcttttt

SEQ ID NO: 30467 - DNA, 576 bp, Glycine max
  unsure (1)..(576): unsure at all n locations
  Clone ID: jC-gmst02400051h10d1
aaaaaaaactttcttccttttatttgaaacaaataattacatagatggattaagccaagaagtgacgtatgggagaaaaataaaatcagggggtcttggggaaaactttttcctctaaaaatttgatgaaacgttcatcataaatcttgggttcaactactgatattgtcatagggtcaaattgcagcgatttgtatgcatgctcaattttctttctcagattatagttctgcaatatatcaattacgcccatgtagaggacaacatcatatacctcaaaaagctctacttcttttgcctccaccttatccttatcctcctgaagcctgcgagtagcttgagctggcatgtttactccaagctgcacccgcaaccttgcaataccgggaagtagaagatcaacttcattatcacccatggagtatgctctcaatgtgttccctctaatgtggggtccaggagccgtgttgactatactcggttcatgggaaactaacagcaagcctttatgaagaatcaagagctgcccttcatctncagaaggtaaactcttctgacgctgcactgattcatgat

SEQ ID NO: 30468 - DNA, 428 bp, Glycine max
  Clone ID: jC-gmst02400051h11d1
cttaagcatgttatttgaaaatctcgatatagatgctcatagttatttgcacaaaactggtaaaattccagatcaataaggattgcggcgaagccgcaaagatacaacattcattagggaaaacaggagtggggaaaaataaggggggaggggttgaggaagaatcaattgctcacagagcatgctaagacacctaaatattccacacacagttattgaaacaacccaatatagagaaaatttttctttggtgtattataatataaagcagaaccaaatgacttggaagattctactttcttataccattcacttggcaagttcgttgcggatgagttttgctgcggcaaccatgtttgtgagggctggcttcacctcagtgtacttacgggtcttgagcccacagtcagggttcacccacaagatgt

SEQ ID NO: 30469 - DNA, 393 bp, Glycine max
  Clone ID: jC-gmst02400052a01d1
aaccaattccaaccctggtaatatcaattttttaaaaaatccaacattggcctgaataggctaattttggggtccaaactaacaaacttttggaattcccccctggataggggcctccatcactggataagaaaaaaccggggggccgggggctttcaacattcaagagggggggccaagggatcaaaactccctttggtgggattatacattttacagggttaacagggaggggcatttaacttttgggtaaacgaaagcttttgtttttgctccccccacgaaaatttttcccgggggcaattaacaacgccctgggtcatcataattaaaagggggcccccttttaaactgggaatgggcactcttttggcctgtattgagggggttttt

SEQ ID NO: 30470 - DNA, 520 bp, Glycine max
  Clone ID: jC-gmst02400052a02d1
agcaaatgtaatagccagaatatcgggcaaatccaaataatgctgcattgtcacatagtctacataacctgggaaactaacagcaatcaaatatgttcgccatttggaattggaatttgaatacaaatacagtgcatcaataatataaccctatgtacacagccaatatctgactgaaatttgatacagaatagtatcaatttgtatcataataaaatggcacagagaaatttatgtgaaggtaaaggggaagtgtatcagctggtgttttaattcttcgtctttcatttacttcatcattggctccttcctgcacgttcacatttcctttatctgcttaagcactgctgaccttgttcttacgcccaaaggtccaatggggtttagccggagtacgcctcaatgccttcactccgaatgggttgttcttgctcttgagacaagttccagcataagtgttgcagatgggatagtcgttaggggcagcactgtagtggtcatcacagcaggtagcaccctc

SEQ ID NO: 30471 - DNA, 511 bp, Glycine max
  Clone ID: jC-gmst02400052a03d1
gtccttatgggttttatttagttgtgtagtggttgtttcaaaatctgcgcaaagatattcgcattacaatgaattgtatgtaaaataaattatttggtagttgataaattgtacataaataatgtaagaatttcgactctggacgcaacaattttcaacgatggatgccccatagttcaactaaagcagaactaaagggatgctatcttggaagccacgatctcaagaagtccctttgggttatctacgtgaacccaatgaccagcattgggaagaacaaagaaggaagctttcccaggagagtcagatcctccctgactggctagtttctggatcctgtcaatagcgtcttcgtcccatctatcacttttttcagcacgcacaattactatttccatacccttgggagggttctccaatagattccaataggacttttcacagtaagaatcaaacatctccttagcattttgaatatcaaatatccatgtctcatgatcaccaacttttt

SEQ ID NO: 30472 - DNA, 520 bp, Glycine max
  Clone ID: jC-gmst02400052a04d1
gaagaattcccattttttgtctgataacacaaacagttacaaattcaactagtaagggataagacgactaaaatggcactcaaacgcaaggtcgtataaatcacaaatcataataaaacacactggaacaagcaaagcttgttaaaaggtgcaatagaatttatgccacaacttggaaaattgagagtttgggaccataactacccaagttgaccatcccacaaactaggatattttccatgagtaactaaggcttaaggagtgctgctcccaccagaaagcctactattttctataatcattttagttggcccggcttttgaacacatcaagacccatctcagtaggatcagttgcttgcagctctacttgaattccatccagctccctcttgaatctgtctttggagcttgcatagatcatcttgctcctcaccttgatgtgtcaggggaccatgcaatgaaaaaaattctgcttttaaggacatatcccttagtcagatactcaaatcataaacagc

SEQ ID NO: 30473 - DNA, 386 bp, Glycine max
  Clone ID: jC-gmst02400052a11a1
cctcggggaattccaattccacattttcaagaaataaggaggcaaaaatgttcatatatgaattggaattatttgttttcttattaggcctatcctgaagccaaaggaaatgagatcggaattcctgggggaattgcaatttcacattttcaagaaataaggaggcaaaaatgttcatatatgaattggaattatttgttatcttattaggcctatcctgaagccaaaggaaatgagatcggaattcctcggggaatttcaattgcacattttcaagacataaggaggcaaaaatgttcatatatgaattggaatcatttggtcacctattaggcctatcctgaagccaaaggaaatgagatcggaattcctagggggtaccgagc

SEQ ID NO: 30474 - DNA, 471 bp, Glycine max
  Clone ID: jC-gmst02400052b01d1
gagagagagaatacgaagcacactgtggacaggatgatgctctctttaagtagggaagcagatcttatcagtacacataggtaggttgaaattctagctctagcaatctagctagagaaggtagtacttgcacaacacacagcacatgataatttattttatacacaatctcattctcatggtgctcaagatgcatggactaattaagcaacaatgttggtctgataggcagtgtccacagataaattgggtacccataaaatggccttgcttccaaggaaatggcaaacagggttagttccaggatcaactcccataagttgatgaagcatttgatgattcattccagaagtatttgagtggcaaatagcaagtgcctgagttttggttccatcaccagccaccaatggaaccatgaaagctgttgtttcacggacttcatggccagtaaatactgcagttctgaaattt

SEQ ID NO: 30475 - DNA, 468 bp, Glycine max
  Clone ID: jC-gmst02400052b03d1
atatggaagctttatgattcgtctttaaggattaaagagtgatttcctcagcttgaattatgcagagaggcctcacttggagtatatacaaagaacaccaaagcaaccaccttgggtggggacatgatgcacaatcatgattgaaaaggctaggaatataattattaacaaatttctcaaatgtatggattaatatgagacgagtagtcacggattcctgctccttcccatcccatccactcctcccacatgtcccaatctggatcgttcattcccctcagtggctcatcgatgcctccagcatcataataagcctcatacgattctgcctcatttgattctcctctcaatttggacatcacaacatcataagcctcgttgatttcgtgaaactgcaccccacaattgctccctctgcacacatctggatggtactgcaaagcgagctgtctgaaagccttcctaacc

SEQ ID NO: 30476 - DNA, 519 bp, Glycine max
  Clone ID: jC-gmst02400052b05d1
atctgattaaattatcaaacaataatatgtgtacgacctaagttattaaaatcagtattctcaaaagataagaaaaaggatcgatccacacacttccgtgagaatatactgattaatgttcaaatgttttataatccaattgtatgaaaggtattattgcatgttgcaataatactccaagaagtagtcttactcatacatgtccatggcaactggagcttttacactttttgcaaagaacggaacgcagcatcttcttcaacctttcttcctcttccttcctcttcttctcggcctcttccttcttcttcttctcctcctcgtccttcttcttcttcgcctcctcctctttaactaggtctaccacggtgagaatcgtcacggagctgaacttcttcttcagctggttggccaagcaaaccatgtccacgttcacaccgctcaccgccacgcgatcattgtcgtccccttccgggacaccgtagttacacctcgtacttctgctgcaattttagggct

SEQ ID NO: 30477 - DNA, 537 bp, Glycine max
  Clone ID: jC-gmst02400052c01d1
gggtaaaactgtgaaggcattttatgaaactgtcaaacaattacaagctgttcagtttttcatgtttaaagaatacaagatttgatttagatacatatatactatatgagtatcacaaaaaatttaaagagacacactctcaagtaccactttatcaattcttaatgctaatcttgagtcgatcattggccccaggcagctatattcagtggccaagctccacttctccaagcttttttttcttcaaaattaccctgatcttcaagttgatacaaaacaacgaaggttaacggtgcactcatatcatctggggtacttgctagaaagaaataaccaatggcacgatgagcttatggtttccatggcgctggaggtggtggcggtgtacgaaacattgggggaacagcagagaaaatggtatttttgtcaatagatgtgcctttgtcgcctgacaatgccactagtgcagcaactaaaccggcattttcagcaagtggtggctctgtgtaattgtaggttgtacgaacatcatggaag

SEQ ID NO: 30478 - DNA, 470 bp, Glycine max
  Clone ID: jC-gmst02400052c03d1
acatgaccatattcaaatttacattgcaaccaaggaatgtatatataaaaataacaaaatcgcccataacgtacatatataccagatacaaatttttcacgacatatgatattacaaatgactaaaacttctagataacaacgaacaaaagctatataatgaattcccacactaccacgcagttcaaaattattgcataccaataatttcaagaacccttattaactttcactttcaaagggattggtacaacaatatcatatgctaataaatataatcttaagatgaagaagcaggtttggaagatgggttgaaaggaacctgctcagcgcatgtaaggatttcatggggcccagcctgttctcgaccaacacctagaaggtcaagataatactggtaatgggaaacgatattgttcatcgagtccacatcaccttgtccacaaacaccatccccatagagaatgttca

SEQ ID NO: 30479 - DNA, 468 bp, Glycine max
  Clone ID: jC-gmst02400052d01d1
aaaagagtaatatataacttgtttatttcaatcatatataaattcatgatagagatacaaacatctcaattaatgctctaataatccactcatatgtatatatatatataagacaagactggactatcatatcaatatatatagcataatagttagttcaaatattcttcattggtatatccagccacacgatcgtcctatatatatccaagtttatgctgcgaacactcccacaaagacaagaccaagaacaagagacacccacattccacttacaccaattcttacaccaccagaggtcacagtaggaacaacctgcgtcgaggactccgaggattgttccggtttaggcgacggcttctccttttcaggtttaggcgcctccgccacatcattcgcggaggtcaccggcgccggctttaaaacgggtgcgggagccagtggcttctggtagtagcaacacactca

SEQ ID NO: 30480 - DNA, 546 bp, Glycine max
  Clone ID: jC-gmst02400052d03d1
atattacctccaaacatttttttatagttcatacagtacaaggaattgtctgcgtctctgaacctttctttgaggttcatcatacattacaaaaagaaaactgaagtaaaatagttcatagtctaggtataaacagtttataataaattacacgaaccaaaaagaatcctttagaaaatatagtgaaaaagaatcgcaggaaatgtcgtcgtgatggcaacaagcgccccccctcaattttgagggcactaatgaaaggtggcacaaataaggccctttcaaaatcctctagccacaactctatgttttattaatatcttcgtcacccccacggcttgcattcagatatcatcaccatacatcgcgcaaatatctgccagtagtttgtagattctttaccatgctctcagccttggaactatcgagagaaccctgctcttgcaaaattgtgtgcagggcgcggtgtacatccctggccatgcccttggcatcaccacacacataaatgtaactccttgtgatatcatgctccaaatttttgaagcc

SEQ ID NO: 30481 - DNA, 452 bp, Glycine max
  unsure (1)..(452): unsure at all n locations
  Clone ID: jC-gmst02400052d04d1
ttccttcacnnnagtttttttttcaaccgatatatacccccaacacaanaagaataaaggaaacgaaattaataaataaaaaaccaagcttttcaacatgacatgcaaaatggtagacctaatgatccccacaactaggaccatttctaaacctgtttttctcactcacactgtccataagtctaagcttcagttttctcaacaggaacctctactggggcttccactgtctcagctggtttgttctcttcctctgtggttgctgctggtgctgattctgtttctgtttcagaagctcctttaggctcttctgcttcttctttcacttcttcagtttttctcctctgatttcccctcagctgctggcttctcttcctctgtctcctttgtcaccaccctccttggactcaactgccaccttttttaggctcctctggcttggccaccttctg

SEQ ID NO: 30482 - DNA, 492 bp, Glycine max
  Clone ID: jC-gmst02400052e01d1
gtataaaatattttatatcgttgtattcaatggatgacttctttacattaactgttccaaatatctttacagccttaaaattctaatgatagcttcaattttttccaaaaatgattgaataagattaagttaaggttcaacatctaactttatgcgcatggcccgaatccatatttcattcgacaacttaggaaactcaagatattttcctaatcaatcaacattgtttccccatttgtagtctgaattgtggccttggtgctctgtaggcttaagtgtttcttcatttcctgagacctgacaaactcctcaattcttgcttttagctcatcgtcgggaatcaacatatccgcggtaagatgagaacggttgaatggattagtactatcactaagaagatgcctctgaatgacaggacgatcaaccgtgatccttgaaaaaggcaagataactggatccttatcaatgtgtattgaattggatcaaggaatt

SEQ ID NO: 30483 - DNA, 490 bp, Glycine max
  Clone ID: jC-gmst02400052e02d1
gttcaaagatttcttcaaatgcaacctttccaacaattaacaaggcattacaatgaagtcaaattccaagtaatgtaacacctaacaactgctatataaatgaaaaactgtacacataaaaggaaaaatatagagaaattaagcataacaagaaccaattgccctgagggtagtagcagatccaagcaagggatgatttcaatagcatcatcaaatcaagcctttccaactcctagagtaagctccaaatcatccattccaacctcgtgtattctctcaccctcccagggtttcactctgccattctcgaagtcaaaatcggagcctcctctgcctctctcggcaacagaaccccactgcatgccttcctgggcagcgatctgctgcatcgcgggcttcatgaagttaaaggtaggcgaaggaagagcagccgccgccgcagccaccatcgtcgtctgaacctggaaactaacccagcggcccgaggcgg

SEQ ID NO: 30484 - DNA, 473 bp, Glycine max
  Clone ID: jC-gmst02400052e03d1
gtctcaaaggaatacatcacattatagttactactataagtaataatattgttccattttcatcccagacacaacttgaataactagacaccaatcacagaagatataacatgaatgaagacatatctgctatgaactagtgtataactaacagtgacacatgcaacagtttcatgtgcatagtaaggatgaagagcaatgctagatcatctggtggtaatctgtctgtctggattttcatgttcagctacctcctcctcctcttgacaaatccatccaaggttcacagccaagtcttccactggcaccttgatcacatcacttctgacaccaatatcagttgcatatctgctcatgcagtacattcctgcagttacagtagcaacaccaacaggacttggcattaacaacttgagaggagaagagatcattgcagccaatggagcaccaataacagaagaagcttgggcact

SEQ ID NO: 30485 - DNA, 507 bp, Glycine max
  Clone ID: jC-gmst02400052e04d1
agaatacctttttaatccatccaaacaagttcaaaacatacataacacataaaaatgtagaaatccggataccgccattcaagcatgaaaatatctcaattatacaatattctaaaggagattttttttggtggtaaaataataagtgctaaaagtctagccaacacgggagagacacatgaacgtctctacttaaaaaactaccaattaatggtaaggatagagaaaatttcactcgagaattttcatgcacatattctagggtagcgtcttgattgcaacaacattatgtgcttggagcagcctcttttttctcggtcgacccctcgcctgcatcttgttcaacaggctttgacacttcttgctcttcatcgtcactctcatcaatgtcatccattgcatcacccatcccaccaaatttagagaaatccatcccacccatgcctcccattgcatccatccctcccattgcatcagcacccatccccccaaatttcgagaaatcca

SEQ ID NO: 30486 - DNA, 541 bp, Glycine max
  Clone ID: jC-gmst02400052e05d1
aaacagtatacacgatctaccatgtgcttacatatgccatttgatgaggaaaagaacattccttaaagttcaacaatcaacaatgctaaaaactaatatcaaccccatcaattcattcatctttcgttaatcctctcttttcttcctccttaccatcatttaacttgtcatcagatgagacatgttcgttggcttgttccaaatcctcttccttgttcttttcactaatttcttccacggacttgtaagtgtaaaaccaagcacatataaaataataaacgagattcacaacttgaatcccactaacaagaaaataatagtagtccaatccacccctattgaggttcctatccggaagccaattattctccttgccagtgtacttatgcaccaatgacaccagcaatgtacccatgtagttcccaatggctgtggttatgcagtacagtgctgtagcactgcttctcatgctttcaggtgattgctcaagagaaattccaatgcccacagacatgaaaattcagccacccatgaggcaatc

SEQ ID NO: 30487 - DNA, 448 bp, Glycine max
  Clone ID: jC-gmst02400052f01d1
aggtcaaacaatggtcaaaatatatattgccattccgtttgggtctgtaacaaaagcagcgaagcataaaaacaatgcatccaaattaaaacccacaacggtactggtacatttgaacatcaaacacaacaacagaaaaagaccaccagaacaagaatctgaagtagattctagtagtcttcgtcctcatgctggccctcaccagactcagcacccacttcttcataatccttctcgagggctgcaagatcctcacgggcttctgaaaattcacctttttccataccctcacccacgtaccaatggacgaaggcacgcttggcatacatgagatcaaacttgtggtcaatgcgaccaaacacctcagccacactggtggagtttgaaatcatgcaaactgccctctgcaccttggcaagatcaccttcaggaacaacagtagggggct

SEQ ID NO: 30488 - DNA, 546 bp, Glycine max
  Clone ID: jC-gmst02400052f04d1
aagaattattcattatgaattacttttccccaaacgagattaatcaaagattcggcgttaatacttactcggcaattgaagttacagttacacgtaactgtacacattgatgagcaagaccttaacatacaatgcggacatatttatagttattacaacataattgcaaaactaatgtgaataaaaccactctaggaatttgatcttctgaagaatcaacttccctcaaagcttaagtttgcataaactttggaatggtttaacactttaacatcatctctaacagatctaaacgaattccgtgcttgtgcagtagagcacaaacatgaaagagtgtaaatatagaggctcctaccaaactaagtgatagtaatgtatatctacgcaaggatgcaacttgacagaaaagaatgttgcctcaacaaccattttgtcactgaattgctactctaagatcttcagacagcttttctgcttttgcaatagcctctgacaaaccaaaaagcttttactttggcatacaaccaaagtgatatgacttacaga

SEQ ID NO: 30489 - DNA, 495 bp, Glycine max
  Clone ID: jC-gmst02400052f05d1
aaaaaaaaccttcccacatttgactcctcctttataacaaagtcataggacagcatagaaaaccagaaaaaatgtgatatagtttctgtgaccacatccataaacaccattgttaagactagtctgactagaatctataagccataagccaggtcttgaacaaaccaatataaaggcttacaaaaggatctttgcttaaatagaaacaacaggctgccagcaccaaaagctagttctttggcccaatatccttcagggcgcaaatctgttcctcacccatagcagacatgacagacacaacaagatccttgccctcagcaaatccatcctttatctgagtgagcagactctcatcagtgggaagcttgaggtcatccttggtgttcccattttcagtaagcagactcaaaaatccatcctcagcaatatcaatgagctggtaatcagtacgattcacatgaggaacatcacagttgtgagaagagggcacaatat

SEQ ID NO: 30490 - DNA, 394 bp, Glycine max
  Clone ID: jC-gmst02400052g02d1
gtactattaaacaaatttatttagccccgccgcctgaatgatttttggttctcacaagtaatacaaaacttgggaatcaaaaacctttggaataccaatcccaagttcccaccctggagtaaccaacccttcccctggttgacaaatccccctcaaaagcctcatcagaagcttatagcttcctcattggggggaaaaaagactaatacagaatttcctttcacagcagtaactagacttgcttggaagaagggtccttgagttcctgagggagaatatccttccccctaataaaggtaggatccttcaagaacgtatccttgggtaggactttctcatcatcaggccaatttttaagggctttttgaagctggttaaccctttgctcgacatg

SEQ ID NO: 30491 - DNA, 437 bp, Glycine max
  Clone ID: jC-gmst02400052g03d1
gagaatcttataagtcagaatgacatataccagctactagtgtacaaaagaaaacaaggagaggctgtctacctcaaaatgcaaatttgtaccagtggaaaacaacagtctacatagttcatgatggtgtttccctttgtttttacaattccaaaatatcatgattaaatggaactctactttccttttcttcaactattacatcttcaagaccaagctgacggttgtggcatcaatttcaccaaaattaacttcatacttttgtacccaggaaggactttatgcctgctggagagtttcctggcttagtagtagtagtacttccaaagttgagctttgcttttttatcagctggctttaatatttggaaagagcacattagtgtctcatcaacactcattatagcgccagcattgtcaaactctccacaataatta

SEQ ID NO: 30492 - DNA, 528 bp, Glycine max
  Clone ID: jC-gmst02400052g05d1
gcatataattggaggaagcaacctttatgagcattatcatccgcaccattcatttacataaaccctattttctacatggattagttacacagtcttgccaagtctttactaacttaaaagtttttctagtcacaaccaccacatgccccacaatgtcacaacccataaaacaaggtcactcaaaagcaaattttttgaagaagtaaagctcaatttaatcagaatcagatgattctgatctctgttcctcagaggctgcattatctcctttcaagttagcctctccctgcttgaatgccttggctatctcttcaatgggaatcaaaggtagatacccaacgaaactgtaacccttttgagtcatggccttgatcacatgattgtacttctctgaccagtgagcaacagtgggaattgccatctctgacagtgcatggaatggtggatagtgggttgagtccattccacaactttactgaatttatcaacacaaaatgctttgattctgtagcaacataatgaacagct

SEQ ID NO: 30493 - DNA, 560 bp, Glycine max
  Clone ID: jC-gmst02400052h01d1
attgaagtaatttcaggtattgtctccttcatcattcacatttttaaaaatttattctaaaattcaaatcataagcagagacaaaacagaaaagaaaaggtatataatttgaaacttaatttaagcatcaacaatttcctcagtgtccgcagaagccaaaataagctggggttcttcccttccaactccacacgttccatcaattgcattgttcctacccaaagccttcaacgccaaatgagccgccttctgccctgatatcatcatcgccccaaacgtcggacccattctcggggagccatcaatttctgcaacctccatgccagtgacaatcatgccaggcacaatctccctagtgagcctgacaatagcgtcctcagcagcattcatatccaaagccttcattccaggaacgctatcaatcatcccaatactcttcaacctcttaaccccagtggcgccaaagggtccatcgtgcccacaagagctcaccacaaccttcgccttcatcacgttggggtccatgcatgactgcgtgtcatgggtcatcgaaaccagag

SEQ ID NO: 30494 - DNA, 552 bp, Glycine max
  Clone ID: jC-gmst02400052h02d1
cgataaaatttaatgttattaagcaaacaaggggaaaaaagaaaaagagtagcagagtcggttttccacgagacgagaagagacacgcaactcgataagtatcacaaaagattacagaagaaaaggaacattctcttctcaactatatcctatttgttgctgttgctgaggtggttggtaaccaggataccccggataactgccatacatgttgggatcctgtccagcagcaggagcatacccataattttcataaccttgtgcagcatacccatagtatccaccaccagaaccagcaccaccattccactggtttggatctgcctgagcctgtttgtttgaaggactgcggccccatgaaagacgaacattttgaccacccaacagggtcccattcaacacccgaagtgcctcttcggcacagctcctgtctgcgaattggacaaacccacatcgcttgcctgctggaatcttcacatgcactaattctccatactggctgaaaacttgcctcagatgatcatcagtgacattaggatccaaattaccaac

SEQ ID NO: 30495 - DNA, 493 bp, Glycine max
  Clone ID: jC-gmst02400052h05d1
attcaagagaaacaactgtgcattacatttgatactgctctcaggactatcaagaacaaagagcatcatcatacagttgacgaaggtgactgcaaaggtgatgtcaagacagccaatttttcagcaaaaaaaccagaaataaaactgataacttcccattgaacacaagaaacaaatgctttttactcatgagaaacaacgagcacttgttttccaacattgcgaccgctaaaaaggccaaccaatgctgaaggtccattctcaagcccctcagctatgtcttccacatacacaaccttcccctctctgatatttggcaggagaaactccaagaacttgggatataggtgaacgaaatccatgaagttaaagccttgcaaacgaatccgcttatatatgatctgtgccaaatttgttacaccttcatgttgagtaagattatactgtgagatcattcccagacgggtatgcgaccacgactctcatgttcagg

SEQ ID NO: 30496 - DNA, 464 bp, Glycine max
  Clone ID: jC-gmst02400053a03d1
gaccccaactggaaaaaataattttttcaacgatagcttacattgcatatacaattatacatacttccatgattccatcattctgtatcacatttgaagaaaaatcatggcttggtgagcacaggcatacaaaaaggacatgcattaattcctcaagtcaacaaaaaatgttacctatttttattttgacagaaaagtcagaaccaactttttctgtagattgaaagggggatctttaagagggagctttcgccgacgttaactattttcctactcatcaaaaccaatagcttacgtgaacaaaaaggaaggttttttggagagcaaagctttaagtgacgaatggtcagtcacagaggggctacaagtgaagttttggcatacaagagctacaaccttgttgactgcaaagttattttttgccatgagagcaacattactggtatttacttcccaaaattcca

SEQ ID NO: 30497 - DNA, 508 bp, Glycine max
  Clone ID: jC-gmst02400053a08d1
gaccgtcaataatgctcaaacatttcaatagcataataatttacaagtgaagatagttgcggaagggagaggatccaccgaggaaaaaaaaatattaaaacatacaggggaagatgtcactgtccaaggccgaactttgattgaaggttgtccagaatctctgcatactctattggtgttgcctcaccgctgaacacttcatcccagatcttgcgtatgtcatccttatttgttgatgaaaggcacattacaatcacatcaaatcttggtaccttggtcaaatgctccaaataactgacaaccagatccatgtcctcagtgaaaagagatgcaagacacttgatgatctcaattagtatggtagaagacaaggcatttttgaatattttcggcaattcatggggagatatagcctttaatagacgagcctgcagagcaagatcacctgaaaatgctctccaggagacctcatactgataagctgtagttggaggtgttacgtttttgg

SEQ ID NO: 30498 - DNA, 467 bp, Glycine max
  Clone ID: jC-gmst02400053a09d1
aggcaaaattttgaattttgtttttcaaaccggcattatttggttctccaaaagttcttcaagtttaaaaggccttaagggaaaaaatgaactccctttttttgtacaaaaaacctttttttttttgctaaatgaaaaaagatgattcatcttttacctggggtctagacaaaaaaattagtaaaaagggggttcaaactcctccccgacttacttttttacctctctatattttgccttaggggcctgttccccccccgggaaccccccgctgggggaccgggccctagaaccacctgaaatgggctctccaatctgggccccaattttgtttgcggactcaacctttgccttgatttcattaacattttcccctgacattgccggtctaaaaacccaaactgcatccccaatttttttggcccccttacggggaaattctttttttgtttaacctaaactttttt

SEQ ID NO: 30499 - DNA, 467 bp, Glycine max
  Clone ID: jC-gmst02400053a10d1
tcgcgatcttgtggaatttgagtgcagaaatcagagagaatatgatgtgtggactcaaggtgtttcaaggcttctctctattgccgcagaaaagaacaacaaaaacagaatttgagccttttgttttgggaatgtgtaaggagggagaagaaattttggcaatgggggaataggaggatcaatcaaggtggtgttagtagcattatagatgttttgtacattgtaaaaaggttaaaaaaactaaaggcaaagttaatgccatatggggtctcacactttactcttggggatctggatggtgttttttttttttgaatgagaaagcgaaacatttgaactgaagtgtgagcccatagtgaaccaattgaccttttgttccttcattattctggaaagaaaatgagtatcttggacttgggggggagtggtagtcaaaaagaagtggaaaagatcatattggagggaaa

SEQ ID NO: 30500 - DNA, 482 bp, Glycine max
  Clone ID: jC-gmst02400053a11d1
aggaataagtaggctatacttcaacaaggagtttatatagtaagaaaggtacatccttggtaaaagcataaagcaaagctaatctaatggcacacacaaccatgagttcatgaaatccagtcattagttacattcgttgttggtgtgacaatatcttagtaaagtactcaaaatataaattaatagatataataaagtatctaaatgatggttcccccatcagacaaaagaccagttcatgaatacgaaggcaaggcagtgattggaatcatcatcatcgagaactttccatgcaatggcctgctcataagacactggtcgattcatacttgatacacatattcctgctggcagatatgcaaatccctgttgcattatcttggagaactcaatgcagagaaccttcctgccagcttcatcaagaactttatccagcattatgtcttgaagagcaacaagagtggtttcaagcatgtcaagtc

SEQ ID NO: 30501 - DNA, 347 bp, Glycine max
  Clone ID: jC-gmst02400053b01d1
caaggaaggagctctccatattgatcattaacagcaaagctgggttatggatacaacatcattgataaaccagcggaaactttcaaacacccccatttttcggcagaaactctattgaggccaaagcactacccgatagggtgctgtataacaccttccccacaaatcctttttgggattctccgtatatacccctggaaaccgggctgccctttttttgtatatggatggctatacaggctatgaacatgatgaggccctccacgggtcccattcagaaatttatgtccggtgacagggagcacatactatgactattggtgagaccaatccttgtcgtagtctta

SEQ ID NO: 30502 - DNA, 430 bp, Glycine max
  Clone ID: jC-gmst02400053b03d1
aaaacaacatagttcaatattgccattcagtttaggtacgtaacaggagcagcgaagcataaaagcaatgcatccaaattaaaaccacatcggtactggtacacatctgaacatcaaacacaacagaaaacagaccacaagaacaagaatttgaagtagattctagtagtcttcatccttttcctggccctcaccagactcagcacccacttctttataatccttcttaagggctgcaagggcctcacgggcttcaaaaaattcacctttttccataccctcacccacgtaccagtggacaaaagcacgcttggcatacatgagatcaaacttgtgatcaatgcgggcaaacacttcagccacactggtggaggttgaaatcatgcaaactgccctctgcaccttggcaagggcgcctccaggaacaacg

SEQ ID NO: 30503 - DNA, 506 bp, Glycine max
  Clone ID: jC-gmst02400053b04d1
cgcaagccaagtcattattacttgaacaagtctatgccaaatccacagcactactaataggatgtaattatcagaaccccatgaagggccacacaataaagctacaaacaagtaacttgttgcagcttacatcacgaaatacctcagttcagtactaacattagagcaataaagaaggccacaataagacagaagttatcatggtaataaactacagggctcaatattggatgtatacaatcatgataaagagcccttatttctttccacttttcttgagcccagaacctccaaagcttcccttctgttgcgccttggctttcaactcctttagcgccttctcctcttcctttttcttctgaatgttagccatgtcaacctcgtcgtaatccttcttatcagacttgggttttttcaaaggcttagcttttccaccttgcttggtcgacatggttgcgatgcggagctagggtttggtctgaaaacataaacgacagacagaggaa

SEQ ID NO: 30504 - DNA, 503 bp, Glycine max
  Clone ID: jC-gmst02400053b07d1
gcttggccatttgctcatactccgcaattgagtcttccttggcaagtagaaaagcaatctgcttctgcttgtaaaactccaaacaattattgcatttgcatagagcatctttccaatttttggaaaggaacattggtttaccaggtaaaactgggttaacagtaataatgttaacaccaaggagacaatttacatgcaagtcgatgctttttgtgcattgatttgaagccatactgccattacaattttctccctgagacaaactcttcccatcagatatagatttggaatcaacagtagcttgtgcatcatcaactttaggagaactacatgaagtattgcatgttggcttttcagacccacaagttgaaggcatgtcttccaagacacctttgtccttgctaatttggacagtagcatctggctgcttttcagccgcccatatttttttgggatttaactttataaagaagcattcgtgagagcctgccttacatatgaat

SEQ ID NO: 30505 - DNA, 404 bp, Glycine max
  Clone ID: jC-gmst02400053b08d1
gaaaacccccaaaggggggcaaaaacccccccctaaaaaaaaaaatgtttttccccccaaaaaaaaaaaaaccaccaagggcccaaaggggggtttattatccccggggggggaaaaaaaaggggggggggggggggttttaaaaaaaaaaccccccattaaaagggggggggggaaaaaaacaaaaggggggggaaaggccggggggggccccaaaccctgggggaaaacattggcccacggggggggccctggggttaaaaaaaacccggagacccccaaaaaaaaccccggtttttaaaaggaaaaaaaaccccggggaaaaaaaaccccccaaaaaaaaaaaaaaacaacaatttgggagaaaaaacccccgcccggaaaaaaaaaaaaaggaaaggggg

SEQ ID NO: 30506 - DNA, 412 bp, Glycine max
  Clone ID: jC-gmst02400053b10d1
ggggaaaatttttttttttttttttttttttttaaggggagggggggaaaaaaccagggggaaaattcccaaaagtatttttttttttccccaaggaaccgggcaaaaaaaaaagacaaagggccttagggggaaaaaaagagaactttggggcaaggggtcaagcccaaaatttttttatgtaaaaggggcaaaaatttccaatttgctatgggccctttttttggggccccccaaaaaaaaattaaaattttaaaaaagggggccaaaaggggcaccgccagggaacaatttcccaaggcccccccgaaaaaagataaaggggccggcaatggttaaagccccaagagccagtaaccttaagggtcccatccctgatccccctcttgggggaaaaaaaggggttaagggg

SEQ ID NO: 30507 - DNA, 54 bp, Glycine max
  Clone ID: jC-gmst02400053b11d1
tttttttttttttttttttttttttttttttttttttttttttttttttttttt

SEQ ID NO: 30508 - DNA, 548 bp, Glycine max
  Clone ID: jC-gmst02400053b12d1
ctggggacccaaatttctaatatataaaaatataatggttctcatacagatttttctgctacacaggtgtagttacattagtgaaaatggagttaaacacaagggaactgcaaaagggagcagaagattgcattgcatgtaggcatcctcattgtccagggacaaagttagtggcataagcccaagcattgttggcaacaggatcagcaacgtggtcgtaaaggttctgaatagggcccttgccagtgacaatagcctgaacaaagaaaccaaacatggagaacatagccaagcgaccgttcttgagttccttgaccttcaactcagcgaatgcatcagggtcatcagccagaccaagagggtcaaaagcaccaccagggtagattgggtcaagtccttcaccaagtggtcctccaccaactctgtaaccttcaacaaaccccatgagcacaacctgaacagcccagatagcaaggatgctctgagcatggatcaggtttgggttgcccaagtagtcaaggcctccctctgagaagatctgtgcaccg

SEQ ID NO: 30509 - DNA, 358 bp, Glycine max
  Clone ID: jC-gmst02400053c02d1
gcggccgcccccaaaaatgttttttttctccacaaaaatgttccaggagatttccccccccctgaggggggaatgcgcctcccccgggggcggccccctaggggcgccaaaagggggggtcacccccccacaaaacgccttttttttcaaaaaaaaaacgctggggacaaaattttttttcccccccccccccttaaaaaaaaccggctctgaaaaaaaaaaaacaaaaaaacttttctggggctttttccccaaggggggccctaaaaaaaaaaaaaccccccccctcctgtggggccccgctccccttattaaaaaaaccgggcgcaggtttgaggttcttccaccgggggggggg

SEQ ID NO: 30510 - DNA, 508 bp, Glycine max
  Clone ID: jC-gmst02400053c03d1
catcatataaaatatatatgttctgaaagaacacatacaagtacacaaaaaaaagggggaaattcataaaaaaatacagaaaaaaaaaaacagaattgagtaagagggaaggaaacatagagaaaattttagcaatcagataataagaagccagtagtagtgcaaaagtcccttgccaagagtgttggaaccccttttagttaagcaggtaccttctcccccttgagtggcttcaccacttcccatgtgaagtcagggtcatctctgccaaagtgtccatatgcagcagtcttcaagaacctgccatttccacccctcttgagatcaaggttgatggagatcatgccaggcctgaagtcaaaactctccttcacaatgctgaggatttccttgtcagggatcttcccagtgccataagtgttaacaaacacagacaagggctcaggcacaccaatggcataggaaacttgcacaattgccctcctagcaagtccatttgcaacaatgc

SEQ ID NO: 30511 - DNA, 457 bp, Glycine max
  Clone ID: jC-gmst02400053c05d1
gggataaaatgatagacagaaatgcttaggagaaactgttctatttcttaaaagtaagttggatcaaggaaagggaagttcacatctacattttgaaagaaccactgcttcccatacaagacacttgaatcatggttacagcttactgagttttgtggtttccattgccacttctattaatttctgtaactaccaacatgctttgagtacgatcagaagaatgggtttctatccatgtttaaataagtataaacatctgagtcggttttcaaggacaaataaatgaataatcattttatctgcactgctccattgctcaaacccgtgttctagataagcacttatgaagatggtcactacgttaatatgattgagctccgtgaaaaccttggcatcaagtttaggaaccacaaaatctggagtgcttgctgcatgaaagatgcttatgatactggcc

SEQ ID NO: 30512 - DNA, 548 bp, Glycine max
  Clone ID: jC-gmst02400053c06d1
ggaaattgaggaggaattaaggtaatttatttcaaatactagtacaaattcaccaaatagcaaaatccacatgctcgacctcctttttgctacatcagcagtacgatcacaaggaattttcaccatgaaatcaataatatatttgaaaagctgaagggaaatttctcccttttctctttcatttaaaccattgataatatcattctcattttcatccaagactccggtactatccattgagcaacgtgttgttattaattccaaaagcttccaaataatactccagaagaagttccatctgtcgcctttcacttaccatacttcattggttctatgttaaaaccaatagtgggaaacttcttagcataatcctcaacttcatgacagagattagcaatcttagattgaatttgttcatctgattgcatagctgccacaaaatctttcaactttgtaccattggtattttccttaatctgcaaggcttacttgacagccgcattaaaggattcagctactttttcaaaatctttctcaacaaatcccct

SEQ ID NO: 30513 - DNA, 550 bp, Glycine max
  Clone ID: jC-gmst02400053c09d1
agaaaaatacttttctcatcttcattcaaagcatcataacttactttaagtatgcatagatttttttatgaggaattctttcatatccatctagagcagatttccattcttctatactttttccaaataagttggaacctattacttctaaaacaaatggaagacctgaagcataagttaccgctcgattcaaaatatcatgataacttggatcaattcctttttcaactcaaaagccttctgagtaagtaattgaagagcatgtttctcattcaactctctcaccttatatgttattttaacattgtgtagagctaacaaatgttcgtctcgagtggttatgatgattctactgccaagaccaaaccaatcagggctgccaataagtgcttgtaactgtttatcttcatcaacatcatctagaataagaagaacctttttttgcttgagcttacgctttataatgggaattccttctctccaatttgttaacttaatttctccagcggttttagaaagaaggaagctttggagtttttctaacccattt

SEQ ID NO: 30514 - DNA, 434 bp, Glycine max
  Clone ID: jC-gmst02400053d02d1
attgcggcataatacgctgaaatacctcaccctctttcttcacacacaaactactaccattactcaaagcccacctgatttctctattttcttccaactttataattgagcaagggcttcaaaggattcgtttcacactcataccttgtttattctacaaaccaaaacacaaagataacgtactaaataagtgataggtgatgctgatttccaattgtccacaacttatatagtagcatcaagtccaagttctatggccttgagtttcaatgatttcaagcaacgaatggcttcatcaagaagctcgattgggtccttgtcctttccaccaggaactatgcattgcaggatgctcagaacatcttgaatcttctcctttctaatcttttaattgcctgacaaggaacccatttcacctgacccttactactact

SEQ ID NO: 30515 - DNA, 570 bp, Glycine max
  Clone ID: jC-gmst02400053d03d1
gcagcaggagggaatcaataagaaacctcagctcttacactcagtaaagaacatacagaggatgggcaacaaaattctgctggattacataaagcaaacatatattgtgcatatgtacttcagcagtgctgtttacaccttttttctttttacattctttctccgcaccccctttgtccccctataatacagttcccctggggtagtataaaagaaagatattgatataccttttaaacgccgttacatacaggcaaactaataaaagaattgcacccgtaatagcatggagtatattaattcaatgggatagagccctctgttatgtaaaagcaaaaatcctatcagtaatacttgtgcggcatattggacactcagaacaagcaagtgaacaagatttacacaaacaaaaatgtcggcatggaagcagaattgctgcagttggagattcaaaacatactttacaaacatgggaattggcatcaccatttccaagggactagagttcttttttcttcatttcttgcatgcgcgccttgaggcgaacaaccaagggctcttctttgggca

SEQ ID NO: 30516 - DNA, 464 bp, Glycine max
  Clone ID: jC-gmst02400053d05d1
ataacatgaactgttcatttacaaaattaacttcacatggaaaaccagatacagcataattcaagtcaatatacaattatacatccaccaacataatatcagcgtgtttggattaacagtgagtacccaaaaatcacgcaaaatacatgaaaatctgaaagcaacaatgagttgttatgctttcaatgggaaaaagaaataatcaatccaaccttattgtgctagtattccagacacacactacaacaactacaagaattattagtatcggttgagcttggattctaggcgtaagtcaggtttccaccattggtgaatcccatgagcttctttgaaatcctttgaaggagtatgattaactgtcagagaagctgaaggaatgaggtgcaggggttcatcaaattcctttcccacacacccattagttgacaattaagggaagtttgagtggctaacttttcaat

SEQ ID NO: 30517 - DNA, 468 bp, Glycine max
  Clone ID: jC-gmst02400053d06d1
gatctcacattaataatgctttataacctgcacgaggattccattggattaacaaacattcaaaaggaaaatatatgtacaagaaactacaacatgttcctcttaacctgtaacacaacattggagaaacctaatctcctatgtttctttctatgcatcctctcttcatgtaacacaattgtaccgactttgggaaattatcaaacttcacttattttcatcgtcatcttctgtacaagccacctgcttgacagcaaatcaagctgcctcagcaagcacgtgactcacaaactggcagccgcctgggcattggtacactactaccagatacttttaaggatgcaaacaggcaagataatcttgcaatcatgggcttagtcttcggcattttaggaacaatcgtcagttccatccccacatcacatgtgctatgatagccttcaagatcagctttggttataagtactg

SEQ ID NO: 30518 - DNA, 516 bp, Glycine max
  Clone ID: jC-gmst02400053d07d1
gagaaaatcagagatttttatcattctatatattggggaatgaatattctacgccatcagtgcataaatgagtaatttacatttattgaaatcacaagctaaacttaaccatgaaaaaaaatgggataaataaaacggggaaagtaaataggtagcctcaaacgctcatttggttgaatgagaatcctatacccttttttctccaatgcagaagaacctgcctctgccaatgcttaataagaatactagtcttgacataatgctaagtggaaaattagatctgattagtccaagacttcagaaagccaaatgcttttccaaatggaaatctcagtctcactcttaatctttctgattcctccataaaaaccatctgcttcatttccttcctctctatgatctcttctacttataggtgttttcccccaacgcgagtcaggattgtactgattgaactctagcaccactgtgtcactactatgacaacggcagtaattttcattcccatcgcatact

SEQ ID NO: 30519 - DNA, 494 bp, Glycine max
  Clone ID: jC-gmst02400053d08d1
gcaatcaattgggacaaaattctgataaaatttccattgcatcaacacagtaacattgcatagccaaacaataaattgtgagtatagggagaaaaaaaaaaacgaacagtttaggtattgatgagatggcattagacattgaatggagtagtagtagtagtagtcatgaaacacgcaaattattcatccacacccagcaagacatccactgaagggagtgattaacttaacaacactcttaagcttgaggcttctctgacttgagtggcttcacaacttcccaggtgaagtctgcatcatcccttccaaagggtccataagcagctgtcttgaggaacctatgaccacccctcttaaggtccaagttaatggtgatcattccaggtctgaagtcgaaattctccttcacaatttgcagaatctccttgtcaggaatcttcccagttccataagtgtccacaaacactgacaagggctcaaggacaccaatggca

SEQ ID NO: 30520 - DNA, 524 bp, Glycine max
  Clone ID: jC-gmst02400053d09d1
aggcacgagataaccactttttaccatatatatatagagagagagaatacgaagcacactgatcacaggatgatgctctctttaagtagggaagcagatcttatcagtacacataggtaggttgaaattctagctctagcaatctagctagagaaggtagtacttgcacaacacacagcacatgataatttattttatacacaatctcattctcatggggctcaagatgcatggactaattaagcaacaatgttggtctgataggcagtgtccacagataaattgggtacccataaaatggccttgcttccaaggaaatggcaaacagggttagttccaggatcaactcccataagttgatgaagcatttgatgattcattccagaagtatttgagtggcaaatagcaagtgcctgagttttggttccatcaccagccaccaatggaaccatgaaagctgttgtttcacggacttcatggcagtaaatactgcagttcctgaatttagcctatgacacatcact

SEQ ID NO: 30521 - DNA, 518 bp, Glycine max
  Clone ID: jC-gmst02400053d10d1
cttcaaacacgcaatctttattgtatacgagagaataataaagccaattctcaactcaaattgttcgttgcaaacgttgcaatgtttatgtgcgtaacggggtaatacaaaagataggaacaagtattgtttcagcttaacacgaaaggacaacacacacaaactttcctcattcaacaaattgcaacatccactgcaacatgtaacactcttacaaagcatttccttcacgaagattagaaaagaaaaaaaaaaatacttgcaagctcagaaaaacaaaactcaatatatttcaagactaaaaaatcggtaatgattttcaagcaatattgtggtatgggttaataataatagtataatctatatatatgaaggcaaacattatgcagcttgcttgagcttctttgtgatgccggcaatgtacttgccttggtggaatgcttgctgtaactcgagctcacttggctgtcttgagccgtcaccggcataagttccggcaccatatggacttccacctt

SEQ ID NO: 30522 - DNA, 430 bp, Glycine max
  Clone ID: jC-gmst02400053d12d1
gaaaaccgaattatcatttattaactgtaacttgctttggaacaattcaagttcactaacaacatccatgaaatccaatcattaaaaattggaaaaccaaaccaaaccaaaccaaaccaaacttattccaacaccactcatcaaacagaaaaacaatccaaactttcaaaactcacaaactcaagaacaacttgaaattactactaacaaaaacaagaccaattggtcaaaaaccatgaatcttgatctggtccttcctgacaaggccagcctgaacgaggaagtgggagacgttcttacgctggtcgccttggagttggatgatcttgccaagctccttgtcctgcaccacggttccgttgcagcagaactccttcttgaggtccttgaggatcttctcgtagctgaactccttcttcagcccttgcac

SEQ ID NO: 30523 - DNA, 385 bp, Glycine max
  Clone ID: jC-gmst02400053e01d1
aaaactgaaccccctttttttggttttggatttaagaaacaccctgggggggccttctttccaaccgggggcccttgtttttagtggtgccccgaaaaaatttcaaaagaacctcccaataacaaaattgggggggggggggaaaaaccccccctggtaaagcccgggaaaggtttggatattatacattttttagggggcacgcccaaaaaacttcccccttaagggggggggattaatttcttgggccttctcccaccggggggggtgggccccttccccggggggggggggggcttcttttccaaaggggccatgggggggaggtttaaaaaacctggttttccccccccttttggaaacaagggtgggggggaacattccc

SEQ ID NO: 30524 - DNA, 528 bp, Glycine max
  unsure (1)..(528): unsure at all n locations
  Clone ID: jC-gmst02400053e04d1
ccttagaaaatatacctagcagcaaaactttgggggtatatatatatatatatatatatatatatattcaaggagagacacatctccccaatagtcttaagtttccaacaaaaacccaacaaaaagcacataaagcaataataatagggaagaaaaggaatggaagtccctttctgcctgctctcttcatagttgcagtgtctttacctgctgcagcaatgtttgtgtgcttgatcttcaacctgctgaagctagacattcgattcaatgctcggctcaccaaagcactttcagcagctgatgcaggagttgtcggtattgactcaacaaaggcccagagagcagaggagaagctacttgtagcaacatcttccacagtgctactttgattgttattgccttccgtaggaaagccaacagattcatataccacacctggggatgatagcgagaaagaatcaacaaagccttctgatgcacttggnggtgtttttttcaccgagcatccagaattcaccgacagtttga

SEQ ID NO: 30525 - DNA, 422 bp, Glycine max
  Clone ID: jC-gmst02400053e05d1
gcgaggggaccttacagcttagaacattccagtgccccttataccattggatgtgccagacaagtacatccagtaaaccagggggatcttatccaacatgacttcatgggatcattacattttgtgctggactttggtggtcctggcatttggcttacaggtgctttgaagtgcaagcttacaggttagcccttattattgcgaccaagaggaacatgcatataaaacattaggagtgctcagccagagtagggacataagactgaactattctgctggctcgccccctggaatagcgcacacttgttcatagtcaggaatatatcggtttgtccaggtgaggtatcacatcataggacttttttcttgatccataacccatatgggtagagatgaaatgttgaactgatgccatgatgggg

SEQ ID NO: 30526 - DNA, 584 bp, Glycine max
  Clone ID: jC-gmst02400053e06d1
gcttcagaataaagagagcttaaatttgaaatggtgattttacaagaatacgggtacaacaaagataaattattgcaaatacagaacggatttccatatgccaaacaaacatttaaaatttagccatttacaacaccacgaagaaataatcaaatttattaccaagcgcgctttcaatccaagtgaagcactagggatttttttttttatatccttgatcatggtaacaagagttgactaactgctgaatattcgcttcaaacttgaacaaattgtgcgtaatcttcccatgctcattgagcttatctttggacaaaagcgaacgtcaagggtctccagtatagagcattttgatatggcagcttcaacagcttcctcgtcaatattgcaagactgaaggaacagactggtcaattttggacactctagcttcaaaatttccaaagaggaacaattgcttaaattaagaaagcataggttgagaacagtaacaataacctttttcaaatttgccgagagtgaaagggttaaaaattaacacagggaaacaatttgccctcatggaatgacacctttctaatatt

SEQ ID NO: 30527 - DNA, 581 bp, Glycine max
  Clone ID: jC-gmst02400053e07d1
gaacaattcaacgattcatacattatgacaaccaaaatgatatcatcttccaactcataatatttaatatataactaaaaaaccaaattttttttcttacaaagtattggctccatcctctgacatagctacaattagaacttccacattttatcatcccttcgaagcatgaaagaggacggaagaactcatcacaaaattaaggtgtgttgaggaattagctagaaccagcttcagcaaaatctgccaatttgttttcttttaatgaataattgattgttgagcagtcaactgttttatcccttcttgctgaacaataagaggatatctaaaagaatatgttcacaaaaccagaataaattcaccggttttggagtccttcaattgcctttttccactggcatgctctttgctttgcgtcctcaaacgacattacctttttaggtgtgcaaatcttgaaatttgatggactagccacttggatgcttaaatcatttggattatcagaccatattatattttcctttacaattagctttgatgggtccacatagatcaactttggttttgtggtaaggatg

SEQ ID NO: 30528 - DNA, 551 bp, Glycine max
  Clone ID: jC-gmst02400053e08d1
caggcagacaaacaaatgctcaaattgctcttatgagcaacaggattgaatttttacaaataatttgaaataaattacaaataaacatttttcactacttacacaatgcacacagcagcaagtgctcataagttaaaaggaaaaacaaagtgaagatgcttgttgcaagaaacaagtccacagtccccggatacatataaattagaaaaatgagaatctaatctcactgaaaactgcactggctgccaatctccaagtctgcttgtccagttacctcggtcgcatcaatttcttcaatatgcttggtcttgtttttgaggtcagataagccatttacatcactcttatcaccatagttgtctgtcttaagtgtgtgatgctttctcctgattccagctcctttctccttgtccccttcagataaattaactgcaccattgttgctctttcgccggcccagctttggagattttgctcgcgttgctggtagcttcttcaattcaaccttaggagggggcccttcatggtaaaagcttggcatagggcttgct

SEQ ID NO: 30529 - DNA, 566 bp, Glycine max
  unsure (1)..(566): unsure at all n locations
  Clone ID: jC-gmst02400053e10d1
cattacggggcagacatataatttattaagacaaacgcaaaacagcagtttctctgacgatcagtcgaccacaaccgcacttttgtggttaagtcttaagtgattaactacagtaccacaaaaaatttcgacactgtaatatataagatcctttgaactgaaaaagagaaccgagttacaaagaaatcaatgtagttattattaaaccagccagaacaacatcaacctgacattttgctaattgaaaaatcaataaccccagttatcattcctgatctcatcatcaaacttcttcctcagctcaggatgcttttcaaagtactcatctgccgtcatggtactaagctttttcttcaactcttgtacttcagcaatttccttttccaagcgctcagactccttcagagatttctcctctgcttctttaagctcaatcaaaagggcatcaaatttaggcttatattgaggagttactgtatcaacaaacttgnggatctcaatgctctcataatgctccttgtacatatccaccaaacgagtgccaattcccttttatagtaatccca

SEQ ID NO: 30530 - DNA, 516 bp, Glycine max
  Clone ID: jC-gmst02400053f02d1
atctcaactcgtaagtcatttattatttttcaaccattcaagtaggaacattctacacatgaaaggcaagattacatcacatagcgatcttttgacataaaacacaatcttccactctccaaatcaacaactcagattatttaaatatccgatcacaagagcatctttctccttttaaattctcaagcgaactgaccaaggtattcttccacggtggtgtagttgacatccgggtacaactcagaagcctcaaccccgaaagatggctcaatctcaaagttggtgtggtcacccttcacgaacactgagtggttgattgctaataccacattgattggaagaggtgcctcttcgatgtccttgagaaccttctcctctggtacataaattttttcgagggtcttgccaatcttgttctcccacaaggccacaagctcgttgaacgagtaaatgttcttagggggcctgaggtagagaatcttgttcaatgtcctagggtcatccacagccctgatg

SEQ ID NO: 30531 - DNA, 504 bp, Glycine max
  Clone ID: jC-gmst02400053f04d1
agatggaaacttatctgagttaggtcttcatgaaaatccatacattcatcagagacataaacataaaagagaattttcaccaaagatgaagtggatcacaaaatactcttggttccttctctacaaattcacatccttagaaactaaattccatcattgggattgacccaccagctgccacgatctgttgctcaagcctgatcagtgtctcaaacttattcttaacatggcaggactcttgccttacttggtgcagacaactgaggcacgcgtctatgttctgttcctcacaaaagttgcggaaagaaatgcaacaattctttaccctctgagcacctatgcttgagctgctaccctttagctggtgaacatgagcatcaacttttttgaagtcaatacttttctgattttgagcaaaggttaggtcattgagaagtctctcagaatcttcaaagaagagagagaccacttcaactacaaagtccgggttggtctcatcctgta

SEQ ID NO: 30532 - DNA, 430 bp, Glycine max
  Clone ID: jC-gmst02400053f06d1
ggctagagggaaggttttccatttttcaagagaacaatttcaagaaacatcccctgaaaatttgggggtatatatattttcatttaacttttataggggcttccatgaaataaattataaaatttggagcaaaaaattttaacacatgacagcctaaataggttaccccttttcaacaacccttcaattacaattcctgccctggattctgcagaagaggctaaaatacatttgtgcaaaacctagcggatcattcacatgtcctgtgcagattccgccgaaccccctccaaagatttttgcctgtccagaatgaaggaccataaatcacattttgctaaaaaagggcagagcccatccctaaaagggggcttttccagccttggtttctgggttttttttgatcccctaggctggcaaaagctcggacc

SEQ ID NO: 30533 - DNA, 570 bp, Glycine max
  Clone ID: jC-gmst02400053f07d1
gcctccaaatagttcacaaacgtgaactcattactattcatccaactaaaaatcgcataaatatataattacatgtatacaaggtaggttaggtaggtaatcagtatcttcacgacaatgatatgtgcatgaaaaatgaaaactcatacaacagaatataacattcgacaatgtgagtgatcacacaggaaggcaatcgatcatcattgtgcatgcgacacaaggaatgttttctgtctttttaagtttcctgcaaagccaatcaactgattcatcgaatatattgtcagaagacttttaatttcaacctctcaatccgcaacccaattgaacagtgcatatagtctcacatgggtaatttaagctttgcctccatcttcattcatcatttggtgggtcaatgggtatttcatgccttggtttattgtacttctcccttaattgcttgattgggatgaaatcttctgctgaatccattccatagaatagaaaagagatgtagggatgaacgaatctttcagagtctggtttatacagtgttaaagattctcctctggaacatatgcccct

SEQ ID NO: 30534 - DNA, 557 bp, Glycine max
  Clone ID: jC-gmst02400053f08d1
aagccagaacaaacattggagatattatatatatatatatatatatatatatataatcgtacaatttttcattttggaagtccaaatatacagaaaaataaaaaacataaaagcatttcaataagaatatatcaactatgctccctgctttatttctttttctgcactcttttcttaatagattttttcttcttctcttattcacaccaatgaacaatgagaatttttctccctttgcactaggcaatctataaacaacttgtgtgttgtccaattattccttggcagtgctgtttctttgccctgatgatgccattagcacagcaacagccactataaacataaacaacatactccctagcagtatatatgttcttcttgatgatttcctgtactctccaaacagaatcacgccccaaaaagtgcttacaagtggaagtgcctggactgcatctgctgctgcatatcctgctgcttgaccacccataaattgaagaccattcccaaacccacaaagtagaccagccaacaaggcccagactctgccatctgagtct

SEQ ID NO: 30535 - DNA, 411 bp, Glycine max
  Clone ID: jC-gmst02400053f09d1
aaacacaacacaaaagcttattcattaggtctcatccattaatttccattggaggccgaaaaccgaaaccaaaaatccgggggggtgaaatttcaaaaagcaaaaacaaaggggaatggtgtttaagtacaaacaaacaaagggggggggggggtacaaatgctttggaaatttttcacacttaaaaacctgggggcttgttggggataaaacttttgccctgcacttggggaacgttggcgaatcccatgataccgatgaagccgcggggggatgcaatcttagccttttgaagctccttcaacacctgggaaggatcagggccacccaacataggggggttccacatgggccaggagcggccattgtattatcctggggacctgttgggctcacggggcacaaaaccgg

SEQ ID NO: 30536 - DNA, 558 bp, Glycine max
  Clone ID: jC-gmst02400053f10d1
aataaaaatacttttttttttctcaaatatactcgagtctatccgaaatttggagaaagtagcttctcattgtcctttttcatttttaagaaaaaggaaaaggaattctagttgtagtcaagccctcatgaccagaaaatacaccgataaataggaggctgatagttgatatatgttctaagggtgatgcccaacagctttgccgcaaagcagaacattgttgggaatgtcatattcattagcaaggcttttctgtgcatcccacactctgagatagaactgttgcccaagatattgcctttcccatattgcagacctcaagttccacatgccttggttatccaaagacaccaatatagtagtccaggattttggatacacctgtgtagtgtgtctagtcagggcatccactagattatatgttttcctgctggcatctgtccactggccgaaaccatgaccaatgacccaaaaatcataacaatcaagatgccaagattgcatggtgttttcgttgttctggaaaataacctcaataaaatcatggagagaagtttg

SEQ ID NO: 30537 - DNA, 583 bp, Glycine max
  Clone ID: jC-gmst02400053f11d1
caaacatatttgacaaaccatatattacaaataatcacttttaacattttcatgttaatagtactagtagttagtacaacacaggaaaaaaaagcaacaagcaaacttacattgaacaccagctgtactactcatctgggatgcatgatgccatcaaagttgaatcccaattcacattatcttttaatgctagagggttgaagcaacgaaaatcaccctccagtctccaccactttgttaatgtggtagcaatgaatcaaatgatgccaattctttttgcgtcacacaaatggtctttgagactcccaagtcatctaatatatgtttttctttataagaaggtgggtttataaggatcaatgaatcgaatatcttccacgctactttttggtttgattacatggagtccagtccgcacaacaagcggctctgttgggttccatttgaaatcaacatcaacagagaccactacatgattccaatcattttctgaaactacttcatccacattatcttcaaatttaatctgcctttcaccaaatataagtatatgatcagttaatactgggaactcgaaataaaa

SEQ ID NO: 30538 - DNA, 529 bp, Glycine max
  Clone ID: jC-gmst02400053f12d1
caaacatatttgacaaaccatatattacaaataatcacttttaacattttcatgttaatagtactagtagttagtacaacacaggaaaaaaaagcaacatgcaaacttacattgaacaccagctgtactactcatctgggatgcatgatgccatcaaagttgaatcccaattcacattatcttttaatgctagagggttgaagcaacgaaaatcaccctccagtctccaccactttgttaatgtggtagcaatgaatcaaatgatgccaattctttttgcgtcacacaaatggtctttgagactcccaagtcatctaatatatgtttttctttataagaaggtgggtttataaggatcaatgaatcgaatatcttccacgctactttttggtttgattacatggagtccagtccgcacaacaagcggctctgttgggttccatttgaaatcaacatcaacagagaccactacatgattccaatcattttctgaaactacttcatccacattatcttcagatttaaatct

SEQ ID NO: 30539 - DNA, 541 bp, Glycine max
  Clone ID: jC-gmst02400053g04d1
gagaaattatttaagatctttaaaaccttgaaaacattacactgtgaacatttcacatgaatcattgaaaactacaatatactgtatcctgtatgaaagaccatttgcagaaatatcctcctcctaaatgccaagttgccaaactactgttgaaatttatggtgtgtggactccaactatgtatggccaggtatagagtcttcaaatgtaggacttgagttgctcaaatttgagagacaaagtgttctgccacaagacgacgcaaaatctttccggtggcagtcttgggcaaagaatcggtaatgaagacctttttggggactttgaaagatgcaagattcttcttgcaatatcttagcaactctgcatcatcaatgtctgatccttctcttgggattacagcacagtatatctcctccccatactttggatcaggcactccaaaagcaactgcctgagcaatgtctgggtgtgaaagaaggacagcatccacttctattggtgatatcttttctcctcctcgggtgatgagctccttgat

SEQ ID NO: 30540 - DNA, 321 bp, Glycine max
  Clone ID: jC-gmst02400053g05d1
ggggggcccttttttttcaacctttttccggtttccgaaaaaaagggggggccaaagggggggccacccccaaaaattttcccggggcgcccctttttgggaaacccccattgggcaaagggatcagccccctaaccgttttccaaagattagggatttgggcccaggggtaaagctctccacccacccccccgggggaaccaacgcccccccggtgtctatgggggggtttcttttaacaccaacccaattgttttcttaaagccccccccccctttttttttcccaaaaaaaagcggcccggccattttaccccctttt

SEQ ID NO: 30541 - DNA, 510 bp, Glycine max
  Clone ID: jC-gmst02400053g07d1
aaggaataaaaggatcgaaatataacccacaagcaacgagacgattaatacaggctcaggaaataaaattctaaggccgtccaccccattctagtaactattgtagaatcttatcacattttttttagtagcattcacagcttcgtgacttgcattgcagcacagaagaggacaagaggtacaacagtgccgaaacgaaaatatgcaaaaaataaactgaaatggtgaacaggaatgagatgttctagatcacaggataaacacaagaactcctaaaggaatggtcacaaggctgatgtatatgcaaacaagaatcctgacaccaatataactgacaagagacaacaaaaaggctagtgtatatatatgatataaaacaagtattcaacaggaaaagaggaaagggttattatgatttctcagccaccaacccttctgagtgtaagaatcatgttccttccctcggcagttcacgaagtatacaacatacaaattaacatgatgaacttt

SEQ ID NO: 30542 - DNA, 566 bp, Glycine max
  Clone ID: jC-gmst02400053g09d1
aaagtaattctccctatgatctcataaatatttcactttggaagaaaagatgtgagcagaggataggcaaaaagtgttacaaatgtcaaaccaacacaacagttataagttatacaatgattaaccagaaaagtcaactaagaaaaaattgattcaaaaagattattcaactataggttcttaactcttaaatctgctttgtgcctttagaaatttcttccaacagtcattcgccaagcatatggcaacttaaaaacatattggaaattaagaattgtgatctcaaattctactccatgactgcaacttctccagcagcttttattttttctattatttcatttgcctcctcttttgtgattccttgttttagcacaactggaactttttcaacaagatctttggcctctttcaatcctaggttagtaaatgctcttacctccttaatcaccttgatctttgcggcagcatcaaatttcttcaactttacatcaaaagctgttttctctggctttttttcctcaacctttggtccagcagtaccaccttttgtacccatgcccatg

SEQ ID NO: 30543 - DNA, 510 bp, Glycine max
  Clone ID: jC-gmst02400053g10d1
ataggtaatagccatccatgaactttgatatcaatcatcctatgaagaaacagagaaattaaacaaggaggcatccatatgcctaatgaggaattaaaagtatagaatttcaagccaggaataattaaatgagaaagaaacagaaaacagatgttacatttttgaagaccaaattagtactacccttattgatcctaaccataccctcactgataataagattcataacactagtgccgtcaaattctgcttcagttgttgagaggtgcaggatatctgttgatgcaatcaagccaagggttcctagaaggcttggtgactcggcgcatggcgcgccaaaccacactgttgcacttgaagccagagccaaatgcgagttgccaaacacggtctcctcttctaacactctcttttgcttccatgtaagccaactcataccaaatgctgctgctagaggtgttgccaaagcgatgcagcgtcattctagacgcttcgatgttcttgtcactc

SEQ ID NO: 30544 - DNA, 516 bp, Glycine max
  Clone ID: jC-gmst02400053g11d1
gtaaaaagcaagtaacattaagttggattcggatacacaagataattcacattatctgaagtacttcaccaaacacaaatctaaaaactctcaaaagtcatttcgttctttgacgctcactttccggggacgaagttggtggcataggcccaggcgttgttgttgacagggtcagcaaggtgatcggcgaggttctccaatggaccctttccggtgacaatggcctgaacaaagaagccaaacatagagaacatggccaatcgtccgttcttgagttccttcaccttaagctcagcaaaagcctctgggtcatcagcaaggcccaatgggtcgaagctgccacctgggtagattgggtcagtgacctcaccgagggggccaccagcaatacggtaaccttcaacggcacccattaggataacttgtgtggcccacatggcgaggatgctctgggcgtggatcaagcttgggttgcccaatagtcaagcccaccctcgctgaaaatttgggacccgg

SEQ ID NO: 30545 - DNA, 435 bp, Glycine max
  Clone ID: jC-gmst02400053h03d1
ggggcgatgatgaacattagattcatgtgtcaaatactagtaatggatctcctgtacagtcaaataactccaacatttttagtacttacgcttcaagcaaacaatgcaacagtatgcacttgaccttacaacatttgaagtttctttacttcacagtcatattggctaaaaaataataaggggcctccaaggatggaagatcatgaaagcttccgcaaaatctagctgcctaagactttatacattcaaaattaccgctcaatgttaaaccagagcagcagcttacttttccgccctcatttggcttttcaaatttgcatgtccggaacatagacaaaacttcttctttcaagtcctgatgggggacacagaagtccgcaggggcataataattgcctttcggaattaggacaataatgcatctcccagaaataa

SEQ ID NO: 30546 - DNA, 556 bp, Glycine max
  Clone ID: jC-gmst02400053h06d1
atggctacaggaagaagacaaaattactaacacaaaagaaacatctaagtaaatctgttgtgcgagattatatatatatttacacttgacattttcgcatctcagcttatccaacaaaaaaaaagtttgtcattatctctgatcacatcaacggagtctatttcagctccttcttcatttgtcaccattgcatcttttgcatcaaacccaaatttttcacctgcaatagtttttagttcctctattgaatcaggcaaccttattagcttcccagcttccatggaacatttttctcttctaactacagggtgacctctatatatgcttacccttggaaactttagtccactattagatcttcctccattgtgctcctgctcttgatgtctcccttttaatacaacttcactgagcatgacctcagttacattaattagatgcccaatttcacgcttctgcagcatttcatttaaggtggatgaacaaaattcatggttatgcacatcagagacatcagcaccattcatgacaagcaactgaaccatgtcaacatgat

SEQ ID NO: 30547 - DNA, 468 bp, Glycine max
  Clone ID: jC-gmst02400053h08d1
atctcaaaccaaatcgccattatgtatagtaaaaaaaaatagggtaactggacaagctatttggggcctcatgttcaatgcaaacaactacatgttctacagttttaggcaccagcaaatacaacaatttgatgtaaccatgtacgtgagaagaatttgtcaaagctcattcatgaaccgcactactgaacacaaaaaaacaagccattaaaaacccgttcaggggcaaagaatcctatttgcaacagcaagggcccaccatatatgtcaggggaaccattaataacctaacattccctgattcacatgggaagaatattaatcctcccaacttgagaagaagcacaagggaccaataactcaaaccgggctctcaaaagaaacttggaattgtgctagatgccttggctttggcttaaatgaagcaccaaggccttgaagcaacttcatgacatcagcaggggcatc

SEQ ID NO: 30548 - DNA, 388 bp, Glycine max
  Clone ID: jC-gmst02400053h09d1
gaggggaattttaatttattaacacaaatttaagtgcatgtaacaaatgaaaactagaatagaataattaaagcgcccccaaaacgtatggggtagggaaaatatcacttttccaagagctccactccacacaacataattgagcctcttatatggtacgcaatataaatacataaagtactatatatcccactgcaaacaccttcgggagataatatgagacacatttatggttgttgttccatcaggacttggaggataatatggggaatcttctgcatattcagttggcattgacatccaatgcagactaggtttccaatctacttctcttagaacctttaatattttcttcaccactaccttgcttccctctgctgatagatga

SEQ ID NO: 30549 - DNA, 425 bp, Glycine max
  Clone ID: jC-gmst02400053h10d1
gaggggagaaaaaaacgggggaaatttatttggggccattcttgtttcattctcgggctttgcatgcccgtctgcactgaaaaacattccaatgggcccctcaaattcacaacatgccccactcaaggttctccttttcaccggttatctaaatattgaacaagggaaacccccaattttttaatttcaggggcccttttttttaaagagccccaattacaagggccccttttaaacaaagggggggaaatggcttgacattcagctccaagcttaacagaaatccccggggggttattattcaatccatccttcccttcaaaaacctttccttcactttattgggggggacaacatagacatgttcctccccagcccctcaaacaattacgatttacaaatgatagccgcgcttgggagaaggg

SEQ ID NO: 30550 - DNA, 509 bp, Glycine max
  Clone ID: jC-gmst02400053h12d1
gtaaagagcaagtaacattaagttggattgggatacacaagataattcacattatctgaagtacattgcaataacatatacttcaccaaacacaaatctaaaaactctcaaaagtccacaagtcatccttttctttcatgctcacttgccggggacgaagttggtggcgtaggcccaggcattgttgttgactgggtccgcaaggtgatcagcaaggttctccaatggacccttaccggtgacaatggcctgaacaaagaacccaaacatagagaacatggccaatctcccgttcttgagttccttcaccttaagctcagcaaaagcctctgggtcatcagcaaggcccaatgggtcaaagctgccaccagggtagattgggtcagtgacctcaccgaggggcccaccagcaatacgattaccctcaacagcacccattaggataacttgggtggcccacatggcgaggatgctctgggcgtggacaaggcttgggttgcccaagtagt

SEQ ID NO: 30551 - DNA, 410 bp, Glycine max
  Clone ID: jC-gmst02400054a04d1
ccttcatcattcacatttttaaaaatttattctaaaattcaaatcataagcagagacaaaacagaaaagaaaaggtatataatttgaaacttaatttaagcatcaacaatttccttagtgtccgcagaagccaaaataagctggggttcttcccttccaactccacacgttccatcaattgcattgttcctacccaaagccttcaacgccaaatgagccgccttctgccctgatatcatcatcgccccaaacgtcggacccattctgggggagccatcaatttctgcaacctccatgccagtgacaatcatgccaggcacaatctccctagtgagcctgacaatagcgtcctcagcagcattcatatccaaagcctttattcccaggaacgctttcaatcatcccaatac

SEQ ID NO: 30552 - DNA, 403 bp, Glycine max
  Clone ID: jC-gmst02400054a07d1
aatccaacatacaatttgagattcattagcacatggcgggaaccttattgagaaaaacagaatagctaacacatgaaatatgataagagagaaagtgaagaaaagtatgggtctaagattaatgaaggggtttgaaggaagtgagattcatgaaatggagccaaggcttctcccagacgatggcttcgtaactggccggggcggatccatccttggctttgaggacgagacggtagttggtgccggaaacgacctgagtctcgcccttgacgaccttgacaagggtgagcttggccccagaacgcttgttgtactcgctcagcgcgtagttggcgatctccgccacgtggctgtcgtttacgtccttgatggggcttcagccgcccagcgctgattccgaccg

SEQ ID NO: 30553 - DNA, 431 bp, Glycine max
  Clone ID: jC-gmst02400054a10d1
gaacaatgtgatccacatgacactttagacatctggtaaatcaataataactcacaggaaaaggttacaaaatttagggttcccgccagaagactagtgccagcgtaaaccctgagcttctaagcaagaacaatccctgatttagctcaaattttttcagcttccatgcttgatcagcatgagcacaagggttaaacaacacaagcccagacttttgagttcaaattcacgtcccttcgcgactcaccttggcaacatgcaactattgtagtgcccgtcaaccaaagcttatttttacaacatgaaaaggtgaggaatcaataatgtgccttctcatcatttttaattgcaaaccctcaatgcccctgattggagtttcatagttcttgacatgagaagcatttttcgcagatgatgttttaattgctgtt

SEQ ID NO: 30554 - DNA, 472 bp, Glycine max
  Clone ID: jC-gmst02400054b02d1
ataaaaagttgatctaatctacgtatccttttactaacagttttattttttttggttttagccagctattggcatacatggggtaaccacattagatataatatattattatgatttaagatttcatggcccacttatactatatatcacattgaagatgccagccaaagtagtggatgatgatgataaagctatgatacaaaacgataagaaaaggagagcacatgtcatgggagctgctcatgaattaaaactcaacgtacgtgtaaccacatctgaactgaagagataaaaggattaaaacttaattagcactcgtatttaatttgattctctgcctgtctatttggctatgtctctaattacatcgaatcccatctccgttggatcggtggcctggagttcatagctgattccatccagcgctcttctcagcccatccttcgaagttgcgtatagaatcttagctcta

SEQ ID NO: 30555 - DNA, 497 bp, Glycine max
  Clone ID: jC-gmst02400054b03d1
aacaagcaattagcatcattagattggtaatccgattcaataatcacatttttcgaactgtgttctagtatgaatcttaaactaaaaaaattggcatcaagggcacattgccttgattttatgtttgacagccagtaataatttgcatcaaaatttgtttcatcaaaaccaagtagagataacttctacttgtggcagaatgacccgcatcttcaagaaaaataaccaaagttgtaaaaataaataaataacactaaaactgtagttggttgagtgctctttaatagtttaatcttcaagctcaataatcttaaccacagatgcatcaccaagtttctggcaaacaactacccggtcatgtgacttaataactcccaatgattttccatgatcaagggcaaccttaagaatagactcatttgttgcacttgttgactcagcaggatgtcgtggatctgcaagcataggaaagagacctctcacgataagtgattgtc

SEQ ID NO: 30556 - DNA, 489 bp, Glycine max
  Clone ID: jC-gmst02400054b06d1
gaaacattcataggtgaactttatcaaatgtatcgcttcatcctcgcaacaagttaaactcgccgctttttccatttttcttcctcccttgcagaacattacaattgaagcagaaaattaaaacattgatgctatggatgttacaaggttctatcactaaattgacaattccaaatagaataaaaacaatggcaactgaatccatctaactcagcgcaaacgacaaagtcacaaaccagattacttgccactcttgatagcagattttgggccaaacctcaacgttgttgttgctatatctgatgattaccagattcactgccattttgtgcaacactctgttcttgataatcatcattgctttttgtattggtcttgttactagtttccccttggtccttctccctgttccattgctcaattttagctctcctttctgcactattttctctgatcggaggactcctttcctacccaaggacttctact

SEQ ID NO: 30557 - DNA, 96 bp, Glycine max
  Clone ID: jC-gmst02400054b10d1
gcaaagggggggatcaaatagcctgttttcttttcctcccgtatttcggtccttttgctcttcccaaaaaaaaaaaaaggggttgtttcccccccc

SEQ ID NO: 30558 - DNA, 333 bp, Glycine max
  Clone ID: jC-gmst02400054b12d1
agagaacattcttttttttttgctagacaacaataggccaatgttttaaaccccattctaagggaaactccagggggctcttcaaaacaggccgatcaaaatcgcgttctaatggacggacacaataaaaatgtcctgtacatccacaattcataacgaagagacctgaatgccccaaaaagcctggcaccgatatttgctataccacctcttgcctagcaaacttgacccaagggaggtcctaccactaactttcagtccggtgagtttaacttttgtcccctgcacctttgggagcgggtcctttgatggcatgcccaccaacatactatg

SEQ ID NO: 30559 - DNA, 556 bp, Glycine max
  Clone ID: jC-gmst02400054c01d1
gaaaaggaaataataatggaaattcttcaaaaggaaaagatgagcaaaggttggaaacgaaggtatcctcatagcaattcatagggtgaaataagacaattatcaaaaatcatcgtcatcctcctctgcaatatgcttagccagctcttgctcttgctgttgtctctctcttctcttttcagcactttccttctctttgtgtgtgtttggtggaaaacgaagagctcgaaccgcctcattgtgcatgttaagacagaaagcaatccgagaattgaaggctgactgtggctcatttgtggagtaaatatctccagtttctttggacaccatccaaccattggcatgatccaatgtagcatcaattgcaccatcacgaatagcctttgatacaatgctctcagcatctgcaacaggatttgcagagttcagcctcagttttttagcaacatcagctagagagatgcgagaataggagatgctgatgttgcgtaaaccagtcctgatgacattatgccgcatacgaacaatcaaattatgggtttctgtctgcattaaa

SEQ ID NO: 30560 - DNA, 411 bp, Glycine max
  Clone ID: jC-gmst02400054c04d1
gagaaatcaaaaccagacatgttttttggaagaacataaactgatttctgatcattttataggaacgaaaaatccatttttctcctttttattgaataacgataatcacaaagtcatacacataatcatgtgaatacgataaccaccgtgcacttgtgattttctcacaacagtaactttaagtacacaagacagagtccaagtgatccaaccattaggcaataatgaaccccttaattagttcgaagctttgacggttccttccttggggtgatgcaccactatgtaattataggcatccaaagtgagaaaatcattaagtgttagggacgcgcattggcgagtgaagatcttgcaagcctccttgtacaatcccttttttgaacttttctggtcccactttctttttaa

SEQ ID NO: 30561 - DNA, 371 bp, Glycine max
  Clone ID: jC-gmst02400054c06d1
gtgcgactccaagtgctgtccaactgtgatcattctatgtggacactctgttgtacctgaaataccgtagtttgagcttttagccgatttacaggctttagaaaaggaaaacaattcactcccgggacacactactgaatatttaacaacagactttactcttccggcggtagcaatggttgctatatgacaatgagccttatcgggagatttaactcacactcggatcagtgtagatgatcatttggttgtcccacgttgaaacctaaagagttgtgctatacttatttagagcccgagctgtggtatgtcggcctacttttagctacaaaacatgaaataccattggtagagcctgtgacacatgatat

SEQ ID NO: 30562 - DNA, 398 bp, Glycine max
  Clone ID: jC-gmst02400054c07d1
cttgaaacacgtgacagaaaaagcatatgctacaaattcattcatgtgaaaaaggggcttatactacatcgatccatcaaagggtctataaccgcatagaaacctcacactttaagaaacattttatgattaactcatttacctgaaaggcctagcttgaaacaattgttttatctcctttctaggggcgcccccaaaataaatccaatcttaaatgggggaattacacaaggttttattaaactcaaatttttttttttttttggaacaatttttgtgtccccccccctcccccagaggggaaaaaattttctacaccccccctccaaaaaaaacctttccctccgggcgcccttttttttattttctacccccctttttttggacaaacctttttt

SEQ ID NO: 30563 - DNA, 259 bp, Glycine max
  Clone ID: jC-gmst02400054c08d1
gaacagtatatttaccgattccctccacatataaagggggtgggtattactaggcccatattcttcgattacctatacaagcttccttactgaagctcgtagccactatagcctagctaaatgttctcacgctgtccaccaccaatggggatttttatcccaaagcaaatgacagttttttgtaggaatcttttattacccaacaaccggtttttggcaaaaaccttcatctatcgcctgccgctattttatttgcctg

SEQ ID NO: 30564 - DNA, 437 bp, Glycine max
  Clone ID: jC-gmst02400054d05d1
acaaaatactcgcatgttatttagaatgtccagcaatacttatataaaaggacatggacacgcatttgaatgacaaatgaaacattggacaaccctcccccacaaaaagaaaaaaaaatgacgaatgaaatgaaaacgtatgtgaaaactagcaggagttcaagtaattattagtaattaacaagcagaaatggaatgcctcctgtggcttaaaagacaccaatagcagaaggatacaaaggcttgggctggtaagaaagaaagttgggaacatacctaggggttcgtttcttaggaggaaccatggaaaatatgggtggttgattaaaatacccatatttgctttttgtccaccaatccttgatttcgatgcgcacttcttgggtcttacaaactgttttgaaaaagcatttggccctacgaaccactttaccgtt

SEQ ID NO: 30565 - DNA, 316 bp, Glycine max
  Clone ID: jC-gmst02400054d09d1
ggaagtaaatataatttattcaaaccaagaggaacaggcaaatgaccatagtaatttgaaccctcctggaaccatcatcctcaatacatacataacataacccatagaattctcgtatcctccgcttggcatgcatgcatgctgacatggagccaaatcagcagggcttatatatatatatatatatatatatatatatatatatatgtatcggaaagccatacccaaagacttaccatttcaataataacatttatgataaataaaataaaaatgcgggaaactttatttacttcaataataccggatccatggg

SEQ ID NO: 30566 - DNA, 411 bp, Glycine max
  Clone ID: jC-gmst02400054e01d1
ggacataaaaaatgggggcatagtcatttcattaaaaaatttttttacaaactaataattacatactaatatcattggggggaagatttaatggcagaggaaacagagttccatttttgagtaagaggggcaataatttgaggcacaactgccccaatacctttgggggcagctccagaggcaagcccaattgcaaaagtttcaacataagcaggcttggaatcaagcttcatgtcaagaacagggagtctattgttaattgcatcaatcttcctagaagattcagtcaatagcttgtcgggtttacctttgccagaggatttgactttaaacagagccttttgaagatcctcaatgaccttcaacgacgcattttgcgagtccatacccttagattcatagggggatatc

SEQ ID NO: 30567 - DNA, 358 bp, Glycine max
  Clone ID: jC-gmst02400054e02d1
aacaagaaatattccttattatcatcatcatggggttaaaagaaaataaaataaaaaaacttttttggaggttattccagccacaaataaaaattttttgggcaaattggtttggtttaaactttaaactatgaaccaaaattttgaaaagggtctaccggggcgggggatcaactttcgttgataaccccacaatgtacccccctccggtagggggcaaccgggaccagccccatttaaaccggcccacccggaattttgacccttccaccctggaattgttggcccgattgcccgcccaattaacccggtggcccaaagctgaacccggcccatattttatgttttcaccataata

SEQ ID NO: 30568 - DNA, 421 bp, Glycine max
  Clone ID: jC-gmst02400054e04d1
gccctccttttttttatttttttttttttttttttttacaagcaaatttcttgatatatcataggctaatatgtatattttacaacaacaaaaaaagagagtgggccttaattcataaacacaaacttatttaaagacccaaaaaaaaacttaaagaaaaaacaagccagtttctaagagctctatgggttttcacagaagaaaatattgggaagggaaaaacatttcccctttcttgtttaaccgtcattggtggattcccatttagaaggagggacacatgttaaggagcgacaccaatgggagggggtatacccttttttaccccgaaataggagtaccaatggaggcgataaccctggaattaacagaatgagagaccccatccatagaacatattgggaagccttgttctttgact

SEQ ID NO: 30569 - DNA, 423 bp, Glycine max
  Clone ID: jC-gmst02400054e06d1
gcaaactatgacatacggatattgtattcattggcggtttcaaagaaagacaataaaactaagcattgctgattaaaatgggaaagacaactgaaacacttaaaagaacataatttttttaaggagacataacatcccatccccaatggcaccattgataaattccatggatcaatgttgctttttcttggtgtccatgttgctctccagcccttgaacatgattcatgtgtccttcattttcaatcactggtatcaccacttcttggatttggagcatggcgatcttcttttctatttcattgagggtctgatcaatcaaccatgagagatcattcaaatccaccaagctaggattgccaacaacctttccagcggtcaggtattgaagcataagattggtcatctctttcttcctgttttc

SEQ ID NO: 30570 - DNA, 436 bp, Glycine max
  Clone ID: jC-gmst02400054e09d1
aaaagccaactatatttcagtatttcccaccttgcttctacccctgttgaaagtaacaaagtaagctgctctgcaacaaagtagatctgaatttacaagacaggaaacgaccaaacaagtaaaataaaaagagagaaaaaaaaaggcttagagaaggataaacccggacaaaaaccaaaagatataagcatcttaggcagaaaaccctaaaaaaccccaaaaccctagaggagtaaaccctgttaggagctaaccactgtaaacaaaacccaatgagaagggattggtgctagcattctatgaactaactccgcccagccaatctcaatatacagatctttatcttcactaggcaaccaatcacactatcttcagactgcaagagaaggcaagacagatcaaatccgggcggtaccaaattgctgataaatatact

SEQ ID NO: 30571 - DNA, 401 bp, Glycine max
  Clone ID: jC-gmst02400054e12d1
gccccaagatttgatggttaaatttccatctttgtatgcttcaacttggaaaaattgaagtacaaagagagtcagggataactatatccattatacaggacagggataccccaaggcccaaatcatcttttacaaaactcaaattaatctttagggtggcacttacatatatgaactcacatccatctaatcatctttagtttgtattaagatagtaagattttttaatttataattaaacatcacgacaacttgaactattattaatggatatccatattcctgttataccttgaaccaaaagaaaacagttagttacaatttggtgggtccttggaacatttatatatagcagatgcaggctgcttatataccggaatgtcattgggatcaacaaagcg

SEQ ID NO: 30572 - DNA, 399 bp, Glycine max
  Clone ID: jC-gmst02400054f01d1
attgggggggggaaaaaacaaggccatataaaaaccgccaaaaaaaaaacccctaaaaaacccccaaaaacccccaaccaaaagggggaaaatgaggaatatccccccctttccaaaaaccccccccggggtgcccccccccccaaaaaaaaagggacccccccccccaggggttaaactttaaatggggcccccggaaagaaaaccccccaaccgcaaaaaaaaaaaaaaaaacccccccgaaaaaaaaaagggaattggctttaccttgggaccaacctgggggaaaaaaccccccaaagcgaattgccgggggaccccaccccatcttccagagcccccccccgaaacccgggggggcccccccccccccccaattgggggggagggggggggggc

SEQ ID NO: 30573 - DNA, 414 bp, Glycine max
  Clone ID: jC-gmst02400054f02d1
gcagaaaaaatcatgaacaaagttagttccttcttattgtattcttttatgtgatgttcatatacacccataacaagaaaaaaatgggcaaccaggcataacagcctctatacaaataacattatagtagtaattataacacaaatatatgacggctgaaattcaatattcgttgtcttaattatcttctgacactctaataatatgaatccacagtattcattcattatccattgtccttgtaacttctctcttcttgtataatttctacccttctatgctggaatggctttgaaaatgtcatcgaaactgttctggtttgcaaaaatatccagaagagacagtgcctcaggcacactcagttcaagacggaacttagggccatcataatggtggaaaattggtctaaaggaa

SEQ ID NO: 30574 - DNA, 546 bp, Glycine max
  Clone ID: jC-gmst02400054f03d1
agtcacaataaagagcactaagcaatattttatatgcatacaaaaggaggaagcaacctttatgagcattatccgcaccatttacataaatcgtatcttctacatggattctacatggattaattacatagtcttaccatgccttaacaagcttaaaagtatgtctagtcacaaccaccacattgcctagaatgtcacaacccacaaaacaagttcactcataagcaaatttttttgaagaagtaaagctgaatttaatcagaatcagatgcagattctaatctttgttcctcagaggctgcattatctccttttaagttcgcctctccctgcttgaatgccttggctatctcttcaatgggaatcaaaggtagatacccgacgaaactataacccttttgagtcatggccttgatcacatggttgtacttctctgaccagtgagcagcagtgggaactgctatctctgccaatgcatggaatggtggatagtgggtgagttcattccacaacttcaccgaatttatcaacacaaaatgctttgac

SEQ ID NO: 30575 - DNA, 371 bp, Glycine max
  Clone ID: jC-gmst02400054f06d1
attgcccaaattgaaaaacaagtcaacaaaaatattggtcttatctgtgacaaacagggggaaaaatgaattctccaatgttgtctggggatgctaagtttcccaggttataggagaaagaaaaactcatgaagttctctctaatgcattttaagtacactgaattgatcagttcacaagggtgcctgcgacatcaaaaaagagcttcatggatggtttggccctggtaattccacccacccagagtaacacatggggagacacccgaaggggcctcaaaagatattttaatagtcatgggctctcctggcccaagtgaaaaatagttatttgggtaatgaataggaagaattcttgtgtcttccccctcc

SEQ ID NO: 30576 - DNA, 235 bp, Glycine max
  Clone ID: jC-gmst02400054f08d1
catagagcaattatgtccattactttttttttttaataggcaccacctagttctgataacctcataatggctgaaaatccggggggttaaacctgataggaaaaacctttttgggacaaaaagagccttatacattttactcggaaaacaccgcccccttttgaacaaaataaaacggaaactggctgctccctggatttaacagacctttttccaacacttttcttctattgga

SEQ ID NO: 30577 - DNA, 406 bp, Glycine max
  Clone ID: jC-gmst02400054g02d1
gtaaaaggcaatttacttataacatccctcggcagcaaaggagcaaaactaaaaccctgtagctgcttgtgcaaaaagagttctcatacagcttataaaatagaaaagtcaccaccgcccatcaagaacccagttttgaaaggtaggtggctgcaatgaaatggctgatacataaaagtaaaactataacaagtaaaagcacctatactctcaaaaaataaaatactaataaggaaccactgttgtgtgtaactataaatgtaactatgatcgcatgtacttgaagaaacacaaaaatgtattcacttcttcttctgtgcagccttggtgaccttggctccagttgggtccttcttcttcacactcttgatgactccaacagccacagtttgtcgcatgtccctca

SEQ ID NO: 30578 - DNA, 371 bp, Glycine max
  Clone ID: jC-gmst02400054g05d1
ctacatcaatatatatccctttttctcattttattgcaatcttcaatacagagagcatgctatcattctttcaaagattccagtaattaactggacctgatagaatatctcattattgggcatattataccacgaagcccctgacaaacgagatgaaacaaacggttattcgaggggaaaaattatgctaattcaattcaaccttgacaaagaaaaattaaatactgtgaatctattaaaaaaaaaaaatcaaactctacaacagatggcataaaaaaaccaactgaatgttgaacttgacatatctagccaggagcaagctgcattcattttaaactaatggacattgatccattgacaaaacctgtttt

SEQ ID NO: 30579 - DNA, 350 bp, Glycine max
  Clone ID: jC-gmst02400054g06d1
gaaagaagaaagaaaattacatgatctataatttctgcaatgtacaaactagcaagttaacagaatccgggggcatggacaacctttataacacaaatattttagtgggtcaaatttaaacataacaaagtaaacacataattaaagttcactaaacaattttgtaaagcaaacccacacagctaaattgcaaccacaaattccctttctggagcttcactcttggtttagaacgattacaagtcccctaaatcttgaagctgagtttatccatgtttcaaatggggggagatgcccaaccaaattaaataacttttggtaaggggcatgcacattattcttggggggtt

SEQ ID NO: 30580 - DNA, 296 bp, Glycine max
  Clone ID: jC-gmst02400054g08d1
ctcttcaatattactagcactctatcattgatgaggtctatgaagatccattaaataacttaagcttttcctgatttaatgcgacccacactatgctcatgtaggaatactgttagttaattattaaaatttttggcggtttaactagtttacagtattaattaaatgtcttgtttaactcctatggcgtatcaagcatgttgtcacactgtaacattaactctacttgattatgatcctatgttcggttgaagggcacatttccccaatgaacaacagatttctcatctaactac

SEQ ID NO: 30581 - DNA, 501 bp, Glycine max
  Clone ID: jC-gmst02400054g09d1
actaaattctcgcttgttatttattaaaaaacaaatattctggagagataaagagaatgttccacgcctaataaaagacgggctctaattattttttgaagggtgcctcacaaaatgtttttatggtgataaaacagactccattcactgttataacgaaccacatgacactgattttttaaaaaggacaggcaggattcaaaggggaacggtgtctaaatggacttccattacccccgggttccctaagctaggtgtggaagaaaaaaaaatgggcaacaccactcccggagaaacccctcattggaagcccccgacccatggatgaaagccttgggttcccgttttttcttttagaaaggtgaccccagttggcgacgaccactggttgggcgggcctcccggggcggggatccccttttttttttttattggagaccgcccttttcctttatggccttgtcaaaaaaatagtgtttttcttaaacccctctttttttt

SEQ ID NO: 30582 - DNA, 488 bp, Glycine max
  Clone ID: jC-gmst02400054h01d1
ataaatggaacatgaaagcacgatgcgtataatttattgacatattaaaaattgcaaccctctgatacaataaaccaagaaatttccctgtacaatgagaaaattccctttctttccatcaaaataggtggaacctcaaaattcttcatatttacatttcaaaatataactcaaaatagtgagagcaataagagcttgccgccaaaaaaatcccccatcccttatgaagaacttagatcccatgcagaacaaatgaattacctaacctacttgatggcatatgaacgggtacacactgattcaagggcctcagcgaacaaggaagagaaactggtcaatgcctgaaacactccaggcaagcctgtttgcaaattgttgagagtcatggctcttgttacctccacagcttttgaatgcctcagcatttcatcttcgacacgcctttggcagggtgccagttctatttttttctcagcaagtgggtcacg

SEQ ID NO: 30583 - DNA, 463 bp, Glycine max
  unsure (1)..(463): unsure at all n locations
  Clone ID: jC-gmst02400054h02d1
aaacttgccaaagctttcatttattgaaaagcatagcaacacttattgagaccaaaaactgatacatttcttacaatttttaatatcagttcacttttaagaatgcccctatctctgtgcttttgcaacaaggtttaccggaaacaatgttcaccctcaaaaagaaaataggagagaagaaaataaacatagtttaacttacattaatacaaaacgatagattgcacccgcaaaaatatctgccacaatgcgaccaggagccgaatgctcgcaaggggggaacttggacttgtcatcaaagtgaattaactgccaactaaacactagccagaaggaagattttatccaaggccaattactggtttatgcacccncttcatcttcagagaagcgcttcttctggccgtaatatgggcaccagggngttcttgcaaatctgagtttacgggaaacaagatacact

SEQ ID NO: 30584 - DNA, 446 bp, Glycine max
  Clone ID: jC-gmst02400054h04d1
atccactaggggaagtcgattgcataataaaatatgcaggcgctagccaaattaaatttaggcattaacaacgaacccccaaccaattagacaacgagatcatgggtcacaaatactgaattggaagaattataccaacttaaggcgcggttggaccaggaattttttgccaagtttgagaatattcagtgtcaacgatcattaatgtttcagaaaaatctatgccacagcttatatgcaatgctcgaaactacaggcccacagtgaatggcttacgaccttttttctacccttctttcactagaacttttattctcagcctcccgttttttttggtgccgcatttgcatgtatccaccaccggtttttgcagcagataaaattgttgtttgagcccccattagtagatacagaatcctgccctgtaaagggcacaggattttttt

SEQ ID NO: 30585 - DNA, 318 bp, Glycine max
  Clone ID: jC-gmst02400054h05d1
gaaaaaagaatgggaacacaagctatttataagttttggtactacagtctgcaaaattaccatcttattattctttcaataaacaaaccattagagatgggcaattaacacaacataaatgggaaagggaaaagaaaacctttgtcacgaacaaaaagccaaaattccataaaattctaatcaagggagaagaagcttttggtcattccgacatggtatcctcttcatcttcatgctcactcagaacaagatcggccaacaactcctccaatggaacagaagattcatcaccatcagatggcttggactttttatttc

SEQ ID NO: 30586 - DNA, 280 bp, Glycine max
  Clone ID: jC-gmst02400054h08d1
caagcgaaaaataagtgttaaaataggggtaactttctaactttcctcggcggaaacagagaattagcgtattttaaaaaaaaaaaaaaagggggggcgcccctaaatattcttaaagaaaaaactagccataagggacgagctctatggttatacccagaatagaattttgggaagggaaaattattccccctttctggaaaaccagaattgctgcatgacaattcagaagccgggactcttgttaagacgcgactcccgtggcgggggttttaccttt

SEQ ID NO: 30587 - DNA, 264 bp, Glycine max
  Clone ID: jC-gmst02400054h12d1
ggtaatggcttttgaattcatgtttaaatagaaagtacaaattctatgttgcaaatttacattacaaatacaggacaactcttcttataatcgctttacctcactaacttcttccaacttccacctgcaaatgcgcagtcagcatatcaaactgcagggcagttctttctaacacattttttttggtcaaaacacttttaacacaacaaagcactcccgaaatatgggttgaaaaatctgtccagtttgtgggcctctgcccct

SEQ ID NO: 30588 - DNA, 498 bp, Glycine max
  Clone ID: jC-gmst02400055a01d1
cggaaagtacatccattttcgatccaggtgtttttcctgtgcattagctaatgggcagaaaaccatgtttgtcagacagctaggttatcctatgtatcctaattattgtttatattaaggcaaggaaaaataaaatactagcttggatcactaaggcgaccagataggaagaaacgccaaattgaagaatactaatactgcaaaatgactccaaggcattaaatccataatcgaaactttacagtaaaaaggtttttgtttcctcctcaaagttgaggcagatgtggtctcttttccaacatttcataatgtagaacaaaattatccttgcggacggtttcaaatatgcttggatcgaaacagtgataagatcctctctcatatgtgtttgttttaaccagcggctccatgttgggaactcttattaaccataaacgatgttctttgtgataaaaccaacctctgttgtaaagctcactggcggcatataattgggct

SEQ ID NO: 30589 - DNA, 476 bp, Glycine max
  Clone ID: jC-gmst02400055a02d1
caactaactaccttctaatttaaaagcttgcagttatacataaaatttaatatgtactactaaattgtttgtaattgaaataaaataaaaaaatcaatgaaaccatgtataggcaatgagagaaaagggagagaagctgatgcaagctatgctaaaacgactacctttgcctgcaaacatttaggagcattgactggccattctaaacctactgcacactactcaacagctagggagatgatgtataagaagcatgatactcaaggtagaatttaaatgatatatatgaaatctttaacctattaaaaaggaaactaatctctcagaatttacagcaaagaaagctatccttccaccaccgttgcttccggtagtgactcctgtcggtttttgccatcctgaccgggctgtttttccattcagattgaattatggggaatgcaaaggatcccgtgctggtagtgctgctgtctgat

SEQ ID NO: 30590 - DNA, 392 bp, Glycine max
  Clone ID: jC-gmst02400055a06d1
gggcagaaataaaaacattttcccctaattttaccttggaacattttttaaaaatattttttccctcatggcaataacaaaaaatcagggtggagagataaaaaaaaggggaaattaaaaatttttttcgcccgattattattaaaaacaaaggggggggcagggtaaattattatccccggggggggctttattattaaacgggagcgcgtttaaatcaaacgggaggggggggcaaaaccaccaggaaaccatgttggcgcccctgtcctcaaccacggggggggaaaaaccccactccctggggcagccttcggggacaaaagggggagggcgcgggtttttccccgttggggaaaaaaaccgccccctgggggttgtggttgtggggg

SEQ ID NO: 30591 - DNA, 527 bp, Glycine max
  Clone ID: jC-gmst02400055a09d1
aacttgaacactctctttttgatattgatattaagagacacattggtagggcatacatacaaacagagagtacatgtttttagttgatcacgtaaaaaattacaaaagaacatacaaataacaaaataggaggaagaggagagaaacacacagagtaagagacgtggaaagttatggatattagacatattataagggcaacgctcaaaaaacttccagcatagagcagtggaatgaattacttaggccttctcccacttgaggggtttgaccacttcccatgtgaagtcagggtcttctcttccaaagtgtccataggcagcagtcttcaaaaacctgttatttccacccctcttgagatcaaggttgatggagatcataccaggcctgaaatcaaagttttccttcacaatgttgagaatcttcttatcatggatctttccagtgccataggtggcaacaaacacagacaaaggctcaggcacaccaatggcataagacacttgcacaatgcaccttttggcaag

SEQ ID NO: 30592 - DNA, 556 bp, Glycine max
  Clone ID: jC-gmst02400055a12d1
atgttaacatagcctttattaacgtcactttcttacaatttacataacaattgagtggatactatcccgtagacaagcagataccttatagaaagaaatatatctgggcacttttcatcgattgagaatagatgaaaaaaattaagtggcgtctatctctcccatccttgataatatatggtttcctccgctatacgtggcacgtgctgtccaaatacaatgtaacaacaagtattgtctccttcataattcacatgttgttcatttattccaaaattaaaatcataattaagtagggaccaaacagaaagaaaagaaaagaaaagctatatatctagctaatttgaaagtaagtttaagcatcaacaatttcctcagtgtctgcagaagcgaaaataagctggggttcttccctttcaacttcacacgttccatcaattgcattgttccttcccaacgcctttaacgccaaatgagccgtcttctggcctgatatcatcatttgcccaaacgttggacccattctttggtgagccatcaatttctgccaccttca

SEQ ID NO: 30593 - DNA, 459 bp, Glycine max
  Clone ID: jC-gmst02400055b02d1
ggaacagaaaataaaaatgttcattttattgcaacaactaagagattcaatcataacaacacaagtccggcaacagaaaattttcaaacaaacaaagcaataaaaacatacactaatcagtaaatatatcacacactctcacaactgatcacacgacgtaggaacaaaagaaatggtctccttttcaagatcatggttcaccaaaatgttctgctgttgaacatttccaaatatagacattccactagaagcacccatggccaaacaagccactcccaaatgggaggcaccaatcatgtagttctcagcaggaagctccaaatccccacccttgaaatggaaaacaagctttggaatctccacttgtgttgaccctgatggcaaggagaaacaaagatccaaccctgttgagctagttttgtccaaagcaagtttggtttgagaaatgaactctttttt

SEQ ID NO: 30594 - DNA, 553 bp, Glycine max
  Clone ID: jC-gmst02400055b03d1
attcaaactcatttgctagaagttgaaaaaaaataaaatacagcacatctaagtccccttcgaattcactgctaagaaggaatgataaataactaaaagaaaacaactgaaagccaaagactccaaaagttttagtaggtatagcccttgacaaacattcccttcttggcctcttcactctcaccctcagcagagtatcttccaagttgagccaaggagtttgctttagcacgcaccaaaagggacttttgagcagcttccacattctcagggtgtccttgccatgtcttaagcacagtgttctgaagagcccgtgcatatgagaaagaaacatgccatgggttgggactttggttcatggcatttagatttagtgttgcttccacttcggattgtccaccagacaaaaacatgattccagggacagcaggaggaactcttcttctaagcatggttagagtatatttggcaatggtttctggagaagcctttttcttgtgttcagccccaggtgttaccatgctgggtttgagcaaaattccctcaaaaagga

SEQ ID NO: 30595 - DNA, 567 bp, Glycine max
  Clone ID: jC-gmst02400055b05d1
aatatagcagacgcgataaaagttctatagtgcatttaagagacaaaattcaacggataaaatctcaaaagacaaattaaattacaaaccaaaaacattgaataaaaactaccaagcactcaaagtctattcatatcctaaagatttaagcagcagttgcttgttgggcggcaatccttttcctagcttcctcaatgattgatagcttaatacctttacccttgggaagagatatccacggttttgttcccttgccaatggtgaacacattgcccattcgagttgcaaattcatgcccagtagcatcctgaacatggatagtctcaaagcttcccttatgcttctctctgttcttgatcactccaacacgacccctatttcttccacccgtcaccatgactacattcccaacatcaaatttgatgaaatcaacaatcttgttcttctccaaatccagcttaatggtgtcattagccctgatgagagggtctgggtagcggatagtgcgaccgtcgtaggtatttaatatgggatacccttttgcccaaactgcactgagcgaacttt

SEQ ID NO: 30596 - DNA, 454 bp, Glycine max
  Clone ID: jC-gmst02400055b06d1
gagaaaagagcctttggttttttcccaaggaaaaggttccccctaaattttccggggggggggggggggtaaaaaggagacttttttaccccctaaaagaaatccctttaagggaaaggggggataaatccccttggtttagcccaaagggggggggggggtcctttggggaaaacctttttgcccgggggggggggcccattggggttcagcacccaggggggatttttaaagggctttttttttttgggaaaaccggggggcccctccctttggggaaaaaaaggaaaaaaacctggggcaaatggggggggggcaccaaaagggccccttttggttcctggggggggttttaaaattttttaatacccggggacccccacggggtttcttggggggatccacccttaaaaaaggggggggttttgggaacccccctaattccccctggggg

SEQ ID NO: 30597 - DNA, 444 bp, Glycine max
  Clone ID: jC-gmst02400055b07d1
aaggacaaaatacttcgataactttatgttattgtacatgcatgcatagcataaatagcctgctctcaaattagtcagcaggaacaaagatcgagagatccaacgatctttaaatttcacatttgccataattatattacaagtaagaggggttgggatgtgagttaagttttgatctcattcaactgcagtatcccaaaccattactcttaacactttgaacttgacttgcactccaggagcatgtcgtgctcaggagctaatgcccacaagcccttaggatggtgtccagcatggctcggtgctttgacagggccttcaccactggcgggctcagtggaaccagaggggccttggctaggttactgaggatggacactacctgggtggaatgggaggagctttccatcattttcagctctgaactcgattggagcgctcagc

SEQ ID NO: 30598 - DNA, 469 bp, Glycine max
  Clone ID: jC-gmst02400055b08d1
atgattaacgaaataattttgatatgtagattaaataaacacacgaagtacaaataaacattggtctctctaatcacaaaggagattaagtccattgtggtgtgccttcatgactgaattataccaaagtactacccttaacatactcagtaaaagccagagcaatcaaacccaacatagcaaatctcccattccacagttctgcatctgaggacatgaaccctttggacttagactccacgctgacaccttggaagagtggaatcaaggaagcaagggtaaggaccacacttgttcccaagaaccatgggatgccaccattggatatttgttctaacacaccttgccctttggctacttccactgccattgcagccacaaacccaatcatggccaaccttccattgatcctctcaagtgctggcccactgaatgccaacacattagaaaaacttagtgctcacctttg

SEQ ID NO: 30599 - DNA, 387 bp, Glycine max
  Clone ID: jC-gmst02400055b09d1
aaaaccggaaggggccaattcccctcatgggggggggaaaaaatttccccaatgctccctggggggcaattaaagcaaatccctgaaaaaccccccccaaaaaatttcctttttttttaaaaagtccccatcaaaaggggccgggggtggaaaaaaaggggcccaattaaaaaatttattttgaaaaaccccggggttccccccgggggggccccaacccaaccgggggttgtaaaccgccttaaaggcctcaatttttattcctgaaacaaaaaaaaggggaactttatatttaaatttgcccctttttggggccaaaaaaggccttggggttttaaaaaccgaaattttgaacccctcctggtttttttaaggggccattaaggg

SEQ ID NO: 30600 - DNA, 537 bp, Glycine max
  Clone ID: jC-gmst02400055b11d1
gaagaagcagatatctttataaattgcaaatcacttggaaactaactatgcattttaacatgcaatccattatattacaaaagaacatcacctaatctacataacaaatattggctgtacccacttcagacccttctttcatggtacccctcattcattcctttttcacagttccggccaaaccttccaattgattcccggacttaaaatataacgctaaggtataaaacttggaaaaagcaaaaggattgcagccattatggtcatcaccaaaaggaaaaaagaaagttacaggaaatgaagaaattgaacagttaaaaaatacaccttacaatcttacaacttgcttctactttacatgccaatgaacaaagcttttgtgattgcgagatcaaagatcagtttagttagtggggagcatgatcttcaaatgagcatgaggtctaaaatgagaaggttcatttattgatgaactcaccctcctggacctgtgatggggaaaaagcctgatggagaacaaggaacagtccccgggaa

SEQ ID NO: 30601 - DNA, 445 bp, Glycine max
  Clone ID: jC-gmst02400055b12d1
cagtctcaaatgcccggatgccaaagtcaattaaaaaatatagactatatatataatatatagcaacacaaaatacaatttgctaaaaatatagttttccctttgaaaactgaagggaacataactaaatgtgtccccaggggctatcaactaaacaattaaaacagcattgcttatctatgtagagatagaaaattgctcatgaagagtcatataggattacattgcttattaaattatttatatattaggcaattaaggggtttaagggcatttgggtcctccttccttggtcttccagctgttgtagcaagggcaaatttgcttgttgccatatgtaccaggaggaacccataggcatttagcacaacacttttggcagaaaaacatgcatggcttcttgtgtgaagttgcagagcaacggtaagtacactttggttaacaa

SEQ ID NO: 30602 - DNA, 452 bp, Glycine max
  Clone ID: jC-gmst02400055c06d1
acattgcaaccaaggaatgtatatataaaaataacaaaatcgcccataacgtacatatataccagatacaaatttttcacgacatatgatattacaaatgactaaaacttctagataacaacgaacaaaagctatataatgaattcccacactaccacgcagttcaaaattattgcataccaataatttcaagaacccttattaactttcactttcaaagggattggtacaacaatatcatatgctaataaatataatcttaagatgaagaagcaggtttggaagatgggttgaaaggaacctgctcagcgcatgtaaggatttcatggggcccagcctgttctcgaccaacacctagaaggtcaagataatactggtaatgggaaacgatattgttcatcgagtccacatcaccttgtccacaaacaccatccccatagagaatgttcatt

SEQ ID NO: 30603 - DNA, 481 bp, Glycine max
  Clone ID: jC-gmst02400055c08d1
catgttaaaattcatggctgcttctggcgagttatccaattctcaattttttaattaagttcttgacgcttaatacatgccttttagaaggaacatttgtacatggaaataagtgaaactatcaaagatattttataatcgtacaacctatgacaaagtttagctaataagatattaaggacaatctatgcaatcaatgtttgatctgattgcgaggtattagcacgacttagacgcttcttcctgtatctccatgcaacctgaatacggtttgctgcaagggatctccagtaaggtgatacataccttagtgctccttgaacatgagggttccgcaagaatcttgtgaaaagaattgtcagttcctcaaggtctgcagctcgaagtgaaaatgcctccacgtttgttaagcatcttactgtcctgttgctcaacaacctctgtccttgaacccttacttttttaccatctgtgcttacag

SEQ ID NO: 30604 - DNA, 516 bp, Glycine max
  Clone ID: jC-gmst02400055c11d1
atccaagcagacacacattatgtctatttaaggattaggtaaaatagtagaaggttgtgttttttccatatgtggcaggtgaagtaggtaaaaggggatggatatgacctcaatgatcagatgatgcggcggcacagggtaatcccatcaccaacgggaagctggcaaatctcgacccttgaatcaagtgcaagagctttgttgagctccataacaaaatcgcgataatacttaacataatccatgagaggagcatcgggtggggccaccacggacccattccatagggtgttatcgtagccgatcaatcccccaagctttacaagctcaatcaccctcttgtggtagttcaagtaattgtccttatcagcatccacatagatgaaatcgaaagctcccttattcttttcgtctttaatgagaacgtcaagaagaggaagagcgggtccttctctgaagtcatcttgcgagccactccagccttttcatcacgggcaacctcaattcataatattc

SEQ ID NO: 30605 - DNA, 519 bp, Glycine max
  Clone ID: jC-gmst02400055d02d1
cttgaaaccatctttaaattgcaaataccattctgatacaagaataaatgcattacaaagctaacaacaccaaccaactttcaccaaaccagcacttaaaaacaacagtggccaacatatatattttcaccaatcacatgaaagagtccttcaaattgcagagatgtccaataactcaagtcacccaccacatataacaatataataagaacaccaataaaatgtgaaggaaactcggatcatttcatgatgaaattgtgcataacttcatctcagggcatggaacttcaacttcaaatcttagatcttatcaagcttttcagccttgacaactgggtttgctttagctatagcatcttgagcggcagtgcggtaatcaaatgggcaattatgcttgtctgagtagcgatgtacagcacaaaaaaggtcaccacatcgacaattaaaccctgtcaaaccaacttgcttgttgcagctgctgcaacgttttggtccatccttcggctttgcctcaacact

SEQ ID NO: 30606 - DNA, 573 bp, Glycine max
  unsure (1)..(573): unsure at all n locations
  Clone ID: jC-gmst02400055d03d1
gggtcaatccaaatctttgggctggtaggagaatacaataaataacatgatacaatagttttttttttgcccctcaagtctcataatgaaaaatacaacccaaaacacttgaatctattacaagaaatttactagcacaaaagtggacaacccagaaattaagttgaagaaatgggagtctgcataacaatggcagataaaaaagaagtgacctctgcaagctgaagaagacaagaaagcacacataaaattcacttgccaatccttcacttaaaaacaagatggtagcgcaggcccatggcaaacaaatgccaatacaacataaactatcactagtaggacgactataagtgcaatcgtaagcttgacatttctccaccaaacagtgcttctgaagcgacgagcttgtttcctgaagcgaaatgtgtttccttgcatattagcagttntatcgaccagcaattccaaccgatcacctctatctaaaactttgtcaatattttctatcatgacattccgtacctgagacatttcacctttgagacgattgatcctatcggcgttaggatcact

SEQ ID NO: 30607 - DNA, 552 bp, Glycine max
  Clone ID: jC-gmst02400055d04d1
acaccaagtacgtttgtctatatatacaagaagcatgtttactcccttaattgggcacacaatggtcttcaactagataatgaaaaatataactaaaaccaacaaaaatgactatgaagtcttttttttatcaaactttctaatattctagaatttagcagatgatcacgcagccctaagactcttttcaaaacctctaacctagtaatttgaaccatacaatgttggggtcatgtgataataaaggggataggcttcgtaaagaggaatagcggggtccttctccttctccttttttgctgggccaaatgaaattagttcagtgggacaccactttcgtagctttgacactgcactcactggatcaatctcacccaataagactagtttcatgtccttaacgtcaacagaaatcgattcaacccctgaaaggccagatgctggcttcatagcttttttcttgattctatcattatttaaggccacctttaatactacttttcttcattgatgataaaagattgtttgtgagagctaagcaagaattttttt

SEQ ID NO: 30608 - DNA, 465 bp, Glycine max
  Clone ID: jC-gmst02400055d05d1
cattcgaattcattttatttatatattaatattatattcaaatgaaataaaaagatattaaaagatactaattataagaatttgaaagtgaaattataaagttattaaatgattaatcaatttttttctacctgttcctgtagtaaaaagagttccatctgttcttgaatagcttccttcaaaaggacttctgcttccccagtgaatgtcttggtagaagatatgatttctttgaattgaggtttattcgtgtttaagtaagcacgtaactcaacaagaaatttccttacctgtccaatttctaatgaatcaagataaccattcgttccagtataaatagttattatctgttcttccacggtaagaggagctgattgggattgtttaagcaacttgcgcaatcgttgaccttttgctaattgattttgagtagctttatcgagaatcagaagccaatttgggcaa

SEQ ID NO: 30609 - DNA, 266 bp, Glycine max
  Clone ID: jC-gmst02400055d08d1
gttatggacttaaggggtaaacccttcccgtccaaaccaatttgaaaggaacgcctaaggcctggaaagacccagaaggcccatggggcaaacaaggacaggccgggctccccctggtggaagcctgaagaaaagggaggaaaaaacaaggggccacaccggaaattggttttgcgagccctttggacccaaccggagccagcgggggtggaataccggggggggttacggtggaataaaccgaatactgagccaagggccccgtg

SEQ ID NO: 30610 - DNA, 521 bp, Glycine max
  Clone ID: jC-gmst02400055d12d1
aaataaatagacttatatataatgaaaatgcgggtacaacctcaaaatagattcgagtcactcccagaatgaatgttatctactttttaagttttaagctcaaacattgaaatgaagaagagctctccaatggtaaaacccaaagaaaacatcaaaataataataatccctcatgtcatctctctacactttaaaatggaacgaaactcctctcagaagcctgagaatgtggctaccaatatggcaacaaacacggagatagctgaaattgggaataatgctgatgctgtgttcccttgagctggtgctggtgctggagatacctcatttacaggaccattagtagaagcatctgctgcttgttggggagatggagaagcttgtggagagaggcctccagcaggagcagcagcaggcgtctcagacaatccacagttggtggcataaggagcagatactttgcaggcagcacggaaagtggttgccttggtgacattcaaaacgacgccaaattgagcgct

SEQ ID NO: 30611 - DNA, 496 bp, Glycine max
  Clone ID: jC-gmst02400055e02d1
aaaaaataccattaaattaacaagcattaaattaactggttagatattacatgaagattttgatcatgattcatgagagttatacaaagagaagaagcaaagatgaagataattgactagttataccaaccatccctgtccatttgtacataggggttgttgatgctgaattgtcttctggcttgggaggaggctttctgtattaaaatggaaagtagggtaaaatagggtccggggggggggggctgccaaaaccaccactaccggtaccgctaccgttgttggtggcaacaccaccgccgccgtcgtaagggggtgtggggtaataagggtaattcccagaaggggggggatatagtaatcccggttgaggtggtgctggtggaacactggaaccacctgaaggagtggtgggagtaaccgttccaatgggtggtgggtaacacggatttaggcatggagggttgtcggtttttgccggtgtccgaaacaaagg

SEQ ID NO: 30612 - DNA, 363 bp, Glycine max
  Clone ID: jC-gmst02400055e03d1
aaaaaaagggaaaaaaactggctttaaaaaaaactttaagggggggcctttttcttagggggggggccccctttaaaaaatttttaaaaaaatggggggccggccccccccaaaaaaaaaaaaaccccaggggggggaaaacccccccctttttaaaaacccacagggcgaaaaaaaaaacttcccttatcaccctaattaaaaaagcccgggcgccccctttttttaaaaaaaaaacccccctcttttaaaaaaaaaaagggggctcatttttaaagaaaaggggcggcccccttgggggggggacccggggagccctcttttttttttggggaggggggatccgcccaaaaactccccccc

SEQ ID NO: 30613 - DNA, 497 bp, Glycine max
  Clone ID: jC-gmst02400055e05d1
aatcattcaaaataaagaaatttatttaaagaattgatctttcaatagatgttcttgacttagggattgaacccctaatcttaagggaagtaatgaccattccacaccatgttggtaaagcctaatgatatctcaatcattcaaccaaaataatgaagcttaagcaccccccaaacccagaattccaaattagttacatagaactttccaagatccaatgagccgacacgaattaactaaacagactaaaagttttcaattgtttggtctctttctgcttcaaaaacactggcaattaaacaagctttttggaaatacaagacactcccttattctctggctgcatatacaacagctatatatgtcacagtttcaagtcagctagcacaaaagggtcctatatatataataatcaccccctcctgtggtaaccaaaccctgctttcattcatgccctttgtacctattcttaactgattcaacctttgacttaccta

SEQ ID NO: 30614 - DNA, 406 bp, Glycine max
  Clone ID: jC-gmst02400055e09d1
atccacaaatggaggtttcaatttcaacaattcatcacaaggttcataacatccaaattagagaccattcattttaacacaattccaacagaacatttgacgatcaaaattcaattgaatcgccagatgggataacaaacaaattgcccaatttttaaaaaaaaaaacttgggtgaatcaggaaaactgtctatatagcttccaaagcttgcaggacattagccttcaaatccttaaaatcttcaactccaaagctgaagccaaccagggtggcataaattttgtacttggccctttttgactgaggaagaccccagtaagacaaaatagccgggtgatccacaatgctttcacagccaccaaacgagggcggaatatttgggattttcaaagaatcaataaattt

SEQ ID NO: 30615 - DNA, 502 bp, Glycine max
  Clone ID: jC-gmst02400055e10d1
ctggttaatactgaatgttcagtagcgtttttttttcttctttcaaagtggatatggaaaaaagcactcctcataactgaggttccaaacttgcaaaaaataaaaacccttactatttacatagctgcttgaacaaaatttgctttgaaaccattaaattacctagtgccatacattgatcttttgatcaactaaaaagagtggttcaaatatatgtatatattaaaaagaaaaaaacggtttcactcgaggcatatatttacatgttcccattctcatctattgatgaatcagaggcagagtcatctagtgttgaatttgatgtagtctccaattgactcccactctcattatctgaagttcccactgtcctttcttcacgagggtgttttaggcaccaagacattatactagccgttagtgcaaggatcattttttgattcacctcagtgatgtcttcccgaagcaggaatatagaacatacaagctttcttgcaatact

SEQ ID NO: 30616 - DNA, 366 bp, Glycine max
  Clone ID: jC-gmst02400055e11d1
atccaaatgaaacattgtatcatttgataagtgaaatgcacaacatgcaaacattaacaaaattgttcaggccatccttaatgatcaaatacttcaattgtttccatacattatattccaaaatatattgaaattatgcaagacaacgaaaacatgaaaatgcaaaatatatggcaaagtactataatctattcacaaattaacaatgagtgaccactccagactcgtttcactttcatttgaaggccaaagtaattgaagtatcttgactacttgttgccttctttattaaaaattctttgtaggaatcaagaatggaacggccaagaattttaatcaagcaagggaaggttcaatttgtggcaa

SEQ ID NO: 30617 - DNA, 568 bp, Glycine max
  Clone ID: jC-gmst02400055f02d1
ataagaatggagaaaatcaaatatcctttcaagtcttgcatattcaaaatgcaactataaggagttgacaaatttattcctgaaaacaaaagagactattttctctaactacaaaatccatcctcatcaaatatcaattgggtacccttaaattgacggataaaattcaagtaggacttagtcacggaactcatccatgaatttttcatggaactcagtcaagcgggtgacgatggccggaatcttttcttctggaggcaatatggtgcacctaaaatgccatgtgccaggaacctgtccaaaaccagaaccaggaacaacaacgactcctgtggcattaagcaagcgtttgcaatagaagttatcaggtgttgcatttgcagcctctgcagctttgatagccttttcggacaggcgaatttgggggaacaggtacattgccccttctgctttgttgcatgttacaccctctaatttgttgaatgcatcttctagtgtctttgcacgcctggcaagggacgccaaaatattctccttcttagccatgaatgagtcataggactcatct

SEQ ID NO: 30618 - DNA, 587 bp, Glycine max
  unsure (1)..(587): unsure at all n locations
  Clone ID: jC-gmst02400055f04d1
attgaagatatcaaaaccaccacctatatcccaaaaaataatcgacccaaaataaaaactactaaagagacccgcgattccataaaaagccatcgtggccccttgtggaataaatggaaaataaataaagtccggaataaaagaaaaatcactaattttctcagaaataaagaacaaatccataccaagataactggaaattgcaacgaacaataaccccaatgaacctaacaaagtgaaaacggcccaaaataaattgcttgttcttcgaacctccgccatagaatatatcagtacatcgtctgagcgaaagattatactcattactctcctttttttgaatttagtattataattggggaataaaaaaccccagaattttactttgttttctgtatctaaaaaatcttgtttttttgaacataaagaaataaagaagccattgcaattgccggaaatactaggcctactagaggaacaaaaatggaaggaaagtttatcataaaatgggtacctcgatttactatttggaccctatatatattatttttataattatatagacgctttnnntttttttatttttt

SEQ ID NO: 30619 - DNA, 413 bp, Glycine max
  Clone ID: jC-gmst02400055f06d1
agtaacagtcaaatgaaaaacactctttattgtgtcaagacagcgccatcagaattctacaaaaacaatgtgacaacaatcctggccactctttcttggatggcttgatttcataaacatatactctaactaaatttccaaattccaggaatggaaaaggaaattaagaatcaacgttcacttcagactcaccatgaaaatactataaatgaaggtgttgttgaccttaagcagcggctgtaatgaactgtattgcctctttgcatataccagtcattgtggcttcgggtccataaacctcaatggggatgccaatctcctctccaagtgctcgcatcaaagctagacccttctggttgttgggaccccctcttctcacaaagatgtgcatccttgctgctttcaatttcgac

SEQ ID NO: 30620 - DNA, 384 bp, Glycine max
  Clone ID: jC-gmst02400055f09d1
ggcaaactctactttcacttgatatttttggtctaatatatatctacactctccattctatcacgtgaatgaagtgatgcgtttctccactttcttgcgtgacagcaaatactgtctacaagaataccaaaatttacatacaagaaagagggactcacgcgtccccccccccacccacccacacagacactgcactttttgttttttgacggaaaatttaacacaatctattctttaacttgtaaatctcgaaaagtaataaaatcagactgtaacacaatcaaggcattcccttgttggcgtaggagttgaccagcgccaaggcattgctggtgaactttttgacgttgctgaccccatcgcatacacccgttttcatgggac

SEQ ID NO: 30621 - DNA, 531 bp, Glycine max
  Clone ID: jC-gmst02400055f10d1
caaaacaaaggctgcacaaagtagccatatcattgttgtgttgtcacttccttgtactggtggatgggtatatgcttttgaagaagtcctatcattttcatcttgccttggtttgcaaataccattccttccactaaaaaacaatggccactttttttcatgatcaaaattacaatgccctaatgtgacaactctttatgaagtaatctgaaaagtcaatgtacttggcccacaatggctttagatggggaaaagctatatctagccatggctttgccctgccatcgaaatggatgacaccagcagtctcagcatcagcaaaacttgtattttcctgatatcccaatcccaacatgtgccagaaaggatcaatagtgtggacatgaccatggaatgctattaatccagggggcaaagttcctagctgccacaaactgaagtctgattttatattctgctcaacccaatgatggtctgttcagctcatatcggtcttcctccaagcatcaaggtcaaaaatgttcatgccat

SEQ ID NO: 30622 - DNA, 548 bp, Glycine max
  Clone ID: jC-gmst02400055f12d1
aactgaataccccacaaaaaggatataatatatgagcaataaaaagaatacatgccttccaggatgcaaaagcttttaggtaacaagaccctattttctaaggctgctcttaacagaggacgctacaaactagaataaagctacagaaatgttaacttaggaaccatatctggcccaattattatacttgtcaccctctaaacacagtaacatgatggaactatgctgaaactggaatcacttgtagctatgagaacaagaactacatggctagcttttctagtaaggttcttatcaaaacccaacgaaataacaatgaaataaagagtgatctatgtagcccgcaacaaaaatgcataatctttgatttctaaaacatgaaaccgctcaatacttttaagcagttttcttgtttggctcaaagacatacttgatcagtgattccttgaaggaaagaagctcatggaactcgtttttcagtttggatgcatccatctcattgttgctccgtggagcaattattaccttggcttgctcttcaagattga

SEQ ID NO: 30623 - DNA, 520 bp, Glycine max
  Clone ID: jC-gmst02400055g02d1
actgcaaagatcaagatatcttatacacgatattaaagtccatgacatccctacacatggtcatcttatctagctaaaaaataataatctatatattgacaacaaaaaaagcttccaaatatatggacaagataaaatatttttttgtggggtaatgtggttccctccaaataggaaaaatatggagaaagaaatctagggaaatgttttaacaagcatatcgatactgagagttctgaataatgacatgactgagttcatctttgaagcacactgaactctgtggcaaagtacatggcaatctatcaataatatcatagtgccttaattgagttcataattaaatacatgctgatcatcattataagcaaatgacattgaccttactagaaagaggtaaagcattcattctcggatgaatttgagtcgtcgcaaggggagtgattgtgtctaccttcataggtggttatcaccatacgacaatcctctgagagtcgttcaaccctcttcttcaccctac

SEQ ID NO: 30624 - DNA, 367 bp, Glycine max
  Clone ID: jC-gmst02400055g05d1
ggcggcgccctcataaaaaacgaaaaaaacacaaaaacacaacccaaattgacaccaccccccccacacgaaaaaaaacagaaaaaaaagaacgaccctaaaaagaaaaccaaaacagaaagttaaaggaagggaggccttgttacccaaggaagggggccccgcgcaaaaaaaaaaaaggggcccaaaaccaaaacgccccaccgacacgggggcacacccaacagagggggaaaacatacgggcggggggtgggccccaccattatcccacccctccccgggaggccacccccaaggggggccaaaaacaacgcccggaaaacaacaaaggctcctgggtggggaagaaaatgggggcagcaaaa

SEQ ID NO: 30625 - DNA, 473 bp, Glycine max
  Clone ID: jC-gmst02400055g06d1
gtaaaaatgaagttctttatttttgttttttagctttaatctaaactctgatttacatagaatatgaagtttactagacagacacggcaaaattgcctatcccttttacttgattcaagggatgggatgtataacaacctttccagttgctcggtttgtttcaaggtaagagaaggcttcagcaagcttatcaaaggggaatggacctttggggtcaacaattggcttcaccttcccactttctaagtaagggtttagtttcctcagaacttctccattggaagtaactacaaatctgaagccaggtggtgtaacagcacctgtgagtgccaccacactgccatcttctttcacagccttcactggcctgtcacattgcccaatggcatcataaactacatcaaatttttcgggcaaatcttcaagttctcttttgtgagtcaatggccaaatcagctcccaagcttttcagt

SEQ ID NO: 30626 - DNA, 558 bp, Glycine max
  Clone ID: jC-gmst02400055g10d1
gacaagtcaaatgttatcccacaattttcagacacaagtatacacatgacatgggttcacacaaaaggatagttaaaaaggatcttaaaattcgaaattagaatcccgctgtaaaaacagcctcagtacaataaaaatttcacaagacatgatagtaactactatatcttggattgctccagggaggaagtggtctattgaatatagttatttacattattattattcttggattctccacggaattacacaatacaacatctcaccaccaaccccttttgatcaaccctggattcttcattgccttcaggaggctgagttagcttcctattttggggagacatcatttctctcttcaattgaatcaaaatgtcttccattgtacgctcacgtttccaattagcaagcataggaaacaaatgtggctcaaccactccagtttcttgattgacacatgtcatgttaatccttgtttgaaatttaacagatggaggaatgtctggataatccctgctgcaaaacaatttcaactggtagatacgccctttatgaacagta

SEQ ID NO: 30627 - DNA, 406 bp, Glycine max
  Clone ID: jC-gmst02400055g11d1
ggttaatatatttcggattatttgacaatagcttatagttccctatagtatgatacacgaaaatgattgacatgaacttaatctttaaaactaatatttgaaccattactcgacaaactgaattttcaatcgttgactttagtttatgataggaggtgcaaaaagtcatgctatcttaccacaatttgtaaaggaagaagccccattttcaaaacccaaccaccaattgaccacatacaccctatttacatttccatgtcctaacaggcttaaactgtaaaactttccttcgacaccaccaccgtcatcaccacgttgactatatacattacaaacttacagaactccattaacgtaaatgctctacccagcattataatcacctgttccaattaaaataaaccca

SEQ ID NO: 30628 - DNA, 509 bp, Glycine max
  Clone ID: jC-gmst02400055g12d1
agacaaaactattgtagagtaatctctaatcaaatattttaagtcatacaaacaatctttccctgtctgcgtcaacaatcaactataaaaatatggagactattcaccgtttgagaagcaatcatgcaaaaaatgatgcaaaaatattgggatctcagaggttaacagctctgctccactggttcagggagtaaagatacctttgccatcaaaatcaaaggaatactgtcgaaactgaaatgccaaaaatcagttaaagagcttgatgagaagctatctacctttcatgtacttgctcaaagcaaaatttagctacggcaatttatgtaacccgagagagataaaactctgcagtcttaatgcttaaatttttacttttacaggatgaagaagcgaagaaaccatgaatcagaagagttctttcgcatgaatgcactttaatctattcttccacaatctattaagttgtcacaattcccacttgtttgtggaaagttcaagcttgggca

SEQ ID NO: 30629 - DNA, 436 bp, Glycine max
  Clone ID: jC-gmst02400055h04d1
aaaacctcaaatccacgtaaaaaaatgtcaataatacaaccccaaagacacattggagcatacacaaataccattaacttagtaaaatgatccacagacccacaattcctactcaaattgatcattatcgtcgtcaggaaggggctgactagcagctgcaagaagctcaacctcgtgctggtggtgggcagctaaatcaatttgaacttttgggggggccaatgcaggagattctacaaagggcaagtttgcatcgcctgcaagtttcctggccaagtacaaaaatgggttttcaaaattggagttgcttttagcagatatctcatagtactggaaattcttcttcctgtggaaaggaacctgctttgccttcacttgcctatttttgacaataaccttgttaccgcaaagaacaattgggatgttttcacaaacc

SEQ ID NO: 30630 - DNA, 413 bp, Glycine max
  Clone ID: jC-gmst02400055h06d1
catgacctcaaacatatttagccaaaatatatttaactatcaattacataatatacatgacagcatcttgtgccagaaatttttggattgtggggccgtatgcggtctagcacaataaacaatttcagatccatcaattttattactttgttttgctttctcacactcattcaagaatgttccaaatgcatcttcacagtatttcactgcctccgaaacagttaagttctcagttagcttggggtatatactcttattatgatccccatttagagttgctgccatatatatcaaatcttcttgaaattcactcaattgcgtttgttgttccgcggaagcagcctttcgcagtttgacggggtcaggcaatttcactggacaatcagtacgtggggtgcttaaagataagagat

SEQ ID NO: 30631 - DNA, 469 bp, Glycine max
  Clone ID: jC-gmst02400055h09d1
gaaaatggtaataaaagcaccaaaaggattttttaaaaattacaggcaaagcttgaccaagtccaaagtataaacaattaaacaattaaaacataagcctactaatgtgttatataagttataaaaagggtacagtgatacaagaccaaaatgtcatccttttgactctaaggctaaaagtatcttctttcttggtcccattggtatacccatggccttgagatcctcatcagtcatatgattgagagcagtcatatcaacttctttagcctgaaaacttaagagatacttttcgagacccaatgactgcaaaaaatcatccagtgaagcgtcagcctttcgggacaactttttaggagttgggttagctgatctgttgatatgtactgcaggagtctcaacatgaatacttttactgctaggcttaacggccactttaggctttggtgggtcaatagttttaggttgt

SEQ ID NO: 30632 - DNA, 569 bp, Glycine max
  Clone ID: jC-gmst02400056a03d1
aatataattatatttatatttatttatataaaataaaatacaagtgcaacagcctcatataagagtctcccatatgagttggcagtagaaacgaaaaaaacatttgcataatcacaccaaattaagtgaagctacacaataagctcattgcttcactctcacatcataacccccaaatttatttattaggtaataacacactcaacagtaaagataaataacagaacataaaaaccagaagtacttatatctccctcacttcatcttcgatctcatcctcactccagcagcatttcagaatagacctgggagatgtactgccatcacagccttgaacaaatgattggtacacaactgcaccacctactccaagctcttcatagctcctcttaccacagtagtatcctttgatgtccaagggaaatttgttaagtttttcgccatgcatgtcaatgttgcaagcaacagaaaactctgctggacgaaagcatgctaaaactttttccacaagttcaccctaagccatttcatcaaagtcataaccatcagcttcaaactcgcgtaactga

SEQ ID NO: 30633 - DNA, 427 bp, Glycine max
  Clone ID: jC-gmst02400056a04d1
gaacactacaaatagaaagttgacatttaataaaccaaagcaacacaacgcagcaaagtcctgaaactcgctgcgcttaacaaaaatgtaatcaggggtttcccatcatacactatctcattaaaacacagataaataaaagcaattttgccactcgtcgatcaagaacccagttctgggaacaacagttgcgagatgatggtggagacttcaaactttgtccgaaaaacaagctacctagaaaagaagacacaagagtacagaaaagaaaccaacatttattgtaaccaacatcccctgatgaaccagcccgcacgattcacttcttcttctgggcagccttggtgaccttggcttcggtaggatccttcttcttaacgctcttgatgactcccacagcaacagtttgacgcatgtccctaacagc

SEQ ID NO: 30634 - DNA, 378 bp, Glycine max
  Clone ID: jC-gmst02400056a06d1
gataaatgaaaacacaaatgattttatattagatttctgacacaattgacgtgctttatacaaagatattgccttgatggaggcatgtaaaaccaatacctgtctacttttttagtaaagagaaaaatgaagactccaaaccccagttttttatcctggggagaatagccaatacaatgatgaatcaactgtgccacgttatatcccagatcttacataatcttcacctgaattacagaaatgcatgatttcgatcacccaaataaaactttctaacatgggagtttgttgtaaattctattattaaccggatgatgaaaccaaaacattatgctcctttaaacgttactgaaaatgatctaaactggtttgcaactg

SEQ ID NO: 30635 - DNA, 495 bp, Glycine max
  Clone ID: jC-gmst02400056a07d1
gaaagcaaggttttcacaccaaaggatctgattcattaaaagcaatagattcttcacaaccacacaccactcacttgacatatatggaacacatacataatccatatagcattacttaggggtggggcatttcttacttttatttaatgcacaaacataacaagggcaggaaggaaaaccacaaaattaaaacgaagatcatatagctgttaataataacaacaacacatgcaacataaaaaccacatgcagttgtggtaggggcatcttcttcagattggaaacccctcaatgatggaagggagagcgttgatcttgatgatgttgtaacgcgcgaaaccggttttcttgaacagccacttccaggtctcttcggtcctctctttgccaccggcgttgggagcgagaagcatcatgtcgaatgcgatgccaacgtttgtgaagagttcggtgccttcgggtcggagaacgtgatccacgattgtgacttttgct

SEQ ID NO: 30636 - DNA, 575 bp, Glycine max
  Clone ID: jC-gmst02400056a11d1
aatgcataatagagatcatttcataaataagtattcagcaagcaatttatggatacaaaaggcggctccgataaaatttaatgttattaagcaaacaaggggaaaaaagaaaaagagtagcagagtcggttttccacgagacgagaagagacacgcaactcgataagtatcacaaaagattacagaagaaaaggaacattctcttctcaactatatcctatttgttgctgttgctgaggtggttggtaaccaggataccccggataactgccatacatgttgggatcctgtccagcagcaggagcatacccataattttcataaccttgtgcagcatacccatagtatccaccaccagaaccagcaccaccattccactggtttggatctgcctgagcctgtttgtttgaaggactgcggccccatgaaagacgaacattttgaccacccaacagggtcccattcaacacccgaagtgcctcttcggcacagctcctgtctgcgaattggacaaacccacatcgcttgcctgctggaatcttcacatgcactaattctccatactggctgaaaac

SEQ ID NO: 30637 - DNA, 543 bp, Glycine max
  Clone ID: jC-gmst02400056b03d1
gtcattacgaattatgatattgatgggatataagtacatactggatttcgaatgaaagaagctatcgatttttcagtttccttttttacatcaaaacatattacagcacatgttcaaccctgcccagttttatactactccctaaagaacagtagcaaaccaggaaaataacagtatcattatattgaacccacaaaaatgggaaaagtcaccactatctatttaatttttaatcaacattcccttgaagaccaaacatcacaagctttgccctacgccttcaaatttatgttctcttgaatgaacaccgtagatgcaaagtcaaccatctttgtccccatccattcatctttgccgccgaacaggtgatctggatcttgacctccttcccctggaagaatcaagagaagtatagggagaatgcctgcgctgagaacgcttgctatgaggagaccgcaaaagttgtcttcttttagatctgactggagacggcgataagtcacgcttttttggatgcagctttcttttgagccatctgatcct

SEQ ID NO: 30638 - DNA, 387 bp, Glycine max
  Clone ID: jC-gmst02400056b04a1
gccgactatcgaggtcgttctccatgctgttaattccagccctgtcctttaaggcgtaccacttttacatatcgtgagtacaattactaccattgggttcaatgttgagactgtggtactgagtaacattggcttcactgtacggtatgacgcaggacacgacacgattgcatcctgggggaggcactacgtgcctaacgctcgagctctcattcatgatgtgcactgcgctgactggcccctattcagtgaggacacctgtcaggcccattgcatgttgaatgaggatgaactgcgagatgccgcattgcttgtgtttgccaccaaacaggatcttccttttgccatggatgctgctgagattactgacacgttgggcctccactc

SEQ ID NO: 30639 - DNA, 509 bp, Glycine max
  Clone ID: jC-gmst02400056b04d1
gaacttcaataataatgacatgcaattaaatatgaccaacactaatggcagtacccaaaaacaataaagcagtcattttaagttaggccaacatctagcaagaaacaattcacgagctaaataaaagtaacataaaatcatgtctccttagaaagggtattctttgcagcctcagcagccgttttctttgcatcaatctcagacacaatggcatcaatttttagcttcagtgagtacagccaatacctagcaagaacaatgctcgcataacacaaaacagaaaattatgtctccttaggaggggctttcttagcagcctctgcagctgccttctccgcttcgatctcagcaacgatggcatcaatttcggcttcctccagttgacgcagaccctgctccttagtcatcaccggaacttctatggtcttccctccactctcaacaacttcaagcaatgcgcgaatagccaacttgacagtctcctggccagaagtgtccttatagttctt

SEQ ID NO: 30640 - DNA, 525 bp, Glycine max
  Clone ID: jC-gmst02400056b05d1
catcaacaagaattgtctcattcattctactttcaataagatcagtcacaacacatacaaatctttcatgattttagatgcacaaactgaccattatggacaaatttagatttgttcatgacacaaatctttcactatacagttaaaagcacaccactcggaatcatgtcattcgtaacactttattcaaatgtatgctgatatagatgcataccgtatatcctattataaaaagcaacaccactcgactatatagtagttaggtgacacattttccctcaaaaacttggaactgaggaacgtgatgctcagaactccctttctggaaacatgataggagctacgagagaccacaagtacagcagagcagttgcccaggaagtgatgattcgaacccacacagaaggccaccccacgttaaccaacttcccgctctctccaacagatgttgaccaaccagtcagaagcattgcagaatacatgcttgcaagagagaaaatcaagtggaagaaggcctatgaatat

SEQ ID NO: 30641 - DNA, 495 bp, Glycine max
  Clone ID: jC-gmst02400056b06d1
agaaggaactttgctttgatgatattttagacgtcataattattgcttacataaaagggttcaggttacatatgaataatagcaaatgatttatacaaatagaactctaggtctttctaaattcttaatctgaccctgtgtaaagcaaaaaacttgatagcataatatccaactaaagaaacaatacatggcacaacaaaaatagaaaaaaagaagtaggatcaaaagaagcttgatacaattactctatctgaattatcactcagcagcagtaacctcaatgttattggtttctgcattggattgtggtagagttcccaaatccacgcgagattctttatcctcctgagtgattgaatgatcagaacttccttgatcattcaagttagaattgctatcttcgccggagtgtgcaaattcctcctctttttgtgactccactgtttcgttttgagcaccaaccttattttcaactgtcttactctcaacagtggc

SEQ ID NO: 30642 - DNA, 455 bp, Glycine max
  Clone ID: jC-gmst02400056b07a1
agattttatgcccaaggccctcctgctatcattacttcccagactgcatttgcttatcaacggcaacttggtcctgctatgaggccatgtgcagcttccgttccaaaattgttcgtgccaatgggtcaaccgggacaacatggacaatgaccttctgtaatgcgttcagttgcacaccataaggtctaaccgcccgattccaatgatgccaactcttatactacctaggtcgcaacgccattcttatggacctggtcaacctatgccacatgttttgatgcccggagttgctggacgtatattatctgttccatatgatgtgggtgggatgccactgctcaaagcatgaatttcccagcaaattcctgatgaggctttatcaacagctatgacaaatgcttctccagagcagaacaggaccatgctaactgagaaactctacgagcttgtggaac

SEQ ID NO: 30643 - DNA, 546 bp, Glycine max
  Clone ID: jC-gmst02400056b08d1
ctgcagtaaactccactctttagcattgataagttattacacaaaatgtgcagcaagcgtctcaaattgctgaatctaagaggacaaattcagctatcagaatcagagagcacttcagtttcagttacgagacagtctacaatggtatgtgcatccttacattcaacaacaatatgcaaccctttattaatacattgcttagttgtgttattgatcccaagctgcttaatgagtcaggggctttgaaatgtctctaataaaagcatcaaggttcccatatgaggagccccctgcggcaatcgctctgagacacataaccttgatttctcttgccctgtctctgatctcctttccctcttggctttgaagatccataaacctctaaactagagcttctatcttttgtgtggccacaataactgcactgtccaactgtgatgtctctaccttagacccattcttccactcatccacaatttggctgctatttggaacttgatccaagataagagggaatgtcagcattgggaccccaaccaagagagc

SEQ ID NO: 30644 - DNA, 534 bp, Glycine max
  Clone ID: jC-gmst02400056b09d1
aagaataattttgtatcacgtttaattgatcatgtaaaaaaattacatatgaggatagaagaaacaaaatagaatggagaggaggaagagaaagtgagaagcacacacgaattaagtaaaataaatgaaacaaattatagatatgataagggcaaagctcaaaaaactcccagcacacagcggtgaggaatgaatggccttaggcctcctcccacttgagtggcttgatcacttcccatgtgaagtcagggtcctctcttccaaagtgtccatatgcagcagtcttcaaaaacctgttatttccacccctcttgagatcaaggttgatggagatcataccaggcctgaaatcaaagttctccttcacaatgttaaggatctccttgtcagggatctttccagtgccataggtgtcaacaaacacagacaaaggctcaggcacaccaatggcataagacacttgcacaatgcaccttctggcaagtccacttgccacaatgctcttagcagcctgtctcacaatgtaagcaccac

SEQ ID NO: 30645 - DNA, 486 bp, Glycine max
  Clone ID: jC-gmst02400056b10a1
tggagcttgctcgagcgtcgctactgaaaggatatattgcggggctttacttgttttattacctcagcgtgggccaacagggtgaccatggccatggccacgatcctgatcctgttcactgtcttcggggtttcatcggtcctaggcatgtggataatctggtacgattaacaacaacgccgtcacgtaagtcgttgacgaggtgctgatgagcatgtacgatcggcggttagtattgctcggctaggagtcatcgcgctgagagacaatgagatgaggttccagatctacaaggacggcctgcgattcatcgacggccacaactaccattaggaccgcacctacatgctaggactgaaccgggtatcggatctcaccaacgaggagtgcagggccatgtgctggggaaccaagatcgatcccaggctgaggctcggctagatcgcgagcaatcgacacgcgccacgtgtcggcgacatactacct

SEQ ID NO: 30646 - DNA, 374 bp, Glycine max
  Clone ID: jC-gmst02400056b12d1
attattatattgtgggcccacaagacacataaatatccttttttcggcggcccgttaaaagaaagataccaacccttctctgatgggagcccgctggtaacctaactgtttaactttgccagagccctttgggttggcagccccacttagggtataaagttccacatcccccttgcgaggctcgtttttgaaaattaagaccgatggaaatgtcaaagcccttggacctggcccaaatgtcaacactcatgggcagggttcccctcaagaggggtttactacaaaattccttgatccctacaagttaacccttaaaattaatgaggggaaaagtctgataaaatcgccacaaaccaggccccaaaaacaggggg

SEQ ID NO: 30647 - DNA, 408 bp, Glycine max
  Clone ID: jC-gmst02400056c03d1
gaatccttcatccctttctattctggttttttttttcactttctgcttttacaattaattcccttttcatattaacaccgtaacttaaaaaaaaaaaaaacatgaaacgaagcaatcccatcggaaccttcaagaaaccccaaaatggggccccggctgatccggtttcccaccaccttcgttacgtcgacccgtaaacgacgccgttttgatctgatggcgaaaacccgagcaacatgagcgccgccatgatcccgacggggaagaagagaaaaactagtggcggtggcgggagcggcggcagcatcagcggcagaaccaccattgacgccgcgagcgccgccagaaccagaacggaacctaaaccaaaacaacgtgccatgtcgatatccatgttgtggcccctac

SEQ ID NO: 30648 - DNA, 535 bp, Glycine max
  Clone ID: jC-gmst02400056c04d1
aaccattcaaggattctttcccttttcataacattaacacacaagaaaccacaaaagatgcaaaaatttaaacaaaaataaaaagcagaaaaaagaaaatttacgacaaagaaaactcaaaatgcagctgccatatggatcaactccacatggttgccactgtgaccaaagctatcccaatcgacatcaacattgctccaccaaggctaaccaaactcactggccggaattaatgggaatttgggccggatcttctttgaccatcctagaagaagtttggtttggcagctttaggagcctttgcaagagttgttggagccaaagctggagccttattggttagaaagaaatctagaggaagaagaaccttgtccacatgataaatgccaagcttgttatccgagtagactactccgagaatggtggcattgactaccccagtagaaatgttgacactgttacctaatgcattcacattcagcggaagccttgcaaggtctttaccagccactgtctgcacagggttgcttaggga

SEQ ID NO: 30649 - DNA, 472 bp, Glycine max
  Clone ID: jC-gmst02400056c05d1
gtgcagcaaaaactaatttctcttataattatttatacagaaacttttcctatgagaacttgtaatagagttgaaacaaacagttacaacttaaaaaggactagaatttcactccggaactcctgagattgcagatgatgatgactttgagtagcgttcaagcaatgatagtaccttggcagcttttctcctaaggtgtccatccccatatatattcatgccagtgagaccaattaaacgtgatctagctgttgttccatagtattctaccatttcctttgacacaaacaccttcttcaacagtcctagagcttctgcctttagagaatcagttccccagttcaaaatgtccattatggaccttattgcattatattcatgcaagacacgagctcccctttgaggaaaatctttcaaaaccaatgtggagagtggttggattgctttacaagccgttgcatgaaccttccca

SEQ ID NO: 30650 - DNA, 82 bp, Glycine max
  Clone ID: jC-gmst02400056c06d1
tttattttttttttttatttttttttttttttgtatatttttttttaactttttaaggaaaacttgctatttataaagcaaa

SEQ ID NO: 30651 - DNA, 399 bp, Glycine max
  Clone ID: jC-gmst02400056c09d1
gggggtgggtttttttttttattgggaaacaaccccctaaaaggacagaattcaaagggcccaaaaaaccaattacaaaatggataaacgtgctattttgaggcctaattcaccctcaccacattgaatgcccctttttttttcaaaaaattcacccccagttttataggaggcatattttataataaaagccttggaattggaaaggcctcataaaacagcaaaaaccacagggtcccccgggggaaagggtataacagcaaaaaaagcaaatcgggggccagggggggcaagaacaaaagcaaacggggtttacctttcgacaagaggggcaagaagaacaggggggacatcccaaactgcaaaaaagggggaaaaaaggaaaatttggaaacccaa

SEQ ID NO: 30652 - DNA, 482 bp, Glycine max
  unsure (1)..(482): unsure at all n locations
  Clone ID: jC-gmst02400056c10a1
ttgcgctcgaggttcacaaacagaccaaatggtggtatgccaagcggtttctgcatcctgacattgtggcaccatatgactatatattcatatgggatgaagacctgggtgttgagcattttaatgcggaagagtacataaaactggtgaggaagcatggggttggagatttcacagcctggcttagagcctaataaagggttgacatggcaaatgacaaaaagaagaggtgatcaggaagttcacaaagtgacagaggaaaaaccaggatggtgttctgaccctcatttgcctccttgtgcagcgtttgttgagattatggctccagtgttctcaagagatgcatgngcgctgtgtgtggcatatgattcagaatgacttggtcacgggtggggtcttgattttgctcttaaagatgtgttgaggtgagtccattctacacctttgtcaagtaaaatccaatttggctgacccagtgacct

SEQ ID NO: 30653 - DNA, 560 bp, Glycine max
  unsure (1)..(560): unsure at all n locations
  Clone ID: jC-gmst02400056c10d1
cctataagcactttcattagcagcaataataattctcttcacttgatttactcactgttcagtactgcaaaattctacattgaaatgatgtttggtccccagctaggactctattgtgattgcattgcatgtacgtaacgttacataggaatatatatttttcttcaagggaaaattctacgcgtaagggtagtaatgatatctgtgtacaagtcaactttggccttagtcaccctaatgagctgtggaattagatgtatcagttcccatggacttgtaatacgcgttttcggcatttgccaaccgactctggaacatggtccactcctttctacaccgctccctcacctagcacaaacaacattttaacatcaacaaatttctttatcaaaatacataacatttagactacttccattataacacacacaacctcttcattagacttttaatgtgagataaaaagaagccaaataccatatcaaacgatcttgagaaaagtaatcaaacaaattcagctgnaaaatattgaacatgtaaaacatagtaacataccccct

SEQ ID NO: 30654 - DNA, 472 bp, Glycine max
  Clone ID: jC-gmst02400056c11d1
gcataaccacattataaccttatagcgaaatagttgatggcatatgcatgccttttacaaaaagaatcaacaacatattaacattacatctgaatgaaacaaggaatacaacacagggtctcctggtcctcaaccttacttccttttatcctatgattttgcatcaaaactatggcacttccttcctcttccctttgattttgcatcaaaatgatgagacttgagcttctttttccgaattgggggggcgggaccacttccctctctgaagggcatacccataagagccaacaatttgtgtgcttcttggtcggttttagctgttgttgcgatgcagatatccattccccgaggcttaccaacaacatcagctctgatctttgggaagacaccctggtccttaatgccaatgctgtagttcccatgcccatcaaagctgttggggttcacaccttggaaatcttttgtccta

SEQ ID NO: 30655 - DNA, 582 bp, Glycine max
  Clone ID: jC-gmst02400056d02d1
gattgcattgcacctccttaacttgtcctttttctgtttcttggtatgtacataaaaagaactatagactgaaaaacagcaccaagtgcatggcaagtgcctttcatgttccattaagaaaacaaaaacactaaagataaagaaaaaaggtacaagaacacaagcgttgcttctctacttaaaagaaagaaattgatagaaaaaatttctgtaagagtatgtggtggcagcagcagcagcaactgatcacagaaactgaaagatggtgtacgtgatgtgagaggataaataagattattagctctcaacaatctttggaccgttgtacatttttccatttacttctaggtcttcaagttcatccctctcttgtagccattcataagcattcttttcctcttctggtatggataatccatccactgaaaagttggaaaaggggaaatcgtggtagtatgtgcagtgtctgccttcagcatcagaatatggaggaccaagcacaattagaactgcgcatgctgtcactgctgtgaaacagtgcaaggttgcccccatcttctggataaaggatgaaggggttcc

SEQ ID NO: 30656 - DNA, 498 bp, Glycine max
  Clone ID: jC-gmst02400056d05d1
gagcattaagcaaatgaagatttataataactaccaacttctttctatgttgctcctaggcatcactagaaaactagtacattaatgtggatattagatatccctcctaaaatcagtgatttcagaggagtttaagtcttctactcttgttcataaaagtgcacatataagagggtattttcactattcaaatagaaacaaaatatgatcatgattcacttctattcaaggataaatatacccttagtgcaccttacacctaaaacaattttccttgccaatgagtgggttaggagttggtcattcctcaagcaggaacccaagaggaaacagcaaaaagaattcgccctttccatccttgcaaaacccacttgccattctcattaaccacaaaatctttatgatgttccttcttcaccattttctttactctattcacatgctctggggccaatggaagttgcttgaaccctgctctctggttcctaacttgccact

SEQ ID NO: 30657 - DNA, 320 bp, Glycine max
  Clone ID: jC-gmst02400056d09d1
attgtatatttaggattgggagttaactaattttttgttgttcgacaccacaacacagacaaaaaaacatggaaaaagaaaacacagaaaatccaacacgaaccagggaagaacaaaaaaaagccccgaagggggccccaaaagccccaacaacggggcggggtacaaaaaacgaaccgacgaaaaaggaaggacctaaaccccgcaacgccggagaagggaaacccccaatacaaggaacgcggcaaacaaaaaaaagggggaaaaaggccagaaaaaaaaggggaacccaccggaaaagggaaagggaggacccccgg

SEQ ID NO: 30658 - DNA, 431 bp, Glycine max
  Clone ID: jC-gmst02400056d10d1
accaaaaaagacaaaagccaaaaattttttaaaaagggttttttggccccaaaacaaaatcatttttcaatcaaattaaataaataacccccttgttcatcattttttggggtccctagggatttacataagccagcatcaggaactttttttatcgcaccccttaccatacaaataaaaaaaatcccttaaaaggaaggaattgcgatcggaagttaatccccccccatgcccgtacaattagaaccaccctttgatcaataaaatttgaaaaaaaaaaaatgggaagccccaacttgagcaaaccccaagcaaaagaagatttaagaggatttggtttacttataggataagcttagggggcccattggaaatcacggggggctttccttgagcaaacattgaaaaacaagctgagtgaaatcggaagg

SEQ ID NO: 30659 - DNA, 509 bp, Glycine max
  Clone ID: jC-gmst02400056d11d1
aaagccattcctgacactaggttggtattggctttttctttaattatttattatgtttgaacatgacaaaaaaaaatctaaatgacaaaacatcaatacttttattactgtcaactgaggcattcagagtgacatgggagcaccgaacaagtggtaactaattgcccacttggataacagtagagacaaatcacacacaacagattaatcatcaacaaaatacatccgttggtgaagttgctgacagctgaagagaaactgctttccaatccacagcatgaccacactgcttgtcttttgtagtagccactggtcacaggagaggacccacaccagaggtttcagttatagacaccttttttgcagcaactgccttcagactgtacctctcagatcttgaaccaaatacttgccccaacaccgatgccgtgatagtaaatgccattgctgatttagggatcaagacagacttccttagcattgctatgaatggaacagctgcatggact

SEQ ID NO: 30660 - DNA, 433 bp, Glycine max
  Clone ID: jC-gmst02400056d12d1
gcgaaaaaaaaaatttttttttttttaaaagaccctaaaacaattttcccccaatggggtttccatggggttttaagcctccggggttcccccggggttaaaaaatcaccaaacttccgctgctccttggggctaaatgcccccaaggaccgttgggttttttggaggggggggcccaactttttttggacgttgaggcccttttcgcccaggccaaaggctcgattaaaattttttcaaaatgggttttttttttgggggaattcttttaaagggggggggaattttctaacctttcccaaacatgaggcgggtttggaaatttggggggtttaagatcattttgtcctttccaaaagccattaattgaactaattggtgggaaaccaggggggggggggtttttccttaaggttttgcccaagcccttttt

SEQ ID NO: 30661 - DNA, 556 bp, Glycine max
  Clone ID: jC-gmst02400056e01d1
ggaaacaactcacactgtcgtttgccttttttatatctgtaaatacttaataatacattacaattgtcctcgttaaatgaggtcgacaaaacacccaaaaattaaccaaatttggagcacaatgttttgttcttacacactatatattgggccacacaaaatgagattttaagactatatcttatgcttcttcctttccatcaactccaactttcacatcatttgcactcacaagctctttttctgcatcgtcattaggctttatgttgtgctgaactttgtactgatgcctcattgctaatacaagaaaaagtatgaaattcagtagtcctagcactgcgagcaaccaatagaagtaatctaacctgcccttgttcagattgctccttagccatcttttcttacttgctttgtccacaattgccaccaataagctactgacaaaataacccattgatagtgtacataggaaaagtccagtgctcatagatttcattctctctggggccttcctaaagaataattctagttgtccatcataagccaatgctttccc

SEQ ID NO: 30662 - DNA, 494 bp, Glycine max
  Clone ID: jC-gmst02400056e02d1
aaaggaaagaatttcaattcaatcgtcttacaaacagcaaaatttgtagtgacatgctgcagtcttttgctaaacaaaacaacaaatatagcaatctgatagctgtagatgccaaatttcaggccccccaactttctcagtatcataatcgtaacaataactataatgacgaaaattttgaaaacgggccagacccatctcacttattattctactttaacatgtcaccaaaggagcgaaaaacaagttaattctttttgccaactccaagcctcagacggaaatcctcttccatacgaggaagaccatcacgcaacttgacctttggctcccagcccaacaattcctttgcttttgtgatgtctggttttctttgtcgtgggtcatcaggagtgttctccaccatcttgatctccacacctggattaataagctctttaactgtctcagcaagttcagtcattgtaaattcacctgggtttccaaggttgatt

SEQ ID NO: 30663 - DNA, 328 bp, Glycine max
  Clone ID: jC-gmst02400056e03d1
gaacccaaaaaatttacattggtcttcaaacaccgcttttttttattcctctatacaaactccttgatttgactttgttacacaaattccctctatgggggggattcccccactttgaacagttctatttttcccaacctaataatcctaaaaagggtatggtctttaccccccacatttacttccaaagattgggaaacataattcaccagtccaacaaacccattgtgccttaagcgaacacccccttggggccccaagtaaaacttgttccttactaaaagtttgggcacaaatatccggtaaaaacaaatccctattttggggg

SEQ ID NO: 30664 - DNA, 460 bp, Glycine max
  Clone ID: jC-gmst02400056e04d1
aatccaaaacaaaaatgaaacttttgtttctaatttcaaggtcttgcccaacatccttgagctagatggaagctgttgaaatattattttatcaagtcacttttcacatagaaattcatggtgaaaatgttcttttagcaactttgattacaccgagacaaatcaatgccacatagtggggggaaataaacaaatacagaaggaaagacttaacactacagtacttattattagcctgtaagagcagagttcagagcactatggacatcaaccccaatctgagcttcagctttctccaaatcagttgtggctgagttcagcttctgggtgaaatcttgaagacccttctggactagattcgcatcaattcggtccaccggcacagccttaacagctattatattagcaacagagtttgcatggatgaatgcaaagccactgctgacaaagtacttggtca

SEQ ID NO: 30665 - DNA, 354 bp, Glycine max
  Clone ID: jC-gmst02400056e05d1
agggtacggaccaaagggctaactttctttatgttaaattaaaggttgaaatattccaataaccttgagggttttcttcacccgcatgtctttttttgcccagtggcattaaaaccccagatacccaaaaaaaagaacagactttcgcccaaagcccaacttaactaacaaaaattggtattttgggccaaatggagggccctgtcggaaagaaccctgtttgttcaaagctttgaagttggcaaacccaggggttttgtcttaacaaggcatggggagaccctcgggggtcgaacattctcaatgaggaagggtttaaccctattggtagtaaaccaaaaaggggaccccttg

SEQ ID NO: 30666 - DNA, 486 bp, Glycine max
  Clone ID: jC-gmst02400056e10a1
aaaaagcaaggacgcaatctatgtccctgacgctgagcacgaggctctccaattcaaagcctgggtacacagtctattgcagcctcgtcgctcacgcatagctgcggcacaacctctacgccggcactctccgtcgtccgtccacttttaccttggccctcatcagtatcgcgacgggtccgcggtccgtcactcagtctcgcggaattactctgttcggatgtgatatgagagcctggactctcactggtaacggctgtcgcgctcacaaggttatcaaagtgcatgaccctatggaaggaacggggctcgccgctcttgagggtccgacgcacagtgtagctggttatgccacagttgctactacagctgatgacgcccaaaggttggatcgaaacaggcgatagagttaagcatcgaatgctgatagagaacggctcctacgagctactgcagcagcctgttgattgtaatatacgccgacac

SEQ ID NO: 30667 - DNA, 543 bp, Glycine max
  Clone ID: jC-gmst02400056f02d1
gacgataacataaacttttgaatagaattttattacagacaaaatcgttctccaatgcatgaattatacaattcaaaacaaaattcgaccacttgtgtgtagaccttgcctcagtgtaaataaatggcttacaaaattcgactatgcaattaacattcctgaagctcagttctcaaatacacttagcaaaggaaagttgaaaagataagcagaaaacaggaaaaaatttcaattcaatcatcttacaaacagcaaaatttgtagtgaaatgctgcagtcttttgccaaacaaaacaagatatatagcaatgtgatagctgtagacgccaaatttcaggtcccccaactttctcagtatcataatcataataataactataatgatgaaaattctgaaaatgggccagactcatctcacttattatttctctactttgacatgttaccaaaagagcgaaaaccaattaattctttttgccaacttcaagcctaagacgaaaatccttttccatacgaggaaggaccatttcgcaactggacctt

SEQ ID NO: 30668 - DNA, 443 bp, Glycine max
  Clone ID: jC-gmst02400056f03d1
atcaccttcaacagaattaccaatttactagtctgaggtgttgtgcaatactggcattaaagaagctgccttttgttttcttacatgggattgaggagttacctcgttcaaagaacaatggttggcagtaggtatactacagacgcagcctagacatttgtaattttctgcattttcacgctttacgcggatgactctagcaaaatacgtgatttacaatccacctagtacaacaagctaacattctgactcatcataacaagcacttgatatacaccgaagaaagaaacaagctcccttattattaaattaaaaagctgacaaattggggggtcaactgatgaattagatccattcctcgtggttgacgcatgcgtccacaagtttccattcttcgcttcctttttccgggttatgaaccgtttttccaaccgagcagttca

SEQ ID NO: 30669 - DNA, 404 bp, Glycine max
  Clone ID: jC-gmst02400056f05d1
acttcgataactttatattattttacatgcatgcatagcatagatagcctgctctcaaattagtcagcaggaacaaagatagagagatccaacgatctttaaatttcacatttgccataaatatataacagaaaagagggtatgggatatgagttaagttttgatctcattcaactacagtatcccaaaccattactcttaagactttgaacttcacttgtactccaggatcatgatgttctcaggagctaatccaacacaagcccttaggatgttatccagcatagctcgctgctttgacagtgcattaaccactggcgtactcggtggaaccagaggggccttggtcaggctactgaagatggttgccactggtgtgaatgagtgggaccttccctcatttt

SEQ ID NO: 30670 - DNA, 418 bp, Glycine max
  Clone ID: jC-gmst02400056f07d1
atcaacaaaagaattctacattctactatttctttgtcctccttacactggccttcggacaaaaaagaaagtaaactgtgactatttttttccggtggtgtaaaatggagtagtagtatatggaaaacgttaagaaaagaaaagaagaagaagaaaaaaactcctcctaagagtaattaacatgaacactggccttaatgccagattgacaaagagggcaattgtgtacggtggacccacacattgtgcacaaacacagatgcctacatggcaacaacagcactatcgattctcttaccccacactgattgcacatcctcttccccaaaacgccgtggtttcgctcgtatccgtcgcaaaccttctcctcctctcggtgggggtggttgttgttgttgttgcttgctcaactcgattc

SEQ ID NO: 30671 - DNA, 426 bp, Glycine max
  Clone ID: jC-gmst02400056f08d1
caaaaccaatcataaacaataaaattaaataaaatagcaggccaccgttgcaaacagaaatagaagggagaaaataattgattacaagttcacaagtcaatgacatgtttgaaataaaccatgttagtatttggaaaaccaacataaaatgcatataggggacaatgccaatcacaacccatgcccttaacttgacaagcctctgactctgtcatttaagtttcaggcaaaacatattgttacagtttctacataaaggccttattcatatgaataaaacagaaaaggaaaatgaaatatcaacaaatgagaatgctagtttcattagcctctccaattgtctttttgcttccttatctctcctaatgctttaacaggggacttgcaacccaccctctcctggatctcaggtagatcaaccctcat

SEQ ID NO: 30672 - DNA, 573 bp, Glycine max
  Clone ID: jC-gmst02400056f09d1
aaaaataatataaaaaggcacaacaaaaccatagcacatatcctaaatgtataattgccgtaaaaaaccaaaaaaaaaaaaaaaactttttttgaaagtacaaaaacaactcaattgaaggaaacatgagaaaaatgaaaacccacaatgacaaaaccatccaaccatacttgcaaaccagaacaaaaacagtactcaacagatacacagtccatcacatttccatactgcatgccaaccattctatatcctgaggttccaatctaggttaccaatcttttaagcatatcagcaacctatgagagaacaaatcattcaccagccacattaaattctatgctggtggagctgattcatcttatgatcctcaggcttatacatcctgctcacctttctcattggtgttagaggccatttccggctcttcatccttcgatttatcctcgccaacagttagtttcttggtgatctggaccttttccggctctttctcgtctgatttgtcttcaccaacagttagtttctcgaggagatcggcagtagccgaagcatctttgttttcctccccttctc

SEQ ID NO: 30673 - DNA, 578 bp, Glycine max
  Clone ID: jC-gmst02400056g01d1
aggcagcgcaaggaacaatttattaattatatttacccactgggttctccatttggttacatgtagttccaattcagaacaccaaaccactttcaagtatttgccttaaaacagaatttccactttcgttaatgaaggaaattcaacattgaaaccaaattattgcagacagcttctcttcttttgctccgtggattcaaacacaattgtaacattatcaaacatgaattccattagtgtaactcaagcatacaattcatcgatgttacattccccaagaaaaaccttgatgctgcgcggtgaaccacagctgccttcggcaattagtgctttgccattggcagccatgtgtgcaataatcttataaatcatttcaatatcttcaggagcatggcaacggtcagctatttcttcgagggtcaatggctcaacaggttctttgcagcttgcctcatttagcactgccaacactcgcttctgaagtgcttagtacttaccctgctgctttcttacccagctttcacacccgggttgatgattaagccattatgttgaccaaggaggcataaattcctact

SEQ ID NO: 30674 - DNA, 488 bp, Glycine max
  Clone ID: jC-gmst02400056g07d1
aaaatagtagagtatctgtattctgagacaaacataaacaactgtaagtaaaactaaccgcaagaatacaatttgcactaagcacctagagtgcatttaagtatctaagcacttgctcattgaactcaaagctcactgaattccaagctgaaattgaaactaagcacttgcatgacatgtcgtctgcaattctctttacaacatgctcctaaaacaagaacattagttctagatgttactcattttgaaagcttatgatcagcagcatgacacaaagactactgagaaagattttaaccaagacatgtgaactcttacattcatggaagcttaaaatttcagcttcagggcttgtgaagtttgaagccaaaaactctcgggacatagctctgtgaaggtttctggggctttagttgtccataagtcatcaagaacagatgaggaaatgtagttccaaaataagccccatcaatggtgccttgatactt

SEQ ID NO: 30675 - DNA, 557 bp, Glycine max
  Clone ID: jC-gmst02400056g09d1
agaaagatgctatatatttattctttgaaatagcaaatgtcaagaacaacctaggatttcaaagggagaaatcctagattacaacttataagcatcattttgaaacaaaatcctaattaacagcgatatagctcaatgacaaacaaaacaagtagtccacaccacacacaattttccccagagattctgagtctcacatacatgaatctattttgaagcagtgaggctttcatagaagcctttaacaaacacataattcttagaaatactaagtctcacaccacatcatcaaatctattttgaaccaaaaaggctttcatagagacccttgaaaaaggagaaaacaggatctctagggggcagactttctttgacaattggatggttcaaaaattcttggctccaattgtggagcttaggaaatttctcacttgtgaataactccaaccctgcaatttcttgaaccatagggacccaaaatgctatgtagacagcagcaatatctaccaacccaatctcctcttctccaaagaacttcttgtcctttatctcattct

SEQ ID NO: 30676 - DNA, 436 bp, Glycine max
  Clone ID: jC-gmst02400056g11d1
atggtggtgtgttgtgattttgttgttcataataacattgattacagatgcatgaagcgctaaacttatatagttgctttttacaagggcaccaatggtcttgagaccaagaacaaccccaaccccaatgatgtggccaacagatccacaggccaaggtgtgagcaagggtgaagccagcagggtcaccagtctgcaagcctgaggccctcacatacagctttagccctgcagtggctttcctgtttgctgatggagccaatccaaaccttccagcaaacagcatcagggttgtagaagccaccataatcagatgaggggaggaaccaaggtagtcacatcgagctcccaatgcacccttccccttgcgactcatgggttgcacaggaaccaagaacttcacaggggcaactgagaaatggggtctaagaccactg

SEQ ID NO: 30677 - DNA, 541 bp, Glycine max
  Clone ID: jC-gmst02400056g12d1
gaactgataaaggaaacacttttattaagacttcaaatcacagcattcaagataatacaatacgcaacactttttagaaagccttataactataaactataaaagctttgcccagatgaaattacactgcgggcaaatttttcattcacctttagcttagttatcttcattgtcgcccaaattattctttgtcacatctttgtattagccctggatggcaacaccaaggggagcagcatccataggtattatcttctcaatttctacacccttgttgttctggttttcataggctgaaatgtgcactccaagtgctgctctaccagagggatcaaggttgttagaccaagcagcatcccactcaacagctttggctgtgctacatgcaacacttgctcctccaggaacagtgagcctagctgagttctgagggaagaacctctcaaagatcattctgtagtaatatgcttccttggtttttggggtgttgtgggggtaaatggtaccagcattaagcattattttttcagtcacatgtttt

SEQ ID NO: 30678 - DNA, 468 bp, Glycine max
  Clone ID: jC-gmst02400056h03d1
ccacccaaaacatgtaataatctagattacaccaaataatatatagtactctttcaagtatcatgtcctaaaggttgactacaaacattaaagggagaaaagggaataaatttgagaaataaacaaagtattgcaacttcctaagaagaaatcataaccatttcaatattctttcttcgattccactatgaccgtagggcccattgcccattttggcaaagaattgcaccaatacaaaggtactttctggaccttaaataaaggaatcttgaccacacgctgtcaaagccttattaaaatgccattttgagcccatatcactgaagaaatttcacaagaatgtgtggatgagattgatctaaaatgccatacgaccagccagcctgctctcaagtatcctcttatctatggctgcatcaatggagctcatctggctactatcatcatgcacctgatattttggcaaag

SEQ ID NO: 30679 - DNA, 455 bp, Glycine max
  Clone ID: jC-gmst02400056h05d1
ctctcttggttttatggatatctttggaggttacttttgtttacctttgcagtattttccttgtgttatgccgtgttttctttctgtctacaaaaaaacccgtgttcttcttttttgtaatccttctatatattataaattatatcaatcaataaaagcaagcatgataaagtatagtttacaggtttatcccaaacaaatgcaagtgcatatataaacatctggaattgcagttcagctctatgactagacctgagaaggagttaggctccaccaactaaaagaatagcaagaactaatatactgaaaactattaaagcatttaagtaggctatgtatgctacaaaaagccagaattatccaaaaatggaaggtctcattatgttgtaacttgcacatacttgcaaagatcactaaatgattatggaaaatgacctgaataccatatttaatgt

SEQ ID NO: 30680 - DNA, 535 bp, Glycine max
  Clone ID: jC-gmst02400056h07d1
atagaaacttctgtgctatacatagcacatatatgggataacaatcatcattcaaaaaccacacatgtccgacagaagacgaaaaagtagacatcaaacacacgatatttcagacactctagatgatcatcatgtgcttcaccatcatcatctacatcaccagactcgggaccaacctgctcataatccttctcaagagcagcaaggtcctcacgagcctatgagaactcaccctctgccataccttcacccacataccagagcacgaaggcccttttagcatacatgaggtcaaactgatgatcaatcctggagaacacttcaggcacactagtggagttcgaaatcatgcacacagccctctgcaccttggcaaggtcacctccaggaacaacagtaggaggctgatagtttataccacacttgaacccagtggggcaccaatccacaaactggatggatctcttggtcatgatggtggccacagcagcatttacatgcttgggcacgacaacggcccggtacattaaacaac

SEQ ID NO: 30681 - DNA, 433 bp, Glycine max
  Clone ID: jC-gmst02400056h08d1
aatattataagcagagattcataattcagagtaggcgaactttatacagaagcgaccaattaccaaacattaaaaaaaaaaaaaggaagcaaccatgagcttaacacacccatcacaagtccaaaacacttgaacttgctgaaaggcaagacatgaccactttattctaaggatgtttgtttaacacaaaacaccagagggcgcgaaaaccatcacagacataatacataagtttttagctacacattaataggttatcattattcctaattaagggctatctctgcttgaagcttgctctcccaacacctaacttgcaagtgcaggggttgcaggagcagtttggtccacatttgcagccatcgttctcagggggcacacccatttcagcaccctcaaattgagccttaacaggtgccactcccatgaccaa

SEQ ID NO: 30682 - DNA, 547 bp, Glycine max
  Clone ID: jC-gmst02400056h10d1
aaaaaaaaagaggattttttttaaaaaataaagcaaataatattggaatatcctgcacaaagaaagatcataaagatgaacaaatgaaacatcatctggtgttttttatttagcactatattattgacaaagaatactaaaacggactaccaagggttatcaatcaatgtgcattgtgaaagggcagcgaatatttgaaagcctgcccattccttgtctttggttgtaaaatgtcacacacatgggtgagttttcctttaagctgaggtaatcccactctttcggattaattgggttaataaatagaaaattgactgaaaatcaaaatcataagcaagaatttcttgctgactccaaaaccaaaatctaaagatgatcaataattgcctttgtgaattcagttgtctttgaactgccaccgaggtcagctgttcggtacttcccttctgcaattgtgttcaggatggctttttgaatctgttctgctttgtcatggaggttcaaatggcgcaacattgtaacaccacttagcagtaaagcagttgga

SEQ ID NO: 30683 - DNA, 432 bp, Glycine max
  Clone ID: jC-gmst02400056h12d1
aaccccccaaaaaaaaagggaattattgaaaaactggaaattgggccagatacatgaaaacttacccccccttgttcacaaattggttaattcaccatttgaaaaggaactttctcatacacctggttttctatcttaatactccacaggagtggtccaagtcccttgcacactagggcgtttgggtacatgttttggcctaaatttcactaccttccttcccaatgcattttttagcctggttgcatgcaaaagtatgtcttctggatccatattcttcacagatatcactcgctgattcttggtcttgtaataacccttcagatggggatgctgaccacggatgagttcagtgccctcctcttatggaggatttttctccttaaatgctggcaaatgaaactccataaatgcccttatacctctgctact

SEQ ID NO: 30684 - DNA, 369 bp, Glycine max
  Clone ID: jC-gmst02400057a01d1
attggggcacccttctatccaaaaaaagaaccgaagggggcattgatatcccctccccaaatggggggcacgaataagataaaccatgctaaaattttaaaaacctacatggaatgcctctagggaactttggcaaacagtacaaaagtgtttaacttggcatggcgagaaccctgttatttccgttattggccaccaattaacgggtggattttttacatatttcttggcaccaactatacaaattaaggtgttgcttgaaaataagcgaaatttttgctgcttttattagggaaacctcgtgatgaaccggttccccggctttaaaggggctttttgaatgggctaagtccccaccgaatgttttaa

SEQ ID NO: 30685 - DNA, 519 bp, Glycine max
  Clone ID: jC-gmst02400057a05d1
aacttggaaaagggttcattccaaaacagttgaaggaatgaaacattatttatgttcgtaacataaaacaagtacccttggtgtatgtttttcataacatgatcaaagtgggcattacagtgcatgaataccaaaaatagcttccttgttgaagtctctagaagctgtcctgaaacccgtatttttaagcttggcataagtctcatgaaaagcacattcatagaaatcctgcccttgcaacttgagggtcttggaagagatgccagatgaattaggtgacacgaacatatcataatttgacccgccattgttgtggtgattaatccgccattcaagttgtacttttggcatgctagttagcttctgttgctcagaagtcatgtgagactcatcattgaataaaagaagcttctcttgatctgatgtaagattaacaatggtgatatcatggatactaggcctccttttattggctttccctccagaaagcttttgccttatataatacttttgagcatg

SEQ ID NO: 30686 - DNA, 549 bp, Glycine max
  Clone ID: jC-gmst02400057a06d1
acatacacgggaacacacataacatatttcataacaagtcttccttcccaagcatgtataaaatcaacaagggagcggagtatgaaaaaagattacaaacagagaagtgctagtaacaaattttctagcactgtctttctcatgccctcttttatccgttaaaattcatgtgattcttactcatttataaataggacctatcaaataaaaatgaaactcatatatctaataggatacacatgaatttaacctaacaaaaaaagtaataaaaaattgtactactagcatttctctaacaaatattaaacttaagagcccaaaagagagataagagaggcagagtatatgcacacaacaattcaacacaatattcaaaccgtagtgatactctccagtctccattgattcccttgataactggaagatgtaactgatataagttttcctatgcttgctcccactttttaagtttgagactcttcataaagctgtgcatagaatttccttggtctgtgagcaacgatcaagctcaaagatgctgcacataag

SEQ ID NO: 30687 - DNA, 492 bp, Glycine max
  Clone ID: jC-gmst02400057a08d1
gtatgttattaaggttttatagtatatttcatattataggtattctatacattgtttcttttgaggagcacatgcagcaattcagtcttactacatgattgtctttatttagaaaacaaaggtttaccaattaaacaaacttatcagctaggctttggaccttagacaaactgattaaggtactcattcacagtgatgtatttcacatcaggatatagagctgaagcttccactccaaaagaagactcaatttcaaagttagtatgatccccctttacataagaagagtggttaattgacaggatcacattcacgggtggtgcggactcttcaatttgctttaggaggggctcttctggaacataaattctttcaagagttttaccaattttttcctcccagagagtaacaagcctatttaacgacaaggtattatctggtggaataatgtatagaattttgttcagggttcatggatcattcacaggattg

SEQ ID NO: 30688 - DNA, 540 bp, Glycine max
  Clone ID: jC-gmst02400057a11d1
aacttggaaaagggttcattccaaaacagttgaaggaatgaaacattatttatgttcgtaacataaaacaagtacccttggtgtatgtttttcataacatgatcaaagtgggcattacagtgcatgaataccaaaaatagcttccttgttgaagtctctagaagctgtcctgaaacccgtatttttaagcttggcataagtctcatgaaaagcacattcatagaaatcctgcccttgcaacttgagggtcttggaagagatgccagatgaattaggtgacacgaacatatcataatttgacccgccattgttgtggtgattaatccgccattcaagttgtacttttggcatgctagttagcttctgttgctcagaagtcatgtgagactcatcattgaataaaagaggcttttcttgatctgatgtaagaataacaatggtgatatcatggattctaggccctcttttattggcttttcgtcagaaagcttttgcctatatatacttttgagcatgacttgccacttgggtgggagtttt

SEQ ID NO: 30689 - DNA, 422 bp, Glycine max
  Clone ID: jC-gmst02400057a12d1
gaattacaattttaaattttgttttccattttaattatctatggaatcaaaatcccaaggggattacaacaaggtacttccaagttccaaaaataacacttgcccagtttgcccatgtaagcaaggaaaaccacccactcctattatccaaaatgtcgccacggtaaaaactaaaaaaaaaaaaaaaagaaagataagaaaaaggtactagaaaaagagagagagagagagaggtatgtaaacatgttttttgacatgtttggtttggatttcaaatctacaacgccaccacggtggtttaacccttggtggcggtagccacgacttgagacccagacggtggaggagccacaacttttttcttcgacgccatgacaaacttctcctttctctcgtcctggtttatctgctgttggcgacac

SEQ ID NO: 30690 - DNA, 468 bp, Glycine max
  Clone ID: jC-gmst02400057b04d1
caaatataaactcatggttatcatgacgataaaagcaacagttcatacaattaatgttatataatcactgacttaggatcttggatcaccattcaccaccactgttagtcagcatcaagcatacccgtggtctcaacctggtttgcaatagagatatcataagctgcatcattgcatgaacataaacacaatgataacttatatgtttaaaatataacaaccacttccaacggaaacttatttttgcttaactaagcaacaaattcaagagcagaaaatcaatgaactatcacagtacttcttggcggggaaaaaatagcactttaatctaattttttttaagcagcacttcccaaatcactttctccaagttaatgtgtgaaagaccacctagtttggtgccctcctctgccttcttcttcaattccatgaccttttgcctcatcttctttcctatctctccctcca

SEQ ID NO: 30691 - DNA, 561 bp, Glycine max
  unsure (1)..(561): unsure at all n locations
  Clone ID: jC-gmst02400057b06d1
acaaaaaaaaaaaagttggactgttttagaataaaatatgtatcaacaaaattgaaatgtaaaatttacaatagtaacaagtataacaacgacaatttattataacaatccatagaagataaacctaatttctatatatgccatacaaacaaacaataacaagttacacatttacaatacataaggatataaccagatttattaccaagtttgccttcaatccaagtgaaaaccactggaaaatttcacagatccttggtcatgtttatgaagctgacaagctgctgaatatacgcttcaaactagaacatgctgcacgcaatcttcccatgctcattgagcttatctttggacagaagcgaacatcaagagtctccagcatagtgcattttgatatagcagcctcaacagcttcctcattaatgttgcaagactgaaggaatagactggtcaatctcggacactctagcttcaaaactttcaaagaggaacaattgcttagattaagccagcttaggtngagacaagctacatcaacttccttcaaattagctgatagag

SEQ ID NO: 30692 - DNA, 447 bp, Glycine max
  Clone ID: jC-gmst02400057b08d1
attgcttatggactcgacaagaaggccactagctctggggagaagaatgttctcatcttcgacctcggtggtgggacttttgatgtctcccttctcaccattgaggagggtattttcgaagtgaaagccactgatggtgatactcacttgggaggtgaagatttagatcacaaactggtgaaccattttgttcacgaattcaagacgaagaacaagaaggatattaacggaaatgccaaagcattgatgaggttgagaacagcatgtgacagggccaggaggactctttctttcactgctcagaccaccattgagaacgattccttgtatgagggtattgacttctacacaaccatgacccgtgcccgtttcgaagagcttaacatggacctattcatgaagtgcatggatcccgaggagaagtgtttgcgggatgctaagatggac

SEQ ID NO: 30693 - DNA, 501 bp, Glycine max
  Clone ID: jC-gmst02400057b09d1
atcttgcaaatcacgctctcattagtcaagtcattactgaatgtccattgtataaaataaaccacacaagatttgcacgccacgcatgttgtaagtaaaaatatcagaaaatgatcaaagtcacgagagaacaatcaaaaccaaaaaaggccacacatacaagcacttgcttgacagaccaaaatgtatttgaaaaaggaagggcaattgaaggaaccaacattcaagattctggaacagaggccacggttgttgcagttgctgttgctgctgctgctgctgcacgtttgactgaggcagacttagtaagatgattatagctccctttctccttaaaaagctgggagaagtggtgcttgcaatacaaaatgccctcaagggctgcgtaattcgacggcgttatgggacatccaccatgtgaacacttgaaacatgaattgtgataggcctgccctttcactgataccttttacaatggataagcaagttttgccacatgtg

SEQ ID NO: 30694 - DNA, 452 bp, Glycine max
  Clone ID: jC-gmst02400057b10d1
cacatgcaaagtgataattctattctgttggtttccaaatggtacaaggcacaccaaaaatacatggttgatctttatttttgtgacaaagaaaacatcatcaaaacatctcctcgatcgccgcctaatcaaggagctaggtagtcgcatggtatggtacaaaactctaagtttccctatagatagtgtacaacatgcatggaatacaaggatgaaaagaatacatggatagtgtacattttacatgctccttcccacaaagctttctacttaatgggcttgaaagcttgatgaccatagtggtgcaagttgtacatttcattggcaatgctgcagctccagcacttgctgctcatcatgtggaggcataattctcttggaacacccctgcttgacctttgtgggaggaatggcttatcaaaataaggcattaattgagctcttggaaccat

SEQ ID NO: 30695 - DNA, 539 bp, Glycine max
  Clone ID: jC-gmst02400057b12d1
attgtaataagagaaaattaacattagccagaattacattagatattccgatgttacatgaaaattataccagatctagacaatttcagatcatgtcctttgttaatactatcaaggacctaaaaaaacagaaaaattaacctatttacatcaaaggatgtaattaacaacatcttatctaatctacacgacaatttaatggaagattaatcttccaaaaaaaaaacaagagaaaaaaaaatctgcttagtcctttcctttctttctgctggcttttttatgaaaaattaaaagattaaaaaaaaaggttaatattcattaggtggagccaagttaagatcgagattgagctcttttttgggctggcaatcgacgacgacggaggacgagtcggagtcgctctggaccggacccggttcgaatcggagtgggaagggctgggtcatgaaatgggcctcgtcgcgaaagtaaaccgggcgcatgggtgcgacggggtgggtcacgaggatttgctggtgatgggtaggaacggaaagcga

SEQ ID NO: 30696 - DNA, 404 bp, Glycine max
  Clone ID: jC-gmst02400057c01d1
agattcaacatattttattaaatatgctaacaacttaatgctagctgatcatcaatttagacaaaagcttacaactatgacttaacaaacaattaactatttttacatataatcatataactatacaatattaattgtaagaacgttaaatatattttcttgattttcactataaaagaaaatttataataatctaagtttgggtttcagctaattagctgtccagaaaccatgaaaacctagaggaaaatttaagtggcttggaattttgattctcgcaacaagggcattatctgctactatcctttttgggtccaagatgacaagggaacatctattcattgaaacagcatactcaacaacaagaagatagccatcatcttcttggttacctttgggaacaa

SEQ ID NO: 30697 - DNA, 570 bp, Glycine max
  Clone ID: jC-gmst02400057c03d1
cgcgagataagaaataatttgcataaggtgtgtgatatatgatcttaaatcttattttgtaatttttaacaaacccaaccttttcccacttctatgagacattcttgaaccatcctatcattatatttataagccacatgataggatttaatattagtaacatttgaacatattagcaattctcaagaatctcaaccacaactaaaccaaaacaacaaacagtaaagcatacaaaaattggtgtgttcaaaatgtttgacaaatgaaaacagccccttcacttgcagatactttttggtggcatgcaaatttagctgtattgaattcataaagtgtcaacaggtgtatttgattgtgctccccattcagtccaagatccatcataaactgcaacatcagactttctaagacgatgaagacccaatgcaagaatgcaagcagttacgcctgttccacatgaagtcacagctgggctttccagagagatgccttcttgttcaaatcgcttcttcaactcatctgctggtaacaatgtctgtgaactatctaacaactgtgcaaaagggatgc

SEQ ID NO: 30698 - DNA, 560 bp, Glycine max
  Clone ID: jC-gmst02400057c04d1
atatagaaacttctgtgctatacatagcacatatatttgataacaatcatcattcaaaaaccacacatgtccgacagaagacgaaaaagtagacatcaaacacacgatatttcagacactctaataatcatcatctccttcaccatcatcatctccatcaccagactcggcaccaacctcctcataatccttctcaagagcagcaaggtcctcacgagcctctgagaactcaccctcttccataccttcacccacataccagtgcacgaaggccctcttcgcatacatgaggtcaaacttatgatcaatcctggagaacacttcagccacactagtggagttcgaaatcatgcacacagccctctgcaccttggcaaggtcacctccaggaacaacagtaggaggctgatagtttataccacacttgaacccagtggggcaccaatccacaaactggatggttctcttggtcttgatggtggccacagcagcattcacatccttgggcacgacatcgtcccgtacatcaaacaacacgccatgtacttgccgtggcgagg

SEQ ID NO: 30699 - DNA, 532 bp, Glycine max
  Clone ID: jC-gmst02400057c05d1
atattagaacataattacttaaataccaaattgaacacaaagtgcacaaacactacaattttactcgaaattccatcatgtagaccctcccttaagaaaccacctactccttacaagatttattacacaacaatttcccaaaatcatgagtctctatcacacccacaattggtctatttggaagcagtgatggatgcatatcgagctttgaagaaccccacaaccctatctctttggggaagattctttttcacaacagggtggttggtgtagtcttcaccccatttgtagagttttggaaacttctcattggtcagcaatttcaaccccacagcctcttcaatcgcagggagccagaaagctatgaagccagcggctatgtccactatgcctatagtagtctcacctccaaagaacttgtgtttgagtacattctcaagaatttgaagagactcgagtgattcctcagtgcccttgtcacgttcctccttgactgcagtaaatgctgcctttgatattgaggcatgcattt

SEQ ID NO: 30700 - DNA, 442 bp, Glycine max
  Clone ID: jC-gmst02400057c07d1
ggcccaaaacgggaaaattttaaaacaaaaagggatgggggaaaaccccaaaaaatccccctttctttggggaaaacagggtttggaaaaaataaggggaaaggggttggggaaaaataaattgttacaaaaccatcctaaaaccttaaaattttccccccccggttttggaacccccccattttaaaaaattttttttgggggttttaaaaaacccaacccaaggaacttgaaaattcacctttttaaaccctttccctgggaaagttctttccggataaatttggttggggaacccatttttggaagggctggtttaatttaagggtacttgcgggttttgaaaccccaatcagggtggcccaccaaaaggtttttcttaaccccctgaaggcttttatggattctgtaaccatttctttaaaaggggggaattttgggg

SEQ ID NO: 30701 - DNA, 552 bp, Glycine max
  Clone ID: jC-gmst02400057c10d1
agtagggaaaaagaataagaccatctaattttttaattaatttacattattccatgtttatacacttataaattattccttaattttcaatatatcacgtgtaataaatctataaggccaaatttggtaatcccgcgggttactcttaaactcgcagaagctgccacggccacgtttgaaacgccatgttgcacgggaatgaacatagaacatagttgaggtagttggcttagaagacataggtatggaggtctacatttgtggtctggtctggacaacatagacttttccatccttgatgacaccttcaatgtcctgaggagtgccatacaactcttcaatttcatttcctgcacgggcaatgctggacaagattgactggcgaaaactgccatcaaggatcagtttgtctgaagaataatcaagcaccaccttctctgcttcatccattggcacactgtcataaagacctgcaccagcataaccttctagatcttcaccattggaatcagatcgaaaaataattgaccgtcttataaataggccgacagg

SEQ ID NO: 30702 - DNA, 475 bp, Glycine max
  Clone ID: jC-gmst02400057c12d1
ataaataattccgttccattcttaatgacccaggttaaaattcagcaatcttctgagtacaacaatcacgcaagacggtagtaggtctttataaagaaagacgtaccaacttgcaaaacatggaaaaggacaaaaagaacagctcccaatactccaggctttggaggttgtagggcttgagtcaaaaagataaaacatgtccccaaatacagttgtagatgaacaagtctaaatctaattttgtgtcttgataccattgtctgtgtggtttcctgattcttgttcatctttgggaggttgttctttctcggcatcaccaacatcattgcaattgttctcttccaacaattgtgtcggagattctgctttcttggctttttctaaatctttagggctcaaaaagctaggcttggttggttgaagaaaggagtcttgcccacattttgtcagttatcacacccttgttctgcctctc

SEQ ID NO: 30703 - DNA, 226 bp, Glycine max
  Clone ID: jC-gmst02400057d01d1
agagcaagttcatatcgtacgtttatacaggatcagccaagaacagagtgtactttgtgattttcagctacataagcctctacccacgtaaacggccccattacaacagtctaatgacatgacatcaacgacatgggcgaccgctataaaacaagacagggcctttgctggggggtggcagaggaacagaaggatcaaattcagactgttgaaactatttttgcct

SEQ ID NO: 30704 - DNA, 530 bp, Glycine max
  Clone ID: jC-gmst02400057d02d1
gaagttggcaaaaatatatattcttattctcaatagatgaaaaatcatctagtagcaccaaaacacagaacatgttttcccaaacaatgacaatggctatactacaatatatggttttgttgtatcatcaaatgaatacattccaatcagacccaactttcctcttttaagactatgtacacagataactcttctaattaaggcaaaccactcaatagcagtaagaaaataaaagcatgcacacaagtgcaattaactcttatcattgggacatcaacatggcctctccacagagtcttattagcattccaccccacattgtttgagcactggaccagtttgcttgggcaagaagggatcaatcctgacccaaatcaatgagaaaatagatgctagaaggattgaccacaacactacaatggtaggagtcctgttttgctttcccatgagacctttgaggaaagggtacaagtgaacaatgacccagaaggcaaagaacagcttcccaaacaaggtccccatgaaccata

SEQ ID NO: 30705 - DNA, 503 bp, Glycine max
  unsure (1)..(503): unsure at all n locations
  Clone ID: jC-gmst02400057d03d1
aacaaaatcattgtatgatagacaatcatcaagtgaggttcaacaacaaattcaatatttaacttctcaactcttccacaaaaaataactaacccctataaccaaaccccaattacttgagaaattattagatagtctcagaccaccacatgttttatgatctcaatcaatcaatctctacatgaaactagtcaagcatttcaattaactatgacactcaatttcatgtcatgtggagatcaattaggaatttggtctgaactctgaaccacaggataatctctccacttacttatactcaaaattgggcacagggggagcatcgaaactctccagaatcttcgtctcgcttccgccgctgccggcggtctcctctctgttccctccaccgaaccaccctccgagccacggctgctcggacgactgcggnggctgcggctgcggctcgtccatgatcataggcatgggctgctgcgcgctgaggaacttgttgagcatgatcc

SEQ ID NO: 30706 - DNA, 544 bp, Glycine max
  Clone ID: jC-gmst02400057d04d1
ggctaccaaaaccaagggggaaattaccatgtatataaataaaatcaaccattgaactatatataagtgcccctataggcagaaacactcttctcaatgcaattcaataccatacaagtttaacttgccacgggctttgcaatgactttcttaacggcttcagcataagtcctgtgctgataggtgagagttgattcaagcaggtcccaaagtgaggttttaggattccagccaagctgcctattaattatggtcatgtcaggaattctcttgtcactatcatcatatccctcaccataaaattctttggagctcacatcaatagtaggtttttccagaggtgcttctccacttacctttgaataaacctgagtcatcatttcagcaagctgcctaactgtaacctcattgtttgggtttcccacattaaaaatatgtccattagccctggcgggattttcaatcatcaataagacagcttcaatagcatccttaatatacacaaaagtcctctgggaatggccaccatccacaagcttgaggg

SEQ ID NO: 30707 - DNA, 534 bp, Glycine max
  Clone ID: jC-gmst02400057d06d1
acttcgataactttatattattttacatgcatgcatagcatagatagcctgctctcaaattagtcagcaggaacaaagatagagagatccaacgatctttaaatttcacatttgccataaatatataacagaaaagagggtatgggatatgagttaagttttgatctcattcaactacagtatcccaaaccattactcttaagactttgaacttcacttgtactccaggatcatgttgttctcaggagctaatccaacacaagcccttaggatgttttccagcatagctcgctgctttgacagtgcattaaccactggcgtactcggtggaaccagaggggccttggtcaggtaactgaggatggtcgcaactgggtggaatgagtggaactttccctcattttcagctttaaactcgattcgagtgctaagctcagcaagaaggaccaagtccaagataataggagccgctaacagtgaatccttacaagtggtgtgcaacacaattgtgttcttttcgcccatgaatatctc

SEQ ID NO: 30708 - DNA, 562 bp, Glycine max
  Clone ID: jC-gmst02400057d07d1
accacaagaacaagcctttaacatttagcaacaaaatttatctgaatacaaagtatatggttaattgggtcacttccatcacttcgaacgtattacagttttatacaaagtagaacaagagaaacagatactacaactgaatcaggttcttgaaacaataagtaccaagaaggaaccacccaataagaatggaagtgaagaagaaccaaaactttaggaaggtgaagccccagaatgtgactccaagaaaaaatacaaccacaaatggtaagatagatcgaagcatagatgctttgctgacccaacgtccattgaataaaatgaaaattgccagattcaccacattccattcaccagtcagaaaacccaacttgttcaaattattggcaacaaacgagtggcagttgcaggtaaagagattgtaagatagatgttggaattcttgagtgcttttccttagtgcatcatcccaagtcctcaaatctcctctagtttcaccctgcatgtagtgttcctaccattgtacacagactggactaagggacacaacactttttttggg

SEQ ID NO: 30709 - DNA, 385 bp, Glycine max
  Clone ID: jC-gmst02400057d08d1
aaaactaaaaaacattgaatagtatacaactgtatgctggtcaaacctacatgggggttccagttacaaagactaatgagcccacaattttaaaaacttaagcaaaggcaagccaactttataggttcttgggtgcacaagttatcaagcttgggaattaagggaaaatggacatggccaatttcaatagtcttcacatatgtttggccctctaagcaaaagcttcagggtgggccataagtttgtcaaaccctgggtcatcaggtcttctggtttaggcagtaggcaggctgcaggcttcatagatctcagctgcatggaccattaagtctagtaagcatggtttctcctcctaaaagcaccactctgacttgacaacccagca

SEQ ID NO: 30710 - DNA, 467 bp, Glycine max
  Clone ID: jC-gmst02400057d10d1
agataaaaagcaaaatactctaataatatacgtaataaaaagtggcattatggaataataatatctaggagaaaagacaaactaacatatgtataaaactagcaaatgcaaggaagttacaaaacactacacccggctaaaattgcattaattcagtcagcctaaaaacaagtacaaacttctgaataacaagaaattaaatgacctaaaaaatgcacctacagagtccatacatattctggtgcatctttccttttcccagccaatgtacgatacaaatacatcttctctaccttctgcccatcttccagactacaatcttcttgctcgttttcattgaagatctccacattcaaccttggcatcttcttggctagcaacttgcaggctccgacagtcacttcacaggacgacattcaaagggatcgcattgtttcatacttccctacgttcgtcagaagtgccat

SEQ ID NO: 30711 - DNA, 463 bp, Glycine max
  Clone ID: jC-gmst02400057d12d1
cgctaaataggaaatgctctcatcagaatataggaccagcagagacaatctcttcagtcaacttctgatcccctcctatcttgtaggtcgtgaatccatcaaaattcttcttgaataagcttgctagtttcaagcgtgtatcttgataggccttcttgtcagaccaagtattcacagggtccaagatttcagaagggactccctctagtgctgttgggatctcaagcccaaacacttcagtcttagtgtactgtgcattcaaaaggctcccagagtgaatagcatcaatgattttcctagtatacgctaacttaatccgattgcctaatccataacttcctcctgaccagccagtattgacaagccatccagtagccccatgcttctgcatcttttggctagcattgctgcatatttggtagggtgcatcattataaacgctgccccgaaacaagcagagaat

SEQ ID NO: 30712 - DNA, 399 bp, Glycine max
  Clone ID: jC-gmst02400057e03d1
gggggcaaatccaaaaaaggctgcattggcacatagtctacataaccggggaaactaacagcaatcaaatttgttccccattgggaatgggaatttgaatacaaatccagggcatcaataatataaccctatgtccccagccaatttttgactgaaattggatccaaaatagtatcaattgggatcataaaaaaagggcccaaaaaaatttatgtgaaggtaaaggggaagggtatcaccgggggtttaaattcttgggctttaatttacttaataatgggctccttcctgcacgttcacatttcctttatctgcttaagcactgctgaccttgttcttacccccaaaggtccaatggggtttagccggagtacccctcaatgccttcactccgaaggg

SEQ ID NO: 30713 - DNA, 487 bp, Glycine max
  Clone ID: jC-gmst02400057e04d1
aaaacaaatacgaactaaaaagcaattagcattacaccaagatacacaatgcttaaagtttgaactttgaaataaatttgggacatgggacactttctgacgtctattatgaaaggaagaacgttcaaatgcactgtataggcataattaaacgggatattacatgaaactagaagctaagcagtgtctgctgccggttgagtcaccccaaactttaccaacagcttaatcaggttttttggggagcaaacttgatacttgacttttccagagggtgagagaaatacctttgcaagctcaagcttttcagaggtaaaacttgtgctggccatagttttacttagcaccttcagtgcaagttgaactgcttcttcccttgggatatcatccttgtagtcctgtttcagaattgactgtgctgcctggttgttggcaccaatagctgcagctttccaaccaccataatttccactggggtcactaatgt

SEQ ID NO: 30714 - DNA, 373 bp, Glycine max
  Clone ID: jC-gmst02400057e06d1
aaggggaactttcatttgaatttgacatgacacccgaaaatattggcccgttttgaagttttgtgaccggaattttaaattttccccaaacaggccaaattttttaagctacagctacctaaaactttgaatttcaagaaaagatttttttccctattggccaaagaaaaacaacaaacccccccaaaaagctggaactgcaaaaggggaattcagcggcttccaaatgcaactggttcggtattgaagagatactttacttgggacaaaaccgaattatgtgccggatcataagggtgaactttaaaagggatttcaagtattgcatgaacgggcttggtataacttttcacccaaaaccttatcatatttg

SEQ ID NO: 30715 - DNA, 432 bp, Glycine max
  Clone ID: jC-gmst02400057e09d1
agaaattaaattaaagctaactttattgtcatcctcaaaaaaataagaaaaaaactgaattcatgaaacacaatcaaagagcgatgatgatgactcgcaagctcctgactagaataatctcgtggagtatctaatagaaaaaagtggcggcaactgaaagcagggtggcaaatactccaacaactccaagagatgcagcaccagagttctgtgggggaggagtgacagcaccggctggagaagggctagaaggagtggtggggggggccgcggcggaaggtggtgtggcggcgctgctgccggtgacgttgatggcaagcttttgaccttccaaacagtgccctggaattccacagatgaagaaatgttgaccagatttgttgagggtcactttcgcatgcggagtggtgaaagtggcaataggagaagctg

SEQ ID NO: 30716 - DNA, 492 bp, Glycine max
  Clone ID: jC-gmst02400057e12d1
ggtgaaacaactttagaccgcaaaattcaaaatccagaagtggctagttttttggttcaccaaaagcctggtacaaaatcttaacaaatgaaaacaagtggctactcgccacaatgataaggcaaatgtaacaaaaaaaaaaaaaccagtaatatatgatatgtgaaaaacaggtaaccgatcctaataaatgcttataattgaagtttgcatccaatgtggatatgaagagggatatcccgacctctttcgggccttgcattatatgagacctagacaagagactatgtccttgaaatgggggggatcattttactaggaagatgcttcatgatggatgcagtgcccacacgatgcagtgccaccactgaatgcccgtggtgggagagacccttggacttggcatgttgcatggcgaattctattgcttcttctgttgtttcagcatgagaagctctagcagaagctgcactcaacacggggaaccaaccc

SEQ ID NO: 30717 - DNA, 462 bp, Glycine max
  Clone ID: jC-gmst02400057f04d1
aatcccctaagggttaatttatgctatattctaaaaatcaaaccattcatagctcctaaaatgagatatttatcaactccacaagctagttaacatacttcattacttactggcctaagaaaagtatgcatatacagctcatcaatctacagattcatgcaatagtcctcatgggcctgagcttcagctagaccaggcacattgaagagttcattaacatctgcccctagtatgcatatacaactcgtgaacctactggctactgattcaggcaactgtttacatgaccatgggctttatccgagatctggtaccgggaaacgctcatcagcatcttgatttaggacttcaatcctaggctttttgtaagacaacaaggatttgggggctttgtgtgagccaacactgctagtcattggaagctgaggaactttagccgccgcttaagcttatgaggaaact

SEQ ID NO: 30718 - DNA, 524 bp, Glycine max
  Clone ID: jC-gmst02400057f06d1
aatgtcattaataaggataagatatacaaaatcccgaaccccacttattgatgattacttaggtaaagaccacgatcgatgtttattaattaaggagctagcatcgaggatatgtggagtaaattaggtttagtaagttgcatattgttgcaactaattaatccccacagttgacaaactgatagttaacaatgagatgcccctgttgatatcctcttccatctgtgtctatccgattgaacactcccacgtccaaatctaaccctccgttgctgcactgatcaacaattctcacaattatgttcgctcccgtccctgtattcgtcacccggaggcattttccacaagcatcacggccgtgaggtccaacggggccacagaaagcagtccagccatatttgctgcgccaagagtaaggtttggcagcgtcccaagttgagcaataagcactcaccgtgttcaagtcccacccgtgttgctctggtaaatagttatgatacgtggcgcgacattagacgcacttt

SEQ ID NO: 30719 - DNA, 495 bp, Glycine max
  Clone ID: jC-gmst02400057f07d1
agcaatctctatttcattcttcacttgagacaagctcatcttttgtgctgcttatgcaatgagtaacaagaatccacattagaaatcccaactccatcatcagtctctatggatggattgatggatagaaggaccataccaagtttgcaaagagcaatgaacacagaaatttaaggcatctcatttgattcacctgttgaatgtgccatgcgatacgaagaactgataatcagggtgattcacctgaagcagccttaaccagttatctgcagcctgcaagagagaatttactacttgactctcactaactccattttgtgtccaaatagatccctttaacttataggaagccattgcaaaagttggtaaggaaatctttggcacaccgacatcaatgtcatttggataaaccaaaattggggcctgagtacctccatttcctgtcaagggtgtatggagtgtatggtatgtaagaaagcacgcatctaaatcttt

SEQ ID NO: 30720 - DNA, 463 bp, Glycine max
  Clone ID: jC-gmst02400057f09d1
actgggaatcaaatcaaaataaatacaaatgagaaaattatatatatttgcattaccaactagaaaatacatttgaccaagaaaaccaagcccactataagcagagagagaagtatagcttgaaatgaggggcaagattctctcctgaccatacgggttctacaaccattaccaaaactcatccgacatgaatgatcaacccatcgccacccttccaacagcccccttttcatgcatgggcaatcacgagcaaataaaccgaggatagtttgactggtgaaggaagaaaatactaatactacttggatgcaagcttccatacttcacgaacattagatgaaccatctgtgatttcagcaaccaggctactagtcatgacaccatccttctctaccacagacagaaaccgtcgagtttcaccacctacttcaaaataatacttctttggtgccatatacactac

SEQ ID NO: 30721 - DNA, 500 bp, Glycine max
  Clone ID: jC-gmst02400057f10d1
gctcaaattgctcttatgagcaacaggattgaatttttacaaataatttgaaataaattacaaataaacatttttcactacttacacaatgcacacagcagcaagtgctcataagttaaaaggaaaaacaaagtgaagatgcttgttgcaagaaacaagtccacagtccccggatacatataaattagaaaaatgagaatctaatctcactgaaaactgcactggctgccaatctccaagtctgcttgtccagttacctcggtcgcatcaatttcttcaatatgcttggtcttgtttttgaggtcagataagccatttacatcactcttatcaccatagttgtctgtcttaagtgtgtgatgctttctcctgattccagctcctttctccttgtccccttcagataaattaactgcaccattggtgctctttcgccggcccagctttggagattttgttcgcgttgctggtagcttcttcaattcaaccttaggaggggg

SEQ ID NO: 30722 - DNA, 529 bp, Glycine max
  Clone ID: jC-gmst02400057f11d1
aatcagaaccgtcccacactcccattaagttgtcttcaccctgtcagaattacaatattgtcccagagagaaggggagatatatatattattcaacaaggataagaacaacacaatcattcctcttattatgcaaacaagtaaacaaggggctaatttgcatttaaaaacctgaatctaaatttaacacaggatgtatcatctccaagtcattgtaaaattcttggacaaaaatgaaaacaagaagtagcaaccggctccttttaaatgtgaatgggcttgtcataagtggccattgcggcttctttcacagcctcgctcattgttggatgtgcatggcacacacgtgcaatgtcctcactagatgcatcatactgtagtgctattgctgcttcatgaataagctctcctgcattgggtgccataatgtgcactcccaatatcttgtctgtctccttttcagccaatatcttaaccagtccttcagcattgtcaattgccttagctctgctattagccatgaacgggaa

SEQ ID NO: 30723 - DNA, 587 bp, Glycine max
  Clone ID: jC-gmst02400057g01d1
cacaccaaaggatctgattcattaaaagcaatagattcttcacaaccacacaccactcacttgacatatatggaacacatacataatccatatagcattacttagtgggggggcatttcttacttttatttaatgcacaaacataacaagggcaggaaggaaaaccacaaaattaaaacgaagatcatatagctgttaataataacaacaacacatgcaacataaaaaccacatgcagttgtggtagtggcatcttcttcagattggaaacgcctcaatgatggaagggagagcgttgatcttgatgatgttgtaacgcgcgaaaccggtttccttgaacagccacttccagttctcttcggtcctctctttgccaccggcgttgtgagcgagaagcatcatgtcgaatgcgatgccaacgtctgtgaagagttcgttgccttcgggtcgaagaacgtgatccacgattatgacttttcctgtcttctctggtattgcctttctgcagttcttcaagatcttgatgcagtgctcgtcgctccagtcatgcagaatccacttcatgtaaatagcatcagcactaggaa

SEQ ID NO: 30724 - DNA, 280 bp, Glycine max
  Clone ID: jC-gmst02400057g04d1
aaaccacaaggaaaaaccttctggggggccccccccacaatgcccggcaaaggggtttcaaaggggcccgaaaaccacccaagggaaaaggggtaaaaacccacaaaaagcccagaaaaaaaaaccttgtccaaaagggcggaaaggggggggggggcaaaaaaaaacctttttttaaaaggggggggggaaagggggggaaaggggggggggggggggggggcaccaagggggggggcccactgggggggcgggggtgggggccgacgccaattccggg

SEQ ID NO: 30725 - DNA, 541 bp, Glycine max
  Clone ID: jC-gmst02400057g07d1
ctggagttaatgatggcacatcttaattgaaaaagagaacctgaaatggacgactatgcggcacattttcacaaggccaacaacttaacaacactgcctacttaataaaaaagactatatcaataccatagacacaaaattacaatgatccacaatacatatggcaggcagtaccgaaaaggcaaaaagtgatacctaacacaataaaccctagttgttggattactgaagtgcttcaaatatcaacttaatctgctccccaataagtagtgagcgattcgcaaccagttccatctcagcaagtcgcaatttcctccacttgcccttcaactctttcctcttagattcttcaattaacgccaatcccctcttcatctcatcctcattcagttctttgaaaccagatacttcgcggtaaagcaaatttacattcccacactccttcaactccatcgactccagtaagtgttgtagtttcagatttttgctactacattcctgctagtagcatccttctttggagtctcggcaagttttcttt

SEQ ID NO: 30726 - DNA, 262 bp, Glycine max
  Clone ID: jC-gmst02400057g09d1
gggaaaaacacttttcttaatgcttttcaaaaccatacaagtataacttgccacgggctaaacaatgcctatcttaacaggtattccaaaacaactgggcaaaaaaaacagagccccataaagccggtaaaaaggtgaggggaaaggatccctggcaagctgactattaattatggtcatgtcccgaattctaaagaggctatgatcatatacattacaatagttctctcagtagcttaaatcaataggggggtttttcaca

SEQ ID NO: 30727 - DNA, 486 bp, Glycine max
  Clone ID: jC-gmst02400057g10d1
atgttagctgtaatgtaggctttattacaactgaggtaatttgtgcagctgtcattcctttaatagatgaggaattataggatccttatatatataaaatacatcagacttattctttaaaactttctataatccccatgctgagtttccgaggtcccttttccctctctctattcaacttcttcaagtttgcgttcatttttactagttcactcctaacaaattccaacccaaataatccctttcccaaaccccaaacggctacaggtaccaatggcacatgcacaacaccaacctgaattaatttggaaacttaaatgataatgcaaggcgttgtggtattgcaataacattttggaggaaaagagatcagaacaaaaaaattaaatatctaacaatttcctgatatgtaacaaaaaataataaaatgagaatggaatgtaagtgagaccatgataattacagcttctcaaaaaatgttcgagt

SEQ ID NO: 30728 - DNA, 413 bp, Glycine max
  Clone ID: jC-gmst02400057g11d1
atgcattaattaattttcagtattataaggttaggaagtgtgaacttttccataatgataaatgccagtggttcaatagtcctcatgcacgggatccaaaattaaaaggaaagccaaaaaagttaaccccagataattatatataaagcacttttgcacaccaccaacctcttgaattctcaccaaattaaaccgtggtcgcacactttacaaataaattaagagaagaaaaaaaaagcatttaatggagagagagaaaaaaaagagagatagaaaaagaaagaaacatgaattacaaaggccatgacttgaatcagatcaaaattcactggaaagaggttcatgggcagagccaatgaagacattgccgtatataaggccagccaaaccaccaccaattagaggtccaaccc

SEQ ID NO: 30729 - DNA, 424 bp, Glycine max
  Clone ID: jC-gmst02400057g12d1
atgcattaattaattttcacttttataagggttggaagtgtgaacttctccattatgaaaaaagccaggggtacaatagttctcatgcgcggtctgccaaattcaaaggcaagcccaaaaagtaaacccccgatctttatatataaatcacttctggccaccaccaaccttttgaatttttacctaattaaacagctggtgcccacttttcaaattattttagagaagaaaaaaaaacccttgaatggggagagggaaaaaaaagatagattgtaaaagaaagaaacatgaatttccaaggccatgacttgaatcaaatcaaaattcactggaaagaggtgcctgtgtagagctaatgaagacatttgcctagattagggcctccctaccaccaccccataagaggtccaacccaggagatcca

SEQ ID NO: 30730 - DNA, 397 bp, Glycine max
  Clone ID: jC-gmst02400057h01d1
aaaggggcaaaaatttttttggggaatcaatataatgattagggggcccacctcccggtcccgtttttgtgggaagggtaaacaaaaaaaggtttcctcccaaattacaaaacccaatttgaaaacccgaagggccctttttttttccaaacgagttttacttcaaactttcaccctttatataaatgctgggggaaggaaaaactcttcccttaactggtttttccaaatccccccaaaaacccctaatttaaaatcctttcgggcaccaccggaaaaaaaaaggggcctatttcttttaatggtgagaccataaaaactgtgtcgaaacttggggggggtgtccctgattcttttagggcccccctgccaaaaatatttcttccatttcccccac

SEQ ID NO: 30731 - DNA, 379 bp, Glycine max
  Clone ID: jC-gmst02400057h02d1
aaaaaaaaaaaacttttccatttaaaccccctgtctttggaaaaggacccccagggggggggcaaacaaaaaaatgttaattagggggcctaaaaattgggagccgggtttattttccagaaaaaaaaaaaaacctttttttggggcatttttaaaaaaaaacccttggttaaggggggggaatttttaccctccgggggtgccccttgcaaaaaatttcaccgggaaaaacggtttccccgttcgccaatttttttttaaccaaaaaaaaatttttgggggtacaaattttttttggcccgggggccaaattggcccccaaaagcaaacctttggaaaaaaaccccctcccctcccaaatagctttggggggggcgcc

SEQ ID NO: 30732 - DNA, 575 bp, Glycine max
  unsure (1)..(575): unsure at all n locations
  Clone ID: jC-gmst02400057h03d1
agtacaaaaacaaaacttctcatcaaaatctagtgtcaccctaatgtaagcttgaatttaaaaatatatacagaaatccagattagctttcactggtaggcatttcagacactaacttttgacaaagaaatcaaaattcaagaactttcaactcaaaagcaagacctttcgtctggaacatagaaatcaaatgtaacatcaacagaacccggagtttcttcgggggtcctattcttaacatttggtattggtcccaaatcaatcctttcttggtattacgggttaacccggcgtacaggcactgggacacagagtaaatagttccaaatatgtgtctgagggagactctcagtggacctataccgtgagattatatttccacaaattttgattagggcacgcaaacaattgctaacaatatttcgctttgcctcatcacttactttacaccgatcagagaacagaatcatcttaaagcgttgcttagcaatcctagcattggagttttgtctagatgttgccgatgggaaaattatcttncatgcccaatttaaccgctcaaagaagttcattta

SEQ ID NO: 30733 - DNA, 513 bp, Glycine max
  Clone ID: jC-gmst02400057h05d1
aacgacaaaaacagcgagcattcaaaagtatccattgcaccgagatgagtcctatacgcttacttgacaatatacaatacaaaacagtatcaagagaatgatatgaaactcaacgtgacaaaatggctttcggtactttgctacctggggaacatataaaagtaaaagaactatataaattaatgcagctgaggaacccaaaaattcaaatctgggccaaaacaaatgggaaaaactgagtaaaaaaaatcttcctcatttgctattacgctgctgtggcagaggtgggggctcttaactcgattttgtatcctttctttccgcaatacccaaacttaacatacttttgaaccctttattgtctgcacaaaagaaaattcgaccagaaccttaaagaattatgttttaggtcttccttattgttcaattcatgaggctccgagcttctgtttgttaagatcaaaggaatgaaaggaaaagtactgaatgcaacagtacaacgcaggacacaca

SEQ ID NO: 30734 - DNA, 289 bp, Glycine max
  Clone ID: jC-gmst02400057h07d1
aggaaaaacggatgatagtagtattgatccaatgggcctttttaaagtcaatttttcccgtgcttcaaattggtgcacttccaaaatgcatttgcttgcaaatgactttaggaacggaatcgaacattgcggggttcattagacacaaattgtgcgttaaaaccttcactccttctatcagttacaagttgtattcttttggtaattcaagcctccaaagagttgaaaccctggatggtattggcttgtcaatatgggtactggtttccatgctaaacttcatttgaca

SEQ ID NO: 30735 - DNA, 435 bp, Glycine max
  Clone ID: jC-gmst02400057h09d1
catcatataaaatatatatgttctgaaagaacacatacaagtacacaaaaaaaagggggaaattcataaaaaaatacagaaaaaaaaaaacagaattgagtaagagggaaggaaacatagagaaaattttagcaatcagataataagaagccagtagtagtgcaaaagtcccttgccaagagtgttggaaccccttttagttaagcaggtaccttctcccccttgagtggcttcaccactttccatgtgaagtcagggtcatctttgccaaagtgtccatatgcagcagtcttcaagaacctgccattttcaccccttttgagatcaaggttgatggagatcatgccaggcctgaagtcaaaactctccttcacaatgctgaggatttccttgtcagggatctttccagtgccataagtgttaacaaacacagac

SEQ ID NO: 30736 - DNA, 530 bp, Glycine max
  Clone ID: jC-gmst02400057h10d1
aacttctcgaaggcaacaacaaagtaagaaactttcgacaataaacatagtttgcatcaaatatcagaccctcatagcaaagataaaacactccactccacactggacaaccttattcaacacaccacacaccttaaatagtttcaaaaaactcaatactaatgacacagaccacaccactggagatagtttgaaagcagcaagggaaaaagcactcctccacaaaacaaggttgctaaaagtaatctttggcatgcatatcatatcttcttaacaataaaacataactctcttaacgttctctttgagtgcaggcaatggtctcacagcagcattagcaccaggtgcccgggtgctacgccctacaccaccaccaccgtcgacacccatcccacggcctgcaacagcaccacttgtcatagagccactatccgaagtctcgggttccatgtaaaaccttgcacggaatgcagtcaggtgagcatagtatgcaagaagcacaattgaaacagatcgggtgcaccgagcat

SEQ ID NO: 30737 - DNA, 381 bp, Glycine max
  Clone ID: jC-gmst02400057h11d1
aaaaatgcccataaaattggggttaaaaatttcccgttgcaaagggactaccatttacattgttccggcctaaaaatttcagaatttaatagctcccctattagtttttctagcttctttgattggaaggggggtttaactcccatggggtttccataaacagcacaagggtcttttcccaaaagaggattggcaatacaccaaccttccggggtaaagggaccatttgaccttttaaaaagttccttatcaattttggtgaaaactgggtcaccctcgggaaacttttgagcaaaaggggccccccttgggaccatggtatcaaaaagcccccaattttaagaagacttggatgctgttttgggggggtgtccccccttt

SEQ ID NO: 30738 - DNA, 568 bp, Glycine max
  Clone ID: jC-gmst02400058a01d1
gagagaacattttttttgtttcatcatataaaatatatatgttctgaaagaacacatacaagtacacaaaaaaaagggggaaattcataaaaaaatacagaaaaaaaaaaacagaattgagtaagagggaaggaaacatagagaaaattttagcaatcagataataagaagccagtagtagtgcaaaagtcccttgccaagagtgttggaaccccttttagttaagcaggtaccttctcccccttgagtggcttcaccacttcccatgtgaagtcagggtcatctttgccaaagtgtccatatgcagcagtcttcaagaacctgccatttccacccctcttgagatcaaggttgatggagatcatgccaggcctgaagtcaaaactctccttcacaatgctgaggatttccttgtcagggatcttgccagggccataagtgtgaacaaacacagacaagggctcatgcacaccaatggcataggaaacttgcacaattgccctcctagcaagtgcatttgcaacaatgctctttgcagcttgccctacaatgtaggcaccacttctat

SEQ ID NO: 30739 - DNA, 415 bp, Glycine max
  Clone ID: jC-gmst02400058a03d1
aaaaaaaaaaccctcctccccagggagggccttgttttgttttttgcccccaaagctccgggaaaaaaaggggatttttttccctttggaaacccagggccctgggggggcatccatcagggaaacctgggaactggttgtttggggattgatttcccccccccttttttaaccaacccaagtgtttattttcaccccaaccccggggccagaaaaaaaccccctttttgggaaacccgaaagtgggaaacccccccttttgggggggggggcccctttcccccccccaggggtttccaaagggggaccaaggacctcccctgggcccaaagggggggacccttgggcccccttttcccccggggggaacacccctttccccagagaggagtgggggcccaaacttctttttaaa

SEQ ID NO: 30740 - DNA, 502 bp, Glycine max
  Clone ID: jC-gmst02400058a04d1
gaataaaagatgacataacagtcaggtgtcttccaatatccttttttgtttcaatcacaagtcacaaaatatttttcacgtggaataagggaaataatagaacagctctggaaaaaaaatatgataaatcctaaaattacagaattctataggggttgaaaagtggcacattacagcaggggtgcatcagcaaagacctcagccagcataccatcatcactaccttccctggcaagcagttctgcttccttctcttcctcattggaaaagtctcgtctttcaagcttggcatgagctgcaatatacaccactttcagagctctttccaaggaaactctggagtgcttatttgcagaaatcttcctgatgaaagaacaattactcttaaatccacttgaggttccatgcagaaaaatgagcctcactgcaagcttcccaagggatttaaactcgctgaggcaagtttgccaaacaagtctactgctgagtggatttgcaacct

SEQ ID NO: 30741 - DNA, 589 bp, Glycine max
  Clone ID: jC-gmst02400058a05d1
gaacaaagttagttccttcttattgtattcttttatgtgatgttcatatacacccataacaagaaaaaaatgggcaaccaggcataacagcctctatacaaataacattatagtagtaattataacacaaatatatgacggctgaaattcaatattcgttgtcttaattatcttctgacactctaataatatgaatccacagtattcattcattatccattgtccttgtaacttctctcttcttgtataatttctacccttctatgctggaatggctttgaaaatgtcatcgaaactgttctggtttgcaaaaatatccagaagagacagtgcctcaggcacactcagttcaagacggaacttagggccatcataatggtgaagaattggtctaaaggaatctttctctagtggctcacaaactttcctagtaatcacttgaacctgagcagggaaacgagattcaccagggcacttcttgtccttcccaagccgttggatcaatattggatcctccaaaacttgcagcctcaaagataccatggagtttgtgagtggagtaattggtccacaaaaatggccaacccct

SEQ ID NO: 30742 - DNA, 470 bp, Glycine max
  Clone ID: jC-gmst02400058a06d1
ccaatgtaaagctttgtactttaaattaaattaaacatagtacatctcaacattgtttagctcaaaatcagtttttttaaaaattcaaatggccactgagatatcttttattttgagcctgttaataataatttataagccaccaaacagctatcatattaccactctataagatagaactccaagttctcatgatcaaggaaaactgaaaacagactcaagcaaaatcaacacagattaacaccatcaaccatcacacacacacaagtatagcttggtgtcctaaactcgtaatcacaaatgccctcagagaaaaaatatttagtcttctttccccaacagagtgagaaggaacttcttgtagtcccctgagatttccttggcaatagcatgctcaagaagaacgctgtttctcttgtagtaaacctctgagattatctttaggtccttctgggccccgctcacaacca

SEQ ID NO: 30743 - DNA, 433 bp, Glycine max
  Clone ID: jC-gmst02400058a08d1
gagccgagaaacaaccatcacaatcatcaaaattcaagcagtaagtgaaaccctataatctctccagttggggggcaatatttggtaccctataatggcttggttactttctctacaaaggtggctctctctttacaacattagggtaacaaaggttatatatagcaaggattaagacccatctttgagactcaaccgaacggagaaggaactggtcctgctcctgctagtgcatctgatctcttgatgcttcccattccacagacgatgcatccaggcgcagtcacggctgaaaatttggctccacagagatcacaaacattatatccgatggttgacagcctgcttaaggtggcagaacagaattgcgagggatcttccaaaggatcaatggacttgttagtcaaacccctctgaacacacaggtcaatca

SEQ ID NO: 30744 - DNA, 532 bp, Glycine max
  Clone ID: jC-gmst02400058b01d1
agaccaagaactgcattgcatcatcaatttcttacctaaatcatacgaaagttttgcttgaatatgttgttctacagctatgttcgctctacagctacatatatgaatgtatattcttacacatatgaccttacacttttttatctagactgtaaaaaataaattgaatatatagtttttgagagaaaaagaaaaatatgtacaggtacaacagaaattaggaatgcttcattcatctttcattgcaagctcatgcatctttttctgcccgatttccacaagtagagttaagagagcctcacagacctgaaatgcatctccttcagaaaggtcatcatttagtgatgaataaaccatccatgcatggtccaattttcgtttaggtcgcaccacaacggatccgggaacttctgcatctcggcatgtgacaagcccgtcacttttctctccatacctcacctgcagcaactgtgcacaagcagccatagcagcaccaaggggcatcaccacaggaagttttctagactcaccg

SEQ ID NO: 30745 - DNA, 567 bp, Glycine max
  Clone ID: jC-gmst02400058b02d1
gattcacaatcctagcattcattcattcccaatcaaaaatcactttatcatacatcaaaatggcccaaaccaatagtcaagaaaagaaacaataaatacagtaccccatgtaattcatctactttcaaaacaacctattgatagttgcaacatagttgggatatcaataaatgaaggcaagtcagccagaaaataaaatagatcacgaaatctaacacaagatagatatcccagtatagtatagaaaaatagtactacattgtagccaaattgtgtgtgtgtgtgtttgcactctacacattaaaaagaaccttaatgagaagctggttgcaaagaagttctagtagagtgctcaaaagcattggcaaggccttgcaacattctcaaaatctcacttgtgtcttccaaataatactttgccttgctaggattctggccaacagtgcatggaaacacttcagcaactggagatagggttgcctttgcattcatgattaccccaaacatgtcctcgtctgatctgtcatctccaatgcatagaacaaaagctggaaacactcccttttg

SEQ ID NO: 30746 - DNA, 565 bp, Glycine max
  Clone ID: jC-gmst02400058b03d1
cataaaatcagatttcatatattataggatcatctgtaaccccaactacaccaccaagaggacaaagaacttcacaaaactaaccctaaaaccactctacccaccacattctgacttgctaccccctctcttagccgtagcctttttcgctggagactttacactctttggtttcacactcttcactggcgctttcttagcaggcgctactttcttcgctgccggcttcgcagcaggagctgctttcttccctggtgaagtccgtgtcgacgtccttgaagccttggcgggcttcgctttgggctttgccgcgggcttggcagcagcagcctttgttttagcagcgggcttgggcttgggcttggcagctggcttagtccctttgggcttggcggcagcaggcttgggcttggaagcagcagcagcagcagcctttggtttaagggcgggcttgggcttggctggaactttggctttaggcttagcagctgccttgggcttagctggtgcctttgacttaattgccttagtgtccttggctatagcagcgggcttgggcttaagc

SEQ ID NO: 30747 - DNA, 434 bp, Glycine max
  Clone ID: jC-gmst02400058b04d1
gggagcaatctggggatatcaaatttcgtacatcgggacatacatcttacattaactattttttatatataaaacaatgctgccgatataacttacaaaacatatacacttccaagtttaaaaaaaaaaaaaaaacaagcaaatcccataaaaatgtcaggccggatgaaaagaaaattaggccatcttttctgcaaaggatccatttgttaagacaatgaaggctattttcctttcagctggagggcaggaaaatcctgggaagctcatgattggaccgatttgtccccatttgtctgctcagggattttaggaggagctgtttttgtttccttatccaatttggggcgttctttggttttgctagtgccattgctgttgcgtccaatgaccacgtccttgttttttggagggacaaggcttccatgttttgg

SEQ ID NO: 30748 - DNA, 458 bp, Glycine max
  Clone ID: jC-gmst02400058b07d1
ggaacaaaaaaaaaggggaccctttcttttgggagaaaaatttaattcttgattcaaaaaataggcaaaaatcccgggaatcattcttatcccgaggaaaatcccggtgggtttttgcctctcatcaataagccacccaatcaaaaaaaaagcttgactcaatcaaaaggccttaccccccaaatttttttttgaaaaaaagaacttgaatagggcgggggtgggcccaacacaacccaacccacttttgaggcttactttaacaaaccccattcatttgggcattggtctttttcctctccaacccaaactttttccaaaggggggggatgtccctttggggctccatagcactctttttagcaaccactaccttgccatttttttcagcagggactggcacactagggctgcttttgaccctagcaggaagggaataaagcttatgcaaaaccttt

SEQ ID NO: 30749 - DNA, 459 bp, Glycine max
  Clone ID: jC-gmst02400058b09d1
actaggcgaataatagaggtcctaatttttattgaaggtagctcatcatatttttttatgtttctcataacagactccattcactctatgaacgaaccacatgatactgatattttagaaaggaaaggaaggattcaaaggggaagggtttcgaaatgatatccataacaccgcaatcccctaaacgacatgggaaagagaaaaaaaaggcaaaaacgacaccgaaagaaacgacacattcagagccaccgacacagagataaaagcctagggtcaacgtcgtctatctaagagagttgaccacagtcggcgacgacgacaggcttggcggtcctgccggagctggatccgaccttctgtatcttcttgacgacgtgcatcccctcgacgacctgtgcgaacacgacgtgctttccgtcgagccactccgtcttcgttgtgcagatgaagaactgagat

SEQ ID NO: 30750 - DNA, 431 bp, Glycine max
  Clone ID: jC-gmst02400058c01d1
aaattataaagtaaatatcatttattcaaacctaaagaaacacagtaacacaccatcacaaactcatgtaaccctgccaataaaccatcacccctaaactccagcaccagcagcttgctcacttcaatacacaactcccagaatttctcatgtcaccacgtggcaagcacgctgatgtggagccaagtgttgtgcttacacgtaggtgtaccctgcataatacaaccaaagacttaagcatcatataataatattaataaagtaaactaaagaaataaaaagaaaaaaaaaaaagaggcttttcaacatggcatggcaaatggtagacctgatccccacaactaggaccatgtttaaacctggttttttcactcacacttgccatagggctaagcttcaagtcttctcaacagggaacctttactgggggt

SEQ ID NO: 30751 - DNA, 459 bp, Glycine max
  Clone ID: jC-gmst02400058c04d1
aaccatgctttaaaacccatccatcgtcttaaagaatcaataaagaacgccaaactaaaagatccaggtttagttcagatgaggagattttaagaacaccataaaaatgacattttgaacaataataaataattacaaagaaattggcgatgctaatagatcaaaacagctttacaacctctggttttcttgggtattctcaactaaaccttccactatcatatggactaagatgcccttggatagttgtctcgtttatcaattcggttaacggcaatccattgaatcaaaggagtctgcaaaccctgcaggtttagaggagatgcttgattgggtttgtgagatggaaatgtcattaaatattgaggaagtgccttcgttggcttgccaccttcgtagagcttgaggaaggctcatatgaaggtcaccgccagaagccgcttcctctttttcatcatg

SEQ ID NO: 30752 - DNA, 543 bp, Glycine max
  Clone ID: jC-gmst02400058c05d1
acacgataaacacgcttcgtaacataaaactgaaatacaaattgtcttgaatgatttaaaatcatgaacaaaacttctgagctacggcgtgcagctcctacaataatacagtctgaaaatgagaaatgtccaacaggaacacaggtgcacaaaaacccaaccctctgcggctctgtcccaaagacaatgatgtgaaccaccaaacaaatttttttactggagaaaagaataaggtaggtgctctcttcattacactttcagcgtttgacaaaattgctacaaaagaagcctccaagcaatagaaggcatagagttcttctggatgtcatatcctaaatggagggttccctgagcaagattggtcaaactttgcccttttaaacttcgatttctcgacagcaatttcttggaaaagattaggcccaccaaagctatgcttgaagccccttatcttcttgctcttgcctttatcatattcttgatcccattcatccccaacatatccaatgctgacagttttgtcattctttgacttcaaatgct

SEQ ID NO: 30753 - DNA, 403 bp, Glycine max
  Clone ID: jC-gmst02400058c06d1
aaaaaaaaacggtcaaaaaaaccaaaacctcccaaacaatattggtaagccccaccctaagggggggggcccctttttgccatttttttaaatgccaaccccaaaggttaggggtgaagaggggtattggctaaaaaccaccggaaccctttgggtttacaaaaaaggggaaaaaaaaaattcccggcccctcccgggcattggggggagaaaccccctttcccaaacaaagggggggcccttggttagccaaggggggaatataaccaacccccaccccaaaaagggggggcctgatcaaaagccctggggggaatatttgaggaacctggcccccccccgaaaacccaaacttttattttgttcgggggaaagggggggttttaccctccaaagcccaagt

SEQ ID NO: 30754 - DNA, 65 bp, Glycine max
  Clone ID: jC-gmst02400058c07d1
attactgcaatctcaatttgcaccttaggcttttatgcatgccacatgcggtttaaagacgactc

SEQ ID NO: 30755 - DNA, 458 bp, Glycine max
  Clone ID: jC-gmst02400058c08d1
aacaaaataaagtaggaaactttacaccaatatatcaaaaacaacaaaattgagctaaccagagccacataagaaagtacctgcagttccagccattttgactatatatataacaaacagaacctgaaatatatacatgcaatgtactaagatatgtaaaacctattagataacatgtgtgcatgatatgaacatgtttgagttcatgtggaaacatgcagctttcaaggatgtgtatttgcaatgtcacgtgagagcggggaagcagaagcagtggcaattctaccatgggtaaaatgatcagcactttttctacgattttgtttcacatgggggacctggaactgctccaaatgcgtggcaacctcggccatggttggtctcaactttgattctattgtcaggcatcgcaaagaggagggtagctaccttacatgcctcatctaattcatattggc

SEQ ID NO: 30756 - DNA, 426 bp, Glycine max
  Clone ID: jC-gmst02400058d02d1
aaggaagatccattctaattaattttaagctaggtaattacatgaaagtaaagagtaaacaaaagataaaataaaaaggtttggcattaatatgtacttaaggagcccttcacaaattaattacaaagtaatcaatgttctcttctgtttccttatacaatactacgtatataaattaattcagaacactgcatcacttggtccttgtgccaaataatgattttctctatattgttgatccaagaatgctccataacacaattgaagatcatcaacaccatttgcagcttgatattccatttctacatgttgcatcatcccatatccataagggatccatgcattcatcttatcaaagggcaaggaagagatcaattccaggaaacccaatgatcagggacaccgactgacgcggggcgatcttga

SEQ ID NO: 30757 - DNA, 500 bp, Glycine max
  Clone ID: jC-gmst02400058d05d1
gtcttccaaaagaaaacagaaaatattaccataaaatgtcatttaaagaacaaaaggaaatgaaaactacaaatatagtagtaagaataacttattcctctaagtaacatgcattcatgtcggccagaatccgtaaagccttggtaggattcatcgtattgaattttcaactaaagcttgactaccacgttctctgcatggagtcttcattgtattatatatagtcgtatataattatatattcttatcaattgagacccctgctaacaacaaattctcaactcatggctcatggaatgttagaacttgcccagtagaaaagggtagcagcccccccatcttccagcaaaagaaacgaactaggcgcaccctaaaacttgaagtctctcttctttgacttgccctccttttcttgcatctttcttttcctcttcttctcgttctctgcaaccatgtcactgaaatcttcacgctgactacgcaacttctcttcttccctt

SEQ ID NO: 30758 - DNA, 490 bp, Glycine max
  Clone ID: jC-gmst02400058d08d1
actctgcataatcgtcttctaccagtcctttaaatttccactgttatactcgcacatcattatgattcgtagttgatttatacataattgacaattttagttcaaccacaaatattgtctatgattactatactggaacatatattttacactgctaagaggtaggcatggaagatgactacctctcttatttacttcttctcccaaactgttttgcatatcatatgtttaacatttgctgctggcattgagaaataaattcgtacaaacacaacattacttcttatatagcaatccaggacgatagcttagctatttattttcccttttgtctttagagctccaagactaagtaatcggcatctgttttgatccagggctccttattctcagatgaatcttcttcacagctgccaaggagtggattgggttggatcttatactgtcgcatgtaatttttcgttgacagtactgctcttttgggctgcat

SEQ ID NO: 30759 - DNA, 425 bp, Glycine max
  Clone ID: jC-gmst02400058e01d1
gaatggaaaaaggcatatctttaaattgaattgatgggggggaaaaccccaatttaaagatttccaatcatccccaattttgcaacaaccaaaagaattttaaaaaaaaaagactttttttttttactttttttacccaaaacctaagcaaaatttaaaaacaaacgacccttttttttagactctttaaatccaaaagctgatcacaatcaaaatcaatggcgttatttatgaaagctccataagacttcaaacgaccaaaagccgggttctccattgatgttctcttcaaacatgaatttactcttcaatagcaaggggcacaaactcagccaatttgcggtgcttgagagcataaaacatctggagggaacctttgctctcacggggttcaagattggtcacgtgcttccagaagccataca

SEQ ID NO: 30760 - DNA, 513 bp, Glycine max
  Clone ID: jC-gmst02400058e03d1
acataacagattggccacaaatataattgtttttccactatgcccaagtcaatcaacagatagaaaataaacagaagactaaattaagacgaaaaactcaaacttaaaatccaactatatttttcagtatttcccaccttgcttctacccctgttgaaagtaacaaagtaaagctgctctgcaacaaagtagatctaaatttacaagacaggaaacgaccaacaaagtaaaataaaagaaagaaaaaagaaaaaaggcaaagagaaggataaacccgaacaaaaaccaaaagatataagcatcttaggcagaaaccctaaaacccaaaaaaccctaggagtaaagcctgttaggagctaaccactgtaaacaaaacccaatgagaagggattggtgctagcattctatgaagtaactccgcccagccaatctcaatatacagatctttatcttcactaggcaaccaatctctatcttcagactgcaagagaagagggcagaaagataaaatca

SEQ ID NO: 30761 - DNA, 535 bp, Glycine max
  Clone ID: jC-gmst02400058e04d1
cctcaacatgtttctgttttctagtcaatggcagaaaacgatgtaccgatgctatggttccaaaggtaaaagatatagaatattaacattggcacttcttcaaagattgcagaatacaaaatcacacaaaaggaccaacacaggaaacctcagttggagaagatgaatttgaattttgactagtccgtaggcataaattcatccgggtgatccaatagatagttggctgctagatcctcgtttttattgcatgcaaagaacgcctccaccacaatatctcgatgaaatcccatagcttcaagccgttgaatggcctcattctcttcaggggtgatagtgacagtcccagaaatcatggaatccaactgactctgtaaattctcgtccccttcaggttcattcataaggtcaagtatgtcctcttgatgatcttggatgatctgcattagctgaggattttgttgtcccagttcctgaatcataggctgcaaaatttgggggttttctcgcatcggcttttttaatgcttggaact

SEQ ID NO: 30762 - DNA, 513 bp, Glycine max
  Clone ID: jC-gmst02400058e06d1
gaaggtcactatcataataataataataattgggaacaatgtatgatttcagttgtccaagaaaaatagcatcacacctatccaacaacaggaattgtttctgattgcttgtggtcatgatctgtctcctgttgtttttgaccaactagttgagaggaagataacgacaattgtgagagactacagcaattatcctcccgctcctgctgcttctgagattctttctcgtacaaggcatactcctcaggcttatcccatctgctttcacaagttatacagttgtagtagtacttatcgccatcggggcagtagtgttcactccagtcacactctggaaaatcttcatcttggggacttgtaggcatatccggcagggtaatgccagtaactgtactagggttgctttcggtctgagaaggcagctgggaacgaacattaaactgagaaaactattgtagtctgtgaactaagctgctgctctatattttgaactgatgaatctgctggatgtga

SEQ ID NO: 30763 - DNA, 465 bp, Glycine max
  Clone ID: jC-gmst02400058e07d1
attgaacggaaatttacacttattttagtctaataaaccatagaatgccccaaccatgggtggttttttaactaagacaggaacttgaaatgattcaaactgcatgactacccagacctggagtgggataacagcccacacatttatttataccaagattacattatttggatatttggattgccaaacacatgggaattacattttcatacatattccttaatggccacaggggcagtccctgcaagggcagttagggccacacttgcacttcccatcatgctcaggtggtggaacatccatgacaacaggctcgatgtaacttttttcagtctttacaataacaccatagctgtttcccttggggcaactagtcttgtcagcgcaatcgcagttgccgcatgtgttccacatgtttggttttgaggaaaaaagccaaacacaaggaatgaacctaagtttttg

SEQ ID NO: 30764 - DNA, 430 bp, Glycine max
  Clone ID: jC-gmst02400058e08d1
ggggccgggattcatataatttaaccttataaataataataacaataataagatgggctttactttcccttttcaccattatcaaccatttttcacttgccatataacaagagggtcctaaacagaatcacaaataatcctacatcggggctgggatgggaaagcatactgaaactgaatccccaagggtaatacaatataacatttatttaccattttgacagatacccagcactttaagcacttgcagcatttggaaaatcaatccggtgttgcaggcctaaaaatagtcttttttcacatttattcatacccctcccacataatcattcagcaacgtgatgcatggctccacttaaaaagggcaagaatatgcattacaaagtcctgggttggcgcttttataggggaacaaggcaacagggcgagt

SEQ ID NO: 30765 - DNA, 486 bp, Glycine max
  Clone ID: jC-gmst02400058f01d1
aaaagttaaaacaactttagaccgcaaaattcaaaatccagaagtggctagttttttggttcaccaaaagcctcgtacaaaatcttaacaaatgaaaacaagtggctactcgccacaatgataaggcaaatgtaacaaaaaaaaaaaaaccagtaatatatgatatgtgaaaaacaggtaaccgatcctaataaatgcttttaattgaagtttgcatccaatgtagatatgaagaggtatatcgagacctcttttgcaccatccaaaaaatttgccataaacagcagaagaattccttgtaatgggggggatcatttcacagtcaagatcttgatgatagatgcagtgcccacacgatgcagtgccaccactgaatccccgttgtggcagagacccttggacttggcatgttgcatggcgaattctattgcttcttctgttgtttcagcatgagaagctctagcagaagctgcactcaacacggga

SEQ ID NO: 30766 - DNA, 435 bp, Glycine max
  Clone ID: jC-gmst02400058f02d1
gggaaccggattttattattctttaaaaaaccctcccccaaaaagaatgctaaggaatgatggtccaaagcgtaccgtttgggaccaaaacgaaatcctatacactacggattcggatacccgggtgcgtattaaaaacgccccccctggtcaaaactcccaaacaaccaaaaaaaaaaaacccggcctacaaaaacttacacgtgcaatccaaacccagcggggaacaaagggggggagagccccccggacgtgggtcccacgtgccgaacaccaccattggtgggggtggtttcacgcgaagaggttgcaggagtcccagggaaattagggttggaacccgagagaacccgaaacccttgtatatcatcttcggtgagccccacctttctcgtccttgcgggaattggaggggtcataatagcattttcaacc

SEQ ID NO: 30767 - DNA, 516 bp, Glycine max
  Clone ID: jC-gmst02400058f07d1
aagcacaaaagacgtggataacttgatattattttattacatacatgcatagatagcctgctctcaaataagtcggcaggaacaaagatagagagattcaacgatcttcaaatttcacatttgccagaaatatataacagaaaagaggggtatgggatatgagttaagttttgatcacattcaactacactatcccaaaccgttactcttaagactttgaacttcacttgtactctaggatcatgttgttctcaggagctaatccaacacaagccctcaggatgttttccagcatagctcgctgctttgacaacgcattcaccactggtgtacccggtggaaccagaggggccttggtcaggtaactaaggatggtcgcaactgggtggaatgagtggaattttccctcattttcagctttaaactcgattcgagtgctgagctcagcaagaaggaccaagtccaagataataggagcagctaacagtgaatcctcacatgtgttgtgcaacacaa

SEQ ID NO: 30768 - DNA, 502 bp, Glycine max
  Clone ID: jC-gmst02400058f08d1
atctaaaattaatttccatttttcttttatctagaatacatgtatttactatttgatataaatttggtcgacgtaggcaaagcatacatccaaattcagaggttaagggaattcaaaattaaaaatatattgctaattcctaaacaacttgttgctacaaaagactgattattggggagggggggaagatcgttggcttttccaccctcctgctgtcttgtcccccattatggcaaatacttttccttcttggctttgcctctccaagcattgggacgatgtctctcatggggggtctttccttgggaagctttgcagtacatagaagtgcaatccggagcacaagcagcatttcttcttggacatgcttgcactgactagctatagcaggatccaatgcttctaacaaggctttggtgcttttcttcttccttatccattcgactatgtcaattgattcttcaaatgaagggggctaaaggcatttttccagttaggagct

SEQ ID NO: 30769 - DNA, 475 bp, Glycine max
  Clone ID: jC-gmst02400058g02d1
gggggcccaaggggtccctttttacccaaaaaaaaagaccttttttttccccaaaagggaaaaccccctaaaaggaaccaaccccggggggttattatgccatattgattaaggggggcccgaacaacccgaacaggaacgggaccccattttgggtccccccatggaccccatgacccttaggttgaacttttttaattggcctttctatataaacccttttttcaagggggggggggttttttcccgtaattttttcaaacctttgctttaaaggggtaaaaaccctgggctgggcccttccaggagccatttggtttttcccccccctggctgggggctattttttttttttatgtttaaaatcctgccccccatcctttggtttgagttgtttttaccccccttttttaactacccccaaaaaaaaatccccaacagaaactctaaccctggttttcctttgtaccccccc

SEQ ID NO: 30770 - DNA, 480 bp, Glycine max
  Clone ID: jC-gmst02400058g04d1
aaataattcattcttttcactcaatacaataaatacatacaaatgccaacaaaggtttctattattacatttgaggaagaaaaaatcagggaaagagagtactatttaacaaaaacttcaactataacagcagaatggcaaaaaattacaaaggaggctgaatgcatgttgctggcctcaacacttctgaagcacatttgtacacaaggtagcttctctgtttattcaaatccgtcagatcctctcagaaaaccccgattttctaattgaccaaataaccctgtcaattcaattcctctcatctaaaatcatgaccatcattctcgtgaagttttgttctgcttgatcaaggcatatgcatcactgtatatagccacaacgtttgagaagactgcgaggactatcataatgacacacaaaatcttgtctgatttagttgcaatgttgtagcggtccctaagagtgatggcagctggaaaa

SEQ ID NO: 30771 - DNA, 503 bp, Glycine max
  Clone ID: jC-gmst02400058h01d1
atatggccatatcaacttcactttatatgaatgatacacgtgatatattcacccaaagaaaaaagaaagaaagagaaaatagacaatataagtgtctaattcacatcactaaaatctgtccacccgctagtaggcccgagacattaacactagccagcggtgacaacaatctgaactaattgataattacatatttacaacatttgacaccaacacgcgtacgttgctacctatctccaggagttgaagatcacgtaattaaattgagacaagaagagtataatccatgttgtgtatgtaacagtacaagagaagagtggtggagtttgaagttaattaagaattggctagcttatttatcaaagccaaggcattgctagtcaattgagctacctgaataacgagtcttctgacggtgcttttaatatcagtggcagcagtgatctcttggaagccatcgttgcaggtggtttcatccgtcaaagcggcactcacccatgttt

SEQ ID NO: 30772 - DNA, 562 bp, Glycine max
  Clone ID: jC-gmst02400058h03d1
atgagagtacgatatggttttatgtgcatcacaagttctatttgcacttttggagggatcaacacaactacacacaagataacacgaacaaactgctactaaatgcagcattggcacatctaaaatgcactgccaagattcatctagtgcatccatgatgcaatggttgacctcactttttcccatgttagcataatcccactgtccttgtagcaaaccgaatgcttaggctttgcattcacttctcttaggtatgatgcttgggtgcaactttggggtgtaacagtgcctttataagccttacaaagatagcttaagaagttctcataatcctcatagagtggttctccatccacaactacccaaggaacatacttgtgaggaggctccagagcacttgtttcagctgcatattgtagctccaactgttttccatgttcactattataacactgattaataggttccgaatcaagatccagtttctcaaaacaagatttcccattcctcacgcttactctgaaacaccagatcctcaacacagtagatgaaaggaaaatgt

SEQ ID NO: 30773 - DNA, 494 bp, Glycine max
  Clone ID: jC-gmst02400058h04d1
atggtgaaacaactttagaccgcaaaattcaaaatccagaagtggctagttttttggttcaccaaaagcctcgtacaaaatcttaacaaatgaaaacaagtggctactcgccacaatgataaggcaaatgtaacaaaaaaaaaaaaacccgtaatatatgatatgtgaaaaacaggtaaccgatcctaataaatgcttataattgaagtttgcatccaatgtagatatgaagagggatatcgcgacctcttttgggccttgcattatatgagacctagacaggaaactagttccttgatatgggggggatcattttacaggcaagatgcttcatgatggatgcattgcccacacgatgcagtgccaccactgaatgcccgttgaggcagagacccttggacttggcatgtcgcatggcgaattctattgcttcttctgttgtttcagcatgagaagctctagcagaagctgcactcaacacggggaaccaaccc

SEQ ID NO: 30774 - DNA, 507 bp, Glycine max
  Clone ID: jC-gmst02400058h07d1
gaaagaaaaagtaaagtcattgcaattcatttgatctcacatccagcactagccacctagtgcacattgcctgaatattacagcaggttatctgaaaatgagacacattgcccaaaaaaagtcagagctaccgactagaagaaaaggtttacacgtataaatcccagtcagtgtcggatggtgagctcagctctaaggtgaagtacaccattgataaagtaaagactatcttcagccatgaacgttgtccatggaattgcaaacaagtttctatatccgacggcctttcccccagtgaatacataattgcctttgtacttgctaacaaattcctctgttggccttgacctagcagcaaactcatagtcaacggcaaagctaactgagcccttttcctgcattcctaaaaacaggccaaagcaatggaaagagctctgttggtccatgttgcaatgtgctgataagaaaaacccttgtccacctaaatggaatgcctgtgaatatact

SEQ ID NO: 30775 - DNA, 495 bp, Glycine max
  Clone ID: jC-gmst02400058h08d1
gaagaaggcacggcttaaaattgaattgatgggtaaaacaccccaattcgaagcttttccaatcaagattcaaatcatgcaaaagaaaaaaagtaaaaggctttttttttttccttttttttctctctctggctcttatcgaaagcttaatcacaaaattaaaatcatcagggacatattatttatagaactcaagtaagacaaactccaaatgagaaacaaaaagccggttcctccatttttttatccaactcttcatcctcagtttactcaacagcaaggggcacagactcggccaatttgcggtacttgagagcatagaacatctcgagatagcggcggctctcacggcggtcaaggttagacacatgcttccagaagccatagacaccagtgagagtgagaagcctttgtgagtaaatttgccatgtgtacttctcttcaataccctggagaccagcctttgagattgtttcccagggggttgggtcaagc

SEQ ID NO: 30776 - DNA, 433 bp, Glycine max
  Clone ID: jC-gmst02400060a04d1
ggggcaaatgaactggatattttttaatacaatgcacaagagtacgataggatttttacagaaaccccgttgatgttttaaaacaaacgtagcttttttggaaatagaatgggataacgttctaagtacaataattttataggacacggccaaatcattttatggggttgaaattgtaggaattgttttgggaattggaaaatgtaaaaaaccgggctttatcaaatttgggggaagtttaggaataggttttttgaaaaaaggctctggcttaaaaaatgactttggcttaagggataggtttaacaattggaaatggtttaggtatgggtttaaaaaccggaataggaatagggttaacaataggaacaggctttggtattggcttaaaaaaaggaattggtgttggtactggcttaaaaattgggattgg

SEQ ID NO: 30777 - DNA, 530 bp, Glycine max
  Clone ID: jC-gmst02400060a05d1
gaaagctcagaaatcatgcttaaagcataaattaaatttaggtatagttgcatcatgcaaaaactagaaacctataatgtacaaatcaccctcaaagcccaaaatgcagcaaatgaagaaataacctgaattcaagcacacctatagtcccatcaattcaacaattctcatcaaagatacatataaaccacacagtttcaacctcctcatgttcctctccagaacatctgccttcctcaaattaccgcctccactctgcttgaattacctttccattcccatctctagaagatgatacagttctgtcacttctgtggccacctttgcctcctgattgaacttgtctcagtgtcctaggtgaatgcgaactaattttgcagttagttgaggatggcagagaatgtcgccgagtatggttgtttttttcacttccatcttgtccaaatctcggggatccttgtgccttcaactctgcctttgcagattcagttgctgccattgtacttggtagtgctggactattctgtata

SEQ ID NO: 30778 - DNA, 539 bp, Glycine max
  Clone ID: jC-gmst02400060a06d1
atgaaaaggcagaacattcaggcagtcataataatatgcgaccaaaatacagacaaaaaaacagagtattatactaataataaaattccaaaatccagaaactagaaaaaacgaaatgtaaccctaagcctcagccttctggtaaacataggtcaaaccacacttgccgcaatagtggcgatcgaagtggttggccatgaaagtcccggcgccgcactcggcgttggggcattccttgcggagcctctggaccttgccggagtcgtcgaccttgtagaactggaggagggcgagcttgactttcttgtgcttgtgcttgatcttcttgggcttggtgtaggtcttcttcttgcgcttcttggcgccgccgcggaggcggaggacgaggtgaagcgtggactccttctggatgttgtagtcggcgagggtgcggccgtcctccagctgcttaccggcgaagatcaagcgctgctggtccggcgggatgccctacttgtcctggatcttcgccttcacattgtcgattgtgtccgatgact

SEQ ID NO: 30779 - DNA, 355 bp, Glycine max
  Clone ID: jC-gmst02400060a08d1
ggaaaaaataaaaagcccccggctttgtttaataaaacgtccaacatcactggggcaaactactcaagtcctccccctgcaccagcccaaccaattaatgttcccgggttatgcttgataatattgaaactagtagctagagcgttgactggtatccagtttgggcccaatctttttgttaataaaaaacacatcccttggctttaaattccaattaaaaatatttttaataataatttataggggggccctgtcttttgtcatggccctagacggtagggaccctttgccctgtagggaccatccctttagagggtggccctttggggatgccggccctccctccccataaatt

SEQ ID NO: 30780 - DNA, 355 bp, Glycine max
  Clone ID: jC-gmst02400060a09d1
atcaatcaaattacagttaaataataataatcccttacatatgaattctttttggttcctttttgcgaaatcccatgcatatatgatttaatgtaaaggataaatcactaacgaaaaagctaaaatacactgctgtcacttctattcattaataatcgatcatgtatgttttattttacgccacatgatgcatttccttatattagcttaccttccaaccaacgggtgtaaaaatccaacgccttccgcggcttatattccggcacggtgtgcccagcttccttgattgttaggaaggtgaggttgttctcgtacgcttgcgagtacccaccaacttggatatttgagttccatg

SEQ ID NO: 30781 - DNA, 336 bp, Glycine max
  Clone ID: jC-gmst02400060a10d1
ctgggaaaaaaaaagggggggttaaccctttaaccacattacccccttttttttatttttccacaaaaaacgggggggaaatatccccccttaaaaaggggggggggccacaaaaaaaagggggggggggggccccaaaagggggcttcggggcccccccccccaaatttttttttttggggggggccccccccaaattggggcccccttccccgaaaaaccccctgggctttgtgaaaaattttctcggccgcccgggccaaatttcgagtttttccccccggggtgcgggcggatattttttttttttgggggccccaaaataaaataacgggc

SEQ ID NO: 30782 - DNA, 442 bp, Glycine max
  Clone ID: jC-gmst02400060a11d1
gggggggaaaaaaaaattttttttgggggcccccggggggccccctcgtcccgccccggggggagcaaaagcctcttttcccccccccccataaaaaattggggggtaaccgcgggcaaccgcggggggttccccccccatctttaatcccccccccccccccccccgggggtcccctggtctgggccagggggggcccccccccaccagggaaaaccccctcggggccctgggggggtctggaccccccggaagggttccaggcccaaaaccaaacttttcctttacccccccccaaaagggacaagggccccttgggggaaaaaagggccggccccgccttttcgggggcaaattttgccccacaaactttgttttgggggaggggggccctcccccccgggccaaaaaaaaaaaaggggggacccaacgcggggggggg

SEQ ID NO: 30783 - DNA, 397 bp, Glycine max
  Clone ID: jC-gmst02400060b03d1
gaaaaacattacatttgatttgaattagaaacgaaatggatatatataaccagtacaattcaaggtaacacagcttaacaggaagaacaatgtaaacttcactatctcatttatctgccgtaaatattcaacagtgcagatcatctctaattattccctcagaaagaaacaacttcaaccataggcaacagcaaatcattgacttggcttaacttagtgaacttcagaaaaatctttcaaaacaaacgcaggctaataatggtttttgttccattataaaccaaactagcttgcttgatagtgaactcagaaatcaagtaaaatagcaaggggaaaaatcctgaaacggggccgttttggaagaaaaatagataacctcgacaggatttttttctac

SEQ ID NO: 30784 - DNA, 532 bp, Glycine max
  unsure (1)..(532): unsure at all n locations
  Clone ID: jC-gmst02400060b04d1
gaaagattgtgaaaattaccttttctttcctttcattttgtcctttcttgagacattctccttttaaaaggacgtttttcaagcctgatttttacagaactatagtacacacttagttacactctactctctcccacactttttctataaaccgtggatcattattatcaagtcgccactgataaaattccacccacatcaaattgctggagatacagatacccgagtctaagcctattccaacctccatctcctatttaccttcccgacctgacccgacgcatttgaaaaaccaggcaagctattttgccagccttggcatgagcttccacgtggcacaatctcttactatgttggatgccaagcatttgtcttacaccaatgcaatctgcttcagctattcatctggtcacttgcgcaaccaacagccacaggaatgcattgtgatgaacaaatacaagggaagccatttcatttgagatttctgtagtttctacaagacacggngcagtcacacaagttaactggaaac

SEQ ID NO: 30785 - DNA, 288 bp, Glycine max
  Clone ID: jC-gmst02400060b06d1
gtgttcatatgcttatatccttaatggtgctttactcccacaaaacccaatgggactgaacggggatgacctcaaacttaaaacggagcgaggtaatattacccccccataaaaaaagctaaagagggggttggcttcaagaaaacctaaccggacatcccaaagaaacaggggggaacaaatggggaccggtggcaaaaaaataagggcccggggaaggaacaaaattccccggaagggtaagggccccctttggcgaaaaaaaaaaaaacccccccgggcctgcta

SEQ ID NO: 30786 - DNA, 445 bp, Glycine max
  Clone ID: jC-gmst02400060b07d1
gacagcaaaaaataactctgatgttttaccataatcaagaaattcatacattgtatgttgcttgctcccaacgagtactcaaattaggagggtttaaaaaatggtgcgatcgacggcaatgaataaaaacggcactttgatttgtaataaccagttcagttacatctgaaacagaatgctctaatgacattataacttgtaaattgttaatatggatggtaatattctgctctacaattcaagggctgcaaaggttctttaaatcctcctccttagcataccaatttggtattattttggaaacatgaggataaagatccttgtaggagttcctaattgttccttctgcaacgcctgtggcaagtgatatatctttgagaggctttttatcatcagaaagctgagttatgatgtatataactgctgcagcaattgatatgggact

SEQ ID NO: 30787 - DNA, 383 bp, Glycine max
  Clone ID: jC-gmst02400060b08d1
cgtcacagacacaacttcattaaaaacccaaaacaaaaaaataataataactgctcttaagcaaggcaactcttgcgtataatatgcaaaggtctcagcccgaatataaacctttactcgataacatataattgccgattcctcgcagaggatgcaggaattttgaaagatgaaatgataattgacagcaaagaatgaaaactcttgcttgcattggatatgaaaaactatacacaaatttatggatgagaatggaagctgtccaaaaaaacaaaagggtcgagtcactcagtgtcgagccgcaacttgttgcttacatactgggcagaaatttttttgtgcaacccattgttttatacactgaaagtgataactgggctcac

SEQ ID NO: 30788 - DNA, 240 bp, Glycine max
  Clone ID: jC-gmst02400060b09d1
aacaagcgtcacccaattgctaacaactttattcatatgataagatttgtcaaatcaaaacatcattagcaaaataaccaaaccatatgtgcaagctttggctcctcttcaaagcaaattcaaaagaggtttaaaagagaaaccctaaccctaatcctaatagcacaacacaacaaagcaattgatatattaaagattgattcaatcgagggccttgacgatctttatccccatgcttgt

SEQ ID NO: 30789 - DNA, 498 bp, Glycine max
  Clone ID: jC-gmst02400060c03d1
cttccttatttttcatctttaaaccaaacacttctcccggggggggaaaaacccccctctttctttttcctacgccaaaaaaaaccacggggaccccccccccccccccccctaccctataacaaaaaaaggccccgccccctcccggacccccccccccaaatcttatagggggagaacccctccccccccccgggtcaccacaacgaaaaggcccaaaaataaaattctaaaaaccccccctatggggggggggcgccctttaaaaaaaccccccccccccctcggggggggggcgtttatataagaaaggatatctttcccacaccccaacaaacacaccttttttaagaaaaaaatttggggcaaaaaaacacaaaaggggccccccacaaaatcccccccaaaaaaaaaaacaacatccccgcgctcccacacacacccggggggggcgcccctcaacagaggcccccccccaacagggggggggcccccccc

SEQ ID NO: 30790 - DNA, 375 bp, Glycine max
  Clone ID: jC-gmst02400060c04d1
caccatccttaaagaacagttatttctttattatattgaatggcaaatattttgccattgcgttatccagaatcattgtctaaaagctactactgagaaccaacaaatcacatcctcgagatctgaagaggtataagagtttcaagcatttcatgcctaacagaagctagagatagcttttccacgtggcctagtttttctaaaagatagctctcacaattttctgcagccatgaccccagctgagtaagctccatgcacagatccctgattgtccaagcttacagcttctcccccaaagaatagattgcccaaaggtgcacgaagcttgtcatacacatcgagtggttttccaactaaatcatacgagtaacat

SEQ ID NO: 30791 - DNA, 506 bp, Glycine max
  Clone ID: jC-gmst02400060c05d1
cgaaaaagttcatttatgctttaaatgtttttgcttcttagcagaagaccctctcacttacataagctaacaaaaatttgaaaacaggaagaatcaataaaactataaacataggataaatttgcaaaagagaaaaaaaaatgaataaattctatatagtagtaggaaagtagtttttgtactgccagaatctagaaattagtgatttgtgatggttcgggcacgaaaattgaaacgccatagcaagattttggagcaatcttctggtggaattccctttaatttagcctcatcttctagaactacttgcttcacgaacttgattgaattctgagaagtgtcttgaacagaggaagtgcgaccccatctctcagggtcccaaaggatggagctattaaaagcaaaacttgaaatatgaattgggggagtgattgtatcagtttcattgttcatattcctaagatgccaaccaatgacttgtgatgaatcacatacaggtccttcga

SEQ ID NO: 30792 - DNA, 417 bp, Glycine max
  Clone ID: jC-gmst02400060c06d1
agcaaagaagaatagaaacaggtcaggaattcatctccaagctatgtacaatttatctaaatccaactagagctatgaatgacaatatgatccccctcatactgatataacttagaatggtgtcacacatgacaactgatacatttgctgcaaagagattagattattcactattcagcacacttcatttttgttgagggttcagcatagcaatccctcttaagttaactgcaacaattaagggataataataataataataaacaactaaactcatacaccacaaagctaatgcaattcgaatctaccttaacctagttatccctccctcggtcattcactgccactattattgatatgaatgctgttgctattgctggaggagccatggtggttgttgctagggttaccaccttt

SEQ ID NO: 30793 - DNA, 486 bp, Glycine max
  Clone ID: jC-gmst02400060c07d1
gaaagcaaggttttcacaccaaaggatctgattcattaaaagcaatagattcttcacaaccacacaccactcacttgacatatatggaacacatacataatccatatagcattacttagtggtggggcatttcttacttttatttaatgcacaaacataacaagggcaggaaggaaaaccacaaaattaaaacgaagatcatatagctgttaataataacaacaacacatgcaacataaaaaccacatgcagttgtggtagtggcatcttcttcagattggaaacgcctcaatgatggaagggagagcgttgatcttgatgatgttgtaacgcgcgaaaccggtttccttgaacagccacttccagttctcttcggtcctctctttgccaccggcgttgtgagcgagaagcatcatgtcgaatgcgatgccaacgtctgtgaagagttcgttgccttcgggtcgagaacgtgatccacattatgac

SEQ ID NO: 30794 - DNA, 469 bp, Glycine max
  Clone ID: jC-gmst02400060c08d1
acttctaaaggggaaaatccaaaaggctattttcactctaaaaatgcaaaattttatatttatgaaagaataatacatccatatgtttcaacatatcttcctccaaataaacttatgacaagcaaaatctgtaaagacgagagatgatggctttaacaactaaagttacggagtatataacggacttgtgttgtgtcactcattcttggcagaagcagcctgctttgctccaacagaaaagaattcagagatgacttcaaggggcatgccctttgtttctggaaccttcaaaaacacaaatatccacgagatgaaacaaacaactgcgtaaatggcgaatacaccaccaagtcctaaagagcccagcatcacaggcagcgagtatgtgatgatgatgtcttcaatccagaacactaatgcacagatagcaatgcagaggccacgcaccctagtggggaaaatctctgag

SEQ ID NO: 30795 - DNA, 482 bp, Glycine max
  Clone ID: jC-gmst02400060c10d1
gtaaaaagcaagtaacattaagttggattgggatacacaagataattcacattatctgaagtacattgcaataacatatacttcaccaaacacaaatctaaaaactctcaaaagtccacaagtcatccttttctttcatgctcacttgccggggacgaagttggtggcgtaggcccaggcattgttgttgactgggtccgcaaggggatcaacaaggttctccaatggacccttaccggtgacaatggcctgaacaaagaacccaaacatagagaacatggccaatctcccgttcttgagttccttcaccttaagctcagcaaaagcctctgggtcatcagcaaggcccaatgggtcaaagctgccaccagggtagattgggtcagtgacctcaccgaggggcccaccagcaatacgataaccctcaacagcacccattaggataacttgggtggcccagatggcgaggatgctctgggcgt

SEQ ID NO: 30796 - DNA, 504 bp, Glycine max
  Clone ID: jC-gmst02400060d05d1
ggtgtggaacgatgagaaagagggatgccattcctaatgcgatgccttgatcacatttgaggacaattttttacagcaaacatacacaaaccccgtatagtgcattaagcgatatatttgttaatatatacattttttgtagtatgtacggctacttaaggatcacgagcctgaaaagtaatgacaaaacataatataaagcatgaaatatattccacgcttatgcctgttaagtattgcactaagcaatgcaacactagagatgatccaactcagcggtctttctttcgtacagcatttggatcagacatcatgtccatcatcattttctcaggtgaatcctcccaactcgcaaatgtcttcaagtcaacttttcttctttgctcagtgaaaagctcttctctcttcttgtaagagttctgcacttcctttgctactttcccaccaagtcccccaacttcaacttcagaaatcagacccttgacaggaaggaaaccctgatct

SEQ ID NO: 30797 - DNA, 361 bp, Glycine max
  Clone ID: jC-gmst02400060d09d1
ataaaaaaaaaatgatctttttttatatttccaggtataaccaactaaactgagtatggcccatagtaccttacaacttattgacatggggcttattcaaagacatttttaccccctactagaccaatgaacatcggacaagaagtacaaactttctattagatccaattaccatcccttttcttaattccatccaagaactcaaaagggtgtcctctcctgtgatctactgggctcgaacaggacagatgctacttcctgtagatctttcgaagatgcttccttggtgctggaacctctgacctaccaacagaacatccccacctcctctggagtactagcacatgccttccatttggtg

SEQ ID NO: 30798 - DNA, 494 bp, Glycine max
  Clone ID: jC-gmst02400060d10d1
aaaccataaacagtttataaaacttcgttataaattaaatgcaacttaaaacatccctcagcagcaaaggaaatggactaaaaccctatagctgcttgtgaaattcgaaatatctcagactcttcttaccatcaaaacaaaaaacagtactcatcaaaaacaaacagcaatgaaaattgaccaccgccgatcaagaacctagttttgaaagttacggctacatgaaatcggcagaaacttaaaaatataacttaaacaaaacacctaagactctgcaaggataaaactactataaaggagtaaccacgatgatgatcacatgtgctagcaaaattgcccaaatgcaatcacttcttcttggcagcggccttggtgaccttggctccggtggggtctttcttctcaacacttttgatgactccgacagccaccgtttgacgcctgtcccttacagccaaaacgacccaggggaggatactcagagaaagtttcaa

SEQ ID NO: 30799 - DNA, 482 bp, Glycine max
  Clone ID: jC-gmst02400060d11d1
aaaaacaagcattaatggggttattttactcatactcaagtttcggcaacatataaaggatttttgggcctaggcctccttagttaccaaaagaaaaaaaaaccttaaagggccaaggaaaacaagaaagggtcataacaaaacgtagcccccatgggagatatgtggaaaaattgcacaaaaactctctttatatcattttaattaggaggaaaatcggttatgcatatgctagtcttgagggactatgttcttgctgatggaaaaagcacattttttcctgccccaaaaggaacattgatctcaatactgtcaaaaatgtctgatcctgattttgtaccgcccttaattggcaattcggggccctcactgtttccttcgctgggtttggtgttcagcttggctttgctttttccccataccacagggtaaagtccactcacaatgataatagctccaatacacttcccatataaacttgc

SEQ ID NO: 30800 - DNA, 453 bp, Glycine max
  Clone ID: jC-gmst02400060e03d1
gatgattaaactgagcaatgaagatgagaccgctcaatctttcactaataactgcaagagtaaattaaaactctcgcaaaacattgatatcgttacaaccactgatccaagtgacccttattttagaatacagttacacgcacaagtgcacaacacaagaccataggtaaaaacataaatggcatgaacaatgagtcaaagcaatggcagaacaataatattaacgccaccaccacttgtaacagtgcactcagttcctctgcagtagcagagaaattagacatagcccctgctcttcaaactctccactgcatccttgatgatttgctcaacaggagtgaattctagacctaaatcaatcagcttctttgatgcatcctttccacttgctctcaacaaccctggttgggtatcctttggcaacttagccacatcgtattcagggtataactc

SEQ ID NO: 30801 - DNA, 378 bp, Glycine max
  Clone ID: jC-gmst02400060e06d1
gcctgtccttttttttttttttttttttttttttttttttattttcttttttatttattgtttggggtttttttttattatttttttttcactcccaatattttttttttagattcttccgggaaaaaaaacgccccaaatcataaattaaggaaattcttacccatcgataattaaatttgatgggaattatgatgtagcagtagcacacgtttgaccattaaaatcaaaataccagggcaaagtttcaagtaacttaagacagaacgtccaaaaaaactagataaaatgagtagattgctcgggaccttaaggcacttagcacttgacctcctttaaggcatatgcaaagtacaggaatgttggatcagcagcgcc

SEQ ID NO: 30802 - DNA, 526 bp, Glycine max
  unsure (1)..(526): unsure at all n locations
  Clone ID: jC-gmst02400060e07d1
aaaaggaaatgtaaatcagtaaatacatacggatgatggtcatttgaaatcaagctgggggatgattttatcacaccatctgttctgttatgaaaaactattctaatttcttgcgattaaacgattttgatctaatgatgagaatgatattgcctccttgtttccccatcatcaacaactgacagacacctgcagcatacaacaaaaccatatgtatatatggacatcacagacatcttgggagaaatgatgtcatatgaaacactactatactacacaagtttgacattattctcgcttatcttcctcaagatcttctccgaaggcgtgatcaatggccttccgatcaagcttggctgccacatccccacttatcttcgctacactgcttgtcagagagataccctnctcatcaaagtcatctcccgtttcctccatgtatgcatatctagtagggttccgtgatggagcccaaagaatgcatatcaccaccaagagagcatatgaaagcagacacccgaaagct

SEQ ID NO: 30803 - DNA, 356 bp, Glycine max
  Clone ID: jC-gmst02400060e08d1
ggggagtgttccttttcctttacattttgctaacttttatttgtaatctggtagaatcaatttaacttttttcatatgataaatccgcgaaagagaaaaaccagtgggtacacgccatataggaccaggaaagtatcttttgggccgccacaatctaaaaattagggaggcgcgatcccccgggcctaacagaaaaaccccatacccagaccctagagcgaccccgcggaggacacccctttaattcaccctgaatatttagaaatactcgcctcacaaactcgcatgaatcatgggacgacgcccggacagaggaagtgcccccccctctttcgggccccaaaggaggggggttc

SEQ ID NO: 30804 - DNA, 487 bp, Glycine max
  Clone ID: jC-gmst02400060e10d1
accaaaattgctaacatatgttcccggcaaattgctctttcagccgtcagagctccagtgaccaaaattgcaggcaaaaccacaaataatagatggggaagaaccaccaccataatatctggagacccaacatactcaacctccccctttccattagaagtctctatggcccaacccatataggtcatgtataccatatttttcccttcagtaaaaacttgccccataaaccagggaaacaatgtaagataaaataggtatcctagccaaccaaaccataatttggggatcctgcagagctcctggagaaaccataatacaccatttactaagcctttattggcaatgaaattcttgtaagtgtatatcttctttggaaaaacaaggagagcttttggaagaagaaggaatatgaacaaaaagttaagagccgaccaaaataatgggtaataaagggaagcccattgacattccatgaccaaaaact

SEQ ID NO: 30805 - DNA, 463 bp, Glycine max
  Clone ID: jC-gmst02400060f06d1
acggagcacatattaagacatatttcacattattactagttcataaacgaatatactaagcataaacaaatccaattccaaaatttgagaaacttggaaaacaacaacataacataaacctatcaacaccacgcgcaacttttgattaccggtacattaatcggaactcaacccataaaaatgaagcaatatactctccattttctaatataggggcccaataacaataataataatgggaaatgtctccctcaatttcacaccatctctgcaaaaggagagtgaaatttcaagggaccaaaattacagggcagaaggggcaggtgctgatgcaataatggcctctgacacgtcagaaacagggccaggggcagctcctgagctcacaagttcaaccatggcacgacgagggttggtcttgtgcttttcacacagttctggcaaaaataccccctctccagca

SEQ ID NO: 30806 - DNA, 313 bp, Glycine max
  Clone ID: jC-gmst02400060f09d1
ataactatgatgtgaaacacaccggtggtcaacgcataggatgtccgcatatgacacttacattcactgccatgtcaattggcatgccttctcagaacactcccaaattacacaaaaaattgcgacctgaaaattcacatgcatacaggctttgccgatgtgaaaaataaagaagtggagtctaaataacaatcacccccatgatatatccattatataacaaaatccaccttctgaggctatgatcaaccatgcatggcgatctaccttggggctggttccttcactttcttactacacattctatacattt

SEQ ID NO: 30807 - DNA, 438 bp, Glycine max
  Clone ID: jC-gmst02400060f10d1
acgaagcaaataacttaagtaaaatacatgatgaacccgagaaaacagtcccaaaagaaaataaaaattataattacccgtcagggttaaaaaaaattggagattaatatcgttacttggcactttacagcagaaggacactcatcaagccgtaattgcacctacctagtcacacagattgaataaattacctagggagtttgatcggcaacaagggtgaattttcattcaacttgatcctttcgtgattgtaagaactgaacttaaagtgattaaaaaaattgaaaacgaattattatttttccttctaagcctgcttcaagtccttgagtttttctgctttaagcatactcaggattgagtgctaatgcttccctgtagatcatctcttttatttgctcttcatccaattggtggtgctcaaaacaaatgaaaatg

SEQ ID NO: 30808 - DNA, 483 bp, Glycine max
  Clone ID: jC-gmst02400060f11d1
gagggaggaaatataacataatttatgcttggatccttgtactggagtataaaaattcttgaaaagataagacactacaaaaatctgaccacgtctaagccaatgaacactgcatactaggtactcaggtgctatgatttctacttaagaagcaacagggacctcaatattggttgccaaaacagcagcaggacgggcatattcttcctcttccttaggagtgtggattgtgacaagatcaggaaggggagttttaggaccctgtttccctttaggatcccaatcaagcatgatcttaaccttgataccaagaacaccctgtcttaggaggacatgtctcactgcagagtcaatgtaatccttgactggttgtccagaagagatcatgtacccatccttgaatttcatggatttggctctctgagccctcaacttttcactaacaatcacctcacaacccttggcaccactttccatcacaaa

SEQ ID NO: 30809 - DNA, 503 bp, Glycine max
  Clone ID: jC-gmst02400060g03d1
accatatatatatagagagagagaatacgaagcacactgatcacaggatgatgctctctttaagtagggaagcagatcttatcagtacacataggtaggttgaaattctagctctagcaatctagctagagaaggtagtacttgcacaacacacagcacatgataatttattttatacacaatctcattctcatggtgctcaagatgcatggactaattaagcaacaatgttggtctgataggcagtgtccacagataaattgggtacccataaaatggccttgcttccaaggaaatggcaaacagggttagttccaggatcaactcccataagttgatgaagcatttgatgattcattccagaagtatttgagtggcaaatagcaagtgcctgagttttggttccatcaccagccaccaatggaaccatgaaagctgttgtttcacggacttcatggcaggaaaatactgcagttctgaaatttagcctatgacacatcact

SEQ ID NO: 30810 - DNA, 552 bp, Glycine max
  Clone ID: jC-gmst02400060g04d1
atggaaatccagatctatacttccaactgtattcagaaacataaattgaagcaataacaaagctcaatctccaactcacatatacaagtaaaagaaggcacaaagtgacagtgctcacttctcaacaacacaacaacaaaagaaaaaaagagactagttttgtttttcatcatcatgttattatatctaaaacaccaagctcgaaaaccacgtactatatattcaaatccatatatgtaaattttaatcacgtaattaaatcaaaccaaaactgaaaaaaagtgaaaagataaagaaagtcagagattaaacccatatatatatatagagagagagagatcgagagagagagagaaaggtgcaaggtgaagatatataaaccagtatacaggttaatttgcttgatctagcaaacaatcggaccacaacgcttcaattccccgagaagagagaagaaagtagcatgcctgagactcttggaagaagaagacatatcaccctttgaataaaaagtagtatagatatgaattaacgggagcgggaataggggtt

SEQ ID NO: 30811 - DNA, 404 bp, Glycine max
  Clone ID: jC-gmst02400060g06d1
ccagtgaaaaggctttaagatttcattatataatatgaagacaactatctaattgtcatatatacattagatgcttgggcaacctatactactcataaactcaacattagatgcttgagaaagagaaagtctcaaccatcacaatatttgcacgagtaaaaaacaatgttcgtgaaggtcatatttgctatatctaagacaatgacgttacagctagaagggacttacactgcatcagaaatgaacgtacatgacgtgatgttagatattttttttaagccatgctgtacttgatccaggagacttccttcgcaggttcaacaaaaagaacatcaaccacattatgtacattgcaacgggttagatgtcaatagtagaacagcacattacggctggatattgga

SEQ ID NO: 30812 - DNA, 489 bp, Glycine max
  Clone ID: jC-gmst02400060g07d1
gaaacatgaattaagcacaaaagacgtggataacttgatattattttattacatacatgcatagatagcctgctctcaaataagtcggcaggaacaaagatagagagattcaacgatcttcaaatttcacatttgccagaaatatataacagaaaagaggggtatgggatatgagttaagttttgatcacattcaactacactatcccaaaccgttactcttaagactttgaacttcacttgtactctaggatcatgttgttctcaggagctaatccaacacaagccctcaggatgttttccagcatagctcgctgctttgacaacgcattcaccactggtgtacccggtggaaccagaggggccttggtcaggtaactaaagatggtcgcaactgggtggaatgagtggaattttccctcattttcagctttaaactcgattcgagtgctgagctcagcaagaaggaccaagtccaagataataggag

SEQ ID NO: 30813 - DNA, 486 bp, Glycine max
  Clone ID: jC-gmst02400060g08d1
gattcaaccttttttccttttattagaagtgtatcccgatttgactctttgtgtagcaagcaaacaaaccctttgtgtccattctcttgttacaaatgctaatctaaagaatcacaaacaaaaagggagacaaaaaagaagaagaatgcaacatccattatggccaccattgttcttaagttctagttcttgcagctcttcatgtataagtgaacatgtgcgtgcaattgtaggcttgcttcctcattttcattgaactgctgagactgacagaaccccttcccattccagaataaagcatatagtgcatgaagatacaacttaagaaaggaatgactgagccgaggcagcttcagcaacggaatcaactatctctaagtctcagacatccatccatgcatgtgcaagaaaactccctcatgttggttggccaggaacacgtgaagaaaaatgcttttgggattagaactaatattagcttaaaaa

SEQ ID NO: 30814 - DNA, 423 bp, Glycine max
  Clone ID: jC-gmst02400060g09d1
ggcggggtagcaattttgggcgatcgattcccgccgggaaataaacaaacttcacattgatctcattaatgataaatccatgccccaaaggaaacaactttaaacctagcttattaattactttacaataactcgtactgacgacaaactggtttatttttcatgatcattttgatacataacttttctttacatgatacataatcaagggttattaccattttttttaaaactaaaaatcttgattatgtaaattttagtctgcatgaccatacccatgtacctaggggtatggaatgatcatgtttacggccacatcaatctggtttaaaatggttttcaattgatcccagaagaggggaattaattttattttgtggaccgtgagcaggtaagccaggaattagcagaccaacccacctg

SEQ ID NO: 30815 - DNA, 298 bp, Glycine max
  Clone ID: jC-gmst02400060g10d1
ggggcaaaaacttatttcattgttcaagtaaaaacggggaaaagtccctttaaaaaaaaagagaaaaattaaatcgcaataaaaacctaatgaccccctggtatttaaacttcaaaaggggctttgacaaaatcaaaaacaacccctgaaaattttttgcttaatcgacttccccaattttggggccaacaccccttccactgccagctgcgggaccatccttattcatggttccccccggattaccaccaacaccctggaacatttttgctatgatgggattacaaatgctctccaa

SEQ ID NO: 30816 - DNA, 508 bp, Glycine max
  unsure (1)..(508): unsure at all n locations
  Clone ID: jC-gmst02400060h03d1
atacccaaataataactctggtgcacaaatatatataacatcaaatcaaaagaaatctttcaaatccatctacgtacctggctacatccaataccatatacaatatatataccccatccccaactttatgaatcctataattaatattaagctaacttaaatctctgcaagtatagttctatatgctactattcaatgtttacagggagctagcatcccctcccatgccaggaattccagtataccagaatcacggtacaatatttcataattagtgactgcatgcatgtgtatatatatgtaaatgaaaataacataaaccctctccttttcttttcttggtgctgctagcgaagttaattagccaagtctagagaaacactcatcagaactctaagatttctctcataaattatccaatattggtttagctagctagctagccatcagttcttactttctaggccacgaaatctggtaataactgatgagcaacanacctctttct

SEQ ID NO: 30817 - DNA, 456 bp, Glycine max
  Clone ID: jC-gmst02400060h05d1
aataaagaaatatatatatatatatatatatatatatatatatatatatatatatgctcaaataattttgtaaaatgattataatataaaataaataatttatacaacattataagtataaagttctgccaagatgcatccaagtgaccaaatatcaatcttcttgtgatatagaagccacaaaataacctttttgtcctataggagcatgataagacttggactgaacatacgagcaaaggggctctgtctcaaaatagctacttcccagatcaacgaccttaacctcacatctgtgctatagcttttaaccaaaatattctccggcttcaagtcacaatgtattattagtccaagactgcaaaaactgaagtgcttccaaacactgaatggtaatcgaatgatggctgtgtcaccagacgtgtgtttgctaaaccatctttttctcctttttgg

SEQ ID NO: 30818 - DNA, 391 bp, Glycine max
  Clone ID: jC-gmst02400060h08d1
accaaacatttatatatatatatatatataaaaaaaagggaaccatgaccttaacacacccatcacaagtccaaaacacttgaacttgctcaagggcaagaaatgaccactttattctaagggtgtttgtttagacacaaaacaccagagggcaacataatacatactacataattttgaagttttgaaactacatataggttttatcattatttctaagggccatttctgcttgaagctttagctctccaacacctcacttgcaagtgcaggggttgcaggtgcaattagctccacatttgcagccatcgttctcagcgggaacacccatttcagcactctcgaattgagccttaactggtgccactcccatgaccaaggtctcgggggg

SEQ ID NO: 30819 - DNA, 404 bp, Glycine max
  Clone ID: jC-gmst02400060h09d1
aaaattataagcggagattcataattcagattagccgaactttatacagaagcgaccaatttccaaacatttaaaaaaaaaaaaaaagaagcccccttgggcttaacacacccatcacaaggccaaaacacttgaacttgctgaaagggaagacatgaccactttattttaagggtggttggttaacacaaaacaccagaggggccgaaaaccatcacagacataatacataagtttttagctacccattaataggttatcattattcctaaataagggctatctttggttgaagcttggtctcccaacaccttacttgcaagtgcaggggttgcaggagcaatttggtccacatttgcagccattgtttttagggggcacacccatttcagcaccctcaaatt

SEQ ID NO: 30820 - DNA, 490 bp, Glycine max
  Clone ID: jC-gmst02400060h11d1
catgttaaaccgatgcaaattcattacagcttattctcacaagttacgtgggagaacgttcagttactttacattagacattagctttctacacgtgttttggtaaatattgaactacatcacttacaaaaacaaaaagaactacaaaatttaaggattgaaaacttagcaggcacctaacacaagcaactgtaaaacaaactacaaactcaaaccactaaatctattcaccagctatccataaatttttctacctaaaggcatttagatgatggctttacagtactgcttgtcataatctggtgtgacaagttttccttcaaacattcaaactagtcaatccattcaccagccatagataggattttctacctgtggaggcaagagatgaaggtctttacagtgctgcttatcgtagtcacgtgtcccagggattgctcctgtacataatctcagaaattcattcccagtgagacaatagtgagcaaat

SEQ ID NO: 30821 - DNA, 461 bp, Glycine max
  Clone ID: jC-gmst02400061a10d1
acaataatctcatccttattcataaagctgactcaagggaaatctttagacaaggagaaaggaaggatttcttctactggagtactagtgcaagtagcaagaacaacctatatcttgggacaaaaccagcttgtacaattacctttcaaatttcctccaattagaagaattggaaaaattcctcacagaatgcaatgcagatgtgtccagataaaatacacctcagttatggcattacatttaggagcaaaagattgtgcagacaatccttaaacaattcatatgcacaaactgtaataccaaattaactgttgttaaagttcgtttatgttttacagattataaaaatgtgtaacacttaatggagtccatataaaactgaaatgagtcccattaacagttgcataccgttggtcaaaagcatctaaagataacaaaaggcaccgggggggataaaaaca

SEQ ID NO: 30822 - DNA, 418 bp, Glycine max
  Clone ID: jC-gmst02400061a11d1
aaaaagaaacccaaccttgtcatatacttgggggaagagggcaacaaattttacatagaagacatggggggggccagagaaaataaagagatgcatttatatgactctggggttatttttgattttgcaaattaaattacacaatcacagccggacattacacatgagttgggcctttttcaacttaaaagcagaggataacattggcccatgacgcgacacatgcaccacctaataatcataattttacatctttacatacaaaatacaaagactttaaattttaaaaagaagaaaagaggtaaaccgctcttcttaatgaaatgaaaccaaaacccacaaacattggcttgatttttgttgttgttgttgttcccaacttgattaaacatgaaccgtttgattgaatcacttggac

SEQ ID NO: 30823 - DNA, 462 bp, Glycine max
  Clone ID: jC-gmst02400061b10d1
acggcaaacaaatggaattctattacattatgaattacaagttccttgcatggcatacatcaaggaaaactgggaagttgttgtatgtggattgatttgccacagccttatatagacaaaccaaatgcttaatatcaacacaaacacgtgtacagaaaagaaaccactcttcaagaaaacagaaaataagaaaaactaacatattggaagaggtgccccattccactccccaaggcattccaaaagtggatcaatgatcttcccttggcacaaagcagtgaacactttgtcacactcttcacccggtgagataaccctttcaccagttagcaatgctgtccccaactcctctctcacaaacttgtacaaggggtaagacctgcattccttgatcttgtttggaattgcacattggtcattctcatatgcaactcttgcaccttccacttcctttaggcaaag

SEQ ID NO: 30824 - DNA, 528 bp, Glycine max
  Clone ID: jC-gmst02400061b11d1
ataaatcaatatttattaaatgatgggagtaaaaaaagtatccttgccctttacatcaatttgcagacctagtgttgtacccaaaaatttgcagacctagtgttacaataagataaacatttcagaatttgacctccactcataataagacatgatactttttcatgcttagcttttatccaccaccagcttctaactttgatgaattccaccacccctttatgatccggatgaattgaacaagttattcttaaacttggtcagcagtgatctcaaatcatatattgataatggggtgctaattatcatgcagcagactaatacgagtagcaagactaccgcatattaatcatcatttgttataaatattgcttgtggcacaaaaaatcaactcaagtaaggatggctcaatctgtacaaactacaaagtcccccaactgtggaagagaggagaatctaatatctatcattaaggactaccatatacaacctaggatatacagcttcttctgtttgactcaactttga

SEQ ID NO: 30825 - DNA, 509 bp, Glycine max
  Clone ID: jC-gmst02400061c09d1
tcgcgatctaggccgcccttttttttttttttttttctttttaacaatatgaaaataacactacattaccaaactaaaaccactgcagaaggcaatgtttgtgaacacacaacagagcttctggacgggaaaaagttccccagccacacaaatcttggtttaaaaaaagaaaatatttattataaaacgttaataacattcgatggcaagttcatcatcacggaacccatcagctacagataatgaccgagttgtttttactattctgcagcactagcagcactaagatccacactgaggtcaataacctttccagttatcaatgtatacatgttgagaacgtcatccacagtcgaatgatagtgagtactagcattataacttgcagatataaagcagttgtccaaagtggggtcgttgactgggtcatatttgtcataggtatcaaaagatatctcatcaactggtcctagaaggttaatttcaggttttagtttaattgccggctg

SEQ ID NO: 30826 - DNA, 505 bp, Glycine max
  Clone ID: jC-gmst02400061c10d1
actgggaacccaaaattttaacttggtagcgacagaaaagtacacgagatctccatcatcaatcaattcaaacttaactcggaagaaaagaaaaaaaaaaaaaaaagaacaaaatcccgggcaaaagttgccattttaagacttacatccacaaacaagaaacaatgattgccacgggcatgataaaacctttaactgtctttctattcaaactcactgcattcgaagcatcaaccgatgaacccgatgacccagatgaagcatcagcagcccctgcccggacatttttttccggcttggatggcgcaggagcctccgccggtgcagcagccggtgccgtcgcgccgaaaagcttcataggaagaagcaccttatccacctgatacactgagagctgagtatcactgtagatagtattggacactggtgtatcaaccaccccagttgttacattcacttggctccctgagggggtcacatttaaaggatactctccatcatcact

SEQ ID NO: 30827 - DNA, 373 bp, Glycine max
  Clone ID: jC-gmst02400061c11d1
acccataaattagaaaggcgaaacccctaaacaaacccaattgttttgggggaaatttgcccccggcgataaaaaggacaacccgatttggggaagggggggcaattttttaaactttttttttaatttcggaaatctcggaaagaaaaaaaattggggccccaaccaacgccttattaaggggggggtacactgggaccctgaatggggttttcccaataaaaaaactttgaaccgggggctttttttgcatttgggcttccatgttgttgggttcacccgggtaaacaacgcagggtcggtccaaccaactccctttggccttaaaggcacaaacctttttttttggggtatggggcaaaaacacatttaa

SEQ ID NO: 30828 - DNA, 552 bp, Glycine max
  Clone ID: jC-gmst02400061d09d1
ctaagaaaaatctaaaacttcactaacttgtacatttcccagcgtactcacgggtgagcttacacaggctgacatgcacacagaaccacatgaaatagacaaaaaaaacagagaaaataattaaataaatgccatggcaatattgcatgactttgtatacaaggcatgtcagaaaattatccagtctgaacaagtaaaccaacattgtccctcttagtacaattatgttgtccttggcctttggtatacagcaacaacttgatgaaagagaaacgaaagagaattccttcactacatcgatcttctcaacttgtttttattcatgcatgagttatgcaattccttggtccttggggaccttagtgattaaatatatattaactaactatctgcacacttgaatccatcaggtggggtcttgccacagtcaatgagaagctgaagagcaatagggatgatgatgttgatgttgagaatcttagccctaatggttgtgcagagacacactgcagcatccaaggccacaagccctgcaagcactggacaacatgt

SEQ ID NO: 30829 - DNA, 391 bp, Glycine max
  Clone ID: jC-gmst02400061d10d1
gggaaaaagacaaatgtaaatttttttttattaatagagatgcttaaattttgagatagttgtggctagctaactaaactagctttacgaagtagccaccaaacgaggctcactccaatttaaaaattcgtggttgtcgtggtcaccaccttctttgcaccttttgagcctttcgtactttcccatgagaatgacataaatcttcacatacccacatgcaaaacatggctcatctggttcttgttactacccggtctcgaactatgtttactgttgttcttattcggaagcgacttatacttgaccacctatgacggtaccacagactctatgattgacaaggtggacttttttcatcaacgttatcgtatggaaattctggagctgaata

SEQ ID NO: 30830 - DNA, 596 bp, Glycine max
  unsure (1)..(596): unsure at all n locations
  Clone ID: jC-gmst02400061d11d1
atatggcaacaaatcaaactgttttaaataaaatgaaattcgcaaagaaaaaagaaacaaacattttattgggaaagaaaaacagatgtgtttgtgatctatactataatgggaaggtcaccaaaagaagtcatttgcatctttacacaaccatcaagcagatcgtattttcgttttaaacattttacaaattggtcttgggtttgacacttccagttccagctacgcgccttgtcactgaccacatggttacaaattcttctgcagccgatgggtgtattcccaccgtgctatcaaactgtgccttggtagctccacacttcaacgcaacagcaataccctgcataatttcaggtgcatcaggtccacacattgaggcttcgagaaccttatctgtctcagcatcaacaacaagcttcataacagttttttcttgtcgcccagagatggtattttttataagattgaaggttgatgtaaaaaccaacagatccccattggtttgctctattgcctgctcctcactgagaccaactacagaaagtggtggaatgctgaacactgcatanggaatattactgtagtctggcttgatg

SEQ ID NO: 30831 - DNA, 606 bp, Glycine max
  Clone ID: jC-gmst02400061d12d1
aaccataacattaactcgggtacataaaatatagctactcccacagtcaagtcttagagttttgttaagttttatcacaacaatcttgaaaagaagcttactaaatcataaacgccatgacaacataaaacggacacataataaacaatagaaggattatggcagcttagtatgagattctatccagtcccatatgccttcagttctcgcttccaatacaccatgttcgaagaggaacactggtactgcctaggttctgctcttacatttttcaacagccctgggagctagaccaatggcatcagaactcttcatgatcctcagcctcttgcatgtttcaataaacatctcccagggaacatcacccacaagcatccaatcgccctctctgtcctcatatgtaagaacatattctgatccatgaagaaggtccttcagcttggtttcattcagcatctccctgcccagaattccatgagatccacatttacctgaaatcataccaaaacaagcagtaactggatccaggcagactgttcatacataaataattgaaaggtcaaagtttttcacataaaactaattctttcttactcatagtaaaac

SEQ ID NO: 30832 - DNA, 532 bp, Glycine max
  Clone ID: jC-gmst02400061e09d1
aatcaggtcaactaaatcaagatattttataaacaataagttcaccaaataaattaagctcaaggccttatgtttccaagtttgagaggggagggggactatgacgatatcaatattcatgcaatcaatggccatatcttacagaaaaacaccaacgaatatcaatttaacccatttacaaaacacctctctaacagcaaaggatttatcggatgttattttccagcctccaatcttcaaccaagcagaagtttcaaaggaacaatcttcatgtatcatttggaaatacacaattttcttacaataatgtataaataatgaggggcaccacactctcaaactatatctcaggattaagattttgtgaggccaccaggctttttgtaagccatattgctgtttctctggatgatacagatacagcatcttcttcaaatggtctcagcacagcagcaagctcttcaagctttccttgctgaagtagctgcgcacataactcgagcagagattccagagcatcagctctttgatg

SEQ ID NO: 30833 - DNA, 530 bp, Glycine max
  Clone ID: jC-gmst02400061e10d1
atataaatcaaactttcattaagaatatttatgtgattacattatagctaattaaatgctaggagcaatttcagacataaaaacactagaatatcaatactatggtcactactctactaattcaagccagcttattcttccagcaggtgtcaggaactgtttcttgtgcttcttttcaagacaaagcctggtaaggtttcagcatctgagtgagtgaaccacttaggtggagggacatgatttcattggtggatcccattagcttccctcctatgaatacagctggaactggagcagtgcagccttgcctcaatagagctttctccatttctctgccttcagggtcatgatcaatctcatgaaccacaggattcacaccaagttcttgaaacagaatgttgactgcatagcagaggcaacaagagctctttgtgaaaatcaccacacccttttcagaagccaacctcgtcaccttgtccatcctgatacaccactgatcaagcaccctgtgatcttctaaatatatatat

SEQ ID NO: 30834 - DNA, 522 bp, Glycine max
  Clone ID: jC-gmst02400061e11d1
ggcagaaaaacaagtaaaccaacttgttagttgttactaactgaattctgtcttgatcaatttgataaaaatcacatcaccagagcttcgaatggtttcattgtggttgtgacctcatataaaacttcttacttcttagcatgtcagggttagtcagtgtaatggtttatgcaaataaacttggaataaactagcaacccagcccataacacatgaccaaccctaatatgctaacaagaccaaaacataatattcggttttcaccttaatggtcattagatgctcttctggagaaacggacatacgtcaccagatacagattctgaaagcagcttccaaagcttctgcaattgaatataccctccgtataagcaaacccaagcaggaaagtatgcaagctacaatatataatcagaattagaaaacccgttagtcaggagtaacctaaatggcggacatactcaaattagaagagaatttggtctcacggactaagactttaaagaaagaattaaactgaag

SEQ ID NO: 30835 - DNA, 558 bp, Glycine max
  Clone ID: jC-gmst02400061e12d1
atataaatcaaactttcattaagaatatttatgtgattacattatagctaattaaatgctaggagcaatttcagacataaaaacactagaatatcaatactatggtcactactctactaattcaagccagcttattcttccagcaggtgtcaggaactgtttcttgtgcttcttttcaagacaaagcctggtaaggtttcagcatctgagtgagtgaaccacttaggtggagggacatgatttcattggtggatcccattagcttccctcctatgaatacagctggaactggagcagtgcagccttgcctcaatagagctttctccatttctctgccttcagggtcatgatcaatctcatgaaccacaggattcacaccaagttcttgaaacagaatgttgactgcatagcagaggcaacaagagctctttgtgaaaatcaccacacccttttcagaagccaacctcgtcaccttgtccatcctgatacaccactgatcaagcaccctgtgatcttctaaatatatatatgtacaagaattctggtccttagacttaa

SEQ ID NO: 30836 - DNA, 397 bp, Glycine max
  Clone ID: jC-gmst02400061f11d1
gatatcaaaatgctctttcacatccaaatagcattgaaacatagaatggaacttctccataataatacagtaaaagtcattcagaaaaaaacaagagaaattaaaatgtaaagcaacagtacagtagcaagccaatttagcttgatgcgattattctttaatccgtagacatcctataaccgagagcagaaagcaaatcggccgagtctaacttctatgaaggaaagaacatgagaatggtgtagccaatagtgcaaaaattctccaaattaaaagaagtcaacacctttagttagtatttgtagtccttgacatggagagactcggaggcaccctcagcaagggtagcatcacctttgtaagttcccaaagttgcatgtgagtttgcattgcacct

SEQ ID NO: 30837 - DNA, 514 bp, Glycine max
  Clone ID: jC-gmst02400061f12d1
ctgtaagttgtaacctgaccagtcctcaatcatttcctactatcaccacaacattttgcatgtttatcgaccagaagtttctgccacaaaaagagcatctccctgggaccttggtaatgggaaaccacataaccatccttacaaccttcgagataaactctgatctcattctcatagcaaacttctagaccttccttcttcatgactgcgatccagattcccattgcaacgtcttcaaatggttatgtctgaatttcttggacatcgtcctcgtgatatcaactgagaccacataaccgggaccatgtgcccaaggaggataagttccttgctccattcctgtaggtttttctgatttggatccaacaaatccatgattggctcattgtatatctgcaaaaacaaactttgtgccaaaaggactaaactaaaattgttaagtaggtcagggacacaaaaagaaacaatttagagacaatcaaccttaagaaaagagcagtggcactgatagctg

SEQ ID NO: 30838 - DNA, 465 bp, Glycine max
  Clone ID: jC-gmst02400061g10d1
gaggaaaagaaagaaagcacatgtattatctcaatggggaatatgaaaaaaatctgatcaatcagggtaacacaaacctgacatcaacgacaaacagatttcaaacttttgaattgaaacaccatcccgataaaccctacccctcccagaatggaagacacttattcactgtttctccatttatgccctttgtgccgaactttgagtgacacaattaagtgccgagcgttatgattgcacctaatccttgctctttattccacataccatgaaccctggcatgccaagtggggcttaaaacttctcgacatcagctgtgcgatcttccctggcctcggtggttgcgaggcccttgttgagaccctcgttgagttagccatgctccttctggagctccagggtgagagtcacagcacggggaaggaactcaccaatctgctcaaaggccttttcaaccaaacccct

SEQ ID NO: 30839 - DNA, 414 bp, Glycine max
  Clone ID: jC-gmst02400061h12d1
aagtcatctattaatctagaattatacttaaacacagacagtcaagaaccaaaagaaaacttaaaactggaacctgcaacaacctttatgccagggaagttggctgacacatgcatcataacaatccacaaagaccaaaataccatctcagttaatacaacaacttgacacatattgagaaggtgagtgacttgacaactgctgcaacatagaagacgacaagactgactgtcagacacccaaactgagcaatgcttgatgacaactctggaccttctcaaccctcaaacatgtcctagtactcactgatcattttgatctgcagctggtgaaggagatttttcagactcggttggcttgtaagcaccacaattctgtctgttgcacttggttctgaaaggatagtttatgttg

SEQ ID NO: 30840 - DNA, 457 bp, Glycine max
  Clone ID: jC-gmst02400062a03d1
gtaaaatatgaatggattctccccttactgattggacaatttatcttacactatccaatacatcatcatgaattgacattcaactctaattaatccactctacaatggcacaatccataatttttgtcccattattatatacatcaatcaaatgaatgcattacacaaccaaccacacttatgtcccataataggcttccttaaagccaaagcaatgaacaattcaaagaaccatccaaagctcaaaagaagcatttgctttgcatcaatcaccacgctatgtgttggcttctggatctggagattggaaaatacgttgagccaaccattgaaagggtctcaagagttgagcccttttcttgcgccagaaccaaatggcagcattgtagttttcattgcgaatcttctgagtggctgctctccaatcatacttctccatctccaaacgtgcagcttc

SEQ ID NO: 30841 - DNA, 256 bp, Glycine max
  Clone ID: jC-gmst02400062a07d1
gtggagagtagagaagaagacgacgagtcaaggaaactaacaatcacagagacataaatggatgtccgatttcaattgctgcaatgcaattacaagctctttgtacccccattataaaactatacccgttttcttaaaataaaattgaagacaacattttgatttactatatagttgtaactgatcaacaaggtttggagggacccattaattaaataagccaaagcaccaaaaggggattgaagtgacaaacaac

SEQ ID NO: 30842 - DNA, 428 bp, Glycine max
  Clone ID: jC-gmst02400062a08d1
ggaagtcattatcaattcaatcaacttcaataaacaacacaagggattgctacatatatatgaacccgtgacacataccattacaaagctacaaatataacttcttttcatactactacatatataacttgaaacttggagacttacatgcaatgccttaaacatttagctcactatcttctactaaatagttagcaataaacttttagcaatgccaaaacccaacccatatcaaataccaattcccaaataggagtaactttgcaatgccaattcgacacgatttttattattgtacccacaagtcatgaaaatttttaacctaagaaccacttattattttgtttttggtgcaaagcttacgagcaacaccaagccttgagttgggcacgttgaaaagcacacgggggttttgctgttgcatgttg

SEQ ID NO: 30843 - DNA, 509 bp, Glycine max
  Clone ID: jC-gmst02400062a11d1
aagagatatggatgatttatttattattcatcacatgcactaagattccataaaaatacagatgtacaaggcaaaatttgccctgtcacttctcattggttaatatacttttaagaagagatggaagattgatttattatttatcacatgaactaagattcccataaaaattacagatacacaaggcaaaatttgtcctcgtttctcatgggctaatatacctttacaaggaatactaacaacactttctctaacatactctttcttattcactctctactattgattaaaatttataagaaactacaagatcacgaatacggatcattaaataagtagtgatgatccataaattattgcaatttccaataaactttaactaataatgaaaagtgtgttaaaaaaagtatgctagagtatgttactagcatttctcatacctataataatacaaagtttggggcttcaagaatctgcaagttctataagttgattgaccacatttggat

SEQ ID NO: 30844 - DNA, 528 bp, Glycine max
  unsure (1)..(528): unsure at all n locations
  Clone ID: jC-gmst02400062a12d1
agtctacaaaatagaaaactttatagaaagagacctggacaaactgtttcaacattatcaaagtaaaaagtagagaagaaaacaaaccagtgataaatactttgttcccaagaactacagaaaatgaggatgaatttcaataacaacgatcaaggctacaaaaacatccacccaagactatcgaagtagattattacaggacagggcatagcacaatcgtttgatgatgatgcagcaaagccaaatctcttgatcaaacagtacatcacttaaattaaatttccttcaagtgaaggacaattaacataaacctcaagcagagagtcataatgtccttccctgcttcttcgcgaaacataaggatgcattatttcatcatctggcagatatctcgctccttcttcagacatctaaactcgacgaatatgtaatacagttgcacaattcttgaaaaaaggccaaatctgatgatgatccaaaacagaagactgngaggaatcttgaagctacactacatgcagtttttta

SEQ ID NO: 30845 - DNA, 206 bp, Glycine max
  Clone ID: jC-gmst02400062b01d1
atagacaataattgaagttcccattaaaatttcaaacaaaaacttatcaaacatgcattcaccttcaacactaccacaataccacggtttactgggccgaaaaacaaggacagatgcctaacgtccttaggaaactcactctattacataagccaaaaataatacatgaatgagtcataaccaacagcaaaaaatatcactgacca

SEQ ID NO: 30846 - DNA, 516 bp, Glycine max
  Clone ID: jC-gmst02400062b02d1
aaaatcagtgctgaagtatccttcaaccaaaaggtggtggtccataacataccaaaagtgtctaatctaacgaaacaaactcaacctgaaaactgtatcaaagccagtgcagaaaataacaatccatcatcactacgtaaactccaaaatataaaccttaagaaacaaggttgtcattaagagataacgaaacaaactcaacctgaaatctgtatcaaagccagtgcagaaaataacaatccatcatcactaagtaaactccaaaatataaaccttaagaaacaaggttgtcattaagagataaggaagccagctgatcagcagtaccgccagcctgctgctgagcaacattccttaggacgtccattgcctcagccacctttgctttcagggcttctggcgactcaagcaaatgcagaacttcagtctggtccatctcaagaagcatgcctgtcactctggcagcattatcaggctctaactgttccacaagggggtagagattctcacccagca

SEQ ID NO: 30847 - DNA, 538 bp, Glycine max
  Clone ID: jC-gmst02400062b03d1
gcagcataaagacacgaagatattactaatatgatgatgactagtacaatcatgtcgaacaagatttcaagtattacaaattgaaatccatttacctggtttggatgacaataataatatatataaaaagtatataaaaaaaaaaacttacaaacagcttaaatagccagaacatttggatttactccaagcaattaaggtcaacaacacaaaggtgaattggatcatcacatcttctatgacacagtatcaatcgcacccctttacaaccttcatacaagtgagctcaataaaaaaacaccggttaaagtcccccgtaactggaaaaggttcattcatcattgccagcataaccacaaagtgcaacaacattccaatccctcttctaacttttggataattcatgaaagcacaacagaaacatggttagtattatatcaccccaatcaaattaaaactccatgcaaagaagttgccgttattagacattgaagacctttttcagcctacaaagtcatgcaacagttgtcctccatga

SEQ ID NO: 30848 - DNA, 502 bp, Glycine max
  Clone ID: jC-gmst02400062b04d1
ctgaaaaccgaattatcatttattaactgtaacttgctttggaacaattcaagttcactaacaacatccatgaaatccaatcattaaaaattggaaaaccaaaccaaaccaaaccaaaccaaacttattccaacaccactcatcaaacagaaaaacaatccaaactttcaaaactcacaaactcaagaacaacttgaaattactactaacaaaaacaagaccaattggtcaaaaaccatgaatcttgatctggtccttcctgacaaggccagcctgaacgaggaagtgggagacgttcttacgctggtcgccttggagttggatgatcttgccaagctccttgtcctgcaccacggttccgttgcagcagaactccttcttgaggtccttgaggatcttctcgtagctgaactccttcttcagcccttgcactgtggtcagactcttcttcccattcctctgctgaattcgaatatgcacatactcctttgctccgggggca

SEQ ID NO: 30849 - DNA, 553 bp, Glycine max
  Clone ID: jC-gmst02400062b08d1
ggttccacaatctattgctttcatatgtgagtgaagggtctttctccagcagctttgccattaacccacttttgtaattctcaaaggaatcaccatcaagcccatccaacaattctttcaggccatttaagaagttttcaattctactttgcaagtaaactgggtggtactcagatgactgaacgcagaaacaaaacccagagatacgatatgttactcgtgggctgcattcaacaacataaccaagctgctcttttgtcctcagttgattgaaaaatggctcctccacaatttcatcaaaaagatcaattaaagctttcaatttgattgaccccagaccaaaatcttgctcaatttgaaaataaagctcaaccaccgagtttttttccgacttattcttcacattgacatctctaactaaattggcactggatgggaggcaaataacacgctcagcatgcctcaattcaatgggagtggattaactggaaaattcatcttaaatatttttgctatgccaaatgcctcttcttttgacagatttccatggcaa

SEQ ID NO: 30850 - DNA, 351 bp, Glycine max
  Clone ID: jC-gmst02400062b09d1
ctcccaaaagggggtttttttctccccttataaacccaaagaaaaaaaccccccctggggtttcgcacccccataaaagaaagggttttgggggtacaaaaaaaaccccccccctatttttttccgggggaaaaaaaaaaagggggcccccccccccccaaaaaaaaagggcccctaaaaaaaaaatttccccccgtcatctaaatcaaaaggcccccgtttttttttccccaaaaaaaaaaaccccgtttttttaaaaaaaccggggccccccccccccccccccttcccgggggtcccccgctaaaaaaaaaatttacccccaaaaaccccttttttttccccaaaggg

SEQ ID NO: 30851 - DNA, 516 bp, Glycine max
  Clone ID: jC-gmst02400062b12d1
gcatccaattgttctaggttcataataataataataataaccaaaagaagatgaaaacggagagtaacaaagcatggtgagacacagctaccgaagctactaaaaacaagggacagagcaaacaagtaggataactagggagcagagaagtagtagcaattaaagcaaacaagaaaaatagacactcaactaacaaaacctaataaccccaaatcaagatggacctaatgggaatagaattctcatcaaaacttatctgccctgtccctcttctctttatatgcttttcaaatttaggttatggttggaatggtcctcacttggccatcatgactttgacaaactcctcatagttgatctgtccatcaccgtcaacatcggcctcacggatcatctcatccacctcctcgtccgtcagcttctccccaagatttgtcatgacatggcggagctcagctgcagagatgaaaccattctgatccttgtcaaacacacggaaagccttcttaagctcct

SEQ ID NO: 30852 - DNA, 517 bp, Glycine max
  Clone ID: jC-gmst02400062c01d1
aaactgaaatatactcttgctaaataatctccattaaccaaaagcaaatacatacttgtacacattggatgtacaaaaaaaagttatttacatcatagtggttatcactgaaatactatgtttggtcaggcattaaaagaaactcattattgggattgagcaggagatgctgatgtttctccagtcttctcttgaagcaacggcatggtgtttgacctttcaacgtttgatacttgatgttcactgtcttcatcaaatctatccacactatgcaaaaatattcctgacataatatacaagaatcacgacacatgttcaaaaaacttctcaaacgtttctgagaattagacatttatgatttgattatgattatagaaattcaatactacatcttgaagataactagatagtagacaagctaattttcatgtagccgagtaacatccatcacaggtataatttgcttttgttttaatctttaagttgggttggacattatttaaagggtgctttattt

SEQ ID NO: 30853 - DNA, 379 bp, Glycine max
  Clone ID: jC-gmst02400062c03d1
agaataaactcggaaagaccaacattgagattgagagaaaaattcaaaaactggtagaatggccaacctgttcacctgaggtggacacgttcgggcacttcccgctcaacaatattccagacgttgcgagaacagctactgttgcagtgggctctaaccaatcggctgagaaaacacaaggctggggtacgagtggtcttatgcaccctccgccctgagacgacaggctttttcccccttggcccgagggagctctcagcgatagaggtcaatggcattaatgccaaaaaaacggacccggaccctctttgggggtgggcgcaggcccaccagcctcggagttttgggataatgggttggactacgagggggaggagag

SEQ ID NO: 30854 - DNA, 459 bp, Glycine max
  unsure (1)..(459): unsure at all n locations
  Clone ID: jC-gmst02400062c05d1
cgcccccttttnnttttttttnnntttatttattttatattatttttnntttgtttttatttatatcttatttattgttttgatagttattgaatattttattgaaatcaaacttatttaattttaatttgttattcttttgaattcccctcccaacaatcgggcgctaattaaaaattttttccgcccgcccacaagagggggacagtgacaatataagaaaaaacccccaggaaaactactggcctaaccgttcaccaccccaagcgggggcaaataaaatatgggaaaaaaaaaacccccaattccagaagggggtcttaaaaaaaaacccccggataagtgttcgcaacccaagggaaaaaaaaggaaaccccccccccgctttgggggggaaaaaaaaaaccccccccccgggaaggaggaggaaaaaaaacttcctggggggccgcccccccc

SEQ ID NO: 30855 - DNA, 471 bp, Glycine max
  Clone ID: jC-gmst02400062c09d1
gacaattaatcatttcatatttcacacattcataacaaacgtaggtgggatattagagtactattattaatgggacacaattgagttcaacacaaaccgaacttattttcaagggacattattacagacccattaaacatcaaaggtcttcaaatgttttgggaacacatccaacattacacaacgagcttaaaaccccccacggagacggaggacaaggtgaagggttgattccttctggatgttgtagtcagcgagggtccttccatcctcgagctgcttgccagcaaaaatcaacctttgctggtccggggggatgccttccttggcctgaatcttggccttcacattgtcaatggtgtcagagctctccacctcgagggtaatagtcttacccgtaagagtcttcacgaaaatctgcataccaccacgaagacgcaacaccaagtggagaggtgactccttctggat

SEQ ID NO: 30856 - DNA, 303 bp, Glycine max
  Clone ID: jC-gmst02400062c10d1
ccacaaaaaccaaaaccggcaaattcccttgccttttttattttaggggttccaaaattccaggaaatggttttttcattttttgggtttacctaccaaaaagcagttaaaaataacatttcttaaccaaactcaaccaggaatgactttttaggcaaattatgattttggggctttttggggacccttggggtcaaacctgggacccttaccatcgggaggtaacttttttggggggggagagggaaatttttttgccccacccaaggttttggagttttttctttgaaaacctttactccc

SEQ ID NO: 30857 - DNA, 331 bp, Glycine max
  Clone ID: jC-gmst02400062d01d1
aaccccggtaagagggcaaagaaataaaaatttgtcattaatcaaaagttgacagacaatggagcaatggggttactggttacattttcctttctaaggatcatttacccccccaccacaataaaacccttttgttcttaaacaggagtgattataaaccccatttttcatttgcatcgggtcagaattttccagcttcaggatgcaaaatactcagggtttctcaagcaacagctctgcaccttaaaaacatgtacacttatttgcaatgcttgccccccacccccaaataacgggtttcattatcaagagcccttttttctgggacccg

SEQ ID NO: 30858 - DNA, 523 bp, Glycine max
  Clone ID: jC-gmst02400062d02d1
agtctgaaatcttcatgcaagcatagttgatattgcaaacaatcttgcacaatcaatgttaattgctcggttaatatcagatgcaagaataatattacaatataagcacatttatgagccactaactttccctgaccaacaaaattagcatgctgatttgaattaattgttggaacttggaacatactcatttcttgaacagtctctctctcaaggtagcacagtaaaaacttccacatctttcattgcagggctcttgactgagtatttaaatgtccaaccatggcaggcaccagcatgttccccctttttattgagggcaacaatggctcccaaaaaatctggaaattttcttgctattcgtgttattgcatctttagcagcaagtttgggttccattcccaacctcatactctccacaacttgatagcatggaaggaagcgcatcatgatgtcaccatccccagttgcacaacatgcaccaacttcatcaatggcatatgctgaggatccagcaatggga

SEQ ID NO: 30859 - DNA, 506 bp, Glycine max
  Clone ID: jC-gmst02400062d03d1
cctaccaagaaaacgaacttgaatacaaatatgaggctcttggtttttccatggctaggaataaaatgaagaaaagagtcctgaaactagagttttggaagaatattttcttttttactgggatatcatcaaccccagagagagggtttcttaccactccccctgaagctctttagtaaaacaatgaatgacaaaataatggggggggaaaaatagattatcattcgggtactttgcagccatccctcgcttaagaatcattacattccctctccttgctccacccaaaaaaattgacaaaaagaatacgttgtgaaattaaatacctatcacaagatggaatgggtcaaatttgattagactacaagctgatccagctgtatttgctcaagccaggctcctagaacagaatgatcaacagactcaactggcggatttgactttggatttgaacttggcccatcaacagatgcaacaggggccagaacctgtcaactttctttttt

SEQ ID NO: 30860 - DNA, 485 bp, Glycine max
  Clone ID: jC-gmst02400062d05d1
gagcataatggtaatcagttcaattaatgctgctaaaaaagtagcattcaaatgattaatcacacaaatgttgcatatacatcgaaatatagcgcattaattagtaccatcatcttaattaattaagctaaatgagaataaagaaaactaattaagcttgatttccatgaattatgaagtcttcaagggcttgcaaatactgtcacggctagctagcacacattttattcaggaataatgaagtatagcatcatgagcaatcagccttagattttttttagcagattgactgctcatgatgttatatcatttccatgaatttacctctatgcatgctaccatatttatatgtatatgctgccccatttgtaaaaaaactcctaacgaaagccccctcctagggctggagcccaataatctgctccattgtcacttccaacttgcagtgtgcatgacactggcaccagacacaaccctttacttct

SEQ ID NO: 30861 - DNA, 466 bp, Glycine max
  Clone ID: jC-gmst02400062d06d1
cccagaaatgggttttaatattataagcagagattcataattcagattagccgaactttttacagaagcgaccaatttccaaactttaaaaaaaaaaaaaaaggaagcacccttgggcttaacacacccatcacaaggccaaaacacttgaacttggtgaagggcaaaacatgaccactttattttaggggggttggtttaacacaaaacaccagggggcccgaaaaccttcccagacataatacataggtttttagctccacattaaagggttatcattattcctaattaagggctttttttggttgaagcttgctctcccaacacctcacttgcaagtgcaggggttgcaggaacaatttggtccacatttgcagccatcgttcttagggggcacacccatttcagcacccttaaatggggccttaacaggggccactcccatgaacaaggtcttggggggggg

SEQ ID NO: 30862 - DNA, 485 bp, Glycine max
  Clone ID: jC-gmst02400062d07d1
aaaagcaccgatataatccgatacatatacttttccactgtacagaaaaaaactcaacatatttatttgtttaataataccttagaagcagttggcaacaaaacattacttgagtatccttccagttctgccttctatacaaaggtgtgaccttttctccagaacaaaaggacaagaggctcttgagcaggtaggtggtggtggtagccaagtgtcacggacacatgcaacatgtcacttatcagcattgattccaaatatcctgaccttgtgcatgtgggggaactttgcaacaaccagcacaatcactgcaacagtgttgaagagcagcattggattctgatagtctgttgtgtgtgaggctattaagtacagcaccaaaggaacaactgtgagaaacttcctgttacgagtaagctgcttttcattgtctacctgctcccaccaagtcaatctattgtagatcccttgatcctctgcaaatg

SEQ ID NO: 30863 - DNA, 508 bp, Glycine max
  Clone ID: jC-gmst02400062d08d1
aatcacccatataataatcaagtttcattatgtttcagacagggtaatcaaaatggagggtttctaagtcatgcaaatgactgcaacaacaacaataacagaaacaatgctttagtcttcattgataactcagaaaagctttgaaataaaaacaaatttaggcttgtcaatacattaagtcctgctttattctcgttggctacattccgcaaaaggtgtctagtcactcaagatgaagtttatatctttgatattattccttaacgaaggagaaacaaacactgaaaccaaaataatgaatgcccccccagtcaccagctgcaaggcaccattgcttcaatgtgttgatctaccacctatgcaaaaaatgaaactagtattacacgtctttcccttgtttggcaataaaatttaagactcctccactcccaaatattgggagtgagaagctgccaggagggctgcaccaatgccagagccatcattagcatgctcaatgacaatggtc

SEQ ID NO: 30864 - DNA, 568 bp, Glycine max
  Clone ID: jC-gmst02400062d09d1
actaaaaaaccagcttataacataagctttaaagcctgtatgtgtccactaaaacacagtgaaaactgaaaagggtaacatgatactgaaaacataaatcgacatgacatactaccaaatattgtctttcttgagaaactaaatccaaccaaaggacatgaaatcagacatttaaaaataaatagtaaatcaaaagcagaaataaactaaatttagtctacttcctcaatctttggccccgcaccgcttccagcagcaggaacatcatcgtccattgcaccacccacgtctggaccagcaccaccctggtacatcttggcaatgatagggttgcagatgctttccaactccttcattttgtcctcaaattcatctgcctctccaagctggttgctgtctagccactggatggcctgctcaatggcatcctcaatctttttcttgtcagctgggtcaagttttcctccaatcttctcgtctttaatggtattcctcatgttgtatgagtagttcttcaatgcattcttggcctctaccttcttcttgggctcttcatcttttgatttga

SEQ ID NO: 30865 - DNA, 408 bp, Glycine max
  Clone ID: jC-gmst02400062e02d1
ataaaacttcgttataaattaaatgcaacttaaaacatccctcagcagcaaaggaaatggactaaaaccctatagctgcttgtgaaattcgaaatatctcagactcttcttaccatcaaaacaaaaaacagtactcatcaaaaacaaacagcaatgaaaattgaccaccgccgatcaagaacctagttttgaaagttacggctacatgaaatcggcagaaacttaaaaatataacttaaacaaaacacctaagactctgcaaggataaaactactataaaggagtaaccacgatgatgatcacatgtgctagcaaaattgcccaaatgcaatcacttcttcttggcagcggccttggtgaccttggctccggtggggtctttcttctcaacactcttgatgactccca

SEQ ID NO: 30866 - DNA, 455 bp, Glycine max
  Clone ID: jC-gmst02400062e04d1
aaaaaacgttattaattactaattcactgcatatacattccaaaataaataagtaataactgattaagttgcagttgatatggtatttgagtaatgatgcatatagagtggagtcagtagaagtttagaatattggtgggagtaaagttttggagccatggactattcaactgagcccaaaaggtatcttgggtccaatccgagagcatgggaagctgaaggtctggaagcttctccttcccaaagggcatttgtagtgatgtgccacaagtgcttttgttggtgtcttttaagaccaattggttggttattttttcttgtttaggcactaccatgtcttcagtttcagactctttcttaagaacatgttgcaacaatggcaagggcatgttttgctcttcctgtgggctgctaaaggacatggtgtccgtggaggaaggagaagcaggggaacc

SEQ ID NO: 30867 - DNA, 413 bp, Glycine max
  Clone ID: jC-gmst02400062e05d1
accacattgtgattttttttttttttaagcaaacatattatagccttcttatgggattgaaaaaaaaggaaacccccgcgacacatgcaaattccaagggggaaatctctcctcattacctagcatgacttaaatcctttggaactaggttacttccttgcattggaccctatatacttataaattttttttactaaatattgagaaaaagggtgaacattttggcttatttcttcccaaagaaaattcccttggaaacacaagattaggtgggcagagccaattcgacacggacattggtgttggccccctttcttttgaagatgcttatgacaagccccgcttataggtatgggtggggcgcaaaatgaaccatcaaaaatttgccttgactcccatttgttagcaagctc

SEQ ID NO: 30868 - DNA, 471 bp, Glycine max
  Clone ID: jC-gmst02400062e09d1
agccagaatatcgggcaaatccaaataatgctgcattgtcacatagtctacataacctgggaaactaacagcaatcaaatatgttcgccatttggaattggaatttgaatacaaatacagcgcatcaataatataaccctatgtacacagccaatatctgactgaaatttgatacagaatagtctcaatttgtatcataataaaatggcacagagaaatttatgtgaaggtaaaggggaagtgtatcagctggggttttaattcttcggctttcatttacttcatcattggctccttcctgcacgttcacatttcctttatctgcttaagcactgctgaccttgttcttacccccaaaggtccaatggggtttagccggagtacgcctcaatgccttcactccgaatgggttgttcttgctcttgagacaagttccaacataagtgttgcagatgggatagtcgttagggc

SEQ ID NO: 30869 - DNA, 505 bp, Glycine max
  Clone ID: jC-gmst02400062e10d1
acataaacacactcgttgcattacatactaacttttatgtgccttgacatgtctaataaaaaccaagaaaagcctaattgaacatatgtaatcttcatatactcttgatcaacagtgccaacgcctaatttggtgataagctttcgggtctttttatgaaaggccagaaactactaacattcacttcatgcctgctattacttttgctactgctactactggtgttgctaccagaactttttatgcttccactattaatgctcgacacaccactatcactctcttcaccagaaccagaaaggctcttcttttttcaccactccttatcaaggctcttagatccatgatcagaaaccgaagttttaggagacaccttgttagaaccactattcactaaggacttatttttagtcttctttttaaatcccaaagaaattggaaagaccattttgagataaaaccctccactttcaatgttcccacttttctttacttgacccttttt

SEQ ID NO: 30870 - DNA, 474 bp, Glycine max
  Clone ID: jC-gmst02400062e11d1
ggggactaatgaactgtgtaaatagggatcatatttaataccataaacttgtacacaaacatattttacagtgtacttacactccagcaaatctaaaccaagagtctttgttatgtgcatggaagatattataagtagaaacgaaataaatcacaccagccacattttccataagttcaattgcatgtccaagaacataagttttgaactgataaattatataaattaataagataggtagaaattttgtagtggcagcagaaataggaacatctttgttgtgagtacccagttttaggctaaaccgggcactagttttcagcctttgcttcaatttttcattattttgacttgaaaggaatggccctgagcactatctgatggtataaagctgcaagtgctgccccaataaaaggccctacccagaagatccaatggttattccaagcttggtccttgttggatacaagggct

SEQ ID NO: 30871 - DNA, 517 bp, Glycine max
  unsure (1)..(517): unsure at all n locations
  Clone ID: jC-gmst02400062f01d1
agagaaaacaaacacagactatactaataaaaaatattcgcaaaaggaaaagtttgacaacacaaaattgtaaaatccaatctcaaacagttaacaaaaaagcaacccaaactaaacaatcaaggtgcttgttgttttcaacatctactcttccagtattgttcccttctcactaacataaatgccatcgagaaatttcctgatatccttctttttaacatggcatttctggttaatgagagcacaggacctagaaacaagttcaatgtcgttcccatccaaaatcaattcatctttaactttttcagatcgaacaacggaaacaccgttaagaaggtccacttttctcaccttcttttcgccaaggaaatttctgatctcaatagacttgttgtcgttgccgatgcttgcgttgatgggaaaatgggcataaacgaacctcattttgtagcggtagcccttggtgacgccggtgatcagattctccacgtggctcanggcggtgcgaatggcggcg

SEQ ID NO: 30872 - DNA, 455 bp, Glycine max
  Clone ID: jC-gmst02400062f03d1
aactcgcgaattgttccttgatgttatgcatatgcatatacaaatttacatacatgcatttatttgcacaaggctcataacagtaaagtgcagaggggggattcagggggactaggtgtctgtaagaagtatttttcacagtgcatatttggcttctattgcaaaccaaatggaccttatgatctgaagcttggcacagaacacagattatacaattttaagctacactctcaaaacagataagctatgaaaatggacattgatcactgatcaatcataggtgcatgaattctttgtgaatttgataggctttgatcgagaagagttggggaccaaggggcaagtgattcacttacgatgccttgtcttgaccagtttacccactacattttcacgcgaacggatttcaaagtgtaatgtgagtggaacttcaacaccagtttgggatacagata

SEQ ID NO: 30873 - DNA, 450 bp, Glycine max
  Clone ID: jC-gmst02400062f04d1
agccagggcaaatgaaacgacttgagtcattatggattttaataaccattgtcatcgacataagtaacattagatgaaataaggatttcataatagaaaaacactggttgaagcataaaattgtttattcgtgaatgtgcataaaagcacaataagacaccatacacgaaacacatccttgttagagccagaagccgcctcattcacctatagttgcggtatacgggagtatacatgcaactctcagcacacttcacaagattctgaggacgaggaagacgggtagccaagcccagttcgtatgccttggcagcaacatttgcagctatattagccgaaattcttttgatattagagaatggtgggtaaatcaagccatttttgtagttctcctcactcacttgtttagccaaggattccgaagctgctaaaagcatatcgtcatgtact

SEQ ID NO: 30874 - DNA, 326 bp, Glycine max
  Clone ID: jC-gmst02400062f05d1
acaaacaaacttattgtgatttacttcattccatgggctggacactacagcaataatcataatttcaaaatcatcctcttcaacttgagaatgaattacttcttgccactttgcatcatagaaagtgagaaactttcttcacatacaactctgccttctattgttggagagggtggatgaatgaacaaagcaattatgcagcagtcaactaatgttgcaaaaagatacatctctcatccaatcacctagaagcgagcccagcatctagtgcattgtgcaatacagtctcccttacaatcaacattataacccaaaacttttggatt

SEQ ID NO: 30875 - DNA, 563 bp, Glycine max
  Clone ID: jC-gmst02400062f06d1
actcaaagcatatatatgtgatctgtaattctgttaggaatgacattgtctagtgtccattgtttgacatccaattacacgggaactagtttttcgcaaaggaaagatgctagtccacaaattttaggagtgtaaatctcaaatctgtgcgcaggccaaaagtcaagaatcaatatttggctcaggaaaaaaaaggcaaataccaggatgtaaatactaaatacaaaggcacaaagctacaaacccaaccaccattcatatgtctaatgccacgcattaacgcaccaagggtcatcacagacactccaatggatacgaaagcctgcaaaatgagaactatctgccgtcttacccattgaaatgcaagctgcattaagagaaaatcgaggttctgtataaatgtttttgggaaatttaggcttactattcctgacgcagttttataggtagaaggggaagccctacagtaccccgctgaaatgtagaaatctatctcaattcaaagtacaatattttttatctaaattacgggaacaagaagcttaagggggaacggaaagggc

SEQ ID NO: 30876 - DNA, 484 bp, Glycine max
  Clone ID: jC-gmst02400062f07d1
aaagtgagaactttgaaataaatctgggacactttatggcggctattatgaaaggaagaacgttcaaatgcattgcataggcataactaaaccacatttgacattaaacaagaagctaatctccgtctgttgccggttgggtcaccccacactgcaccaacaggctagtcaggtcttctggggagcaaactggatacttgtctttcccagccggtgacaaaaaaacctgtgcaagttcaagcttatccgaggtcagacttgtgctggccatagtcttacttaataccttaagtgcaagttgaacagtttctttccttgtgatatcatccttggtggcctgtttcacaattgactgaggtgactggttggtggcaccaataggtgtagctttccaaccaccataattatcactggggtcacttgtgtaaagctgaaagcccatatgtcggcccctaccagaaaagaggaatgtgactactaatgg

SEQ ID NO: 30877 - DNA, 525 bp, Glycine max
  Clone ID: jC-gmst02400062f08d1
gaacttcaataataatgacatgcaattaaatatgaccaacactaatggcagtacccaaaaacaataaagcagtcattttaagttaggccaacatctagcaagaacaattcacgagctaaataaaagtaacataaaatcatgtctccttagaaagggtattctttgcagcctcagcagccgttttctttgcatcaatctcagacacaatggcatcaatttttagcttcagtgagtacagccaatacctagcaagaacaatgctcgcataacacaaaacagaaaattatgtctccttaggaggggctttcttagcagcctctgcagctgccttctccgcttcgatctcagcaacgatggcatcaatttcggcttcctccagttgacgcagaccctgctccttagtcatcaccgcaacttctatgttcttccctccactctcaacaacttcaagcaatgcgcgaatagccaacctgacagtcttctggccagaagtgtccttattgttcttttcaggaactcccgatc

SEQ ID NO: 30878 - DNA, 477 bp, Glycine max
  Clone ID: jC-gmst02400062f11d1
accatcttacccttgagctctgatttcatataagttaacagagtcaacaatcactcatgaattggtacattgttaatccaaatttctagtttacaagataactgtaatcatccataattgtagaacaaactcccattgagatctttaaacagaaacgtgtatacctacagaatttattcctccttgcttgatggcctctggtcagtaaatagagagggcccatgaagaggtataacggattggagccaagggtatcttcatgtgtttatgcattattagaatgaaatcttcactgaccttcatctaagggacccacaaagcatttttccaataagaattcagcattaacccaagcatggtttttatctgattcaagaattaaggaaaaggacggaagtaaacctaacaaaatagaaactttatccatgttggggaacaaatgaacatgttagggcacctacgttgaaacttgaatca

SEQ ID NO: 30879 - DNA, 321 bp, Glycine max
  Clone ID: jC-gmst02400062f12d1
ggggagaaatataaaaacatttttttgtaccaaaaaaagtgttaaggggtttttttgtaaaaaaaacagaaaagaaaacgggcgggaaataaaaaatagatccccaaaaacccaaagaagctccccgaagggtctctctgcaaaggggggggggggcgggggccaaaagggggaaaaaaaaaggtcatgggaaaaaacaggggtgcaataacaacaaaaagggggaggggggcaatgatagggggggatagggtttttaactccatgattgggttttcaaaggcatgtgttttttggaggggggcgctgttttttttgtgg

SEQ ID NO: 30880 - DNA, 470 bp, Glycine max
  Clone ID: jC-gmst02400062g02d1
acataaacacactcgttgcattacatactaacttttatgtgccttgtcatgtctaataaaaaccaagaaaagtataattgaacatatgtaatcttcatatactcttgatcaacagtgccaacgcctaatttggtgataagctttcgggtcttcgtatgaaaggccagcaactactaacattcacttcatgcctgctattacttctgctactgctactactgttgttgctaccagaacttttcatgcttccactattaatgctcgacacaccactatcactctctccaccagaaccagaaaggctcttcttcttccaccactccttatcaaggctcttagatccatgatcagaaaccgaagttctaggagacaccttgttagaaccactattcactaaggactcatttttagtcttcttcttagatcccaaagaaattggaaagacccatttgagataaaacccttcacta

SEQ ID NO: 30881 - DNA, 502 bp, Glycine max
  Clone ID: jC-gmst02400062g04d1
gaaataaatttagaatttcatagaaaaaaaatgttaaaagattctgcttctcttgctctcttgcatatacacttcatgatatttatttcgcaaaaaaaaaaatatactacatggtagtggtattgattgacaaacacaaggttcatgataaacatcgtggcaggtcatcatatcagtagatacgatgaagttgtttcccttgtgaggagattcatactgggttatcaacatgagaaacctgaagcctccaagtaacaaactggatatacgcatagttgatgcccatagcaactccaaaacccaaaactgatgaaagtagtatggcatatatggccgtcaaatgcaacatagtataaaatagatgcacggttaaagccacaagggcaaactcaagagcagcatatgtccatatatactctttaattggtaggataactgcaaaaaaggaagctaggaggcccaacgtaaaggcaaatggtgatgctataataatcgcttgagt

SEQ ID NO: 30882 - DNA, 534 bp, Glycine max
  Clone ID: jC-gmst02400062g06d1
accaaagcaatcaaacttgcgcttcttgcatatttttgcaaatggacataacatatataattacgtatttaatatatattatgcaaatcactaattagtagtagagctaatagtagtaataatagcactaggaataatatagtaattaaaagaaaaattaagaagctagcatcagatcatacacttgtgattattttgaccctcaggaatgttgactggtggaatcacgtccatcgtcttcgccgtgatgttgcccggcactgcccggaggcttcgagacgccgttcgccggaatctgcctgtaggcattaagggctgcaagcatgcctaagttactttcacttagaagttgagcaccgccgttgccaccaccgccgtcaccgtcaccaacgataccggaacctagttgacctccgggcataaggttcatcggagaagcgaaattcatgaaatgaatgccacctggagcagacatagctttctctatacacaccactatttccaacagagggaattggccaaatgggattatta

SEQ ID NO: 30883 - DNA, 355 bp, Glycine max
  Clone ID: jC-gmst02400062g07d1
gggaccattaaaaagagaacttttatttaaagctaattaacttagccccggaaggggcccttccgacttcaaaagggcggataaattaaggggttattccgggctcttttaaaacaatttttgaagtgtcatttggactcggggcccctattttaacccaaattatgcttccgctaaaaattaagtgcaattgagcggggttttgggctggttacttatagggaaaaagagccccccaaatttttcaaaccctgggtggtgtttggttttcataaaacacggacaacaccataatttcaaggggggccccccgccctttggggggtccttgtttttcattacgaaccaaattggg

SEQ ID NO: 30884 - DNA, 485 bp, Glycine max
  Clone ID: jC-gmst02400062g10d1
ctctaaccaatcaaattttatggcacacttgtacgtaagtctgaactggttttccaagacatgcttgcttctagataactttttgtcctgaatcaaaccttttattttatacatcttgaaggcatcttctattctgacattatgcttagaccagatgcaagtgatggaatactttgttcatatctgaaaaaattgcttggatcaaccttggtctttacctctaccagtctatcatagtttcttttgaaatacttctcaccccagactctagcctctgcataactagcatttccaggtccattgacacctatatcaacgtctctatagttgatatatgaacttctaggtgaacttgacacataaggtgtcatataatcatagagcctccgaatccgatctagatatctgttagcaacatcttcaccctcctctttccaagtcacagagtattgaattttataaatgttaccagctctatgtggaaa

SEQ ID NO: 30885 - DNA, 407 bp, Glycine max
  Clone ID: jC-gmst02400062g11d1
aaaccccccaaacaataaaaacattttgatttttggggggactggaaacataaaaaccaattttgccttttataaatttaaacagaaactggctcaaaaatccctgggagaaaagaggcttaaactatcggcctcctaactgggggcacctaatttttggccccaccatgaaaatcgaataaaaggaaaaaccaaaccaagcagaacctacaaaggtccaataccctccgccaattgcataaaaaggctggcttccaaggggacctaacggggaaacttataacatactcaacttacaaatccattttttaaactagattttttttttaaaaacccaaagctttaaataccaaattagtcaacccaactttactgaaatatggcacaagactgggggcatgaaaaac

SEQ ID NO: 30886 - DNA, 389 bp, Glycine max
  Clone ID: jC-gmst02400062g12d1
aaaaaaaaaccaacaactggatttttttgaattgaatcaaaatcaattgcagataaacaaacagatgggggttgaagccctttttttcaacccataaaagggccgcacaaaaaaggctttatgacaacatacagcccaaacgtaaaaatgagaattgtttgataaaagttcctagggcccacaaacttggaataaaattgaaaagggggatcccccagcaaaatggattgttgcaattaaaaaacgtagagcttttttttaattaagacattgcccctttttggaactttaaccttgggatgagctgtttgaccctggcaacccttgttacttacaaaaacaatctccatggatctgccacaagcagcattagggcaattaatgggggg

SEQ ID NO: 30887 - DNA, 367 bp, Glycine max
  Clone ID: jC-gmst02400062h01d1
cattgaaaagcatccaattttaaaaaaacataggggaaataaacgataagatctgggaaccaaccacttgacttatggttcctctatataaaccgaacgcataaaagcattagacagtgttatcaatctgacgcaaccggtgtgtgtgagcttacgaggtaaattgttataaagaatatttattctcgcaaacacaggagctccaatctcggttgccacaatccataagatgatagtactttatcgccacatggttgtaaaaacctgcttactttaggcggtggaatcatatatcccgtgagggcttatatgggagtataggagaaaattgttttgactgagcaaactatggaggatgatgacacct

SEQ ID NO: 30888 - DNA, 563 bp, Glycine max
  unsure (1)..(563): unsure at all n locations
  Clone ID: jC-gmst02400062h02d1
caatgtgaagaagtttggttatgattaacgaaataattttgatatgtagattaaataaacacacgaagtacaaataaacattggtctctctaatcacaaaggagattaagtccattgtggtgtgccttcatgactgaattataccaaagtactacccttaacatactcagtaaaagccagagcaatcaaacccaacatagcaaatcttccattccacagttctgcatctgaggacatgaaccctttggacttagactccacgctgacaccttggaagagtggaatcaaggaagcaagggtaaggaccacacttgtccccaagaaccatgggatgccaccattggatatttgttctaacacaccttgccctttggctacttccactgccattgcagccacaaacccaatcatggccaaccttccattgatcctctcaggtgctggcccactgaatgccaacacatcagaaaacttagtgctcacctttggtgaaggagcagagactggctgtggcttgggttctactgatggtggcggtgtaactggnngtgcaggctcacttg

SEQ ID NO: 30889 - DNA, 514 bp, Glycine max
  Clone ID: jC-gmst02400062h04d1
acgccactctagaacatcattatttatttatttatttatttatttatagctcttaacacatataattccctggatacaacatgtatactggtcatattcaactctagagagctttatctgatatgatcatccttaacatattcaaagatagctaaatacttaactgtataatatatcacacaaacgtagagtgacatatatagagtaaataataaatataagtttaatttatacacacaaactatgagtatataacatcgttatccaaatattcaacaagaatttactttattaccgcatcatgttaaaatgttgcgataaagtggtgaaatcctattgaatgcttgtgtcaagatgctttgtaggatcaaagtgtgtataaattaaactggttatctatatatatatatatatcccacactttaattataagaaggcttaattaattaacaagttggaaagggaatcccacaagaagcaacggtttttcgggcattaggagagttaacatact

SEQ ID NO: 30890 - DNA, 295 bp, Glycine max
  Clone ID: jC-gmst02400062h05d1
gagaggacatatacgccactctagaacatcattatttatttatttatttatttatttatagctcttaacacatataattccctggatacaacatgtatactggtcatattcaactctagagagctttatctgatatgatcatccttaacatattcaaagatagctaaatacttaactgtataatatatcacacaaacgtagagtgacatatatagagtaaataataaatataagtttaatttatacacacaaactttgagtttttaacatcgttttccaatttttcaacaagaat

SEQ ID NO: 30891 - DNA, 471 bp, Glycine max
  Clone ID: jC-gmst02400062h06d1
agacgcgaatagaaaaacatttttataagaaaatttctgagatgttatatctcctttatggtacattgtacagagaggagctgttccagccctctagtagacaggaacataggacgaaccatgcaaattcattttcacgctcaaattaatccaagctcaagttaatattattcgaattccaaaattattaattgcaagggctattaacagtacaccaccatgaagctgacaaattggttttgaggatgcaaccctgaacttgatgtctttcttgccacgtagtatgtactttgttatttatttccaagggagtttaaaagtatctttccaccatccttgttttgagcaatttgcaacgattttgtccaaccgtgcaatgacctgagaaaatgttggcctcacaacaggtgttggatcccaacattcctcgatcaactcttttaactctggaggataatgttttgttttgat

SEQ ID NO: 30892 - DNA, 497 bp, Glycine max
  Clone ID: jC-gmst02400062h07d1
cactaaggttacattatgtactaattgtgaagaaacttacattttccgttgccaacacaagaaaaaagaaataaagaagcaagctaggatcttgtcattactaaaattggagccaggggtatattacaaatatttcacaatttcagaaaattcagtaagtggaaagctacactacattgcagtggcatataggcaattcaaacagcaactggtgagggagttgaaggagggacccgattttcagcaggaatttcaacaaactcggacaggagagctcggaattcatctccagacattgtctcagtctccaatagaacttccacaatcttgtcaatcgcctcgcggttgctccttatttggctcaacgcaatttcatatgcttcatctgagagtctcttgacagcagcatcaatgtcttcagcaagctcttttgacattgagtttcttgccatcattctcatgataacatcactttgagctgatgagtccacgagtga

SEQ ID NO: 30893 - DNA, 456 bp, Glycine max
  Clone ID: jC-gmst02400062h08d1
gggaaaggaaacatgatcggatcctccttgagtccttgtaagaaatgtttaaaaacaaaattatgagaaatacaaagcttagtcttcagacatgctcagtagaaactgcctttttatttttacccctaccaaactagaagcaatacacaaattttagtttaagactggcaatactcaaagattgcacagtcacatggatttcaaaactcatcatcagctttctctcacagggcctcagggccattaatttccttgtctgcgatcacagctccgtcaggtatttccagcttcacacccggttttgcaagaatacttgcttttcccttaaggattacaccagctccaaaccatacattgcctgccacttttagactgtcaagctcaacaatactggggattgacttgaaccggctcaagaaattgcttacctctttaaattctggccccaatttaatg

SEQ ID NO: 30894 - DNA, 476 bp, Glycine max
  Clone ID: jC-gmst02400062h09d1
gatgcaaaactgagatgtctatctataaagaaaaagggaactcaacaacatcatttatgtcttacccacaccatactcccccaaaatatcaaacgcagtaaaagtaaagcacaagggggaacaggcttcaagggtacaggaccgtatgaagaacaacaacataaatttacactttcaaggcataaaattaaatgaaccttccaatccaggaaatccaattaccatagttcttttcctgattaagttcaaataagagaacccaaaattgaaaataggacagggatatgacaaaagggttctagcaaggcctcacttggcacccaagtttgggaaatgcccaggatcttcaatggatggagcaggtgcattgttggtggaactttcacggtaaacaccttcgccttcgccttcaccttgtgaaccacgggcacgacccctaccacgccctggggtatagtatgcttccccctcagcag

SEQ ID NO: 30895 - DNA, 501 bp, Glycine max
  Clone ID: jC-gmst02400062h10d1
gggggggagggggagagatcaattactaaacggagctctgtccaaagccaacaaaacagagaagggagatgagaaccaggaacactgaacactgggcagagcagaattcggcaattcggtttccaaatccaaactaccccaaattcctcaacttaaatgtctggcgtctcacaagccataatgccaaattcatgttgcatgaaatcttcactaggtctgtaatacttgtctggagagtataagcccaggttagatacttgactagtataaaggcaagcaaatctctcaacctgatgagcaaagcgagaattctgataaccagttttcataagctgtccccatggctcgtgaaacctttgatgtaattttttctgagcttcttgatgacttaatcgcactctctctctttcaagctttaatttatcaagttcagaagataacttctgcttggaatcagcatctggattcttgaatttgagagaccatttcaaatgatgtatt

SEQ ID NO: 30896 - DNA, 506 bp, Glycine max
  Clone ID: jC-gmst02400062h11d1
ccataattcaaaaaatcgtatccattaatatttctgagcaaagatcacaacaaaaaaaggaaagaatcataggtatagattctcattatcagatctatacacataaaatgattatatattttgcaaaccaaataactcattaaagtgaatccatggtcaccatgagactgctagcagctgtagccggtgacggctagcaaaacagcaatagcaagtgcagctgttgcccatatatttctcccttgctggtggtttgacgatgcagcattcaaattcagacttggtgatggtgctggtgttgtgtctgattctgctgtggaatcaggtggtgccgggggacttttgcgaacaattgttggtgctggagctggtgcctgatgcctcctgtgcctgtgcctgtgccttctatgcttatgtgacgatggcgccggtgctggtacctctactaccggcgttggtgccaatgttggtggtggaggaacaggagctggagttggtgctggctt

SEQ ID NO: 30897 - DNA, 513 bp, Glycine max
  Clone ID: jC-gmst02400062h12d1
caaaatatcttcataatctatcagagcagttgctactgtattgtggaacaatttgtgatctatacataaaccaaaaactaacatgtttgtatcaaaagaatattcaggcactaaattagaaatttgttcaactcattcggatctaataattacttcaagtgcccttcccttctgtatgattataccaaacgaaagatccatatcattgcttacaccccaggaaggatatactgcaatactccatttaactcaatttcatcgacgcaaatttttctgcaagatccatagcttcgtttacatgtgatgcctctgtaccctgacccgtagcaagaccaccttttcctttaccacatctcccttttagaggccccaaagcattactcagccaatctgccacatccagcttaccttgacctcctttctctggcaccccagcacaaactacagccttgttagtagattcattcgtgctaaaaaccatcacagataagcctttctggtccatgacttttg

SEQ ID NO: 30898 - DNA, 485 bp, Glycine max
  Clone ID: jC-gmst02400063a02d1
aacagaagcgaccatagcataatactcttgttttagaataatttcatagatacaacagtagatcccgtgatccagtattcaacaaattcatcacttctttctcacaattacataactcatcgtaacactctcggtattaatatatatagcatatggtgtagcaactagctacaacgttggaaaattcagatatgatcttttcctggttctggtttatgttgtcatcacactcatgagaagtactccaagtccaagtgacatccacattccgtacacagcgatcttctcggtgccagagttctgttcagtgggattaacctgtgacgaatctgaagatgatgactcgtccttatcagctttaggtgcctttgcggtgtcacttgaaggttctggagccaaagagggtgattttgcaggtgccttggtaactgcaaagaagttccgtaggaagaagcactttccccaccttataaatagcaagatgc

SEQ ID NO: 30899 - DNA, 528 bp, Glycine max
  Clone ID: jC-gmst02400063a08d1
aagaacaagcttttattccacctctcatacaaatattattcagcaattcctaattccatattgggtttaacaatgggggcaacatattaaaggggcaaagatccgtaataaactacatcggctgagcctgtcatataaacatgattatcttcctccctccattcaatctgaagaggtcctccaggtagatcaaccgtgcaattcctcccagcacgaccctcaagaactgctgcaacaacagtagcacaagctccagttccacaggctagggttgctcctgctccccgctcccagacacacattttcaagtgagaattagacaacacttgtacaaactctgtgttagttcgtgcagggaacacctcatgatgttcaaattttgggccaatttctgctagcttcaattcatcaacaagcaaattctggcttccttctctactgaaagttacacagtgtggatttcccatgctgacacaggtcacatgccagataactccatctacaactagttctgatttaacaacagca

SEQ ID NO: 30900 - DNA, 526 bp, Glycine max
  Clone ID: jC-gmst02400063a09d1
acttaagttattattatctgtgtcaactgctgttgatagttttacaacattgttttctaagatggatgatcgctttgaagattttcaaagtatataaaaatgtaatatggcagaattttattccttggaccaatgatcaattctcgtttgatgaatgtagcattagtttaacaaacatctgcaagggaatttcccaaggggctcaacaccatccacatataaggtatggtggcatgttattgctccttgaagagttcacgtccaataatcattcttctgatctcactagttcctgcaccaatctcgtagagtttggcatctctcaagagacgaccagtaggatactcattcacataaccattcccacctaaacattgtattgcctgcaaagcaacctgggttgctctttcagctgcacaaagtatagctccagcacaatcctttgggtcaacttttccgttgtcacaatcccgagctactgaatacacattagacctagaagactgtaatgaagtatacatgtcag

SEQ ID NO: 30901 - DNA, 475 bp, Glycine max
  Clone ID: jC-gmst02400063a10d1
gcaacttatatcattgttaagttgaaacggggaaaagtacattaaaaaaacgagaaaagtaaaatccaaatccaaaacataatgacaagacaggttattatctaaacttcaaaagggtcttcgcaaaatcaagaacaacccatgacaattggtctgcttaatcgacttcctcaattttgggtccagcaccgctttcactgccagcagcaggaccatcctcatccatggctccacccgcatcaccaccagctccttggtacatctttgctatgatggggttacaaatgctctccaactccttcatcttgtcctcgaattcgtcagcttcagcaagttggtttccatcgagccattggatagcctgctcaattgcatcctcaattttcttcttatcatcagcagacagcttggaagcaatcttatcatctttaattgggttcctcatgttataggcgtaattctccaatgtattttt

SEQ ID NO: 30902 - DNA, 484 bp, Glycine max
  Clone ID: jC-gmst02400063a12d1
gcacaaaacatttatattcactaatagaaggaaaatacacatagtaaataaaatagaacataaaattaaacctggatacacgtttaatgaatttgttttcatacatccatgtaaccttgtattaaagatgatacaaatgttaatgttcctcaattttgaatcatatagatgatggtcactcgtttccccttatgacatcagctttaccataaactggagtaacaattccaagaatcacaaagccacctaaaatgactatcagaatgcctaaggaattgaccagaagtgcctcattggaatagcgtgatatgatgttgttgacctgaaggaatgtagctttttctagaataccagtagcagttgtggctatagccaagcaatagatatagataccaaagaacacatgccatggcaataaggcagctctactatttcttgaccctcctgggtaccaaaatgttgcaaagccagcaccccactggat

SEQ ID NO: 30903 - DNA, 466 bp, Glycine max
  Clone ID: jC-gmst02400063b01d1
ctccaaccagttaatatcatcaatttatatattcattactaattaattggtgtcatctgttaattagtaaaaaagacaatgaaaacttgtacaacatacattttggatattaaaagaaaaggggctaataataacaatgacaaccctcatttgcacaacatctggcaaacaaccaagcaataatttaaattttttagtagaaaaataaacaaaaggattagtcaaactaacaggaacaaagaaaatgaactaagccccttatcatagtagatgaccaaggagaaatagggagaggatggtggatacatcactcgtgggagattcttctcacatcatctttgtactttcttcaatcctgctttacctgttgttatacctgacaatgtaacaggtagcatatatgatacggttgtttgaaccacaaaatcaattctatttccaaatctttacagatttgtcatgactg

SEQ ID NO: 30904 - DNA, 502 bp, Glycine max
  Clone ID: jC-gmst02400063b05d1
gatgattaaactgtataatgaagatgagaccgctcaatctttcactaataactgcaagagtaaattaaaactctcgcaaaacattgatatcgttacaaccactgatccaagtgacccttattttagaatacagttacacgcacaagtgcacaacacaagaccataggtaaaaacataaatggcatgaacaatgagtcaaagcaatggcagaacaataatattaacgccaccaccacttgtaacagtgcactcagttcctctgcagtagcagagaaattagacatagcccctgctcttcaaactctccactgcatccttgatgatttgctcaacaggagtgaattctagacctaaatcaatcagcttctttgatgcatcctttccacttgctctcaacaaccctggttgggtatcctttggcaacttagccacatcgtattcagggtataactcagcaaccttgtccacaagatcactaaagtgacgaatagattccacacac

SEQ ID NO: 30905 - DNA, 471 bp, Glycine max
  Clone ID: jC-gmst02400063b09d1
aggtcaaatttttttaaacttatcttccaaaactgtgtggttgcccccaccaaactcggcaagcacaagtttcaaaatgtatactcttgtataaatgtcaagatccaaacttataatatgtaaatactgatatttattattacttcttaccacaagcggcttcttagattatatctagtggacccaacaactaatcacaatgctcaatactcttaaatttgtgtttttcaccatccattgttattattcaagaagagaaaaagatccaaatccaaaaacaaactacaggtccacatctgcagatagcctccaatttattctcaagcaggtattagaaaatattgaaggcacatccctcacaccatcttggaatgttggggtagaactaactacacagggtatttgtatagctgaagaaccttctgccaagctggtcggttactaatatcatcccaccaagcactcacatgc

SEQ ID NO: 30906 - DNA, 469 bp, Glycine max
  Clone ID: jC-gmst02400063c02d1
agcgtaaagcacagtaagtatattggatactaattacaataagttacatttttgtgtgaaaggactagaattataaatgatgcaccactaacttagttgggtgcagataaaatgacatctagacttaaccttgtaatttaggtgaatgaaacattagcggataccggcaaagtatgccaaaggtccaacaaaagcagcattgatgtaagttgcaggctcagaatgactgtaatcactgcggtcatctggaaatccgtcattttggtttggacctccgactatggctgcaaccaatatgttaggattaggattcatcgaatggaaaaatgggttgaaacctccatcacaccctatgctttgtggatgagctgctattgaaggcaaggaagatcctctgtggtgaattctcttgggaaagtatggaccatagcctaccatgtaagacaattttattgggtttgcacctaaa

SEQ ID NO: 30907 - DNA, 545 bp, Glycine max
  Clone ID: jC-gmst02400063c05d1
gccatcagaaggtttttttattgtattaggatgtcttgtgaaataatttcttggacaataatgctacagtgtttggttgctaaaatcgtctgagatatcaaacactaaatatgtttagacccgcacaaacggctaaaaaataagatgatcgagatcatcacatgtctactctagcgctcctgtggctcattactgctgagcgcactgcactctctgagcaccaccatgcatatcctcatcctcatcatatgcctcctgctgagcttgttgcctcctccttgtctcttcctccatgttcacatcatggagtgtggtctcctcacactcatccagctccatgtctgacaactgtgatgttggctttgatggcagaacagcctccaaagccttcacctgatcaagactcagggtatcaggaaattccactgagaaatgaatgtaaaagctttcccttcaggaagtgcctctggtagtttggcattccctcatcatttattgccttgaatgactcaggcttaacaacctccccagggtttgatttgatc

SEQ ID NO: 30908 - DNA, 430 bp, Glycine max
  Clone ID: jC-gmst02400063c08d1
ggaaactgatactgagtcataacccttcaagaattattgggaaaagttttgggaaagtagacttaaaagactgaatcttgctctctctcttgaatatgattaagctcaacttaaaattaagtcttcttaggagcaagcttggccttgatgtcatcaaccttcttagtatcaatctggaaagcctgagcaagaacatcatcaggcacagttggggttgaagtgaaaagagctgcagctatagacactgggccagggagttggctgttgaaggcaaaaagcacaaaagcaggcttatccccattgttcttctgatagggcaccaaaccttttgggaacacaaagatttcacccttcttaattgactttgagatgagtttattggctgtggtgatgaatccaacatctagttgtccatccaacacaaacacaa

SEQ ID NO: 30909 - DNA, 459 bp, Glycine max
  Clone ID: jC-gmst02400063c09d1
aaaaatcaaacatgataaaggttatataagggggagtaattacaccagtaacttaggcaaaacaggtatatattgatcttggaaatagatttgaagtgaaggttcagatctatcgtctacataagaaactagcaggaataggaaaactaaaattgcaaacacgcctcaaatgaagaagccttatttagactaaaaagggcattctagagtttgcgtaaaatgagatgagccccacgctcaggctgaagagtgataataaaggagggggcatgatcataggagggggaaaaatggagggagaaacgttgcaggatcattgacacagctacttttgcttctaacaagccaaagttttgtcctatgcaaagtcgaggaccccatccaaatggcaagtaggaaagcttgccttttgttgcctttgatactccttccgagaatctttctgggttgaattccccg

SEQ ID NO: 30910 - DNA, 502 bp, Glycine max
  Clone ID: jC-gmst02400063c10d1
aatgatcaattatttaattgtatacatacattatataccaaaatatattcgaattatagaagagaaaggaaacatcaaaagccaagatatatggcaaagtaatataatctatacacaaattaacaatgagtagtgtccactccaaactcatttcactctcatttgaaggccaaagtagttgaaatatcttgtctacttgttgctttctttattaagaattttttgaaagattcaagaatggaccggccaagaatctcagccaaggaatgctcaatttgtggcagaagatggtgagccagagggcttaaaagcagcttgttcagcacaggagagaacttcattaggccctgcctcttctctgccaacacccaagagatcaagataataaagatagtgtgaaatgatgttgttcatggcctcattatctgatccctgaccacaagtttgatccccatagagcaagtttattgtggcaccaaatccgggtacccttttggacaat

SEQ ID NO: 30911 - DNA, 548 bp, Glycine max
  Clone ID: jC-gmst02400063c11d1
gtatgttgagaaataaaatttaacatcatacaattctgcattcccatgggcaggtaaaaaattgttgaggatgatcaaaacacatgcttcccagctgatcaaacaccaataattaggagaactgcttccctggaatgactacatatcaaaaacagcatcagcaaagccatataaatcagaacctccactgcgactagaagcaccaacagagaggtgctctggcacacctgcaaaaccttctgtggatgttttcccatacaaattattcaatgttgatgcagattgtcccacaaaactctgtccaactgacctatcatgagacaatgccccttccccaattccatgatatctatacatatccccctgatacccagaaaatgaaccacccatagctcctccaagcatattagccccacttgccactgcacttccaagatatttttcagccaaagaatccgaagcagatgctgcagtgagataattattcgggtaattgccataggatctaccatccagcaaatgtgccgacaatgaaccatcatatgagc

SEQ ID NO: 30912 - DNA, 502 bp, Glycine max
  unsure (1)..(502): unsure at all n locations
  Clone ID: jC-gmst02400063d04d1
aatgttaaaaatttttttaataaattctaaatcaatctttttagtatctacaatttacacacaggacacaaccattggacacaattacggtatgaagacagagaccaatatcaaggactattttgctttggagtggccaactagatgcttaaggtaatttacacaaacgtatgtttccacatgatctgcttaattcctttaccaggatttaagaaaccacaatcatagttcattccaagcacagaaagtatgtttgatgcccctctccctctaatctcctcaagcgataacatttttcccattaaaaatagctctgaacattcctcattgtcacctaccaccagctttatcagccgcaggaacttcttcagggtaactggatacatccaagtcaatgagggtcaagtcgtatggttctgaaacagaatttgacatatccacaagcaatgaagaattagttgcatcagaaatntgaagcatcaggcatggaaccagaattttg

SEQ ID NO: 30913 - DNA, 588 bp, Glycine max
  Clone ID: jC-gmst02400063d05d1
cacaccaaaggtctgttttcattaaaagcaatagattcttcacaagcacacaccactcacttgacatatatggaacacatacataatccatatagcattacttagtggtggggcatttcttacttttatttaatgcacaaacataacaagggcaggaaggaaaaccacaaaattaaaacgaagatcatatagctgttaataataacaacaacacatgcaacataaaaaccacatgcagttgtggtagtggcatcttcttcagattggaaacgcctcaatgatggaagggagagcgttgatcttgatgatgttgtaacgcgcgaaaccggtttccttgaacagccacttccagttctcttcggtcctctctttgccaccggcgttgtgagcgagaagcatcatgtcgaatgcgatgccaacgtctgtgaagagttcgttgccttcgggtcgaagaacgtgatccacgattatgacttttcctgtcttctctggtattgccttcctgcagttcttcaagatcttgatgcagtgctcgtcgcttcagtcatgcagaatccacttcatgtaaatagcatcagcactaggaat

SEQ ID NO: 30914 - DNA, 442 bp, Glycine max
  Clone ID: jC-gmst02400063d07d1
attaaagatatttatatcattatacatatatggtttctcttctctttcatttttttcacaaccaaactaggaaaaagaaatacggtaataacttatataatcaactcactttctattcttttttttttctttctattttttccctttcactttctttcctaaactaaacatgccattaaagaaaatgactgcttattttcttccttgaaagtaaactatatatcattccattgttcgtcactcttgagtatgctgaggtcttgtgctaatatttcatgcatttctgctggatactcccctatgataattgggtccaaaaaccaattcatataaaatgattgagctcgctcagcagctaactggtctttccaggagtggctgacgggttcaaacaatttggatttaataacaactccaattttccctccctgttttttatgat

SEQ ID NO: 30915 - DNA, 154 bp, Glycine max
  Clone ID: jC-gmst02400063d08d1
aagggggcaacaactaatattatcattaatagtgagtcaatgacaaacaaaaaccccgtttcaaaatattaaaaacagaaagaccccgtaaccattggattagactaacacccataacaattagattagattaatactaaaaatcaccagacaa

SEQ ID NO: 30916 - DNA, 494 bp, Glycine max
  Clone ID: jC-gmst02400063d09d1
atattccataaatcttgtcattgagtgaattaacaccaccgttttgccacattgttagagaaggatatgatcgaattaggaactgggggcgtaactatatgcgaaagcatttagaagtgactcttttgaataaaactccaataggcaagcaaagacaacatgtagagctataaagttgatagaaatgctacaatccaaatgtccaagatggaagtagctcagccgcatcaaagttctagtgaccgtatttctgaaactcccactcgctattatctagaggacatacttgacgggtcttgagccatcggcttatgcaatggaagtgaaaagcatggttacaaactccccaagctacagtgcattcctcgctagtggcgctagcctggttggcctggcactcaatacagagatccatgatatggttgcggcaaatagcgcaattatccacaacaatatcccaagcccagagagaaacggcattccacttcttgatc

SEQ ID NO: 30917 - DNA, 368 bp, Glycine max
  Clone ID: jC-gmst02400063d10d1
gttctcttattttatgtgactagcgtaagtgagaatacaaaaaatacttgtgatgaccaccgaattcatcataaaattgcgaccaaaattgggtgtagttctcagaataagcagagagactcccctagcaacaatttacactcatgttagataattgactagacaaaccagatccaccaccatccaaatcccttttctttggcttcagtgatggaggtacccagttaccaataatatcagcatcagcatgttcatgatcatcataaccaatgacatcatggctaggctctttacgactcacagagagccacttggcttgcatgtatgaagcggttctccatggtggcacgtggagacccttctctctt

SEQ ID NO: 30918 - DNA, 489 bp, Glycine max
  Clone ID: jC-gmst02400063d11d1
aatattatatatttgagattcataattcagattaactagccgaactttatacagaagcgaccaattaccaaacatttatatatatatatatatataaaaaaaaggcaaccatgaccttaacacacccatcacaagtccaaaacacttgaacttgctcaagggcaagaaatgaccactttattctaagggtgtttgtttagacacaaaacaccagagtgcaacataatacatactacataattttgaagttttgaaactacatatagtttttatcattatttctaagggccatttctgcttgaagctttagctctccaacacctcacttgcaagtgcaggggttgcaggtgcagttagctccacatttgcagccatcgttctcagcgggaacacccatttcagcactctcgaattgagccttaactggtgccactcccatgaccaaggtctcggtggtggttgactcggtgtagctcaagtctgggtaca

SEQ ID NO: 30919 - DNA, 533 bp, Glycine max
  Clone ID: jC-gmst02400063d12d1
aatgaatatagctatgtacattataagaacaggtaagtaaagtcaaaattttaaaataaatgcccaatactatcaactgttttaaaaaatacatgtaaatactgtagactaagggaaaagcagggaaaaaaaatagagagaaaaaaaaaactccaccaaggccagttacagatttggccacctcgatctctctggaatttgcctcggttgctcaaacctgtcagattctgcatgaagacagcaaccagcatgcactgtctctaacttgaatctagaatgtttatttacaagtccactgcatccctataatttgacaatccatttgcaggtaattgcccgccgcttcaaaaaaaaatcttactgtacatccctccttttcggttttctgcttggtctctatcaacaataaaatgagtaaagaatattgttctaccactaatcctgacattgtacaagacaacattagtctggctctctttgactttcctttctgctgagagattggacaagaggagaaagtgcagtacccactg

SEQ ID NO: 30920 - DNA, 407 bp, Glycine max
  Clone ID: jC-gmst02400063e01d1
aaagggggaaatggcgaacccaacccccgggaaattccaaataactttaaaaagaacttttaaaaagaattttttttttccccgggaataaaattcccccggataaatttggttccccaaaaaaaaaaaagttttttttgcctgagtggggttaattatgctcccattgggccccaattttttcttccccgggggaagctgtttccactggggctgcaaaaatcggggggaccaaaacctttttgggggacttggggaaaaaaagaactgggaaaacagggggttttttccccgggaccctattttttatagggggcccctttcttttggccttttcaaaggaagatttgggggggacaaaagccccccttggggggggggaagcccctggcccccgaaaacttttt

SEQ ID NO: 30921 - DNA, 495 bp, Glycine max
  Clone ID: jC-gmst02400063e04d1
accataataatcttgatattcctcactgcaatttatagacaataggcacatcttttctgtctttcatgctttggtaaaattttcatgtcatcttccacaagaaaacattaattccttcatgatcctaatgagtggtgaaacaaataaaaagcaaagggcatgtatgaatagcaatgagctgtacacactagtgtagtgtaaggatctttttagtcccatactaatacacaatcatctacattctaacatctacatctatgctataacaacaaaatataggtgtacaaaccatcccaaagtaactcgttcctgttcccatgtctttgatgtcaaacgtggcagttatccaaactcagaagctcaaaagaatgcaaaaatggcccctccaatagtgtatcttatccaggaattggtacctttagctttgagattcatggctctacttcctttggttccttctgccattggacttggaatctggattctcagtcatct

SEQ ID NO: 30922 - DNA, 516 bp, Glycine max
  Clone ID: jC-gmst02400063e05d1
aacaaacagatttttttatatccaaaattagatttctcaaattagtaatgtcattgtaatatctagaattcactatagggttgttctcatcaatgatgggcagccatcagtgatcagacatgtggcttattttcttgttgtgctaggtacaaatttgatacatgtcttatcatgaaaccatgcttattatttatcctcttcaagtacacaacagtctttggatcagaatggtgccacttcacttcgagaaaagaatagaccagaaggacctccattaggtagcagagccaaccttacaacactttcagcaccttcatcaacactaagatagccagtattgtagttgagatctgttttcacaaagccagggcaaacagcattgatgcagaaagatgggtacttcttagcaagaatccttgtgtaggcagtcaaagcagcttttgagactatatatgcagaaaaagcatgtggccaccctttggtttctaatgaaccctctttaaatcttttagaaac

SEQ ID NO: 30923 - DNA, 368 bp, Glycine max
  Clone ID: jC-gmst02400063e07d1
cattatatatattaagaaacatccaattgagaggaaggagtaacttgtccttatgtcaacgtacaggttacccatgcgactttgaagaatgaaaatataaagacgttagggacatagcccagaaaaataatttggcacttcaacttagaaccatgtgtaatatgaatcatcatactgagaagaaaacaaaagaaaggaaaagaacatgacaaccaacagaagtgacatagctaaagtactaataaataataagctcatgtcagaaatctgcaaagacggcaaaaagatcaccattgatgtaatcattgtcgaccaaactaaccaagaagtggctgcccccaacctcttcaaccaatttcctggatgcc

SEQ ID NO: 30924 - DNA, 163 bp, Glycine max
  Clone ID: jC-gmst02400063e08d1
gaagtgaatttttttttttttttcctggtatcttacaaacaataaacaaaatctccatttcattatatgaatgatacatgaccaaataaaactaaaaatcagacaaaacctggtggcacattgaattagtatctccattacagttatgggcgttgcatccaaa

SEQ ID NO: 30925 - DNA, 475 bp, Glycine max
  Clone ID: jC-gmst02400063e09d1
atgttcaaaagatctttttctccactttaaaggatggatatctaggaggatcagaagtgtttgacaatgaattaacaataaagctgagataccagattcaaaagcattcctcccaccatattcaactattacttacaatttcaagattgcccaagttcaaaaaagaagacaagtttgatacgcgaaacataaataaaacaaacaaaatagtcagaaacataaactagaaactatagggcatatcttttcattgaaatttcaaaagcagcagaatcataaaacttattcaaacgcccattggttttccctacgaacttcctcctcttcctcaggggtgaagtcattcttgatgttgaatgtcttgcgaatttcctcaggagtctttcccttgatcatgtctgctactggctggcaagtaagggccaaaaggctcttgatgttcaagtagtttgcagccagaatgagatcgaagaga

SEQ ID NO: 30926 - DNA, 540 bp, Glycine max
  Clone ID: jC-gmst02400063e10d1
gaaagagagttttttatactatattcaatcattttggggtaatacagtataattttcttccctaaactgataatttctttagtaaagacaccaaagtaaattgcatagctatacttattgctcatcttcagttttaacttattgtgcacacatcactcggttcgtgctcttacatacagctctcgtttgtgttctgaattacactcaggcagcaagtaacttctggatatccttctcaatttgaaaaggagacgttgttggtgggtatctttcaataactttaccatttttgtcaaccaagaatttctcaaaattccactttataagatcacccaaaaagcctccagcactcgatttcagaaactggtacactggagttgtaaatggtccattgacatcaaccttatcaaaaattggaaattctgctttatatcgagtgcaagcaaattgcttaatatctttatttgatccaggttcctgcataccaaaatgattgcaggggaaagctaaaatctccaaaccctggattcttatattttt

SEQ ID NO: 30927 - DNA, 399 bp, Glycine max
  Clone ID: jC-gmst02400063f01d1
agaaaagaaaagcatattttttttccattacgattcctgaccatttagagagaaaaaaaaagttagtcccattggaagaagaaaaagcaaccttctggtcagttggccccgccatcacctacctaagggtttttcctttcacataaaccaaacccttaaagaaaaaaatttttaaaaaaaagagtctaaaaactaggaatttacatgagaaaatccttaaaaaaaactaagggggggggggattttagccaaagatcaattttttttttcatgggttcaaccccgattttaaattacgggcgcagtttcatcgggattttttatttcatgggaaattgggaacaagactccgaaaacctaaatggtggcgcggatcgttttctaaaacctcggactttt

SEQ ID NO: 30928 - DNA, 562 bp, Glycine max
  Clone ID: jC-gmst02400063f06d1
gaataaattaatttggtttagcatctattcatccatttcaatctcgttcctgtattcgtctgtcattcccttggtaacattcataaagacaagattacattcttgaataggaagagaaagggggggtagggatgatacacaaactatactatggtcaaaacaaaaatgccaataattaatgggtatatatatggcttataatcctgtagctggtaatttcatttgaatggctagccttctctttcatcatcttttggtcttgttgaagagcttgaacctgaggccattccaatgacttggctgtgtgtgaacctttgtaactgaatcatgcgcgcataaatcccatccgggtgatttttcaacaactgtgaatgggagccttgctcggctactttcccatcatcaatcacagcaatcagattggcattcctgactgttgatagcctatgtgcaacgatgatagttgtttttcctgaggaggcgcggtctagagcctcctgaacagacctctctgattcagcatcaagtgcacttgtggcctcatcaagaagcataagttcag

SEQ ID NO: 30929 - DNA, 328 bp, Glycine max
  Clone ID: jC-gmst02400063f07d1
ggggaaggggaaccgggtcccatagaaaaaaaactttggggggttttcaaaggccccctggggaggaacttttcccccctatgggttccccataaaaagcccccttaagggggggggtgggccctttgggggtttgttaaagccccaaaaaattcccccccttttaaaaaaaaaaaccctacccaattttttttcccccaatacaaagggggggggacccctttgggctttattctttgaacaagagattttttcggagcaaatccaagggccttttttcttaatcccggaaaattaaagggggcttttttaaaaaggaataaagccg

SEQ ID NO: 30930 - DNA, 540 bp, Glycine max
  Clone ID: jC-gmst02400063f08d1
gaacttgagctttttattatatatatatatggagcgaggagagaaaacatcacataaagcaagttttgcacaccaaagtactcattcattaatagcaatatatagattcttcacaaccacgcaccactctcttggtatatatggaacacgtatataacccatattacttggtggtggggcgcttcatacttttatttaatacacaaacataacacgggtagggatgaaaaccacatcacacgaagatcacatagctgttaataataataacaacacatgcaacataaaaccacgcacatgaagtgtagtggcttcctcttcgttagattggaaacgcctcaatgatggaaggaagagcgttgatcttgatgatgttgtaacgggcgaaacctgtttctttgaacagccacttccagttctcttccgtcctctctttgccgccggcgttgtgagcgagaagcatcatgtcaaatgcaatgccaacgtcggtgaagagttcgttgccttcgggccgcagcacgtgatcaacgatgatcactt

SEQ ID NO: 30931 - DNA, 409 bp, Glycine max
  Clone ID: jC-gmst02400063f12d1
gggccaaaccaaagccgatggttttataaacccctaaccccgggggggtcatgggaaaacaaaacattcccccccccctaaggcccctttccggtccttaaaaggaaaaaaaaacccgggccccccaatggggacaaaacctaacaggggggggggggacccaaaacggggcctcctttttttgggcggggggggtccccggttttggttaatttgcccctgccctcccaaaaacaaagaaaacaacaccccccccccccgggggaaacaaaaaggccccccttccatggcccccccccagggattgggaaaaacggcccttttccgttaaaaaaggttggggagcttccaccccgagggacccccctggggggctaccgccacccggtggggaacggggggcccccca

SEQ ID NO: 30932 - DNA, 493 bp, Glycine max
  Clone ID: jC-gmst02400063g01d1
ggtacatatcagcataagacaatttattatatatatattttaaaaatactgaacgaaaagctcatgaatatttcacaacttcctaatgtagaaaatccgaacagcttttctacatataagtgaaatactgaaaattgaaatagaaaagtttatacactaacaagactctttccaagaattatgtcatctgttgagaaatcagcctctttccggtatgttcctctaccaaagtccaggttgtacgagtctgcaagaccctctacaagcccaaattcaggttcccacccaagcactctctttgctttctcaattgatgcaaagaaatgctggtcacggaatggaaatgatttctttttcccaaagtcaaaatctttagggttgtagtgaatgatctctggctctgggaacccaccagccttagcacatgctcttgctaatccgtcaaacgtgacatacttctctcccgagatgttgaatactttcttgctggcct

SEQ ID NO: 30933 - DNA, 530 bp, Glycine max
  Clone ID: jC-gmst02400063g04d1
ggtacggcaaaattcctttggatagtatgattacagtaagactaaggttctcctttaacaacttgtgaaataaaaaactcatgctagagaaggcttttacggtctatcttaaagctgaaaccatgaaaaacaaagggaaccgacagcaccgtcattaaatagtggatgtcatgcaaatctacaactcgtccttggcatcatcaacatcaccatcatgaaccgcatcagcttcaggctttgaatcactttcagcctctacttcggtgtcatcttcctcctcaactgttgcttcaggactgatgtccaagctggtcttaactgaatcataaatacgggaagcaaaatccttgggatcatcaagcaggaagccactttcgaagagtgcggtctggtacatcaactgtgctgtatgtttcacaccctcatcctcagggttctttactactctctctcggagctccttgataatagggtgcctaggattgacctcaagaaccctcttgccgcgcatgtatgcttgcttgctagca

SEQ ID NO: 30934 - DNA, 514 bp, Glycine max
  Clone ID: jC-gmst02400063g06d1
ctgtacaaagattttttttttgatatggggggtctttgttcaaagtctgtgaaaggtgacaaggtgtttgctaaatcagatggacattctgataaccataaatctgatggtaagaaccacaagtccaccaacatgcctagtgatttgacaagtgcaggggatcatggagtggacaagaaaaaacaagaagctgatgctgctgcagggaatggttctgatgatttctatgatggaatcccacggtttaatgattcttttccccacaagtctaggtcagtaaaatcaaggcatgctgtggcaaaggtctcagaggtgagtttacgcctgggcagagctggtattgacgttttggacactctggggagcagtatgacaaatttaagtgctggtgggtttgtatctggagctgtgacaaaggggaatgaaattggaattttagcatttgaggttgcaaacactattgtcaagggttttagtcttatggaatctcttttaacaaaaaatattaagcatt

SEQ ID NO: 30935 - DNA, 559 bp, Glycine max
  Clone ID: jC-gmst02400063g07d1
atatagaattaatttttgtttactcttaacatgtaccataattccgcgatacaattatattataatactcgataccacatcaatgaggaaaatgtaacaccataagtgatactgatactgagtcataacccttcaagaattatagggaaaagtatagggaaagtagacttaaaagactgaatcttgctctctctcttgaatatgattaagctcaacttaaaattaagtcttcttaggagcaagcttggccttgatgtcatcaaccttcttagtatcaatctggaaagcctgagcaagaacatcatcaggcacagttggtgttgaagtgaaaagagctgcagctatagacactgtgccagggagttggctgttgaaggcagaaagcacagaagcaggcttatccccattgttcttctgatagtgcaccaaaccttttgggaacacaaagatttcacccttcttaattgactttgagatgagtttattggctgtggtgatgaatccaacatctagttgtccatccaacacaaacacaatctcagtggcaccagggtgtgtg

SEQ ID NO: 30936 - DNA, 553 bp, Glycine max
  Clone ID: jC-gmst02400063g10d1
aagccattcttttcaaaactttattacaaacttctttattggacatccatgtccttctcttcacggaggacagaatcataccataactttatttcaacttaaactagtattaggaattaattgaagtaaaactgtataaaaccgcaatatcaagggtttaatattttacttattaggcaccttaatataccccacatgtgaggaattggcccctctagtaagggtttgaagatcataagctacccaacaccttgaattctccttgtggtagaaataacccacacacttgcaatccttggtgcatttgtttccacaagtactctcactcactctatcccctgtagtgtatttgctcatgtaatgctcaactccttcaattttgtagtagtggaaatcactagccttgcatgatgtcacagccttggcagtgcaattgttgctccaaccaagtagtccattttccaatggacaagccacacattggttatcttcacacaacccaaatttcccacatctctcaggcaattggcactcactctcatcagaatctcta

SEQ ID NO: 30937 - DNA, 182 bp, Glycine max
  Clone ID: jC-gmst02400063g11d1
ggcttatggacccccactgggcgggtttatgtttagattaataaacaggccaatttaattcaatagacaattgggtacaaaatgcattgcatggggggggcattctaaagggaacgtaacaaaaatgaagggggggaggattaaaccaggcccattggctacgaaaacccatttggtggagg

SEQ ID NO: 30938 - DNA, 439 bp, Glycine max
  Clone ID: jC-gmst02400063g12d1
gaacaaaatttctttcattctcattgatgattgatcgtggcgcagtatctacaaccattaacacttaaatgtcttggtggaaaatacaaagcatgcaactgagatttcaagtgcatgtgaaatctctttactcaaacactattataacactggcactagacactttgccaattaagacagacagaaagaaaagagcatgctatctatctacatctattggaaaatcaaaaggaaaacgggtccaccaaacattttgtttcaccggccttcagcagaagtaaaagaatctgcaaatccagtaggccttgcagggatactactatcagtgtttagggggcccatataattaaactcttttttttgtgcctggggccatccctacaccatgtggagggggggagggttataataaatgccggaatactcctgggtgtcatca

SEQ ID NO: 30939 - DNA, 517 bp, Glycine max
  Clone ID: jC-gmst02400063h01d1
agaaaccgaagagcaaagagtattattaggcgaattatagatgtcctaattttattgaaggtagctcatcatgttttttttatgcttctcataacagactccattcactcactctatgaaccccaaccaaccaaccacatgatactgatattgaaaaggaaaggggaagggtttcgaaatgatatccttaacaccacaatcccctaaacgacgacacgagaaagaaaagaagagaaaaaaaaggctaaaacgacaccgaaagaaataacacagattcagagattaaagccgcgggtcaacgtcgtctaagagagttgaccgcagttggcgatgacaacgggcttggaggtcctgccggagctggatccgaccttctcgatgtccttgacaacgttcaatccttcgatgacctgtccgaacacgacatgctttccgtcgagccactctgtcttctccgtgcaaatgaagaactgagatccgttggttccgggaccggcgttcgccatggagaggatgc

SEQ ID NO: 30940 - DNA, 508 bp, Glycine max
  Clone ID: jC-gmst02400063h04d1
atatcacaacaatttattttataggaaattggatgatgtgggtcttgtttgttggagtaacaaaaatattggaattggaaacagtaagataaacaccgtataccttcattcgaatgcatcacattaccaatggacagattaaccagcttggcggaaccaagcaaaggaaaatattctagacaaaaactgcaacccaagctgcttgaaagagacaaccaaaatcaagtgtattaataatattaaatcaacttcttatcagaacccctaagattcaaattaaaccatttctttttgcctgatttatccttgccatctgaccctccatcttccccggggctctcgtcgccattaattttgctagaacttccattgcttaaattactaccacttccactaaaattggttgacttcacagtggtgaaggaagaatggataccatccctttgttttagaagctcatctacagattgtttttcttttgtgtatctgtctgtcacttcctgatagc

SEQ ID NO: 30941 - DNA, 274 bp, Glycine max
  unsure (1)..(274): unsure at all n locations
  Clone ID: jC-gmst02400063h05d1
aagaaaatatgcttgtcagaaacgcgtataaatggaaggacaaactaaaatagcccagtacatccacaattcataacgaagaacacgaatgcccaaaatctcagtaacattgagattagcattcaacaccttctcccttctgtaatgttttcaaagggagnnttnntgtctngttagtggccccgtcagcgaggctcattgcgtaaccctcctactttgggggaggttaccgtactgtgatgtgctccatagcccccaaaggattacgatgcaa

SEQ ID NO: 30942 - DNA, 495 bp, Glycine max
  Clone ID: jC-gmst02400063h07d1
aaccattaattaacatataaaagcatatgggatttcagtctttaaagcccgcttttacgtgacatccatcattgtaatgattcccatagaaaaccctcattctaaaagtcctagaaagaaagcatgtgaattaaccaaaaaaaaaaaagaaaaaaagatgaaagccccttcgtacacacacaagcttcctgacacaaagtagtaataatgtataactgggtattattttcttctttttcctcctttttccctttttctctcccaaaaaatggtgccccagcttgaagtcatggttttgttgatcagacattctccgtagatgaagggagaagtggctgagtgagtgatgttttggcatggcttgaggacctgatgccactgtgctctggggtggacgtaatagcagcatgttcctttgcaaactttctctcttcgcttttaccccacaagacaaagtacagtcccacaacgatcaacactgctcctatgatccct

SEQ ID NO: 30943 - DNA, 471 bp, Glycine max
  Clone ID: jC-gmst02400063h08d1
aagattcctctaatgagccttgcctattactgccttccatatgtaaatgttaatattggttttggttcaattttctttaacaaaagaaaaattataaagaaaataactatcaaagcacaggtaaagattgatacctttatttccatgtgaaactttttatacatcagcaagaatagcctctatttgcaggatatttctatctctatctgccttcactgttcattagttgagaaaaaacttcggtagcacttatgtctgaataaccattaccattatctccctctcttattacgttactagaaggactcccaggaattattgtagttgtcacattcactgtttcccgagcactgctatcatcatatgactccccttcttgttcactttcttggagctgaagtgcatattccaaattccacaatacagcacccattgttggcctatcaacaccatattcagccagacattttt

SEQ ID NO: 30944 - DNA, 459 bp, Glycine max
  Clone ID: jC-gmst02400063h09d1
acgacaaaatttgttcatttaatactctgagctataaagagggaatcctaccataaaggctaactccaagataaaaattgttatcaatggtagcatacattacataataaagaagggtgtcgaaaggaaataaaaaatacataacatcgacaaccgagtctagctaagcaatgcgggagggatggagcaaaaagtgaggaagatgctgttccaaaacgaccactagctctctaccatgggtcacttcatccaaaaccctatttccaaccctcctagcggcttcaaccagttgtcccctaagccgttgtgaaaacaagcagccacctgtcttgacacactctctataaagtgggaggtaagcaattgccaccgtcagtggggccggaagatctcttaagcaaataggagactcaccccatttaatgattctcacaaggttcatgtaatgctcttgcccta

SEQ ID NO: 30945 - DNA, 445 bp, Glycine max
  Clone ID: jC-gmst02400063h11d1
agcaccaattttatatttgaatttatgtgtaaaagtatttgaggggggttcatatacacacacaacgatggcaacaacaaaattactgaaaaaacagagaaaaaaaatataagatataacgtatacaacgctcacagataaatatattctgatatgataacagtgcactaatatttagtatcatttattcccaaaggttaacttaaatttcttcacaaggggggccttccaaacgaatataatcatacatgataccttggaagggactggtgcatcttggttgcgaaaaatatatggtatttgtgccatcaacaagaagagaacctggtatattcacatggtacagtcaatagatcccttgaattccatgtcttgaaattgagtttgcccttcctattaatccactggaaaatacggggtcgccttgcattggggatcattttac

SEQ ID NO: 30946 - DNA, 306 bp, Glycine max
  Clone ID: jC-gmst02400063h12d1
catattctatttacatacaaatatgtggcggcttacaaaactctaaatcttctagggtttacttaacaaaactaggaaaaatagttaaagcaaccagcaaaacattgggtactagttacacaaccatgccattgacctgtatgaatatataaaccaatgacacgagaaaagaaaatgggttttgtgatctttgcagccattaaaggtaggggatttaaaatagtcacaataagatacctacctacaaccgaagaatggttcgaagggtgtcagatagattttgaatagtccgctgctcctgggtcg

SEQ ID NO: 30947 - DNA, 549 bp, Glycine max
  Clone ID: jC-gmst02400064a03d1
aaataaattaaaaatctccttttgtaaatcaaaccattaatcaacatataaaagcatatgggatttcagtctttaaagcccgcttttacgtggcatccatcattgtaatgattcccatagaaaaccctcattctaaaagtcctagaaagaaagcatgtgaattaaccaaaataaagtaaaataaaaaagatgaaaaccccttcgtacacacacaagcttcctgacataaagtggtaataatgtatataactgggtatcattttcttcttttaatatcttctttttccctttttctctcagagaaaatggtgccccagcttgaagtcatatatggctttgttgatcagacattctccgtaaatgaagggagaagtggctgagtgagtaatgttttggcatggcttgaggacctgataccactgtgctctggagtagacgtaattgcagcatgttcctttgcaaactttctctcttcgcttttaccccacaagacaaagtacagtcccacaacgatcaacactgcttctatgatcccgcccaagtagaact

SEQ ID NO: 30948 - DNA, 507 bp, Glycine max
  Clone ID: jC-gmst02400064a05d1
gaactgtggaccactgtttattgccaatcgttgtgaaatacaacttcccttgaagggataagactttgatgttattgtgaaatatgacagaattctcacaatattaaataaaaaaataacttgtacttcttgaaattactctaggccttgctgatatttcagaggatgattatccttattgacagaataattcaaaatttggcaaaagaaaatatgttgctgcccttaacaaaatgtactctaccagattgccaccaccaatggcttggtttttcgattcagtatccatcaagtgcacaatatatgattgcaatttactaatacagaacagctacaatactcaagctgcttaatgaattttattgattaaatgcaccaaacgaaaaatgttctttttttgttttgtttcctttcagagacaaagggggactactctgcaaatctgaactagagaatctcaatagacttcaacatgccattgtttgttcttcttaagttgagaaagct

SEQ ID NO: 30949 - DNA, 551 bp, Glycine max
  Clone ID: jC-gmst02400064a06d1
gaaattaaatataattattttaaaatcgtcagattacaacacatactaaaaaaggaatgtaccatacagcctaaaatggagttacttatggaccacagcaaatagcttggggactgccagactacgaccatggataagaactcaaatggattaccaatttaccatccaccaaagtattaactgttcttataaacctaagaataaaaagtatagactaaaattgatgaaatataaaatgctaaaacaaacagcatttctttacttttcccaaaaatgatgggtatttatgagaaaagctatttacacaatcaattccaacacaactggttatgtgtctgcgtccaagattttgcgcaagaaaaaaaaggggtgagagcctttggtagaaatcataactcatatgcagtcacattagcagttttgcgggggtgtaagtagcattactagcgattcctataagtagcacacatatattcgtgccactactagacttcatttagcccaacatacaggacgacacagagaaccagagacaactgccatgggaaaat

SEQ ID NO: 30950 - DNA, 384 bp, Glycine max
  Clone ID: jC-gmst02400064a07d1
aacaaccctatcattatttttataagccacatgataggatttaatattagtaacatttgacatggaacatatttgcgattctcaagaatctcaaccacaactaaaccagaacaacaaacaaacagtaaagcatagaaaaattggtgtcttcaaaatgtttgacaaatggatacagccccttcacttgcagatactttctggtggcatgcaaatttagctgtattgaattcatgaagtgtcaacaagtgtatcagattgtgctccccattcagtccaagatccatcataaactgcaacatcagactttccaagacgatgaagaccccatgccagaatgcaagcagttacgcccgttccacatgaagtcacagctgggctttccac

SEQ ID NO: 30951 - DNA, 529 bp, Glycine max
  unsure (1)..(529): unsure at all n locations
  Clone ID: jC-gmst02400064a08d1
gatgcatgaacacaaattgaatttgctgctttattactaataattattgcaaacacaacaacagggtacaacacaaaaatgccacaataaatagaaaagcaatcatacacgaccatattaatctatgaacaaataaattaaagagatcactaaaaatggactgtacttttcacatttacttggcatttacatttcaaatctctctttcctgtttggatttgtccgtcacttgaacacaataagatcaggacgtgcaagatggccatcaaacaaatagaatcaacctgatctgaatcataaacattgtagcatagagatgacacattcagacttttattcaaagaacttagacaggaagatagatgtttcacttggctcaaaatagagcttgcctttattcctcgatgaaaactagaacatgattcatcatgaatggtgctttcacaatttgagcttacttgtagataggtggaggtggngaagcatagatataaaccggaggtggaggtgatttgtaaatgtacttggg

SEQ ID NO: 30952 - DNA, 566 bp, Glycine max
  unsure (1)..(566): unsure at all n locations
  Clone ID: jC-gmst02400064a09d1
agaaagtatcatgcttgattactgattgatggacagtctaaataacaatgtaaaaccatcgtagttcctctgtacatgaaaatagacggatcataacaatcatgcccaaatcactctcaaaattcatccattcaggattacacgagaaggacacaggcttatccatgtcattggatacaaacttagtagccacgaattgtattgatgatggtgttgtgccacgggtcagagaggtgctgcaataggttctcaaatggtcctttgcctgtcacgttgtgttgaactatgaatcccaagaatgccaacatagccaatctcccattggcaagttccttctccttggcctccaaagtaggtgcaaagttcaaggggttaaacacactaccagggtatccacactcatgttggggcaagctgtattgcttgaagatggggtcttggttgacagagccagggttcttgatgtcctgccatctccggatctcgacgtagtggaacaagatgaactcgatcacaaagagggtcgacgatgaagcanagtactncgatttcccagcatcatacca

SEQ ID NO: 30953 - DNA, 433 bp, Glycine max
  Clone ID: jC-gmst02400064a11d1
gacacataaaataaatgaagcatttatatataaaacgttgatgtaccagagtccaatcacattcaatgtatgaatgctttattttctcttcaaggattcattgtacaattcatttgtttgatgtgcttccgacctcagccaaattggcttaacaaagagacacaaagaggaaacaaaaggggaaaaactaaaaaataagtcccaagtcctagatctcaatctacaagaatagaaaaagctaaaaaaaatgtctcaagaaaatttacaacttacaagggcatagagacaaaactaacaaaagttgaggcaacgaagcgaagagaagaaatgttttgaagtaaaaagagaaaaatgtataacaatcatgttaatagaaaaattgaggaaggtaagggaaaaaaaattaggatattgtgaaaatatgttatactct

SEQ ID NO: 30954 - DNA, 572 bp, Glycine max
  Clone ID: jC-gmst02400064a12d1
cattcatcaagagattctgcattttatttatgatatacagacatgaatcaatatgatacatacgttcgtccattcacccaaaaaagaaatataaaaatatatgatacaacgtatacgtttgctcataactgtatgaaattggtgtaacagatgcaagggtcacgataagaacttgtttctcccatagccattaatccaatagctaatccatctcaagcatacaggtccccttctaagtcaactggcataaaaaatgattgccacgcccaccttccatggctccaagcatcaaggttcaattcaaagcaaaatgggcttacctatttgtcttgtctcctccatgcattatttccatgcacatatcctggatcaacaacaacataatgaggtggagcatttctcaagagtggcaccctgtcaggagcatattcatcatcactgtcataatattgatgtggccctagtgctttgagtatcattgccaataataaagagagtccctgtacagaaacaagtgacaggcctacccatttgcacatctcataatttgacctgataaaattcttgaactg

SEQ ID NO: 30955 - DNA, 515 bp, Glycine max
  Clone ID: jC-gmst02400064b01d1
acaaatatataatttattaatccttttgcttcattgaatcagtctcactaaaaccacatgattctttaatcatatgtaatataataatgccctaaatcaagggtacattgattattaattaaatagttacgtaattaattacatatattctggagagtcccataaagattcatgctgtatttcttcccatccactcaactccaaagcataatcatcatcatcagaaggcagcatcatcatagagtgatcatcgaaaccaaacctgagtgcctctgccatttgcaccatccacatctttggtgagtccaatggggactcattgatggcctgaatttgtgtgggtgagagtcccactctcacaggaaccacactacccttaataatgttattgtcattgacacatccttgatgattgttaataggtgacattgttggtgatattctgaacatcaccgccgcttgttgtgctgccacttggacatcttcgggtttcgaactcgttggacgtggcagcg

SEQ ID NO: 30956 - DNA, 450 bp, Glycine max
  Clone ID: jC-gmst02400064b02d1
aagaacgaggcaagccaacaaactaacttaaacgagattagatggcaactgaatgttgtccaatacagtttctaaagtggctgcaacatcccgcaggtaaaaactaaaacagaagcatttttaacacatacatatgtccaaaaatcaattacaagccaattttcttaaaggaagaaaacacagtcacggacacttagcagtatttgcctatatcccaattaatgctactaccagcagaaaacctaccctccctaacaaccccatctattgaataaaaaaaggaatctgaaaaacaaaaacaccaaccgcagccaccaatcatcttcatctttccaaccaccaactcaagcacgctcaccacgaatccttcttgccagctgaatatccttgggcataatggttacacgcttggcgtgaatggcacacaggttagtgtcctcaaagagccca

SEQ ID NO: 30957 - DNA, 333 bp, Glycine max
  Clone ID: jC-gmst02400064b05d1
ggaaccctccaaatagaaagggggcatttaataaaccaaagcaacccaacgcagcaaagtcctgaaactcggtgggcttaacaaaaatgtaatcgggggttccggccaacccaacacatttaaacccagattaataaaagcaattttgccaccgtcgatcaaaaacccagttttgggaacaaccattgcgagaagatgggggagacttaaaactttgtccgaaaaacaagcttccttgaaaagaagacacctggggttccgaaaagaaaccaaccttttttgggaccaacatcccctggagaacccgccccgcccgaatacttttttttttgg

SEQ ID NO: 30958 - DNA, 356 bp, Glycine max
  Clone ID: jC-gmst02400064b08d1
aaaccggaaggggggggccaaaaaccccgttaaaatgggcatgaatgccccctaacaaaaaaccccaatttttaaaacctcgggccccaagggggggggttttttttagttcggaaaagggggagcaaaaaaatttacccaatcaatggcccctccccggggggaaaacaagcccaaatggctttcccccccaacaagaaaaatttaattcatttaccataaccctttaaccccccaaaaaaaaacatgggggatggttttttccaggctccaatttttaaccaagcaacaaattttgaaggggacaaacccatgggacctttgaaaggccccttttttcccacaatgttttaatt

SEQ ID NO: 30959 - DNA, 369 bp, Glycine max
  Clone ID: jC-gmst02400064b09d1
aaaacacaatatgccagcatacagttgataattatttttcagctccccaaattgataacaaacggtggtaacattaaggggacaatagagttcaacacaaaccaaccttattttcaagggtcattacagacccattacacataaaatttttttttaaaaggttggggaaaatccaacatcgaacatcacacagaaatcagctccggtttaaaaccccccacgaagacgcaacaccaagggcagagttgactccttttggatgttggagccagggggggcccttccatcctctagctgttggccagcaaaaataagcctttggtggcccggggggattccttccttggccgggatcttcgccttcacatt

SEQ ID NO: 30960 - DNA, 347 bp, Glycine max
  Clone ID: jC-gmst02400064b11d1
ataaacgtaaaaaaaataattcgcattctttaggctacgttaaatacaaatgggcaacatccgcattttttatgatactaaagtaatatttacggtacaaagttactaatgtaacatcaccggtagcttcccagttaataaagggatacacacattgtaaaactacttatttgccaaggcacagagaagggggtaagcccttgcctagattagaaccatattggttgggggaccaaactttagaacagaattaggaatgaacttggtcccttcgatttaaaagggaccccccttgggtatttttggggacccttaacttaaacttgtttttcttttggccccttttg

SEQ ID NO: 30961 - DNA, 518 bp, Glycine max
  Clone ID: jC-gmst02400064b12d1
agaacagacttaattttaatttattgcaatcaaacacgcttttttttaatacaaaacagcatttctcaaacacgcgtgtttgagaatttgaataactcccaaacacgctccttacatacagaactggggatatgaaaaacaatatcatcggttcttttctgttattccttagtatatatttctgccccaaccaaataatggattgttttcgtataccattgtgggggtagatttgctacaagatgcattgcaataggttttttacttccttcttccaagattattaagccatgttgtaagttgacagcgtatgctgtgcattgtgatagctagaagaagcatgctaactttttagtatgttcggggaccagctgaagctttcagcctttcagtgctcttctaattagatttgaatcatacccgcaagaattggattataaagtcatttgcttgcgcagattagaatttggcatagtccctgccggtctccaaataatgttttctagtttgccacaaaa

SEQ ID NO: 30962 - DNA, 404 bp, Glycine max
  Clone ID: jC-gmst02400064c01d1
atctcaacaaacaagaaaatcaatacaaacttgattaagataccatatatatagtactagatataaatacacatatttcccagaagatcgacaacctaattaatagatacatcatacatgcatcaaactagttgaagaagcaggggcttcaatttcatacttaattcccacccaaattaaagcacttaatcttccatgattgccaaattaattaagtagcccatggggtccttcaaaaaccttgtcataggaatttttcttttcttatttttgaaagaagaagaaaaaaaaaaaaggactaaaagctctcacagcctatctcatcctccaagagcaactggttacagttagccgggggatgaagatactcctcacaaacatcatcacaagccaatttccgagca

SEQ ID NO: 30963 - DNA, 544 bp, Glycine max
  unsure (1)..(544): unsure at all n locations
  Clone ID: jC-gmst02400064c02d1
ggctcaacaaatacaaatattgatgcaacatttagataattgcagacattttgtcctctattgtatgttacaatctgctgtgatacaggaaacagggtattctacataaccatcggggggttgggtgataatgagtagcatgtatctctaaatctgcttttacagggcaaccgaatacaataaagataccaacaaaaatatcatattaaatagaaaaggaaagcgcagcattctcatatggaaacaacacttcacgagcctagaaacgggcattgcttccttgcatgctctggaaccaatttcaccaaaatctcagatgggactcctttcagttcatgggatttgaaattaaatagtggcggaaggaatcggccatttggcaagcgagtatttggatcacgaagctcgtcgaagaaaggatgcgtcaaggcatcaaaagctgtgcaccgcaagttaggggagtattgtagtagtcttgataccaaatcaacagcctctggaggcatgcgcttatggaagatctngtgccatggatgtgctttaa

SEQ ID NO: 30964 - DNA, 503 bp, Glycine max
  Clone ID: jC-gmst02400064c04d1
atagataaaaaaaaagttattagaattacagatataccctttattgataataaaaatgttatgtttacatggtagacaattatcatcctttatcaggttgcctacccttacactttggaaccttttaaatcatcaatcacagcttgttttttgttgatgcaacaatcgaacccatactttgatggtttgagatctcaaaccacaaagccatgagtgcaagtgacacatctcgttcaataaaaactagataactaataaagtatagtttgtagtaataaataaataagcatactcttttaaatgaatctatacgtctggacgctcattctgatcaaaaatacgattatggcaagtagggttgcaagggtaggcacaatctatctcacggaagggccttcgatcataaaaccaatcacccactgcctttgcaattgatgtcttggccaccactggggagtcatttctcagccatgtctcttgtattccagtttggcagtgtgcat

SEQ ID NO: 30965 - DNA, 588 bp, Glycine max
  Clone ID: jC-gmst02400064c06d1
aaagatcccaaaatacatcctcagtaagatcctcaaaaagagctggtgcatgttacttctatgtcgagaagaactgattatgtgggaacaattaacttagataaccgaaaagcaatacaaacatctatacaatctgccgtacaacaagcattaagatattatagttagttctccaacatccacaatagtaaactctgctttcgtccttcgatgacacaacttactgttcattccgaagcaaaatcaaaaaagggctccagcgtcttcaataagcaacctatccacttcctaatgctgcaaatagtgagcctccagctacaggtgttacttcctactgctacaattatctcttccttagccagaataagatacaatctttcagcagtgctacaatattgtccttcgcattcgaagcttcatgaaacttttcagtctctgccgctatcttcatcaccgccatcagcattaacatcaacggtgaaaccatactcctgatcacaacccaagtatgaatcacacatgaaataaagcgaataggatttccttccagcatcagcaggagcatcaaattccagtttggcttttaat

SEQ ID NO: 30966 - DNA, 542 bp, Glycine max
  unsure (1)..(542): unsure at all n locations
  Clone ID: jC-gmst02400064c08d1
gatagaaatgcatgaaagattactaattccagagaatattcaataccaaagcatatatagaaataaaaaattaacaaaaaataatcccaaaaggaaaagtttgacaagttaccaaaaaagggtctccaaaccaaaaaccaatacaaatgttttcatcctctactcttccaatattgttcccttctcgctgacataaataccatcaagaaacttccggatatccttgttcttaacatgacatttctggttaatgagagcacatgacctagaaacaagttcaatgtcgtttccatccaagaccaattcatctttgaccttttcagatctaacaaccgacacgccctcaagcatgtccactttcctcaccttcttctcgccgaggaaatttctgatctcgatggacttgctgttgttgccaatgctagcgttgatcggaaaatgtgcgtacacgaatctcattttgtatcggtattccttggtgacgccggtgatcaaattctcaacgtggctganggcggtgcggatggcngcggaggttttac

SEQ ID NO: 30967 - DNA, 563 bp, Glycine max
  Clone ID: jC-gmst02400064c09d1
aacagccagaaaaaaaatttcccttagcattgaagatattaaaacttacttattaatatcttcagactgagatttagatcacatcaatagaatatacatgagccattactgtttttcaccccacaaaaaagaaagtgaaaaaatatacaaaagcaaactattgactaatcaatataactgtgcgatcttacgagtctacaactatgcacaacctatcatacttccacatgtaacaaaattggtagatatacaatttctttcccttcaccaatgagtaaattggtaacacttttaataagtgctccagcgagatatagaaacaacagctcgaaaaggacaacagttcatgacaacaatcattttgccaatttttctgattcttcggcattactattctcagcaaatgagtttaaaaactgaataccattatgcttttgagctgaacttcccccaccatgatcgccgacttttttccgtttctgatttataaagccttgttttagtctcgcgtaatctaaccttgtatggattcttccatccctcaaatttctggttaagtttcc

SEQ ID NO: 30968 - DNA, 515 bp, Glycine max
  Clone ID: jC-gmst02400064c11d1
aagcacaaaagacgtggataacttgatattattttattacatacatgcatagatagcctgctctcaaataagtcggcaggaacaaagatagagagattcaacgatcttcaaatttcacatttgccagaaatatataacagaaaagaggggtatgggatatgagttaagttttgatcacattcaactacactatcccaaaccgatactcttaagactttgaacttcacttgtactctaggatcatgttgttctcaggagctaatccaacacaagccctcaggatgttttccagcatagctcgctgctttgacaacgcattcaccactggtgtacccggtggaaccagaggggccttggtcatgtaactaaggatggtcgcaaactgggtggaatgagtggaattttccctcattttcagctttaaactcgattcgagtgctgagctcagcaagaaggaccaagtccaagataataggagcagctaacagtgaatcctcacatgtgttgtgcaacac

SEQ ID NO: 30969 - DNA, 379 bp, Glycine max
  Clone ID: jC-gmst02400064d01d1
acgttaaccaaacgttgttttaacgaggtttgaaatacttctaatgtgaaaaatgagaatacacccaaacaggcaaacatgactttagtagaaagaattttcaaagtattgcacctagcttattttttttacattgccaaagcaacctaaaattgattatgcttggtatccaaagccgcattgaatttcaacacatttcgagcacaaaattctaactaaatcttcatccaaataacaagttaaaaactggagggaaaaaaacatcgcacctaattgagtatctaattttccgtcaagtgttcgacgattgtctcaatctgcgaagctgatcaatccatcgatcatcagcatctcgaccagcccaattgggaaccactcc

SEQ ID NO: 30970 - DNA, 532 bp, Glycine max
  unsure (1)..(532): unsure at all n locations
  Clone ID: jC-gmst02400064d02d1
acaacaaancctaatatgctgtcatcaatatatattgcccactaaaaagtttatgacacccaatctcgtatatagaattatacgtaagaaatactcaggtattatatgcttaaatgtggtgcttccatctttcaggattagaagacaaaagcatacagcattgcactagctagtagcgacttttgcacttttccatggctctaggtgctagcccaattgcttcagaactcttcattatcctcagcctcttgcaagactcagtgaacatctcccacggaacatcaccaactagcatccaatctccatccttgtcttcataggtaagaacatattctgaaccatgaaggagatccatcaatctactttcacttaaattttcccgacttgaaaccccatatgagccacattgactgagtgtaaaacaactaaacatcttttcaagtgccaaagagaggtccttgtaagtggtaaaactattcagatccactttcctcaaatatggggcgcnctccatgctgactntaacataaag

SEQ ID NO: 30971 - DNA, 591 bp, Glycine max
  unsure (1)..(591): unsure at all n locations
  Clone ID: jC-gmst02400064d03d1
atatataaagcacttctgcacaccaccaacctcttgaattctcaccaaattaaacagtagtagcacactttacaaataaattaagagaagaaaaaaaaagcatagaatggagagagagaaaaaaaagagagatagaaaaagaaacatgaattacaaaggccatgacttgaatcagatcaaaattcactggaaagaggtgcatggtcagagcgaatgaagacattgccgtagataaggccagccaaaccaccaccaataagaggtccaacccagtagatccagttgtcatggaagtcaccactaacaactgcaggcccaaaggagcgtgccgggttcatcgagccgccagagaatggccctgctgccaagatgttggcaccaacaatgaaaccaatggcaattggtgcaatggttcccaatgatcccttcttagggtctgctgctgtggcatacactgtgtacaccaaaccaaatgtgatgatgatctcggtcacaactccttcaacagctccaaccccagaagccacactgtggattggagttggcaagcctnctgtgacatagttgagaagaaaacatgccacgatggag

SEQ ID NO: 30972 - DNA, 431 bp, Glycine max
  Clone ID: jC-gmst02400064d06d1
gggaaacaaatttaaaacagtttgaattcgaatattatagattacaaccaggaatcaagtgctagatcgagactgaaaaattacaaattaaaatgattcaaattttcaacaatctttcttgaagaacaagagcattctctattcacatcagtaatgaaaacctaactacaactacagagcataattatcaaaactaaaaaagaaactacaaaacagagaggccaaaagataatctaaatttgataataaaaaaatcaagaaaagcgaatccctatttaagagtcatcgtcagcagcagcgcccttggatgagccaccggccttcttgggaaggagaagattgtgaatgttgggcataacgccaccgttagcgatggtgacgtcaccaagaagcttgctcaattcttcgtcgttcctcaccggcaattgaat

SEQ ID NO: 30973 - DNA, 446 bp, Glycine max
  Clone ID: jC-gmst02400064d08d1
aggaaaaaaaatcacgaccgaattcatattcagaacatcgataatttacaacaacttaactcgggctcattctttattgagaaagaaattcagttcttatactgaatctcatgcacatttctaaatcattctctcattctcaaggtctataccattaatgctccctccatatttctaccaacctattcaatgcaactactggggatccaccttcagtcattgcttcgggggcactggttttcattttgaaaatcctctggctaatctcttttcccctatccgagttcatgagctccttgactcgggcacccaactcgggggaactcactaacccgttattgttttggtccaccggcaaccccacctttattttcttcaccaaaatcaccctattcagcttctgctccgcgtacaaaggccacgccaccattggaaccccttcacaa

SEQ ID NO: 30974 - DNA, 491 bp, Glycine max
  unsure (1)..(491): unsure at all n locations
  Clone ID: jC-gmst02400064d09d1
aattataaaggaaatatcatttattcaaacctaaagaaacacagtaacacaccatcacaaactcatgtaaccctgccaataaaccatcacccctaaactccagcaccagcagcttgctcacttcaatacacaactcccagaatttctcatgtcaccacgtggcaagcacgctgatgtggagccaagtgttgggcttacacgtaggggtaccctccataatacaaccaaagacttaagcctcatataataatattaataaaggaaactaaagaaataaaaagaaaaaaaaaaaagaggcttttcaacatggcatgcaaaatggtagacctgatccccacaactaggaccatttttaaacttgtttttctcactcacactgtccataggtctaagcttcagtcttctcaacaggaacctctactggggtttcaactgactcagctggtttgctctcttcctctgnggctgctggtggtgctgctgctgctgat

SEQ ID NO: 30975 - DNA, 470 bp, Glycine max
  Clone ID: jC-gmst02400064d12d1
ggccccgaaccagaaaataaatttttaaacatgaaaaattacaagttttaaactggtctaatacataacatacattccgggaataaacacaagttcagtaatttgttcctcaacaagttttaaagtccaagggaaaagccagcttatttgcatgaagttgttaatacacaaacccctcataagttataaaatcataaacccttaaaaccaggaagatcaatcccctggaatggggttttcacttaaccacacttcaaattttgcaatttaagggtcattttttggacaaccttgccattgctataagttatgcagcttttggttgccaggcaattatgcttggtggggtgtattcttgggactaccgcaccatttgggaggccagttaagtttattttcaaggcctctttaaagggaaagaagggaaattctgcctctcccattttgtcatttttggtaaaaggggcagg

SEQ ID NO: 30976 - DNA, 425 bp, Glycine max
  Clone ID: jC-gmst02400064e01d1
atctgtataaaataagatatatcgtagtattcaatggatgacttctttacattaactgttccaaatatctttacagccttaaaattctaatgatagcttcaattttttccaaaaatgattgaataagattaagttaaggttcaacatctaactttatgcgcatggcccgaatccatatttcattcgacaacttaggaaactcaagatattttcctaatcaatcaacattgtttccccatttgtagtctgaattgtggccttggtgctctgtaggcttaagtgtttcttcatttcctgagacctgccaaactcctcaatttttgctttaagctaatggcgggaataaacctattcgcggtaagatgagaacggttgaatggattagtactatcactaagaagatgcctctgaatgacaggacgatc

SEQ ID NO: 30977 - DNA, 501 bp, Glycine max
  unsure (1)..(501): unsure at all n locations
  Clone ID: jC-gmst02400064e04d1
cataaaagttaaaattcaataaaaaagcatcaaataagttttaaacagataaatggatgaaagcaactacacatttagtccacttcctcaatcttggggccagcaccacttccaccagaaggagcagcataatcatcctcggctgccccagcaccagcaccacccatgtcaggaccagcaccaccttggtacatcttggcaatgataggattgcagatgctttccaattccttcattttgtcctcaaattcatctgcttctgcgagctggttgctgtctagccactggatagcttgctcaattgcgtcctcaatcttcttcttgtcagtaggatcaagtttctcaccaattttgtcatccttcacagngttcctcatgttgtatgcatagttttccaaagcattcttggcctcaaccttctttttgtgctcttcatcctcagatttgtacttctcagcctcttgaaccatcttctcgatatcttcctttgacagtctaccc

SEQ ID NO: 30978 - DNA, 458 bp, Glycine max
  Clone ID: jC-gmst02400064e06d1
ggaaaatctcaaacttttaccatcaaaacaaaaaacagtcctcatcaaaaacaaacagcaacgaaaatgtttccgccgatcaagaacccagttttgaaggctacgggtacatgaaatcggggggcccttcaaaatataactgggaaaacaaacccctaagactttgcaaagataaactcctggaaaggaacaagtttttttgaaaccccgttgatgatcacatgggctagcaaaattgccaaaatgcaatcacttttttttggggggagcctttgggaccttggctccgggggggtctttcttttcaacacttttgatgactccaacagctacgggctgacgcatgtccctcacagcaaaacgaccaagggggggatactcagagaaaggttcaaccaccatgggcttggttggaacccttttaaccataccagcatcaccatttcttaaaaatttgg

SEQ ID NO: 30979 - DNA, 385 bp, Glycine max
  Clone ID: jC-gmst02400064e08d1
aaagaaacaaataagtattattcaagagaaaacatccttcacatgccatggctatgtattgatatttgcactcaaagctacggcaaacaaatggaattctattacaatatgaattacaagttccttgattggcatatcaaggaaaactgaaagtggttgtatgtggattgatttgccacagcctttatagacaaaccaaatgcttatttcaacacaaacacgtatacagaaagaaaccacttgaagaaaacagaagaaaacaaaactaccaaattggaaggggagcaccattccactctccaaggcattccaaaagtggatcaatgaccttccttgggcccatagcagtaaaaactttgtcacactcttcacccggtgagaaccc

SEQ ID NO: 30980 - DNA, 553 bp, Glycine max
  Clone ID: jC-gmst02400064e09d1
aattaagcgttgctcctgaaggatccaagagctttgattgcagaacctctaagaatgtattgatggtagattgcagccaccgcagctccaacaaacggtccaacccagtaaatccattggtcgtcccaggctttgtcgttgttgaagatcacagctggtccgaaactccttgcagggttaatgccggttccagtgacagggattgtagccaagtgaaccatgaagacggcaaacccaatgggaagtggtgctaacacaggaacatgagagtccctagcgttcctcttaggatcagtggcggagaaaacggtgtagacaagaacaaaggtaccaatgatctcagcacccaaagcggtacctttgttgtagccatcgctgacagtgttaaccccacctccgtacctgttgtagaacgatttctggaaccctttggccaacccagcaccgcagattgcaccggcacactgtgctatcatgtacaacaacgccctcaccaaagacaccttgcgtccaggaacaacccgaatgtcaccgcagggttgatgtgtccccc

SEQ ID NO: 30981 - DNA, 541 bp, Glycine max
  Clone ID: jC-gmst02400064e10d1
atagaaacttctgtgctatacatagcacatatatttgataacaatcatcattcaaaaaccacacatgtccgacagaagacgaaaaagtagacatcaaacacacgatatttcagacactctaataatcatcatctccttcaccatcatcatctccatcaccagactcggcaccaacctcctcataatccttctcaagagcagcaaggtcctcacgagcctctgagaactcaccctcttccataccttcacccacataccagtgcacgaaggccctcttcgcatacatgaggtcaaacttatgatcaatcctggagaacacttcagccacactagtggagttcgaaatcatgcacacagccctctgcaccttggcaaggtcacctccaggaacaacagtaggaggctgatagtttataccacacttgaacccagtggggcaccaatccacaaactggatggttctcttggtcttgatggtggccacagcagcattcacatccttgggcacgacatcgccccggtacatcaaacaacacgccat

SEQ ID NO: 30982 - DNA, 604 bp, Glycine max
  unsure (1)..(604): unsure at all n locations
  Clone ID: jC-gmst02400064e11d1
aacaagcattaatagaatttttatttctcacacaataaatacaagagattctgcaaactgaaaaagggatttcttactaaagcaaactcaaacaagaacaacttccactcatttggcatctaccgtagtagaacaggatcaaaagcagctctctgatagaacacacgtatgtattatattgaacatcttgcacagtggttcatttctcacagctattgcaacttaaaatacttgcaaagcttctgcaaattccaaactttctttttctcccttctttatggatatgacaaagtgatcagatcatgaaacaataatcaatccattgaatttgaatctgatttttggtttggatcgatgccaccattcttcatcttaggaagggacaacaaataggccaaagcctactaattaagcgcttaaaactgcattagtggttggtttaagtgtgatgttagtaacatcagcttgattattaaagggtgttctttgtacgaagaagcatgccccaataacaatgtagcacagcaggagaacaagggccttcatgtagtgagaagtcccatcctgtaaagngaacctgtgactattattgcaacgcaaggga

SEQ ID NO: 30983 - DNA, 476 bp, Glycine max
  Clone ID: jC-gmst02400064e12d1
aagaaaggtgaaccatccggaaaggaatatatttagaaaattgaccacgcggaagagatggtaaacatcatcgtcatcatacaaggaaaattttcgcaacagactcagcctaatcaagttgtcttaaaactacatgagacaaaatatactttgtttcaaggtgggggaggaaaaggtttcaaaaacaatggaattgacatgacagatgagttaaagactaacacaaaaacgagaaggcattggtaaagggacggcttttccttgttctgtcgttgtagaaaaatgatggacgatactctttttctatcaaatcctttagatcttgaagagtaggccaccatgtgtagcaaagaagggagcaaacacaagagactcaaccgccatgagcttaataaggatgttaagtgaaggtccagatgtatcctttagagggtctccaatggtgtcaccaataacagctgccttgtgacaatctg

SEQ ID NO: 30984 - DNA, 476 bp, Glycine max
  Clone ID: jC-gmst02400064f06d1
aatctgaaagtaaattgcatggactgaatcaaatgaaccatcatagtgtcgcttaactacaaagaaacattatttttgtaaccaagggactgaaacccgactaaacacagacatatattgtcctttgccaataaaactgtgcaaatttaactcttgcacagcctataatcatcgtttgatctaagtacaacctttcactttcttgtgtatgaaaaactaacattgaaaatcattttcaaggaaagagaacggcaagcaaaaagacgaaaaattaattcctcgtgactaactctcacttttatcacagtaccatgagcatgttgactaattaataaggattcaactagtgctgaaaactgacccaaaacaaaatttaacattggacctgatccagtagttcaatcagcgtatctgggaaggtgaacaaaccagaccagaagcatctgctccaatcactgcaagatcgcaaacattac

SEQ ID NO: 30985 - DNA, 450 bp, Glycine max
  Clone ID: jC-gmst02400064f07d1
ggcgaatgtttctaggtgttttacatgtcatttcttacagcgccacaccaaggaacaaaatgtccacatgatataaaaaggtagaaaggtagttgagttttggcaacgtaaagaatatgtaaaataacatataatacattcagtggaacttgagactggtcaagatgttgttgtgcacggggtcagccaaatgatctaggaggttttggtatgggccaacacctgtgacaagagcttgaacaaagtaacccaagattgccaacatagccaaccttccattcttcacttccttgagcttcaaatccttcaaggactttttattcttaccaaagcctagtgggttgaagaaaggtcctcctggataagctggctcaccagaacctccaagacccttctttagtcctaggaagtattgtttgcccatagagcctggtttggcccaatcttgga

SEQ ID NO: 30986 - DNA, 525 bp, Glycine max
  Clone ID: jC-gmst02400064f08d1
gaggctagcaaattaacactgtttctttccacatccatttatctgaaccttacacattttcaccactgccaaacagttcacacagttgccaccttcctcatccttccatggtagatttccagagctactagtagaatgagtagcagtgactgggctaccgtcaaacatgctaagtaacaatctgattcgggcactgatgacagcctaaacgcatgatatcttccacatccacagaacattagagagaatggaaggcttgttactactactcaaattaatattcacatacaggggaaattctacccaattggaacttgactctaagaaccggctaccctttgaataacttagaatcactaaaagaaaattgataatatacattgagatttgagattctaaacctaactctcttgatctggacaaccatagacaacggattcaggccggaatttgagccatactaactgcaccatacagctcagcagcacagcaatacttaccgcaaggattactaattacataaat

SEQ ID NO: 30987 - DNA, 477 bp, Glycine max
  Clone ID: jC-gmst02400064f09d1
agcaaagctctcaatatttattattaaaaaaattagaaaactatataattacaaatattacaatggaagaagcaacgaggtcgaccctgagttagtaataataataaaatgaggtcagtgttacttcagtatacatatctgcataacctaactaagctgaaatgtcaagcgctcaggatttcttcacatcgcgtctcacaaggctgtttctggttctggctttaaaaagttatgatattccagctgagtcatctcccctccatgtactggatcaaattggcatctatagaagcttccatccataccaagaataatgactgtattcttttggagaccaaatgcaactgtgtaatgagagccctcttgtaagtgaaactgagcaactgaccactcagaattgaagtacttgggcaacacccctttcaatttaatgaaggagcgagaagagctagatggggtaatggcagcatctgaatt

SEQ ID NO: 30988 - DNA, 391 bp, Glycine max
  Clone ID: jC-gmst02400064f10d1
gggggggggccccccgctcaccctttaaaaaaaaaatcccgggcgaaggttttaggttctttgggccggacgctaaaaaaaactttataaaaaggggggataggcgggggccttaaagggcttggccctgggccccctttaggggggtttcaaaggcccgggggggggggtctacggggccccccttgggggggggaaaggcccagccggcttttctccccctggttgggcccaaaaaaaaaggggaatcttttatttttgggggggggggtttgggggcccccccgggggggcttttaaaaaacccctgggggtttgcgtctggctgggggggaaaatttttggaaaaccctttctaggaggggaccaaccggctttttttgaagggggg

SEQ ID NO: 30989 - DNA, 479 bp, Glycine max
  Clone ID: jC-gmst02400064f12d1
ggcagtgggtttcacattaaaatcatatgaatggttaacagctcaagtttaaaactggtcaatgaagaaggggaaactcaccccataatgaggtttgatggacttacaacatcaatttccgcttaaattgacgaaataaaaaaaaaattttattgaaaagaaataagtaaaaaagaaatgtttttccccaccatcacaacatgcctccattttatatctcaaaatctgaagtcaggatccacatccattgcccagcagaatttcgccagcagagatttgttgaaaatcttttcaataggaacctcatgccttttgcaccaggcaactgtaatcctagggtcaaggtagtttatcttggatgtgcctaatgccacaggtttcagatcttcttttggcttcatatcacggtgcattttctcaatttttgcattggtttgagatatttttttttttagcattttgggactcaagttcttttt

SEQ ID NO: 30990 - DNA, 478 bp, Glycine max
  Clone ID: jC-gmst02400064g01d1
caacagggataagagtaccacccattattgaaataatcactcaaaatacagtaatgcacccgtataacatatcaaagtggcgtgcggaaaacacacaggctccatgaatatgtcccgagagcacgatggaggaggaggaggagtcaaacacaacacaaatacaaattaaaagataatcagtactactaggcagaaccgaatttaagagaattcgagccaaatatcttagctaaatggtacaagagctgaaagacaaggtaatttcttcagccctgaacctccaccacacttactcctcctcttcagcctcctccagccaattaacaaagggttccagcgccttcacaaaggtttgcctgcccttggagtttgttccttttcggaaccaatgaagaatggtttcttcagccagcacatcctggtcataaagagatctaataatctagggaacagcttcataagtttagcatcctcatag

SEQ ID NO: 30991 - DNA, 558 bp, Glycine max
  Clone ID: jC-gmst02400064g03d1
gaacttgtaatcacaaaagattttaccattattttcaaagtagacttctttgtacaatatgtttctgcactcactagacatttcccatttgttatgtccctaccgtacacataaatacatgcagcatttaattagaagaagaaagtacgtacgtactgtgccattttgatgatgatttggttttgctttgctatcaattttgtgttttggttggcgaggaacctcacaagaggaaacgttcaccttccaccttccgagagaaacatttttgtaaaatactaggtagataaaattcaacaccaagaacctaaatttgagcccgtggtattttgtcacatttatagatttgatatcttacccttaattttctttcatagacaattaaattcccgtgctaatgcccctcttccttcattcctatcgtttgcagggcatgtgactctatctcgttgaaacaggtaaacccaaaatcatgaataccaaagtcttgacagtccaataaccaagcacaattatccttccaagatggtaacaaacccatgttattactagtattct

SEQ ID NO: 30992 - DNA, 483 bp, Glycine max
  Clone ID: jC-gmst02400064g05d1
agcatccaaattcatatacttcatgattccaatatcctcctaaaacaggtggaccagtctatcatgagtctacatatcaattatattctttattcatatgaaaactacttctaaaatactactattgaaaccatatataccttataccgatgatatgagtcgtctgctacatctccattacttacattttttattttttctgcatgccataagtggaaattatacattaaaacgggcaatttacagtcaaaccctgttgatgatgaatctttcgatgctttcgttgaccagtagcatatgcattgattgttctgtgaaacaaatggacataactcccatctttcttagcacctggaagattttccggatgtgtgtagcaaattccttggtctccttccagtgttgggatgaactcattgataaacatgtagctgaagatagatagtgctttcactttctttgcaaatcctccatgtcaataag

SEQ ID NO: 30993 - DNA, 500 bp, Glycine max
  Clone ID: jC-gmst02400064g06d1
caaatataatatactacatataattgaaacagacatcatcttggggaagaaacatacatacagctaatgagtttaaattttacaacatcatcatcatcacaagccttaatgggcatatactctggtttttatttttattttcccttgaaaacaaagattcatacacacatacatacataggttggtttgaatagctaaaagattactatcatacatgctttcacgattgagaaagttgcttaatcttttcctcgagctggaccttattggctcccacaagcctctcaacttcctttccttccttccaagccacgaacgtcggcatcgccctcaccccatactcctccgccacaccagataattcttccacgtcgatattgacgtagtcagcgtttggatactttgcggccatctcgtgaaacagtggagtgatgaatttgcaagggccacaccaagacgccgtgaaaaaaatcacaactggcttaggggagtctttgatc

SEQ ID NO: 30994 - DNA, 557 bp, Glycine max
  Clone ID: jC-gmst02400064g07d1
aaataaatcgagattgaactcggaactttctttctttacagaaaaagaaaatgttaaaaaaaatacaaaaaaacaccaattaataccaaaaaagaaaagaaatcaacgaaggaacaacagctgttttagctggcctcctaagtaaagaattgtattcttctccttctcttcttttcttttctcttttctttttttctttttcttttcttccttccttttagccccaatttcccttcttcttctaatcttcttgaccaggttctttcttcttttttttccctgtctgttttaatctgtgacttaaaacctaccacactaaaaaaagaaaaaaccctttccgaaaaagaaaaaaaaaaggggggggaaacaaaataaaataaaattaatttacaggtttgccgtgattgtagccgtaataggaaaggtaccacttgacgaacttcttcaacccggtttgcaaatcggtggtgggcttgtacccgagttctctccgggccgaactaatattcgcgtgagtaaacggaacgtcgccgtttccaggcatgtccacaatattc

SEQ ID NO: 30995 - DNA, 503 bp, Glycine max
  Clone ID: jC-gmst02400064g11d1
aaactgagcaatgaagatgagaccgctcaatctttcactaataactgcaagagtaaattaaaactctcgcaaaacattgatatcgttacaaccactgatccaagtgacccttattttagaatacagttacacgcacaagtgcacaacacaagaccataggtaaaaacataaatggcatgaacaatgagtcaaagcaatggcagaacaataatattaacgccaccaccacttgtaacagtgcactcagttcctctgcagtagcagagaaattagacatagcccctgctcttcaaactctccactgcatccttgatgatttgctcaacaggagtgaattctagacctaaatcaatcagcttctttgatgcatcctttccacttgctctcaacaaccctggttgggtatcctttggcaacttagccacatcgtattcagggtataactcagcaaccttgtccacaagatcactaaagtgacgaatagattccacacacaagtgcct

SEQ ID NO: 30996 - DNA, 548 bp, Glycine max
  Clone ID: jC-gmst02400064h01d1
acggaggaacgtttttctgctattttctcatatccttccaacaccatttctttacatatatatatagctgttatagaggggacaagtcccgacaagcaaaaacggaaaagataaaagcaatccgaaatatcctaagagcaaatatgcctttattccactacctacgcatcttctagaagacacgatgctatcacacgggtttgcgcttttcctacgtacggtgcatgtatgcatgatgcatgatgccagccatgctatacgttccttcctcttgggcctttggtgcttacttcctgcagacccatcttactacgatttcttttccagcatactaggaacaggattatatatatagccgataaaaacaaagaagcaagattttccaagctacagattttcatctggaatgcgcaagaggataatggaagaataactaagcatgggatacatattggcgtccagaaactgagcatactgttgtatggcaatatctcttccaggaaggtcaggagtgaggaaatcatatggtgtaggcttgctggtgtcta

SEQ ID NO: 30997 - DNA, 453 bp, Glycine max
  Clone ID: jC-gmst02400064h02d1
acggaggaacatgttaaggctataaaataatcttcattctacaggaggaagattcatatttatattgtgggcccaaccgggccaagggcccactagtttattctgaggcgagaatatctctaccatccttactatgaccttccctgcctcactacatgttccatcacattttctaaaaaaaacgaacctattgcaagaatttgttctgtccctacgttcggggccttgctgctttttgcatgggggcaggcatgcaatacgttctttaacattggacccaagttgaatactttctgcttgcccaccttactgctagaccatttgcagactggttcgaacatgattatatgtacaccctctacttacgaggggacctgaatctccaagcttcaaatcttcatgtgctctgcgtctaaggatcttggtggaagaactacacctgtgattcatatt

SEQ ID NO: 30998 - DNA, 317 bp, Glycine max
  Clone ID: jC-gmst02400064h03d1
aatggttggggacaatggtagtttccacataaaaggggggaagtcctaattttcacaagaaaaaaggcccgtgacacaggtccctcccaagggaaattgatcaccaacttgcaactgcagacctctgttggtgcaaaatgagagatccatattacccttctacaaagggggacaaccccgggaatccccttccgccacatggctttaccagttacaagaaactcatgacggcccgggagtactccggtggggttcccatcctgagccccaacaagggatatataacattgctccaaatgcccatgaggcttatgcaa

SEQ ID NO: 30999 - DNA, 355 bp, Glycine max
  Clone ID: jC-gmst02400064h05d1
acttatatataaatataatacacaataacattgatgaaaactacccaaacataaaattcgctgctctttctagcaaaacatagattcctctttttcgagccatcaaatcctcattagatcaaacaatacaaaatacaacacgacgtaaaaattaaataaatatcaagccacgataatacctcaataaaaaaagcccagtatgaaaaggacatgctgtggggaagcaaagagaaatgtgatgcacatcaaagcccccagaagataacaatgcaactgtgaatctgcgctggccagtgtgtcaacgatagtacataagctgctgtctcgatgaattaccgggatatccatcatacat

SEQ ID NO: 31000 - DNA, 455 bp, Glycine max
  Clone ID: jC-gmst02400064h07d1
gggttgggttttttttttttttttttttttttcttttctttttgggcaaaaaaaattccccgggcccggtttttttttttttcacatggttttccccaatcccccaaccttttaagggggggcggttatcgaaccccctgggggggccccccaaaaagcccccccacaaggttttgggggcggcttaccataaaaaaacccccggttccgtcctaaaattggggccaaaaagagggcccccaaaaaccaaaaattttttggggaaaaaacccccggggcccaaatggggtgtatcccacctagaaaaaagccccctattttcctcccgttttttggggccccaaccccccaaaggttcccttttggggggcccgggttttcaacccctttaggccccttcctttttctttttttctttgaagggaaacccagggcccccccgaaaaacccttttt

SEQ ID NO: 31001 - DNA, 486 bp, Glycine max
  Clone ID: jC-gmst02400064h09d1
aataattaattaattggatatcccattatacagtatcctttccaaaatatcatgagacataaaaataaaaaacaaagaagcctggtctctgttcatacaacattatatcacagattgccaatcattttataaactagggcgattcttaatttagcacaaagaaatgacattcaaagcccacctccatgagaggaagaataccacccatcaaacctataatggatatcagggctcatctagctggtcctggacatcagaagtccaaagggtgaggttgtctcttaaaagctgcattatgagcgtgctgtctttgtaggattcttctcccaaggtgtccagctcagcaattgcttcctcaaaagcctgtttagccatggcacacgctttgtcagactggttgaggatttcatagtagaagacggagatgttgagagcgagacccaatctgatggggtgagtagggggaaagatccccagaagcaatgt

SEQ ID NO: 31002 - DNA, 584 bp, Glycine max
  Clone ID: jC-gmst02400064h11d1
gaaaaatagagtattatagatatgaaaaacataattaaacattccaataataacacaaacaaaacctaaataactctatctaagatttatcatatcctaacacagcacgcgcagcgcgtatgaattggaacacagcaaaaatgagcacaacaatccccaccaaagtggaacttgctctccaagggtctctaaagtacaccaaccacaacgctgccatggtgcggttccagatgttctggtagtgcttgttgagttcatttatagtctcgtagtaacacgttgtgtttgccacaacgtgtttgcttagtccattaacgagaaccgccacttgcttatcactcccaagttcatgcacaatcactttcttctcaaccagcaactccacatcaagctgagtgtgtataagagagtcaatcagagaaacatagttgcaaatgtagggcttctcaggatagtgacactgctcaaaggcaatgaggttcctgaacacacattcggttgtgtggtccaccttcaactgggggatcctaaaacgtgccttgaagtggtttcagtatggcaagcaaccaaagcaaagaaaggaa

SEQ ID NO: 31003 - DNA, 540 bp, Glycine max
  Clone ID: jC-gmst02400064h12d1
aataacaacatactagcatatcattaaggacttaatgaagaaattaagtaaactagttccacaagaatttctgtcttcatacaagacaaaagaaccaccaaatgtatgtaattcagtaaatattgtgctaccttgtactacttgatctaattggtattgttgcctttacacccatgagttacaagttctcaagtatgcataacaaacgatttcatagggaacaactactaccaatgctggaaactgaaaattcaagaatctgcaatggggaaaacagatccaattcgatcacccaatcgatagcacttgatattaaccccatatggaccaagctgaatgtggttatcctccctaccaacatagaaacacagggtatacaaagcaatttcaaattcagggctcactccaaccaaagtgctggatacagattttaggacaccattccattcaaactgaatagtcagaagctgagcttcagagtcaggagtttctccccgtcgacggggaaaaatatatccttgataatcaactctccccttt

SEQ ID NO: 31004 - DNA, 505 bp, Glycine max
  Clone ID: jC-gmst02400065a02d1
attactattgcttcttatgaactagccttccaaaccatgatcaatatctctctcctagctatcctgagacagaaggattcacaggaaaattccttgctatttaatctctaaaagaaacatgcttgctcttttgcttctaccagtataccagccatcatagaatgagtcatctgaaaggttcaacaggtgcagattcttcaagaaagtgtgctgcttgaaaacattcggcagcttcaactaatgatgatgctgtaccctcagccttgtgaagaaggccaagattataccaagcagaagcgttgaatctgtcgtgccgtagcgcatccatcagaaagcttttaactgctggatttgatttattactgcatcgtttaagaactacagcagtggagattatgctaaggacatggccaggatcaatgtccaaggcatcaccaaaagcttttagagccctcttgtattgacactttgcttcgtacactatgcctattgcatgacatctgga

SEQ ID NO: 31005 - DNA, 584 bp, Glycine max
  unsure (1)..(584): unsure at all n locations
  Clone ID: jC-gmst02400065a04d1
agcaatgaactaattattatataaagaagaaaaatgtaatgcaagcatacagcttaaagaacaccaccaattatcagttcaaaatgttttatctactgtcaacattaagtaagtctcaaatgttgactaaaacagacatcgagcaggatacaaaactttaatatacttatttttgttcatccagtaatccatggacagttccttttatttatcacctaactggaaaatcaacatgggcatcatccaaaattaaacatgttcccaaatgaagttttggagaatataaacaagcgccctatcgtccacaaatcctattccacatataattagaatgttaaataccatcatgtgttggttggaaattgaagcactgcaaactaggcctgttaaagagatgatctgttgggtgagatctttgcataaaatcatccactgggacaggaagctgaaactgagcttcaattccgtaacctgctgctcgcatttctgaacaatccaaattggtcattgatttaggcaaaagttngaaggctaaagaacatcgtccatacatattagcctncatattaatctcagttttgagc

SEQ ID NO: 31006 - DNA, 514 bp, Glycine max
  Clone ID: jC-gmst02400065a09d1
gaccatatgagcaaaaacttatatcattgttcaagtagaaacggggaaaagtacattaaaaaaaaaagagaaaaataaaatcgcaataaaaacataatgacacgctgttatctaaacttcaaaagggtctttgacaaaatcaagaacaacccatgagaatcttctgcttaatcgacttcctcaattttgggtccagcaccgcttccactgccagctgcaggaccatcctcatccatggctccacccgcatcaccaccagcaccctggtacatctttgctatgatgggattacaaatgctctccaactccttcatcttatcctcaaattcgtcagcctcagcaagttggtttccatctagccattggatagcctgctcaatcgcatcttcaattttcttcttatcatcagaagacagtttggaagcaatcttgtcatccttgattgtgttcctcatgttataggcataattttccaatgcatttttggcctccactttttttttatgcttcctcg

SEQ ID NO: 31007 - DNA, 444 bp, Glycine max
  unsure (1)..(444): unsure at all n locations
  Clone ID: jC-gmst02400065a11d1
gaaactccttcaacaagatattccatcaaaccttactattaatgctgttaatatatgcttaacttggcaatatgactaggttggtaagacaggattcaacccgtcttgagacattgcccccttcctgagttattgcataagtnttatcctttacatacaaaaaatgcacgccccgatacataacttcttcagatgcatgcaccgcttatatttgtttcaattatgccaaatcagagaaaaacaaggaattaggataagcaactattcaacatgattgtggcatacacatgaccccgagcatttctcacttctccgcatgacttcgagtacagaagtaagcatccataatgtcatacatgtattcctctcaaactaatcctgagaatctcccaccataaacttcatgaaaaattgatatcaccaactgccaacaatttcaaaatc

SEQ ID NO: 31008 - DNA, 534 bp, Glycine max
  Clone ID: jC-gmst02400065b02d1
acattaaatactgagattgtgtcatctacagtacagttatttaacttgactcaagcagaattgtctcacaagaacaagtatgttctcttaacataaaacatctacaactaagagctccctaatccatttctacttatgtacagaaccatcaaaattagtcaatgcataagttaatttccagagctctttcagatagcttctccagaggttgattttaacctatggataagttaatatataagaaaatctttacttataataagtatctgttgagaaattgatcgaaacacaacttaataactccctaatccacttctacttgtataaggaacacaacaataacaataacaagaattagaagaagtgaatccccaataacaaaaaacaaaccgtactgacaattaacatttgccgacaaaaaaaaaaacactataccgcaacagcgacgccaatgattggggaaaacttgacgaagatgcctaaccagtcccactgggatccttcccagatatcggggtattgaaaatgacggtc

SEQ ID NO: 31009 - DNA, 469 bp, Glycine max
  Clone ID: jC-gmst02400065b06d1
aaacaaaattaactcatgtgttatattttggcagccaaatgctccataagcattggcatgaccctaattagaaaacattttgttttgcaattacaatcagaaatggataaagcaatcaagtccttttatacaaaactacatacaacgaaagaagacgccattttaaacaggcttcattaaagaggaatcaagcgaagacaaatagcatagcttgacattaacatatatagcctactaatcaaattagacaagacgtaaaatataaaagatggatcgatctaattggaagctacagagagagtctgtctagtcgagtggccaaatagttccacaactcatagcatcgttcatgacttcattgatgtcattgaaactcatatccaagtttccaagtgctgaattctgtccaccattattgtacgagacatcatttccatgaacggtgattgttggcgaaacatgcgccatg

SEQ ID NO: 31010 - DNA, 460 bp, Glycine max
  Clone ID: jC-gmst02400065b09d1
gagtcgataatgagagactaatttctcaatgtattgatgttcattcaagagattgatatcggcaaataaatgttatttcatatatacggacatgaaaatccaatccctaatcgcatacttaagaacagaaacatgattatctgtctcacgcaaaaaaaaaaaaaaagaaccaaaatataaccatactgcaatgagtagcattggcttaacttcaaggccacagggaaagaaccatgctctctgactcttgcatcgaaaccatgttgttcatgtcgctaatgaagtacccaccatcataaatgctgtggtaccacgggtgagaatagggccacccgtcgtccatgtccaggaacacaaactcggaactccggtcgggcgagtcgaaactcgttccgagcggcggcagctccacgatctcgccgaggtcatcctccggcgtggcggccggcgacggaggggt

SEQ ID NO: 31011 - DNA, 453 bp, Glycine max
  Clone ID: jC-gmst02400065b10d1
cacttctattggatttttcctatatagacaaacgctattaacaaggaacagagaagggaacacaattccagcaccggccttttacagcaaaaagctcgagtgtgttgtgacgggtgaaactgcacggagaaagttgcgttttgaggtaaaatttatcagggggcattatagcaaataacctaaagttactactaacttaatttctagtattctatgactagcccacccattggggcacggtgtggaattccctttcttctcttggccgttctgtaattaacagaagttggaggcggtgtggacggtgtgaagctgttcttcttcccatggctgctgttgctgctgtacgaagaatcctctgtgtctgatcccattgccgctgactttttcttcttctggaagttccttgaagtcccaacaatcttgcaaccaagagaacagaatcggaaagaa

SEQ ID NO: 31012 - DNA, 444 bp, Glycine max
  Clone ID: jC-gmst02400065b12d1
aatcatgaatttattaaaaataaattttcaacaagttatacaaacttattagaaaaaagtttaaaaagagtttaggtgatccccaatttatttttacatatataggttcaaacagactctctaaactcttctacacactctaccaatgccctaacatatggaaataacaaccaagcaatggcacacgaggatacaattaacaaagtataatgacactaattttaatgcatggattgaagtgatcttgaacagtgatgctatattctcatgacttctatgtaggcctttccatcgagtttgcgagaaaataagcccttgaagtagtcctttactcctatgcttttgaatcgtggtggtgtttgttcagtgatcaagcttggtgcaggacctaccacaccatctgaacttggactatagaatgttgcaaatgaaagtctttctttt

SEQ ID NO: 31013 - DNA, 552 bp, Glycine max
  Clone ID: jC-gmst02400065c01d1
aatcaccaaatcaatcacattaccacattcacgggcttgctcgaaacaatatccatagcacaggcttaaagcgtcttacaatattacagaaattgaaattaaaaaaggaaaccttaatatcttcctatgggagacaatcctgttcgagtagaatagattattttttcttgcctcctttggaaacacccttgcgccttgaggggataacaatctctcccttgagaacaggaatctccatgatctctttgagctccccgaacttcttgcggaacttctcgacctggtcgtcgctgaccatagacgccgaccggcttccgaggtagaaggggtggttccccgaccacacgtccaccacgtattccttctgggtcccacctgtcgtcagcaccagctccccgttgcagtacaccttcgattcctcgtagaattgcgggtgtatcttcttcttcttgcaccacacaccgcactgaaccgctctccgaacatttttagtgggagctgctgcaactggaagaaagggttttccttgcacgaatgtgttggtcacacact

SEQ ID NO: 31014 - DNA, 294 bp, Glycine max
  Clone ID: jC-gmst02400065c02d1
aaatgacaaatgaatttcatgtacaaataaatgtctttatatattataatacacataaatccgcagtcaaaccaataactgacttttgacagaaattaacagaaaaaagttacaaaacaacccaatttgtaagaactgtagctatagctataaagaggacgatagctcatgcccttttgtttaattgtcattgcatttccatttagaagttggaacacatgttagatagtgacaccaatggcagtgatcatatccattctcaccccggataacatcactagagcaatagatacc

SEQ ID NO: 31015 - DNA, 443 bp, Glycine max
  Clone ID: jC-gmst02400065c04d1
acatggtaaaaacagaaccaacctttacggcctcaaaactttaacaacaagaaaacacaaacagatcttgtgactagcaatagtctcccgatttcaacggccttcctcccccaaaaaaccaagacatgaagttgtcgcaataccagggcaaggctcatctcacttatcgagccaggttctaaccccccaaaaccaacgtctaacattggaaacacacacacacacacacacacacacacaaactgacaaaagcgtcgacgcgtgcttcttccaaaaaaaataaaaatgacatgcatggtaaatacgaggcacaaattaatgcgcacattacattgcatacctaggacgacgagatcatatgggattgatctaaatcatataccgtccatggtcggaaaccattacatgtgtgtgacgtggagatttgttagagtaaacacaat

SEQ ID NO: 31016 - DNA, 375 bp, Glycine max
  Clone ID: jC-gmst02400065c05d1
aggaataatatacgtctctgtattagcaactaattccatacaaagaaggatcaacaaatcccatattcttcacttacaaattgctttcaccaaaaagaaaaaataaaccaacacttcaacataaaacatattcctaacagagacacctagatcgaagcgaaggggcataatagtcagttcaagagctagtgaacttggtgacagccttggtaccctcagagacggcgtgcttggccaattcaccgggcagcacaagcctgaccgcggtctgaatttcccttgaagtgatggtgggcttcttgttgtaacgggcaagtctagaagattcctgggcaagcttctcgaaaatgtcgttgatgaagctgttcatgattc

SEQ ID NO: 31017 - DNA, 544 bp, Glycine max
  Clone ID: jC-gmst02400065c06d1
ggagtcaaagaactgtattgatctaaccaacaaaatttacacttggtgttgccttgaggcttcatgttggacagtacaacacaaacaacaaaaacgaatcttgaatcagtattttgctttccactatctgtgcatttcacaagtattacaataacagaacaacaattcacagaggccctccaccaccacttgcagcagcagcagcagttcagcacccatcattgatacatgacaacaggaggaaccttaaacctatcctcaagaaagggtataggccttttcccatccacaaggtccctataaaacgcatactcagcctcatagtcatgcaagtgaagctcagccttctggttagtgtggtaatggtgcttagcagaagtcgatttcccaaacccaaaaatgctaaccctatcacaaatccccaaagccagcatcacagcctgcatccctgaagagtagtgaaaaagagaaccatcatgagcctctccccacttctccaaacccttcccactctccttcacaaacctcttcaacgaatagtact

SEQ ID NO: 31018 - DNA, 395 bp, Glycine max
  Clone ID: jC-gmst02400065c08d1
caaaaacggggggggaaggacccaaagcatttccatacttggttacatttaaaggggaaccagccaaaattaaacttattaccccgggaaaaatagcccggggtaaatcaaaaaacaattggagtttgcaaaaaggtcaactaaataaaaaccacctgaacccatttactggaaaaaaagcactcctccaacccaatttccgatttaacaatatgaacaggtggaaaaacagtcctcccctcttttttatttatttaaccccagggcaggtaattatatttaacagggtcaaccttgggagcggggaaaaaaagataaaaacccttttttccccaaacgatgccggggggggactccaaaaactggttgaagaggggggggcacttttggggggg

SEQ ID NO: 31019 - DNA, 527 bp, Glycine max
  Clone ID: jC-gmst02400065c09d1
caaaggaaagcgtgtttattcagtactaaacagagttcaaaacattggccacaaagcacagatccaaaactcaaaaacagcaatttccgaagcagcttgaaaggcagcattatatcagttcctaactacgaatttcaattcttcttcacagtggcagcatttatgatgtccacgaactccggcttcagggaggcaccaccaaccaaaaatccatcaacatcgggctgtgcggccaattctttgcagtttcctccatttacagaacctccatagataattcttacagatgcagcaacttcggcactcacattgtcatgaacccatttcctcaaatcagcatggacctcttgagcctgagcaggagtagcaacctttcctgttccaatggcccaaactggctcgtaggccaaaacaacattgtcccaatttgatatttaactgcattggttttgtttgcttagaaacaacagccgttgttgtaccagcttcacgctgttcgagagtctccccaatgcatgcaataactt

SEQ ID NO: 31020 - DNA, 446 bp, Glycine max
  Clone ID: jC-gmst02400065c10d1
ataggtaatagccatccatgaactttgatatcaatcatcctatgaagaaacagagaaattaaacaaggaggcatccatatgcctaatgaggaattaaaagtatagaatttcaagccaggaataattaaatgagaaagaaacagaaaacagatgtaacatttttgaagaccaaattagtactacccttattgatcctaaccataccctcactgataataagattcataacactagtgccgtcaaattctgcttcagttgttgagaggtgcaggatatctgttgatgcaatcaagccaagggttcctagaaggcttggtgactcggcgcatggcgcgccaaaccacactgttgcacttgaagccagagccaaatgcgagttgccaaacacggtctcctcttctaacactctcttttgcttccatgtaagccaactcataccaaatgct

SEQ ID NO: 31021 - DNA, 469 bp, Glycine max
  Clone ID: jC-gmst02400065d01d1
aaagagaacaataatgtagttaaattcatggggcaaattggaatattaatatatatatatatatatatatatatatatataacaccctgatgattctacaataaaaagtacaaattagctgggggctaccattttacttaagccacttcagcgttccctagaaattcaaaatactacaactttacgccccccaagtttaattatcaaacccacccaatcagaaaaagtaaaacccaacaatatctaagtcacaattaaaaagttgtcactcactatccagtcaaacgaccatgtttagtaataagtaaataaatggggggaaccaaaacaaaaaggatcatgataaaaaatatatataagtttgtcattgatgttgatgacatgggtgatgattatgattagggtttttttcagacccggaaattttttccggtgaaagtttgaccgaattgccaattgggtggagcga

SEQ ID NO: 31022 - DNA, 471 bp, Glycine max
  Clone ID: jC-gmst02400065d04d1
caatcacaagtcacaaaatatttttcacttggaataagggaataatagaacagctatggaaaaaaatctgataaatcctaaaattacagaattctataggagttgaaaagaggcacattacattaggggtgcatcagcaaagacctcagccagcatgccatcatcactaccttccatggcaagtagttctgcttctttctcttcctcattggaaaagtctcgtctttcaagcttggcatgagctgcgatatatatcattttctgagctctttccaaggaaactctcgaatgtttatttgcagaaatcttcttgatgaaagaacaattactcttagatccaaatgaagttgcatgcaaaaaaatgagcctcactgcaagctttccgagggatttaaactcgctgaggcaagtttcccaaacaagtctactgctgagtggattagcaaccttcatcttcccggtaaccgggtc

SEQ ID NO: 31023 - DNA, 528 bp, Glycine max
  Clone ID: jC-gmst02400065d05d1
aaattgaggaggaattaaggtaatttatttcaaatactagtacaaattcaccaaatagcaaaatccacatgctcgacctcctttttgctacatcagcagtacgatcacaaggaattttcaccatgaaatcaataatatatttgaaaagctgaagggaaatttctcccttttctctttcatttaaaccattgataatatcattctcattttcatccaagactccggtactatccattgagcaacgtgttgttattaattccaaaagcttccaaataatactccagaagaagttccatctgtcgcctttcacttaccatacttcattgtttctatgttaaaaccaatagtgggaaacttcttagcataatcctcaacttcatgacagagattagcaatcttagattgaatttgttcatctgattgcatagctgccacaaaatctttcaactgtgtacctgaaagtgatgtaaccatcaagaagaaaagtgatttacgtaacgttaagacactggctatgcttttaaaact

SEQ ID NO: 31024 - DNA, 517 bp, Glycine max
  Clone ID: jC-gmst02400065d06d1
gttaaatgaaagcgtaaaattaatatttgaaccatcatattaactacaacagttaatatatgtcaaagtaaatgcaaagcatagatcatctcctgtacttttccgagaaactaaaagtgatctgaaagtaaaggtaattagtatgtatctctgcttaggagggcgtgctatatacagaagtaatggatcagacattagagaaaaccactagtagcgtgcaataccgcatttgagagagacttgcatgctccagcttcatcagtgcttcagttcaaaagcctacatttgtacatgctatgtacatttcttgttcagcttactttggttcacaattgtacattgatgcttgcctcagaagcaatgccaaatggtgaacccatttaagctttataccctattaatcattgaagcctgaataaagaactagtcttctgacaggtatactaaatcaaaatattatcgagtcaggaaatgaatagcttttcaggcttaaatgttaaccaaatattttctcttt

SEQ ID NO: 31025 - DNA, 424 bp, Glycine max
  Clone ID: jC-gmst02400065d07d1
cccaaaaaaactcccattttgggggttttttttgtttaagaaaaaaatttttaattggtggtaagaaaaaggggccccaaaaaaccaagggttccttggggacaaaatttggggggtttaggtttaaggggtttgactttgttaaacctgggcccaaattccgggttttcctccgcggggttgggaagtaatattttttttttgggggcccctaaattaaattcacggggcgggtttttaaaaactttggacggggaaaacccgggggttccccaaattaaatgctttggaaaaaatccccttttcgccaggtggggaaaaaaaaaaaaggcccccacccgtcgtcttttccaaaaattccccaaccttaatgggaaatgggcccccccctttatggggacattaaacgcgggggggggggggg

SEQ ID NO: 31026 - DNA, 496 bp, Glycine max
  Clone ID: jC-gmst02400065d08d1
gggagaattatagcatacaaaatcatttaatagaaggccttacaatttacactaagaatttcctctaattatacaaaactcacctttcaatccccactacataggaacagcctcaataagcctagcaaagtaaaattgagtagtggttaagcctctcttccttatggtccagccaaccttttgcaatgctctctctacatctgcctcggagtgaagatatgcccttgttgcctttgaaggaccagggaacaactctccaaccctctttagcagatcataataaaacgtctttggggcaaaactcaaaatcaatcgcttgttggccaatgatgcaaggtgtgcaatcatcccatcagctttactttgggggtaatgaattaaaacatcaagggagaccaccgtgtcatacttgccatctaagctcttcaaatccttcactacaaacttttggcatcacaggcgccggaaccatctttactggttacaagctgttctt

SEQ ID NO: 31027 - DNA, 535 bp, Glycine max
  Clone ID: jC-gmst02400065d09d1
aaagaaaaagcaaaccaagccaaaaattgaacactacaaatagaaagttgacatttaataaaccaaagcaacacaacgcagcaaagtcctgaaactcgctgcgcttaacaaaaatgtaatcaggggttccgacaaacacaacacattaaaaccacagataaataaaagcatttttgccaccgtcgatcaagaacccagttctgggaacaacagttgcgagatgatggtggagacttcaaactttgtccgaaaaacaagctacctagaaaagaagacacaagagtacagaaaagaaaccaacatttattgtaaccaacatcccctgatgaaccagcccgcacgattcacttcttcttctgggcagccttggtgaccttggctccggtaggatccttcttctcaacgttcttgatgactcccacagcaacagtttgacgcatgtccctaacagcaaacctaccaagtggaggatactcggagaaagtttcaacaaccatgggtttggttggaatcatcttaacaaaaccagcatcac

SEQ ID NO: 31028 - DNA, 540 bp, Glycine max
  Clone ID: jC-gmst02400065d11d1
ggcatcattaagaaattttatagaatgattctcaaacttcattagcagctgctttttcattcattgtccttttgtgtaatcctctactgttttcaggttcgttttgttaactacattccccatgctcgaaaaaagtctcttttgaacggtgttgtcttcccacttgtatatgcctctttgctaaaacatcaagagctgtaactacgtcactaatcaaaggtcgggtatcagcttcctcctgaatacacattgctgcaactgctagtgcttggtgtagaccctttgttgggtagttccctttcagcaatggatcaaccattgatgaaaatttccttctgtctttgaatagtggttgtgcccaagtgaccaagttttgctcttcagatggtcttgactgatcaattgctcttcttcctgtgatcatctctagaaacactactccaaagctatatatatctgattttgtagtcaattgacctgttgaggcatactcaggtgcacagtagccataagtttccattaccctgggggatacatgag

SEQ ID NO: 31029 - DNA, 425 bp, Glycine max
  Clone ID: jC-gmst02400065e02d1
gggaacccagattactgataaattcaatccatataaataaaagggccgctggggaaatctcaaatacatatttttttcacataaacaatcactaacagactactggtttttaaatgctgctcaagaaaaacttttattcaacgaaaagggatccataatggaggggtaaacttccttacgttttccatgttaatcatatggaattgggatatatgctgcatcacagatgaaaggaatgtcagcttacataccaacaagagcgccccttatgctctccaagacagtaaagagataaccaattgattcggcagtccaaaaatgctttcccagtttaccccagttgagggataggggcattcaacgggtcacagtccctataacctgcagggaaatctccaataacattcccatcacaacatgaaatt

SEQ ID NO: 31030 - DNA, 554 bp, Glycine max
  Clone ID: jC-gmst02400065e04d1
ggaaaatctttcatatatttatgtattatatattatctgaataatgcagcaaaactggaatacatgttatacaaaggtgataactaatgcggctccgactgtgagacaatgcaattctcgtccatttccaagaagcgggaaattccctgatcttgatctttctcttcaataaggagacgagatttgtataatatactgatactgatatgccatgaccagtatgaattgggaaaacttagatgcaaaatatctcactccatagaaaataggagatcaaggttccttagggagaaaaaaagaaagaaaaaagggaaggctcttgcttacataaagtggtgatcagcgatttacattctttgtgtatgtccagggtatacaatacatgacattccgctaacagggacaggcatcacatattaccgtccagtgattatattaatacgttgacttcttggtaaaatgagacaaataagctttacaacaagaatgcaccataatacacccagtacaatattacacatataatgaaagttagacagatgtgtctggggttg

SEQ ID NO: 31031 - DNA, 339 bp, Glycine max
  Clone ID: jC-gmst02400065e05d1
gggccaaaaacaatatttttgatttcactgggggatctgatatggggctaaaacatttacagggtattggtctcaaccgagacaaaaatgccgaaataattttccacccaatttgaaagtttgaactacagatttggatgattaacttttcaacaaacccgcccttttcccccagcaaacatttggcacaggggccatttagatttcaagagcaaagaatcttttgggccaacatctttgccaatggggtaggggaaagcattttggcacagggtaatttgttactttgttccaccaaagatgccctagaccccattttctttatgttttaaccgccct

SEQ ID NO: 31032 - DNA, 499 bp, Glycine max
  Clone ID: jC-gmst02400065e07d1
gattaaactgagcaatgaagatgagaccgctcaatctttcactaataactgcaagagtaaattaaaactctcgcaaaacattgatatcgttacaaccactgatccaagtgacccttattttagaatacagttacacgcacaagtgcacaacacaagaccataggtaaaaacataaatggcatgaacaatgagtcaaagcaatggcagaacaataatattaacgccaccaccacttgtaacagtgcactcagttcctctgcagtagcagagaaattagacatagcccctgctcttcaaactctccactgcatccttgatgatttgctcaacaggagtgaattctagacctaaatcaatcagcttctttgatgcatcctttccacttgctctcaacaaccctggttgggtatcctttggcaacttagccacatcgtattcagggtataactcagcaaccttgtccacaagatcactaaagtgacgaatagattccacacac

SEQ ID NO: 31033 - DNA, 525 bp, Glycine max
  Clone ID: jC-gmst02400065e08d1
gataggaaaatgaatacttgaattatttccaccgactgaatatccaaaagtgacatagctcagaacgtaacaaataatgtgaaacatgaaaaagaagcttttatggccaacacgaataaaaacatcatcatgaatagtattttacaatgatacatgcttatttggttgagggcatgcaagcaaaacacaatatgaggaggcaagagaaaatttgattactctcccaagaaatgcacttgatcatggtgttggtgtctgcacattagagtcagattcatgagaggattgcctgtggtggttcttcaactcaggatgcttaatctcctccaacattctaacaacttcatccattctaggcctattatcagaccccttagccacacatgccagtgcaatctgaagcatctgcaccatctcctcttcaacatattgccctctcagaagctcctcatcaaacacttcagcagtccactcctctctcacaacagaccttacccaccttggaagatcaaccacatcttcata

SEQ ID NO: 31034 - DNA, 463 bp, Glycine max
  unsure (1)..(463): unsure at all n locations
  Clone ID: jC-gmst02400065e09d1
acccaagtctaactaggcatataacacatacagaatcaaatagaacacacttatttaagcatcataaacctagaaattaacactagcttggaatcaccaatccttattaggggctcacttgaaatagataagtgaaggaacataatgcacatcagttacaagcctgaaatagtgaccgttttgatttctttaagccgagcagaactagaagtattccaaggtagtctaaattgtaagacacctcaagtagttggagcttatcaagagtccatggagggaacctaaaccaaaaatcagtcaagtaacttcttctagccacagccttatggtgactgaacgcatcaaaggagaactttccatggtacttgccaaacccacattcaccaactcctccaaatggtagggtatccgctacgtactacacanagatatagactagttaccattcaatcacaagcagctt

SEQ ID NO: 31035 - DNA, 579 bp, Glycine max
  Clone ID: jC-gmst02400065e10d1
gtgcagcaaaaactaatttctcttataattatttatacagaaacttttcctatgagaacttgtaatagagttgaaacaaacagttacaacttaaaaggactagaatttcactccggaactcctgagattgcagatgatgatgactttgagtagcgttcaagcaatgatagtaccttggcagcttttctcctaaggtgtccatccccatatatattcatgccagtgagaccaattaaacgtgatctagctgttgttccatagtattctaccatttcctttgacacaaacaccttctccaacagtcctagagcttctgcctttagagaatcagttccccagttcaaaatgtccattatggaccttattgcattatattcatgcaagacacgagctcccctttaaggaaaatcttccaaaaccaatgtggagagtgtttgtattgcttcacaagcagttgcatgaacctccccatgtaacagctttatcaagccaggtaaagcctttgcttctaaaagacaaaatgtggtggtcacactgcatacactcccatgtgcttgacataacggaacacgcgatgat

SEQ ID NO: 31036 - DNA, 429 bp, Glycine max
  Clone ID: jC-gmst02400065e12d1
caaagaaagattcttttcggggggtgattctttttatagagatatgagaaaactgttattacaaacaaagaaaaacataaatatttccaggatattcattcctcaagcaatcgaattacttggtactttgtgctaactttacttatgaaatctctttctgcagattcttccactgtttcttttctcaaaataaagaaccaaaaaaatcagagaataataaaagcctcattgttaaaatgctcatatatataatcagaaggctgcccatcctgaagctgtggtcgatccagaggtggttgttgtgggaagatttttctgtagttgagaaaaatctgataaagcgttggtagaatgtttcacactttcgtatgtccctttaggaccagtagcacgactggtggaagcagtccgagcagcaactggatcatt

SEQ ID NO: 31037 - DNA, 345 bp, Glycine max
  Clone ID: jC-gmst02400065f01d1
aactgccaaaggatttctttattgctctctacagcttattgccttcatgaaagagaccctaagatatatattatatatctgtggagatgactcgatatgcacttctcccccatggctgcctttattattccctattatacatccaccaacggtgctgaaaaacatccacatcttataaactctggttatgacggttgacatttatattgggcggttatgcacatccacggcagtcgtcattacccgagtaatggccatacatatctggagatgcattgtgcgcgtgctcacccttcatatccgtatattgcgtgtggtactatgggcaccaacgccctacccttt

SEQ ID NO: 31038 - DNA, 308 bp, Glycine max
  Clone ID: jC-gmst02400065f02d1
ggggggggggggcaaaaaaaaaccttttttggggaaagttggggtcaaccaaaaaaaaatgggcggtttatctacaaaaaaaggttttgtacgcccccccctcggggggaaatttaaatttttttgggggccctttttttgggggggggaagggggttatccctatgcccaacccggggggggggcctttccaaaatgggggggggggagaacaaaaaaaaaaaggggctggttttttttggggggggggggggactcgacattctgggtgaacacccccccgcccttttggtggggggggaaaaatt

SEQ ID NO: 31039 - DNA, 452 bp, Glycine max
  Clone ID: jC-gmst02400065f03d1
gaaatcccaccaaagagccaaatgccataattaggatggctaaaaaaaatgaagtgtccacaatacaatgaaatacattgggccaatagagattacaactcaattaagaataataataaaaaaagaactttttcggtgtacaaattaaaacatttaaataaggaatataatataattaattaacaaaggagagagaccgtgttttcttcggaatgtagtaatgtccaagataactaactaagaccaaaaaatggcaagtggcatgcataaaccttaagcataactctgtagctttcttcatcaataagtaacaacataggaaaccttaaggtaatgacaattggggaaaactccattaaaccccttttctgggccaccagttgcaaattgcaaggaccaattgagccacattatgaatcctgtgaagatcgtatagagaaatgtactggcag

SEQ ID NO: 31040 - DNA, 315 bp, Glycine max
  Clone ID: jC-gmst02400065f05d1
caaaaaaaggccccggtttcttttaattcaaaaaaacggggggggaaaaaaaaaaggaaaatgtttccataaaaacccaccggcaaaccccgaaaaaaaaaagtaatagggccttttcttccccaaggcccaaataattttttgaaaaaaaaaatacctttttttaaacaaaccccagtaataacttttcctgggagcacccataaaggccctgggttaataaaaaccatggcggaaaaccagggttttttttggggcccccctcccttatttttaaacccaaattttaaattccccccccggggggcctttcaa

SEQ ID NO: 31041 - DNA, 475 bp, Glycine max
  Clone ID: jC-gmst02400065f06d1
ggcagaaagtgaagagacattaacattacaaccctttttttggataaaattacaagacaaactaagaaggttcagttccactacagcctagtagcaggacttgccactaattgacattttaaggttggattcaaaaaccatcaaataaaaatgtaggaagaagaaaggtcaaggactactacatcactgttataccacccaaacccttggccttcctcctacccctttttttgtcgtttccttttaatcaacatttcttcatttaggtttttgtggccataatgtgatgatcacttggccatcatcaccttaacgaactcctcgtagtttatttggccatcgccatcaacatcggcctcgcgaatcatctcatcaacctcttcatcggtgagcttctccccgaggttggtcatcacatggcggagctcagcagcagagatgaacccattctggtccttgtcgaaaacccggaatg

SEQ ID NO: 31042 - DNA, 530 bp, Glycine max
  Clone ID: jC-gmst02400065f07d1
gagaaaataaccctttttaatttataggaacaattcaatacattgacaccaccaatagtatgatttaccaacaaaagctaaaacgctagtcattgagaaaaataaacaagtaactacacttctttgatagcagttcccctccccatctcaacaccattgccataatcatcattctccacgaatctggaccagaaggggtgtgccttccaaacctggttcatttcttcaatgggaatgcccttggtttcaggcaagaagaagtagatgaagaatgtcatgatcaacacgaaaaaggcaaagaagatgaacaagccgaacttcatgtggcaaagcattgtcaagaagacttgtgcaatcaagaaagtgaaaaacatgttcaccgacacatttatactttgagcagccgaacggatctccaagggaaagatctcactaggcaccaaccaacctaggggaccccatgaccaggcaaatgctgatacgtaaatgcaaatgaagagaaccacaacaactgcttaccattttggcaa

SEQ ID NO: 31043 - DNA, 544 bp, Glycine max
  Clone ID: jC-gmst02400065f09d1
accatgttgactcattttaccatgtagaatacaaaaagcctatacaagttcaaatccgatatagtaataataataaaaccaattcaatgtgtagggatgttatttctcccccggggtagtccccacaactttcttatcagttatcacgaaaaatttcggattgatctgcaaacatagggcattgcagtatgatacaacagagaagcttatttacatctgaatctttaaatgaaataaataatgagattaactatgaccgatcatcattttgctcatttgcactagctgggctttatatatagatcgtcacaaaagcttattgaacacatggctggatcagataacatatatatatgacacttatcaaggactgactataaacatccaaaaagtagttctcctcagaaaagagaaagaattggagttcaacgtatgattgatcactcgcctggaggttcataattatctgctttcatgcaaattcctctctttccccattttgttcctggctgtagagagcaaagctgtgttgcaactgcacgta

SEQ ID NO: 31044 - DNA, 467 bp, Glycine max
  Clone ID: jC-gmst02400065f11d1
aatacttgaaattttttacgataatatcttataattgaataaagcaatactacagggtaaaaagtcagatcctatttggtgcgaagcacatacatacagcaccgctaaacaatcaccacaatcttcctgatgacatcaaggccaatacataatttaatgctccaacaaagcctcgtaaccttagctgaattgattgtacaccaatcagctaagtctaaccttactctctccacacgatcaaaaaatgaaaagggaaacaaaaaaacttaggctccaccacagaaaataaaatggagcatatgccactgtttaagttaataacaatacattcctttttcatggatatctttcttaaatattatcttctctgatccactgtcttcatcatctaattagatcacgtaacttgccttttgacaaacttgattgtgcaagctgagccaggaaaccttcattcatatactcgc

SEQ ID NO: 31045 - DNA, 529 bp, Glycine max
  Clone ID: jC-gmst02400065f12d1
cattcattaactgtttggaactttggattatatcacattaccctcttcaaacaaaccagacatcacaacacagtgaagttggagaactaggaccggccagcaaaaagagaactaactagtaccaagatccatcatacattaattgattcctcacatgactagagaccaacgaagctcactattaattggttcaacaacacttcgcatattatataatagtattcgtgtagatacgaacactagtactagtgaaaacacacacacacacacatatatatatatatatatgggtgagtagttttatatagtaattagttagattcatatgtatcaagcactaattccatctcgggggttaaattttgatgatctcatgcttgctacgtgaaactgcgatgcatacttattggacgcagcttcagtcactggaggctcattcagaaacgcccagctactcttggtccaccagccatttcgcttaataagttgctccaaacttgtgtcaatgtccaccatatttaagtagtcc

SEQ ID NO: 31046 - DNA, 554 bp, Glycine max
  Clone ID: jC-gmst02400065g01d1
attaaaaggggttgttttagaagattacaatatacacgataaattgataatcatcatttattcttctctcataaaaacaaaaaatgctgacttaaatctattctttccttccagtttcttctctccttcagttattcatttcagcccattagtttgtatcttttctcttcgacacctgtaactcccaattgtatttctattatcgtatggaggggcatctcaatatctgcaatttctttcaaaggcctgtcagtaaaataagcatataatgccctcaaaactgcctggtgagatatcacaacaacaggtgctcgttgtcgctcaagttcaataattacaggttctaacctttgaataacatctaagtaagactctccacgaggataacgatacctaagtttgtccttattgcgggattcatactcctctggcatgttcttcttgatttcttcatacgtcatcccatcacacacaccagcatttatctcatcaagtgcgcgccattgtatctttggaaacccaacaattggacctgctgtcaaaattgttcgctg

SEQ ID NO: 31047 - DNA, 451 bp, Glycine max
  Clone ID: jC-gmst02400065g03d1
gaatcaagtagcttttacatttctccataaacacacaatgatctcgcaagcatagatcaatataatatttatccaaatactgaatgtaattgaatgacttaaaatattccaacaagaaataccaacacttgatgacaacgccatctcatcccttttggcaaaagcaagctttaagtccaggaggaaaatggagcaatccaaaagtcagttcttggctttccccttctggtcagaatggccatagtaaagttgcaagcggctgccatcaaaaacagaagagaactgatgctggtgatggttgttgttgttgttgttctccatggcaggagcagcaactgcagcagcagaagaagcagctccaatgaagaaaggtacagtggatccgtctataggcgaaaacctctgcgagtgaggcaacagaaacggagaattggactgaagggtcccccta

SEQ ID NO: 31048 - DNA, 521 bp, Glycine max
  Clone ID: jC-gmst02400065g04d1
aaccaagaattgtccttccataataattaatgaatgttgattgttgaatactcattgcaattacaaggattaaagtgtaatgaggagacaacaaattttgttcacttaaagttaaacaccagattatggcagctgttgtcacatgggtaagcacagtcaatagctttgacaacttctcgatcaaaataccagtctccaacagcaactgcaattggcttgtcctcgataaggggagagtcatcagcaaaccatgtctcctgtctctcagactgacaatgagcaaaacaagaatttatgaatagcccagtttgagatgagcttgagaagtctttaatgtcacccagcatttgatttctgaagtcttgaaggaactgcatttgagatgagctacaatttgcatggttcgatttgcattcattccaagaaccaaggcggtcagctgaaagtggggctaaactggcttggacctgccacacatcataagcagcattgagtagaaacaatggggtctcaacatgttc

SEQ ID NO: 31049 - DNA, 560 bp, Glycine max
  Clone ID: jC-gmst02400065g06d1
aggggaagagaatgataacatggtctaatcttaaaacattttacacaagatttgtaatcaaactaaagattatgcaaagtgacgtaaataaataataaaaaatgcattaatctgttactagctaaagtagaacaatgtggtgttgcctatggattttaggatcagctgctcaatcaaagagatcattcttatttggaagcattgaaatgctaatcaagctggtacctggtaattctgctggaacagttacagcctactatgtaagttcactggatctcagagatctcaaaaacactaaaatatgttcttttgaacaaccaaatctatcaaactcccgttactaaatgaagtgtccatgtttctcactcaaaatccatacagttatcctctgcaggaagccagcatgacgagataagatttgaattcttaggcaacagtacaggacagccatacactgtccacactaacatatacacacaaggaaaaggaagcagagagcaacaatttttcctctggtttgacccaactgctgattttcacaattacaccattcactggaa

SEQ ID NO: 31050 - DNA, 374 bp, Glycine max
  Clone ID: jC-gmst02400065g08d1
aaaaaaaggggcttttgtttttttcccaagaaaaaaattaaaaaatttcccgggggggggggggggaaaaaaaaaaaacttttgccccacctaaaagaaagaccttaaaaattagggggggaacaatttttaccttctgggttctgaaaaaaagggggcggggggccctttggggaaacctttttcccttcaaaaggggctcaatttggttcgggaaacaaaaaaaaatttttcaaaaccctagtttttgggtggaaaaacttgggcccccttcccttttgggaaacataaaaaaaaaaccccttccccaattgaaaacccccattttttccctttttttttttaaggggggttttaaaaaatttttaaaaccc

SEQ ID NO: 31051 - DNA, 451 bp, Glycine max
  Clone ID: jC-gmst02400065g09d1
aaaaaaaaaatatatcacattaatcatgacatccgttttttaaataaaaaaaaaacttattcctcgtttttcacaatttatataacattccacttcttcctttatagtagtctttggcaaagagagaatttacccctttttacccgtcacattaaacaacaaaagcagaggtttaatagaatttttagaaacacactcagaaaccgaatccaccaccacctctattatccattcccctgcttcagggcttccgttcccaacgaccaatatttacaaccattacacaacacattgccacgtgccagtcttcaaacgagggtcttgcatgtcgaagtctgcgggtcccacatcgctggcacgagggacctttttccattcgcaccatgcgcattgtagctagccccggttgctttatccacgagaacccgacccggatacccgggtacgatcc

SEQ ID NO: 31052 - DNA, 398 bp, Glycine max
  Clone ID: jC-gmst02400065g11d1
acttggaacccaaaattttaacttggtagcgacagaaaagtacacgagatctccatcatcaatcaattcaaacttaactcggaagaaaagaaaaaaaaaaaaaaaaaggacccaattcccgggcaaaagttgccattttaagacttacatccacaaacaagaaacaatgattgccacgggcatgaaaaaacctttaactgtttttttattcaaactcactggattcgaagcatcaaccgatgaacccgatgacccagatgaagcatcagcagcccctgcccggacatttttttccggcttggatggcgcaggagcctccgccggtgcaacaaccggtgccgtcgcgccgaaaagcttcataggaagaagcaccttatccacctgatacactgagagct

SEQ ID NO: 31053 - DNA, 487 bp, Glycine max
  Clone ID: jC-gmst02400065g12d1
ggatcattgaagtattcacgtccttttcatatataacaccaatacacaagaaaacagaaacacataccaaaatttaaacaaaaaaggtaaaaagaaagaaattaatggcgtgtttgacaaataaaattgaaagtgcagctgccaaatggatcaactcaacatggttgcaaccaaagctatcacaagcgacatcaacgttgctccaccaatgctaaccacactcactgccccagatttattctgatgctgatttgtttcttcttgatcgtcatcagaagagttatccttagcagctttgggagactttgcaagagttgatggagctgaagctggagccttattggttataaagaaatctagaggaagaagcaccttgtccacgtgataaatcccaagtttgttatctgagtatactaccccgagaacggtggcattgacgaccccggttgaaatgttgacactgtttcctaatgcattcacgttcaat

SEQ ID NO: 31054 - DNA, 452 bp, Glycine max
  Clone ID: jC-gmst02400065h01d1
atcttcatcagccttagcaatttcagcctctgttggccatgtctgctctccagcaagaggatcaggtatattctcaaccactaaggcttcctggttttgaggatcaggagctagagaaccaatgacctctgcatcatgcatttcatcagcatccattagggcctgatttttccttgaattcaaaggacaaggatctttaagaacttcaattttagacaattggaaatctcctgcacctgaaacatgaaccaattgattgactgagaggttaccagaaccaaggtaaccagtgagaaacagggggcatttttcagaggtgccatcatattctgcatcaaccttttgagacaagaggtatgatcgttgagttctccaatgaggaactttaagcctttgctctttaaagagccacaagaacttgtgtagctcatcctttgtatcagctggataaa

SEQ ID NO: 31055 - DNA, 509 bp, Glycine max
  Clone ID: jC-gmst02400065h02d1
aaggataaaccactttatgtcttacgcaaatataatgagcctgtcgagaatatcaactgttttttactggcaaaatacacgctagagaatcaaaaacaaaactcagccaaactaggggcacgtgacagtaatataactaatgaattcatcactacacaacgttaacaggttgatgggggccatcctttgagttttgcacctgcaaatgatgagcattggttattcagtgaagcgtgcaacagaaaatgtgaacgtgtttgatggcttcaaaatgagttaataacgggcataattttgtctttgctttaaggacattcaatttgctccctctaaacatagaaaaaccatatggatgagagaatgacctgttacactgtagtcttgaagcataattatgattgttgcaatttgagcacatccaatctccactacgccattgctttgctctaacaggtacaataggtaaaaatgtatttaaaatgtgaatctagaaaagtatgatagctctt

SEQ ID NO: 31056 - DNA, 453 bp, Glycine max
  Clone ID: jC-gmst02400065h03d1
atgaaatcggttcctgtttaacaaaatgtagcaaacagaaaaggataaaaagaacgatgctttacttaagaataatcgaaatgaacaaaggtgataaacaaaggtgaacaaaagtgaaagaatttacacacacaagtggggagtcagtttagcataaatgtttcaagccattaacaaaggtaaattccctacaagggcatcatctcaaatgattctcactttcatagagctaaagggcaactgcagcaatttagtcataggataaattctgaagattactgaggattgggaggacggctattggcagcagaaacccttgagccccattcaagcaattctttactggtgtcatccttatgaacaatcacctcaatgaagcataaggagtctttcttgggttctgtggctgtggcaattgcttcaactagctttcttttacagaacaccttggca

SEQ ID NO: 31057 - DNA, 421 bp, Glycine max
  Clone ID: jC-gmst02400065h05d1
caagtaatctcaaaccatttgagtatatattattttatgtacttaacacttaacacagtacacatgcatatatagagcaacacatttcaaggaaacattctccaaaccatactgatctcccaaaataaactggaagatgattaacttaaagacacacatatatatataagccaaaagcatatatatatataagacaagtagaaggaatatgctcataattggttgcttatgcttcagccaaagagatggtggtgcttctttccatgagcttcctcatcttgctcctttgcttcctttttctcatgatgttcatggaaggcaaacccaccagatcccactgcagctgctgctgcaacctcctcttttatcttgtgcctgtgagcatgctctgggtctttctctgccttgtgcttctcatgca

SEQ ID NO: 31058 - DNA, 409 bp, Glycine max
  Clone ID: jC-gmst02400065h09d1
ccaaaaccaattgatttttttattcatcaaagttgctcttcgaatctgggtttgaaaacagcccggggatcaaattggcaacaaaagttttcctatagccaaaaaaaaaaaaaaacaattgcagttacagccccgagatcaaaagatgaactttgttttaagacagcactttttccacttcaactgtcaccttttgggggggtttctcagcatgaaaattagcaccagggcccttttttgaatagtaatcaatacccggttcggtttgcttgggaaatgcctccagtcttaacttaaaaacagctgcagggtcatccttgcgctggataaggggttcaccagtaacattatcaacaccaagaaccttagggggagcaaattttgtttggtaggttctgccactggatgg

SEQ ID NO: 31059 - DNA, 501 bp, Glycine max
  Clone ID: jC-gmst02400065h11d1
acggcaaacaaatggaattctattacattatgaattacaagttccttgcatggcatacatcaaggaaaactgggaagttgttgtatgtggattgatttgccacagccttatatagacaaaccaaatgcttaatatcaacacaaacacgtgtacagaaaagaaaccactcttcaagaaaacagaaaataagaaaaactaacatattggaagaggtgccccattccactccccaaggcattccaaaagtggatcaatgatcttcccttggcacaaagcagtgaacactttgtcacactcttcacccggtgagataaccctttcaccagttagcaatgctgtccccaactcctctctcacaaacttgtacaaggggtaagacctgcattccttgatcttgtttggaattgcacattggtcattctcatatgcaactcttgcaccttccactttcttaggcaaaagggtctttaactcttcctcaaatgttgcaatcttttggaa

SEQ ID NO: 31060 - DNA, 489 bp, Glycine max
  Clone ID: jC-gmst02400065h12d1
aatatctctttaattggacggtgtgcagcagttacacacaaattctttagatcgcttccggaatatccatcagtcatacttgcaattgcatccatattaatatcagaagacaagtcctcttttgccagtataacttttaatatttttgctctatttggagcatcgggcaaatttaccattaatctccgaggcagcctccgaatgacagcctcatctaggtcaaaaggcctattagtggctgcaagcacaagaactcgctcagtatcctttgtgcgtaagccatcccagttcaccatgaattcatttttcatctttcgcatggcctcatgctccccaggattttccctcctgcccaacatgctatcaactttgtcaacaaatatcacgctaggagcaattttactagccagggaaaaaacagctttgacatacttttcaccctcaccaaaccacttagatgtgatacttgacatggaaatgttgatgaaa

SEQ ID NO: 31061 - DNA, 508 bp, Glycine max
  Clone ID: jC-gmst02400066a03d1
aaaggcttattcagttatttgatacccagaagagtttcttgttagggtgtgtgaagtgggccaaaatagccatcaaagtagcttatcagctttaaggcaagaagaaacaaaaccaattcttttgggtaaaagaactttagaaaaccactttgcccattcaactaaacacaacaatgaaagatgaattaaaaagtcatgttacagattcctctgaatgaagtcccacatcctcccttccatgtaaactcggtcactatgacgccgaggcatgtgccgttcatctgggaaaactattagctcatatgattttccagctgccacaagtgcattgataagtcttgcagtgtgcctaaagtgaacattctcatcaatcatgccgtgcacaagcaacaaccgccctttaactggtgcacttggttcataacagaaccgctttcatatcctgacttgttttcagatggcaaccccatgtacttctctgtgtaaaacgtgtcatatccatcccatg

SEQ ID NO: 31062 - DNA, 417 bp, Glycine max
  Clone ID: jC-gmst02400066a06d1
aaaaaaagggcccccccaaaaaaggggggtgaaaaaaaacaaaaaccccccttaaaaaggggggggccccccccctaaaaaaaccctgggggggcccccccaggggggggggcccccccccctcaggggggaaaagttttttttcaagggggcccaaataaagggagggggaaaaacccgggggggaaaaacccctttaaattacaaaaggggggggggcccggggggtaatccccccaaaaaaatccccccgggggggaaaaaccccccccaaaagggggggcccccaaaaacccccccctttttttccccccaggtgggggccccccaacagagacccacccaccccccaaaccataaaaaaccccgggtggaaattttggggggggggtggggggcccccctttttttcggggc

SEQ ID NO: 31063 - DNA, 534 bp, Glycine max
  unsure (1)..(534): unsure at all n locations
  Clone ID: jC-gmst02400066a07d1
actattattacatagcaactgaatgctgatataattaacgaaaacagctacactgagtagtgacatatatcatcacttctctccccactctgttcttttcttttctataaaatgaatagaaaggtcaccttactgcagctgacttccaattttctaattgtggttatcactgagtatcatttaataacacagcaccaaagacttgaagatattcatcaactattcttttacatttgaatatcgattacttgaaccttctttgtaagacgaagcatattatactgtttattttaaaggggaaaatatatatcaatcttgaatattgaaataaactgtgtaatgctcgtctctgaatgagagtaatggctgcaaaagaaaattcctgtttgcccctttagccacaaaactgataggattgtattggctcaatccttgcagagcaacaaagctngctgcttggttaaaagtagcatcagaatcagatttgcaactgagcttgactcctgcactagggctcataccactgtacacata

SEQ ID NO: 31064 - DNA, 503 bp, Glycine max
  unsure (1)..(503): unsure at all n locations
  Clone ID: jC-gmst02400066a08d1
cataaggaaaaataatggtccacaacacacttaaaaaattattatcataaagttttctcttccccaaaattcacccgttcctcaatattccataaaggaatacgaggtataacaagattttaaaaaatatgccaggggggaaatctactaagataagggaaaaaatacaagtttcagaatctggttcttaattaatcaaatagtaactaaaattacaaatgaaaagatgcatttgaatagtgcctggtacttcagaagaatcagcagagtccaaaactaaatgattgatgcatcttatgagggtatctaatgacccatgtaaggagcaccagcaccaggatgaggtctcacaccactgccctgtcccatttgaggattctggtatccgggttgcattgctggctggttcccataccccatagcaggctgattcgcatacggagcaggaggtcccgcctggntaactggggcacccccaagccctcaagcagattcccagcccc

SEQ ID NO: 31065 - DNA, 329 bp, Glycine max
  Clone ID: jC-gmst02400066a09d1
aaaagggggcattgaaacaagccccccctttaatgcttttaaaacaattttttttttttcaaccccagcaaaccccctgtccggtttgagaaagccacacccaaatttagttttacaaatgcttgtaaaaatttgtgagggcccccccttaaattaatatctcaccttcaccctgggttatttaaaacaactttgcttccacttgtctaatcataaaaacttgtgatggggggcaaaatttccggagttatgttgcccacacacttcctgagggaggggtgggcatactttttttccccaaaaaaggacctcaaaaatcctggctttct

SEQ ID NO: 31066 - DNA, 434 bp, Glycine max
  Clone ID: jC-gmst02400066a10d1
gatgaaaaacccaacaaaataacgatattttaactcaagaagtgccactaattaaagttattataaaaccagcttattagagaactatacatataaaatactatataactctaaaattgattctaattctatagtgatcttcaccctataaatacaatacagagagtaggtaggttttgaattactttattgatatattaacaaatacttatcaagaaaactccctgctttcaacatctagacatattaatctaaccatagcatcgaattggatcattgcatcccttagaagcagattgcttggaaccaaatctccctcctttctcaaggtactgttgatggtattcttctgccctgtagaacttcttggcaggaaggatctcagtaacaatcttcctgttcagcttcttctgttgttgttccagagactctat

SEQ ID NO: 31067 - DNA, 427 bp, Glycine max
  Clone ID: jC-gmst02400066b01d1
aataatatcaaatttattatcaatttgtgtatgcctacacaagtctattattaatattagacaaacatgacatgattactaagacaagaactttgccacaccaacctagtagcacgcagtactatacaaacatttgaaaaccaacaaactttaacgtcagaacaacttgaggcaacgacgcaggcgcaaggaagattagggcgggtttttctttactcatgatgagttacctcctctgtaacggagaagggaatcaatcctctgcaacctcaactgtttcttgaacctgttgatgaaatcgtcagctttggcgtctacttcttcgtcttctctccacgacgtcgtcgtttcaaccggcctcgccgtctgcggcctccgcttctcgacctcctcccactcgctatccgtcaaaccccctctcacgctc

SEQ ID NO: 31068 - DNA, 551 bp, Glycine max
  Clone ID: jC-gmst02400066b02d1
gttgtagaaaagcaatattttaatgttaagaactgattcttacattagaactgatcttacactggctacaagcgtttcttaccaccaaggaatagctatgctctaaatccaatctaaaatatggtcagtacccacatcgagaatgtttcttcggagatagggaaagggcaaatacatagtttcgattggaccagttctacttatccatcgaaagcgatccttgtgattttgtagaatacattcatctacctaaacagaaacaaaagtgtggataaaaccgattctcaaagaatttcaaactaatagtacataccttttatttattcaaattaaaggaagatcaattattttgttcaatgtagcgcttggctccatccaaagtattcttcagcaacattgtgactgtcattggacctacaccaccaggaactggagtaatccaaccagcaactttagatgcttccccaaaatctacatctccaacaagccttgtacctgacttctttgttgggtcatcaacagcatttgtgccaacatctatcactgcagct

SEQ ID NO: 31069 - DNA, 533 bp, Glycine max
  Clone ID: jC-gmst02400066b03d1
ccggcaaactgcatttcattaactacacataaaatagcattagtcatgtttgaaggaagataccttgtacatcattttctttcctattgtcagaattttacaggtgtcagaatacccacagccacaggtcattctaacctaagtgcctagttagacaaacaacaactgcaggacctagaaacacatcgccactcccaaacaaactaatagttgtctctattacatcatcttcattctctgctaatagcttatcaacaagaactaagaacacaaatcttatcagtcaagttacagaaccttatcaacatgtggtcaagatcagttccaactatactggaattaacaccatgcaatctgtcacatagaatgctgtcagcatcatgaactcctaaaaatatgatgacggcccagaacttcaggtatccccaatgccgaaatgctttcacagccaaagatctcctgaagcttcccatcacacactatagccataggattcgcaggatcctctagctggttgactttaatgtactccc

SEQ ID NO: 31070 - DNA, 258 bp, Glycine max
  Clone ID: jC-gmst02400066b04d1
tcgccttttttttttttttttttttttttttttttttgggaacgaaaaaaagggatatcacaaaatatatggttatttacatggtcccacccgaaatacattttcagagaagaaaaaacgaataaacatataatcaaccaattcaattttcagaacagtctacacaagaaacagaagctgccacccattcattaatcatgggctaaagcaaatcccaatcttcccaacttcatgtagcaggtgtttcaaaaaacaaca

SEQ ID NO: 31071 - DNA, 433 bp, Glycine max
  Clone ID: jC-gmst02400066b05d1
gctaaaaagtgccaaatcgcatgttgctagcatttctaaaaaatacaatgccacaccatttctacagttttcgtgtgaaataacaccacttgaaaaaaaaaaaaaaggagtattacaatttcagcatatagcttatctatttaaaattacaactaccatcccacaaggggatatcactcccagtaaactttacataaattgaagcttggttagctccatacaaaaatccaatttggctgaaactcaggatatgaatggttgtgccattaaaatgtaggttaaggattcctcaatgtgagaatcgtttacctaccccgcacgctggccgaagattgaccacttcttacgctgacaatatcatcatctatttcactattatctaaacaaagacccttttggtttacactcacttcagaactagcattactgcttg

SEQ ID NO: 31072 - DNA, 530 bp, Glycine max
  unsure (1)..(530): unsure at all n locations
  Clone ID: jC-gmst02400066b06d1
ctagttctgtccgagtatcagatcagagtattgtacaatgaggagattttatggtactaaacaaggtacactacttttgtaccttgtttcaaatgggtgagtggtgtagtgaacaaattaaatgaattgaaagcaaaaatcgaggtgggaaagagatgatgttggagacaaatatagaacacgcccttaccctatcccttctaagctttaagacaatgatcatcattctagcaaaagacgctgtggttgaaataaccaaaagccagaaaggtgatagaaaatatcagagaattcttctctgtacttgggaccaaattatcggtactattcatttagcttacagttttgaagatagggatgattgtacttgacatacttggtccagtaagaccgatactttgtcatggcaatttctaaccatggcttcatattaccattgtagtgtacaactgctgcattctcaatctctgatcgatccaaactttnattataacccaaaccaagtacatgccatgatttatctagtggat

SEQ ID NO: 31073 - DNA, 352 bp, Glycine max
  Clone ID: jC-gmst02400066b07d1
gggagcaaacccccctttaagcatttatgagtagaaaatattggcccccatatgttttgaaacattggggggagtacatttcacaactgggttaacaaattaaaccatactggatccctaaacaactggggggggggaacaaattcccataacaaaaaaaaaaggggaattcttcaacatgtaaggggaaaaaattaatggagaaataaacttttaattgacttgacaaaactttgggggtagctagcttctttcatctggtttttggggaatgggtcaagaagctaagggaagtccctgggaagggcttgaatgatactgggggggacgagggtggggaataacctctctt

SEQ ID NO: 31074 - DNA, 395 bp, Glycine max
  Clone ID: jC-gmst02400066b08d1
cgagggacaaagaacaaggcaaatactgctattcaccaatattcctaattttgtacaaatgttttttcttttaaaatcaaatacatagaaaataatggaagttttaacaacggcttaaccgataagaggaacaaatcatgacgaacaatcttgatatgaaagcaatgtgaaaagcttggttttaaatgccactgagacacatgaacttttaaaccccaaaaactttcgttctctttaagtcgagcagcaaccagccttttggttcactggcttgcctcgaaattgaactggtggaggcctcgcattgttcactggctggcttgccattctgtttttaatttcagcagccatggccatgaaagcctgttcaacattggtggcatttttagcactag

SEQ ID NO: 31075 - DNA, 396 bp, Glycine max
  Clone ID: jC-gmst02400066b09d1
aagatacaactttttcatcttttattcttcgcaccagaacatattacactcaatcaaattgagattaaggattgaaactagcaccaagtaattaaagtaaaacgacaaaggatatctagccttacaaattacaaggcatagtttccttgacaatcaagggaaggaggagggcacacacaaacaacctctcatcctaaacccatctataaaaacattcacagcacatgcaacacgggaaaattatctacaaaaggatttagatttcaaaaaacacaatccttcttattcttctagcaatttgctagtagtttgcttaatcaaagcttgatgagcgactccaccggcctctcaagtagttctccaacgagacgttttgctcaacgctgcacatggaga

SEQ ID NO: 31076 - DNA, 316 bp, Glycine max
  Clone ID: jC-gmst02400066b10d1
cggacaatgggggtggagagaacctaaccggcaaaattatttctttcccccccacaaagttttcaccaggggggggggggaaagcaaaaccctccccccaaaaattcaaaattcttaaaaataaaaaaaagggaaaccagggttgaactttaaaaaaaatttatcccccccagcttgggttcccctcaagcaactttatttagggggcctttttttattttagggccctattaccggggtttctaaggttcggacaaaattgggggtggtcattatgggaaattttatgcctttgctagctcaaaaccaaaaactg

SEQ ID NO: 31077 - DNA, 435 bp, Glycine max
  Clone ID: jC-gmst02400066b11d1
catgttcaacattattgactgtaaattttcaaggatacgtagtggctctttaattgctccatgttacataagcaaatggtccataattacatttataaatgtgttaacccacaaaagggattatctattgaatataactatttacattattattctttgattctcacctgaattacatgatacaacatctcagcaccagccccttttgatcaatcctgccatcttcattgccttcaggtggctgagctagcttccgattttgtggagacatcatttctttcttcaattgcatcaaaatgtcttccattgtacactctctttgccaattagcaagcataggaaacaaatgtggctcaaccactccagttttttggttgacacaagtcatgttaatcctagtctgaaatctaacagctggtggattgtctggataat

SEQ ID NO: 31078 - DNA, 551 bp, Glycine max
  Clone ID: jC-gmst02400066c01d1
ggaataaattcctttgcattgataactcttgaagctcagtgtacatcattggctttttaggcctgccaggccctagctaggggtttagccactcatggccattgagggcttacaactggggatgaaataaagaataggctacaaaacaaagaatataaagagggaagaaaactcaggcttgaagtactgagagtgatgctctgagatgggatcattttttcttgggactgtctctctatttatagtggctgaagtgggcttacgggccttcgtagttgcgctcagcgccacacctcgcgcttagcgcgttcagatcgcgcgctgggcgcgccatgcacgctgggcctgtgcttctgttggatcgggcgctgggcgcctgtgcgtctgttggatcgggcgctgggcgcctagctgggcttagcgcgcgtaacggtggcagcggtttctgccacgctaagcgccttcagttagatgctcgcttagcgcctgatgcgcgctgagcgcccctattggataggcctgcttcagaatttctctcttttttttctttc

SEQ ID NO: 31079 - DNA, 505 bp, Glycine max
  Clone ID: jC-gmst02400066c04d1
aaattcaactttagaatcaagagttcccattgtactatcttgattacaattacagttaattacaatttcatatacgaaatcacaaatcccaaattccttgaaacaagtttgctaaattaaaaacggaaaatactagaaatgaacggaaaaataattaacaagcactactactcctattatattattattattacaggaaattggaagatttaagcacaggcacacgaagtatcaacgacaagggaatcttcgccctcgttcctgaagaagaagtaaccaacagcaagacccacgacgacggccacaaacaccccaccgttgaaggacatcaccgacaacatcagcaagtacccgatcgccgagctcagcccgaacagaaacgctccggctaccttcacgcccaccttggcgcggtttccggcaagcttccgtcgcagaagcggggcctcgatctctgccgggaagggatttccggcgccgatgagcttgaggcggatgcggcgat

SEQ ID NO: 31080 - DNA, 409 bp, Glycine max
  Clone ID: jC-gmst02400066c07d1
aaaacaaaacgggcgggctttattttttcttcattcaaggagaaaggattcattgtccctttaaggatcttgctgggcttccgtacttgctaatttggcttaacaaaaaaacgtggggaaaaaaagggaaaaaaatgcccaattcctaaaatgaaaaaaaaaagcccataaaaagggactaaattaaaaaaaaaaactgaaacaaatgcttgaagcattcaattgaaaaaggagcctttttcataagtaaaaggggaaattatacccattaaggaaagagggaaaagggaatataactgtgggtgaaaatatctataggttgtttgttgtaggtcaagattgaaagatgatctgtgtatagaggaacccattccaagtatcaggtaatcctggtaagcccccatgaatg

SEQ ID NO: 31081 - DNA, 419 bp, Glycine max
  Clone ID: jC-gmst02400066c08d1
gcactctacgaaatggctcgtcggatgaacacaggcgttacatagcattcatacacgagtaatatgaaattacatttataggacaacaaagactaatctgcaaaagttagaagcagcctagacatcccttccaatggcaacagtcgtttacagcatttggttgataaccatacatatatcactgtcagttggggctaattcttttaagacattccccatataattcattacactgataaaattaaaatcaccaagagaaaggaaaacctagtcgagcaccattgttaacgaagcaaatcccatacttgggattggctcattataatgtttacccacagataaacgggtagaaaacagaggataagcttggaccgaaaagatacttgtatgtacaatgtaagcttattcacatgaaacac

SEQ ID NO: 31082 - DNA, 396 bp, Glycine max
  Clone ID: jC-gmst02400066c11d1
ggatatatcattattcatacataataatttcaaggaagtatatacacactaaacttgtgaaatcccaagaaaacatagctcaggaaagaattttagtttaaaacaatgagttccagaatcacataatcccaagcaaaatttacgggtttctaagagccgccaaacgcttctcaagttcttcaatgcccgagctgctatcattttcagcattctttgttgcgactctccctttgggagctgctgataactgtgaggcaacatctacaccaatttcatcgagcacctggtttgtcagcttttcagtctcctcttcagcttcatcattatccaaggcatcatctatggcatctgacatcatttcagtagtcatatccatctgcgctgattgtttctgga

SEQ ID NO: 31083 - DNA, 359 bp, Glycine max
  Clone ID: jC-gmst02400066d01d1
aaagccaaacaaaacgttcgggctttattttttcttcattcaaggggaaagggttcattggccatttaagggtcttgctgggcttcccgacttgctaatttggcttaacaaaaaaacgtgaggaaaaaaagggaaaaaaatgccccattcctaaaatgaaaaaaaaaagcccataaaaagtggcttaattaaaaaaaaaaaaactgaaacaaatgcttgaagccttcaattgaaaaaggggcttttttctttagtaaaaggggaaattataccctttaaggaaagagggaaaagggaataaaagtgtgtgtgaaaatatctatagggtgtttgttggaggtcaaaattgaaagatgatc

SEQ ID NO: 31084 - DNA, 373 bp, Glycine max
  Clone ID: jC-gmst02400066d02d1
caagacagagaagtaggtcaatattattattataataatataggaaaggagggtgacaaattacagtaatggcccatgccacatttacagaaccagcacccaacaatcccatccgttttacgatacacattcattattattattccttatcacccatatggtagtgattacaatttctcaacagactcaaacctagaagaagaagaagaaatcctcatcaaatctcagactcagagaccatggatctcaatactgcaatatatccgcagaagccataatagggtggttcagataccccatattcaacgggttgaagaagctattattattaattggctcaacgaaggtgctcgatgttgctgctgctccaaaa

SEQ ID NO: 31085 - DNA, 291 bp, Glycine max
  Clone ID: jC-gmst02400066d03d1
aaaaggaaacccccattatgggccccataaaaagatttacaatgttttccaaaaaaaatggccccaaaaaaaactgttttaaaaaaattttttggggaaaacacccttaaaaacggggttcttaattaccggccaaagggggggcccccccaaatccctttttgaaaatgttccaagctagcccccccctgggggggtgctgtttgacctattttgttcccacccaccactggtggagggttctggtggtgcacattttaaatggaaaaaatgccccccaaaccattggtg

SEQ ID NO: 31086 - DNA, 329 bp, Glycine max
  Clone ID: jC-gmst02400066d06d1
aggggcaagggaaattgcgttcttaattttttattattgaagacaagcaaagggggctggtgggtacaattcaaaagccagacaagcctctaaaaaccagggcttgttttaaaagggaagaaaaaaaatagccccaaaggggtgccctggtaccacaccaaaggccttggatatgaggtacctagccctaaaattggacaacataaccaccctgacaagaccgggggaaaacaaggtaaaggctcttccccacttttaggtatggggaaaagcgattgtggttaacttaaaagaccgaagactttaaaagacatgaactctagctttag

SEQ ID NO: 31087 - DNA, 480 bp, Glycine max
  Clone ID: jC-gmst02400066d07d1
gcatgtaataaaggtatcatagcatatagcatagcataggtatttcatacattgttcttttgaggagcacatgcagcaattcagtcttactacatgattctctttatttagaaaacaaagttttaccaattaaacaaacttatcagctaggctttgcaccttagacaaactgattaaggtactcatccacagtgatgtatttcacatcaggatatagagctgaagcttccactccaaaagaagactcaatttcaaagttagtatgatccccctttacataagaagagtggttaattgacaggatcacattcacgggtggtgcggactcttcaatttgcttcaggagttgttcttctggaacatagattctttcaagagttttaccaatctttccctcccagagagtaacaagctcattaaacgacaaggtattagctggtggtctaatgtagagaatttctgtcaagggtcttggatcat

SEQ ID NO: 31088 - DNA, 270 bp, Glycine max
  Clone ID: jC-gmst02400066d11d1
gaaaagaaaaacaaatcaccgttactaggaaatcagatattctttacaattgttttcacttctatttctatgtactgaagcattacaatgaccaaccaattggcaattttcgtattctataatataactattattggaacccgaagataaacaacaaataaggaaaaagaaaaaaaaaatcaacgaataagtacatctaatttatgttcgtgccaaaacccgagtcacggactcactgagtcttctctggctcaccttggttcggggggc

SEQ ID NO: 31089 - DNA, 440 bp, Glycine max
  Clone ID: jC-gmst02400066e01d1
gaattacagaaacgcattatatcgttcattcatcccataggccataacaagaaagatcaaccaagctcttctagaaaaaacaaaaatattagaagaaggaaccatatgagaacttagacgtaggagacgagcccttgagacaataattaattaacagtgacttttcccaccataccagctccttggtgaggcgaacagaagaaactgtaggttcccttagcatccaaagtaacgctgtaagtctcaccaggcgcattgagaaggtcttcatcgctcatggagattttccctgcatccacgccgctaggaatctcgtcctcgtcgaacacaacgttgtgggggaaacctgcgttgttcttgaacacgatcttctccccagaggccacggagaaattgttgggaacgaaagccagagacccgtcatcaccacccagcaacac

SEQ ID NO: 31090 - DNA, 521 bp, Glycine max
  unsure (1)..(521): unsure at all n locations
  Clone ID: jC-gmst02400066e02d1
agtatcaaaagtataaaaaatagatagagattgcaatcgatgaaatgagcaaaatagttttaatttctcaataacaaggtgttgcaaaataataaaatataactagcagaaaaaatccagagagaaacaaaacattccaacattgctgaaacataaagctctaaatcctaattctcaaactagaagagtgatgttcccttgcccttcttgtcaccaccaatctcaaagtgcttgcacctcttaatagcgtgttgggagacatgcttgcaaccctggcattgcaacctcagaacaatcttcttggtggttttagccttcttgtggaagacgggcttagtttgtccaccataaccggattgtttgcgatcataacggcgttttccttgggcagcaatgctatccttacccttcttgtattgggtaaccttgtgcagcgtgtgcttcctgcactccttactctngcagnatgtcttctttgttttcggaacgttcaccatggtgacggcgcgtgcgatcggaat

SEQ ID NO: 31091 - DNA, 443 bp, Glycine max
  Clone ID: jC-gmst02400066e04d1
aggtaataataattttgattcttctcttgctgccactggcttgttgattacatatacgtactcgatgacatcaaatgctcaattattgattccttcattggcacgaagtaaagtcgaaaagtactggatctacaaggaagaaacaatgaacctagagtttggagcaatggcactaggttggacgatgtggtggttaagcacacagtccaactccttctgaaccctctccatggcttcagaaggcaaacaaaccggtataaccaacccttcctctcctttagcattcttaaagggtatgtaaaagctagcaacaccaggtatggctccaacccctcccttggcgggtcctccataaacagccttcccccacccaaactcaatgtttccaaacccagcacgagtcacatccgacacgagatacgatctcacaacagtgaagtgag

SEQ ID NO: 31092 - DNA, 101 bp, Glycine max
  unsure (1)..(101): unsure at all n locations
  Clone ID: jC-gmst02400066e05a2
aagacgcttaactggaagtatcactaagataagcaaaccgggggaaaaagaanggaaaaaaaacaaaattttaataaaaaaaaaaaaccccggcacaaggg

SEQ ID NO: 31093 - DNA, 486 bp, Glycine max
  Clone ID: jC-gmst02400066e06d1
aaaaatgccactgctaattaaactaaatattttagggttgaatctttgcattttgagatacattaatcacttcaaaaatgtctgaatgatgttgaaacaagtgattccagtcaatcatatcatgtatgtgatcgaacattccaatagacaagcttctttgtgtcttcattatagtagggttattgcttaaccttgaggccggcttctatgcgttcaatgagctgatctgcagtcaatgctccctcaaagcgatcataaggttctccatccttaaacatgatgaaagtcggcaacgcctcaattctgtatttgtcagcaatgctaggatacttctcagtatcaatcttcaccacctgtatcttatccttaagccgagtgcttacttcattgagtatgggaaccataaattgacaaggaccacaccaggttgcatagaagttaacccacacaggtttctcagaattggcaagccaatcgtcaaacgag

SEQ ID NO: 31094 - DNA, 376 bp, Glycine max
  Clone ID: jC-gmst02400066e09d1
aagtgtacttatagatattgatgggtaattgacgctggagataaggtcttcagaggagttctttgggcaattgaagttagtctcagagattgaccttatgattttctgtgaatagccgaaataacaaaggaatctgagatagtcttccacatctgtttcaaagactaagccagggttgagagctctgagtggattaatttccccaactcccatttcatgtgggccggcaatggagtttgagctgttagtaagaggcttcctcatgttgttgtagtttgtagctgttgtcatcaatgctgatttgatcattgaagaactccattttttgtgtactgacttaatgaatgctgctgcacctgtcacatgtgggcaagcc

SEQ ID NO: 31095 - DNA, 380 bp, Glycine max
  Clone ID: jC-gmst02400066e10d1
cccccccaaagcccaaagggtttgggccccggggtttaaaaaaatgaaaggcccgttgccttgcaaaaaaaagttgcccccattccgagactccccgtgcctgggggttaactttggggcaagggtttttgggaaacctaagaagggggggtaattcacatttaagggggattccgggttaaagttaaacccgggcaccccaaaaggttcgaagtttgttttgttaaaattttgggggggggggtgggcccccggcctctttcttcccatttttttctttaaccctaaagttaacgggataacccctgtttggggcccttgggccttgaacaaaaggttggttttttaggccaaggcctaacatccctttatttgggggg

SEQ ID NO: 31096 - DNA, 489 bp, Glycine max
  Clone ID: jC-gmst02400066e11d1
gttcactaaagacaatcctacttatttaaacagtttatgataaaatcaacttttaaagttttattccagtatctgactagtagaacaaaacaataagaaattgtaacactattatagtaatagtcctttctcctcctcccaagggtatgataattatgacatttcgttttctccattccaaacatacataccctaatgaacttcgttgtcagcctccaattttaggatacactagcatttccatttcctataagcactttcattagcagcaataataattctcttcacttgatttactcactgttcagtactgcaaaattctacattgaaatgatgtttggtccccagctaggactctattgtgattgcattgcatgtacgtaacgttacataggaatatatatttttcttcaagggaaaattctacgcgtaagggtagtaatgatatctgtgtacaagtcaactttggccttagtcaccctaatgagc

SEQ ID NO: 31097 - DNA, 453 bp, Glycine max
  Clone ID: jC-gmst02400066e12d1
agacacggattctaagaggtccttcaatctaattaaaactgtgtacaataatacgcttagttcttttcatccaccgatgacttcatgaataaaacccaactatacgatctaaaattcaaaccttttgccacctgtctgtaattaaaaactataaccttcttacatgtatcattaaacttctgttaatgccaccaatcccaattgttaagaggaaattcttcccatgtctcttcttcagcgtgtatgtacttgctggaattttgactaaatggctgtcctaattgagaaatagttcaatagaagaactgtattatgtatcaaaagaaagctgctaccattggcctggatctgtttgaactctatatttcttgtatgtgtctgaaactatgaatgtttacatcccactatctatctagtggaaatgcaaatggactggtccggagattgagtcct

SEQ ID NO: 31098 - DNA, 377 bp, Glycine max
  Clone ID: jC-gmst02400066f01d1
aagccccatgaagaacttaacttgcctttattcatcactgctttaaattccactatttagttaatacaaatggacttcgaaccatatattggccgttactcccaggaataaaaccaaacagatcttccttcaaaagaggtccaagttggggaaaaaataacttggtagccaagttttttactactctttgtaaactgaagtttatttggagtcactgggacttttactccactgggagcttccacaacgggagagtacgctggttcatcttcttcaccaacgtttgtgacagttctactcacgttaccggtgctttggcggggaagtttactgctatggaagggtagttgatttggggattagaacacaacttgaat

SEQ ID NO: 31099 - DNA, 456 bp, Glycine max
  Clone ID: jC-gmst02400066f02d1
gaagagaaagaaatatattggggaaaaattacttcaagtagtacatctaaatgtccccatctcactattcatcttgcccccttctaatattgatttttccaacactcactactttccttaaagagaaacgaagacgtttaaaatggaaatgggaataatatcatagagattaatgttcaaaaattttaaaagagaggggaaaaaaagggaaggaaaaaataaaaataaaaataaaaatactagttgttataaatcccaacacaatggtaatgttgaagaagcctattggcttccctaagaccactgaagtaagctccatgagttgtggaataatgagttctgtgagttgcttcccctgcaaacaaaatttgaagtggagatgaagctgcaggaggttgacaactgttatcttttggcaatggctctgccattgtatctaaatcatcaccacttgat

SEQ ID NO: 31100 - DNA, 489 bp, Glycine max
  unsure (1)..(489): unsure at all n locations
  Clone ID: jC-gmst02400066f03d1
gcttccatgggcactggacattctttaatatttcacaattccaaaatcatttacaaaattaaccgatgtatgtatgtatgtatgatatatatagatattatgatacagattgcttagccaaagaagcagcaactccagaaaacttttctagttcaaatcgccaataacatctatttggtaaatgaaagtaatcacaactacttaagcaggcaccaaagcccaaccttcacccattatgtgcaggcacaacgagagacatattgtgacaacaacagaggatttggctgcaacatatctcacaatctcaagtactgcctcatgaacaatatgagcacattttttcacagaagcacaaaatgtctgcaaaacaaactccatgaaagacctaacagtcttaaatgtcaccctgccggtcacatcaagaacaagcctcctattgcttggaaccgncaacgaagacgaaaccttgctcacccaggcacttttttt

SEQ ID NO: 31101 - DNA, 490 bp, Glycine max
  Clone ID: jC-gmst02400066f04d1
ggcactcaaattaaattattgcctcaataaaaaggagtgaaaactataaagtacagtaaatcataaatttatcttagacaccaaaataatacttaggaaagggaatatggcccaacttgatcagggacaatgcaagaaaaaaaataatatgtgaaatttaaatgttctctcccaaattgatcatctttacttgctgctgctagtttccttgctagtttccttgacgatagtcacagggcaagaggcatgggtcatcacaaagttgcttacacttcccaatataatcctttggattgtgctgaggcccctgcttcccataaccagcgaatccagcttcaaatcttcaatagcatccaaaagtttctctcttgcatccccccagtatatttttgtaacaatgtggatctctttttgtcttgaagcagtgtcaagcaaatcaagaacctcaatatcaatttgaacatcatactttttcataatctcaggctct

SEQ ID NO: 31102 - DNA, 462 bp, Glycine max
  unsure (1)..(462): unsure at all n locations
  Clone ID: jC-gmst02400066f06d1
cagcagtagttacgacttttggattttacatatagcacttggccacaacacacagaggattcttcttatgctgtgtaactcctggcaacacttcagtatcaatgtcttcctttttcattccttgtggcaattcccagtcaaaggaataaagaagattagcaagtataagatccaatgcagcaaatgccatattcataccagggcacaatctacgaccagcaccgaatggaataaactcaaaatcttgtccataaagatctatgtcgcaatttaaaaacctctcaggtataaactcttctggatctttccaagccttaggatctctatgaattgcccaagcattcacatataataatgtcttggctggaatttcgtagccatctaacatgcatnttttatttggttctcttggtataagtagggggtgctggtaagtgcaatcaaagtgtctcttttatcact

SEQ ID NO: 31103 - DNA, 397 bp, Glycine max
  Clone ID: jC-gmst02400066f07d1
gaaatgcacctcttcatctacttaccattcatgtttgagtttgtacagcaccgcattcacaaccgacgaaaaaaataaaggaagggttaacaataacccaaattaccaaaaaagaaaaaaagtaattaaaaaacaacaaaacggttctgatctcttgtaataagtatcaaacacagaaagccgatgatggagtcaaaactgagccgagccacgagttcctcaagccgaacattcaagccccagctccatcttgcacgagccactctcagccgagccactaaaatttttcaactcaatccttcttttcttcaccggaaccacgggccgcgcacgtgaaaccggttcgaacccaagcgtaagctctaaaccaacatcatcgctcacacgcttcgggttc

SEQ ID NO: 31104 - DNA, 461 bp, Glycine max
  Clone ID: jC-gmst02400066f08d1
agacaacttgtatatacagggatacttgatagtttagttatgcatgatccacaatatagacaacagaatatacagtattacttgactgcctgaaactgaaagtataaatcgatagagtaagtccttgaactggtcctccaaagattttggtcaacaaatcaatcccacagagatacaaatcaaatactaaattattttgtgttaccacttctttagtcctctatgtgaacaaatgtgggaacattttagatatttgtgggactaatttgataacaaaaatcttaaaaacattaatgaggtgatgccataatctttggaagatcaattttgcagtttattctaaaacaaaatcacaaaacacactgcacagaaatacaggtatacaaccacaggcgctatagcttcaaacatactcccatacaaaccaaatacaagatctaggtggagtagaggctactgat

SEQ ID NO: 31105 - DNA, 467 bp, Glycine max
  Clone ID: jC-gmst02400066f11d1
gcacgcatacatagtgatttattaaaatccattcgatgttcaaatggtaatagtagaacaataaaaggtccaaacgccctaacaatggtctaacataaaagggaaaaaacaccaaagaaaaacaatcactgtctggaaaaccggacttattttcgcaaggacataataaagacacttaagaaaactactcttcttcatcttcctctttccagcacttcagagttgatctaggtgaaccacagtcacaagtcttggcaaatttttggtagacaagagaaccacccattccaagcccttcgtggctcctctcttcgcgacagtatcccttaacatccagaaaacacgtctgatcaaacaacttgcttgcaccatccacatgaactgcaacagagaactcagttgggagaaaacatgccaataccctcttaaccatttcgttcagattcaccactttgaagtcataccca

SEQ ID NO: 31106 - DNA, 548 bp, Glycine max
  Clone ID: jC-gmst02400066f12d1
ctgtaactctttaatattaacacgaaccatcattaaacagttacaccttgacaagcatcacacagtttcttgtcctgtcatcaagggaaatcataataaaatagtcttcctctccttgtccctcctaaattcccaaggcacaaacacagaaaaacacattttatatagatagaaaatggggaagatctctgtcaataggtttaaggaagaggccatgatgatataaagtttttctccatttgcactctccaatatgttcactttttgagatgaggaaaacaagcataaacatcagatttagggtgtttggcttcagcatgctccctacacttcacttccgatgtggtgcacataaatgtttgcatgcacaccttgcactggatcgacattgctttcttgtttgaatccagctggcttccctttgaggcggccttctgcttctcgatgttcttctcgcgagccatctttgccttttgcccattgcctcctcccatgtctgatgccgcatgatgaaaccctcgtgaccctaattctcttttctcaagctc

SEQ ID NO: 31107 - DNA, 433 bp, Glycine max
  Clone ID: jC-gmst02400066g01d1
ggcaacacaacacaatagcttattcattagttctcatccattaatttccattgaagtccgaaaacagaaaccaaaaatacaggatgatgaaatctcataaagcaaaaacaaatgggaatgtagtttaaggaccaaaaaacaaaggggggtggctacagatgctttgcaaatttttcaatgacttaaaagcctgggggcttgtaggcgatgaagctgatgcactgcacttggcgaacgttgtcaaatccaatgatacggatgaagccattggggtatgcagtcttagccttttgaagctccttcaacacctgagaagcattagtgcagccaaacataggcagcttccacatggtccagtagcgtccatcatagtatccaggtgacctgttgtgctcacggtacacgaaaccgtgctccaactcgaattccaagc

SEQ ID NO: 31108 - DNA, 366 bp, Glycine max
  Clone ID: jC-gmst02400066g03d1
gaaacagaacaaaacaattaaattttcccgccctgcctaatgcatggcctattttatttttttaccctacatttttgcacacccttttgttttcaaacaaatttaaaaaaaaaattcccatgtttaaaaaccaacaaattttcttttttgctttgcccccccccttttaaaaaagaaaagaaaagaaagggaaagttttttctttttgttgcaaacttgttcaaacgggtccattttttgactttaaaatcccccttgggctccgaggaaaggtttttgggggatggagattttccagggaaggctttttttggtttcactagggacgggttaacccttgaaaagaagtcatttgattgcttttga

SEQ ID NO: 31109 - DNA, 499 bp, Glycine max
  Clone ID: jC-gmst02400066g04d1
gttatccaaattgaaacaagaaattttattgccatcgtagctcaattacatttagtctccatcttgcatcttgtaattttgctatatctgagactcttttgtctgcttcacatttctatagcaaaacgtaaaatagaaacatctaacgaccaattcgtacacaaggtacacgtacaataacaacagtggaagaagaaattggtacctataaaaatacactggatcggatcgagtagagtatacataccacaagtgtcaataacatattctttattacactcattttaacacattttttatgattagtttaaatttattaaaaactataaaatcacataaaaaaaataaccatgaattttccagatttaattttcaataaattttagtgacgaaatatttcatatgtaacttttgaaaaattcatcactaaagtttttgtaactctagaattagtgacgaaaaggcaatacatcactaaattccgtcactaataaacata

SEQ ID NO: 31110 - DNA, 449 bp, Glycine max
  Clone ID: jC-gmst02400066g10d1
aaacaaaacgcatttattttaaatcattggcatttctgaaattccaaaaaaataaataaaacctacctaatcatctgtattatgataatgtttcctcagcagcattatttttattattatatctacagatggactgatagccagatcatcctagtattacaaaaatccagcagtgacacattacaaaatcaacttccttgtccctggttgagcatgaagaactgtaacaaacaagtccctagaggaatcttagttccccaactctatagtttcgcctgtgaatacaagaaggttccaaggatagcaatggcggcaccaagagcattgatgggttgaactggtgtgtggaagataataatggaagacacaatgacagatatacgtttcatggtgtttccaatgctaaacgtcaaaggagagatctgatccagagacatgtatgacacttg

SEQ ID NO: 31111 - DNA, 446 bp, Glycine max
  Clone ID: jC-gmst02400066g12d1
catgtatagtttgtaattcattaattatttaaaaattctacaggattcaatacgattgctatgatatagtatcaaacacctaaataaagaaaaagaaaagacttaaaagagtaaaaaaaaaaaaaaaaatatatatatatatatatatatatatatatatatatatatatatattataaggctatataagagaagcagcaacccatcaacctcataatataataagcaagaaatagcggcattccacaaaatgtccctaagccttgttagctatattgtgggagagccactccagtccttcatatagtccttccccagaggtagcacatgtgctctggatataccaggggcgttggcgaagagaatgaaaaccaagcttgtctgtgatttctgcagcattcatagcatttggaagatcttgtttgttggcaaataccaggagaaca

SEQ ID NO: 31112 - DNA, 405 bp, Glycine max
  Clone ID: jC-gmst02400066h01d1
gggaaaagtaaaaaaaaaaagatttggtccggaaaagacaaattcctttgatcccccccaaacatttttggtccctcggggggttttttttttttttttttaaaggctaaaaaggccagagtttaaaacatttcacacttcgggcattctgtttaagcaattttaaacctttttggaacttaggggagttttttgcgacttattattatccttataaactcatttaagtttttaaagcccttcccattttttttcccccccattaccatttttttacaagcccttagggtggaactttccccttgggttttgagaacttgggacaatttctttggactgatttttccatcgcccttcaaaataaacccttggaaagcacttttggtctctcgttttttcaccctt

SEQ ID NO: 31113 - DNA, 286 bp, Glycine max
  Clone ID: jC-gmst02400066h03d1
gggggaacagcgcaccctttttttccaacgaagaaatccttttttggataaatgtattggcaaacacagggcatatgacaattttgttaataaaccctataaggacacaaggtgtaccttggccaggggcaaaagggcccccacttggcctcccatgaaagctcagtgtggggaaatttctgaaaaccccattgagggaagcctttttttggtctcttaaactccccgtaagaggtttcctctgggcgaagaagcttgtaactgcagacctaattgccgaattggg

SEQ ID NO: 31114 - DNA, 422 bp, Glycine max
  Clone ID: jC-gmst02400066h04d1
atataaaacacgaatctttaattcaaagcagaaaaggaaggggggttcaaacactcgagaaccatggatgaaaaatggagggaaaatgtctgctatcagaatcaataaagcccgagtacatctgcaagtatataagaatccaaaaaactccatcccctacacagaagaggcaacaaaaaaagagcttaatgctcgtaacagggtaacaacactggttccggaaaccgatttattcatacttctcaatttttgcacgagcaagacactaaatcgcagcttgaccagcacataatgttagaaccaccttaattaaaaagacttcttggcaacgattacaagcaggtcaatgacacgtgaactgtatccccactcgttgtcataccaagagacaagcttcacaaaattcttatttaatgcaattc

SEQ ID NO: 31115 - DNA, 496 bp, Glycine max
  Clone ID: jC-gmst02400066h05d1
atcttcatcatttgcacctttatcaaacacaaaactctacatttgttcagcactcatgatagaaacacacctccaattcaattataatattagcttacaaccacctaagatcacatgaatatacaataacaatacataagctaaggacttgagggaagcacaactgcacaaacagcaaatttttctatatgctaggtcataacttagcaatcaaaagcttttggaaagaaaaatgtttcctttgtcaaaccaccagaaggctagcacagaaatcagtgggacaaacattgctactgaaagaaatgtcaagtttctccaatttgcaggcttatctgctgaaatagatgatgttactcgagttacggagcttgcaccttcttcatccacctgcctgaaatgtcttattaaagtgatctattccttcttcatctgatgatttagcagagttatcattgctcgagtcattggtggaagcttgatcttcatttctggtatt

SEQ ID NO: 31116 - DNA, 254 bp, Glycine max
  Clone ID: jC-gmst02400066h06d1
acaaataataaatacaatgtcgccattaatattaaacaataactttgacatcataaattcttccaaaataattatacaaaagtgacaagggaaaacccgatctgccagttgcctactgaataaaaacacacatcattactatgtgttggcatacacgcatgaccttgtgccttgtcatgagtgaatattccaaagcaattggtcctttatgcctccttaatccttatgccacaaaatgctatcatcccttgaaa

SEQ ID NO: 31117 - DNA, 280 bp, Glycine max
  Clone ID: jC-gmst02400066h07d1
acgcaaaacaactatatacgaaatacaattatgctctgcaatttcgtgtttctatcatggcaaaagcagaatataattacaaaattacaaacatacaggagagcaacatattctgtaatcacagacaaccatcacaatcgcaatcaaaactcaagcagtatgtgataaaccctataatctctctagaagtggtgcaatatttgttaccctataatcccttcattctcttgtatactttctctacaaagttgtctccctttacaacattagagtagcaaag

SEQ ID NO: 31118 - DNA, 240 bp, Glycine max
  Clone ID: jC-gmst02400066h08d1
ccctccaagtttcctggctaaaaaaaaggggggggttccccaatttttttgttccccccccacttaatttttccccccccttcgaaaaaaaaaatattatttctgggacccggcaggtccatgcccccgcacacgagggaacttcagcggggttttttcgccttcgccccccggacgaagtaaccatctggaagacctgggacagactgtcaccaacccccgcccggtgaatgtcccccc

SEQ ID NO: 31119 - DNA, 445 bp, Glycine max
  Clone ID: jC-gmst02400066h11d1
caattaaattacattatattacagcatggcaaatcaattaaaatatacagcttattttccatagtgttaaatggtgtgtgaaaaattccaacgcgtaattagtatctagaatttgtttttgattgatgatacattttcacaaacttttctactccttacttccagtgtttttgtagtagtaattttttagccgggaaactgcacaaaattgcaaaagatcactagaggcactatgacatttaaaatgacatgtccatggcatcatggtctggggtcttgtgaccaaaaccagattcctcacttggtcgtcttttaaccacacttgctctttgcactaaccgaaccaatgcttgcaccacctcagacatcggaggtcgaaattcgggttccggctgaacacagagggcaatgatatcagcaaagcgtgacagtgactttgcaggat

SEQ ID NO: 31120 - DNA, 533 bp, Glycine max
  Clone ID: jC-gmst02400067a02d1
gatataaacaaacaattgcttactaataaaggggatatgtacatatagcatggtatctaatccttgttactaccgctcccaaaggtttagcctaagaattctttcatattctatctaaacaaacaaaaggggactcgaacaacctattacagcttgacgttgatattttacactgctacaacagacaaattatcacattaattagataacacgtggaccataattctcaaatatggcattcaagccaaagggtgagttatctctctggatttcctatccattgctagaaccaaagcagggcttaaaaaattgagtaaagttacaagcaagcaaactctgaattttgaaggcacaacacaatgaactattgttacaacaatgcacccgggactaactctagcaacttgaagattgaacattggagatacttttatatccaatgaatgtcagatcttttatcaaaagaaaagaatcaagtaagcccgtgaagataaaatcaacccaatctgcaatgatttgcataaatgtaattt

SEQ ID NO: 31121 - DNA, 474 bp, Glycine max
  Clone ID: jC-gmst02400067a04d1
ccccccctctagtagtcagtggtgggaagctgctcgtgggtgtggctgataaagacaacctcgtaaacaaggccagcgattccaccaccgatgagaggcccggcccagtagatccagtggttggtccaggtccagctcacgacagcaggcccaaatgtcacagcggggttcatggccgctccagagaaggccccacccaacaaaatgttagcgccgacaatgaaaccaatggcgatgggagcaataattcccaaattacccttcttggggtcaatggcagttgcgtagaccgtgtacaccagaccgaaggtcatcacgatctccaacaccaaggcgttgccaactccaactccagcggagagtccgaatgctggaacagtggaggcggtgacgaaggccaggaggagggaggcgacgatggagccgaggagctgggcgatgacgtagacgatgccgcggaggaaggtgatgttg

SEQ ID NO: 31122 - DNA, 385 bp, Glycine max
  Clone ID: jC-gmst02400067a06d1
aacagtgtataatgcccatgggccatgatttatttattgagaaagaacaacctatctttatgagtatgaatatgataggcattgtgactgccattataacagcactgacacgcatacataacataattaacaccatgaacatgcccttctacccaactctaagctacttgcatagtgctacatatataatatccttattgaaattaaaaaaaaaacaacggtaacatcggaagattaaaaaacataggctcttaatcctcccatccccatgaacctgcagtggtgtcgggtcattgaaccaccccatttaaaggaaaagaccctacttattttttgcataatatattacagatgctcttcctcgatcatagacaaggggaggaaa

SEQ ID NO: 31123 - DNA, 357 bp, Glycine max
  Clone ID: jC-gmst02400067a07d1
caatcatctgtgtagtagtaataataattgttccgccgggcagaaaagtaacaaaacaatttacaaagacaggttgaaagagaggcaacttaaccacacctaaaagaaaagtttgcatacgttaagttccacaaatttacagacaggctggaatttgtttcagctatcttacaatattacagtaacccatctactatcttctgaatccttagcgggactacactgtatcagcaataagcatgtccttatatatagttgagatgcttgctaactgttccacatagtttgggacaaatatgagactaatgaccacctcttgcgtttggactgtcaagaagtaaccgattgacacacggt

SEQ ID NO: 31124 - DNA, 462 bp, Glycine max
  Clone ID: jC-gmst02400067a08d1
aacaaatgattttgtaaaattgcatttaattgacgcacctacataattcatgttacaaagacacagctccactacaatatacaacggccaagagggcaaatcatgaggtgaaataattgcaagtgtgataaccggacagcaactaatcctccgacgctctgcaacgtcacagttccatagtttgcaggcgataatagcttcgattgattattatacatatttctcatctatacccacccgtattgaaaattatgaccacgacatgcttgtatgccactgcatcaatgggaataatgtctctgactatagtaaggaatttttttctctttacctttacagaggttcaagagatccacttttcaatctttccatccgtgcttgaagcccagacaatgctttctcatccataggaagtaccccaccgtgcattgtattctcagtacccacatgctctgatgcatg

SEQ ID NO: 31125 - DNA, 431 bp, Glycine max
  Clone ID: jC-gmst02400067a09d1
cccccaaaaaatatggttttcaatccaaaatggcagagagaccaggtaattaaaaaatatacttttgctagctaaaagatacattccgtccagggagaaccagaaacaactgtttaggctatgccgtcaaaaaattaatttgttctctcactaactcatttaaccattcattcaaaaaagtccaactttgtaaaaactgacccccatcagaatatcatgatctaccctccaaagtgtctgattgcaaatgctctaattggccaatgattaacgcttcttcttgcttccctttgcgctggattttgatggggaagctcccaagtatgtgaacaggaccttgatggagatcaccgagattagagatccatacttagccagcagcctgttagcccattcaaacttcttcttgggaggtttatcagaaagaacat

SEQ ID NO: 31126 - DNA, 605 bp, Glycine max
  unsure (1)..(605): unsure at all n locations
  Clone ID: jC-gmst02400067b02d1
gttaacatagcctttattaacgtcactttcttacaatttacataacaattgagtggatactatcccgtagacaagcagataccttatagaaagaaatatactggtcacttttcatcgattgagaatagatgaaaaaaattaagtggcgtctatctctcccatccttgataatatatggtttcctccgctatacgtggcacgtgctgtccaaatacaatgtaacaacaagtattgtctccttcataattcacatgttgttcatttattccaaaattaaaatcataattaagtagggaccaaacagaaagaaaagaaaagaaaagctatatatctagctaatttgaaagtaagtttaagcatcaacaatttcctcagtgtctgcagaagcgaaaataagctggggttcttcccttgcaactgcacacgttccatcaattgcattgttcctgcccaacgcctgtaacgccaaatgagccgccttctgccctgatatcatcatcgccccaaacgtgtgacccatccttggggagccatcaatttctgccacctccatgccggtgacaatcatgnccggcacaatctccctcgtgagcctcacaatagca

SEQ ID NO: 31127 - DNA, 488 bp, Glycine max
  Clone ID: jC-gmst02400067b04d1
atataatatccttattgaaattaaaaaaaacaacagtaacatcggaagattaaaaaacatagcctcttaatcctcccatccccatgaacctgcagtggtctcggttcattgaaccagcccatttaaaggaaaagaccttaattattttttgcataatatattacagattttcttcctcgatcatagacaaggggaggaaaattcaagggtcctgatcatggtgcttgttggcaacattgcactgctttctgacctcaccctttgtgccagtgagagggttgttctctgagagcaaggtaatggctctagagaactccttgaagaaatagtcttggctcttggccattttcttcacataaggcttggtcctcttgtcattggctagttggtgatccactatcaagagacccttgctgtctaatatgtttctgtagtagttggtgtctagaatcatgggagtgccacggtcgtttctcacgtactgcacc

SEQ ID NO: 31128 - DNA, 311 bp, Glycine max
  Clone ID: jC-gmst02400067b06d1
ggcaaacaaattgcaatacaatgatgtcaataaataccaatgttacatgatacaggaaggtgtaccattatcttgaggtactgatatctcaattagcaaaaactaactgtaaacatttgaaagcagatttgagacgtcacatatcacttgactaaacccagctgggcttatgactcaatttttcaaacagaacatccatgaagcattactgtttactttcatatatggcaaggctccaattaccttgttataatcagtcctgctgaccgcgtgcattatggagagtcgggatttgcgcttggtattcttct

SEQ ID NO: 31129 - DNA, 390 bp, Glycine max
  Clone ID: jC-gmst02400067b07d1
ccaactcataatttatgggtgtataagggtatgctttgtatgtttccactggtccatcccacaagacatctatctgggtaaaaagaaaagaactacattctatctactcatactactggccgagaaagaacatactttaccatcaggggaaggagagctcaaatcgcaaattcttgtgatttgccagccaaaacacagtatgaagcatcgactgcaccccctctttctattagaagatccacaaaaaaggggagaaagaatatcagggacggaagaaggtgtatacattgaacaaaaaaaaagaacggccgaccatggatagtatacattccacatgaggtatgcccaccccaaactttttggaacaggcactagaagagcttattttac

SEQ ID NO: 31130 - DNA, 496 bp, Glycine max
  Clone ID: jC-gmst02400067b10d1
gaaaattcatttgcaaaaattttatcttggttcaaccaaggtggctatgaatgtttacagagagagaacttagatgaagttgcatacccttacaattctcccaatcctcatacgtgaatacaagagcaacgcattcctttccttcccagaagattaagttgggaaggcaaggacattgccaaaatagatatctttatacatatcacaccaccatttgcttcaacttttaatagtgagtggggaaaggaaggcctagcttatagtgaaccaccataaatattccaagcatgttcttgatttatccactctttaggctaggctgcgcaaaaatgactccttgagctgattaatatgaaggtaaagccctatgtgtttcatcacaatgcaagggtaaaaatacacaaggttttatctcctcctttttctgccttttcctaattggcctgatttaaaggcatgttcttgctcttgaaggaaagctttaactcttccatac

SEQ ID NO: 31131 - DNA, 344 bp, Glycine max
  Clone ID: jC-gmst02400067b11d1
aaaattaaagggtttaactttactaccaaaaaaaggtcaatacataaaaacccccaaagtcccccttatgaaaaccactcagggggtttttcattaagaaaaccaaagggggtaacaaaattttgaaacaaactggggcggttgggggttagccaaaaaaaaatattttccatcatcaaaagaaaattgggcctgaacattaatgggtgtatacccaaggtattgaggggggcccgtttttcctgaaacacacgggtatgagaaaccctttggaaggaaccggcccccctcggggtttgggaagggtttaaacaaggggggtttttgggggggcctaattccct

SEQ ID NO: 31132 - DNA, 295 bp, Glycine max
  Clone ID: jC-gmst02400067c01d1
gggtcaaacccgataatgtgaatctatttgatttaagccaggggaaacccggagaaggccctacgggtatggaccccttcggggcccacatttttaaaaatttcctttaaaatcccatggtaatctgggacccccccctaggcatgcggtttgtcttcagggctccaaataagcagggcctatttacttagtgtccgcagaagccaaaatcagctggggttctgcccttccaactcccaacggtcaccaattgcattgttgcctcccatagccttaaacgccagatgggccgcct

SEQ ID NO: 31133 - DNA, 586 bp, Glycine max
  Clone ID: jC-gmst02400067c02d1
gagccaattccctgcctctgggagtgtcttcttcagaattgagacaatgtcacttgtattgcatacacgtatagccatatgccaaatacacaaggaggctgattagtgctactagttataatacaaaaacctaatataagtgcaaagtcggtgtggaattcaacttttatgattggtgagaaatgaattaaataaaaggtacatgagaagcacagaaactgagaatcgtgttcagaagatttgcccattacaattatatgcagcaaatatacagcaggacttaccggtcatgttgtacctcaaaacatagagggaagacctaagattctgttgtttagcatacacgcacaaaggatttcaaaggtgtaacactgccacagatttggtcaagcacgaagaaacgtgcagctcatgagtaacatgatcccttgaaatatggttccagtttgccatatcagacacatcacaaacggtgaaaaaacccaatacccggccaattattgtgaacatgtgcaccccaaaaatcaggcttttgtctgacacaaaaacagcgttccagtccattggggcatccggatgcactgag

SEQ ID NO: 31134 - DNA, 452 bp, Glycine max
  Clone ID: jC-gmst02400067c04d1
acggaaacatgagatccaatataccagatggacaaaaataaaaataaaaagcaagccaatataagaacaaaccgataggtgccgcataacatgtacccaaaggtcccaaactccactctcactaccatcaaagtattatcccgcaaaccgtacatacactattagtaattacaatcttcttcacgttggagtgcagagcaaacacacttacgcatcacatagcataagtaagacacaggcatcttcacattttagtctcttcacatatggtcgtctgcttcaccatcctcttcctcctgatgctcgtactccccttcgtcctcagcagtggcgtcctggtactgctggtactcagacacaaggtcattcatgttgctctctgcctccgtgaactccatcttgtgcatgccttcaccagtgtaccaatgcaagaaagccttgcttctaaacat

SEQ ID NO: 31135 - DNA, 195 bp, Glycine max
  Clone ID: jC-gmst02400067c08d1
atgaaaaaaaaaaagctatttttttttttaagaaaaaaaatttcttctcacaaccccgggggcttgggggggtaaaaaaacccgtgtggtattgtaaaaaaaaaaccccctgggaaaaaaaaaattttaatcaaaagaatgtgggaacccccactgtttgggggccaaattgaacaaacataagaacgggatcta

SEQ ID NO: 31136 - DNA, 427 bp, Glycine max
  Clone ID: jC-gmst02400067c10d1
cattatgaactgataaaggaaacacttttattaagacttcaaatcacagcattcaagataatacaatacgcaacactttttagaaagccttataactataaactataaaagctttgcccagatgaaattacactgcaggcaaatttttcattcacctttagcttagttatcttcattggcgcccaaattattctttggcacatctttgtattagccctggatggcaacaccaaggggagcagcatccataggtattatcttctcaatttctacacccttgttgttctggttttcataggctgaaatgtgcactccaagtgctgctctaccagagggatcaaggttgttagaccaagcagcatcccactcaacagctttggctgtgctacatgcaacacttgctcctccaggaacagtgagcctagct

SEQ ID NO: 31137 - DNA, 477 bp, Glycine max
  Clone ID: jC-gmst02400067c11d1
catacagtaagtattaaaaatgtattaagtggcgtctatctctcccatccttgataatttggtttcatctgctataggtgagtccaaattcaaagaagtaacaacaggtattgtctccttcatcattcacatttttaaaaatttattctaaaattcaaatcataagcagagacaaaacagaaaagaaaaggtatataatttgaaacttaatttaagcatcaacaatttcctcagtgtccgcagaagccaaaataagctggggttcttcccttccaactccacacgttccatcaattgcattgttcctacccaaagccttcaacgccaaatgagccgccttctgccctgatatcatcatcgccccaaacgtcggacccattctgggggagccatcaatttctgcaacctccatgccagtgacaatcatgccaggcacaatctccctagtgagcctgacaatagcgtcctcagcagcat

SEQ ID NO: 31138 - DNA, 511 bp, Glycine max
  Clone ID: jC-gmst02400067d01d1
cagatctaagaaacaaagaaagatattttacaaaacgagaacagagtacatacattagaggatcagaatatcttctagcacagaagttaaaatttaacatgacattttacctgtttcagcaattcttaaagactacatagataaagtgcaacatacaacagcttaagggttaagacttaagactaaatattaaacaaagggatatgtagcttcttagtcatcagttcaccatcatctgtgctaactagtggagatatgtagcttggtactgatagccatttccaaagtagttgccaggattaggagagatgttataagttgcacaacccatgagaggagggcagtgattgtcagttggtgcagggtacatgtaaggtcggtcatacacgtattgaggatacctgtcagcaactctagcataagaagttttgtcagatagaatgttagtgacacgcgggccatatcccacaccattagcacggggtctcttgggttgaggctttgttgcttc

SEQ ID NO: 31139 - DNA, 489 bp, Glycine max
  unsure (1)..(489): unsure at all n locations
  Clone ID: jC-gmst02400067d03d1
aagagaaactaaaatatatatacattgaggtctctaaaaacccatttcccaggtcagcaatacattgaatcatgttgaaaagaaagccttggtgacttccctgatgatccagtcgcaaggccacatatttatctacataattgggtcgctgcaaaagactaagagtctctataacaatctcaaagcactaacctactactatatcagaaagtgacagagcaccgataaatattaacataatactaagggaagtggatattacatacactatctttgttagcatagacaatctcatttatcaaaatatcatttcttctgatttgcacacagtcttaagcctctgtgcagcttggacgaataccacaatgacctgcaatactgccatgtgctgcgacatgaaatgcctacgaacaacatctactanctgctcttttgatgggttcgggaccgcatccactagattaaaatgtcgccaatatctccacaatg

SEQ ID NO: 31140 - DNA, 571 bp, Glycine max
  Clone ID: jC-gmst02400067d04d1
cagaagaaacacttcaaatttctcaatactatcaaggttcagtacacttgtttcgatttaagggaagatacacaaaggggaagaaaaatgatgtattctacaacagaacaaattgaaattaaaaaaattaaagctccgcagcacttatcctggatcagcagactagttcgacgaataacgtgaggaaaggtggggtatccgagtatcacttgaaagtggagaatctcggaagcttgtctctcagatagtacaatcttgccctcctgaccttacggtgacttaccactttgatttctttgatgtttggtgagtaaactgggaagactatctcaaccccagtgccggcaatgattcttcggattcgaatagtcgtgtgaataccagcattttgttttgagatgacaatccctttataaatggacaacctacgcttgttctcaggaacctccaatttgatttcgacaatatccccagtcctaatgtctggagttggtctttgcttctcggatgccttaattgccctctgattcaatatccccataatgtctccgaagttgacttcgggtttttt

SEQ ID NO: 31141 - DNA, 441 bp, Glycine max
  Clone ID: jC-gmst02400067d07d1
aggtgggatattagagtactattattaatgggacacaattgagttcaacacaaaccgaacttattttcaagggacattattacagacccattaaacatcaaagttcttcaaatgttttgggaacacatccaacattacacaacgagcttaaaaccccccacggagacggaggacaaggtgaagggttgattccttctggatgttgtagtcagcgagggtccttccatcctcgagctgcttgccagcaaaaatcagcctctgctggtccggtgggatgccttccttgtcctgaatcttggccttcacattgtcaatggtgtcagagctctccacctcgagggtaatagtcttacccgtaagagtcttcacgaaaatctgcataccaccacgaagacgcaacaccaagtggagagttgactccttctggatgttgtagtcagc

SEQ ID NO: 31142 - DNA, 414 bp, Glycine max
  Clone ID: jC-gmst02400067d10d1
gatcatccattataaacttctccagggtttccaccatgagaatagcgtggacacttgtacaaaagctagaattggcatgtaatgttgattcttcctgtcatcacttggttacctaacttcatccaattttaacaaccacaagacttacagaaaaatgttagtaaaacgtgttctttattttagaacaatcatatattgtgcaccagctgacctatatgggtgtgccttgccaaaaagaaaggaaaaaattcctaagcatacactaccagccaacataaaaagcagatcccaagatagaatctgctatctgcatcattttagtaaaggagccggatcttggtacatctagggatctaaactcttttgccacttaacaggatgcagctttgtattaaccctctttttcactacccc

SEQ ID NO: 31143 - DNA, 497 bp, Glycine max
  Clone ID: jC-gmst02400067e01d1
aagccactgctggcatgtccttgagccatgaatctagaggtttgccaatggagtaaacaatgaaaccaatttccctcagcttgttaacatccacgacgttgcggccatcgaaaatgaatgcaggcttctgcatgctgtcataaaccttctggtaatcaaggttcttgaactcatcccactcagtcataacgcagatgccatgtgcatccttgattgcctcataggcatcccaaaccacagatacttgtttgttggaagttggactcagtggttgaagatgagcagggtggtcccaatcaaacttcttcattgctaaatccctcatgatttgatcctcagtgacctgaggatcatatatgctcaacttggccttgtctcccaaaaggcccttgcacacatcaatggctggggtctccctagtgtcaccagtgtccttcttgaaagcaaatcccaaaacagcaatgttcaacacaagtctcagggaagaagattgatga

SEQ ID NO: 31144 - DNA, 572 bp, Glycine max
  Clone ID: jC-gmst02400067e02d1
gaaagaaaggcagcacgtattatttcaattgttaaataagaaaaaaaatatgatatcaatcaggctaacaaaattaaacatgaaatcaaagacaaagaaacttcaaacttttgaattgaaacaccatggcgataaaccctatcactcccaggaaaggaagacacatatttcctttttctccatttctgcactttgtgtcgaacttgagtgacacaatttagtagaaagtggtatggttgaacctaatccttgtacttcatttcagataccaggaagccaggcatgtcaaacaaggcagagaacttctcaacatcagctttgagatcttcaatagccttgttgttgacgagacccttgttgaaatccttgagaagtttgccatgctccttctggatctccagtgtgagagtcacagcacggtgaaggaactcaccaatctgctcaaagtctttttcaaccaaacccctagaagtcatggcaggggcaccaattcgcactccaccaggggccaaggcactgctatcaccaaaaacagcgttcttgttaacagtaatgttacagagatcacagag

SEQ ID NO: 31145 - DNA, 384 bp, Glycine max
  Clone ID: jC-gmst02400067e03d1
acaccacctaataaatgatagatcttaatttttcttaactaaatatcgaacattgcttacaattaaatctccaataaattcatgcacacacagattcatatatacatacataatcaattactcatcaattttctcatgaccatatgtgcagggagtgatagatatacgaagacactgcataggtctctacacatttatcgcatgtatggtctgtgcgtctctctccacacgtcctgtgatgttaaacactagaacgagaggatcaaaatccataggggattatttttcatgacatatcatgattgaatgacatagactaacacacttgcgcagaggatgccactggtataaagagtgataaccgaattgtgctctgcaaatcag

SEQ ID NO: 31146 - DNA, 461 bp, Glycine max
  Clone ID: jC-gmst02400067e04d1
attaacacgaacttgagtcatacttatatataaatataatacacaataacattgatgaaaactacccaaacataaaattggctgctctttctagcaaaacatagattcctctttttcgagccatcaaatcctcattagatcaaacaatacaaaatacaacacgacgtaaaaattaaataaatatcaagccacgataatacctcaataaaaaaagcccagtatgaaaaggacatgctgtggggaagcaaagagaaatgtgatgcacatcaaagcccccagaagataacaatgcaactgtgaatctgcgctggccagtgtgtcaacgatagtacataagctgctgtctcgatgaattaccggtatatccatcatacatggcttgagatgccccagagtttacgcccatcgaagctggagctaggccatgttggccagtcatttgcaaaagagtttgacctgaa

SEQ ID NO: 31147 - DNA, 408 bp, Glycine max
  Clone ID: jC-gmst02400067e05d1
acatcctcaacaagaagatattatttatttacatttgaaccaaaagttacattgcaaagtgaaaaaaaaaaaaaaaaaaaaaggctggcaaaaaaccaccatggggaacaaaccagtggagggccattttttttttggcttattataaactcacccttttttaccacatgatctaaagtttaaacagaaaaacttgagagtagaagggagagacatgctttatatgctataaaaaaaattcagtagggccaaaaccaaaggggttgatcttcctccggaattccaaaatggcatgaaccatggggggggggggaggaataaacattttcaagcttgggaaaaatgtaatgaggcaaaagggtcttgctcaagttatttttttcatcctgagacacataaaatcgatca

SEQ ID NO: 31148 - DNA, 471 bp, Glycine max
  Clone ID: jC-gmst02400067e06d1
actagaatgcaacgatcgatacactaataatagtgccatacaaaataactgtcctcgaatacaaaacctcccctcaaatctcccaagaatgcaagcaatgtacgtatataattcaaatacagtaattaataaactcccatgatcacatccacaaaataataatatataaaggtaaggtaaatagaaaaataacatgaattggcagaaaaatctgcaagtccgaagacagagatcgatgatgtctagaacaacaaggacagcaaagcacatccgaatactaagctcccaatcatcttctgaaaggaccacaacttttcagccccactatcatcgccagagggagagatggtggagaggctggggccgggagccaaggaaggagagagtgcaggagcaaccaccttggcaggagctggagctggagaagtggctggtggagaggaaaggggtgattgggtcaatgcgggtgga

SEQ ID NO: 31149 - DNA, 511 bp, Glycine max
  Clone ID: jC-gmst02400067e07d1
aaaaaacccaaaggggccctttttgggaaaaattgggcccccccggggggggttttttattatttgggccccccccccccccaaaccagggggcggggggaaaaaaaaaccctttaaaaaaaaaggggggggggcccccttgggttttaaaaaaaaaaacccccccctttttttccccccaaattttgaaaacccccccccgggggtaaattttaaaataccaaaattttttttttttcccccggggggggggaaaacccccccaaaaggttgtttaaaaaaaagtggaccccgtcccccggtgggggggggtcccaaaaaaaacaaaaaaaaaaggggggggggccaaacccgaaaaaataatcccccgcccccccccccaaaaaaaaaaatttttttggggggggggccccccccctgggggggtgggaaagaaaaaaaccccgggggcccccccccttctttaaaaaaaaaggggggttccctgtgtataaagggcccccccccgggg

SEQ ID NO: 31150 - DNA, 393 bp, Glycine max
  Clone ID: jC-gmst02400067e08d1
ctaacccaatccaaaatttttttcccttttcattatatgggggggaaccaaaattggaaggaaatttttccagaaaaatgggtccaggaaacaactttattaccctcctatagaccctattttaaccaacccttgagttaatttgtttttaaaaaaaaaaaaaaaaagttttttgaaaattcccttttttgaaattcaaaaaaatttttcccaatgatttttatgatcatcccccaggggctatccccctgtatcttggccttgttctgccaacctcaggggaaaggccctgtcccatggccctccctttgttattggggggggcttgttgaaaaattggtcgctgttgcccaatagggggtgggggatgggactctgattctgaccttggct

SEQ ID NO: 31151 - DNA, 363 bp, Glycine max
  Clone ID: jC-gmst02400067e10d1
acctacccattagcaggccaattatatatgacatttccagaacaaccccattttcaagcattgatacaataataaagagtaagaaaagaaaaaaataaaggggattgccacaatcatatgatcatggggggaagtctaaaatgaccttggctttgccacaatgggggaatgcttgagtatgtgcaagctaaactgccctcctttctcactggtgtcaatctgggactggccagggggaggcaagagctcaaagttttggaccaaacgtcccaaagtgatggcaagaataggcaatgcaagaatgattccggggcaactccttctgccaaccccaaagggaaggcacctaaagtcattgccatt

SEQ ID NO: 31152 - DNA, 457 bp, Glycine max
  Clone ID: jC-gmst02400067e11d1
ggcaccatcaacaggctcaaatgaacatgatgggcagaacccaaaaatctgctctctaacttgagatttaatttaagaaaaaattacagaacatgatataccatgctattgccgcttcctcctatcaaaaatatacaacaccagttgggtcaatttctatttgtttcttgtccaaataagaccgcagcagcggcggcaacagcagacaaactccaaaagaaagaattatgttgatgaaaaccgtccacttaaacagtgaaactcttctcttcttaaagacacatctacagtaacagcataaagcagtagctacaaacaaagagatatatgaagttacaaaaaataatctggcgtctttcgtgtagtgtcgggctcaatttgtctgggagctggatcaaactgcagaaaattctgatccatgttctctccaatttccagaatggcagacatgttccca

SEQ ID NO: 31153 - DNA, 498 bp, Glycine max
  Clone ID: jC-gmst02400067e12d1
aggcgaataatagaggtcctaatttttattgaaggtagctcatcatatttttttatgtttctcataacagactccattcactctatgaacgaaccacatgatactgatattttagaaaggaaaggaaggattcaaaggggaagggtttcgaaatgatatccataacaccgcaatcccctaaacgacatgggaaagagaaaaaaaaggcaaaaacgacaccgaaagaaacgacacattcagagccaccgacacagagataaaagcctagggtcaacgtcgtctatctaagagagttgaccacagtcggcgacgacgacaggcttggcggtcctgccggagctggatccgaccttctctatctccttgacgacgtccatcccctcgacgacctgtgcgaacacgacgtgctttccgtcgagccactccgtcttcgtcgtgcagatgaagaactgagatccgttggttccgggaccggcgttcgccatggagaggatgccg

SEQ ID NO: 31154 - DNA, 404 bp, Glycine max
  Clone ID: jC-gmst02400067f01d1
ggccggggaaaaaaaacataatttataggagcctgctgggaggggccctcaaagggaccttgaaccttcttaggaattcccgccccctcaaatttcaatgctaaaagggggaataaataattgaataaaccgcccaataattttatttgtaatggcaaactttggccgaaacacccctgaacggggaaccgtttcttttccttgacctacaggggctacacaaactggaacaatttaacaacccgtttttttttttttgggacaattaaccccatgcgggtattttcctgccccaattttggatttctaccccctggaagccctaaaaggcttcgggggggaaaccccccaaaaagggggtgttctgttgggcccgattcaaaagccttcgcaaagcatatttt

SEQ ID NO: 31155 - DNA, 542 bp, Glycine max
  Clone ID: jC-gmst02400067f07d1
accaccacctatgacctttttcattttataaaaccaacttaaacaccaactaattctccaaaattggattaaagaatgcaaaacaatgttagaagaagcctataaaacccaatttgagctttctatatcctttcaagtttccttctaaaccattctgatattctcctgatcttgctcaccagctgagcattttttgtaattttaaagtattcttcagcatttgataacattaccattatatcatgcttgacaccttccacactccgatagtagtcattcttcaatcttgattgaattagttcaggatagaatggggcaggaaacctgtttgcaaactctaacctctcagctacttggttcaatgcttggatatcaaacctcctgtggtctaatttgatgaaataggaaagcagcttatctctgatctcatgatcaatgtggggatgctcccacagcatctcaggatcatatagttcccacggactatgcagaagaatctcgcttggatcaatcttggactggaccccataccttttccaggg

SEQ ID NO: 31156 - DNA, 393 bp, Glycine max
  Clone ID: jC-gmst02400067f09d1
atatgactctggtgttatttttgattttgcaaattaaattacacaatcacagccgtacatcacacatgagttgggcctcttccaacttaaaagcagaggataacattggcccatgacgcgacacatgcaccacctaataatcataattttacatctttacatacaaaatacaaagactttaaattttaaaaagaagaaaagagataaacagatcatcttaatgaaatgaaaccaaaacccacaaacattggcttgatttttgttgttgttgctgttcccaacttgattaagcatgaaccgcttgattgaatcacttggacttgaagggaatggccctgattacgacctggtggtagagtgctgcaagagctgcaccgatgaatggtcccaccc

SEQ ID NO: 31157 - DNA, 412 bp, Glycine max
  Clone ID: jC-gmst02400067f10d1
ggaaaacaaaatgttgcttatactagatgattatgataacgaaacagaatagtcaatcgtcccttacgagaggaaaaacctataaggccgtctaccaactcaacatattgcactgtttttcaatgatatctctcacagcaacacaaagtgtttattccgaattcacactaaaataaactcgattaagataaaaatttggaacggggtagcgatgatatccaagctcagactcaattctttaagccacggatgcaatgtggacaatcaaatcaatcacacgggaactgtgaccccattcgttgtcataccaggaaacaagttttacaaaggtgtgattcaaagaaattccggccttggcgtcaaatatgctagacctgttatcaccaacaaaatcagtagacacaacatcatc

SEQ ID NO: 31158 - DNA, 362 bp, Glycine max
  Clone ID: jC-gmst02400067f12d1
gtctcaaccaaaattagggaattcatggtcataatcatatgcaccatgcaaaagcagacaataagtgaagtctcttctatgggaacgtacacaccaaaagggagattcttaccaagcataatatggaaaataaacccccaaagaagtgcatgaagaaaccataaaccattaaattagaatgggctatttggatacaatggtttttgacagccctgaagtaccgtgttttcttttctttccgtttgatagtgtaaggttaagtcaagggctactttgcttttcattttttgggttaatcttgggctaaatttgggtgtttttgcgaccctgctccatgggcccggtagaagttttgtttgttt

SEQ ID NO: 31159 - DNA, 462 bp, Glycine max
  Clone ID: jC-gmst02400067g01d1
acaaggaaaaaaaaatatcattgatatacacgtacatttaatattacacgaaaagcatatgcatgcccctcctctgcctcgtaaccagctcaatcagggacaaacttgcttcgaattaggtgaatacaaccgagataaattaaaattccatgccaccatggcccacaagtttatatacgtacttttaacatttataaatccatctttcacattatcgattaaaacaatgacaccattatggtgaccgataatgcaacaatgaacataaaagaggtgaagcattgtgaggccgaagatgcattagtatttgtaggagaagaagatgatgggggtgatgataatgatgttgatgacaataatggtgacagtgatggtgacagtgacggagatgttgccggtgacaatgcgggggaaggagcattcccttttcgtatgggaatcttcaccttcattccttgacta

SEQ ID NO: 31160 - DNA, 525 bp, Glycine max
  Clone ID: jC-gmst02400067g02d1
gaaacagtgtcaaattaattcccaacacaaaaataatcaatgaaaaaatgatgcactgcaggtttccactgctccatcccacaagacatctatctgggtaaaaagaaaagaactacattttatctttttatcctagtggcagatattgaacatcctttagtatttgttgtaggagagctacaatcacattttcttcttcatttgcaagccaaaacacaatatgaagcattgactgcaccttctctttttataagaagatacagaaaaaaggggagaaagaatattagggttggaagaaggtggaaaaattgaacaaaaaaaaagagatgctgcccatcatcatccagaaacaaaataaggtctgcccaccccaggaattttgaaacagccacttctggatctttttttctaaaagctcctgctaaagattttgaagggcacttgtagtgtgagttaaatgtagcatccaactcattggttggtaagaaggggaaagaagccttctccacagcaaccccaaaaaca

SEQ ID NO: 31161 - DNA, 227 bp, Glycine max
  Clone ID: jC-gmst02400067g05d1
agccacacgacaagggggttttttcaattatttactggcgtaccaaaatgcatttcggagacatgggggaagtgacaaaaagagaggacacaatttttcatttgcatcttcccaaggataattgctctttacttaggacaacacaaggaagacagggtcccccagttttttactccacattaagggttataatcttctcaagaatgaccatatgaggggagggaaaa

SEQ ID NO: 31162 - DNA, 462 bp, Glycine max
  Clone ID: jC-gmst02400067g07d1
gttcttgttcttggagaacacactgaagagaccttttcctgatttctttttttgacttggacttccttgaaccaccacagcagcagcaacaccatgatggccaacagtcacatgtcatctttggccttttctcagatactggtggatcatagccatacaatgcctgcctgttgaacacagttccagtaccaacatatactggaccttgaatcccatcaagccctttcatattgatatcaaagaacactgtgtttcggttagcatatctatcgtggcgatcaataccatcaaatctttgtggaaattggacataacacagcttcttccctaggttggggtgcattaaaaagcacatggcctctcttactgccttgctgttattgacgtagtgatcacaatccagattcaacatgaatggtgcatttgtaagcacagcagaaactcgaaccaaaagcattcatg

SEQ ID NO: 31163 - DNA, 339 bp, Glycine max
  Clone ID: jC-gmst02400067g08d1
aaaagggcaaaaaaattgggtgacccctctaataatgaaaataccccgaataacataatggttaaagcaacgttcttttcaaaagggaaaaaaagtttgaatcccctcccacaaaaattatgccttaaaaatcccattgaaaaagcctaaaggaaaataagtttttaaaaccgggttttgggggaaagcaaccccttttgggccccttcctcaatttgggggcccgccccccttccccccagggggggggcaggtatttttttctttgttggcccccccccccccccgtttgggcccccccccccttgggacaatttgggaatggtggggttgcagaac

SEQ ID NO: 31164 - DNA, 415 bp, Glycine max
  Clone ID: jC-gmst02400067g09d1
aaccttaaatatattttaaaatgtagaaacattacagttttccaattatgaacaattgaaactagtagcaacattttttaaagagtaagtttagccatatctagactaaattaactactgtggtttattggtcttaaaactaataccaaaagggaaggaaaaaaacaaatattagggaatcattcttagatattgaaaggattctactaaagttcagcacaagaaatcacaaatatagtaacggcaggaacctgcaacaacatgcctccctttaggctactacaaacgcaggggatgaacctgtaaagtgatgaattgatccaaataagccctttgcagcaccaaagtgacttaatctgtacacaccaagagtcacaccctgtggtattatccattccaaggttcctttactcct

SEQ ID NO: 31165 - DNA, 387 bp, Glycine max
  Clone ID: jC-gmst02400067g10d1
agggagaacccaatattaaagtagatataactatgtgtaactcatacagagaaataacaacgcaacacaatttaaagctatccaatacaaatctctcatacaagaggagaggggcatataagtggagccctcatcaccctcgatcttattcttaatattaataatgctactcatatactagtgagtagtttccggtttcctgcgtccatgactttctcttcaaaccttgatggtagcgcagttggtggaggtgctgatcttgtaggggatggagactccgcatttgccggggagcgaggcggcgttgttggctttgaagccggagatttggctggcggccgacttgaggcagttgcacgccgtctggcggtcggcggtggtcttggc

SEQ ID NO: 31166 - DNA, 514 bp, Glycine max
  Clone ID: jC-gmst02400067g11d1
gtaaaaagcaagtaacattaagttggattcggatacacaagataattcacattatctgaagtacttcaccaaacacaaatctaaaaactctcaaaagtcatttcgttctttgacgctcactttccggggacgaagttggtggcataggcccaggcgttgttgttgacagggtcagcaaggtgatcggcgaggttctccaatggaccctttccggtgacaatggcctgaacaaagaagccaaacatagagaacatggccaatcgtccgttcttgagttccttcaccttaagctcagcaaaagcctctgggtcatcagcaaggcccaatgggtcgaagctgccacctgggtagattgggtcagtgacctcaccgagggggccaccagcaatacggtaaccttcaacggcacccattaggataacttgtgtggcccagatggcgaggatgctctgggcgtggatcacgcttgggttgcccaagtagtcgagcccaccctcgctgaagatctgggacc

SEQ ID NO: 31167 - DNA, 332 bp, Glycine max
  Clone ID: jC-gmst02400067g12d1
atctctaattaacataagtttattaatcctagacccataatcagaacctatgttcaaaggaaacaccagccttgggggcaagatcagatagtatatgtaacttctgttgaatcgtcttacaattttattgctttggcataatcatgtttatctgtttaaacaatatgggctgaataccatccccaaagggcaacaagcatcagccctaattttaagaaacatctgactattacaattaagtatatactatacaaaatatgagcatgatgactacgaactcccattccatgggacactagttctatagacagatgcacgagaccaaattacat

SEQ ID NO: 31168 - DNA, 597 bp, Glycine max
  unsure (1)..(597): unsure at all n locations
  Clone ID: jC-gmst02400067h02d1
aatccaaacaattggaaatgacttccattacaagctaaatcaacataagcataacacaaaatgagacaatatagaaaaggacctggttacagcgtttttcgttactgtacaagactgttctatcgagagcagactcacaagcaagttcagggtgaaacttagtttagctacagtacatacatgatacaaaatgagctttctataaacatactagaattatgactgcagctcttttcaacaggactagcagaattatgcttatttgcaaacccgttagttcaataagcatatcaataacttttttttttctatacgtctagtaaaaaattgtcacggactaagatggatgatttcatttcacatggaaatagtacagcctaactctttggcagcggtatcaagaaagttaatagacaatccgtttgaaagtcggctgtgagcttcccaagtcaagcatttttctatgtcagcttgccagtcaatgacatccaaattgaagtattgataagaggggttgtgggtgccatttaatctcgaggtttatgactacatctgattgaaccagtatgcanaatgtcacgaagaactgatatactc

SEQ ID NO: 31169 - DNA, 483 bp, Glycine max
  Clone ID: jC-gmst02400067h03d1
aagaaggaaaatgcagtaggtcattggattaatacaacttaataaccaatcagattcactcaacaataaatttcttctgctacagaagatcaaggggattcagaagataggatacttctgcttacattaacagttatgctgggtcaggtcagattacaacggataaaatttggctaggtattcctacttgaaaactaagggatgtttggttttccattcagaagattcaaacgttattcagttcaatgaaactacacccacggattgggtttaagtttgaacatcctttggaacacgaactaaaaaccaaacacaaactaatcccaaaatcaggttatgaaggagaagtggcttggtttctaattctacttgaacgcctaacaggagtgatgatctcctgctccccatgtccctgcttgattggaattttctcatacacagttaagcttccataggatggggaacccatggaatagtctgatg

SEQ ID NO: 31170 - DNA, 418 bp, Glycine max
  Clone ID: jC-gmst02400067h04d1
atccgggatttgccagtgttatcactggtatcagagcaccgatctggtgccctgagatctgcgattccagatgctgcgtatgaagaccaggattatggcgcgaaactctaaagattgggagcaagagcgtgaggagatgaggattcgattggagctggctgaagctctggcgaagaaacacgaggaacaaatcgcagagattgtcgcgcaatttggccaaaatcgagatcgtgatcgcgagggaggtccaattcttgaaggaatcagcaacagtggtggtcatcttgaggatatgaatcgaagggagaagtagcgcaagctggagattcgatttttgctggagaagatgcgtttggctcttagctccgattggagagatattttctattgaaagatgtcactgaagatgaaaagatgc

SEQ ID NO: 31171 - DNA, 469 bp, Glycine max
  Clone ID: jC-gmst02400067h06d1
aaaaactggaagtcaagactggatcccagaccatatataacataattgataatccttatggacatcaaacagaaaatcccctgaaaacaaggtctcttgagtttcacacaaaggataccctataaaaacctatatatagtcctatactgcattagctacaagataaataaactccacatatgctttaagcaggttggctttcttgctggggattccatcaccaacatcaccatcaccattcttgttgctttatttacataaaaagggatatgaaggtgttcagaacactcctgccatggaaggcaggtcgtccaagctgcaaaggttcatagggatctcagcagcatactgagatgcatgttcactgagcaaagacgccaatgcagcatcagcccaggcttgatcaagaaaagaaggggtctgaaagaactgtaagtgggattcaatgtctgcaagctcctcacaaaga

SEQ ID NO: 31172 - DNA, 386 bp, Glycine max
  Clone ID: jC-gmst02400067h07d1
cttagatctctttctcttctttcgcctgtcatcactagaagaactcatgtaagatgatgaggacatatctgactcggaatcactatcagtttccaaagattctgtatcagaatctgaagagctcccggattcagatgagtagtattttctccttttccttctgccttttgaagattttttattctttcccatttttgatgtatttaccttctttccatcctcgctatattcaccacaattaatgattttaacagttacagttggatgcccttcttcatcaccgaattcttcaattttcttcaatacattatgcccttgcacaagctttccaaagactacatgtttcctatcaagatgatgatcagctttcaaagtgataatgaaat

SEQ ID NO: 31173 - DNA, 497 bp, Glycine max
  Clone ID: jC-gmst02400067h08d1
agtctaaaaactcacttttgattcttgtttctaattattgtttctcttttctgcctgggttgataactgtgtataacaactaagtagaagtacaaacttaactaatgaaacataaaatccaagctaaatatcttcactttcgaactttaatccagctaagattaacaattataccctgccctcctcacttatggcctttaaactcaagttatccatcacggaggatttgaatcagccttgtagttatacaactctgcaactacggttataccatttcatctgtgcatgctttctctgggtaatcctccagctgtacaaagacttgaaattatacctgtaacccacttcctttacacaactgctttttccgtatgcattttgtatggtcgtaaatagtatagtattggtgattgatggtgatggtatgggtggtcatagtggcggcggtggtgattctttacaaatttgtccagcattgtttaggtcatctttcactt

SEQ ID NO: 31174 - DNA, 370 bp, Glycine max
  Clone ID: jC-gmst02400067h09d1
ggaagaaactcaacttaccaatgcaaaacataacttctcaaacaggaaacactaagcacaaatctcacactatgctattgctatacacaaccttcctctgtcgggatatctcaggggtaaagtcttactggataagagccacaaattctctcaataccacgtgatgtggacgtactatatagcctactagggcctcattaaagaaaatcttataataataattttaaagaaaatgatttttcaacctatcattgaaggcaagttattagacaaatgaaatggggggacagagtctagatcatatcctaggagaaagctgaacctgcaatgcatttttcatgacagtggtaaactcctgtttcttcgaaaa

SEQ ID NO: 31175 - DNA, 442 bp, Glycine max
  Clone ID: jC-gmst02400067h10d1
gaaaatgaaaaatccacttcaatattccaaccgaaaaatgtcttcatattgtaccccaagaccttattcatctgggttacagtgagatcagatgtcccattaaaacataatttaagctcataattttattctaggaatgcaggcatcaattacatttagccaaatatgcattccatccttgaagacgatattcacgagctatctcagcagggtttgctgctttgatgatgccacgtaccacgatgatgatgtcactgcccctatcatggatcacagaatatggagtgttatattgctgccctaaagcatcgccaccagttaccatttgaactccaggggttgcctgaatgaaagaaggatttattggtgcccctggccatgatgcaagattgactgagatgaatccaattacaaagtcagaatgatccttagcaattttact

SEQ ID NO: 31176 - DNA, 513 bp, Glycine max
  Clone ID: jC-gmst02400067h11d1
gcacaaaactggtaatatttcatatcaataaggattgcggcaaagccgcaaagatacaacattcattagggaaaacaggagttgggaaaaataaggggagaggggttgaggaagaatcaattgctcacagagcatgctaaaacatctaaatattccacacacggttattgaaacaacccaatatagaaaatttttctttggtgtattataaaagcagaaccaatgaacttgtagattctactttcttataccattcacttggcaagttcgttacggatgagttttgctgcggcaaccatgtttgtgagggctggcttcacttcagtgtacttgcgggtcttgagaccacagtcagggttgacccacaagatgttcttctcgagcactgcaagcatcttattgattctgtcagcgatttcttcagttggtgggattcttggggagtggatgtcatagacaccagggccaatttcagcaccatacttcacaccttcacggaagactgacaggagc

SEQ ID NO: 31177 - DNA, 521 bp, Glycine max
  Clone ID: jC-gmst02400067h12d1
gcatctcaaaatacaccaataacatatcaccaaaaaaaataattcaagcacaatgctaaacaacaacattgaaacaatgacaccaataagttgctttgtaaaaccagacatgctggtgtagtttactaccacaaggccaaaattcattgacaatttcgtttccacgataaagaaatgagggtatcaatagcctggttgtgcaggttatttcttatgctgcgttacctctttaataacaccatcagcaagtgagtcaacatcattgttcttgccaaaaaactttacgaattccatctcaggactcatcaagtatctccactatttctactctcatccttgccattgaaatatttcaaagattagatcatataacaatggagtgatcaacaagataatctgagtcttcctctgctgtcttcatgtaataaacgcgatatgcacgagcaacattcttgacctcatcggggctaccagttaattcaattaactttggatgaaattctgtgacatattcaccgact

SEQ ID NO: 31178 - DNA, 303 bp, Glycine max
  Clone ID: jC-gmst02400068a03d1
ggtaaatgatgaattaacaaaatattcgttacaaacagcaacaattcaatataacaacaagcaacctatctttaaatgcaatacaagatttataatgaaaatgaagcaacctctatattcacaacaataatgaaataactggtaacatggagtcctatgtttttatataaatactctccggctatatatgaatctacactccaacagcaacctcatatgatacaatctcaggtggggatgagttcaagaccagtgcaacattctgatcaagttcatttttggattctagctccatgtcatttt

SEQ ID NO: 31179 - DNA, 466 bp, Glycine max
  Clone ID: jC-gmst02400068a04d1
acaaagaaattcaattattgcacaggcacttttcacataaacaagtgaaaaagaggttaagaaaattttcactaccaaatactaaagaagacacgaaacaattaacaaatatcatcctctaataaactgttctaactgaaatccagttcacagcggcagcaatttccatttgaaaacaaataaaccaagcataaaataactgacatcttacaatgttagctaaatggtaggaagagctactgctgttgcttaaggagatgtcaataatcgcttgatgccacttttctgttcggatgtaagcctggagggaaacttgatattgaacttgattcttaagtttcccttcttggaaggttcttttggaatgggcataccctctcctttgacaacttcttcatatgttggactaatagtggagttaatggggaatgtaagattccggccatcaagggttgtcagctgcact

SEQ ID NO: 31180 - DNA, 396 bp, Glycine max
  Clone ID: jC-gmst02400068a05d1
gtctcaaccaaaactagggaattcatattcataatcatatgcaccatgcaaaagcagacaataagtgaagtctctcctagtggaacgtacacaccaaaaggtagattctcaccaagcaaaatatggaaaataaacccccaaagaagtgcaagaagaaaccataaaccatcaaattagaatgggctatttggatacattgttctttgacagccctgaagtaccgttttcctttccttcccgtttgatagtgtaggtttagccaaggctactttgctttcattttggttcatcttgtctaatatggttttttgcacctgcccatggccgttgagttttgatgttttggtggtctgaccttcaacccgaactttccaaggacgtgctcgaacccaacgc

SEQ ID NO: 31181 - DNA, 355 bp, Glycine max
  Clone ID: jC-gmst02400068a06d1
ctctaaccaatcaaattttatggcacacttgtacgtaagtctgaactggttttccaagacatgcttgcttctagataactttttgtcctgaatcaaaccttttattttatacatcttgaaggcatcttctattctgacattatgcttagaccagatgcaagtgatggaatactttgttcatatctgaaaaaattgcttggatcaaccttggtctttacctctaccagtctatcatagtttcttttgaaatacttctcaccccagactctagcctctgcataactagcatttccaggtccattgacacctatatcaacgtctttatagttgatatatgaacttctaggtgaacttg

SEQ ID NO: 31182 - DNA, 559 bp, Glycine max
  Clone ID: jC-gmst02400068a07d1
gtcagaattgtgaactacttttacatacaatcatgcatagagagagagagagagaattcagaaggaaatagagcaaaaaggaaactgaagtagcagaccataacaacttcagaattttgcagtataagcacattagcagaaagtctgccataagatgggctctcacataccctgaaaacctaatatgttaattggcaatatttgaaaggaacacaaaacaatgttgaaacaacaagctaatagacaaaacaaatgaatgttttttccaattacatactgaaaccaaaactgaatagtatcaaactacaagagcacaagtccaagtccagatggtttcaaggcactacgaatcctataattgtacaagtagtaatggagctgtccatctcccggtccaaacttgagctctttgaggaaactctcattgtgcattacatccaatgcattgaaaacatcaaaatccttttgctttgctacaatcagcacatcattcatcaactgagtcagtggagtttttggggagacattataataagaataagcagctttcaaaattgag

SEQ ID NO: 31183 - DNA, 319 bp, Glycine max
  Clone ID: jC-gmst02400068a11d1
ccagctaatataatagcttcaatagctctttatgggaatcaagggtacatcattttccagtcaacacaagaagactgcaaatcagcagcgagacattgttttctgaatgaagagagagaatggaaaaaaagaaaatctttgacaaaaatagaaggaaaaataaaagcgcgctatcacaaggatagtacaacactgaaccaggcactcaattattttgaaggaaatttgtggtgatttacagcgcaagacatcctgcaggttgacaactttttatgctgatttcccttggcgcttctcttcctccatcctggctttgatg

SEQ ID NO: 31184 - DNA, 351 bp, Glycine max
  Clone ID: jC-gmst02400068a12d1
cacaccaaaggatctgattcattaaaagcaatagattcttcacaaccacacaccactcacttgacatatatggaacacatacataatccatatagcattacttagtgggggggcatttcttacttttatttaatgcacaaacataacaagggcaggaaggaaaaccacaaaattaaaacgaagatcatatagctgttaataataacaacaacacatgcaacataaaaaccacatgcagttgtggtagtggcatcttcttcagattggaaacgcctcaatgatggaagggagagcgttgatcttgatgatgttgtaacgcgcgaaaccggtttccttgaacagccacttcca

SEQ ID NO: 31185 - DNA, 290 bp, Glycine max
  Clone ID: jC-gmst02400068b02d1
gagcccaaaaaaaatcctgggggaaagttttttttaaaatagctaaaaacgggtttctttttaataaaaaaagggcattaattcttgccccccacttaacccttccattcttttcccaaataaacttttatttccagctaatgctttttttttgaactattttttatgctacaaaagctggttaacggggctttctttgcaaataaagatcgccgtaattttagtaaacctatttttttttataattaaattaaagcgctaattggggggttatacccttggtttgggcc

SEQ ID NO: 31186 - DNA, 318 bp, Glycine max
  Clone ID: jC-gmst02400068b03d1
acctctgctgtccgagtgccttcgtaaaggtcactagccaccattggtcccatccgatctcttttaaacaattccaacaacaaaactccactaatagttccatccagcaagtgaactctttgaacaccacctctgcaaacgaaagctgcagcggccaattctgacaggtagccattcattcgacttagccgctcttgacctccaatagcaaaaccttgctcaccggaccctaagccatttccattctcaaaaccaacaccattatggaaggttgcattatgccattctgtaaaacatccaataggtggtgatttgact

SEQ ID NO: 31187 - DNA, 342 bp, Glycine max
  Clone ID: jC-gmst02400068b04d1
aaaaaaaagggaaaaaccaaaagggctaaaaaggccctggaaaaaaaaaggtttttggggggggccaaaccccctaaaaaaaatttttaagggggggggggagggaacctcaaggggaaaaagcttttaggttttaaattggaaacagggggggggggggccaaaatttttggggcctgccccaaaaccgggtttgggattcaattaaagggaaaaatctcaaccccccgggggggggggggggaaaccccatttttgggctggggggggccttggttcccaaaaactcggttttggatattggggggggccccccgggccaaaaaaaaaaaaacccccttt

SEQ ID NO: 31188 - DNA, 370 bp, Glycine max
  Clone ID: jC-gmst02400068b06d1
aaatcaaaatatattcagatacactgaaatggcaatgaagcataacatgaagttgggaagaggtagcttttatttgcaaaatgatggcattccatcccataaaaatatagatccacacaatttgtaatgaacaagaatgtaatacttctttctttaaaccatgataacacagattgtcaggagcaactgttgtcttctagatgttggcaatcgatacaggctcacggaggatcctctccatctgttgtgccctggtcttaattgacatgtcaaagaccttctggctgaattcaagcacaagaccaccaagtatgcttggatcaatcttctgatcaagatgaacctttgctccagaacctattatttcctg

SEQ ID NO: 31189 - DNA, 362 bp, Glycine max
  Clone ID: jC-gmst02400068b12d1
aaaagagagggcacaccacgcgcttggttggtacagcaatgagtcgcgtggaccttggagcggtgagtccgaacacgtgacccatgtccatctcacttggtttcattccatctggcaattgccacgtgaagcagtgaagaagatgagccaccgccaattcaagcgcgtagagccccaacaccattccggggcaggatctttgacccgacccgaatggaatgaactcgaagttgctccccttgaaatccggcacgcccgggttaaggaaccgggcgggcttaaaagtttcgggttcctcccatgaatacttgtccctcccaatggcccccgcgttgatcataacacgcgccttcctggggact

SEQ ID NO: 31190 - DNA, 462 bp, Glycine max
  Clone ID: jC-gmst02400068c01d1
atcataaagaaagagtaaatcgatgggcaaagttgatggtgaaaactgtacactgaaatgattttactcacgtatacatgttactatactggacacagatgaactgcattataaatggggaaactaactcgaaacactacatcacagaattccaaaattggataatcataactatatatcaaaaaattatgacacaacacaaatatacatgtgcttatatgaacgggaggcatggggaaatttgttgatagcttggatctggacctgtacagcgcttgcacgctgaacccgagttgtcttgaagtgagtttcgcctccgaaattggatctgcatcaatctgcatgctagtataaatgttcatgcatatatatgtgaacaaagaatactaagagcaggagctatatcctatatggagttcacagtatcatgtatgaacacaccaggataaagaattttgcatt

SEQ ID NO: 31191 - DNA, 439 bp, Glycine max
  Clone ID: jC-gmst02400068c02d1
atcataaagaaagagtaaatcgatgggcaaagttgatggtgaaaactgtacactgaaatgattttactcacgtatacatgttactatactggacacagatgaactgcattataaatggggaaactaactcgaaacactacatcacagaattccaaaattggataatcataactatatatcaaaaaattatgacacaacacaaatatacatgtgcttatatgaacgggaggcatggggaaatttgttgatagcttggatctggacctgtacagcgcttgcacgctgaacccgagttgtcttgaagtgagtttcgactccgaaattggatctgcatcaatcatgatgctaggataaatgttcatgcatatatatgtgaacaaagaatactaagagcaggagctatatcctatatggagttcacagcatcatgtatgaacac

SEQ ID NO: 31192 - DNA, 361 bp, Glycine max
  Clone ID: jC-gmst02400068c05d1
attataagcagagattcataattcagattaactagccgaactttatacagaagcgaccaattaccaaacatttatatatatatatatatataaaaaaaaggcaaccatgaccttaacacacccatcacaagtccaaaacacttgaacttgctcaagggcaagaaatgaccactttattctaagggtgtttgtttagacacaaaacaccagagggcaacataatacatactacataattttgaagttttgaaactacatatagtttttatcattatttctaagggccatttctgcttgaagctttagctctccaacacctcacttgcaagtgcaggggttgcaggtgcagttagctccacat

SEQ ID NO: 31193 - DNA, 485 bp, Glycine max
  Clone ID: jC-gmst02400068c07d1
aaatatccaatgtcaaaatttgacacataaagttgattttttaaaagcaaaccaagcaaaaattgaacacaaatataaagttgacatttaaaaagcaaaccaacaacgcaacgggaaagccctaaaactcgctgtgcttaacaaaaatgtaatcaggggttctcacaaacacaacacattaaaacagaatgataaaaggagtcttgccaccgtcgatcaagaacccaattctgggaacaaaagttgcgagatgatggtggagacttcaaactatgttcgaaaaacaagctacctataaacgaagacacaagggcaagaaaccaacatttattgtgaccataagatacgacatcccctgatgaaccaaaccgcacgattcacttcttcttctgggcagccttggtgaccttggctccagtaggatcctttttctccacgtttttgatgactcccacagcatcagtttgacgcatattcctgacagc

SEQ ID NO: 31194 - DNA, 359 bp, Glycine max
  Clone ID: jC-gmst02400068c09d1
ggaaaaaaaaggccgcttgggaaacttttattgaaagggttaattcacttcacatgcaattccatagcttcccacaaaaaatattaacatttggcccgtaaaaccctcccaataaacaaaggaccccccccttttttaggcattacgggaaaacccctgattttaaaacggttgccatcagttttcctattcccccaggtatcccccttatgggggaaaataaaatccccccgcccccctggtaaaaacccccctgccacccaaccaaaagggaaaacccgcccgatttcctttcggaaggaagggccctttaaacacccccaacttttttttaagcaaaatttttttttgagggggcc

SEQ ID NO: 31195 - DNA, 354 bp, Glycine max
  Clone ID: jC-gmst02400068c11d1
aaaggcaacttaatccaaaggatatggttacccataattgcaagtatatacttttactccctaaggctaactaattattatcatcggcttttggaaatgtccaaagaaaatgatgtcctttcattcggaaaaacaagctaggggaaaggggattcaaatcaaaaaaaaaaggttcttatgggggagaccataaaccaagccccggagggggatcatcttggtaaaaaaaaccaatcaaggggagggggtgcctgccttgatgccataaccctattaattaagctaggatgccccccagggttgccccatgttggcctgatcaacggccatttccattctaaaaagggacttggt

SEQ ID NO: 31196 - DNA, 351 bp, Glycine max
  Clone ID: jC-gmst02400068c12d1
cctaccaagaaaacgaacttgaatacaaatatgaggctcttggtttttccatggctaggaataaaatgaagaaaacagtcctgaaactagagttttggaagaatattttcttttttactgggatatcatcaaccccacagagagggtttcttaccactccccctgaagctctctagtaaaacaatgaatgacaaaataatggggggggaaaaatagattatcattcgggtactttgcagccatccctcgcttcagtatcattacattccctctccttgctccacccaaaaaaattgacaaaaagaatgcgttgtgaaatgaaatacctatcacacgatggaatgggtcaaa

SEQ ID NO: 31197 - DNA, 354 bp, Glycine max
  Clone ID: jC-gmst02400068d02d1
gcaaactaaaattaaaattgaaaagatcaaaatccaaattacaccaagttcatagtaataataactaataacaacaagttaaacccaggataataatgagaaaaaagagtaccggaaagaaacaaggtggcggtggtggtttttgttttccaatttccaaatgaaacgaaaccctaaccagagttttgttcgtccttgtcatggggctttctgcagaggatcatgtgcatcggagagaaaatcccagagtcaccccctctggtcaaatagtcagcggtcttgaagagcatctcatgaacatcgacggtccccttaggcgcgattcccaaagcggcgagaacagtgaccacaata

SEQ ID NO: 31198 - DNA, 319 bp, Glycine max
  Clone ID: jC-gmst02400068d06d1
acaaacaaacttattgtgatttacttcattccatggtctggacactacagcaataatcataatttcaaaatcatcctcttcaacttgagaatgaattacttcttgccactttgcatcatagaaagtgagaaactttcttcacatacaactctgccttctattgttggagagggtggatgaatgaacaaagcaattatgcagcagtcaactaatgttgcaaaaagatacatttgtcatccaatcacctagaagcgagcccagcatctaatgcattgtgcaatacaaactcccttacaatgaacattataacccccaactt

SEQ ID NO: 31199 - DNA, 281 bp, Glycine max
  Clone ID: jC-gmst02400068d07d1
cggaaaggaaataccaatattatttaaaccaaaaatagagaattagttctattcttggaataatacatacaaatcaatttacaacggcaatgctgagaagattattgaggcaaatgaactgcatatattctaatacaatggacaagagtacgatgggatttctacagaaaccccgttgatgttttagaacaaacgtacctatattggaaatagaatgggataacgttctaagtacaataattttataggacacggccaaatcatcttatggagatgaaatt

SEQ ID NO: 31200 - DNA, 572 bp, Glycine max
  Clone ID: jC-gmst02400068d08d1
gaatgccaacacgattttatttcaaaagctgaccacattatgtgtcaccaaagaatcctcgcttttcctcatgatgagtcaggaacttacttttgttgagtgataccaaagattcaaactccttttatctgatctaaacctctcaagtttcttacaatttgagcagatcaccaaacctattttccttccctattgtcctaaacaccacaagaacctatataattagagtagagactcaacctatatacagccagttctcactcccccgagctctcgcatgagcttccaagatttgaagttatgtcatgcaccaaaaccctgattattttgcttcctgatgatcttgaaacatccatgcactcctgtaggtctgcatcacaggctatcaaaacccattcgtgatcatcatccaggtacttgatttcaaatgtacccacctctagtttcaatcttttggcaacttcttctttcagttcaacaatgccacaggtcaacgagacccgaaatcttatgatatcttctctgtatgtggccttggatgtcactgtcttcatttctttcatagctacaaa

SEQ ID NO: 31201 - DNA, 465 bp, Glycine max
  Clone ID: jC-gmst02400068d09d1
acggtagtataaaaattgtttatttaatatcttcaatgtagagagagatgctattctgcttacaatttcaatgacattttcacccgtatctgtacgactttaataaaggaagatgttaggcgtgagatccttttggttcaagattttttgtattcccattctgtaattctcaataaccaaaagaatcctacacattaaaaaatgaatatttgtcatcatcatgtagagctcaaattagagtcgaagatattagaaacctcgtggactttaaacaaaatggacatgctgtatccaattgattacacactggacacacttccctttgaagtttggatacacattgcgactctcctcgtcagagctcttttgacaactatgaattggagggagaaagcttcagaatagccgaaaggatatatgtaagcacaaaaaatagcgctaattctttcatttgaatacacccat

SEQ ID NO: 31202 - DNA, 502 bp, Glycine max; identical to SEQ ID NO: 30848
  Clone ID: jC-gmst02400068d10d1

SEQ ID NO: 31203 - DNA, 428 bp, Glycine max
  Clone ID: jC-gmst02400068d11d1
aacaaaaaaaactgaaactagaccatttcaatgtagatacgggataaatacttcacaatcaaagactggatgctaggaagtttaactagtgcatgatagttatcagcttctggtaacaaaaaagtaactgctgttgacaaaaaaaggatggaaatactgaaacaaacaaagggaagttttaccaccctttctacacaatgtatcaactggaaagttgaagcaaatatccactcacaaatctttgacgaagaccatcagttaatgagacgccggacgagtgacccttggtctcaccggagtctttgaaggacttacccttattggatggggccccaagagcatgccacttcaggttagtgccattatagcgctttcagccattgggaatttcacaaaaacaattcgggttgaatgcacgtggtgcccca

SEQ ID NO: 31204 - DNA, 459 bp, Glycine max
  Clone ID: jC-gmst02400068d12d1
ggatcaaaccaacccatattctatatgggcttttactttgcatcagatacgacaatatagaacgttatatttccgtcataatgttgacagtaatgttcaatatattacatacgctaaaatctagaacaacgcatgcccccccatcatacacaatatgggaacaactggactaccgaaatatggtgttatctaaaagacaattatatgttgacagaagcaatggcacgatagctattaatctccaaagacaagcttatgcttcgggatataaacattacaggggtaacgaaacaatacaatcaaaatatgtaagcaacaacttatccaaagagctgccttcggatctctggaagctgtttacggaacactacatcaagtcgtgcatcaagagtatttttacacacaatctttccatcacgagaagccaacaccaccccaccagagcagtagagatcatga

SEQ ID NO: 31205 - DNA, 461 bp, Glycine max
  Clone ID: jC-gmst02400068e01d1
cgtccaaaaattatagataaaaaaaaagttattagaattacagatataccctttattgataataaaaatgttatgtttacatggtagacaattatcatcctttatcaggttgcctacccttacactttggaaccttttaaatcatcaatcacagcttgttttttgttgatgcaacaatcgaacccatactttgatggtttgagatctcaaaccacaaagccatgagtgcaagtgacacatctcgttcaataaaaactagataactaataaagtatagtttgtagtaataaataaataagcatactcttttaaatgaatctatacgtctggacgctcattctgatcaaaaatacgattatggcaagtagggttgcaagggtaggcacaatctatttacggaagggccttcgatcataaaaccaatcacccactgcctttgcaattgatgtcttggccaccac

SEQ ID NO: 31206 - DNA, 395 bp, Glycine max
  Clone ID: jC-gmst02400068e02d1
caaaaaaggcgttctttataaatttgacagagaattacaagagagattgtgatcgcataaaaaagaagaacagagcatggtgtcaaacactaattaccggtacaaaattctctgtgccgtaccatacgtaaaatcttgatattcataactataacaataacaataacatcataaaccataaaattcttccattgtgtatttgtgtttagaatgatctgaatgatacatcgttactattaccttcttcacaagcgaatcaccaaaacgcaagcgtgctaaacaagccaaccaaaagtggcaacaacatggtggcaaagctccggcggtggcggtggctgatggctccgctgaaattctcgtcgacgggatacaagttccccggaggcccggtgatg

SEQ ID NO: 31207 - DNA, 407 bp, Glycine max
  Clone ID: jC-gmst02400068e03d1
caagaaacaaggtgtattaaaaaaattagagcaaatgatataacatacaatacaaggaacgaaagctgcttttcaattcatatatgaaatgtgctgtggactgcggtggacagtgtcgtcttgtgtgtaaccaattaaccattatgaataagaaactggaaggtccaacatattctattttctaactaaagacaagtctcggacacacctgatgcttataggggcgaaaacaacctaacggaaatagatggatatttgggggatgtcaatgtcattatcatcatcatcctcacaggcgacaacaacatccaagtgacgacggtaagaaggtatttccaccttggccactttcctagctaaatccaccatttttttgtccattcgttctctgggcctagggaacatgc

SEQ ID NO: 31208 - DNA, 416 bp, Glycine max
  Clone ID: jC-gmst02400068e04d1
ctcaaaggataactagattcgatcagtatcctaaatcacaccttgacctcaacacagtatagacaaaaacatgaggcaaggctttctccaaagacattccaagaatccaacgtagacaaaagtcatgcataagaacaacaaatattacggaaacatgactcaatataacaacataaaagcaagccaatataagaacaaacagataggtgccgcataacattgttcccaaactccactcccactaaccccctattttttccattctccacaccaagctcatcaaagttttatcccgcaaaccgtacatacactattagtaattacaatcttcttcacgttggagagcagagcaaacacacttacgcatcacatagcataagtaagacacaggcatctttcacattcagtctcttcac

SEQ ID NO: 31209 - DNA, 536 bp, Glycine max
  Clone ID: jC-gmst02400068e09d1
acatactgggaaaccttttattggataaccatggaagttgacagaaacagcaaaatcatcccattcatgatttttgtgcaacaatgatcatttccattattctagggtttttattaagacaatgatgaagacaatctttgagttcacggtatgctagtgtttttaaatacatggacattgcagtattttgcttgtagatgaatgttgcaccatttgattagtcggtctccaaactgcagcctttgttcctgtttgcctgtgcactcacttcagtcccctttgttcttgattatgtttttcaatttctcatttgcagccactagttcagcagttatgcctggttcattggctgaatgccctgcatcaggaaccaccctaaaatctgcctctggccaagctttatgaagatcccaggctggcatcataggacagcaaacatcatatttttcctgaacgaatgtggtgtttatatgccttattttatcaattcttgccaccggaatgaatcaaaggggaaaaatcccttggttacaaaa

SEQ ID NO: 31210 - DNA, 418 bp, Glycine max
  Clone ID: jC-gmst02400068e10d1
aactcgcgaattgtttcttcattttatgcatatgcatatacaaatttacatacatgcatttatttgcacaaggctcataagagtaaagtacagagtggggattcagggggactagttgtatgtaagaagtattttttcgagtgcatattttgcttctattgcaaaccaaatggaccttatgatctgaagcttggcacaaaacacagattatacaattttaagctacactctcaaaacagataagctatgaaaatggacattgatcactgatcaatcataggtgcatgaattctttttgaatttgataggctttgatcgagaagagttgaggaccaaggggcaagtgatttccttacgatgccttgtcttgaccagtttacccactacatttgcacgcgaacggatttcaaagttcaat

SEQ ID NO: 31211 - DNA, 491 bp, Glycine max
  Clone ID: jC-gmst02400068e12d1
gcagcataaagacacgaagatattactaatatgatgatgactagtacaatcatgtcgaacaagatttcaagtattacaaattgaaatccatttacctggtttggatgacaataataatatatataaaaagtatattaaaaaaaaaacttacaaacagcttaaatagccagaacatttggatttactccaagcaattaaggtcaacaacacaaaggtgaattggatcatcacatcttctatgacacagtgtcaatcgcacccctttacaaccttcatacaagtgagctcaataaaaaaacaccggttaaagtcccccgtaactggaaaaggttcattcatcattgtcagcataaccacagagtgcaacatcattccaatccctcttctaacttttggataattcatgaaagcacaacagaaacatggttagtgttatatcaccccaatcaaattaaaactccatgcaaagaagttgccgttattagacattg

SEQ ID NO: 31212 - DNA, 446 bp, Glycine max
  Clone ID: jC-gmst02400068f04d1
aatgcttcataaatatacaagaaattcttgtacatcatttttctttatatcaaacctgataaaagagatataggaaattataacgtgcaaatattagaatccaaaatataaatagaaaaatcttaattattcggagcatcttcaaactaatactacaaacccagtccaattttaatgactacaacattttttgaaatcggaaatcagtcatgcttcacgtgggccatcataaccattagaatataatgttgaccaccaaccttgaatccttgtccttgtttacttaaattccctccaagacaagctgggaatgaaaaaactcgcaaatcaccccaaattaacacccccacctgaaaactccacctcctgagcaggtgccaaggatgagacccagtctgatgtgtgtgtaggaagaagccccaatgcattgagctttcaaacaccta

SEQ ID NO: 31213 - DNA, 399 bp, Glycine max
  Clone ID: jC-gmst02400068f05d1
ggaaaccaacaaaactaaactcttaattgatacgcaaaaacatccttataatttacaaggccaataccagcggaatgttgtttgaaatttaagggaattcatgaagcaatcaagatctggggatgttatgcttcttacatttaggaacttgatagttttgaactctaccaacattatatagctggctaaggatttcctgacagggtataaaacctaacagattgggggacatctatttttaaacttgggatataaaaaaaaacactggagcttattttatttggataactcagggctcatggacacttgggaccttaaaagggcaggcaacagacctgtttaacaaactgggcttgtagattatatggcctgcttgaaaccttcatttggccaaaggtg

SEQ ID NO: 31214 - DNA, 510 bp, Glycine max
  Clone ID: jC-gmst02400068f06d1
ctctctccatcccattactatacaccctgcaaaatgccttattctttctattccctccctcgctctcaattaattaagcttcttcttcttccctcttaactccattcctctgaacagtaccactgcagagttggtgcttgttcgtccgagaagaaattgcaggcctcgtcggcgctgagaaaattgtgctcctccatcttcacgtactgcgtcgtcgtctggtactgtttctggaactggaaacagttgttcatcgacgaagaagaaggcgacgacaaaagcccgtgactttgcagaaccccacacgacgaaatcgccgcgttgttgttggggctgtggttgttgttctcctcgttcaagatcgcacttgagtcgctatcagaagacccatctttgaaatccacatggaacacagaacccccctccaccttatcactcttgttgaaacactcggtactcaactccttgagtccaatccaggaatggcggattcacaagcgggttactatc

SEQ ID NO: 31215 - DNA, 453 bp, Glycine max
  Clone ID: jC-gmst02400068f07d1
aaactcaacctcaggaaatcacctgatatatacatccctaaataatgaaaaataaacacggatgtaagagccaaaaaaagtaacgagaatatacatgcacttttgtacaaaggaccaacttaagtaagaaaagagagaataaagataacataacacccaatctagtttagtctagttcgttagtttctaaggttactcccagcacttttctacttatttggtactctcgtttttatgtgttcaacaatctctagaagagacccagagttgagggaagctatcttcatttttgagaagaatgcacattgttcttacttcttacttcttacaaaatcgccatcctttggtagcacctgctgaaaggtaggcaaagtcttaatagtttccatgtattgatcattactgttaatgctattacaaattcaccatccttcactggcactcaatgggaaa

SEQ ID NO: 31216 - DNA, 541 bp, Glycine max
  Clone ID: jC-gmst02400068f09d1
accaatagaattcgtgagtctcaaattcattttcattcatcatgcccaaacttctatacactgcaaagtcatatctaagcaccttgaaagtcaaagcatctatataattcatcagctgtagaggtaacgaaatgtaactcaaaaaatttgattacttttttacaacatccttgaatgaaactggccaaaccctgcacgttcctcaatgacaaaatacctagattagaaggatgaggttcctattgaagagtatccagcagcttttctttccttcagtgttgaagccaaccagtccaggccctcataaagaccatctgccttgagtgcacaagtgccatgtatgtgccattttctattctttagatcaaagagacctagtgcttcacatacttgcattggcgtcatcgcccctctcaggtcttgtttgttggcaaacaccaagatgacactattgagcataaatgggtcatttatgattgtctgaaattcctgctttgctttacctattctctcacgatccaagctatcaacaacataaatc

SEQ ID NO: 31217 - DNA, 478 bp, Glycine max
  Clone ID: jC-gmst02400068f11d1
gggcaaaacggtctaacattatataacaactgaggtcttgaatatcatactaaatatgtgaacccattcaggtccaacaaattcaaacgctgtgtaaatatgggaggggagcaaatggaataaaataatataaaatagtagagtatctgtattctgagacaaacataaacaactgtaagtaaaactaaccgcaagaatacaatttgcactaagcacctagagtgcatttaagtatctaagcacttgctcattgaactcaaagctcactgaattccaagctgaaattgaaactaagcacttgcatgacatgtcgtctgcaattctctttacaacatgctcctaaaacaagaacattagttctagatgttactcattttgaaagcttatgatcagcagcatgacacaaagactactgagaaagattttaaccaagacatgtgaactcttacattcatggaagcttaaaatatcagcttca

SEQ ID NO: 31218 - DNA, 204 bp, Glycine max
  Clone ID: jC-gmst02400068g02d1
ggggggccccaataaaaaaaaaaaaattttttagggggaaaaggggaaaaccccaccccaaaaaaggggggggctttggggaaaaatccccccacaaaaaaaaaagggggggtttgaaaaaaaaaggactttttggggggttgggccccccaaaaaacctttgtgcatggggggggggaaaaaaaaaaaaaagggggggttttt

SEQ ID NO: 31219 - DNA, 327 bp, Glycine max
  Clone ID: jC-gmst02400068g03d1
ccttcctaactgaaatccttgttagtttagaaaaagctcaacttcattcaaatgtagaaaagtaaaaattcttaagctacaacagaaagctggatctttcagccaaaatttcacaactacttcctcgtgttctctcatactcaaccctagtcagttacaggattctgtattccatatccatggtagagtctagtgagtggctgaacgtgagaaattggttatctacttcttcttctttgacttgcttgacagagactgagtataagcagttccctgtagccattcatctgttgaagcatcagtagtcttagtcccaacttcaacttt

SEQ ID NO: 31220 - DNA, 340 bp, Glycine max
  Clone ID: jC-gmst02400068g05d1
ggggacaaacaaggataaatcccccttaacatcaattaatcaatagctgggcgaagattacaaatcacagactttcaaaggggtgtagccctccctgggatccccggccaattttttgaataaaccaaccacccatttcccaacttttgggtgagaaccaatttttttaacaaggtaaccaacaacattttacgcccgggaatttaaagcaaacataatggctgataattaaccaagggggcacatgcgacacaccacacacattacaactttttttagcgggaaccacttagggatcattttaacgagccttaacaagatgagcctccccgtttttggg

SEQ ID NO: 31221 - DNA, 619 bp, Glycine max
  Clone ID: jC-gmst02400068g08d1
ctatgtatctatataatcgaattgaaattacgattctatcaaatctttttatttactttttttttttttaagaaaaaagaaagttctaattattaataaattatatctatatatatatatatacagatagatattctatatcttttatcttaattaatatttgacccctccttataatgggttatagttttctttatttttaggaacttatccattccttttttaatgtgcccgacaatccgaaagaattctgggggaggggtcatttcgtttttgatctagaataaatagagcttcaagaaatgagagaattaagaatacccacgagaaacactaatccaatccataatgatgtaccggaaaatacaacatttttgttattcgaccaaccttcaggagaagcaaatacaacaggtgcactaatcaataaaataaatgaaatagcaattaatgcaaaaacagctaattggaaagcaatagtcatgtttctaatcctccaatttaccaacaaaagaactttaccatttgatcccccaaccccttgatccctttatttgacaaaaaatttataataaaaaaacgcaagagggttttatcatgaattcattgatttttttac

SEQ ID NO: 31222 - DNA, 511 bp, Glycine max
  Clone ID: jC-gmst02400068g09d1
gtgacatcgaccacccaaaattgttatgcattaaaaacaatgttacacattattacaattttattcaaatataccaaaagaatcaatcaaccagcaaataaatagatggaacatggtgatgccggttgtgatcctctaactgcataaattaattaccatccaaactcatgtcatttacactttgaagcaacggatcccttcggcaatgagggatgctacagcctcctttcacttgggtataacaacttaaccaagggaatcaacacaaataaatgtggtacaataataagacacgaaaaaggtcctctaaccaagtaccttgcgaagttcatcggtcaacttcacgcgacccgatggctccaacttgcttaaaagggcagcaagaccttgaggtagagcttgcaaatctagagctgagtcaccaatatttgtcaattgaagcaacactttctgcgcacgcaattcctttagtttattctcgtaatttgcaggattatccttccatctgaag

SEQ ID NO: 31223 - DNA, 477 bp, Glycine max
  Clone ID: jC-gmst02400068g10d1
gcccgaagcaaaatcaatgactaagccgctgcattacttgaggtttaatagcccaccaatatattggcgtggaacaaaaacgcagcactgaactaaaccctaagcagttccctttggttttccaaagacaaaaaatgtcccaacaatttgagtttgccctaaggcaacaaaaaaggcccttcccacccggggagaagtcccccaacagaaccggcgggccgaaacccccctttaaacccccccccaattgctgggtggggggcaaaaaaaggggggggcccccccgggaacaaaaagggagcccccggccgttggagaggtctttgtttttccacaaaaaacaaaattttttttttaaaacccggtgaagaagcctctttttcggccccacaaatattgttgggccccttatttttggggggggccccccccctttggacgcccccaaaaagaagagttcttttagaagggggcccc

SEQ ID NO: 31224 - DNA, 504 bp, Glycine max
  Clone ID: jC-gmst02400068g11d1
aaaatatccaaagccaaaatttgacacataaatttgattttttaaaagcaaaccaagcaaaaattgaacacaaatataaagttgacatttaaaaagcaaaccaacaacgcaacggcaaagccctaaaactcgctgcgcttaacaaaaatgtaatcaggggttctcacaaacacaacacattaaaacagaatgataaaaggagtcttgccaccgtcgatcaagaacccaattctgggaacaaaagttgcgagatgatggtggagacttcaaactatgtccgaaaaacaagctacctagaaacgaagacacaagggctagaaaccaacatttattgtaaccataagaaacgacatcccctgatgaaccaaaccggacgattcacttcttcttctgggcagccttggtgaccttggctccagtaggatccttcttcttcacgttcttgatgactcccacagcaacagtttgacgcatatccctgacagcaaagcgaccaagtggggg

SEQ ID NO: 31225 - DNA, 359 bp, Glycine max
  Clone ID: jC-gmst02400068g12d1
aaaaaaaaaacacccggggaatttgggacaaacccaaattttgggggggcgttggcccataaactacagaaccctggaaaccaaccgcaatcaaatttggtccccctttggaatttgaatcccaatcccgggcctgggttatttaaccctttgtcccgggcccatggctggctgaaatttgtacccaaacatttttttttttggttcaaaaaaaaaggggaaaaatctttttgttcccggcccccttatgggaaaaaggggggagggccccccccgggggctttaagccctcggcttcccttttacttaaagagggggccctttgggccgttcacattttcttaaactggttaagccct

SEQ ID NO: 31226 - DNA, 414 bp, Glycine max
  Clone ID: jC-gmst02400068h01d1
gcaggataaagggggaaatacaaatttatgaggtgggagttaagtataatttgtatgctcggtggatctgatatcgagcacgatccctttcagaattactaagactgccataaaatatgtacacatcaactttacagaaaaacaggtgattccccgatcttcccttgtatgattacaaggaatgcttccgtttagtccttcccacaaatgtgtcaataaaacggaatgcatacccttctaatacaagtaaatgcaagaaatgctcatccactgtacagtttactctcataaggaatgtacaatgctaacaaaactagcccccgccagagcaaaaagcctatctttacattttgccatattctcaaataaaactttcccacgagaaaaatagcatggcattcaatattatggatg

SEQ ID NO: 31227 - DNA, 421 bp, Glycine max
  unsure (1)..(421): unsure at all n locations
  Clone ID: jC-gmst02400068h02d1
gatcatccattataaacttctccataatttccaccatgagaataacgtggacacttgtacaaaagctagaattggcatgtagtgttgattcttcctgtcatcacttggttacctaacttcatccaattttaacaaccacaagacttacagaaaattgtaagtaaaacgttttctttatataagaacaatcatatattgtacaccagctgacctatatggctgtaccttgccaaaaagaaaggaaaaaattcctaagcatacactaccagccaacagaaaaagcagatcccaagatagaatctgcaatctgcatcattntaataaaggagccggatcttggtacatctagggatctaaactctctcgccactaaacaggatgcagctatgtattaaccctcttgtacactaccccatcaact

SEQ ID NO: 31228 - DNA, 441 bp, Glycine max
  Clone ID: jC-gmst02400068h03d1
cataaaatcagatttcatatattataggatcatctgtaaccccaactacaccaccaagaggacaaagaacttcacaaaactaaccctaaaaccactctacccaccacattctcacttcctaccccctctcttagccgtagcctttttcgctggagactttacactctttggtttcacactcttcactggcgctttcttagcaggcgctactttcttcgctgccggcttcgcagcaggagctgctttcttccctggtgaagtccgtgtcgacgtccttgaagccttggcgggcttcgctttgggctttgccgcgggcttggcagcagcagcctttgttttagcagcgggcttgggcttgggcttggcagctggcttaatccctttgggcttggcggcagcaagctttgggcttggaaagcagcaccgcagcagcctttgggt

SEQ ID NO: 31229 - DNA, 471 bp, Glycine max
  Clone ID: jC-gmst02400068h05d1
cgcccatgatctcattttatgttgccttcagaactcaagctatacataactgtaaaacatgcatgtattacatacaccgtcttctctttactaattcagaacagacattcagtaaacagataccgaataagcaaaaggtctccagataaataaataaaacacacagatacacaaagctataatatagtcacccttcactaccagagtttcatcttgcccccaaattttccagtctatgtttttatgacttttttgcatttgctttcgcagaggatcagatcagtcagcagtcattggatgggtcatgcaacacctgaaccgagccttccgaactgttgtcatgatctcattctctgcattctcaagcattcccacaatttcagcaaatggtggcctgacatcagggttgggatcccagcatcttgtcatgatgtcacggagaaccgctaggcaatcgttaggtatgattgg

SEQ ID NO: 31230 - DNA, 511 bp, Glycine max
  Clone ID: jC-gmst02400068h07d1
aagagcaagatatgggtagagatcgtttcttcacccacaaacaatttctgtattatgctagtcgtacataacggaattcaaatccttgttacagaagatacttcatgacagcctttattattttcaacccagtcacagtaatcaggacttcttttaatacactttgcctgatgccctaagaatgaagtatgaagcgaggacaaaaaaataaaaaatattaagccaaattttgcaaaatcactatagactaagcaacatacaacaaaacctttacaaagagtagccgtcccttaaaacatgttacctggcaagattttctgaaatctcccttcacaataaatgtctccaagcactcaacataggatgttgcataaaatgtacaatctcaacagtaactcaccctaatacgtgaacaataatagaagcaagctaccccaacaaatccaaaaggggtggctgctcagcgtgtgacttggtatgagaggaaccagtggttgaagcagatgccctt

SEQ ID NO: 31231 - DNA, 395 bp, Glycine max
  Clone ID: jC-gmst02400068h09d1
ggaaacaaattcaccatctttgggggataagcttgatccaattacattggtttaaatcaaaaatgcctaacagggtttacatttaaccaaaaatacccgtgctggttccaaatttcatcaactcccatgacctgaaaacagaatgtgtgaaacggacaagttgagatcccaactgcggatttttggataaccaaaaaataacaaaatgcctgaattcattttagggatatgtagagcccatatgatatgaggactgcaacctctgctaactaataacatttattaatccaacaaaacaaggggaaaaagaaaaaaaaagtaagccacttttgtgtgagagttaaaaaagtattgaaggggtcctgggtgagctgttctttttgctgtgttgttgg

SEQ ID NO: 31232 - DNA, 518 bp, Glycine max
  Clone ID: jC-gmst02400068h12d1
gagaactccaccattcacgcaacctgttttaatgaaaggaatatctgtcatgaaaaatctagatgaagagaaaatgatcagatgatgcggcggcacagggtaatcccatcacccacggggagctggcaaatctcgatcctcgaatcttgagccagatacttgttgagctccatcacatggccgcgaagaggcttaatgtaatccatcaatggtgcatcgggtggtgcagccacagatccagcccatagggtgttatcgtatccgatcagtcctccaatcttcacaagctctagtaccctcttgtggtagctcaagtaattgtccttatcagcatccacgaaaacgaaatccaacgacccctttttattttcatctttaagcatctcgtccagaaacggaagagcaggtccttctctgaaatcaatcttgtgagccactccagctttttgaattattggcaatcctaactcatagtattcgcgattcacatccaaagccaagatctttccatcaggggg

SEQ ID NO: 31233 - DNA, 332 bp, Glycine max
  Clone ID: jC-gmst02400069b01d1
aaaaaaagaaagccctgcaaaagtaatacaaattttgggcttagttctccaacaaatctttttgtttaacaggggaaacttgggcctttttccaccaaacaaaatattcttgattaagggtccccaaaactgaaggcaacttttagattaactaaaaggtcccctttgaaaaaaaatagaaaacaaatttttaataatttttcaggggtttgcccaataggatcacaaggtacagccccgggcaatttttactcccccctgtccataaaatagcaatcccgggattcaaaaacatttggtttttaagaattttttacccaccttgggttttt

SEQ ID NO: 31234 - DNA, 368 bp, Glycine max
  Clone ID: jC-gmst02400069b03d1
aattaaaggggattggattaatcatacctcaaaaaccggaatttaaaacagaagttccccctgtttcccaacaaagataatagattgtgagatacaccactcataaaagctttctcaaagggggaaaattaacccaatcacagcacaagaaacccgcattacccaatacttttaaatatgtccttagctggagagcaatcacattaatcttccttttagagcccttccaaatctccggcccccgggtttaataaaggatctttgggttggccggattttcaaattgccgaagaatataaaaatttggagttttatcccaaattttttttgccttttgaacagctcctttgatacctttgggggggtca

SEQ ID NO: 31235 - DNA, 330 bp, Glycine max
  Clone ID: jC-gmst02400069c01d1
attgcggcataatacgctgaaatacctgaccctgtttgttcacacacaaactactaccattactcaaagcccacctgatttctctattttcttccaactttataattgagcaagggcttcaaaggattcgtttcacactcataccttgtttattctacaaaccaaaacacaaagataacgtactaaataagtgataggtgatgctgatttccaattgtccacaacttatatagtagcatcaagtccaagttctatggccctgagtttcaatgatttcaagcaacgaatggcttcatcaagaagctcgattgggtgcttgtcctttcacca

SEQ ID NO: 31236 - DNA, 389 bp, Glycine max
  Clone ID: jC-gmst02400069d03d1
aagcgagtaaaagtggactagtgattaattgattcgaaaaaatatactgactacaattgctatagctacatcaataagccatcccatataccgactacaattgttacatacaaaacatgaattcctccacctggccttccacatgaaaaatctaatttgctaattgctatatagctacatcttgtcaatttggcattgatttatctagtcatagaaatgccatgacctacggatatgtaactggaaaacaaaaaaaaaaaaacaaatgtgcaaggaatgcttagcagcacctacaccagtctcctcatttgaagggcttctatggcgatgggttcccatttgcaacaccatcaccattatcaaccatggtaacatcttccatgctgttt

SEQ ID NO: 31237 - DNA, 399 bp, Glycine max
  Clone ID: jC-gmst02400069d09d1
ctcgttctctgcaaccatgtcactgaaatcttctcgctggctacgtaacttctcttcttcccttgcttcttcgtacttggcaggcaaaacattttccatggcttccaactcttcaggctgtaaagtgacatccactttatctgtcttctgacctctaagcaaatcaacccttttagcacctgatttgtcctgtgtgccagtgccaaccacataagtgtgtgtggttccaagcaaagttccaggggcaattttttcttccttctcttcaagtacttgataaagaggcctctcaggctccttcctctgttgcttccggaggtcgataacatcaggtgtttccactccagcgggagtgcttgacagactatcaacagactgaataccagcttcaagttcctc

SEQ ID NO: 31238 - DNA, 454 bp, Glycine max
  Clone ID: jC-gmst02400069e04d1
caaaggctcaaacctgagatgttataaaaacatccggggctaaatcaaaatattttttctttttggcctaaaaacatatcggttacaaaacatagagaacaagactagaataagttcaactgcctatactccgaacaaaaatgacttaacctttcaaatcatcagctatgacacaatgaagtcgtgctggaatccttgagaatgcagcatcttttcaactcctttgcctttgagcttcatctattttctttttccgttgtttaatgcgatcagtctgagcttccttcagtttcttagatatcttcatggcttcagctagcttcctttttttacgtgacatcataactttactcatgtcatcatcaacattttcttgaacactggcagttgattcaccagtctgtaccactccagtagatgtttctttagaacctgctgaagtatatgtaacacc

SEQ ID NO: 31239 - DNA, 344 bp, Glycine max
  Clone ID: jC-gmst02400069e08d1
aaacacaccctaattggcctttatttttaatcataatgataacatataatcatccctttcatgaaacgttgcacctaattttgaaataattcgaccggacaaaacaaaaatttccaaagggggggggccagacaaaacagaaaacttagaacccattccccaacatagttttataaaactttaacttaaaaaaaccccatttattaataaattaattatctcccttctaggaaaataagggacgggggggcacaacgacgtggtccaacattcacaggtcattcatgttggcccactcaacacccatgttggccaaccctaaaaaccggtcaagttgtttcagg

SEQ ID NO: 31240 - DNA, 440 bp, Glycine max
  Clone ID: jC-gmst02400069e09d1
acaagaaaaatccaatcaataacatgtgtaccgacaatgagattcactatcaatcaccaattcttcatgtataataaaacgagtggacattaagattttctgtaactgcataatgcatactggcatccataataccatgaatacaaattctttcatagaaagggggggaattaactaccctgaatgttcacaaaacctaactaagtagatctttgaatccagagaagcaagtttcagtctgcacgagagccactgctacttgcagaagatttcttaccgctatacttctgcttccccaagctgaaggggatatatttgtatttcatcatgtgtgcaacttggcggctcatcgctaggacaatgtgaacaaaccagtaactgagtcttataggccaaaagacaggaacattatacagggaaaataaagtcatcacaaatgc

SEQ ID NO: 31241 - DNA, 268 bp, Glycine max
  Clone ID: jC-gmst02400069e12d1
ataaaaacaagtgccaacgaaaccgccgatttattgtacctttgggttagaaccaacacaaaagggggaagcgcttattatgtttcaaccccttcaaaatgtgtaccactttttccgatccaaaatgttatatggccacccactagagcgtgtaactccttcacaaagactaggctagagaagtaattaaacttcattgtattgtgagctctactgagtgcaacccttacgcttttgggctccataccctgaaaacattggcccttgt

SEQ ID NO: 31242 - DNA, 556 bp, Glycine max
  Clone ID: jC-gmst02400069f01d1
aataataaaagcagtggttataataataataaattttaaagatttgctctacatactacaacaaaatagctccacacctgctgagctaataatgccaaagcaaactacacccgtacatattcacgataaacctatccaaacctcagggtttacactcatacaatcatgcatatcgttacaatattatgtttcgtgcttttgacaacacttcatttgtaaggattgggaagtgaataaagcaacaaaaaacataaatctacgtcaacaagtgcaactcaggacggataggaagctacagcttaggtaaaggattgaacggcagaagacgtggtaactaaacttgataagagaccgactatgacagcactgttgtacgtgcttggttctgtttgcatggaattgttcctggaatcaatgaaagtctcatttaagaagggtccaccaacaagtgctccagtagctacattgggattaggatcagatgactcaagccactggaagccatccttgcagccagtttttgcatcagcaggaattgaagcacccctatgatgca

SEQ ID NO: 31243 - DNA, 435 bp, Glycine max
  Clone ID: jC-gmst02400069f03d1
agaaaaactgaaattccattactagtaaccaaaagtgacatttagattgaagtcaaggaaggaagactcctctcaacaatcatccactcaatcccaaatgtcaaacaaaaacaaccaacaactcaacaccttaacctaaaccataacccaacgattcctacctgactaaccacaacacagtaaaacaagacacacaactgagcttagtaactcaaccttgactcacacacacaatgcttgtggatcatgaactacattgtttattcttaacattatcttcaattattcaataagtctccattttatttgcactcgaatatttatctatacaaaacttagatagagtacctcaagggttaccactattactctctgatcagaacaaaaatttcaccttgataattagtaaaactccaattgtcgaggtgaaacttc

SEQ ID NO: 31244 - DNA, 429 bp, Glycine max
  Clone ID: jC-gmst02400069f04d1
aaaaaaacacggaaccccggcttttttttacgggtttttttgggggacaaaaacccaaattcacatccccctttttggggggggttttttccccccccccggggggggggttaaaaaaacctttttttttctggaacaaccccttttgggcccccccccccccaattttaaaatgaaaggcccgccgggcggggtaaacaaaaccccatctggggccccttgtatttgggggaatgggaaaaaaaatttggcccgcaaagcacacaaaaaagaaaattggggggaaaaaagggttttttccaaaaccaaaacctcttttttggccgggccccacccaaaaaagggggggcgggccctttttttcttggggggccgaaaacgggtgggtttataaagaatttgccgttccctgggggggggggctccccc

SEQ ID NO: 31245 - DNA, 351 bp, Glycine max
  Clone ID: jC-gmst02400069f09d1
accaaaaaaccctttttagaaggccccaaccctgggtgttaaaaactttgacaggaaccgggcatgattcaaactgggtgactccccaaaccctgggggggggaaaccgcccccatttttttttaccaaaatttctttttttggggattttttttgccaaacacatgggaaataccttttcatacatattccttaagggccccaagggccctccgggcaaaggcaattaggggcaaacttggccttcccattatgctcaggggggggaacatccatgttaacaggctcgaggtggttttttttaagttcttcttaaacaccataattttttcccttggggcaattagtttt

SEQ ID NO: 31246 - DNA, 62 bp, Glycine max
  Clone ID: jC-gmst02400069f10a1
aaaaaaaaaaaaaaaaattaaaaaaatttaaaaaaaaaaaaaaaaaaaaaaaaaaaaaaaag

SEQ ID NO: 31247 - DNA, 448 bp, Glycine max
  Clone ID: jC-gmst02400069f12d1
accaaagtaaacgcttagtctcaaaaatcagtaaaagcagagttcaagaagccatcggggcatggcatttctttacatatattgaagaaaactagtagaatggcaaatagtaaaagctgtagaaccaagcaaattcaattgctacttgtaactagtcctactagtttgtcaaccatatggtgaaatcaagaagatttgcaattgctttggtctacctagcaatgcattcagctaccgaagaagaaaggggatatggcgccggagttagtgattgatgatggaaaatgcgagtggaggaatgtcatgtttggaaaacgaatttgagtatccgcagctgatggtattattgttgaagggaatcctgatgatgctgcagtagagaagggtggagcaagagatgccctgccataaggaccttggacttgccatgcccaatttggcacgggag

SEQ ID NO: 31248 - DNA, 343 bp, Glycine max
  Clone ID: jC-gmst02400069g01d1
aaaaaaaaaaaaaccccccccccgcttggggcttttatttttttgggggaaccaaaatttttttttaaggtcccccgggtcacaccggggggggaatttttaaccccttttggggggaacgggggccccccttttaaaaccccccccccttttttgggggggggggactcggtctcccttttttttccaaaccgtgggggttttgggggggccccaaaaaaaaatttttttaaaaccttttgttttttaaaccccaccgggcccggggcccccccccccctgtggttgcccgggcaaaaatttgaggggggccccgccttgttttggcccccccccccccccc

SEQ ID NO: 31249 - DNA, 388 bp, Glycine max
  Clone ID: jC-gmst02400069g04d1
aattcaaaaacatttattatttattggtttctaccatctctgcatggctaaatgctataaataccctggctttttggaaaaatcaaataatgccattcctactgattgcaaaaaaattggcagtaattttgataataaaaaccaatctgttattatacacccacattattgccacatttatgactagcccgtctttatccttaatgctctcatattgccaaaatcacaataagtaattaagccgcaactttcttggatgggactgaattgacaatggtagcaaactcaggaccctttaatgaagcccctccaacgagaaatccatcaatatcttcttgctttgccagttcagcactggtgcctccatttacagaccctccataaataa

SEQ ID NO: 31250 - DNA, 463 bp, Glycine max
  Clone ID: jC-gmst02400069h02d1
ggttgcaaagaaaactaagtaaattgcccaacatcattgcataacgcggggttcaggagttctttgcaataaaagtgccgtttaaacagggctaatccatacccttcatcacgaaactgaaatgacaaacattgattcaaaacctgccttaaaattaacataatatcacagaaagatcgagctatagttgacaaaactgataacacactcctaaagtgaactcaatctaactaaagaatagcctgggacttgttaaggatcactccctcgtacttcacctggaaccacttcatagcatcctcctttgtgactcggtgctgaattccaacacgggacttgcatcttcggcgacgtccaacacgatagccaggtcgctccagaacaacaaagaaatccattccataaataccagttgaaggatcatacttgattcccaaatcaatatgctcctgaataccaaagc

SEQ ID NO: 31251 - DNA, 468 bp, Glycine max
  Clone ID: jC-gmst02400070a01d1
caaaggatattttattactttcaatctgttcttacataataattttaatggaaaaacaattattttcttttggcagaatgtagcaatatactctctgacacatttttgcgtgtccacaattctttcctttgtatcatagtaaataaaatgtgtacgggctgaatcttcattgatacaagccctgtaatacatggagcaatattcagcacaatagcctgacttgactatgtacagtatatttgcatccaaattctcttatatacatctttggttttggccaggcgatgcatgattaggccttggaaatcttttgaggtatacttgaacaaccagaagacatggagcaccaatgatttaacttcaaatattttttaatactgaacctaataagatctgaaccacacgtatttggtaaattgctgcatcatagggggctaaccgcataagactcacttgacagcttttttg

SEQ ID NO: 31252 - DNA, 408 bp, Glycine max
  Clone ID: jC-gmst02400070a02d1
gcttactaagcaattatttagacatcaaaattcaaaacaaataatttagagcttgtaaagcagtaaaccaccttaagcaccacgaagtgccttaaaaaactatatataatacattgggaacattagggcttccgatttaaacatgaacaaccagcggatacataggaaatccttagcagctaattaaaaataaccagataccgttatttagttgctggatataatccaactcttcacttgaaacatttaggagaatactactacagccatatgttgaccacctcattctttgccatctgctgctcgaagagagcctagttgaactggggcttgagtctgcaccactttggaagacccatacactgatatattaataccttgcgccttctccttctcgatctgctcctt

SEQ ID NO: 31253 - DNA, 276 bp, Glycine max
  Clone ID: jC-gmst02400070a04d1
gctgcaaaagcaattcaataaccatcagagggtgaaaagacatggagcagggcacaaaaacaaccatcaactaagggaagaatgaagcacactggaacatgacggattggagcagaaccccaaggcggatgaccgtgcaataagctaaaaccagcagctggtcaggctctggattgtaccttagacaaataaacaaaacacgctggatgggacgctaactgcaataggccgttatgtaggagggaactaccggatgactctgattgacacagaagg

SEQ ID NO: 31254 - DNA, 334 bp, Glycine max
  Clone ID: jC-gmst02400070a06d1
ctgcttcttcacattcataaccaagagtgtatgtaatgcagaagcagcttcaatcatcaacaccatcatataacccttgcataagttcgagcggggaagcccagattggaagatcaaacaaggcttgtttaagctgttcttctctcttaacgcacactgtttctgctatgtcgcataaatttgacacatcacgaattattgcttcctgcgcctccacctgcaataggaggtcgtggaggagggagctaccggcggaatcggaggacgaggaagtagaaggaagagatagggataggtttggttggggatgttgttgagtggtccgatgttgcat

SEQ ID NO: 31255 - DNA, 406 bp, Glycine max
  Clone ID: jC-gmst02400070a07d1
ctgcttcttcacattcataaccaagagtgtatgtaatgcagtagcagcttcaatcatcaacaccatcatataacccttgcataagttcgagcggcgaagcccagattggaagatcaaacaaggtttgtttaagctgttcttctctcttaacgcacactgtttctgctatgtcgcataaatttgacacatcacgaattattgcttcctgcgcctccacctgcaataggaggtcgtggaggagggagctaccggcggaatcggaggacgaggaagtagaaggaagagatagggataggtttggttgggatgttgttgagtgtggccgttgttgcattgagcgcaaggtgttcaacaaggtttcccaaagaagaatttctttctcgtacttagatttgagcttcaatag

SEQ ID NO: 31256 - DNA, 236 bp, Glycine max
  Clone ID: jC-gmst02400070a09d1
atcctatcttgtgggataaagatcattgtatgacaaaggatggagaaagacatagaaggagacaagaaaccgccgcagctacaacaaacggtccaaaccaggcaaaggaaaggaccccccaaggtgtgtcccttacgaaagaaaaaagacgtaccgagaccccaagcatggaaaaagccagaggcaatgacacggactgtgcccaaatgaaccataaagactgctgacccagaggg

SEQ ID NO: 31257 - DNA, 426 bp, Glycine max
  Clone ID: jC-gmst02400070a10d1
aaaacagacaaatattgatgtggaaatattaagaaacgttctgtttgacactaccaaggaaccttgaatctctgttccaaccagagtgtgtgagtattctgtggacaacctccacttgcaacaacagttatagatgaaactattttgaaagaaatgatccaacacattccacctgccagggtacatccttgattccagcattacgtaacagatgctaaacctgggacttgggggaggtcttgtgtgtctctgttgacacgcgtagatgcatcgtacccactacatgtgtgtctgggaagatccaggagtgaaacttttggatgccatagacaccccttatcttcgaaacattgattaaggcatccttcatctcatgctcatgcgcccttggcactctttggagcaaaacatctgctgaatttttta

SEQ ID NO: 31258 - DNA, 474 bp, Glycine max
  unsure (1)..(474): unsure at all n locations
  Clone ID: jC-gmst02400070b01d1
cccttaaaacttagccagtaataattagaaggtaaaattacatgatgcagggcacataaactcattcaaactaaggaaataatttaacacactcaaacataacggatattattagaactccaaagccaaagacctcacattaagcttagaccaacagttcataaagctcaagacttcacatcacagtaatagtctaaacacactggaaggaaggtataatacgtcaacccgttatttagtaggtaattatgggatgactttgattcacacagcacgcactggcattttgattactcatcatcataactcttgtattggtgatgcttgtggngaagcttctttctcccatcatcatcatctgagtcatctccatatttcttacgaccatagccctcatgatcatcatcatcagccttcctctcataggaaggcttgcggaacccctcctcctcctcctgccggggtggacgcccc

SEQ ID NO: 31259 - DNA, 424 bp, Glycine max
  Clone ID: jC-gmst02400070b03d1
ctgaggggactggaaacataaaaaccaattttgcatttaataaatataaacagaaactggctcaaaaatccctgggagaaaagatgcttagactattgtcctcctaactcgaggcacctaattcttggccacaacatgaaaatcgattgaaaggaaaaaccaaaccaagcagaacctacaaaggtccaataccatccgccaattgcataaaaagtctggcttccaaggggacctaacggagaaacttataacatactcaacttacaaatccattcattaaactagatatatctattaaaaacccaaagcttcaaataccaaataagtcaaccaaactttactgaaatatggcacaggactgggtgcatgaagaacttgatcaccatccagctggacttgacccaactttagaagcacttccgat

SEQ ID NO: 31260 - DNA, 469 bp, Glycine max
  Clone ID: jC-gmst02400070b04d1
aaaaaaggccactttcaatttgggtggataacaggggaagaacccaggaagtaggagtgttgagctcattcatttcagcaggggataccttcagcaggggaacaaatacagaatcactattcctattgaaaatatgagagaatctgcatgtttattggccaactggattcggggcagtctcctattccttgccctcacacagttagggcatttgtaaccattgaataaagatcggacagtgcggatctcaaatacgtgtgttatgtctaatttactgagatagatggccgatctttatgtaatgggtccaagttagtaattgagtgaatatgtggaaaagacattgcagatgatcctcattatttgggggtcttgaaaggagaaaagtggagaaaaaaaagaaggctatctgagtctaattccttggagaggtctcaaagcttctcagcttattttttcaggtactatt

SEQ ID NO: 31261 - DNA, 343 bp, Glycine max
  Clone ID: jC-gmst02400070b08d1
agtggaattgagactcgaattatattagaattggtttggtttgttgtcgtcctccatatcaccagttttccttaatggtgaaaggagacaagaaaataaaagataaacaaactttgttatgaggtacaaaagaacatgttcttaagatgctaaaagataaattaatggctgttgagttttcactagtttttagacatttccatctgttttcttttcacaagttttcggttccatagctttgcaataaaggaacattctcagtagctggtgattcccagtaatcaacttcttcctctatctcctctgttgctttgccccacaacacagcataaaaagccaaatg

SEQ ID NO: 31262 - DNA, 424 bp, Glycine max
  Clone ID: jC-gmst02400070b09d1
agtggaattgagactcgaattatattagaattggtttggtttggtgtcgtcctccatatcaccagttttccttaatggtgaaaggagactagaaaataaaagataaacaaactttgttatgaggtacaaaagaacatgttcttaagatgctaaaagataaattaatggctgttgagttttcactagcttatagacatttccatctgttttcttttcacaagttttcggttccatagctttgcaataaaggaacattctcagtagctggtgattccgagtaatcaacttcttcctctatctcctctgttgctttgccccacaacacagcataaaagccaaatgatactattgccgctccaactatactttcaacatgaagagagtcaccaacgaagatgatcacccagggcataagaaaaaaaca

SEQ ID NO: 31263 - DNA, 418 bp, Glycine max
  Clone ID: jC-gmst02400070b11d1
gaagccaaaacaatttgatatttattattataagacaaaggtttgatttacaccgacgaagtgcccataaaacatatatattacagaactgcaagcttattttgactatgagcgcacccttaaagcgcgtctctacgcgaagttatattttattctctgctacgaggaattaagctatgcagtgatcatcacaaccacgtggcaccgattctctatactcctctatggcaattggactgggtcaatgttccatatctctcgggcatattcatgaatcgtgcggtcactgctaaacttgtatgaacctgctgtgttcaatattgacattcttgtccatttagtttggtcacggtatgcttcatcaaccttctcttggcattctatgtagctggggaagtctttccctacaaggaaataa

SEQ ID NO: 31264 - DNA, 416 bp, Glycine max
  Clone ID: jC-gmst02400070b12d1
gaagccaaaacaatttgatatttattattataagacaaaggtttgatttacaccgacgaagtacccataaaacatatatattacagaactgcaagcttattttgactatgagcgcacccttaaagcgcgtctctacgcgaagttatattttattctctgctacgaggaattaagctatgcagtgatcatcacaaccacgtggcaccgattctctatactcctctatggcaattggactggttcaatgttccatatctctcgggcatattcatgaatcgtgcggtcactgctaaacttgtatgaacctgctgtgttcaatattgacattcttgtccatttagtttggtcacggtatgcttcatcaaccttctcttggcattctatgtagctggggaagtctttccctacaaggaaat

SEQ ID NO: 31265 - DNA, 459 bp, Glycine max
  Clone ID: jC-gmst02400070c01d1
aatattagagagtttgagatcattcagaaagttatttagtatttcacttggacaactcaaccactgtagatatcacccacaagtcacaatgtggggataccattgtacaagtccatgaaaatggaagaattttattctttaggacagagacagactaccaaggttttcattgcgcacttaagacttcgatttcaaattccaagacagagttgggccgtattccccaagcaggaaagccaccagcaccataagcataatccggagagcaccggagacgagcaacttcaccaatttgcatgccaagcacaccttcatcccatcctttgataacagaaccttggccgattttgaaagtgaatgggttctggccaggatcctttgtgctccagaatttctgagaaaggtcaccgttcttcccgaaaccagtgcagtgaacggttacgttctgaccgggaattg

SEQ ID NO: 31266 - DNA, 426 bp, Glycine max
  Clone ID: jC-gmst02400070c02d1
cggagggtactgcaaacataaaaaccaattttgcatataataaatataaacagaaactgactcaaaaatccctgggagaaaagatgcttagactatcgtcctcctaactcgaggcacctaattcttggccacaacatgaaaatcgaataaaaggaaaaaccaaaccaagcagaacctacaaaggtccaataccatccgccaattgcataaaaagtctggcttccaaggggacctaacggggaaacttataacatactcaacttacaaatccattcattaaactagatatatctattaaaaacccaaagcttcaaataccaaataagtcaaccaaactttactgaaatatggcacaggactgggtgcatgaagaacttgatcaccatccagcttgacttgacccaactttagaagcacttccgatga

SEQ ID NO: 31267 - DNA, 418 bp, Glycine max
  Clone ID: jC-gmst02400070c03d1
cccttgaaaggtgtaattgcttcttcagaaatagatttatacaaaggtagttgcaatatctatttgccaaactaaaaatgtaaagacccttcttcccaatcctaggtagtggcccaattgtatttacaaaggcgggacaaaatatgtatatacaagtccaatcatatagcataatgtaacaataatcatactttggtctttactggggcacattacaggaattattatgcactgaaacccctttgcagagaactccaaggattggaaggaatagagacacaagcttgtgcagaggcctcagccatttgctcattctttatccctacattgcagatgtttgcaaaggacctcatatgtttcatgccatactgagacaaggatccacaatgtgtctcaaaagtcctcaccatggttttaa

SEQ ID NO: 31268 - DNA, 300 bp, Glycine max
  Clone ID: jC-gmst02400070c05d1
aaaaaatggccactttcaatttgggtgtataacacgggaaaaaccctggaagtcggagtggtgagctcattcatttcagcaggggattccttcacctgggggacaaatacagaatcactattcctatggaaaatctgagaaaatccgcatgtttattgtccaactggattgggggcagtcttctattgcttgccctcacacagctagtgcattggaaaccattggataaagatcggacagcccggatctgaaaaccccgttctatgtctaatttactgagatagatgtccgatctttatg

SEQ ID NO: 31269 - DNA, 335 bp, Glycine max
  Clone ID: jC-gmst02400070c08d1
gaatccaaaacaatttgatatttattactataagacagggggtggattacctccgccgaattccccttaaagcatatatattacagaactgcaagcttattttgactatgaacgcaccctggaagagcgtatctacgcgaaaatctatttgattctctgctccccggaagaaagccatgcaatgatcatcccagccacgtggcactgggtcgatatactccactatggcactcggactggttcaatgatccatactctctcggccatatgagagacacccgcggcaactgctaaaatagactgaccctggtgtgtagaatattgacatggatata

SEQ ID NO: 31270 - DNA, 201 bp, Glycine max
  Clone ID: jC-gmst02400070c09d1
agtggaattgagactcgtatttttttataaaagatatatgaaggatgactttattctatcacacttttattttattggtgcttggaaacactcattttatttgacaccaaacatggggggggagatctatgggagcataaaattcttaggcatcccgtgagcttcttggctgtggccgcaaaactctttccctgacggaaa

SEQ ID NO: 31271 - DNA, 504 bp, Glycine max
  Clone ID: jC-gmst02400070c11d1
gaagccaaaacaatttgatatttattattataagacaaaggtttgatttacaccgacgaagtacccataaaacatatatattacagaactgcaagcttattttgactatgagcgcacccttaaagcgcgtctctacgcgaagttatattttattctctgctacgaggaattaagctatgcagtgatcatcacaaccacgtggcaccgattctctatactcctctatggcaattggactggttcaatgttccatatctctcgggcatattcatgaatcgggcggtcactgctaaacttgtatgaacctgctgtgttcaatattgacattcttgtccatttagtttggtcacggtatgcttcatcaaccttctcttggcattctatgtagctggggaagtctttccctacaaggaaataatctgctcgaccaaaaccttcatttccttctaaggatcccatcaattcgtcatagttggtaagatccaaaaacgccacttgtgacaa

SEQ ID NO: 31272 - DNA, 270 bp, Glycine max
  Clone ID: jC-gmst02400070c12d1
gaagccaaaacaatttgatatttattattataagacaaaggtttgatttacaccgacgaagtacccataaaacatatatattacagaactgcaagcttattttgactatgagcgcacccttaaagcgcgtctctacgcgaagttatattttattctctgctacgaggaattaagctatgcagtgatcatcacaaccacgtggcaccgattctctatactcctctatggcaattggactggttcaatgttccatatctctcgggcatattc

SEQ ID NO: 31273 - DNA, 506 bp, Glycine max
  Clone ID: jC-gmst02400070d01d1
atcaaacatccaatattacaacattgctagtcaaaatcaactcatgaatcatattctcaacaggtcttatacacaagcacactgttaccagcactgcacaaaaatacatataaattttttaatacattagctatgctcctaggttttaaattgccgggacaatgcatttctataataaagtgagaccttcagacttataaaactcagaagcctgaagtttattaaaatttggaagtataaagtaaacaagagggtaagtactaacagtcataaatccttctctattcacagaaacacctctaaagctagaggaccaaagccacccccagaaactatagaacacaacccaattgattttggtcagaaacacaaagttgaatctgcccctaaaatttcccataccagattcagagcaatcctaaacacaattggaaactaatccatcagccaacacaaaagagactggcactcctgacacctcttgtcaacaatttatgttaatccac

SEQ ID NO: 31274 - DNA, 478 bp, Glycine max
  Clone ID: jC-gmst02400070d03d1
gcaaagtgaaaaggtatcctaaatatattgggccaatagaggctacaactcaattaaaaaataaaaagattttttttttggtacaaattaaaccttttaaataaggaatataactaaaaaaataaagggaagagatagagagacagggtttgcttttgaatgtaacattgtacaagataactaagttagaccaaaaaatgccaagaggcataaaccttaagcataatagctttgtagctttcttcatcaataaattaacataggaaaccttaggtaagtgacaattgtgcaaaactcctttaaccaaacccctttgtgccacggttgcaaattgcaatgactaattgagccaaaataccatgtgaaattctgtgaagatcgtatagagaaatgtacttggcagccaaaaagccagccagttcttcaactttgatttagttgattattgagttgatgtggaaataagtaacccaatact

SEQ ID NO: 31275 - DNA, 438 bp, Glycine max
  Clone ID: jC-gmst02400070d04d1
gaaacaagaaatcttatttatttccataatatgcaccatatcatggcccttcccagagcacacaacacaattacatctatgaaaaggaaaatgtttctagtatatttcttgcatcaaaagagtctcacaccacacattaaagacagttaaacagccaacaagaggattcaagggttttaaagggccttgatgatctcttcagcactggagatggtgaactctcctccactttcaacattcgcaaccttcaccttgaggtcttccaccagcagagcaaacctctttgagcggacgccgagacccttgtcagtgaggtcaagctcaagaccaagggcattggtgtatttggctgcaccatcagcaaggaacttaacatgcttgttctctgggaatgttttggcccatgagttcatcacaaatggatcattcacactgata

SEQ ID NO: 31276 - DNA, 426 bp, Glycine max
  unsure (1)..(426): unsure at all n locations
  Clone ID: jC-gmst02400070d05d1
gaaacaagaaatcttatttatttccataatatgcaccatatcatggcccttcccagagcacacaacacaattacatctatgaaaaggaaaatgtttctagtatattcttgcatcaaaagagtctcacaccacacattaaagacagttaaacagccaacaagaggattcaagggttttaaagggccttgatgatctcttcagcactggagatggtgaactctcctccactttcaacattcgcaaccttcaccttgaggtcttccaccagcagagcaaacctctttgagcggacgccgagacccttgtcagtgaggtcaagctcaagaccaagggcattggtgtatttggctgcaccatcagcaaggaacttaacatgcttngttctctgggaatgtttttggcccatgagttcatcacaaatggatc

SEQ ID NO: 31277 - DNA, 364 bp, Glycine max
  Clone ID: jC-gmst02400070d06d1
aggaaaggaagatccatcatagagatatttgatgaaatttgaaagataacaatcccaacaaagcggctggcttattgtaaacttgcttcactatatgggagtgaaaaataaattgtacattctataataatatcacaagcaggaaaaagctactgcatctacaacaaaaggcaagacaatattaaaaattaggaccttgattcaacttatcaattcaccacctcaaacttccgcaacatatcacaatggggtgtttcccggatatacccccattggcgacgctgcaactcgaaatgacaattctggcggagaatgctgaagtactccctctctaccctctctttaatttttgatcgttcatcac

SEQ ID NO: 31278 - DNA, 448 bp, Glycine max
  Clone ID: jC-gmst02400070d07d1
agtaaaggaagatccatcatagagatatttggtgaaatttgaaagaaaacaatcccaacaaagcgggtggcttattgtaaacttgcttcactatatgggagtgaaaaatcaattgcccattctataatcatatcacaagcaggaaaaagctactgtgtctacaacaaaaggcgagacaatgttaaaaattaggaccttgattcaacttatcaattcaccacctcaaacttgcgcaacatatgacaatggggtgtttcccggatatacccccattggcgacgctgcaactcgaaatgacaattctggcggagaatgctgaagtactccctctctaccctctcttcaatttttgatcgatcatcactccccaacggatactcctgaacaaagtttgtagacttgacataataggtaacacccttgggtgtggtaaaccgatgttcataag

SEQ ID NO: 31279 - DNA, 379 bp, Glycine max
  Clone ID: jC-gmst02400070d08d1
atcgaaaaaatatgaaggattactttattctctcacacttttattttatttttgcttctaacatctcattttatttgacacaaaatatggggggggagatatatggaggataaaaatcattgagatcccttgagcttctttgcaatgcccgcaaaggactttccctgatggaaagcttgggccaattccaattcactaggctgccttgagccatctccagcataagttcctgcaccatatggggagccacctttcaccttctccaactcaaacatgccaccgccaaatgtgtatccaatggggacaaagatcaatccatggggaacaagctgagtaatagatgtcaacggggtagtttcttggcctcctccttgagaac

SEQ ID NO: 31280 - DNA, 343 bp, Glycine max
  Clone ID: jC-gmst02400070d10d1
gaagccaaaacaatttgatatttattactataagacaaaggtttgagttcctccgccgaagtacccataaaaaatatatattacagaactggatgcttattttgactatgaacgcacccttaaagcgcgtttcttcagcgaagatatattttattctctgctaccaggaagaaagccatgcagtgatcatcacagcctggtggcgccgggaggatatactcctctatggcaggaggaccggttcaatggtccatatctctcgggcgtattaatgaatcgcgcggacactgataaacttgtatgaacctgctgtggagaatattgacattctcgtccatttagt

SEQ ID NO: 31281 - DNA, 466 bp, Glycine max
  Clone ID: jC-gmst02400070d11d1
aaatccacaaagccctaaaaatcattacaatttgatagcagttcaggtacataaacagagtttcctcacaggaacgagcacgatcgggatcgatatataatagtaatagtaatatacacaatcatagtaaaacaaaaggaaaaagaagaaaaaggagaactcaccgaaagaggcgcgtggattgagagcgcgtggttgtcagcgcttggaggagttgttatcgtaatcgatgatctcggaatcggtgacggatctggagtgctggacgatggagcggccgatagagttgatccaatcctccttctccttctcggagtcggcgatgaagtacatggtgtcggagcgcgtggagagctcgaaggcgttgggcttgttgaggatgtcttcggcgcctttgacggtgaggcacgtggcgacggggaccacgccgcgtggacgagacgcacgcgtgacggcggagtccttg

SEQ ID NO: 31282 - DNA, 501 bp, Glycine max
  Clone ID: jC-gmst02400070e03d1
cagaagaaaacataaacatcaagataataaattgcttgtcccgataaagtaatagtacatgtcaacatggatgaaataaaatgtgaatacacagtgcccagcatggtaggggaaatacacctacatagaggtaagtagcactattccaaacccaaagggattccacccagttccaatagtcaccaaaattcataccataaaaatcttcaaatgcacctttcagtaaaacaaatgcaactggaggaacacaataaaacctaaagcaatattgcaagaggcccttagtaaggtactccagctcctagcttgaatatcaagtttcaatggtctagccatcagacaaatcgggacaataagtaaagccccaatctctgctgtagcaaagttaatgacagacatgagagacaaaccgatgaatgcagttgatatagttacagactttaagctagcccacttgtttttctcatgtagagatgcagcagcttcaaaaattgggggacc

SEQ ID NO: 31283 - DNA, 420 bp, Glycine max
  Clone ID: jC-gmst02400070e05d1
gaaacaagaaatcttatttatttccataatatgcaccatatcatggcccttcccagagcacacaacacaattacatctatgaaaaggaaaatgtttctagtatattcttgcatcaaaagagtctcacaccacacattaaagacagttaaacagccaacaagaggattcaagggttttaaagggccttgatgatctcttcagcactggagatggtgaactcttctccactttcaacattcgcaaccttcaccttgaggtcttccaccagcagagcaaacctctttgagcggacgccgagacccttgtcagtgaggtcaagctcaagaccaaaggcattggtgtatttggctgcaccatcagcaaggaacttaacatgctcgttctctgggaatgttttggcccatgagttcatcacaaatg

SEQ ID NO: 31284 - DNA, 417 bp, Glycine max
  Clone ID: jC-gmst02400070e08d1
ggacacaaataaattataacaagtaatgcattcaaagggtcacaaatacaatcaaggaactaatcatgtcataatttacatccattcaatggatgaagacaatgagattcacatggatttgcaaatgaaaaggactccaaatacataaataacaactgataccagggtgcgcatacacaaacaagagcctaaccccttgtattgaaagggatggctcgaatgactatgtggggatgcacaacatccagggcaacttcaatgaaaggttcaacccacaaaattcattggttatcccatgcatgggctctgttgtaaaggatggcagctgcgaaactcctagctgggataatgacaattcctgggaagggaatggtacccgggtggacctagaacacatcctatccgatgggaagtgga

SEQ ID NO: 31285 - DNA, 418 bp, Glycine max
  Clone ID: jC-gmst02400070e09d1
gtaaacaaataaaataaaacaagtaatccattcagagtgtcacaaatacaatcaaggaactaatcatgtcataatttacatccatacaatggattaaaacaaaaagattcacatgaatttccaaatgaagaaggactccagatacataaataacaactaatacaagcaagcacatacaaaaacaagagcctaagcccttgtcttgaaagggatggctcggatgactatctggtgatacacagcagcaagggcagctccaatgaaaggtccaacccagaaaatccattggtcatcccatgcatggtctctgttgtagatgatggcagctccgagactcctagctgggttaatgccagttcctgtgatgggaatggtagccaagtggaccaagaacacagcaaatccgtgggaagtggag

SEQ ID NO: 31286 - DNA, 322 bp, Glycine max
  Clone ID: jC-gmst02400070e10d1
acaaattaaatttaacaagccatccattcagagtgggacaaataccatcaagggactaaccatgtaataaattacatccatacaatggctcataacataaacacccacattattgtgcaaagggtgaaagacccccacatacacttgtaacaactcataccagcaagcacattccaaaacaagagcctaaccccttgtcttgaaagggatggctcagatcactatccggtgatacacaacacccagggcaagtccaatgaaaggtccagagccacaaaatccattggttatcccatgcatagtctatgttgtagaggatggc

SEQ ID NO: 31287 - DNA, 389 bp, Glycine max
  Clone ID: jC-gmst02400070e11d1
gaccatatcaaattattaatatctcaaattattgtaatattctgattcacaacaatagattgggaaagaaagaaatgaaaagaaaaatgttcctcatggtgtatccgaaacaacccactaggatccaatatggatacatggctaacatgtacatttgtccactgcctttgccctttgagtggtggttggaaaagaatatgtctaattatacattttcactttcaggatgaccattgatcaggtcaagggatgaaagtatgtagtcatggacttccggaacctttgtttgtattgatcaggagaaactttggggggagcaggattttttggaccctcaagtatccctgctgccttcacccatgtctccacatgcttgtgccatgtgtatt

SEQ ID NO: 31288 - DNA, 471 bp, Glycine max
  Clone ID: jC-gmst02400070f01d1
acataaaaggaggacaattttgttgttataattttaaaccattaaagacaggtgtatcacttcattttatggaagaatatccaaagcctaatattttcagaataaacagattacacattgccaaaattaaaataaaaataaaatacacccattacaacaaaacagcaatattaaacaagtgcagcagagctcagcgggataagtgctctcttaactctttctacagctgcctgtagggtagtaagggattctgcataagagatgcggatgcaagtgtcatctccaaatgcactccctggcaccagggctacctggcccacatccagtagatatcgacagagggactcagaatcctcaattttaccgaatccttcagcttctcttccataatagaagctgaaatcaaggaatagataaaatgctccctggggttcagatatcttgacaccatctatttttctaaaacttttt

SEQ ID NO: 31289 - DNA, 401 bp, Glycine max
  Clone ID: jC-gmst02400070f02d1
aaggtggaacattaactcatagagtttgagcaagcacagtgtcaaggactagaaaatcataatggttctttttgaagtctgctggttattcaatcatatatccttttgacaaccttttgattgtcacagaagccctatcttatctatgatgattagtcagcagtccaactctgctcaacaatctcacgtactcttctgttgtattcacgcttgttttcactgaacatccgagcagcttcagaatttgctggtgaatttgggtttggatcacacagcaatgactggattgaggtaagaattgcagctacgtcataaatagggctccactgattctgtaaaatgtccaagcatatactgccatccgataaatgttaggatgaaacattcgagaaacaaaacgc

SEQ ID NO: 31290 - DNA, 437 bp, Glycine max
  Clone ID: jC-gmst02400070f04d1
aaaattaaaccatatatttttattcattattttttacaaaaatacagcatagaaaactcaaataacagaacagaaccccccacccccccaaaaaaaatttattaaatatgaaacaagatcatatacccccatctgtgccagataaataaaaaaaattatatataatacagatattatataaaaactctcagagattttttttatcctgccacaagttaaattatatatttctttataggaaagcccatttcctgttcaagagaaaaggaatgagagatttgaggtatgtcattattgccttgtcttctgcaaccttgttccaatcatcttgagctcaaatttcttgattaccccagcagtgtccctcattgtgggtgtccatcacataaggaaattttgtctgggtgacttgtgttggggtgacgagtattttacat

SEQ ID NO: 31291 - DNA, 489 bp, Glycine max
  Clone ID: jC-gmst02400070f05d1
aaaattaaaccatatatttttattcattattttttacaaaaatacagcatagaaaactcaaataacagaacagaaccccccacccccccaaaaaaaatttattaaatatgaaacaagatcatatgcccccatctgtgccagataaataaaaaaaattatatataatacagatattatataaaaactctcagagattttttttatcctgccacaagttaaattatatatttctttataggaaagcccatttcctgttcaagagaaaaggaatgagagatttgaggtatgtcattattgccttgtcttctgcaaccttgttccaatcatcttgagctcaaatttcttgattaccccagcagtgtccctcattgtggtgtccatcacataaggaattttgttctgggtgacttgtgttgtgttgacgagtattttacatgtttctctcctttctgatatgggtccatgatagtggaaagtatttgatcctac

SEQ ID NO: 31292 - DNA, 358 bp, Glycine max
  Clone ID: jC-gmst02400070f06d1
gacataaaaaactaatgagttgaaaagtgtttatatgcacacatcccatagctggcaggtagcacaaaccggatctacccacactgaaaaaaagaggccaataaaataattcggaaaacagacaaacaacaaatacaaaacctataataaaaaaaagtacacagtggcctcctacaaggggaagatcggattttaaaattgggcctggccagaggttaaaaaaataacaatttaaagtttcggggcatatttgcatggggtgtttgggggggatacttttacaaatttggtatgccaagcccacttgcattccatgcttagaaagctgaaactcggcctttattgaaagtctttgttt

SEQ ID NO: 31293 - DNA, 487 bp, Glycine max
  Clone ID: jC-gmst02400070f07d1
aagaataatttttgtatcacgttgaattgatcatgtaaaaaattacaaatgaacatagaagaaacaaaatagaaggaggggaggaggagaagcacacacggagtaagtaagtgacatgaaacaaataatagatatcgtaatggcaacgctcaaaaaactaccagcaaagaacggtggaatgaatggccttaggccttctcccacttgaggggcttgaccacttcccatgtgaagtcagggtcctctctgccaaagtgtccataagcagcagtcttcaagaacctgttattcccacccctcttgagatcaaggttgatggagatcataccgggcctgaaatcaaagttctccttcacaatgttgagaatctccttatatggatcttcccggtgccataggtgtcaacaaagacagacaaaggcttcggcacaccaatggcataagacacttgcacaatgcaccttctggctagtccacttgccacaat

SEQ ID NO: 31294 - DNA, 397 bp, Glycine max
  Clone ID: jC-gmst02400070f08d1
gttaacaaataaaataaaacaagccatccattcagaggggaacaaatacaatcaaggaactaatcatgtcataatatacatgcatagaatggaataaaacagaaagattcacactgaattttgcaaaggaagaatactccggatacattagtgacaactaataccagcaagcacatacaaaaacatgagcctaagtctttgtgttgaaagggatgggtgggatgactatctggtgatactcagcacctagggctgctccaatgaaaggtccaacccagaaaaaccattggtcatcccatgcatggcctatgttgtagatgatggcagctattagactcctagctggggtaatgccagtttctgtgatgggaatggtattcaagtggaccaagaacac

SEQ ID NO: 31295 - DNA, 363 bp, Glycine max
  Clone ID: jC-gmst02400070f09d1
aactagccaatagctttggtaggatttacgctgtgccattgataccttatgttatacaaattatttcatgtattacacatgctgtaagcaacgaacttttggggaatggggcagatacaggttaaaacttgtgatgaagcattccaacaaaattactagacaatataagcaaaactatatgtggaagaaactaggagtgaccccttacacctgcttacctttacacctattcataatttaacattacatatttatatatttagacgaataaatgtagcgccataccttattccccacaggttacaaagaatattacaagcagcacttgctttcctttcctttgctgaccaaacttcactatgc

SEQ ID NO: 31296 - DNA, 252 bp, Glycine max
  Clone ID: jC-gmst02400070f10d1
gttaacatatagaataaaactagccattcattctgagtggatcaacgccgagccagggactcctcatgtcatacaaaacattcattcaatggcacatgccgaaaagaaccacacttttggggaatggggcgaaatactggggatacacttgtgacgactcattccagcaagctcactcaacaacatgagcctaactctttgtgttgaaagggatgggtggcctgactatctggtgttccacagcacctaggg

SEQ ID NO: 31297 - DNA, 490 bp, Glycine max
  Clone ID: jC-gmst02400070g01d1
aaaaccataatgcataatagagatcaattcataaataagtattcagcaagcaatttatggatacaaaagacggctccgataaaatttaatgttactaagcaaacaaaggaaaaaagtagcagagtgggttttccacgagataagagatacgcaagtcgataagtatcataaaagattacagaagaaaaggaacagactcttctcaactatatcctatttgctgctgttgttgaggagcttggtaaccaggatatcccggataactgccatacatgttgggatcctgtccagcaggagcataaccataattttcatatccttgagcagcatacccataatatccaccaccagaaccagcaccagcagcaccattccactggtttggatctgcctgagcctgtttgtttgaaggactgcgaccccatgaaagacgcacattttgtccacccaaagcgtcccattcacacccgagggcctcttagcacagtct

SEQ ID NO: 31298 - DNA, 441 bp, Glycine max
  Clone ID: jC-gmst02400070g02d1
aaaaccataatgcataatagagatcaattcataaataagtattcagcaagcaatttatggatacaaaagacggctccgataaaatttaatgttactaagcaaacaaaggaaaaaagtagcagagtgggttttccacgagataagagatacgcaagtcgataagtatcataaaagattacagaagaaaaggaacagactcttctcaactatatcctatttgctgctgttgttgaggagcttggtaaccaggatatcccggataactgccatacatgttgggatcctgtccagcaggagcataaccataattttcatatccttgagcagcatacccataatatccaccaccagaaccagcaccagcagcaccattccactggtttggatctgcctgagcctgtttgtttgaaggactgcgaccccatgaaagacgcacatttt

SEQ ID NO: 31299 - DNA, 414 bp, Glycine max
  Clone ID: jC-gmst02400070g03d1
aaaaccataatgcataatagagatcaattcataaataagtattcagcaagcaatttatggatacaaaagacggctccgataaaatttaatgttactaagcaaacaaaggaaaaaagttgcagagtgggttttccacgagataagagatacgcaagtcgataagtatcataaaagattacagaagaaaaggaacagactcttctcaactatatcctatttgctgctgttgttgaggagcttggtaaccaggatatcccggataactgccatacatgttgggatcctgtccagcaggagcataaccataatttttatatccttgagcagcatacccataatatccaccaccagaaccagcaccagcagcaccattccactggtttggatctgcctgagcctgtttgtttgaagact

SEQ ID NO: 31300 - DNA, 92 bp, Glycine max
  Clone ID: jC-gmst02400070g04d1
atataacacacaaattcggtcgttataattaaaaatgccccacagggccctctaccccccctataaaattttaatacaactgccgcaaaacc

SEQ ID NO: 31301 - DNA, 283 bp, Glycine max
  Clone ID: jC-gmst02400070g05d1
aaaacaagctagttggttcgttttcataaatcatgccccaaaggggtttctatgaatcatatcatatttcaatacaactgccgtaaaacctaaagccagatggggatccttgtgaaaacacttaataaaatccgggcagtttgtgcaagttaaaattttggaacgaccgattgattcggaaaaactaaaaccttttattgggacccaataactttaaacataacaggtacttctagagccataatcgtcaagatgctgatagatattccacccaaaagaacct

SEQ ID NO: 31302 - DNA, 461 bp, Glycine max
  Clone ID: jC-gmst02400070g06d1
aagaataatttttgtatcacgttgaattgatcatgtaaaaaattacaaatgaacatagaagaaacaaaatagaaggaggggaggaggagaagcacacacggagtaagtaagtgacatgaaacaaataatagatatcgtaatggcaacgctcaaaaaactaccagcaaagaacggtggaatgaatggccttaggccttctcccacttgaggggcttgaccacttcccatgtgaagtcagggtcctctctgccaaagtgtccataagcagcagtcttcaagaacctgttatttccacccctcttgagatcaaggttgatggagatcataccgggcctgaaatcaaagttctccttcacaatgttgagaatctccttatcatggatcttgccggtgccataggtgtcaacaaagacagacaaaggctcgggcacaccaatggcataagacacttgcacaatgca

SEQ ID NO: 31303 - DNA, 348 bp, Glycine max
  Clone ID: jC-gmst02400070g07d1
gaaacccaaaaataacttgatcttgcttacatgatctaacatcaggtccagttttactataacgcacataataaccagtttgcattgttttggggcaggggaggggttgtgaggggaaatagactaacgcgacacgttttaaactgcctttgcgccaggatgaggagaccagggtgactacgggccatggaaaccatatgcaatatgcagggggcctaaagtgaatcgctcagctccttatctggcatacatttgaggacatacacctgcggaactactctctcaggaccgaccctgagacgctagctaacgatgaaaatctaccaacccacggcgatggcgtatgac

SEQ ID NO: 31304 - DNA, 382 bp, Glycine max
  unsure (1)..(382): unsure at all n locations
  Clone ID: jC-gmst02400070g09d1
aactagccaatagctttggtaggatttacgctgtgccattgataccttatgttatacaaattatttcatgtattacacatgctgtaagcaacgaacttttggggaatggggcagatacaggttaaaacttgtgatgaagcattccaacaaaattactagacaatataagcaaaactatatgtggaagaaactaggagtgaccccttacacctgcttacctttacacctattcataatttaacattacatatttatatatttagacgaataaatgtagcgccataccttattccccacaggttacaaagaatattacaagcagcacttgctttcctttcctttgctgaccaaacttcactatgctatttatcgncgggatccg

SEQ ID NO: 31305 - DNA, 363 bp, Glycine max
  Clone ID: jC-gmst02400070g10d1
aactagccaatagctttggtaggatttacgctgtgccattgataccttatgttatacaaattatttcatgtattacacatgctgtaagcaacgaacttttggggaatggggcaaatacaggttaaaacttgtgatgaagcattccaacaaaattactagacaatataagcaaaactatatgtggaagaaactaggagtgaccccttacacctggttacctttacacctattcataatttaacattacatatttatatatttagacgaataaatgtggcgccataccttattccccacaggttacaaagaatattacaagcaggacttgctttcctttcctttgctgaccaaacttcactatgc

SEQ ID NO: 31306 - DNA, 538 bp, Glycine max
  Clone ID: jC-gmst02400070g11d1
agacgagtaaaccttcacaatcagttggataactcaaattgtacatgacaacagttctaaaaagtggtgcttccacaccgcatattacaaatggaacagataaatcctagttttaatttattggatacttccaacatccaataagtttttggcaagcaatcttgcatggccaggaagggaaaaacgtgaatcttctttattgaaaccaaaaaataaaaaatccatgtttcacttcttcaacagcatggcactgcattgtgccattatctttgatgcccttgtaatggcatcagtcatatagaaattctcaactacagtcccgaatgggggtggtgtccaccttctcagagaaggttggtctgagtgaagatggtaatgtggcaggctctctctcatccattttacaaggtttggggctacagtactgattcgagcacgaacggccccaattgtatcatagggcaaacgcactcctgccacctcagatagagctcgaattatcttccaatcatctctggagtcaccaactgttggaact

SEQ ID NO: 31307 - DNA, 435 bp, Glycine max
  Clone ID: jC-gmst02400070g12d1
agacgagtaaaccttcacaatcagttggataactcaaattgtacatgacaacagttctaaaaagtggtgcttccacaccgcatattacaaatggaacagataaatcctagttttaatttattggatacttccaacatccaataagtttttggcaagcaatcttgcatggccaggaagggaaaaacgtgaatcttctttattgaaaccaaaaaataaaaaatccatgtttcacttcttcaacagcatggcactgcattgtgccattatctttgatgcccttgtaatggcatcagtcatatagaaattctcaactacagtcccgaatggggtggtgtccaccttctcagagaaggttggtctgagtgaagatggtaatgtggcaggctctctctcatccattttacaaggtttggggctacagtactgattcgagca

SEQ ID NO: 31308 - DNA, 466 bp, Glycine max
  Clone ID: jC-gmst02400070h01d1
gaaatgaatatcgcaggtcatgcagtgaatacatgtccacttttaattccatagatttcatcttgacttcaatatagaagttggtgggaacaatgtgagaaaatttcaagatttatctcaactatcatacgtgtttggatgaaaattgagttattaatgcaaggcgttctccttgtacttgatgtgggtaggacaatggcatagaaatccattacaacttccagattataagaaaactggttaagggggagtattgggaaaggtcaaaggtgaaacctcaaagtaaattaggacggcttatagtattttgttggtacaaatggcatctttgtaacaactccttcattagactttcctcgaataataatctctactttggtgcctgctttgtgcaatcctgatttcacatatccaatggctatgttcttcttgaggcaaggactgaatccgccccctgtgacttccc

SEQ ID NO: 31309 - DNA, 518 bp, Glycine max
  unsure (1)..(518): unsure at all n locations
  Clone ID: jC-gmst02400070h03d1
attcaaccaaaaatcaaactaacaaaatgaacacaaacaaggcacgcacaagagggtccaagagttccaattatagctaaaagtattagctaatttaagcaatcatacaaacccaagttacacaaaagaagagaatacttctagcaagcattctgctattacaacattgacaagaaaggataagcatctttctccaagaaccgccatactcagcaggaaatcaccagacaagaccaaaaattttcaaatgtctcatgccttgctggcaatgttgttagaaagccagtccaaaccctcatagagaccctctccagaagttgcacaagtgctttggatataccagtggcgttgacggagtgaatgaagtccaagcttgtcagttatttctgcagcattcattgcattaggaaagatctntgcttgttggcaaaaacaagcaaaacagcatctctaagttcatcctcattcaacatcctgtgcaactcatcccttgcctcaaccactcgatccctatcatt

SEQ ID NO: 31310 - DNA, 309 bp, Glycine max
  Clone ID: jC-gmst02400070h04d1
gttgtattggttttcagcctttaaaaacaataggacccctaagggttatggaagaatctaaaaagccttttattttttggaaaaaacatcttcacattggcgcaggttcaaatgaaaatcaaatactcctattccaacaaatcgggtatgttaaacatgtggaacaaaacttagcggggtaaaagctatattaactctttgtacaccagacagtcgggtactaggggattcttcatgggacatgaggttgcaagtgtgttattaaaatgcactccctggcacccgggctaccagggccccatgccgaaa

SEQ ID NO: 31311 - DNA, 417 bp, Glycine max
  Clone ID: jC-gmst02400070h06d1
atcccaaagataacttgttcttgctttcataatttaacatcaaattcagttttactataaagcacataataaccagcatgcatttttttggggcaggggaggggttgagaggggaataaaagaaagtgagaagttttaatttacctttgcaccagggttttcagaccactatgacttccttttatggaatccatatgcaatatacagggtaccttaagtgaattgtccaggtccttatctggaatacatatcataacataaatctctgaaaattctttcacaagaacgatcataagctgagacctcaccattaaaattaaccaattcaccaggatggcatatgactattaaactccagtgaagattgaagttcacaggaatgaaatatataatcctttggaaacaaaaatacttttt

SEQ ID NO: 31312 - DNA, 202 bp, Glycine max
  Clone ID: jC-gmst02400070h07d1
aataattgttcaataaaccgccacaattacacaaaaagaaactaaaaaagaaaaagaaaaaattttcccacgcgtgttccccaccaaagaaaaaaaacataaagaggacagaaataataaaaaaaccataagaaaaggaatcgatgccgccacaggctaaaacatttgcggctggagaggaaaacccagggaccccccagga

SEQ ID NO: 31313 - DNA, 385 bp, Glycine max
  Clone ID: jC-gmst02400070h09d1
ccacccgggaatcatcaattatacattaattaaaaaaatgaaacccaccaatgagaagcaaaagtaaaaaaacttgtcactgactatttttttgtttcttcctctgcagtaaaaaagatcaggaaatagataaatggggggaacccaaacaaaaagaaaataaacttgtattttatatatcttaagaaagtaaagggggtgttcagacacggaagttctttccagtgaaagtttgaccaaattgccaatttgatggaacaatgttccaagagggggaagagcgacggtcgctggcggtgactctgaaggacaaagcctgacccaccaaaacggggtttgactgccagttctgtccccagtttttgctcattggcatccaccccgt

SEQ ID NO: 31314 - DNA, 343 bp, Glycine max
  Clone ID: jC-gmst02400070h10d1
cacccgggaatcatcaattatacattaattaaaaaaatgaaacccaccaatgagaagcaaaagtaaaaaaacttgtcactgactatttttttgtttcttcctctgcagtaaaaaagatcagggaaatagataaatggggggaacccaaacaaaaagaaaataaacttgttttttatatatcttaagaaagtaaagggggtgttcaaacacggaagttctttccagggaaagtttgaccaaattgccaatttgatggaacaatgttccaagagggggaagagcgacggtcgctggcggtgactctgaaggacaaagcctgacccaccaaaacgggcgtttgact

SEQ ID NO: 31315 - DNA, 520 bp, Glycine max
  Clone ID: jC-gmst02400070h11d1
ctgagatgtgaggcctttcatatacatataggggaattctcaaatacagcattagcaaatgcaaatggcaagtttctttcatattgatggctagctctctaataaaagagcccaaataaaatcaatgtatcatcactcttccctcattgttctggccctgacatattttaaacactcaaaaattatgtaagcttgaaatgtccatctccacacaacaacaacaacaacaacaacatcaaaggaggcattccaatttccaaccttggtttcaatcaatgattgagccagcaataaagaagaggatcacttcccatcatcgatgctgcttgccagtattcaagggagaagccctcatgctcttggattgtgtgtatgtgatctgtggagttccatctttcttctttcgcctcccttgttgagataagcgagagtgattagacaagattgcacggtcattataatcctgcaatggagtcagagccttcataacttcatccatgttaggacgggatttggggtc

SEQ ID NO: 31316 - DNA, 435 bp, Glycine max
  Clone ID: jC-gmst02400070h12d1
agacgagtaaaccttcacaatcagttggataactcaaattgtacatgacaacagttctaaaaagtggtgcttccacaccgcatattacaaatggaacagataaatcctagctttaatttattggatacttccaacatccaataagtttttggccagcaatcttgcatggccaggaagggaaaaacgtgaatcttctttattgaaaccaaaaaataaaaaatccatgtttcacttcttcaacagcatggcactgcattgtgccattatctttgatgcccttgttatggcatcagtcatatagaaattctcaactacagtcccgaatggggtggtgtccaccttctcagaaaggttggtctgagtgaagatggtaatgtggcaggctctctctcattcattttcacaaggtttggggctacagtactgattcgagca

SEQ ID NO: 31317 - DNA, 461 bp, Glycine max
  Clone ID: jC-gmst02400071a01d1
agaaatagccaagaagaattttatttgaaaaaaaacatagacatgtttagaagcagcataaatagaagcaatagccttgcaatcaacgagttcccccgaagatggttccgtgagaggagtgaatgtggtattggttgatggaagattggagagtgttccagcaggagaagggaagaagaaaccggtgcggtggagataacgaatggcttgaaggatgtaacgacagcgcgtggcgtcgtccgaggaggttcttgaacggaggctggtggtgttgaggggacatggattcagatctgaatgtcgagcagatctcaaacttcgtcgatcgttcagccttctccgccaactacggttggtgggctccacgaaccttggcagcagccagcagcttcatcggatatggatttggagcttctgcgcttcaaaacgacgtcgtcatcgaagtgtcgtaggtaggcatg

SEQ ID NO: 31318 - DNA, 519 bp, Glycine max
  Clone ID: jC-gmst02400071a04d1
aaaatgatacagtcattcataggcaaacaaatttacacaagctaatagacaccattgttgccaattcctccttccggtaatacaagtaattaagcaatcaaaagacaatggcagaagaaactaaggaagaagcttacatatacaagatttgtccaagattgctagttaagaagattcaatgtccacgccagcaagtatcaatttaagagcaacaaccaccattttgggatgcttgggattcttgttttggttgtaaaacactccttttaactgctgttgagccttcttccaaaagactaggagcttgcattatctttagagcaaggtcctgaaagcactgctccacattttcccttgttttggcactacattcaagaagcaaacaccccaaatctttagcaagtgctaaaccctcttccctgctcacagccctttcagtatctctatcaactctatttgcaactagtatcttcacacaatcctgattagttgagtagagttccacttgcttagaccaca

SEQ ID NO: 31319 - DNA, 452 bp, Glycine max
  Clone ID: jC-gmst02400071a05d1
ggaaacatgaattaagcacaaaatacttcgataactttatattattttacatgcatgcatagcatagatagcctgctctcaaattagtcagcaggaacaaagatcgagagatccaacgatctttaaatgtgacatgtgccataaatatataacagaaaagagggtatgggatatgagtcaagttttgatctcattcaactacaggatcccaaaccattactcttaagactttgaacttcacttgtactccaggatcatgttgttctaaggagctaatccaacacaggcccttaggatgttgtccagcatagctcgctgctttgacagtgcattaaccactggcggactcggtggaaccagaggggccttggtcaggtaactgaggatggacgcaactgggtggaatgagtggaactatccctcatttcagcattaaactcgattcgagggct

SEQ ID NO: 31320 - DNA, 499 bp, Glycine max
  Clone ID: jC-gmst02400071a06d1
agttattccgatattcggacgcatcaacttgttatgaaatcacattgatagcctctactcgtgtcctagctcgtctaagagctagatttgcctcaattgtttgtctcttgccttccgccttattcaaattagcttctgctatttcaagagtttgctgtgcttcttgtggatcaatgtcactacccttttccgcatcatttactaaaacagtgatctcattattgtttattctagcaaaaccgcccatcagagccatcgttaaccattggtctttaagaagacgtattctcaaaatacctatatctacggctgtggcaataggcgcatgatttggtaatactccaatgtgtccgctattagtagataaaatgatgtccttcacttccgaatcccaaacaattcgattgggggtcagtacacaaagattgaaagtcattgcttcaaattgctctccatttctaagttcgtagctgtcgcagtagcttcatcgatattacct

SEQ ID NO: 31321 - DNA, 394 bp, Glycine max
  Clone ID: jC-gmst02400071a08d1
caaaacccacgaaggggccaggtacttttcaaaaatagaggctaagagtccccccatctgaaaggcgtggaggggcctgatcctagatgccaaccatgccgtatcaccggaccattataggaaggcctggctaagaagtccacttgggaggggaaagaaaaagcccttgctgacgccccaaattacgttattgacggactgagctcaagacgtttttgcccccacccatttgtttaaaagaggggcccttttttaaaaacacagaagggggcatagcctgaatagcccaagctggaaaaacaccctttaatgggtccacatccacctttaggaataccccccttgggaaactttttaccaacgcatccaatataggggcatggaaacggcttgg

SEQ ID NO: 31322 - DNA, 519 bp, Glycine max
  Clone ID: jC-gmst02400071a09d1
ggaagataaatttaattcatgattcagaaaatagtcaaaaagacagtgaatcatacttatacagatgaaaatacagtttgatatttgcctgtcatcaataagcaaccgatatagatgaatagcttggctcaatcaaaagtacttactcctcaaatatatatatgaaaaaaagaactagaataagggagggataggcacaacacagcacaacacactcttgaagctaactctaacggacaccattcatcttggcattggtcttcttcctctgcaacacaaacttgttccaaatggcagtgatttgcctctgaggctccatagcactcttcttagcaaccactaccttgccattttcttcagcaaagactgtcacactagtgctgcttatgaccctagcaggaagtgaattaagctcatgcagaacctttctaacatcggccaccaggcgctctgcgagagtcctttagaagtcctccctgatgacaacacgaagccctgagacatgttgggcatttgggg

SEQ ID NO: 31323 - DNA, 477 bp, Glycine max
  Clone ID: jC-gmst02400071a10d1
aaaaaatccaacgggaccggcttcatttcaaattaaagatcaggggatattttcaaaaaactaggctgcctcaaccaactgtcacagaaatactcctttggggaaagaagattacacttcccagttaatgggttccaacttacaagaaccttggaccgcaggacatatttcccttgcacagaaattatggacttctcacctaaaatgaatttaatgcaataatatcttactataggatcctcaggttctgccatctacatcgatgccagccccagtcccatctggagttgaagaaccacccttggccccagcgccaattccctttccttttggttggaagttgactttctttttacttctgccttcagcttcattatgaggctgctgattaggcccatttgttactggaactttttgaccattactttggctgggaatactctcggacgatcccctcttggatcccttggccttggg

SEQ ID NO: 31324 - DNA, 479 bp, Glycine max
  Clone ID: jC-gmst02400071b01d1
aaaaaaaaaaatggggggggggaccccccaaacataaaagatcccaagcccctctatttttggccccccccaaaggaaaagggtaaaaaaaaacccctccttggggttttggggtcccaaaaaacccccccaaaaaataaaaaaaaaccccccctttttttttttgcctttttaattccaaaaacaaatccaaaacaaaattcaggggctttttttaaaaaagccccataaaaccccaaccccccaaaggccgggtctcccattgaatgtgctcaaaaacataatttctcttttaaatacaggggggcccaaacccacccaatttgggggctttgaaagaaaaaaacattcaaagggggcctttgctttccaggttttaaaaaatggtccattcttttccaaacccctccccccaaggggttcaaaaccccctcaaaaaataatcccttggtcttttttaaaaaacccttgaccccccc

SEQ ID NO: 31325 - DNA, 530 bp, Glycine max
  Clone ID: jC-gmst02400071b02d1
gaagctaaaatgtggttttattgtcgattgatatatatatatatatatatatatatatatatatatatgctcatgtctgtcttatatggcaaaaattttgtgggtccaatcacaccattaatcctaaacttgagagaagaatggacataatttgtcagtgacgcccacattccttctagacaaattagatttagtggacagtctatcatagattaatctccaagcaaaaaacgcagctttacttggtatttttagtttccatacgtcttgaaatacctcatctatattctcatctcttgattccctgtcaagcagttgatatgcactgcttatagtatataccccagttgagtcgcttagccacacccacctatcttgttgctgctcatttgtgttgagatgttaaatttcctccaaagagcagtcccccataggtatctcaacctcaaaaaagtgacctcctccattgcaagcaccactctcaggttgcagctgaactacataccatctgctgaatgtgctggtttttt

SEQ ID NO: 31326 - DNA, 369 bp, Glycine max
  Clone ID: jC-gmst02400071b04d1
gataaatcaagccatgcatcatatgctgaataaatcatgcaagactcatggctccatgggggccatctatgaaatccaggattccaaataatccacttgcaccaaaacttccgcctatgttaatacagaatccgcttgctggtggcactttatgtcataagagcatgatattatcctaaatacatatggcaagagcacgtctggtgtcttactctcactaaccaaactgcagatgactgatgcacatgatggtggttacacactacactagatctatggccaaccctcccccactaaaggaaataaatgcgatatgtatgaatcgagcagtcaaatgtgagaacactctggacgctgcaaccgtgcctt

SEQ ID NO: 31327 - DNA, 337 bp, Glycine max
  Clone ID: jC-gmst02400071b06d1
agttattcccatgttcggacgcatcaactcgttatgaaatcacattgatagcctatactcgcgtcctagctagtctaagagctagatttgcctcaattgttcgcctcttgccttcccccttattcaaataagctcccgctattccaagagtttgctgtgcttcttggggatcaatgtcactacccttttccgcatcatttactaaaacagtgatctcactattgtttattctagcagaaccgcccatgacagccatggttaaccattggtctttaagaagacctattctcaaaatacctatatctaccgctgtggcaataggcgcatgatttggtaa

SEQ ID NO: 31328 - DNA, 424 bp, Glycine max
  Clone ID: jC-gmst02400071b07d1
gaaaaccataaaagttttttatttatagtaatctgtggtacaaaagcaccattttctctcttataattttgatttacattcacaaagaaataagtatgatgctcatgatgacttggccacatcattaatgctacgaaggattgaagtgcatgcaagagtcaagaatatgcattgctacgaagttgtaaatcacaatgctagaaaacacaaagcagttcctcttatttattaagtagataatagacctcattgcttgctttaggcatgggtgttgtcctctactggagggtactttccataaggtggtttcttgtatggtggcttcttatatggtggcttgtaaaccggtggtttcggcttgtaaaccggtggttttggcttataaaccggtggtttgtacactgggggcttgaacactggaagc

SEQ ID NO: 31329 - DNA, 554 bp, Glycine max
  Clone ID: jC-gmst02400071b08d1
gaaaaccataaaagttttttatttatagtaatctgtagtacaaaagcaccattttctctcttataattttgatttacattcacaaagaaataagtatgatgctcatgatgacttggccacatcattaatgctacgaaggattgaagtgcatgcaagagtcaagaatatgcattgctacgaagttgtaaatcacaatgctagaaaacacaaagcagttcctcttatttattaagtagataatagacctcattgcttgctttaggcatgggtgttgtcctctactggagggtactttccataaggtggtttcttgtatggtggcttcttatatggtggcttgtaaaccggtggtttcggcttgtaaaccggtggttttggcttataaaccggtggtttgtacactggtggcttgtacactggaggcttgtacactggtggcttcttaattggtttgtaatgagtagcaggcccttgaggcatgaggataatggctgcaagatgcagcactaggatggatacaaaggaagccatcttaatgggtttggtttggtgtt

SEQ ID NO: 31330 - DNA, 542 bp, Glycine max
  Clone ID: jC-gmst02400071c05d1
agatgaaagaaagcatatttaatagagtatttgaactgtttagagtatatgaggggagaaccgaacacctgaaatacttttaaaaaaaaggaaaatcaagggaaaaaaaataaaaacacaggagatatatggcgatggcacagtaacaataacacttaagaagcagccttggtctcctcagcagctgtctcaaaatcctggcctggaacaagctccgggacatcgtcatcatcattctcctcttgagctgtggttgaaccggcggctccttcaggagcctgcttctggaattgctcggctagcttcttcaggttttctaagttatctggtcctaattggtggataatgctagggagtatatcttgcaacttctttgtttgtggagaaccactgacaacccaagtattagcagcaatggatgcttgaactttgggatatagaaactggataactacgtcatccttaaagatattgacctcctcaatagccgggatggcattcacccctattgtcttcaggtgctctgaagccttatgtcatct

SEQ ID NO: 31331 - DNA, 394 bp, Glycine max
  Clone ID: jC-gmst02400071c10d1
cttgttgggtttgtgggttttgaaattgggaaagccccgtagaggacattaagcgccccccgctattaaggggcgcggtggaagctggatttcaggagggacttgaaccaagcgtctatctagggctagggcagcgaccctttatgggttaagcgaccgcccctggaaacttacagggggaaaccaaaccacactcgttagagccaagccttgttatggcacagaggggggtccagggtgaagcacggaccggggaaaaacaggtttgaaaaaagcccccccgttatgtcaagggttaaagaataccgacggaggggcagtttttacaaagaccttatgggggttaggtcgggtccttgaccggttggtggttttccgggaaacactgtcactg

SEQ ID NO: 31332 - DNA, 530 bp, Glycine max
  Clone ID: jC-gmst02400071c11d1
gcagaaataggccatgcaacgccactctttattatatctgtcatcatatttacatacagaaaatcaaggggaactccacacaatattaatattttcactatacagaaagtgcagtaatatataaacacgtagaccattgtattgcatccatcataccggaatgaaggaaatttacacactactaaattttccggatgacttgaaaaaactaatcatagggtcataaagatcttgttttgcttgcaagcttaaaatgaagtcaacatgaccatagttttcaagataaaccacttccggtgtggatggcaattccttgagtgtgtgctggaaatcagttatatctgccaaagcatcattgccaccataggccatccacagaggcaatgatttgggtatgcgactaaggtcgaactttggtggattgaacttgccgtactctatcagattttttagctttccataatcatacttggagtaggtacctctgcggatcatctggaaaagggtgtttacgtttttggaggatgatg

SEQ ID NO: 31333 - DNA, 431 bp, Glycine max
  Clone ID: jC-gmst02400071d01d1
ggattccttaatatgttaattccttttcttttgggggccaattttttccctggccaaaaggggccggcaataagataatgtacctaaaaaaaaaataactactgaaaaaggccaaatctttcatcccatacaagaaatcaccacttgtattccgattgcttgaatcgaaatctcctatgttccaatgaaattaactagttttccagaccccttgcatcaactagcggaaatgtcttggcaggtaatattttaacactccttccaaaactgagaaaaaaattaaaactgaatgtgaatcattcattgcggattgaataatatttatcccacagagtttgagattttgatattccgttcataagaatcttgaacttggcactgcaatctcctccacttatgcgggtaaaggatgcaataactcggagtgcact

SEQ ID NO: 31334 - DNA, 348 bp, Glycine max
  Clone ID: jC-gmst02400071d02d1
caatgacaaaccaggccaatggatttttttttggaggccaattggtgccctgccaaaagggggccggctttgatttacagaaccgaaaaaaaagcttacaacttatcaaggtcagagatggaatgccaacccaaaaaccgccgaaagaactccacgggcgagaaaggaaagcccctatgctccaacaaaaaaaccaaaattttcgagacagcgtcgacacttccggttgggaccagaggtggtaaaaaagcaacccttcctgtgcaaactgccaaaaaaatgtaaactgatcctcaaacactcaaaccggaacgaaatatatttatcccacgctgtggcagattatct

SEQ ID NO: 31335 - DNA, 518 bp, Glycine max
  Clone ID: jC-gmst02400071d05d1
aaagtgaaaaaatattttctaatataattaaatgtgtaaaattactcataaaatatgatgatataaaaaatgttacatttaactaatatattgtaagcttcattatttttggctcctcagtttttagtcaagctcgccaatgcagtcgccccactcaatccagctcctctatatgcatacatcacaattctctaagcttctgtgttcaatccatctgccatgcaagcaataagctgaaagaatgcatttatgcataataatccagattgtgcaccagatattttgcaaacccaagttccaaagtcaacaacttaaggttgaatatacagtaaacataaaaaatatggacaatatagacaaataaccaacacagaatttatatggtgtctgattgtgggaagagcttttccaacatgttattccaaaggatcctattggggtccaattcctttcttgctttattgtatgcatccacaggaaaccgctttcttagcttttctggagagctgcaagctcct

SEQ ID NO: 31336 - DNA, 470 bp, Glycine max
  Clone ID: jC-gmst02400071d06d1
aaagtgaaaaaatattttctaatataattaaatgtttaaaattactcataaaatatgatgatataaaaaatgttacatttaactaatatattgtaagcttcattatttttggctcctcagtttttagtcaagctcgccaatgcagtcgccccactcaatccagctcctctatatgcatacatcacaattctctaagcttctgtgttcaatccatctgccatgcaagcaataagctgaaagaatgcatttatgcataataatccagattgtgcaccagatattttgcaaacccaagttccaaagtcaacaacttagggttgaatatacagtaaacataaaaaatatggacaatatagacaaataaccaacacagaatttatatggtgtctgattgtgggaagagcttttccaacatgttattccaaaggatcctattggggtccaattcctttcttgctttattgtatgca

SEQ ID NO: 31337 - DNA, 470 bp, Glycine max
  Clone ID: jC-gmst02400071d09d1
gacaaaaagaaaatacacgggtatacataaatgaatacatagccatcttcccagggataattactctatcataagttaaacacaaggaagacaagggcccccaatattttactacaacttaagggtgataagctttgcaagaatggccatatactaaaattgccgttgtaaatggaaggaaaatacatgtgatgcgataaagggggggaaagatttctgagctataaagttacctaacatggcccggggggatactaactccctgtacagaccaaattgaaaaaaaggggcaaaatggaagaatcaagatattcttaaagatgctttgacagcatcgggtattacaactcaacgaccagaaacttataatgaattggttatctgggctccctaaagttggagggttctaatctttgccttgtccaaccgtgcttttcgaaccaccctttggatttggaggtcatgggcct

SEQ ID NO: 31338 - DNA, 496 bp, Glycine max
  Clone ID: jC-gmst02400071d10d1
gacaaaaagagaagacacagggtatacataaataaatagcatagccattttcccaggggtaattactgtatcataagttaaacacagggaagacaagggcccccagttttgtactacaacttaagggtggtaagctttgcaagaatggccatttcctaaaattgccgttgaaaagggaaggaaaatacatgtgaggtgataaagtggaggaaagatttttgagctataaagttacctaacatggcccggggggatactaactccctgttcagacaaaattgaaaaaaaggggcaaaattgaagaatcaaatattcttaatgatgctttgacagcatcgggttctacaactcaacgaccagaaacaaataatgaattgggtatttggtccccctcaagttggaggcttctaatctttgccttgatcaaacgagcttttcgaaccacctcttggatttggcggtcatgggcctttaacatctggacatgggtgcttga

SEQ ID NO: 31339 - DNA, 540 bp, Glycine max
  Clone ID: jC-gmst02400071d11d1
aggaaataaaaatagcattcaatataataaagaggtttccctctataaatacaagagattagaacataagaaaggaatggagataattaggtgtgcaggatacaaattaatagatgacactacaacttatgtaagatgatatgagcaccaaattttggattaagagtgagcacagtgactggagcatgtgcataggtaggagaaagctcaaatgagaagcgttgtaagagtaatgacaaaaccaacttcgcttctaataaagcaaaattttggcctaagcacactctaggaccccatccaaatgggaaaaacacaacttggccttttgttgcctttgctactccttcagcaaatctttctgggttgaactctgtagcatcatcaccccaaatatcacgatcctggtgaatcaatagtattggtaaggaaacttgcactcccgcaggtagggaaaggtttccaagtttcacatcattcttgatcgctcgagcaaaataaattaaaggtgggtattacctaagaacctggtataaaatcatg

SEQ ID NO: 31340 - DNA, 358 bp, Glycine max
  Clone ID: jC-gmst02400071e04d1
gaggacaaaaatgaaatctcattcttcaggataattagaggcagtggttcttacataccctcaacgcccttgttaggtaacattggaggttactggatacacacaatagacaaagactacatgcatcttttctgactattgtggtaaatctgaccatgtttgctctattcacatcgcacaataaaaaaaaaaatgcacaacctgctaaatgtgcatctagagaaaggtaatactatgcgctggctgacatcaacaaaagcctacttcatgtttactgcacaaggcatgtcatgttgggctagaactattggcttgtgagtgtaaatatagtaaagcagtactcttacacctactttca

SEQ ID NO: 31341 - DNA, 432 bp, Glycine max
  Clone ID: jC-gmst02400071e05d1
caaaagctattccattaacttgccataagagataactatttcttgttccaatatcaacatttaaacctgttatttggagaagagggaacacaaatgatgaccatctttcaattcaagagaccatctagcactctaatagggttctaaataggcaagaccccaatagaaaccaccctattaagagttgagagaaggatagtaccccaagtaagaagggccatgcaaccataaaaacacctaagcaaacaaccacaacaaaaggcagaaaagaccttacaattgacctgaaatcaacccagtgccccttaaatattaccaaagctcctacattcaccatgttccaattcattgatccaccataacacagttcgattcagacagttggcaacaaacgagtggcagttgcaagtgaaaaggttgggagttttgttc

SEQ ID NO: 31342 - DNA, 473 bp, Glycine max
  Clone ID: jC-gmst02400071e07d1
cccgatacggggacaattttataacaattttatttgatgtaaatacgaagctcaccaaaacacttaattttggataatacaaagaccaatggatgcggaagaacacagggaaaacgcatgacccaaaaaacgcaaacgagttaggccaagcagacgcatcatggaggacttcagctgtttcaactatgcaactaaatattgcaggatgattaatactaaaaggtgaggatgtttcctcttattctaaaggagaaaataaatcaatctgattggtgttagatttcatttctgggtttgttcgacctttgctcgaatcttctccttcaaaacagatatttctggctcaagggtgaacattctattcaaagcattcatgttctccagtgtctcactaagagtccggctggcgttcccatcacaccttaaaagttgcattggaccatgaagcaccttattcactataccccgactta

SEQ ID NO: 31343 - DNA, 526 bp, Glycine max
  Clone ID: jC-gmst02400071e09d1
caataacaaaacgcatggaaatatatgcgatcaaggatcaaacaaacaagatgtaagcaacacagcacgcacgcacaaaagggtgcaagagtgccaattatagctaaaagtattagctaatttaagcaatcatacaaacccaagttacacaaaagagaatacttttagcaagcattctgctattacaacattcgctagaaaagataagcatctttctccaagaaccgtcagactggcatgaaatcaccagacgagaccaaaatttttgaaatggctcatgctttgctggcaatgttgttagaaagccagtccaaaccctcatagagaccctttccagaagttgcacaagggctctggatataccagtggcgttgacggattgaatgaagtccaagcttgtcagttatttctgcagcattcattgcattaggaagatcttgcttggtggccaaaacaagcaaaacagtatgtttaagttcattcccttgcaacatttttgtgcagctcatcccttgcctaaaccact

SEQ ID NO: 31344 - DNA, 496 bp, Glycine max
  Clone ID: jC-gmst02400071e10d1
cgattattataattatatttccagcaccgaaaaaggaactgcaattattattcaagttggttgttgcaacattgattgctgctcgccaaaagactcgtccgaaacaacaatagcgtccgcatcccaccaagtatccgcgtcagattccgttacgctctctaacggcgtgctgacctttctcatatccccgaccgtcacgccgtaacgcccgtcatctctgacgtagaccttctggacgccaccagattccacgcgcagggtctttcccacggtgggaccccactccgccaccaccgtgggcttccgccgccgcagccgcgtgtcccagatctccagcgccagattcccgcacgcgcctttccccgccgagacaaccaccgagggagacgcggtggagctcgtcggaaccgacgcgttaccaacgtaataaccatcgtaatcatcgaagtccaagcccaggccgaagcctatggtgtcccagagcttcaccacgctc

SEQ ID NO: 31345 - DNA, 506 bp, Glycine max
  Clone ID: jC-gmst02400071f01d1
aaaaactagcgtggaacttgcgctgttattaataagtccccctgggcgggtggaaaacaacattggggggggcttcccccattgactatgaattaaaaggcggttttattttcaccccccagaacccacaatggtgggtaggttttccttcccccgctaatgttatttttatccccttcttacagttttttagttagtccttccaatagatatgctttatttgccttggtgggtatgtaaatatcattttagcggactgaataatcctttgctggttggaaaaggcaagtccaaaaaaccaataacttcgttccatttaatttttaaaaaccaaaatgccttttgtttccctggcatgcacataaccactctccattatttggtaagggaccttgattccccaattacatgttcccctacaattttggccacacttggtgcatgcttttacaatcattacttaaatgggcttaaaaactaaagcttggtaggtcgtaaggaaaagg

SEQ ID NO: 31346 - DNA, 323 bp, Glycine max
  Clone ID: jC-gmst02400071f02d1
gcaaaaactaccgtggcactcgccctgatattaacaactccccctgggcggtggggaaacaaccttctgggggggttgcccctttggctaaaaataaaagggagagcttttatggccccgccccaacacacgaatccggacaggctgttcttctcggactctagggatttgtacaccctgctcacgctagctgagctagctcttccaattacaaggccttttttgccttggggtgaaggtgcatctcctcttagcgcaccctataacccttcgttggcaggaaaaggccggtccaaacaaccagttggggaggtcccttacct

SEQ ID NO: 31347 - DNA, 309 bp, Glycine max
  Clone ID: jC-gmst02400071f03d1
cggggaaaaaacccccccccccaggggattctttcaaaaacacccccctttttccaccccccccccctggagagggttccaaaaaaactacattcccggtggcccctgggggaaccattttggcagccgaaaagccctcccctaacacagggggtaacaggaatcttcggactcaatggcctaacaaagaaaaataactccctgagagcacccccccagagggccctatgggctctccagaagattgggggccaagagccccggtgaatggcccaacgccggccattccaggggggggaagagagcccc

SEQ ID NO: 31348 - DNA, 506 bp, Glycine max
  Clone ID: jC-gmst02400071f04d1
aaggaaaaaggaaaatggggcgatatattggagtctgcatgggcaaataaatgctcagtaaaattatgatacatgtacattcctgagcacactaaaacagatcagtggccaaaaaagaaaaaaccaaaaaccaatcagaaacagattggagaagataatatacattgataactgtgaatgatgagtggcatacgcaaagtaatcttgcaacatgtatgggactgagaactccctcattgtagtgtaagtcacaaaaaagccgcacaaacagggtggaactagaacgagatctcacaaggtgcatgaaatgttcttcctcgacatattggttccaggttttcaccagcatacgaacagaggggtgacacttcaacacctgttgcatataagggcactgaatgtgttaagaagccacctgcagcaactacccaacgagtatggagtgcgcgaacaagtagttgcgcactgtctggagtgtcaacattggatccatttgcatttttcac

SEQ ID NO: 31349 - DNA, 382 bp, Glycine max
  Clone ID: jC-gmst02400071f05d1
ccggtggatccactttttttagatttgtcttttttttttggggaactacagcttgtggcccctaaccagacgacaaattgggcccagggttcgtgaatgtcatcacttcacaaaggggtggatccaataggcgcccgagtttaatattttacatggtgcccgaaccaaaggttttttcggcgctataacccatggaaagaaatccctccccttccttgaatggtccatacacagagtccattatattagcagtttggggcacgggattcttcacaaaatcaaagaaagctttcccagggggcagactaaggttgggacctaaaatgtgaatgaaatgcccaacaaacaaggctcggggaacaaggtgtttttttttctccaa

SEQ ID NO: 31350 - DNA, 462 bp, Glycine max
  Clone ID: jC-gmst02400071f06d1
agtaaaatcaattttgatcaaattattttctccatttgtcctattttagacgaggaacagaggcaatataagcaagtataagctgtaagcatcatagcactaagagcttatacaataatatatacattggtaacaattggtatcatcatacagtttttctatgtttaactcagacatacaactttatttgactgcaagcaatcacagtcacagagctcaacacagcattggattaactcaaaacaggccagggctgcacatatctgagtgcaaacgatggtgcactggtcattcacaaaagtgcaagtctgcaacagacacatgccacaacaggtatcagccaatcgaccacaacaattggaagcaggcttccccagtagaccttcaggtggttgtgcttcttttatagctggtggcaagttctcagcagttgctttcaagtcaccaaatccaagattcaac

SEQ ID NO: 31351 - DNA, 528 bp, Glycine max
  Clone ID: jC-gmst02400071f07d1
gagaaattactgacaaataatattagaaatatgctcatggtacaaatttagattactccggacagcgtatatcatccacgaagaggattcttattgactaaacgtgcataaagtcaaagaactatagtaaacttcaaagatcaagaggctgattattatttacaaaacacgatgtacctgatggagaaaaataactttatgaccattatctcaggaagttgcgggttcagccccatcgtgtcgggcacagcaaattgtagctttatgatgcccttggaaaactttaatatcttcaccagttgacatagaccagagcctcgcaggtgtatcagaggaagctgtaataaggtaggcgccatccacggagaagacacagtgccacacccagcgttggtgacctataagagttttttctagggtaaaaccatcaacattccatattttgacagtttgatcagaagatgcagttgccatgtgcctgtggtgttcacagaactcgggtgattaaagacctttgaggatgtatcc

SEQ ID NO: 31352 - DNA, 436 bp, Glycine max
  Clone ID: jC-gmst02400071g02d1
ccttagccaatatatcatgaaaagtaaaaaggggcaaagtaactttgtgttgattgctctctaaattaaagttatcttcttctgcgtgtaaaaagggaatgaatacatcaatcaaattccgggaggcttcataaagcgcttccttaggagttgaacttccatttgtccatatttcgagaaagagtatctcttgtttttcattcccattcacataagaatgaatactatgatttacatttcgaacaggcataaatgtggcatctataggatgacctccatcttgaaagttttttagtgtttttatacgatacccacgattcctctcagtttttaattcaatacacaaatcaacgggttctgttacgatggctatatgttgtgtattatcaacgatttccacagagggtggtaaaatgatgtcttgagcggatacata

SEQ ID NO: 31353 - DNA, 496 bp, Glycine max
  Clone ID: jC-gmst02400071g03d1
agtcaacatgatgaagactttcttacatattaaaaagcaaaagataaaaatgtagagcatcaaccacatgggtagtgttgcagttgtttacagggttcaaaattaatgaacaccttgaggacccacattagactcttgaatgtctaacaatcaggaccacaacacgaaaaaaaaattatatatcgcacaaaatgtaacatggaaataaagcaaactatacactgcttacataaacatggttcatgccagccccacctaaacctttgaatcgtttgttatctgctttaccacttgctgcgtcacaaaattctctcaacctcggaggaaagaagcagaaggtctatgataagcagaagcctttctagggacatctgaaccaccattgccaccgttggaacggtcatgaccggaattgcgtacatgatgctgtttatgatcagcgccttttctctgcatgctctttgattcctgaagctggtctaacgcttttaccacc

SEQ ID NO: 31354 - DNA, 547 bp, Glycine max
  Clone ID: jC-gmst02400071g04d1
gaatgaatgtaatcttgtcactcaacaaagagaaaagggtgatgcttaaattccaatacatacatctccagaaaaaagaaaaaagagctacgaatcacaaaaaatgtagcggtaaatggaagctcatatgaatagtaatttacattcttgaccaagcaacagaaatccgatgaagaaaaagcaagccaaaagaattcaatctcgtgaagttgagtgagaaggccaagcatggattgtccaacttggcaaacttctagctggctatatacgcattttgcacctatatgtacaccaggaaagcacacccagaaatgtcatcaaggaacaattccaaaaagaattcaaatgatatgcccacacacagacttgagccagtgtgtgatttaacatgggcaggtttaatggaacaaatgacaacgcttgtggaagtgcaaaactagcagcaatcacattccccttggaaatgtagctgctccaacagggtccaattggaagttaggaggtagagaacacatctctgatttttcaaagagccatacttcaagac

SEQ ID NO: 31355 - DNA, 553 bp, Glycine max
  Clone ID: jC-gmst02400071g08d1
aacaggtggaaaaaataatcgtgaaactcaaacaagtcggtaccaaaaccttcgtttataatttttgactttctggactgcaccctccaaccaacatgacccattactcgcaacaaatacatatgtagaatgaaaaataacaataataacaaactcccagaccccgaaagctcaaccagtcatgcctcaaaattcaaacccaaccctaactttgccagctgaaataaactcaagaggacacaaacagctcaattcagtgacacaatccggcaactattaagtatgagaatatcccaagatatgggcggcaaaaacatcaaccacctaaccttgtcagattgccaagtatagaatatgaataagaaacactcaagctgaggatgcaggctcttcggctttcttatcttcaaccgccttgctttccttccctgatgcagattctttctccacagttttgtcctcagacttctcttcatccttcttctctgcatcaaccttttcttcaacacttaatttctcaataagaccagctgcatcagctgattccttctca

SEQ ID NO: 31356 - DNA, 522 bp, Glycine max
  Clone ID: jC-gmst02400071g10d1
atataaagaatttctttattaaatgaaatggccaaaatgggaataagatcctaagttacattacatatagtatcaaattgacatgaaattcaaacatcaataactcaacgagagacaagttgttcacacaagtatccttaaataaatctattttgaatcagcgagcaggctttcgtagcgggctttgaagaaggcaaaaagtgggtctctaggaggaagaacttctttcacaacagggtggctcatgaactcttggctccaattgtagagcttatgaaatttctcacttgtgaataactccaaccctgcaatttcttgaaccatagggacccaaaatgctatgaagatagcagcaatatctaccatcccaaactcctctcctccaaagaacttcttgcccttgatctcactctcaagaaactgcagagccttcaacgattcttcaacattcttctcacgctctttctcatcaaccgtgaaaacagatttccatacagtacccccaatcttgacatcaatgaa

SEQ ID NO: 31357 - DNA, 559 bp, Glycine max
  unsure (1)..(559): unsure at all n locations
  Clone ID: jC-gmst02400071g11d1
ctgaaaaacaaaatcccaatttaactgaagtacgtttcgattatactgaatacacaacattacgacgtaggaataaacattaacatgggccacaaaagaagtacacataacaagctatcacagaaggtcaaaaaaataatccagaccttggccaatttcccagatcgagatgccacattcccatgaacgagcttcctctaaccgcaaagaaattgacttcaaagatggataaaataccacatgcctgatatccttgtcgtcagtgtaaaagaaaaaatgctccccactattcttatcccactgcagttcaggccagtgcttctccaaaagtgccaggtaatctctcccaataatagctgcaccccctgcatctgcatcccttgaaagggagaaatcatttccatagaagttgataccaagaagtatcttgggggcaaggctttgggctctattgccagaggtaccgagaagcagctgtagaacaatttgaatccatgttaaaggtgcattangaccaggattatgaggattagaagaatcatatgtcattaacgagaat

SEQ ID NO: 31358 - DNA, 529 bp, Glycine max
  Clone ID: jC-gmst02400071h05d1
aaactcacaagtgaatgcaactattattaactttccaagggtaaaaaggcctgcactctgcatgacatttatatatgcggagagcacagcaaaatgccccactgatcacaaaaatatccattaaatttgatgaaaatacagtaaaaataaaaggactaattaatacaagaaaacaaattgataatcatagagcagttctgagttctacaagcaaattttaagcagaaatgctgctcagtcagagaagagacctatatgagagttgatcataaggaggacacgttcccgtgtttctcagtttctccataataattatgaatgaacgacaccaatcttcttagcaaaatcatccccatcttcttcttccatgtaatcttcctctggattatcaccctcttcaccttgttcactcatagtatccctcttcaccttgttcatactcatagtccgcatctctctgatcatcaccttcataatactgatcctcacccgattcattgtacactattccctcctcatattcaccatc

SEQ ID NO: 31359 - DNA, 528 bp, Glycine max
  Clone ID: jC-gmst02400071h08d1
ctactgattcaatttgcatgatgcatttcctagaagtgtatccaaactattcacattacacaatcctttccttcgatataggtcaaactaccagtcaccagacatgaaagcttagtatcaacagaaaaataccagtagattttaatcttacttctggttccatttacatgatacatgcccaaatttgtcaccaaactacaaacactacacaatccttcaaacagactacaatgacaaaatctgatgaaataaattcctcaactacacacaaataaatgttcctctcacattcaagagctgcacaaactgctacaaatttcaaatctcatacagggttctcaccaggcagataagaaggagaaccaccctcaacctggttctttttcctttggaagatgccactaatatttggcaagagtgttttctttgaaactgaaaccttctccttttcaaactttttcacctgcaccattgtacgaggaggattctgcttttgaatcctatagtgctgaggagatgattctgttg

SEQ ID NO: 31360 - DNA, 528 bp, Glycine max
  Clone ID: jC-gmst02400071h09d1
atataaagaatttctttattaaatgaaatggccaaaatgggaataagagcctaagttacattacatatagcatcaaattgacatgaaattcaaacatcaataactcaacgagagacaagttgttcacacaagtatccttaaataaatctattttgaatcagcgagcaggctttcgtagcgggctttgaagaaggcaaaaagtgggtctctaggaggaagaacttctttcacaacagggtggctcatgaactcttggctccaattgcagagcttaggaaatttctcacttgtgaataactacaaccctgcaatttcttgaaccatatggacccaaaatgctatgaagatagcagcaatatctaccatcccaaactcctctcctccaaagaacttcttgcccttgatctcactctcaagaaactgcagagcctccaacgattcttcaacattcttctcacgctctttctcatcaaccgtgaaaacagatttccatacagtacccccaatcttgtcatcaatgaatttgga

SEQ ID NO: 31361 - DNA, 350 bp, Glycine max
  Clone ID: jC-gmst02400071h10d1
atcagaagcttccgagcaatctctcaatggtattccgccgtaaatccggcccacagatgttatagaatatactaaactccctgaaaaaaaacttttcaggactaggacacacgtgactgaaaaacttcctgatacatcttgcaatacaccatggggccactgcatttatttcacagcttggaggcccggtgtaaacctccatgcttaccaatcgtcctctcaaagtacacttgaaacgggggacagcatttgcgagtctcatttacacacctgtatttaccccaagctattaatgctttacttgaacgcttgcatagctgatacaggcctagagcaccccttggacaaga

SEQ ID NO: 31362 - DNA, 507 bp, Glycine max
  Clone ID: jC-gmst02400072a01d1
atatataatccacaaaatgaaacttgttatttgatattggcagtctacattggacttgttcattattcttttcctaagagaaaattacgtttttccgggaaagctttggaaagtagcaccacaaccacaacctcaatctcaaaacccaaatgcagcttgacatgaatccatgccaaagaacttaaatctttttgagaaattccatgatgttggtattgaaagcacagcaaacaactcggaaaccttggaatccagaccctttggccagagcctcaaactctttctctgttctctctttcccacctggattatgtgccaacatgatcacattgatgtgaaccacaccttttgtggcctagctagagtctggagccactggaagaatgcattctgccacaatcaccttcccattgtctggtagtgcctcgtagcagttcttcaaaaacttcaagcagtgctcattactccaatcgtggcaaatccacttcataaaaatagcatcagctt

SEQ ID NO: 31363 - DNA, 541 bp, Glycine max
  Clone ID: jC-gmst02400072a02d1
catctaaagaacaaataagataacatggagtcatggggagcaggcaattaacaattgttctgccttgttgaattctgagagaaagacacacgaaactaaacaagaacacatggttatgtttaagaacaggagataaacctaaccaacgacataagcatgagtcgtttggaggaacacgaaacacaagatttaattcagcaacaaaatcattaacaacaatctaagttgtgaaacccccatctacacatataacctgtccagtgatgtatgatgcagccggaaggcaaagaaaagcaactaatgctgatatctctttaggttctcccatgcgaccaacaaatgtttgagacactattccatttatagactcattcccttccgaagaattcacgatacactccaaaagtttagtcttaacaggtccaggggcaacagcatttgcacgaatattatcctttgcccattccaatgccaagattttggtgaattgattcatggcttctttagaggctgctttaacagagaacacaggaagagcttt

SEQ ID NO: 31364 - DNA, 507 bp, Glycine max
  Clone ID: jC-gmst02400072a03d1
acaaattacgccttcaaaataattagaaattcaataagtacaccaggctgcaaaatgatttgggatgtaccatagaaaatgacaagactaaaactaatacactaccagaataggattttctattcacataaaaagactaagctttgttgttaggagttttttttttaatttcctgcaagtactggcaaggaaccaaacctatgtacacttcatgcaaaatataaaactgatgataccaaacaccagaatgctatcaaaactcaatgccactatttatctgaacggagaaggaagggcgcccaacggtggagagaggaacatcaactcttagaactagacccgagttccccacattttcattccactttgatctttcaatagatactgaagcaaaggcagaaggatatgtcatgaaagcacatccacaaattagattaagtttctctttactgaatgaaggagttctgcccgaaccctggatgcttccacaacagtggacacacactg

SEQ ID NO: 31365 - DNA, 438 bp, Glycine max
  Clone ID: jC-gmst02400072a04d1
gaccagacaataaaaatatgcttataaacaattggtgtctgaaataacaagctattagcttcattagattggtaatccaattcaataatcacattttcgaactgtgttctagtatgaatcttaaactcaaaaaattggcatcaagggcacattgccttgattttatgtttgacagccattaataatttgcatcaaaatttggttcatcaaaaccaagtagagataacttctacttgtggcagaacgacctgcatctttaaataactaggcaaagttgtaaaaataaattaattacactaaaactgtagttggttgaatgcgctttaatagtttaatcttcaagctcaataatcttaaccacagatgcatcaccaagtttctggccaacaactacccggtcatgtgacttaataactcccaatgcttttccatgatcaa

SEQ ID NO: 31366 - DNA, 342 bp, Glycine max
  Clone ID: jC-gmst02400072a05d1
agcctacaaagaccaacaaacagttccggaacatatttgtttcagctacaaagaaaaaccgcccctccccctctaaacaaaaaccattggcaagccaaataaaggctccacgctttctctagaaaaaaaaaagctccttatgactttctccacctttatgaggacctattgacactcgggtaacggactttacacccccacttgaagaatctcgcgagggatttttacttaaatctacagctgtggcgagtatagggtggggtttaacaactggatactgcctgatttacacctttaaaaaagggcccccgctttatcgcaaaagaaccttttttacttgcc

SEQ ID NO: 31367 - DNA, 483 bp, Glycine max
  Clone ID: jC-gmst02400072a06d1
aaaaaaagaaatcacaatttttgaaaacttcacaatctgggtttaacatcaaattcctagtttcagactttcagccattctgcatgattcataaccacattcatagtgtggctagtagaaacatgcatgcagcaacttctataatgaataggcacccagtctttctctgcacaaggtataaaaatagtaatacaaaataagcaatcctgcgggttcacaatcaatctgtatagcatatcaaattcatagttccatttcttttgcagagtttatggctcagtattcccttccaactcaggttttgattccttgtcttctgaggaggagatctgaactgccttcatcagcaacgggcccattattagtgtgtcctacagctggagggttcttatagagttcattattttccagttgggctaacttatttttggattctcccttcagtagctctaccacctcaagttggtgggtttcttctttggc

SEQ ID NO: 31368 - DNA, 549 bp, Glycine max
  Clone ID: jC-gmst02400072a07d1
aaaacaatctgatatcatttccattattcttttttttctgacacaaattcaatacatctgaaaccactataagatgtgttagcgaggagctaacactcatccacagatttattaaaccactacaagatgtgttagtgaggagctaacactcatccatataaattaaaccactataagatatgtgttagcgaggagctaacacacattcacaaatttattctcactgataggaaggcaagaaaaccttataatttggcactgatcttccttgttggtcaactaggcattgaccaacatttggtagtgccattgtcctacacacttaattttacaagtcttcttcacaccaactttgtattatccttttttgttttctatgcccaatgcaatgcactctagaataaaatatatcactgactggaacagaagcctaagagtcccatgaactcatggttggttatcatttgaatgctgttctcaatgccaaccacacccattgtgagggcgctagcaaaaataacaccctgagagggatgaatacaatgattg

SEQ ID NO: 31369 - DNA, 348 bp, Glycine max
  Clone ID: jC-gmst02400072b01d1
gggccaaccccaaaaaaaacccccttttttttgggggtcaaagggaaccccaaataaaaaattttttaaaaggcacccctccaaaaaaggggggggggggccctttttgggtttaaaaccaaaaaaaaaaaaatttttgccgcgggggaaaaaaaaacccccccttaaagggggtttcactctggtatttttaaaaagaaaaaaattttggggtaaaaaaaatggaaaaaccgggggcccaaaaaaaaattttcctggggaaaaaaaagggcccaagtgggaaattttttcggggccattttatggattcccccggggagggggttttgaaaaaacaaaaattttttt

SEQ ID NO: 31370 - DNA, 423 bp, Glycine max
  Clone ID: jC-gmst02400072b02d1
acttcacctttcaaattgggaggatgaggatgatacatatttttcctggtcaaatgaaccaaccataaaaaactagtactaaaaactttttataaacatttacattaactattacccctaatccatttttttgcttctcttttttgggttttaaataatatacatgattcttgaaattggttttcatttcaaaatcctctcactcactcactggtttgagagattacttcttcaaacttgaggaagagttgagcatctgaagtgctcattggggggcagtttactaagtggggggttttgagggttgcatactcatccacgtagcatggcactttggcagatggatttgaagcaggtggtaggtcaactagttgctttggtgggatgcttgatggcacgagacttccgagtacacgtgtcact

SEQ ID NO: 31371 - DNA, 437 bp, Glycine max
  Clone ID: jC-gmst02400072b04d1
acattcaaatacgtaagctttgtaaactataaagaatttgtatacaattaacaacaaataaatactaaaatttctattacaaatatatcttgcattctaattataaagcagacacaaagatgtaaacattgaacataacaaattttttaatgctacactataatgacttatttttatatacaaaaaaataaatctgcaagcttaagctctgctattggtgaagattctctcaatatctaaaatctttctattccatttctttttaattttctttcaattcacaattctttgcagccaaatctctaacgtagtattcatttttcccttggtaggtgtaaacatgtggaactgacaaggtttacatggaccaaacttcacgtaggagttggtatctagcacttgtggcggggttgacaccttgctctttatgattatta

SEQ ID NO: 31372 - DNA, 497 bp, Glycine max
  Clone ID: jC-gmst02400072b05d1
aacataaacacacaatccaattaataaattttccacaaaaaaaaaaaaaaactcagtacaccgaatttacaaacaaaattgattgcaaaaccagcataaccatcaaagaccatgtaaaataagctataacttttccaactaactgaagcgcctaaattggaaaagagacctatctcaaggggggactacatcaacaaatcattgccccctgtatatggcacttgcacaaaaaaaaccaatgcctttgaatgtcttgaatgctcacaagtcatgaattttgtggacaagcatgcagccaccagacaaaccaccatctcccaacagaataaattggttttcagtaagatgagtgtcttcacctaatcatcttttaatggactcgcatactcggttccgttgtccaatctagtcaagttagatgaggcgctagatgacacggcatgaccctcattgtaactgctttttgatggggttctctgaggattgtaagctgcagg

SEQ ID NO: 31373 - DNA, 463 bp, Glycine max
  Clone ID: jC-gmst02400072b08d1
aaccctcatcaattcggcttgtgccatcttatcttcaattataattggattgtatgtccaaacttttctctatttgacagtcacattcaaacaaagttcatacatacctcatcaatcttcccttattttatcttcactttaatcatattttctttcctttcagtgtcccagatggcatcttctatacaagaagatcatcttcaagataattatactcaaaagtgaattcagtcttgattctttgacaccatccatgttgcatgtcatcatttgcaatatggaaatcaaagtacacataagttccctgctcatattcatcggttgcaactttgggctcttcatgccgctgaaaccatgtgttatactttcggtggtatctccaagactgcttctttaactcctttgcagccaaatattgttggtaagtattctgttgataataaaatgcaaagaacagagtatc

SEQ ID NO: 31374 - DNA, 513 bp, Glycine max
  Clone ID: jC-gmst02400072b12d1
catccacttcagttacagattgagctggttgtgttgtagcatatccagtttgttatggaggagcatgatagtttatcagaacacaatatcattgtgagggaggaattgaaacttgaaagtaaagaatcgaaaatctcgtattcaagttatgagccccccaataaaggaaaactaaacttacaccaatacacaatgtagaagcaaaaaatagtgcacttaatgtacctcattcccttttgtgggagcaaacctgttctgcagtgccactggacattgtgattttgtgatacaaaaatacaacagagttattttcacatgccccagcacttgataaaacttcaattacaatttacattttattcttcaataaaattgatctcttttctctttcacaattttctgtttaaaccattgccaaatgttcaaactccaacctaagggtgccctcaaaatctgagagttaaatggacatcacaccatcatgttactcatcaatatgttcatctttcataa

SEQ ID NO: 31375 - DNA, 414 bp, Glycine max
  Clone ID: jC-gmst02400072c01d1
ctgtaattaagttatcatttatctctttatttttttatcacccaaactgaccacattccttcatcggaaccttcaatttttcatggcagagttcccctaacattgggggggattaacactgtaatatacgttttggtagcagtaatttgacttgacgccagcctccgcgtgaaaagttaatacgcccgagatgttccattccattcccgcaaatattaagcttccagccgctggaaaatcggtggaaaaggaaaacaaaggggtgacagagtggctcgctagaaattaatgaagtccaatgagtcagaaacacaaagttagcattgcccgcaccgcaatatttccgatcgttgacacaaacaggagaatgttgaaattcgaagcttcagtgtcttgcctttgacgaaagacaca

SEQ ID NO: 31376 - DNA, 268 bp, Glycine max
  Clone ID: jC-gmst02400072c03d1
gaattagacatatacagaacgaatttcacagtttgactttctatctaggcctacacttttggaatgttacataaagaaacacggcacttaaaagaaaaagcagaaggctctcgtgtgatttacataaaatcacagacagggtacagggtatgcaagggtatatatatttaattaatcgatgagaccaaaataatgcctttagacagcaatcctctaactttcccactaatgagaacaataatcaagttggaaggactaggatgaagtt

SEQ ID NO: 31377 - DNA, 229 bp, Glycine max
  Clone ID: jC-gmst02400072c04d1
ggtgttggggttaaacacaaacgggaatttctttggggggtccccctttaaaaaataacccattgaaccccgggaatttatgaggaaaatattaatatatagggccgcgggggtttaaaatgtctggctttaaaaaaacccgttgcttataactggggcggaaaacggacttctaaaaagagtggaaaaaagagcgaaaaaagttccggccttgggacatgccggaaaa

SEQ ID NO: 31378 - DNA, 533 bp, Glycine max
  Clone ID: jC-gmst02400072c06d1
gagaaagacatcaagactttaacattgcacacattgtaaaatgtagacaatgtaactcaaaattatacaggataacaatccaatatgaacaagataacttattttattatctcaactcttagcttctctccaagtggagaatgcttaggttctcagggtgtgtataagcaggttccatcatcacttcttgcagttgggtcgaagtttgaggcatttggatcagtacaaccttcaggaacgggaatgtttacttgctgagctgctttgccatagaaagttcctctgttgatggaatcttgattagcatcaccaagagcagcctctttcaagtacttgtctgccagttgtactctcttcacattctcttgttcttggacaagcatgttaccatactccaagagcttgctcaaagtcatcttcggttggtcaaaggttggaggtccttccttggagttcacaagcttcttcccaatgaagtcaacaccaacaacagaaatccacttcctcacctaatcatgatatactctagccct

SEQ ID NO: 31379 - DNA, 520 bp, Glycine max
  Clone ID: jC-gmst02400072c08d1
gaataggcaacatatgatttacttacaagcagacatcatctgggcgtaacacccagaaatcaaacaataaaataaaataacaaatacagagctaacacatctacttgacaatttatacatggactctaccaggattcttcattaaaacaacttttccaaatcccagtagttcctagggtagaaattaaacttgcacatgtgtacaaagacataaaatattccctatgcagctagacactgctagatagctccatacttgcccaatttgaaattccaaatatgagaataactacctggcatgactgttaccatcctcttctgatatgttaaacaagaactttggaagagatgcgattctaggaaggtggagaagcaaatcactaaacgagtctttcctagacatgcctagtgcttgcttgcctccagaagcgtactttgattccttcacagcaggcttgacatcttttccatcatcaggtgcttcaacagtattatcttcagtaaaatgagaattctgaac

SEQ ID NO: 31380 - DNA, 440 bp, Glycine max
  Clone ID: jC-gmst02400072d06d1
aagattgattgaaggatttgttattttttactagtttttctctccagatatggggttgctgagacagaacagttgaactatttttagttgtttatctatatgaatagctttttatttgtaaggattattatgctacttggtaattgttctgtctagggtttcgctggagggagagagtggtgctaagaccatgtgctgatgtgcttacttgtgaagttgttgttgttaaatgtattgttttctaaaaatctgtgtctttgtgtatgtgcttgacattatcttgtgttttgaattataattgtggcttgctcttgctttgactagctgaattttaggtaagattgcctacgtagggacatgattagtctgtatatatgaaaataaattgtctccttggagagtaaaaaaatatgtgctagtgtctgatctattcaaatgtt

SEQ ID NO: 31381 - DNA, 384 bp, Glycine max
  Clone ID: jC-gmst02400072d08d1
aaggggaaaacaaccaaaaaactcaccccactgggggctctacataaaaaattttttaaaaacccccgggtccataattcaaaaactttaacaagagctttggcccaacagaatcaatttacatatttcaacgagacatacaaggattttcgtaatttgctgggactggggtgttcaacaaattgcacaacaaccgaaacaagttgaagttggctgcaatttgaaaatgcatgacagtaaacaaacttgtttttggatttttttggactgcattcaagttttcaccccaaagacaaaaccattgctgtatgaaagaagattgctaaaaactgtgaaatttttcacaggtgaccggaaaggatttggagttactggatgtgtgat

SEQ ID NO: 31382 - DNA, 582 bp, Glycine max
  Clone ID: jC-gmst02400072d12d1
acataacattcatgcataacacggaagagaggattagtcattcatcagatctggttagaacaatttaaaaacaaagtctttgagcaaatttatacggatttacaaagagaaaaaaggtttgtcattaatcacaaaatgcccgaacttaattcttgccttatttggcccatctagcacgttcaagatggcatttaccatacagctttgtcacccccgtaatttttattgacccatgaacctgatgcaccatctgctgcttatttccaactagatgcttgacccttgactgcatcacttgattgaccccagtccttacaagtagtgtttgaactagattccttggtccacccaccaccctggatattggtcccttcagttgtagattttttccagctagcctttgcagtttgcgatgacccattgctgttccaattattgatacctccaccacttgctgaactccagctttgcttatttccagcttggttccagcttggatgctccttatctgcattcccctggttccaagcctgagatccattatcattagctccacttgctgaactccagctctgatttctt

SEQ ID NO: 31383 - DNA, 408 bp, Glycine max
  Clone ID: jC-gmst02400072e01d1
caacacataaatgatatagtcattcgtaggcaaacaaatttacacaggctaatagacgccattgttgccaatttccccattccggtaatacaagtaattacgcaatcaaaagacagtggcagaagaaactaaggaagaagcttacatatacaagacttgtcaaagattgctagttaagaagactcaatgtccacaccacgatgttgtatcattttaagagcaacaaccaccattttgggatgcttgggattcttgttttggttttaaaacactccttttaactgctgttgatccttcttccaaaagactaggggcttccattatctttagagcaagttcctcaaagcactgctccacattttcccttgttttagcactacattcaagaagcaaacaccccaatttttt

SEQ ID NO: 31384 - DNA, 306 bp, Glycine max
  Clone ID: jC-gmst02400072e04d1
gtcaacaaaacccagtttatacaatgtcaacaatcaacaataagcgtacacattaacgagtcaatctaatttgactgcatcacaattttaaacttacaccactcgttcaaagccaacccatattgatatttgaaacaatttttgacaaataagagagatgccttaagcaccaatcttctcttcttccttctcttcctcatactccttctcatcagcagtagcatcctggtattgctgatactcagcaacaagatcgttcatgttactctcagccttggtgaattccattttggccatttccttccc

SEQ ID NO: 31385 - DNA, 486 bp, Glycine max
  Clone ID: jC-gmst02400072e06d1
ggaacaaaattgttcccaatttattatagaaaatatgatataaaatatgtccaaatttggtatggtctatatgagacccattgaacaattaaaaaagagtgcctgaaacatattatagagtgctgatgattgtcttcaattcttcattgccaactctgtcctccttttccctcagagatagaccactcattcctgaaccaccaccaccttgcctttttaagaaatgttaaatgaatgagggacattgttggaaatgaagagatacattttgaggggaaggctctgaagttcagcaacatgcatggaagactaattaccacagtaaataaaatataagacttcttttttggtttgtgaaaggggtatttaattaaggagaggtgccaacaattccgacaatgacccggttaagtggtgacaatttcatttgttggccttgggttctgctcttcttgaagagaggctctggtggtgaatataatgatg

SEQ ID NO: 31386 - DNA, 405 bp, Glycine max
  Clone ID: jC-gmst02400072e07d1
aagtaaaaaacatgtaaatatcacatattaacatataaataatacaaggtagcaactagcaaggctcagtaaataaaaataaataaaaaatagtgcctctcatagtgatagatagataatatacaaatggaaaccgatcaggttccaccccattagtagctatattatcaaatattcaccactgaaaaggaaccaaattccctaacacttctttttttctctcttttcttagaaggaggaacagaacataaacaaacaggaggctaaagtggggggttttgcttctggatgattccaagtgatgaaattacaagaacacccttgtacagtgtggcaaaatctcattcacacattaaaacaaacagccccaaaagggtttttttttttcccaaaaactgtgccact

SEQ ID NO: 31387 - DNA, 315 bp, Glycine max
  Clone ID: jC-gmst02400072e08d1
agcattgatcttttttagctttaaaaatgctcgtgggagaaaaacaccaattaattaatactaatagtactaaagttgcacttttagtcaatgtttccaatgcttactaggcggtgaaaccacaacatcagagcaagatattgcagaactaagcattgtcaatgaatgctaatcggatttcccaaaggaaactaaaatcagttttgttgttgtcagacttcattctctctaaaacaaattgaaaaactccatcaccatttaagattcaaactcttgaggaagaaatatggaggattcaaatgcagtcatcatcat

SEQ ID NO: 31388 - DNA, 569 bp, Glycine max
  Clone ID: jC-gmst02400072e11d1
cgagcaaatataacactttcaatcacattgatgatgtccactcaaaatccccattacagcttccattatgaagcagctttggctctctaaaactttaaagcaaaaaggtgtttgggggaagggggaattatgatctcacatacaaggggaaaaaaacccttcaagataactgcactcgcaatctttctctacatcaagggaaaaaacagacaaattgggtaacaatcaactaataaaactctatgggctataataaaaattgctgaaggaagcttattgtttactgaattacaaagtactcaagcctccattaccacataaagatagagactgaattcctcaacagccaccttatacttctcaattcattttagaaaattgaaaacctcaaggtattacttgccgcaaacaagttgtactcctcaatgacagtagcctcttttttattgcattcatgatcatcgtcaacttgatctactgaactctttaagttaaaatctccaacattgtcgccatttgaagatgcagttgccgatttatgaccagttgaaggtctacagggccaccaa

SEQ ID NO: 31389 - DNA, 568 bp, Glycine max
  Clone ID: jC-gmst02400072e12d1
ggagaagataaaaatgaatatcgccattaataataaaaaaaagcatcattaggtgtatgatacatagatagggtaagtaagcaaaaaaagagttgcaggcagagcttgtaatgtatgaaggaattcaatccaaagcattgggcccagcacaagccttcaaaacggggctccaaatccactgcactagaaacttccgtccattcctaccgttaagattaaaggttctcccttcaccatctttcataacggaaccaatataaccgtcgccaccacccgttccgtacaacccctggcacaaatctccgatctcggttggcgcggtggggtcctcgccggcgtaccacgcgttcaccagcgggttcgacgagagctccgccagcttgtgcccgatcacgcttaccatgccgttcacttcgacgtctccgttcggcggcgtgaggtggccggggccgtcgacgcccatgtagccgggaacagcgaaaggataagcgcaaacctcgggacactggtttcctgagttccccaccaaggcgttagggaacgtggtacccaccttggatggaaggtg

SEQ ID NO: 31390 - DNA, 496 bp, Glycine max
  Clone ID: jC-gmst02400072f02d1
aataaaatatacaaatatttacataaataaaaaggctaagttgtttcttttgccccctcaaatatgagacaagaatcagtttaatcccataacatattaaagtcttaatcatgacgggtgcacagacgatgacggtctattactttcccttctttttcttttttctcttggctggaaattgtggccaaaatacagttcttttttccttctgtctacttgaatggcgtaagctgggatcaaatcaatttgaaaatgttttgtgggatacaaaataaatttacaaccacacacacaaactgaaacaagaaaagaaaatcatgggactgaaacgaaactggccccaaactaatgaggataaaaaagagaactttagcccagataaatagaagaagcttcaagatttgcaaagccagtcttggatggcaagtcgaagtgcgtaattgggagtaagaaacaggtgacttaatttcaaattagtcatgggagaagtatcatg

SEQ ID NO: 31391 - DNA, 325 bp, Glycine max
  Clone ID: jC-gmst02400072f04d1
ccaaaatattaatcaaataataataataaaaaaaagtgcctctgatgtgtgacttaatttactagaccacagaaaatatacagatcaaacaacatcaatatggggacatctggcatcatgttatttacagcaacataggagagggccagattaatagatcttatagcatggttgatccattgtagactacaatagcttcacgaaggcacctaatcaatgctttcaaagaccataatagtaaccaccaacgcttatgtgagctttgctcataggaacacctcttgctgcggaaattgcataattcaatttgggcgcatgctgcacc

SEQ ID NO: 31392 - DNA, 393 bp, Glycine max
  unsure (1)..(393): unsure at all n locations
  Clone ID: jC-gmst02400072f07d1
gaataaactgttttttatgaatacacaaggacaaggaattaaatgtgtgagaacatagccacacaattcaataccattcatgtggtaaaattcaccattttgacttaaatctgtagtaaaggaaaaagtgagacgccacgctacttccagtgtggatttgcaataccctataaaatgtatcttgtacgtacaaaaatctcctgagacagccctttataaggcgtacttaaacaaaagctttcactatgaatggactttacaattctgccgcttgttaccacagtgtcattggctggaacgagcataccaatgatacaaattgttcaatcaatgcccaaaccttgaataanggttcaatttccacctgagccaatcattaatgaacaccgccca

SEQ ID NO: 31393 - DNA, 64 bp, Glycine max
  Clone ID: jC-gmst02400072f11d1
ggggtcgtgggttcctgctggctgtgatctacatgaagcacttggaccagctttttagaaagtg

SEQ ID NO: 31394 - DNA, 448 bp, Glycine max
  Clone ID: jC-gmst02400072g06d1
gcatagaaattagaatttccaccatttatataaattcaatgatacaaggaaaaatatgaataaccggaatttcctcttcactatagaaaatagacatatatgaagtaacttttgtgaacatcctttagtaacaaacaattggatagtggaaacctacttccactttgttattgtttccccggccaaatatgcaagcaatgatcatagtgaggaaaaatagttaatcttgtttttatatacaaccacaggtttataggaccttaatgccattgtttttcacaagctgagagtgggtgtcaagaagagtttccaatgatcttcttgatctcctgttccgtgccctgccggattctttcaacaactcttacaacctacgtttctcatcatccacatcaggatttgctgttcctagcttctcttgtctcatgccaactacatattccaaaat

SEQ ID NO: 31395 - DNA, 56 bp, Glycine max
  Clone ID: jC-gmst02400072g08d1
cgccctttttttttattttttatattatttttttcttttttgttttatcatccttt

SEQ ID NO: 31396 - DNA, 574 bp, Glycine max
  Clone ID: jC-gmst02400072g11d1
atcaaatgatgaattatatgattcaaattgcgaattgtatgaataaaacataattacgactcaaatttccctgcctatttcatatacaaaaacaaaagttccctttactgcaagagagattgtcgttcctataaatatcactagtacatttttggaagttcttctactcaggagtcatcttcccctacgctcatgaaatgaaggaaagaaacagagtatgatagaaaccaacttataggtggccagctctagtaaaaaaaataaaaatccttataggtgacaagctgaatttttttatttgctgtacgacgttgcatgcctatagtaatagctgctagtaaaccttcaaccgcacaccttgccacccgtgctcataagctaatgaaactatattgatcgatggacatcaagtctataatcagaagcaacttttcaacagacatctctatgaatcacttcgcttccagtagatattaaaaaatcttaggatgcaaaccttctaacaattgatgactcctaagaattacgtttgtcgtctgctcacaagaatgcactggaatcaactcaaacaccg

SEQ ID NO: 31397 - DNA, 399 bp, Glycine max
  Clone ID: jC-gmst02400072g12d1
gaagaaaagatcgataaataaataatgatgatagtaataatattaataatggtagtctgagtctgagagagtgaagctatcgaaatgaaaccctaaaggacatgatctccgagaaggcactatgaacatgatttcccaccactcactaatgagaataataaataataaaaacaaaatgttcagtgtctctaaagaaagtctcgtgctcaatatttatactactaaataacaataatcataaaataaaaccctaacccatacacaactaccggatctacatcatcaaggcgaccgcagcggccaaggcgacggcggtgacagattcggaggcggagactctgcagaggtgggcgtggctgctggggctgacggcgggggagtcggcgggtccgtcgctga

SEQ ID NO: 31398 - DNA, 518 bp, Glycine max
  Clone ID: jC-gmst02400072h01d1
cacataagttgctatatatagaaatacaaaactgcaagcaagaatatcaccggaaaaaacaaacggaacatagtcatcatctgtttcaaattaatcacatcttctcaactaatttgtctcaaaagacaagtatcctgtaaaagaaattaacaaacttaaatagaaggacgtgaaatgcctgatacatgttggttaaagagaaaataactcaataataggattgcaagtacttgggcaaacatgctataatggccctcctactctgatgactaatatgcccttcttatcaatatcactaacgaaattgtattaccttcacaagtcttaatctaccagaaaagtgatgctataattttaccaaggaacttggtgcaaagcttggtacaatcttcatcacaaaagctgaaggtagagtaagttggtagccagaccaagaatatcagaaccagggaaaacaagaagtggatagagttaaagccaatgactgattcttggaatcatacctttagtatagtttg

SEQ ID NO: 31399 - DNA, 475 bp, Glycine max
  Clone ID: jC-gmst02400072h02d1
aatcaaataaaaaaaatccttataaacttataacagccaaacaggattggattgcagtacaaggaaacacaaaacatatggcctcgtactttcccaaaatttatactcatttatgccaactactatgggaaagtgaaaaatggcaaccaaaaaattgttccaaaaaaaaaattattagtaataaaattgaaccaaattgaatgcctcaatccttgaaatctctctcttatgccacagctggcatgtccttgagccatggatccagtggcttcccaattgagtacacaatgaaaccaatatcacgtagcttctccacatccacaatgttccttccatcaaaaacaaatgctggttttctcatgttgtcatacaccttctgataatcaagagtcttgaactcatcccactcagtgagaatgcagacaccatctgcattcttttgttgcctcgtatgcatcccaaaccacactaactt

SEQ ID NO: 31400 - DNA, 421 bp, Glycine max
  Clone ID: jC-gmst02400072h06d1
aattaagcgttgcttctgaaggatccaagagctttgattgcagaacctgtaaaaatgtattgatggtagattgcacccaccgcatctccaacaaacggcccaacccagtaaattcattggtcgttccaggctttgtcgttgttgaagatcacagctggtcccaaactccttgcagggttaatgccggttccagtgacagggattgtacccaagtgaaccatgaatacggcttacccaatgggaagtggtgctaacacaggaacatgagagtccctagcgttcctcttaagatcagtggcggaaaaaaccgtgtatacaagaacaatggttccaatgatctcaacacccaaagcggtacctttgttgatgccatctgtgacagtgtttaccccacctccgtacctgttggagaacgattttt

SEQ ID NO: 31401 - DNA, 238 bp, Glycine max
  Clone ID: jC-gmst02400072h08d1
atcgtccaattcttgtactatataccattctttaaataattcattcttttcactcaatacaataaatacatacaaatgccaacaaaggtttctattattacatttgaggaagaaaaaatcagggaaagagagtactatttaacaaaaactttaactataacagcagaatggcaaaaaattacaaaggaggctgaatgcatgttgctggcctcaacacttctgaagcacatttgtacac

SEQ ID NO: 31402 - DNA, 518 bp, Glycine max
  Clone ID: jC-gmst02400073a01d1
agaaataaataaacaacttgagattccatttttgacctctctacgagtctatgacaactaaaatataacaataataataaagataaaaataaaacaaatttacaaggcagccattgtccttacttcttggttcttcccactacactttccaaaaattatatatatatattttttaaaaaagtcctccacttccaaatttattattatttttttattggaccttctttctcattctctacgttgactcgaacaccaaccccaccaccccggctgcgttctcctgcatcgcagcctgaaccgcgtgcctgtgctccccctcgtacgtcactatcagcattgcaggatcgtctggtgcgcgctccacgtgcttcctcgctgggcaccctctaatcgtgctgcacttgtagtaaccccttgggtatggggaacccttgatcggtttctgaccgtacttactgcacgagtactcgtccggtggaatatcggcgacttttgaactaatcgccggcactcttaca

SEQ ID NO: 31403 - DNA, 429 bp, Glycine max
  Clone ID: jC-gmst02400073a03d1
agactccagcatcctcattaaaaactcattttttgaattcagggagaggaattcaattaaaaccaaagcaggtacactctgtaagtggatgtgtaagacgaacaactggacagacacacatagtagtacaatgtaaatcatcaaacaataggtccaaccaccaggaatattaaaggtacaattcaagtaagatcatcctcctcaagttctttggctttcagcttttccttcacccttaagagaagtgtggtcttccaagaatccagaggggtcatactatcaaattccttgacaacatcagtaaactttgcaacatcttcttcatcaattgcagcagcaatgtccgccaacaatctatattcacgtgttcctgaaaatgttggatccagttcctgatatcgttctaatgcattggttatagcaacaacg

SEQ ID NO: 31404 - DNA, 512 bp, Glycine max
  Clone ID: jC-gmst02400073a05d1
aacaatgacaatcacacttttcaatcatttaaaacacacacatggccaggtcatttcatttcaaagatcaagaatgagttacacttgccaatgagtggccacatagtttccaaaaaccaaactgttattattgtgaatacaccgtgctcttggattgcagtatttgaacaagcggccacaagatatccaatctgtgtacatttttgttgttttgaccctcgacgacaaagcatatccatatcttttcaccatgagcttttgttgcaccctttaaaatggtaaggcccaaacttcttatggcttctgctatttcaagaaaatggctgcattcctcacagagcatctacaccagaaggcataattagttagtatagaaacaaactcaataaccgattgtatcgacaacaatagcaatttcttagaccttcaccaagtgccactaagctccatttctcatcaggagttttctcatgtgttataatttttaattaatcactaatatagaataaatc

SEQ ID NO: 31405 - DNA, 563 bp, Glycine max
  unsure (1)..(563): unsure at all n locations
  Clone ID: jC-gmst02400073a07d1
cagtaaaccttatccacttaggatgttccgcagccaagtggcgggcaagtcctatattatagccatcgttctctcaatcgtcattaccaaacgggactcacagaagataataattaataataattgagcagaactgagcgcgctcaaacaaagcacgctttccgtttccgcagcatcaaaatgtatcttaaggaaatctaagcagtcatcaataaagctcctaacaagagccagctaataaaaacacaatcacttggaaaaaagatcaggctcccccattaatcaagacaaatagcgacttgtctcccaacctttcccgcccctttaactctggcaattcaatcacacaagcacactccacaacatgcaccccaacacgttctagaagcttaattgcagcacctaacgttcccccagtggcaataagatcatctatgattagggctcgttctccaggntgtacaacccctacatgcatctccattttgtctggtccatactccaaagaatactcttctgagataaccctcccaggcaatttattggggtttcctcatggggac

SEQ ID NO: 31406 - DNA, 436 bp, Glycine max
  Clone ID: jC-gmst02400073a08d1
aatataaatattgtgtcatctttttttgttcattcgggatgggtaatataggcaacaaaactagcagaatctacagcttccaagagaagcatttgaacatgggaaagtgctccgaaactaaaacatgttgagaccaacacacttcacgtttagctaaaatatcaacatttttttacctttagtatggtagaagttaagcagccaatcttcattcttgaaagcccctatatattataggtgcatacggattgctacctgttttaggccttccttggtagcagagaccaacttctttccctcaaattccttaagctgaccaacagcatactcatcaattgcatcaaccatgttgagaacctcataccccttcttcctaagcttttcaaggaagggggaattctcgacaactttcttgctttcaccagtaatgtagtag

SEQ ID NO: 31407 - DNA, 536 bp, Glycine max
  unsure (1)..(536): unsure at all n locations
  Clone ID: jC-gmst02400073a09d1
ggaacaaagaatttgatttattattaaggccccttaatacacagatacattatcaactataaaatanatacttaaaaaaaaggacagaagtcagtaaagaatctaagacataaaccattgcatattttacatagaccattcaaatccaactcagaaagtgaccattctcttcatctcttaaaaccttcaacgtttacattcagcaggaagaccttgtgggaatcgcttgagatcactgcagtagttatagatcatgaagtacttctgaacccatctcagtcttcttctgctataagcatcaagctcatttgcctcatattcagccccagaatttgaaatggaagacttggatgagaactcaatggccttgaaattgcggtagtatgctgtaaagggtgctttggaccaatcagttttcaccaatccttctctggtggcccagtcatcaacattccagaggctaaaatagattctcatgggctggtttctttgaaaaggaacaccaagagggttagcattcttgaatacccttatgg

SEQ ID NO: 31408 - DNA, 547 bp, Glycine max
  Clone ID: jC-gmst02400073a10d1
gttggagtgacatggaaactgtcatctttatggtattgtaaagggatcacaatcaattagctatatccatatgtacaaggaaattaaaattaaaaaaaatcattattccatagttttggcagcagaatgctagctaaatcactagcctatgaggaaattaacaggcttctgattgctagcatacacttccttagattcagacagaaactgtgattttaaagctaaaagcaaaaaacaaaagaaattgagtatgtgaccacaaggaactgtcaaatttatagagttctccaatcaccacatctcatggtaaaagcaacaaacaagctaaatgtaatatctttgcatggggaaacacaatgttttccatgcccccttgactttttctttcattcaattcacatgctgcctaattgtcataaaagcgggaacggcatctatgggatctgcgataaccactgctaccccttgaagagccactagtactaacaatctcatcatcgatcctttttatcctataatctgcatactccatagatactacagaacc

SEQ ID NO: 31409 - DNA, 474 bp, Glycine max
  Clone ID: jC-gmst02400073a11d1
gagaaaccttaaattgaagcaaaactgagatgtgggtctgggaagaaaagggaactcaacaacatttatgtcttaccccgaccatattcccccaaaatatcaaacgcgggaaaaataaagcacaaggaggaacaggcttcaagggatacatgaccgtatgaagaacaacctaaatttacacttttaaggcataaaattaaatgaaccttctaatccaggaaatccaattaccatagttcctttcctgcttaagttcaaataagagaacccaaaattgaaaataggacagagatatgtcaaaagggttctgggaaggcctcacttggcactcaaggttgggaaatgcccgggatcttcaatggatggagcaggtgcattgttggtggcactttcatggtaacccgctccgcctcgtgaaccacggccacggcccctaccacgttctgggttatagtatgccttccccctcagcag

SEQ ID NO: 31410 - DNA, 348 bp, Glycine max
  Clone ID: jC-gmst02400073a12d1
aaggcatatttaaaccccttttttgctaaacaaaaaaaaaccccaaagggaagttctttataaccctttttcactacacaaccagaagggtttaggacttaataggcgtactacctttggcactggacatatgccccctcacaaaataaaaaattctcccaccaaaagggatttaaggggcttaagggggaaccccccggatttttggggggggggggggaaaattccaaaaaattttttttttttccaaagaagtttggaaaccctcccacatcatgtaggggaacggcctggaaaatttctttaaaggcccttttttggaaatttcagggttaaggcccccgtgtt

SEQ ID NO: 31411 - DNA, 498 bp, Glycine max
  Clone ID: jC-gmst02400073b01d1
cttcgaaatcatcactcttataaccagaatgtttgttgcttgccaaaaaaaatctaatttggcatattacaagagacttcacgaatcatgcaagttcagacgtacataccaggtggcaaaagaaaagatattttacacacaaaagacacattaaattcagcaaatccttctgctgtttccatccccgccatacacaaaggttgatgaaactggagtgggttttatctgttgatcgtgtaggaagcattgattggaagagacattttttcttctcagtgttggtctccttcacgtaccattcgttggagaagatgagtcatttttcttctccccgttggcaacctcagcatgattatcctcatcacttccatcctccagagaagccttttgttgcagctctttgaccttgcggaattcattatagtgggcctttctgtgctctttgaaactcaaacttctatcttcctcatcctcttaagtttcttctgcctcatcctc

SEQ ID NO: 31412 - DNA, 539 bp, Glycine max
  Clone ID: jC-gmst02400073b02d1
aaaaaggatcttgggattcgaaattagagtccgctgtaaaaacagcttcagtacaataaaaatttcataagacatatagtaactactatatcttggattgctccaggttacatacggaagtggtccataattacattataaatgcgttatgcataagtccgtgaacttggatcatctattgaatataggtatttacattattatgtatgattatgattatcattattattatgcttggattctccatggaattacacaatacaacatcttaccaccaggcccttttgatcaaccctggcttcttcattgccttcaggaggctgagttagcttcctattttgaggagacatcatgtctctcttcaattgaatcaaaacgtcttccattgtatgcttacgtttccaattagctagcttaggaaacaaatgtggcttaaccgttccagtttcttgattgacacatgtcatgggaatccttgtttgaaatctaacagatgggggattggctggataattccttgccacaaaacaatttcaact

SEQ ID NO: 31413 - DNA, 473 bp, Glycine max
  Clone ID: jC-gmst02400073b03d1
ggggttggggtttttttttttttttttttttttttctttttttttttaaaaaaaatttttttgggaaaaaaaaaaacccccccccccctttttttttccaaacactttaaccgggatagacccccccccaaaaaaaaaaaaatggggaaaaaaacttaattccaaagggggttttgggggcaaaatcaccccccccaaaaaccctggttttggccccacacattggaaaacccttttttaaaaaaaaaaaggggatttccccaaataaatttcaaaagttaacaccaaacccccttttttttcttttttaaaccccaatcaaagctttctcttttaaaaaactaaaattaaaaaagggtcggaaaccccctttataaaacaaaaaaaaacccccaggatccccccctttgggaaaaattcccgccaaaaaaggggggaaccaaaaaccccctttgccccaaatccgatatttt

SEQ ID NO: 31414 - DNA, 382 bp, Glycine max
  Clone ID: jC-gmst02400073b05d1
ggaagggaaaaagggggatcgttaaattgaattgatgggggggaaaaccccaatttaaagatttccaatcatacccaattttgccccaacacaaaagaattttaaaaaaaaaagactttctttttttactttttttacccaaaacctaagcaaaatttaaaaacaaacgacccttttttttaaactctttaaatccaaaagctgatcacaatcaaaatcaagggcgttatttatgaaagctccataagacttcaaacgaccaaaagccgggttctccattgatgttctcttcaaacatgaatttactcttcaatagcagggggcacagactcagccaatttgcggtacttgagagcataaaacatcttgaggtaacgtttgc

SEQ ID NO: 31415 - DNA, 483 bp, Glycine max
  Clone ID: jC-gmst02400073b06d1
ggtaaagcaaccattatccatttcacctctgcatttcagagttctggaagagttacatcactaataaaaatatacacaccaccctaaccttttagaaggtcccactgcccactacaaaaaaccaagccctaccataaaagcgcttccatcacgttccactaacccccaccaattgacacataaaggaagagcatatcaagtgaacttcgacaatttctttccctttacatgaaatttatcaagatgggggttttgcttgtgttttgaagggcattgacatcaaaccctgtctagacaaaagttgaaagaacgacaaaaaggagaagactatggcatcctactttgaatgcaactcgatgcgaaccaatgactaagattaagggggtttgaaacagacaaatttcgtgtgggtcctagacgtgtgttaggtgagcccttgatgggaccactggatggtgcatctgtgccagaggtctgtctatg

SEQ ID NO: 31416 - DNA, 395 bp, Glycine max
  Clone ID: jC-gmst02400073b07d1
ccccaagggaaaaaaaaaccctccccttttttattacaaaaattttcccgtatccaaagggcaatccatcaaacgggtttggacccctttataaaccttttaaatgtttaaaaaaccctttttttgccagggggataaaggcccaaaattgggaccaaaaaacaaaagtccagttttggtataacagggggggccgggaccttccaaggaaagtttaaaaggcaaggaccgaccccaaaagccccttttctttaaagtctaaaggggcccaaaaaacccggaggcaggggggaaaaccctgggcattcaatttttacaaaagtttttttgcgccaaaaacaaatttttaccgggttaaaacattccgggaaagggaatccccccatttggggggg

SEQ ID NO: 31417 - DNA, 369 bp, Glycine max
  Clone ID: jC-gmst02400073b08d1
ggggtcacaaataccataaattcaaaataaaaacctttatcagcctatttaaaccggttcaagattaaaattgtcacatttgcctaaaacattttacaaggacaaaattttgcaaaaaacagtaacctgggttttaggagagaattcattttcaatttttgaataccatgaaaaccaaggggaacaatttgcctgttaaaaaaattgatgctgctggggcttgggctgataaaaatccctaaaaagggccccctttatttgcccttggcacctcacatttttttatttttgaataggggctggggtatttggacaggatcataaatggtttttggttaggcatccctactaataaggagttcctactta

SEQ ID NO: 31418 - DNA, 474 bp, Glycine max
  Clone ID: jC-gmst02400073b10d1
cgaagaggtaatttatttaattcattaacgcaataatggtgagggtaattgataagtttaaagaagaaatgcctacatgcatccccacggggataaagttttctcatatcctggcttccttactataaaggtcaaaaggttcctgttccagaaagactgatccagatgtaacaaaggatagtcttttttttttttctaaaccgaagttgtcaagaaaaagttgacatcatctcatgcataaagggttcccaccaatctgtgcaaatctggataatcatgtgagaaaagcaagaagccacagaatccaggttttaaatttcatactgagctcgatcaccatagtttatttttgatccagaaaagtacgaagacaactccaaaaacaatagcaacaggggcccacttccgaatcagagcctgccggtttaaatctctagccttatcagcatatatgcgagattctgatgataagcg

SEQ ID NO: 31419 - DNA, 510 bp, Glycine max
  Clone ID: jC-gmst02400073b11d1
cagtcatgaatttaaaatcttcctttcttctttgtcaaattcagggtgcattcaccaaactaattgaatcatgaatccaaaaaaaaaaaaatgaatccacaaatatttcttttgtacatagtcaaatcaatctacaaaatattcttatgaacatgtgggtcaagcacgcgaagagcgaaataatcgcttgatgatggcaactttggggagggaattcctgttgttgatgtgagtaattttccgagtggtaactttccctattgatggtaatctgaaagtaagtgttactttcttttccaaaacgttaatcaccacagactctgtctctacattcatttttgcaataatgtcagtaaccctcttctggcacttctcacattgcatgtctgcagagagaacaacctcctgaacctgaggcatggacaagaactccatagaagctagactagtcccactcccaccaagaggaaaaccctttgatttttttacaccaacaaccactccttgaag

SEQ ID NO: 31420 - DNA, 493 bp, Glycine max
  Clone ID: jC-gmst02400073b12d1
gagacaaacaaggataaatcccccttgagatcaattaatcaatagctggtcgaagattacaaatcacagacatacaaaggcatgtagccctccctgtgatccccggccaatattttgaataaaccaacaacacattacacaacttatggttgagaaccaatatttttaacaagttaaccaacaacatattacgcacggcaatttaaagcaaacataatggctgataattaaccaaggggccacatgcaacacaccacacacatcacaactttatttagcgtgaaccacttagggatcattttaacgagcctcaacaagatgagcctccacgttcttggggagtttaaccaccaaatctttgtacttggttggctcaggggcagtgtgatccaccttttcatacaagaaagtccacttcacaaggctgtgctcatcaccttttggtaaaacatgaacgataaccttgtagctcttatagtacttcaacatgaca

SEQ ID NO: 31421 - DNA, 355 bp, Glycine max
  Clone ID: jC-gmst02400073c01d1
aatccaaacaattggaactgacttccatacaagctaaatcaacataagcataacacaaaatgagacaatgatggagaaaaggacctggttacagtcgtttttcgttactggacaagtctgttttattcagagcagagtcacaagcaagttcaaggggaaacttagtttaacttgagtacatgcatgatacaaaatgagctttctataaacatactagaattatgattgcagctttttttaacaggactagcaaaattatgcttatttgcaaacccgtgaggtccataagcttatcaataaccttccgatatcttttccttttcctataaggtctagcaaaaaattgtcccagact

SEQ ID NO: 31422 - DNA, 451 bp, Glycine max
  Clone ID: jC-gmst02400073c02d1
attgggaattctagacaattcatatagtacataaatatcagatcatttggcaaagctgagatctgatgtcttagcacatacatgacactcatccgtcggcataattcaccacagcatttgaagaaaatgattcctaaatatgcaccagatagaaatatgaacggagccactgactgggtctaaccgcacttaaagaaccataacagaaatcatgaaattttgacatcagatgagataggcagcagtatcttgcgccacatattatggtagttatggaaccgactgagatctacacattaagcagatatggaccggttatagtcagctgtgcaaccatcatccgagggtgacatgcctcaagcttcggccttgagtatatgtcgcagaagtagcagctatcaatgcctccactaattaactaccatgaagtggtaacagcaatgaatgtaca

SEQ ID NO: 31423 - DNA, 415 bp, Glycine max
  Clone ID: jC-gmst02400073c04d1
gaaaaaagcaagtaacattaagggggatggggatacacaagataattcacattatctgaagtacattgcaataacatatacttcaccaaacacaaatttaaaaactctcaaaagtccacaagtcatccttttctttcatgctcacttgccggggaccaaattggtggcgtaggcccaagcattgttgttgactgggtccccaaggggatcagcaaggttctccaatggacccttaccggtgacaatggcctgaacaaagaacccaaacatagagaacatggccaatctcccgttcttgagttccttcaccttaagctcaacaaaagcctctgggtcatcaacaaggcccaatgggtcaaagctgccaccagggtagattgggtcagtgacctcaccgaggggcccaccagcaata

SEQ ID NO: 31424 - DNA, 535 bp, Glycine max
  Clone ID: jC-gmst02400073c05d1
ggaacaaagaatatgatttattattaaggccccttaatacacaggtacattagcaactataaaatagatacttaaaaaaaaggacagaagtcagtaaagaatctaagacataaacatagcatattttacatagaccattcaaatccaactcagaaagtgaccattctcttcatctcttagaaccttcaacgtttacattcagcaggaagaccttgtgggaatcgcttgagatcactgcagtagttatagatcatgaagtacttctgaacccatctcagtcttcttctgctataagcatcaagctcatttgcctcatattcagccccagaatttgaaatggaagacttggatgagaactcaatggccttgaaattgcggtagtatgctgtaaagggtgctttggaccaatcagttttcaccaatcctcctctggtggcccagtcatcagcattccagaggctagaatagattctcatgggctggttctttggaaaaggaacaccaagaggttcagcattcttgaatacccttatgg

SEQ ID NO: 31425 - DNA, 487 bp, Glycine max
  Clone ID: jC-gmst02400073c06d1
gataacatcgaaaaaaactttgatcaaattaataactggggcaaaagaaaccatcaaattcctttgagaaaaaggaacaatagcaaacctagctcattaatatacatacacgattaaataaacgacacagatcgatgtttatggccaaagccaaaattaaccacggtaagtagacagtcaacgatttgattccacagctacaacaaaatagcaagtgttaacaaaattacggaattaaaaaccgaaaccaaagcgatcggatgcggatcagaactacaaatccaaaagaggatcgtaagatcaaacggtgccgccagatttggagcggtagagtttgccgaacacgtggagcgcggtgacgaagccgatgaagcagaggctcatcaccagcaccaccgtcggcgaaatcttcagccccggagcatcgtccgtgtagaacctcagcatgttgctggtgccgcctacgacgccggtgctggcggagctg

SEQ ID NO: 31426 - DNA, 444 bp, Glycine max
  Clone ID: jC-gmst02400073c08d1
agaaggaaatatcatttggtataaccaatcgggttggtcagcaccagcatttaataaaatttacagtagttaatagtttgtttttaaggtgcaagaatcacttggaagtacaaaatcgagaagaaaatgctactattacaaaatacagagagacatcacggatgagtttcacatctcccagcatcaaaacccaacaagaatttgtctcttcaacccagtctccttagcatccccgttgtactaatgtgcagatcccaagaataagatgacatcatttgaaaccaaggaaaacactatgtcatagtaaaaaataaacgaaacaacctatagatatgacacaaagaaaaaagtgaaaaggggtatcagtaaggagtgtgataatacccggttggaggtcccattccattaactgggggcattccataaggcatcatgggcatagga

SEQ ID NO: 31427 - DNA, 332 bp, Glycine max
  Clone ID: jC-gmst02400073c09d1
acgggaagggaaatttttatattattgtaaccaccaaaaaaaacaacaaagccccactagttgacgcctcccaactttgttaaacaaacaataccttcaaaacattcactgaatttcacacacacacagctgaacacaccacgtttaaacaaaagaaatgggctcccttaaaaaaccatgattcaccaaaatgaacccctggtgaacatttccgaatttcaaccttccactaaaagcccccccggccaaacaagccccacccaaattggaatcaccaaaaatgtatgtatcacccggaagcgcaaaaaccccacccttgaaatggaaaacac

SEQ ID NO: 31428 - DNA, 456 bp, Glycine max
  Clone ID: jC-gmst02400073c12d1
gggcactctaaaacatcaggatttcggaatttatatagctctttaaccataattccctggatacaacatgtatactagggtatacaccatattcaaagatagctaataaatacttgactgggtaattaatatcacacaaacgtaaaggggcaatatatagggcaaatatttataagcttaatttattcacagaaaccatgagtttaaagcatctttatacaaaatattccacaagaatttactttattaccacatcattataggaaaaggtcatgataaaggggggaaattctattgaatgcttgggtcaagatgtttttataggatcaaagggggtatataaattaaaccattttttttaatcaatatatatatattggtcacacattttatatatatatataaaaggggcttaacaagttggataggcaataccacaagaactaacggtttttt

SEQ ID NO: 31429 - DNA, 493 bp, Glycine max
  Clone ID: jC-gmst02400073d02d1
actacaatatatggttttgttgtatcatcaaatgaatacattgcaatcagacccaactttcctcttttaagactatgtacacagataactcttctaattaaggcaaaccactcaatagcagtaagaaaataaaagcatgcacacaagtgcaattaactcttatcattgggacatcaacatggcctctccacagagtcttattagcattccaccccacattgtttgagcactggaccagtttgcttgggcaagaagggatcaatcctgacccaaatcaatgagaaaatagatgctagaaggattgaccacaacactacaatggtaggagtcctgttttgctttcccatgagacctttgaggaaagggtacaagtgaccaatgacccagaaggcaaagaacagcttcccaaacaaaggtccccatgaaccatatccattgatgatggcatcagagacttcggccacgaatccaacgatgttcaagattatgagag

SEQ ID NO: 31430 - DNA, 537 bp, Glycine max
  Clone ID: jC-gmst02400073d03d1
gaaaaacagcattatattatcaagacacgttttattaaaacaggggacgggatcattaccaaccaaaaaccaaaatacattagaacaacacaacacaaaactcactgacgcgtacatgctatactagtccagcaaccatgcacccctcacaccaagtttttagcaagtatagtagttgaacaacacatggggccaacaagacccttaattggaaataaaggacataacacaagcaagcaaacataagtaacggagaatgtaggacaaattattcttcctcggtttctgattctgcattctgaagccaatcaatgaaagggtgagcattcttccaaatcctagagttcttgttatcacccttcagtcccttttgataccactgcactatggtgttcttcctctaacacatcagcatcgtagagtgcctttagaaccagggcaacctccttcaaagcatttgaagtagacttgcaagaaaacttttcaatagcatgaagcaacaacggctggggatcccttttccggcacagcaacaga

SEQ ID NO: 31431 - DNA, 446 bp, Glycine max
  Clone ID: jC-gmst02400073d05d1
gggaaaaacaagtggggatagagattaatgtttttaagcacgggataatgtacaagatgagcaacatcgttgaagctgaagggttcttcctagtccatgaagcaacaagatactgcactggctgcttctaaaatttatagcacatgaacaaaaggggattttcaagttaaattacatttggttatgaaacactatttgacgcctgggcacttttgcaagcgtttgggcttacaccaggcaatgggaaccacatacaagaatatggtccctgcagggctacccccaacagtccaaaggaattgggtcatcccaactttttgggcattaaatagctcaatgggaatattcatgccaaaaataccggccacaacaacaaaggcactcactaccagagttggcgtgggcaacatgactcccatttggaggagatgggtctgtttgtcatc

SEQ ID NO: 31432 - DNA, 487 bp, Glycine max
  Clone ID: jC-gmst02400073d06d1
gcacaacaaaattaccccatacgggtaatcacagggatctcaaaaatgggacgtctcatgaaaattctatagtagagatttctgatatttttaggccacaacagaccatactccatttagaggtaactctagttcactggctttaattcatcctcttgccgctgatgcacgtatagagaacctctttgtataatgcataaatagaagggaaagcactctccagcaccagactcaattattgtgtgaagcatccaattatgatgctcctacaaacttgttcaaggctgatgtgtctaaacctgcaaagtccttcacagctgcaagcacagcaagtccaagcttcacagcatcatcattactaggtgcctcaatgttaaggggaagtacaggatcatggagtgataatctaagaagaaaccatccaccatagccagaaactcggaccccttcttagttcacaggagccttgtgcagacttggatcagag

SEQ ID NO: 31433 - DNA, 516 bp, Glycine max
  Clone ID: jC-gmst02400073d07d1
gaaagcacaacatgaagtagtaatatatataaccactgtcaaggactattcttggattttcaatcatacagaaagaaaatgacaaaatattccaaactcaaactccttacttatttcataaacgctgccataggtttaatttcataatagaagaaaggtggtagctagtggtagtgggttaaaaaccatgaatcttgatctggtccttcctaacaaggcgagcatgaatgaggaagtgagaaacgttcttgcgctgatcaccctggagttggataatcttgccaagctccttgtcatgcacaacattgccattgcagcagaactctttcttgaggtctttgaggatcttctcgtagctgaactctttcttcagcccttgcactgtggtcagactcttcttcccattcctctgttgtatgcggatatgcacatactcttttgccccgggagcatctgtttcttttgcctccgcaaatgggtcgaaagtgctcgtagggatctgataaatacccactt

SEQ ID NO: 31434 - DNA, 438 bp, Glycine max
  Clone ID: jC-gmst02400073d08d1
gacagaaaaatttattgtcatgctataattcaataaagcctcgggggtaacagtttctaataataaaacttctgaacagaattcgcatcgtcctaaatatttgatttttttttcttcaggtcctaaaacataattctcctaacaaggaacaaaccatagcagtcatcatggatgaaaaaaaaaagtaaatatttcgatatgttaaactgactttcagagatcttccacttaggaaatgaaaaattcactttttgaaaaaggaaatgataatgaaagttcttcaaaaggaaaagatgagcaaacgttggaaatgaaggtatccagatagcaattcatagggtgaaaaaaaacaattatcagaaatcatcgtcatcctcctctgcaatatgcttagccagctcttgctcttgctgttgtctctctcttttcttttcagca

SEQ ID NO: 31435 - DNA, 543 bp, Glycine max
  Clone ID: jC-gmst02400073d09d1
agccacagaaaatactctcccttggtgattttaatgtcagggaggtgaagaagcatcaaataaaattccagaagtcaaaattttggttattgtttaacataaatatgtaattctaacagaaaaatctgccaaaaaaacaatactccattaaaccaagcagcagcatctcaggcttctgagattggatactcaaatactacatcttttccagtaagcttcctgtaaactccagaaaaggtctccagcttgtactcagtgttgttgcgctccttggggtccaagaaaaccttcattatttttgagccatcaattctatatctggcccgtttgccaacaatctctgcaggatacacaacatcctccagcatggcatcatggacagcggtcaaagtgcgggttcggggtcgctgaacagcagagcctttctttggcggtcgcacgatcctccttgtggcaatcaagacaacatccttcccactaaacttcttctccaactctttgacaagtcgaagatgaatcttgcggaatgccttccttaatctg

SEQ ID NO: 31436 - DNA, 439 bp, Glycine max
  Clone ID: jC-gmst02400073d10d1
gaaacaagaaatcttatttagttcgggaatattcaccatatcatggcccttcccagaccacacaacacaattacatttatgaaaaggaaaatgtttcttagtatattcttgcatcaaaagagtctcacaccacacattaaagacagttaaacagccaacaagaggattcaagggttttaaagggccttgatgatcttttcagcactggagatggggaactctcctccactttcaacattcgcaaccttcaccttggggtcttccaccagcaaagcaaacctttttgagcggacgccgagacccttgtcagtgaggtcaagctcaagaccaagggcattggtgtttttggctgcaccatcagcaaggaacttaacatgcttgttctctgggaatgttttggcccatgagttcatcacacatggatcattcccactgatac

SEQ ID NO: 31437 - DNA, 176 bp, Glycine max
  Clone ID: jC-gmst02400073d11d1
gttcaattctactcaattatcaaaatgatcaaaagataatatccaacagaaacataaagataaacccaatgaaaatagtctaaaagaacctcaaacaaaatctggcagtaaaaaaccaacgggtacgtctctactaaaaacgcctgatagacaccaagtatttgtaactcattcat

SEQ ID NO: 31438 - DNA, 479 bp, Glycine max
  Clone ID: jC-gmst02400073e01d1
gaacatactctgattcaatttcctatttctgtcaattaaaggaaaagagagagaaaatacggacaccatatattacagaccaatatctccaatagacgagcattttaacccgaacttgtttttcaaaaaaggatacttgaaccctacaagggacaaggggtgttatattcgtaaacattctcagatctgtgctttaccatcatccaaattgtaaaaaataaaattaaatgtaaagactggtgttccaataatgtcagtttcagcatcatgcaggatagacatcgatcattgttgacgcttggtacggtgcaagagagcgagaagaatttttttccttggacccataggaatcccaagctctttgaggtcattttctcccatctgcttcaatgcagtcatatgcacttgctcagccttaaagagaatggcatattcttgaagtcccatgcatgtaacaggccatccaagtctgggagact

SEQ ID NO: 31439 - DNA, 463 bp, Glycine max
  Clone ID: jC-gmst02400073e03d1
gttggtaaagaaacactttattttattaactcatcaaacgtaaggaaacgaaacatcatgacagtatagcatttataaccattaattacataacctttatttttgtttcccccctcattttttttggtcgttgaattttaaataacaaaaacattggattggacgtgattaaacatgatgataattgaaacaaattgtgaatggccaccatcatttacagaacccaataatgcaacgccgtggacgtaattgtcacataattatgcagccttgtggattctcttcgctgaaatattgatcaccacgggtcacataacagggtctgcctccaccgtaactatcatatacgggccttgcatagtacccgtcgtaacagaacatgggcccaccgtattcgtacccaggcccaacgggcctgccttcgtagcacggaggaggagcatagagcatcccaactggaacc

SEQ ID NO: 31440 - DNA, 496 bp, Glycine max
  Clone ID: jC-gmst02400073e05d1
atatcataaacaagaaaatgtatcatgtttacgtattcaaggggccgggttttctcagaagataagtgtttaaattacacttttcatataagaaacaccaaaaaaatggagaaaataaaaaaaataaaaggccaatgtttgaagcactgatctacttaagcaatctttcaccctcatgcaagttgcaaaatattcacctttgtagttgtatgccctaagaatctcctcattagtcaagtacacacactatccaatttgcaacacggtcgaaatttgaaaacaacgtgcttcaaaaatccgaacccggcaactctatacataataattcaataaaagtaatgatagttgcacatactttactcgcatgctcctcaaaatactgctctccatgtcattaaacaagaccactgcaacttgttctacatgatctagattccacacatattcacacataatatgtgtaactcatttttcaattgataaatctaacaagtca

SEQ ID NO: 31441 - DNA, 318 bp, Glycine max
  Clone ID: jC-gmst02400073e08d1
cttgggccggtgtaattttaatttattttttcctttttcccccacccaaataccaatattacgcccccccaaaaaaaaattaaaagcccttcttacagaaccccaaaaaccaacaaaacggccgccatacaaaaaaaaagaaaacggaaaaaccccccctttccccaaaaaaaaacccttacaaaaaaacccccttcccccaaatggccaaaaaacaaaaaacccccaaccctaaaccctacaaaaaattaacccaccccaaaaggccaaggggacccccccctacccacaaaaaaaacccccccgggggggaggcaa

SEQ ID NO: 31442 - DNA, 477 bp, Glycine max
  Clone ID: jC-gmst02400073e10d1
ggaacacaaattatagggaaggggcaaaccaagccaaaaattgaacactacaaatagaaagttgacatttaataaaccaaagcaacacaacgcaggaaaagtcctgaaactcgctgcgcttaacaaaaatgtaatcaggggttccgacaaacacaacacattaaaacacagattaataaaagcaattttgccaccgtcgatcaaaaacccatttttgggaacaacagttgcgaaatgatggtggagacttcaaactttgtccgaaaaacaagctccctataaaagaagacacaagagtccagaaaagaaaccaacatttattggaaccaacatcccctgatgaaccagcccgcacgatttacttttttttttgggcagccttggtgaccttggctccggtaggatccttcttctcaacgttcttgatgactcccacagcaacagtttgacgcatgttcctaacagcaaacctaccaa

SEQ ID NO: 31443 - DNA, 422 bp, Glycine max
  Clone ID: jC-gmst02400073f01d1
aaaggaccattgatggatatattaattaacttaagaaagccaaaccatgtaattactgagagcacatgcacctgagagcttacttaactagggtccatgatgctaattcttcatacatggatagctctggcaggtatcttattggatggacatgcatgccattaaacggattctcatgagcccgcttaagtatgatccggggtgaccccattaatcttgtgctcaatcctcttatgattcaagaatccatagcccagtctgttgacctaactgaaatcaggacgtttgcgccaatgaccgaaattgaatcgttgtagcaccggattcctggtccagtcacatgtgcctgctggtggcggcgcgggcctgcttacaaactggcctggcccattttgatgggccttgttttaatattcaggcca

SEQ ID NO: 31444 - DNA, 419 bp, Glycine max
  Clone ID: jC-gmst02400073f02d1
aatcaagtaatttcaaaccatttgagtatatattattttatgggcttggcacttaacacagtacacatgcatatatagagcaacacatttcaaggaaacattcttcaaaccatactgatcttccaaaataaactggaagatgattaacttaaagacacacatatatatataagccaaaagcatatatatatataagacaagtagaaggaatatgctcataattggttgcttatgcttcagccaaagagatgcttgtggtgcttctcttccttcttatagtcaacctcatcatcatacccaccaccacttgttttgctgtacccaccatcagtggtagtgtcagggtacacaccaccaccaccagcggcgccatagccaccacttggtttgccgtagccaccatcagtgacgtcagagta

SEQ ID NO: 31445 - DNA, 504 bp, Glycine max
  unsure (1)..(504): unsure at all n locations
  Clone ID: jC-gmst02400073f05d1
ccaatgacaagttaatttattgatttagaagtacagagagaggggagttactattcaatggtaggacgcgacaatatagtagtatgtgtagagaaagaagggaaggacggtccacttgataagaaaggaacacaattccccaaagaacgtgagttctgatttctgctgtgacatttgttggtaggtaatatgtaaataatgttgtaagtgttctttgagcttgaggtctgaacctttgtgagcttcgaactcgactcacctaaacttttttttttatataaaaagaaaagaaaagaaaaagaagtaaagaggacgatacaatgcttcgccttttcaccgtccttatcgacaattgatgacaaaacaaagcccaaaattaccatcacaaattcttcaacttcaacaacagacacatatcgcatagacatagacagaggacacagacacgaaacattacttaggaagaaccttnttgaatgacttatttggaggagtttttggagc

SEQ ID NO: 31446 - DNA, 532 bp, Glycine max
  unsure (1)..(532): unsure at all n locations
  Clone ID: jC-gmst02400073f06d1
aaaggagaggggtccattgaattccacattgtaagcaaattggaatagcatgtgaatatgggacaaatccaaatattgctgctgcattgtcacataatctacagaaccttgaaaactaacagcaatcaaatatgttcgccatttggaatttgaatacaaatacagggcatcgataatataaccctatgtacagagccaatgtctgactgaaatttgatacagaacattatctattttgtatcataataaaatggtaaagatctttatgttacgtgcagcattatgtgaagaagggggaagtgcatccagctggtgctttagtccttcgtcttcccttttacttcatcattggctccttctgcacgttcacatttccttaaactgcttaagcactgctgaccttgttcttacgtccgaaggtccaatggggtttcgctggagtacgccttaatgccttcactccaaggngttgttcttgctcctgagacaagttccagcgtaagtgttgcagatgggataatctgcagggcac

SEQ ID NO: 31447 - DNA, 339 bp, Glycine max
  Clone ID: jC-gmst02400073f11d1
cgggggaaaaaaaccccggggcgttgaaaacaatgaaagccccactcacttttttggggtttttggggccgccagaaaaaaaaagggggggtaccccctctggggcttggaaaaccctcccccgaaagggggggattaaaaacgggggggggaaaggggggcgaaaagggaaaaaaaaaaaaggatggggattacaaaggaaaaccccccagggggagctcttcctcttgggatggttgaaaaaggcctggaaaccatcaggcgggccgttttcggggggggcccccctttcctaatcttgaaaggggaggggggcccttataactgtaggtagggggc

SEQ ID NO: 31448 - DNA, 522 bp, Glycine max
  unsure (1)..(522): unsure at all n locations
  Clone ID: jC-gmst02400073g07d1
ctgggtctgtttttattatatttattttaaaattttctttctttttttatatttttttaattaatattatttttttataacataaaaaaaaggggcgccaaaaaaaaaaaaagttcaaaaaaacaaataaaaaaaacaacaaattaaaaaaaaaaaaaaaaatgaaaaaaaaaaaaagaggaacaaaaaaaaaaaaaaaaaccttatttcccaatttcccaaaaaaaaaaaaaaaaaaaattttataaaaaaccccccaagacccccaaaaaaaatcctacaaaaaaaaaaaaaaatgccccaaaaaaaattatagcccaaaaaaaaaatctttttcaaaaaaaacaacgatatataaactccaaggactccaaaaaaaaaaaaaaaaatttccccccccaaccccaaaatttanaaaaaaagggtttaaatacctaaccccaaaaaaacattttaaaaaaaaaaccccccctcctccccccatttgagggaccaaacaaaaaaaaaaacgcccccgaaaaa

SEQ ID NO: 31449 - DNA, 484 bp, Glycine max
  Clone ID: jC-gmst02400073g10d1
agaatgcaacgttcgatacactaataatagtgccatacaaaaggactgtcctcgaatacaaaacctcccctcaaatctcccaagaatgcaagcaatgtacgtatataattcaaatacagtaattaataaactcccatgatcacatccacaaaataataatatataaaggtaaggtaaatagaaaaataacatgaattggcagaaaaatctgcaagtccgaagacagagatcgatgatgtctagaacaacaaggacagcaaagcacatccgaatactaagctcccaatcatcttctgaaaggaccacaacttttcagccccactatcatcgccagagggagagatggtggagaggctggggccgggagccaaggaaggagagagtgcaggagcaaccaccttggcaggagctggagctggagaagtggcttggtggaaaagaaaggggtgtatagggtcaatgcgggtggaggcgttcctggtgg

SEQ ID NO: 31450 - DNA, 353 bp, Glycine max
  Clone ID: jC-gmst02400073h02d1
ggacacaaacatgcacatttgtgttcatctccagggggggggggttaagatattcagttacagaagcctgttgcataaaccccatacggaaattttaaagatgagacattatatacattaaattgggatgtattcaataggagtgcaaggaggattacccttacgcgacttagccccctttgacagtaagtggccttaaaaaaggagccagcatatgatataactatgagtaaggactccatttcagcttttggtgcattggccttaggcagaagacatggatttctaattaaggatccaagttttatcgacgctgttgattgcacatttgacatgtggtggcagacttaaca

SEQ ID NO: 31451 - DNA, 434 bp, Glycine max
  Clone ID: jC-gmst02400073h09d1
acaacacaatctgaaattggggtttggaatttttcaactgacaggggcgggatcaaaattaaacctaggatgaagttttatttttatatactgatacacattatttaaaaattcaatataaaaaggtcctgagacaagtcatctactacagaacacttattagagcctcccgtaaaattcgcaaataattttgcagtaatattttaatccagtgggccgggcttcataacaattattagcttcagcaaacggatcattactcttggggcgtcttaaatcttggtggggtgttaatttccatcattcaacaaaggcccggtatcaaaattattaacgaaactttccccactaaaattccctctaaaagagatgatttaagctggcggactttattacaaattgtggaattgggtgattcattcccgggtgtactt

SEQ ID NO: 31452 - DNA, 425 bp, Glycine max
  Clone ID: jC-gmst02400073h10d1
acaacacaatctgaaattgggggtgggtatttttcaactgacaggggcgggatcaacattaaacctaggatgaagttttatttttttttactggtacaaattatttcaaaattcaatataaaaagcccctgcaacaagtcatcaactacagaacacttattaaagcctcccgtaaaattcgcaaataatatagcagtgattttttaatccaataggcccagcattataacaattattagcttcatcaaacggatcattactcttgtggcgtctcaaatcttggtggggggtcaattcccatcatgccgcaaaggccccgtttccaaattattagcaaaactatacccactaaaattccctttaaaagagatgatttaaggctggcagactttattaccaattgtggaattggttgatttattccc

SEQ ID NO: 31453 - DNA, 381 bp, Glycine max
  Clone ID: jC-gmst02400074a02d1
gaagaaaaaaaactttgcatgcacttgccattaaacttcgtggtacatacaatacacatcaaggcatttaattttatctatctatctttcacacaaaatccgcacattaccaaaaaaaatagaaaaagttctcttcaaactgatatgtttgccacaccatatattaccgtccagcttttcttctagctatacacaaaaaaaaataggctatcaagaataatcaaggaaatggaaacaacaaagaaaaactgggaagagttggaatgcaggctaaaatgcactccagttatctgaacctttcttcggagaatgattttcaaaagaagaccttaaaagggccagaggagccgaatggatcaaagtcatcaaaagaaaatggac

SEQ ID NO: 31454 - DNA, 491 bp, Glycine max
  unsure (1)..(491): unsure at all n locations
  Clone ID: jC-gmst02400074a03d1
ctgattatcatttcattaaatcgactataagcaaccagatatattggtcaaaaacaagaaccacggtgacacaaaaccataaagatactcaaactcaaacacaactaaaattactgagcataatcataaaccctaatcaacgacatcaagccctagtttctccagcctccatcaccaccgtcaccaccacgagagtaaccacggtcaccaccaccaccataaccacggtctctgccaccgtcatagccaccgccaccgccaccgccatatccaccgccgccgccatagcctccaccgccaccgctacggttgtatccccctccaccaccgngaccaccaccaccatattcaccaccgcgaccaccaccatattcaccacctccaccgncttcggcgtcaccgtcaccacgggactgagcttcgttaacagtgatgttacggccgtcaaggtttaggccgttcatcccttgatggcgtctttcatggactgc

SEQ ID NO: 31455 - DNA, 467 bp, Glycine max
  Clone ID: jC-gmst02400074a04d1
agaccatatgcaacttatatcattgttaagttgaaacggggaaaagtacattaaaaaaacgagaaaagttaaatccaaatccaaaacataatgacaagacaggttattatctaaacttcaaaagggtcttcgcaaaatcaagaacaacccatgacaattggtctgcttaatcgacttcctcaattttgggtccagcaccgcttccactgccagcagcaggaccatcctcatccatggctccacccgcatcaccaccagctccttggtacatctttgctatgatggggttacaaatgctctccaactccttcatcttgtcctcgaattcgtcagcttcagcaagttggtttccatcgagccattggatagcctgctcaattgcatcctcaattttcttcttatcatcagcagacagcttggaagcaatcttatcatctttaattgtgttcctcatgttataggcgtaa

SEQ ID NO: 31456 - DNA, 470 bp, Glycine max
  Clone ID: jC-gmst02400074a07d1
aacaaaacaacacaggaccttgttggctttcattaaatattcgcatgaacaaatttatattctgtggggaaaaaatataacatacacctcaacattactactgactattcttgtaaggaacatgtagataaataatagaaacagagagggtacattcccatctatttcaggggttcaatcctccagacaactttgataggctgaaaattcttgctatatacacgacagcaaccttgtgtatctccaagcaaaagggaataacaacacaaaatgaatcatacaagagaactaacagttgatgccacattgaccattggttaatttgttggagtcagaagtgaagggatcaatcctcacccacagcaaggagaatattgaagcaagaagaacggaccaaacaataacaatggttggggtacgattttgcctgcccaagagacccttcaagaatgggtatagatgggcaatga

SEQ ID NO: 31457 - DNA, 470 bp, Glycine max
  Clone ID: jC-gmst02400074a08d1
aatacacaagatgggtcaggttatgaatacaaataaagatggggaaaatattcaatcttagtaatacaaaagctaataattctcttacaaataaatcaaattgaagacaatggcaaagattgacagatcgtaaataaaagaaaagaaaacaagaggaaaaaaaaatcagacattttcccaacaaacagatttgaacaaaaaggacttacacagaagatacagccttacacttgccaattcctgacttgaagttatgaactttacggacaatgagcaatttacgatctgttgccaaaactatcatgacgcaagaggagatatgatcaggccaaataaactctaattttactcaagagtccctctcccatccaccagtttaaaaccattgatcatggaagttggcacgattatttggtggaattccagcaccaaagaaagatacaaattcttaaataagccccaattcatac

SEQ ID NO: 31458 - DNA, 520 bp, Glycine max
  Clone ID: jC-gmst02400074a09d1
aacattatataacaactgaggtcttgaatatcatactaaatatgtgaacccattcaggtccaacaaattcaaacgctgtgtaaatatgggaggggagcaaatggaataaaataatataaaatagtagagtatctgtattctgagacaaacataaacaactgtaagtaaaactaaccgcaagaatacaatttgcactaagcacctagagtgcatttaagtatctaagcacttgctcattgaactcaaagctcactgaattccaagctgaaattgaaactaagcacttgcatgacatgtcgtctgcaattctctttacaacatgctcctaaaacaagaacattagttctagatgttactcattttgaaagcttatgatcagcagcatgacacaaagactactgagaaagattttaaccaagacatgtgaactcttacattcatggaagcttaaaatttcagcttcagggcttgtgaagtttgaagccaaaaactctcgggacatagctctgtgatggtttct

SEQ ID NO: 31459 - DNA, 337 bp, Glycine max
  Clone ID: jC-gmst02400074a11d1
gtaccaagtgacccttatatgaatatgaatacatgactctacgtaaactataaacaaagatcgcattatcaatccaagcgaaagaccacaataacacagcacattagtgacaagtatttctgtaagcaatacataatcggctaatagctgtacaatactgtcactgtttttaccccctttatgaagtaaattggtcgcttccctataagcacaagacatccaaaatcagatagggattatcactaaaactggaccaataatatccaacatctttctgcagcgtgatgattgtggataacttcaaatatagctgctaaatatgatccttatgactggg

SEQ ID NO: 31460 - DNA, 462 bp, Glycine max
  Clone ID: jC-gmst02400074b01d1
aattaaatattacattttatgtagattgatgttttcaataggtataccttgaaacaagaaggggtagcttggcggaggatcaaacttccgtcataaatgtcacaccccaattgagctacaagctcttcttaggctataaataaattatttacaccacttgcatgactgtacatgttacatatgcatcatacatgtacaaaccagtgaagtgaaatatgttagaattgggaaagaatttgaattattcaggaaaaataggaagccttggtgacactgatgccattgccgctgtcaccagtagacattgaggtaggacttgttttcttacggccaatagtagatttagagggtttttttgtatttagcctcaagggaagaatttgcaacctgggattctgatcgctacctgacttttcagcagccaactgataactttgaacgagttcaagctgccgggcaata

SEQ ID NO: 31461 - DNA, 465 bp, Glycine max
  Clone ID: jC-gmst02400074b03d1
caccaaactatcgggacattgttctacatgatttcaataggaggaatttaaaccaatataatcatatcatttctttttggacgcaccaaactcgagaatcaaaatagcacttgggcacagcctagccccgctgtctcttcaagagagccaaataacacaaaagcacgtactacagcccttggctacaaggatatgtcaaactattgggagatttttttaagattaaagcaaaatgattaaatttctgacactcaaatccggcatccaaaactgtcaacattacaccccccaaaatacatactgtagcataagcagtagcacgactcaaaaggcataattttactcaaaagattcatcatcatcgtcaggaaggggctgactagcagctgcaagaagctcggcctcatgttgttgctgtgcagctaaatcaattaaaacttctggtggagccaatgctggagactc

SEQ ID NO: 31462 - DNA, 422 bp, Glycine max
  Clone ID: jC-gmst02400074b11d1
aaataaatatcacaaattattatttctcctataatgttataagtatagatagacgtagacccctaaaagtctgtctataaataaaaggtgaatctaaattaaacccaagaaaaaaaaaacttattaaaaaaaagtacaacaacggattacaagtccaacctttttcactctaacaagacacaatcctaagttaaaaatgaaaaagaaggaaagaagaaaatacaaaatatttgtgttgactgttgtctttttatattagtcgtggcagcttaaagaagaaagtcacaagccacgcgccgcatcgaccaaaacggacatgatcgaggctctataacggttctatttgactcaccacaatggggctccgaaccacgtgcttcccatccgtccacgtcagcgacccgaacaccgtcccggactga

SEQ ID NO: 31463 - DNA, 419 bp, Glycine max
  Clone ID: jC-gmst02400074b12d1
gcataattcctatagttttagatctccttttcccttttgaacaatatttggtacacagtaccccagaagagaaaccaagatgaaaaacttcaaagggaaattaattaatacatcaaaggagccaaaaaaaaaagagagagaaagtaatcggaaacatatatgtggagatttgtggggactacataaggggaacaaaggattcaattgatgggtatgtgaatgcctattgctacaaccaagatggtaagtatgcagaagaaaatgatggcatgaaccaaaattgcgatcccactagtgctcatgtttccaaacttaaccaccctataccttgcgggaaattggaacaacaaacccggagataagaggatgaacaaagccacaggaataataactgggccccaatcaggacccatttcttt

SEQ ID NO: 31464 - DNA, 439 bp, Glycine max
  Clone ID: jC-gmst02400074c02d1
aatcttggatgttttggcaagggagaaaagtataaatataggaacaacttggatgagattgaacttacagtgatggttaataaaaatgttatatacttactatacatgataagcgcttaatctgaagtattcacaatgtctatactgtatatttcctttcctctgttgttggtatcatccacgacataaaccttttcaatcattcgtttcatcaaataccataaccttaccacaaacaggacaggtgtcacttatttccatccactcataaatgccaccaagatgaaaatgatgagagcattttggaactatcttgggattctcttcaatgtattcttcaagacaagttggacagacatgctcctcttctgaggatgaatagacaaccccagctccagatgtaaattctgctgatgagagtattacagaggacttgaac

SEQ ID NO: 31465 - DNA, 363 bp, Glycine max
  Clone ID: jC-gmst02400074c03d1
gttcaattcaattctatttatcaatcttttgactgtctgtacagttattatcccctctcctgagtcaatttgaatctctctccacaccccacaatgtctacatccataacacaagcaataaaataaaaaaagaactctaatcacataccctgtacaagctagtgtgacaatccctctccctcccaaactaaagtgaaaaaaaatgcattagtgtcccaattggcctcctcccccactgggtttaccattaaagttttaatgggtaagaccaaaaattaacccatcaacacccatgaggttttccaatctatatgtttgttaaaaacaccactgttggttaacatttcctagtgcatggaatgc

SEQ ID NO: 31466 - DNA, 564 bp, Glycine max
  Clone ID: jC-gmst02400074c07d1
atgcattaaaaacaatgttacacattattacaattttattcaaatataccaaaagaatcaatcaaccagcaaataaatagatggaacatggtgatgccggttgtgatcctctaactgcataaattaattaccatccaaactcatgtcatttacactttgaagcaacggatcccttcggcaatgagggatgctacagcctcctttcacttgggtataacaacttaaccaagggaatcaacacaaataaatgtggtacaataataagacacgaaaaaggtcctctaaccaagtaccttgcgaagttcatcggtcaacttcacgcgacccgatggctccaacttgcttaaaagggcagcaagaccttgaggtagagcttgcaaatctagagctgagtcaccaatatttgtcaattgaagcaacactttctgcgcacgcaattcctttagtttattctcgtaatttgcaggattatccttccatctgaagaaggctttgtcatccaaccaagcatctgctctacctttgggcatatcagaatttaaataccattctttgagcaagttc

SEQ ID NO: 31467 - DNA, 517 bp, Glycine max
  unsure (1)..(517): unsure at all n locations
  Clone ID: jC-gmst02400074c09a1
aggaagagcttgatattgatgttcttgttcatggagaaccagagagaaatgatatggttgagtacttcggtgagcaattgtcaggctttgccttcactgttaatgggtgggtgcaatcctatggttcccgttgtgtgaagccaccaatcatctatggtgatgtgagccgcccaaagccaatgactgtcttctggtcatctctggctcagagctttaccaagcgcccaatgaagggaatgcttaccggtcctgttaccattctcaactggtcctttgttagaaatgaccaacctagatctgagaccacctaccagattgctttggctatcaaggacgaagtggaggaccttgaaaaggctggcatcactgttatccaaattgatgaagctgctttgagagagggtctgccactgaggaaatcagaacaagctcactacttggactgggctgtccatgccttcagaatcaccaatgttggtgtgcangataccactcagatccacacccacatgtgcta

SEQ ID NO: 31468 - DNA, 460 bp, Glycine max
  Clone ID: jC-gmst02400074c12d1
gaggcacgagataaccactttttaccatatatatatagagagagagaatacgaagcacactgatcacaggatgatgctctctttaagtagggaagcagatcttatcagtacacataggtaggttgaaattctagctctagcaatctagctagagaaggtagtacttgcacaacacacagcacatgataatttattttatacacaatctcattctcatggtgctcaagatgcatggactaattaagcaacaatgttggtctgataggcagtgtccacagataaattgggtacccataaaatggccttgcttccaaggaaatggcaaacagggttagttccaggatcaactcccataagttgatgaagcatttgatgattcattccagaagtatttgagtggcaaatagcaagtgcctgagtttcggttccatcaccagccaccaatggaaccatgaaagct

SEQ ID NO: 31469 - DNA, 424 bp, Glycine max
  Clone ID: jC-gmst02400074d03d1
gcacgcaattctccttaagtataatattaacaaagcatgagtttattacagttatgcaacaaaacgtgtataagtagacaattcaattttacatcaaattcaagagcaggaagtttgtcccatgctcatgttaacagcttattcttaaacaatatagaaaatgcaaagaccaaatggcagtaaaagaattatcatcctatccagacaatgcaaagctctcctgagtccagtgtggtggatccatcacagcacagggatctgatttctcaaagtcagcaaccttttcttgacatttaggacagtagtgatatttatgccaaaggcaatccattgaagggcaaagaaagcaaactccaagcatcatcggcacaaagcatccaacaaatgctgctagactgggctttgatctgacggtagtgagagc

SEQ ID NO: 31470 - DNA, 437 bp, Glycine max
  Clone ID: jC-gmst02400074d05d1
gaaaactcatgaataatatatgtattttaaaattttaatgttaaatattcatgacatgatttaataatcaatctttgattataggtccatgtatgtttaaagttggcattaaattttgagataaacctctaataatgaccggaaaacaacactaaaaacggtgaaatttgttgcatattgtctttaatccataccctttgtgagataaaaggctagtgcagcggggctccaagttggatggatagtctttataagtgcaacaataccagttatgtgggggcatggcatatggaagttcctgactcaatgttgaagttaaggggatgtaaatctgactcatcttcatttgcagcatcagataccaaacgggcagaaaaagcgggtgaccaagccgccagaatattaaccccaggagcagcaatatcaggcttcaacac

SEQ ID NO: 31471 - DNA, 512 bp, Glycine max
  Clone ID: jC-gmst02400074d07d1
agggaggaaatgctcagtaatagcataaattgggtacagcttgccatgttcatagtatataagttgcacagtcgtgcacagttcaaccgcgggaaagtcctggggatcaatatcaaacacaattgaagtgcattgaccaaccagatcatggaacaaattgctgcaacttatagaaagactaaccaggaaattacgaactctctaacagatgtttgtaaatctaagagaccatggcattggtttcatcttcatcagcttctcctgtttcattgaacatgtactgactttggtactccattaggtactgtgttgatcttttgacatccaaaaacagattgtaaacccgatttatatcatccaactccactgtcttcccctttcgcttttggcatgccaatgcagctgctgtgattagatgaatagcatatctcatagatgtttctacacctattttggttaacaaacactttgcaccttcactcatgtctacgtctttctcttggcatctgata

SEQ ID NO: 31472 - DNA, 582 bp, Glycine max
  Clone ID: jC-gmst02400074d10d1
acaatacaatatgtaactatgaactatcaatatatgatcgttatttatgtctgtgatacacacaattcaggccatgatattcttacgtgatttacagcaacttctaacttatttaatacatcataccaacccaactaggagcaattttcattatacaatgacacttatctttaaactctgaagcatgacaaggtggtagtcaccagggaccatattcttatgcaatttatgccacaactggataagacgcacaagttgcaacaccacacatgttcttccccaattccattttgaagtagccattctcaccccaactttctccccatgaattttttatgagccaatatgggacgccattttcaactccataccccacagcaaggacggcatggttcacatcctgtgaagtgctaccgcaaatgtcactagtgtaaactccattctcgtagaaatggaacccattcaccacctgaaaggccacactaaccggccgaacaaatgcaactgcatgttttaattcattctcagcaacccagggtgatatttgaccgagtcaatgacttgaacggcaacattttcagc

SEQ ID NO: 31473 - DNA, 544 bp, Glycine max
  Clone ID: jC-gmst02400074d11d1
ggttaaaataaaattctgatcacagccttaacacgtcttgtttgtttatcatagagattcgcagcctgatcaacaagattttaaatatagcaagccgatcaaatttctattgctactacaaagttgacgatcagattgtgttttttatatataaaaaaaaatatatcatgactctggcaagctgaaggttatcacacgattaaagattgccaaaaaataagaaaaagataataaatgtcaagcatccgcttaggttctccattggcttgaaatatctcaatggatctttgtaaactgaaaaatagcttgttccacaatccagcctatgcataatagttcagacttgctttcttctttgcttggacttgaataataccttcattaaaatcctcgtggttcacctcagttgcatcacggcgtagagccaacatgccagcctcaacacagacagccttcagttgtgcgccattgaaatcatctgtggaccgggcaagttcttcaaagttgacatctgggtgaacattcatcttccttgaatgaatct

SEQ ID NO: 31474 - DNA, 264 bp, Glycine max
  Clone ID: jC-gmst02400074d12d1
aggccgcattcacagcaaactccacaagataattttagaaaaaaaatgcaaaaagtcaaacaaagaaatctagctaaaacaaaatctaagccccaatctggattttaaaaaatcaattatgccctataaacaatgttcccaccaaaatgctatttacaccatagactcaacttagaaccccaaattaacatttggcgtgtcaagctttacattgcaaaactcataggtcttgagcgaaaggcaggctgatagaaaaagaaagat

SEQ ID NO: 31475 - DNA, 458 bp, Glycine max
  Clone ID: jC-gmst02400074e01d1
acataaactgtaatttttttccggccagtgatcagattttatttctatcataattctaagggttttggaaacacattgggcaccaatacagaataatcaaaagggagaacttaatttctctcccttttcaagccttcttcttagatggaactgtcccatctgtgcctgcaagcatggcatatttgctcttcctagacaaatttgtgcactcaaatcccaaagtccctgcaagaaccctttgaatgtagtttgcaacttcaatagctgatttccctccactgcatgtgagctccttgggaagctggttcaagaaagtgatctcatatgttggcattggattcatgaacacaaagttcgggtccaacaacttgtgtccgcaaaccgtgggtccgtagaacacactttgctttgtgttaatagcaactgggacaatcctatcagtgagttcagcaaatagt

SEQ ID NO: 31476 - DNA, 474 bp, Glycine max
  unsure (1)..(474): unsure at all n locations
  Clone ID: jC-gmst02400074e02d1
aataatataattaagcagggtcggtccatggacatatataagatgataatatgaaaatgtcgagataagactccacatcaagattgaattaaatagacattggaaaacccacatcggacgttgatgaataataacagtgttactgaaattaattacgtaattaattctcattggcgaactcctcgaatagcctgaggacctgaacacagccagaagcaacctcctgagacatgaagcccagggcattggctaacctatcataggatgccacgccgttgtggcgggtgagaataactgacagntgctgggcggaccggggcgactatcttgcattgagggcgagggctgcttacaagcttggcactgcatatttgatctgcgagaccctcgcacacgtgcatcgtgtttgcttcagaagatgcaccgtaccccttcttggtgtacacaacactcgttgataaccctgctcttgct

SEQ ID NO: 31477 - DNA, 394 bp, Glycine max
  Clone ID: jC-gmst02400074e04d1
aagagaataaaaaacttttatttatatcacagccggacatatgatataagtaacatagggctaacacataaagagacacataaaaagggttacattatgggaacacccatgatttattaacccataatataatgccaccagaccagaccagacctcccaaagcataaaatatctaagacctaaactattacatgggaagaaaaatgcataaactgctttttgagtcaagggactttcacatgaccctctttaatgacacaataaaagtccgtgatacacgagtttccctcttcgcattttcactggtaccaaattgaaacctcttgctgtttttgaagagaattcattcatactcactgtatattctccttgaaatcaaaggatgacaaatcac

SEQ ID NO: 31478 - DNA, 446 bp, Glycine max
  unsure (1)..(446): unsure at all n locations
  Clone ID: jC-gmst02400074e05d1
aacacaagcttcaattttattgattttcatcttgtacgtatgagtaggaccattcaggttctatagtgtaaactaactcaaatgttcatgaaaaccaatgaaaaaaagaagtgaaaaaggataattgatcaaaggcttaagagtaaagaaagggcataaaaaagaagaggtattagtcccttcaataataataataattttcagtgtccaaactcctataaacatgaaatgatcatttaatcttattctttggtctttaatccaacggcacagtatgattcatgtagtcgagtatgatccatgtagtcgacctcaccagagtcattagaccactctctcgaagaggagaattgaaggacaattcaagaagagtccgaacaattntcatcttcatcttcgggcattcaaagcaaccaagaaagagggtctgatgagaatttggagac

SEQ ID NO: 31479 - DNA, 607 bp, Glycine max
  unsure (1)..(607): unsure at all n locations
  Clone ID: jC-gmst02400074e07d1
aaccattaacgtaaaaaactattaaaaaattgtaattactacacagtacacacctaactaacttgaatagctgcaatggacaagtcagagtacttattcttacatgcattgcagctacctttagcaatgaaaatatacaaaattgtgcaatttcctaataaatacaaatttccaacaaaaaacagagggtcaaaaagactaccctctaagctgtaggctggtcattcaataattttctccctccctgttctattggccattcaatcaatacttgaatcagcaagattttggcaatcggttagcagtaattggctgctacatttcaataatttactatagtcctgcagtgatactggattctctttgcaggaatttagtgccctcatataagagagctcttgagagaatcattttctgatcattctgaaaatggttttttaacctgaggagtgaatggtggaacttctgagtactgaatgcatgttggtcaatcttctgctccatctctataccagaatgtatcccaaggcccacttttactgctcaaccttaagaaaaccaaaatattaactcaatatanatcttatgaagaaaattttgatcatgg

SEQ ID NO: 31480 - DNA, 251 bp, Glycine max
  Clone ID: jC-gmst02400074e09d1
ctatctgattaagtatcttggttagaactcaggttttgctctattggtcggaagtacaatgcccataaccatgcaccattcaaagattaacacttatcaaattatctacagcaagaaatagaattcatgagaatctgcagtcaacctatctacacaggttgggtttgcacactccaccgttagggttttgctgttctcgccatatacttactgttcctcgtagcttcacctctttcctgtctacacctgac

SEQ ID NO: 31481 - DNA, 481 bp, Glycine max
  Clone ID: jC-gmst02400074e11d1
cacacaaacataggacaccccgttgagacgctgcaaaattaacacatcaaagatccttcaaccataacattaactcgggtacataaaatatagctactcccacagtcaagtcttagagttttgttaagttttatcacaacaatcttgaaaagaagcttactaaatcataaacgccatgacaacataaaacggacacataataaacaatagaaggattatggcagcttagtatgagattctatccagtcccatatgccttcagttctcgcttccaatacaccatgttcgaagaggaacactggtactgcctaggttctgctcttacatttttcaacagccctgggagctagaccaatggcatcagaactcttcatgatcctcagcctcttgcatgtttcaataaacatctcccagggaacatcacccacaagcatccaatcgccctctctgtcctcatatgtaagaacatattctgatccat

SEQ ID NO: 31482 - DNA, 452 bp, Glycine max
  Clone ID: jC-gmst02400074f01d1
gaactaactaataaagttaactaactcaaccgattaccattgggtgtttttcttaagtgcaaaaagatgaactttcaacacttcaagattagagcaaatgccacagagctcgagaagatttacaatgctaaatacatataacctaccaaagaaaacctcgagtgagtaacaacgtttttcccacctacaattactcgtaaaaatgaaaaccctctcattattttacattttgtcacacaacttttaacctaggggagggctgcgtgtttcaaacaatctattgaatgagtaaaattattcagtttttttcggagttctcataccagacatttcaatctgtactgcttaatctgagctttggaaagcaaaagctatcactagcagtattaaggttttccattggttcaatacggaccataatggatgctgggtattgagtctgatgtgctaat

SEQ ID NO: 31483 - DNA, 496 bp, Glycine max
  Clone ID: jC-gmst02400074f02d1
acacaatcattcaaactcccatttttgaagtacaagaatgagaatatgtataaccccaagaaagactgacattaaaatcaggaaattagtaaattaacaatgatctcttgatctattctctcatgtagtatataaaagccttccctaaagaacgttcctcatatcggccaatgcaaacctctccaagtataggggaatgaaaactaaggaaataaaacacagtcaccctctcttctaataactggaagaaaggagaattagaaagatcaaaagaatggaagtggtagcatatcgtggcagtgatcaataacaagagcagcaattccttcacactaccttctgagcttactttgctttatattatacccacaaattctattcatcatctgattccagagttgggctcttagagcaggcttccttttgatggagttccaacattttcttttctggattacataggcctgaacactgtggaatatcccacactgcaata

SEQ ID NO: 31484 - DNA, 380 bp, Glycine max
  Clone ID: jC-gmst02400074f03d1
aattatatcacttcttagtacttgtggtagtgaaagaaaatgtgattatacaaaatgacataatggggaagaactcatgtctctgtctctcttggtctaaatcgcatcagaagacaaactaaaagggacttattttctttgcccatcaaacttgggagtagtaataattggaaaaaacatgagaccatacagatagtatacaggctgatacttctaaactcagcgggcttcctcacaggaggtcctctgggccattaatttccttatccgaaatgacagcaccatctggaacttccagtttaacaccaggattggccacgatactgatttttcccttgaggataacaccagctccacaccatacattggcagccactttt

SEQ ID NO: 31485 - DNA, 492 bp, Glycine max
  Clone ID: jC-gmst02400074f05d1
caaaaattcgtaatctcgagctgttaatagggaacataaaaagagaaagaatctctttaacagggccactaccctacaaatagaatccttggccccccatttgatgaccagaaatgggataagtacttcaaaaacaaatcggaaacgataaaaaacaaaaaaacacattaacacagcagattggccgcacgctgtttttgcaccccaccttgaaaatatatagtatgaaatatgaaccagttcacacattaactacatattggagcaaataccacagtgcagtgctttaaggaaaaatgaaaatccaagccccagaactcgttttcaagggggcaacagagcagtagagttgatccattcgggtagctactctcctcagaagaaccaattttcataagcaccatgatgaatatttgaacttaatgaatcaggaccaaactcatgaggtgtattcaaatggttgaggaggctgaggttccttatccacagcca

SEQ ID NO: 31486 - DNA, 285 bp, Glycine max
  Clone ID: jC-gmst02400074f06d1
agaaagaacaacctagctttatgagtatgaatatcataagcattgtcactgccatcataacagcactcacacgcatacataacataattaacaccatgaacatgcccttctacccaactctaagctacttgcatagtactacatatataatatccttattgaaattaaaaaaaaaacagcagtaacatcggaagattaaaaaacatagcctcttaatcctgccatccccatgaacctgcagtgggctcgggtcattgaaccagcccatttaaaggacaagacctt

SEQ ID NO: 31487 - DNA, 413 bp, Glycine max
  Clone ID: jC-gmst02400074f09d1
gcaaattaaattacacaatcacagtcgtacatcacacatgagttgggcctcttccaacttaaaagcagaggataacattggcccatgacgcgacacatgcaccacctaataatcataattttacatctttacatacaaaatacaaagactttaaattgtaaaaagaagaaaagagataaacagatcatcttaatgaaatgaaaccaaaacccacaaacattggcttgatttttgctggtgttgttggtcccaacttgattaagcatgaaccgtttgattgaatcacttggacttgaagggaatggccctgattacgacctggtggtagagtgctgcaagagctgcaccgatgaatggtcccacccagaaaatccagtgttcattcccaaccaaggtccttgttgaagatgata

SEQ ID NO: 31488 - DNA, 359 bp, Glycine max
  Clone ID: jC-gmst02400074f10d1
attcataactccttcaactagatgatccacacaaaggaccgtctaaaaagctagcaagggatacacctgcgtactatattatagtatagcaatctaggatttcttagaatgcatattaattaatattaataattgtaaggttttaataagtgacagcacgagtttatgaatctattatcagcagcccacatacgagggataattttctagagcatgggatgggaaagatccatgggaaatggattgcctagaacattatgcatgtaatagtgtggatggctcggatccatcagcacaaactgaatgtcccttgaaggcttcagtgccgtttcctttgattaataaccagttgttgattt

SEQ ID NO: 31489 - DNA, 507 bp, Glycine max
  Clone ID: jC-gmst02400074f11d1
ataaggtactctattaggaatagaacaaacaaaatataaagcttcaccaaagtgtttattttattgtttttatgttttatcaatgagttataaataaagagacaatcagtcaatatgtaacaacaaaatacttgcagcagtaataataacgttaaacaataaaaattaaaaaccaaacaacaaatgtcctgattttaaagacttgtgttcacaggatcatttgaccaagtaaaggatagttttctaatcatatatgaatgaaattagaagtatgcttttagtttttcacataaactaattctaaaagcattttctcttcaaaaccatcattaatgaagaaaatatattttaaattttaaattataagaaaatatttttcaacaatctctcacttatgtaaaatttaaggaaatgaaatactatagtaaaacattgttaataaagcataatacattgtgtcttcatccattaatttgtcagacttacttaacagggaactcaatcata

SEQ ID NO: 31490 - DNA, 499 bp, Glycine max
  Clone ID: jC-gmst02400074g02d1
ctctgaaatgccaactacagtttgattcgattagatgtaaggggaggactattttttggtgcagggctacgtttttagccagccaagtaaacagaaaatacaaaaatccacacttcagaacttatttcaaaactcaataacaacgttggatccatccaaaatacatccttccaaatctcggaagtaaaaatctggcataatgttcttattaatcatactctaagggctccacaggctcaaaacttcacggtgaacacaagaataaccatatagggcatatagtttggatattataacatctaatgtttagacgaagttatttgggaatgaaaacagaacagaatgcaatgatagccatcaaatccttgccgatttacttcagtttggagaatagctccggtgcaacacatttgtcaatacaagaccaataatcaaaatattgtccagtgcagtgtttctgcccagatacatcaccatgtatccttttaatgcacgcctg

SEQ ID NO: 31491 - DNA, 474 bp, Glycine max
  Clone ID: jC-gmst02400074g04d1
acagtggtaacaagaactttattatttttatttgggcaaaaacaacaatttcgaagctttaccaaccaaacgaaagtctatgattacaaatcaaagaatgactacagctgctttcaactaaactcttccccctttttttccctctgtttatttctttccaagtctccctctatctacaaggttatgacatccctcccttgtcagatttttgacaaaacaaagaactatatataaacttgttcaacaatcaaaacaaaaagagcggctatctttattcacctactactactactatatcttcacggaaatccgtgtctttattggtttcaatttcaaacccatactctctggagagtaaagctcaggagaaatgcaagagggactcaggggacttcttgggctgacactcagcttagatggtctgtacaagccatatcccatgagaaaatactccattggtattaacatggcatg

SEQ ID NO: 31492 - DNA, 469 bp, Glycine max
  Clone ID: jC-gmst02400074g05d1
acttagataagtccggtagaatagataatatgacgtgaaaaaaaaaatcaaaataaatgacgtatccatatataactactcagcgtatatacagtcaccaaaaggaaacaattgaacggagacaaacaccatcacatacagaaaataaattatctcccaaatcaggtctcaggcactgggtttacttccactcttatacatgttgtcaatggcattctgatagtatttaagcaactgtggcctcttcttcttgtatgttggagtgataagggcacgttccatgtcaaatggaattgagtcaaggtgaactgcttttataaactcaaaacctttcaacttcttttccttcgcaatctttgagagctcttcaattatgtaactttttgctcgagcattttcacagagagaattgaagtccatggatataccattttcttgggcccaatgttcaagtgcttgcttactgggg

SEQ ID NO: 31493 - DNA, 464 bp, Glycine max
  Clone ID: jC-gmst02400074g06d1
caacataaaataaaatttaataaaaaaatggtatgtaattacagtatgaagcaaaatgacagaaaatttgtttttgttatcttccgtgtaatcgctcgctctccgtttatagattcaccatgcatccatcctttgtattgaaatgactactctacaacattcttcgagtttacatacattcactctttattatttttgtgattagttgagaatgcgatttcattggcagacttgtccaaaagatccaaacatgctacaagcgatttccatcaacttccctcttcttggtttaggagcagcaaccttaacaagtggagtggtgcggcgagtgcgttcttcttcttcttcaggagggataagaacgccgtcaattccctgaacggagatcctaccatcagtgtaaatatcaggatcaaacaggtaggcggaggaatcgccgtgaccgaatttaacggagccgtcag

SEQ ID NO: 31494 - DNA, 429 bp, Glycine max
  Clone ID: jC-gmst02400074g08d1
gagcagaaatctccaagtataacaattatgaaacaggatacaacaggggtgacaatattacaaaaagttagtatctatggttacatagaaaatcagattatacccaaatggcaaaagagggagggtggttgatcaagctacataaaagggtacataaactacaaacatgcgagggagggtggttgaccaaactacaaaaaaggggacattataaactacaacaatatcaacagactaaaaaacaacctgtattaatgacacaacaaattcacttccagagcttgacaaacttgtcatgactggctgaagcaaccaaaccatttacagtagaaaccgccaatgccgcaataagaccttcatgagcagatagtgtcatcgtcttgttctcagtcatgttccagagctccaatgactggtaacaaccaacga

SEQ ID NO: 31495 - DNA, 288 bp, Glycine max
  Clone ID: jC-gmst02400074g10d1
ctaccaattggttttttttttttttttttttctttttgggaaaaaaaaggggtgttaatccttttgcaccaaaccggcccaaccaagctttgtcccaaaaatggccttaaaacctaaaacacttataagccgtgcctaaaaaacacggggcacccaaaaagttcaaaatacccggggccttacccccgggaattcaaccaaactggggcataacacaccgacttaaaaccccccccaaaggggggggacaaaaagcaggggggagtccctcggaaatttggaaacccc

SEQ ID NO: 31496 - DNA, 538 bp, Glycine max
  Clone ID: jC-gmst02400074g11d1
cacgaggtacgtacagttagaaatttatatttataatttcatattgtttgttactgaattgaccatagaccaattccctttttattagggagtattcaatacatccataattctgagtttcatgttactcattccaagagacatgtcagattcagggcatcccaattaaattaaatggaatgacagtttctcattcggaatctgtacaataaaaatttttatcaaatcacacatcgcagtatactagactttctaattcctttagagatttatctaaaagatttgcgatataactaggaagacgtttcaaataccacacatgagttactaggcatgccagttttatatagcccatttgatatctacgtatccgagaatcaataaattctactccgcattgttcacaaaattttgggtcgtcctttttatctctgattactcgataatttccacaagcacaaatcccactttgtataggcccaaaaattctttcacaaaataatccatctttttcggatatattggttttgtaatgaaa

SEQ ID NO: 31497 - DNA, 541 bp, Glycine max
  Clone ID: jC-gmst02400074g12d1
gtcagtggactcatcaggatcctcatcagcaatcctacggatcatatcaagggctttcctaataagtttcttcttgattgtctttagactactatgttgctgaagcatttctcgcgatacattaagtggcaatgtgtcagaatcaacaagacccagcaaaaagtttaggtacttaggcaacagttcattaaattcatctgaaatgaacacacgtctaacatacaacttcaggttggatttgtttgcgttataatagctctcgtataaatcttgaggtgccttaggtggtacaaacaggactgccttgaactcgacatcgccctcagcagtgaaatgactccatgctaaaggtttctcatcactgaaatccttggcaagagagtggtagaatttggtgtattcttcttctgtaacctcctttggattcctcagccatatagctctcacatcatttaaaagttgccattcataagttggttccttcaccgtctttgtcttgggcttttattcttcgtcttcacttttatcagcatcttcatct

SEQ ID NO: 31498 - DNA, 402 bp, Glycine max
  Clone ID: jC-gmst02400074h01d1
aatatccaacttcttttttctttcttttaagggcggaacaatacaacattttttttacacagcaaagctatggtcaaacaggaagtttggtatcttgtgctttccacgagaatctgatatcaaatattttaatgaacggcgtgtgaccaaaacagagaaaacagagcactctttttaataaacaaacacagctttagttcaatgaaaaacttttccagactcttgatgatgatggatggatgtcgcgggtgtcgagctggaatactttcttttactaaacaacaagtttgctgcctttgacattcactacaaacctgtatataacatcgatcttctccaaccttatacaggctttgttaatgtaatccatgtttaccactgtaatcatcgaactgagaccct

SEQ ID NO: 31499 - DNA, 118 bp, Glycine max
  Clone ID: jC-gmst02400074h02d1
cttggggtgtggtgttttatttttttctatttgcactaacttttttaatagtttaacatttaaatataacacaaaaacctaaatatgaaatttgccccgatgacccaaaaacctaggg

SEQ ID NO: 31500 - DNA, 504 bp, Glycine max
  Clone ID: jC-gmst02400074h03d1
gtgaagaacagatattgtaacttttgcaacatttacaactgagccttgatcgaagcaaagtctctaactgtgaaacccaccttatcaaatctacctctttcattgctctctctaaatttcaaatagtccaagcacacaaatggtttgtacttccttttattcccttctccaacaacttcatctggtgccaaaatcaccttgtcatcctcaaagcaccaaaagaatgatagagaaaaccggttctcatgatgtttcaaaacaactctatgttctgaggatcttagtttgtcattgctccaagcttgcaacatatcacctatgttcaccactagggttccctcagatgggtttatatctatccactctccctcatttgatctcacttgaagccctcctatctcatcttgatataagatagtaatacaactcatatcagtgtgcatcccaagcccctcaacttgatcttctataacttctggagctgagtaattgtttaccctcaag

SEQ ID NO: 31501 - DNA, 503 bp, Glycine max
  Clone ID: jC-gmst02400074h05d1
agacaagaaagttaatgcatgtttgagcagcatcctgctaattaagggattagacaaaatttatagaatccaatacaaatagcatcagatcacatgtctttgatctctaatgggcaaaatatatagagagaaaatgagcacaaataatacttgccaaatagaataagaacctgatgacttaacagagaacaaacattaactcatcagagtaaatgagcaacatttgatggcagctcctctacagtcacattggagaacttctgaatatcagacagcatcctggaatcatctgtcgtgacaaagtttatagcaactccttttctttcaaatcgaccactacgtactatgcggtggagatagttttcaggttgggttggcagatcatagtttatgaccagagacacttgctggacattgataccacgggccataaggtccgtggtaatgagaactcgagaagagccggaccggaatttacgcatgagaatatcacgtgtgttttg

SEQ ID NO: 31502 - DNA, 471 bp, Glycine max
  Clone ID: jC-gmst02400074h06d1
gatgaaataatatacaactcatttatgcattatgtagtactaatataccagcagcatttacggacttgatacaactcacgtaaaacacattttcatctacactaagggctttattatattaaaatactggacatcaaagtttccactaaaaaggaaacattctatacccaaatacacaaaggatctggaaaactcttacaagggaccattcatgatcagtaaaacacaggagcactttacgtagactttggagcttcactcgtatatatcaagcatttattctagagattgactattgaaactgcaatgacttcagcactggacttcatgttaccacctgaagggagcataacgataggaatgtttttttcacgagcaaaccggaaaactttataatctctaagggcaattccttcaggactgatctggaaccttgctaatggatcaccttctaggatgggagtgccagca

SEQ ID NO: 31503 - DNA, 451 bp, Glycine max
  Clone ID: jC-gmst02400074h08d1
cacacataaacaaagcatcaatttgcttctgataaagactaaaaaaggggagactccaaatagaggaagaagatcctcctccatacatgaacactccaagaaccagaacattttttagcaattaagagagaataattaaaacaacaaaaagggccctcctttatctacttgttttctgggttaggcatttcctccagcataaagacaactcttgtaacttggattattcgttgacaacatggctgtttgcgagaaatcacaagtcaatggattccgtccagctgtttgatacaatagattcatggcatatgcagcatggtttaccaaagggttaggttcaaaacaagcccctccttgttgaattgcggtacaatcaatcccttgcccacaagcataatccaaatttgcttggaactgtgcatctgccactcctcctttgggcacacaccat

SEQ ID NO: 31504 - DNA, 365 bp, Glycine max
  Clone ID: jC-gmst02400074h09d1
ggatcaaactaatatacaagttccttcaatattctacaagagacattcaataatgttcaaagttctcttcaaaactaatcatttatgacacagctgaaacttggcaaatcaatgtttattattctcagccgcattctcttctttcccaagtgcaaccactactttcttcaagatggattcggttggttgatgagaattctcaacagcctttgagattgcttgccatttctctccatgttttggttcagcagcaatacatctcttcagtacatccttctggttctcctcagttccatgctgcagttcaaatttgtatagcaatgcccaaaaatccccaatatcaggagctagtgtcacagccctac

SEQ ID NO: 31505 - DNA, 437 bp, Glycine max
  Clone ID: jC-gmst02400074h11d1
gtatccaagaccatatataacataattgataatccttaaggacatcaaacagaaaatcccctgaaaacgaggtctttgagttcacaaaaggataccctataataaaaacctatatatagtcctatactactgcattagctacaagataaaataaactccacataagctttaagcaggtttcttgctgtggactccatcaccaacatcacgatcacaattcttggagctttatttacataaaaggggagataaagggtgttcagaagactcctgccatggaaggcaggtcgtcgaagctccaaaggttcatagggtttccggcggcgtcatgagttgcgtctccgccgagcaaagacgccaatggagcattagcccaggctttatcaagaaaagaaagggtctcaaagaacttgagctgggattcaatgtctgcaagc

SEQ ID NO: 31506 - DNA, 619 bp, Glycine max
  Clone ID: jC-gmst02400075a09d1
gagataaggaaattgatttgtacaaataaaaaatcgttgcagtgttaggagtttcatttttttacatcccctaaaaatctagtgtagagtaaaataaaagaatgccacgatacaaacaaagcaacaagcattattgctccattacccgtgtgattacaaaatacaaaccaacaaaaaaaattataacaatctctctctctctctctcgcgtcgatctaaaaattgaaaaaattaaaaaaaaaatcaaatataaacaatcactctctttaccttttcagtaaacacgtttattttctattcccagttctacgtttcacgtcaactggagccggatgccttcctgatcgatgtgggacaccatttgagtttttcaatgaaggtgaaggacctagaggagaagaatgaacagcattcttgctcaactcagggctgttttttgctgcctttgagatagatctcatagtctttgatccaattccattggtcacgctgctaagtttggaatgattaaattgccaaagtaagtcaggttctgaggaatcactggttgcagcatcaagctcattcatgatgtcatctgaaccccgaatgttaaactggttggctcccatgaacatag

SEQ ID NO: 31507 - DNA, 587 bp, Glycine max
  Clone ID: jC-gmst02400075a10d1
agaacatcattatttctcaatttatatagctctttaaccataattccctggatacaacatgtatactagtgtatacaccatattcaaagatagctaataaatacttgactgtataattaatatcacacaaacgtaaagtggcaatatatagtgtaaatatatataagcttaatttatacacagaaaccatgagtataaagcatctttatacaaaatattcaacaagaatttactttattaccacatcattatagtaaaatgtcatgataaagtggtgaaattctattgaatgcttgtgtcaagatgtttttataggatcaaagtgtgtatataaattaaactatattttttaatcaatatatatatattgttcacacattttatatatatatataagaggtgcttaacaagttggataggcaataccacaagaactaacggtttttttggcattaggagagttaacatactgcttcaagctagggtttttgaggtagccacagaagcatggcttttgctccttcagcttctggcaacaagcactccaaggtgcagaacctgaattaattgccggaagacacggagtc

SEQ ID NO: 31508 - DNA, 535 bp, Glycine max
  Clone ID: jC-gmst02400075a12d1
gcaaccaaggaatgtatatataaaaataacaaaatcgcccatagcgtacatatataccagatacaaatttttcacgacatatgatattacaaatgactaaaacttctagataacaacgaacaaaagctatataatgaattcccacactaccacgcagttcaaaattattgcataccaataatttcaagaacccttattaactttcactttcaaagggattggtacaacaatatcatatgctaataaatataatcttaagatgaagaagcaggtttggaagatgggttgaaaggaacctgctcagcgcatgtaaggatttcatggggcccagcctgttctcgaccaacacctagaaggtcaagataatactggtaatgggaaacgatattgttcatcgagtccacatcaccttgtccacaaacaccatccccatagagaatgtccattgtagtgccaaatccaggaagacgattctccatagtatcattcttgctaggcttccagttgccgacaaaggcatcatgcgcagagggct

SEQ ID NO: 31509 - DNA, 533 bp, Glycine max
  Clone ID: jC-gmst02400075b09d1
aaacaaaaaataacctttagtgctttttattaatttttgaatcatcagaaatatgaaataatcatgtttattaagtaccaccatttgacaccaaagatatatatagacacggtggtgaattacatgatgtctaataccaccgtttgaccctataggtgtggagtaaaagaaatacattattggacctctcaataaagacattactaggtgggcgacgagcccgtatgtgatctgaagttctgaactaatagttgagctttagtattatatgtacagactcagctacattagatagagatctgcataagataagatgtaagtctagtaaggatgagagctaacatttgtgttatgaatcttcccatgcacattggaatctgtctatagataggatggttttgagaacagcatggatgcagactggtaacggcagaatgtaatatatgagccacatcatctggagggtattgccgttcagtacatgtttgaatcatgattaatgtagcatcacacgaagggataagatctgatgg

SEQ ID NO: 31510 - DNA, 478 bp, Glycine max
  Clone ID: jC-gmst02400075b12d1
aatatcatcaatttatatattcattactaattaattggtgtcatctgttaattagtaaaaaagacaatgaaaacttgtacaacatacattttggatattaaaagaaaaggggctaataataacaatgacaaccctcatttgcacaacatctggcaaacaaccaagcaataatttaaattttttagtagaaaaataaacaaaaggattagtcaaactaacaggaacaaagaaaatgaactaagccccttatcatagtagatgacgaaggagaaatagggagaggatggtggatacatcactcgtgggagattcttctcacatcatctttgtactttcttcaatcctgctttacctgttgttatacctgacaatgtaacaggtagcatatatgatacggttgtttgaaccacaaaatcaattctatttccaaatctttacagatttgtcatgactggccgaagcaaccattcctgtaagt

SEQ ID NO: 31511 - DNA, 562 bp, Glycine max
  Clone ID: jC-gmst02400075c08d1
gaaaaaattcagagcggagatttataagaattaacataaaaaaaattcttacattttcactcacattttaaagggatagtaaactcgaccttagtgaaaaatattgggaatgcagaaattcatccaccatagtcctttatacatgaagtacaattctagctcgtagaggttttcactcaatcccaaaccacgaccaaagatcagtaaaagtatatctaaaatttatgatacttccggttgagcatcagaaccttggtcttcatcttcttcacttccagcatccttaatttgggcttcatcatgtagacttccagcttctttattcttttcactgaattttaagcgaagcggtcgtcccattaactccttcccatccacagtataaatggcagcctctgcatactccctggtaagaaaagaaacagatccgtacccagcagatcgtccagaaaggctgtcaaagacaaccctggctgacgatggcgttttgaaattctcagcgaagacttgtctgagatgggtagatcttgctttccatgcaagggtggatgcataaattaca

SEQ ID NO: 31512 - DNA, 497 bp, Glycine max
  Clone ID: jC-gmst02400075c10d1
atgaaactgggatatgcaatcgttattgcgcgccttgtaccaaaacatttaattttcatatattacaacaaaaaaacagactttagaaatctgccaagactaaataacgttaccagccaaaacctaaagggtaaatttatcacgcagttataactgcattatgcaaacaaaagataaaaaccatgcagaaattatagaacctctactaccataaattgcactactgttgagcacattgcactcgttgaccagatggctcatcatcatcttcatcatatgcctcgcgatattgctgttgctgctttcgtctcatctcctccttaaagttgacatcatgcaaagtggtctcctcacaatcatgcagctccatgtctgacacatgcttgctgctcttttgaggtaacaccttttccagtaactggcattggtcaggggaaagaaaccctgagtctgggaaatcaacattaaactggatgtaaaggcgacccttcatgaat

SEQ ID NO: 31513 - DNA, 509 bp, Glycine max
  unsure (1)..(509): unsure at all n locations
  Clone ID: jC-gmst02400075c11d1
aaagcaatcatgtccttttatacaaaactagatacaacgaaagaagacaccattttaaacagaggcatcattaaagaggaatcaagcgaagacaaataacacagcttgacattaacataggctactaatcaaattagacaagacaaataacatagctagagtctaatcaagtggccaaatagtcccacaactcatagcattgttcatgactccattgttgatgttgttgaaagtcatatccaagtttccaagtgctgatgaattctgttcaccaactgttacaccattgtatgaggcatcattaccatggacggtgatggttggcgaaacatgcgccatgcggcgaagattagtcgtgttcagttgcgggggtgtgctcatttgatgttgctgtgtctgaagaagctgatagtttaacgtagtaaaagagctcctagtgaccatatcctccgctaacttcaccttggctctcaaagcttctacatctgattntagcactcgattattcg

SEQ ID NO: 31514 - DNA, 511 bp, Glycine max
  Clone ID: jC-gmst02400075d07d1
attataattacagtttacaatataataacgatacgtacatcattgaattacaacaaacacaaaggacaatagcaaattctaccaccaatgtaaatcctcttggaacaaatcatgggacacgtgatctaatcttggatgtcatcctcccatatgcttcaaataccaaattgacatcacagatgagtcaaaactggtctgactgaaaattttctattacaaggctaagtgtaccacagattgaaactttatgcgtgagcataaaataccaaggctaccaaagatgctatcactaaagaaaacaaggaaaccttttgcctagcaccagcattaggtaaccacggataagaatcaggtggtggcattacacagttgtcaccggtgaagtagacccttcgaggaaaagcccaacccttatcaaaagtaaaagttgctttatcctttcggaagagtagctctgattgaacattgccattagggccagcttggttgagaatatcattatagaacttaa

SEQ ID NO: 31515 - DNA, 428 bp, Glycine max
  Clone ID: jC-gmst02400075d08d1
aatattataagcagagattcataattcagattaggcgaactttatacagaagcgaccaattaccaaacattaaaaaaaaaaaaaagaagcaaccatgagcttaacacacccatcacaagtccaaaacacttgaacttgctgaaaggcaagacatgaccactttattctaaggatgtttgtttaacacaaaacaccagagtgcacgaaaaccatcacagacataatacataagtttttagctacacattaatagtttatcattattcctaattaagggctatctctgcttgaagcttgctctcccaacacctcacttgcaagtgcaggggttgcaggagcagtttggtccacatttgcagccatcggtctcagcgggcacacccatttgagcaccctcaaattgagccttaacaggtgccactcccatg

SEQ ID NO: 31516 - DNA, 604 bp, Glycine max
  Clone ID: jC-gmst02400075d09d1
cttgtataaacttttcatttttttttctcaatcaatcattaggtgtaatcgttgaaggttcgactcatactaaaaataggattaagatcacgtcactgctgctactgctctattatttttgtccgatacattgcaacattaacccaacaggcaccccgtttatatagtctctctgaagaggacgtggaataccagattctcaaatatatgcttcacgaacttcctcactcaaaacaaaaggcaccccagattctcacttgaacgtgacaccacgtaaaacacacagttttataggaacttgactcctgcaaaaaatacagaaaaacttattgctatgttcctttctgagtgacgaaaaaaaaacttcaaacttatttatttatccctccatttttcattgtttaagacaaatttttaacaaatttcgtgaatatgacgtaaatgtaaacttatccgaaaacaaaatgcattgaattacaaatcacgcaaattgtcaattatggcgtctatatccggggttatagaaacacgcttgctgatctccccaattgcgcaacaatgatcttgagcggtattgatagcacccaaatcttgggcacaggca

SEQ ID NO: 31517 - DNA, 431 bp, Glycine max
  Clone ID: jC-gmst02400075d10d1
aataattaagaaccgaagtgtatatcatccaattttctcaaagatggataatgtcttttatattattttctcccttgtcaacagccaggtgggataattatgaatattcgttcataatcactatgaatgatgaacaggttgagtagtgcgtcgtccatgttgcgttccttgctcacgtacctttacgcgaagaccgccgctaaaagttgcagtgaggcctggcgagaaacgtggggtaactgcgatgatgatgatgcggtggtggagccgccaattcgatgtggaacctccggagcaacgaatgcgccacactcttgagctccaacagtgccatctcgttcccctaacacacccttatccccgcttgaaaaaccggatacttgaacggattctgagggcaaaaaagtccttccttaaccacctgtctggcc

SEQ ID NO: 31518 - DNA, 615 bp, Glycine max
  Clone ID: jC-gmst02400075d12d1
aattaaataataatttgtcatttcacacatacaaggtatatatacatatatgtagttatgatctaatagctacattcaatgattttattacctttgtccgcatttatatatacttaattccctactccaatattacaaatcaagttatacaacacatattcctacatataccgtaccataagggataaatttcataattgaccacccatgtctttggaagaatgtgatgcaaggccttttttcacctgcttcattttccatgataccatcccaaaaggccttgtccattgtctgctttattttcccctcagtgtccttggagtcaaaatccatgggggttgccacatggaaaacaccagtgcaacctttaatggcttcatcaaagcttccctcttgagcaagatcagccttccacagagacaatttggtcttggaatctggcggctccaccaaatgcttcaccttcttcatgttagctgaagcatgcatataataataataataataataataataataataataataataataataataataataataataataataataataataataatgtaataaataaaagtggtaagtattatttatatatattctaat

SEQ ID NO: 31519 - DNA, 530 bp, Glycine max
  unsure (1)..(530): unsure at all n locations
  Clone ID: jC-gmst02400075e08d1
tcgcgatctagaactattacactcacactctttgtgaaaaaggggagtttcttattctttctagacgcttgcattgatcggcgatttcttagacatggcggagcatcacgaacacgaggaagtgaagggtgagtccttgttggagaagatttctgggaagatccacgaccacgattcgtcatcttcgtcggattccgacaacgagaaaaccagcgcttctgactccttgaagtcaaaggttttcaggcttttcggcagagaaaagcccattcaccatgttcttggtggcggaaaaccggccgacgtttttctctggagaaacaagaagatatctgcatcgacactcggagttgcgaccgctatatgggttctgtttgaattgcttgagtaccacctcctcaccttggtttgccacttcctgatccttggtctagcggtgttgttcttgtggtccaatgcatccactttcatcaacaagagtccacccaagaacccacangtgcacattccagagaaaccctgtttagaat

SEQ ID NO: 31520 - DNA, 547 bp, Glycine max
  Clone ID: jC-gmst02400075e09d1
ggaacctgaagagaaacggcatatatcggatttgcgttcacatataagagaatacataattacacagtaccggaaattagtgcacatggactttctactgcataacaggtcagttctccagaggagaagaaacagccaggatttggaatcaagagacaaatagcttatgataaacaagggggctagaaaaaggtctttcctatctttagtggtctaggcaaagagaaatttgctatacgtacactggtgcacatatgcagaggtctaacttagtggattatcatggttccaggttcaaggaaacaactgttgattgtctgatggatactgcaacctttaagaacactgtagataggcaagccggtgcccaccatggccgtcgcaccttctgctcccctatcagacgagccactttaatccgtcttaatgccttgcataatgtgatgaagtctccccacttcatgtggcaacgtcttataaaacgtaggatctgctcagtcgtaaacatggacatgccttccaggtatacgccattaacaccattttc

SEQ ID NO: 31521 - DNA, 418 bp, Glycine max
  Clone ID: jC-gmst02400075f07d1
aaaatcaaagcaattcaggttatggacatttcaaattccttgaaattttgagatttatgatccaaacacaaaaggttacagaattgctgagcaattgggtattccttttaccctttagctattatcattatggctgatcagtatttgaatactggacagccattaacctgaattcctggtgcaattgggcaagtggccaatgggcaatggtccaattaactttcccaccatttgagattatggccagcattttgcagggccaagaatatgagaacccccataaaagctgtgcctgaatccagtgctgcagattgtccataattgaacttctgccaccagcgtttgttgtgacggaacacgaagttattgaagatctttccagtcactagccagcttgcaattttggcaagagttgctg

SEQ ID NO: 31522 - DNA, 552 bp, Glycine max
  unsure (1)..(552): unsure at all n locations
  Clone ID: jC-gmst02400075f09d1
agaattaaacatcataagttcattcaggattacagttaatttccatagaccaatcacgtagtgttgagttccagatttaataatagattaaatttaaataattgaattggtacaatgtacaattatattatctttcaagacatcaggattttggaattgttctagtttagaggagaaaagtcatctagtttataactacactgtttttgaattttagcatctatcaatttaagtaattataatatttgatagatgaattatatagtcagttatattaatagaaagcagagcttaaaagggacagtaaaacagaaagttgcaatatattcaccaaagacaacagccttgtcctctcaaccaacaaccatgaattcaggtcctagcgaagacggacacacaaaatatgtataacattgatccagaaaatgtcttaatattcccatttcttcaactccatgccatcaggagcacttccctctaccttctttgatcccacttctttccagtttgtagacagcactgtcccattagactcaacanaagactttttca

SEQ ID NO: 31523 - DNA, 555 bp, Glycine max
  Clone ID: jC-gmst02400075f10d1
aatccataaagatgtgtttatcgtattccatgcatatctcacaaagcaatatacactttactacttgatcaatcaaaatgcttctttgaatcagtaggtacgaacaagtactcaaattagtacataagaactcactttctcctcccctttaagctagatcacttggaaaacaaaaacttaaattttacataaaaaactgttgagacaaaaggctaaccagcaagtggattagcatgtattgttacacgattgagccttatctctgcaagcggtcagacccctgcccctgactgagttttattcatgagatcaagaactgaagatgcatggcttactttgccaaacacggtgtatagcccatttaaatgaggctgctttgcataagtcaagaaaaattggcttccattagtatttggaccactattggccattgctaataatcctcttgcattgtgcttcagagattctcttatctgatcgttaaatatcttgccccatatactggttccccctttgccagttccagttggatctccaccttgaatcataaaaccc

SEQ ID NO: 31524 - DNA, 508 bp, Glycine max
  Clone ID: jC-gmst02400075f11d1
ggtatcaacatttgaaatctgacaattacataaaaaagcctttcaataccttaataaattccatgccactgccaaagcaccaagaaaaaacaaagaaacacgttatcatgtttcaatgcacattcagaaacatgaaaaaaagagaaacttcacgagttgggtatttttatctttacaaatatttgaccaacagccatatgacaaccaccaaacccactataccaatcactgataaaagcatgcacaagcaggagcaaccacccttggtacgtttgtttaacactgccaagttcttctgcactctcctcagccgagaatctgtaacatctacatgttggtccaagtcatcaatgagtctggtatgtagattcagctcttcattcacagccaatgcaatatgtttagtactgattacagtctcctccaatttctcaaggccatcgtctggctctttcataatttggccgtgaagaccaactagtccactgttgtccaggccaacagttct

SEQ ID NO: 31525 - DNA, 513 bp, Glycine max
  Clone ID: jC-gmst02400075g07d1
cgcatctaacccctcatttatgtttttttccaaactaaataaacctgaagcacaggatcatccaaagaggctcagaaacaagccaaagaaatttcaaatttgccatgaaatttcactttccatcattccattccaggctactactcttggcttctctcgtcccgttcccactgtacactaaccaatattattattccctaaaaataaaataaaaaaaggaaaacagcttccttttgtttgtttctctacccttgatcatagttcttcataaacctcattttgtgaaaacactaattaggtcataatagtaataataataataataattacgaatccaccctgctaatcccaattctcttcaccgacacgttcctaaacccttgcatcattggcataccctgaaaacacatcagcccatactgctgctccatgtaactgctcacctccttccttatcatctcatgcatcaccgccatagactccgcattcaaattcaacgctcctaatccaacc

SEQ ID NO: 31526 - DNA, 389 bp, Glycine max
  Clone ID: jC-gmst02400075g08d1
agctcaacgataaaatgggttactttattacaagaaggagcatgaattcccagaatgggttttggaacaaaaaagattgatccataagcagatccgggtaccggatttttaccccaatatgggaaaatattaagtcacccccttggtccctaacccaaaaagctccgacgaccttcgttatcagtaaacagagagtcacatgcaggactgggcacactcattcatagttgatgaatgcatattgctgctccatgcctccataaagcttaacccgcattgctaggcccaacaatattacctaattttgcccaatcccagatgttttgcatgctgatgggtgactataccattggacaaaaaaaaatttgagttcttggatataaacatgc

SEQ ID NO: 31527 - DNA, 612 bp, Glycine max
  Clone ID: jC-gmst02400075g10d1
gttaaatgttaacgtgtgtgattatttatatgaatgatgattggcccaaaaaagagttatcatttaattaagttacatgcacaccagtgatttacattcatcctattcctatcctaatggccagcaaagtgaatgtaaaaaagtaatcaaatggttagattctcctgaatggcaatgaatgatcctacaatctttcctcccacatccggaaactcttcgtggcccgggagggatcttaccttaccctttcgatcgacttctaccgggtacttgagcagatgccctgtcatttctgttacatcatttgatgcaaattgcttccagttcagctcacccattgttctaatcctactaacacattcaaggctctctggttgtaagaagcagtcttcaatcgtacccgtatgttcagcccaaagtgacatcctatatccatggatttgcccacgaggatgatactggcttcttgcccaggtatgatgaggttggtacgcacccattgcaatctcggtgtcccttgttacttacatagagcgctggttgatgtttgcagaccccattatgacatattcatcatcaactatcatgccttttgaatgaacttaaatcatg

SEQ ID NO: 31528 - DNA, 458 bp, Glycine max
  Clone ID: jC-gmst02400075g11d1
cttggctaatgccatttttaatacattaagatcacaggattacatccatacatgtatagagagaagaagatcaagttactgtctaaagtctcaataactcttgctaaagttttttcctcttctttttacaaatgctcatgtttggtctgaaatcagcttcatattgcacacacaatgtagccattggcagtggcgtgctgaagcccaacatgtcaacttttggtgctgaccaattcgatgacttcagacccaaagaaaaagtgctaaaattttcatacttcaactggtggtcgtttaacactgcatttggcactttagccgctacactgtttgttgtgtacattcaagagaggtttgggtggggattgcggtatggaatatcagcattgaagcatttcatttggacgtagaggcatacaaacacatggttagtatcgatggattgatcctcgcatgtg

SEQ ID NO: 31529 - DNA, 529 bp, Glycine max
  Clone ID: jC-gmst02400075h07d1
atacccaaataataactctggtgcacaaatatatataacatcaaatcaaaagaaatctttcaaatccatctacgtacctggctacatccaataccatatacaatatatataccccatccccaactttatgaatcctataattaatattaagctaacttaaatctctgcaagtatagttctatatgctactattcaatgtttacagggagctagcatcccctcccatgccaggaattccagtataccagaatcacggtacaatatttcataattagggactgcatgcatgtgtatatatatgtcaatgaaaataacataaaccctctacttttcttttcttggtgctgctagcgaagttaattagccaagtctagagaaacactcatcagaactctaagatttctctcataaattatccaatattggtttagctagctagctagccatcagttcttacttgctaggccacgaaatctggtaataactgatgagcaacaaacctctatctgttttgaatatcaatgctctc

SEQ ID NO: 31530 - DNA, 565 bp, Glycine max
  Clone ID: jC-gmst02400075h08d1
gaaacaaagcaacacaacacaatagcttattcattagttctcatccattaatttccattgaagtccgaaaacagaaaccaaaaatacaggatgatgaaatctcaaaaagcaaaaacaaatgggaatgtagtttaagtacaaacaaacaaagtggggtggcggctacaaatgctttgcaaatttttcacacttagaagcctgggggcttgtaggcgatgaagctgatgcactgcacttggcgaacgttgtcgaatccgatgatacggatgaagccgttggggtatgcagtcttagcctcttgaagctccttcaacacctgagaagcatcagtgcaaccaaacataggcagcttccacatggtccagtagcgtccatcgtagtatcctggtgacctgttgtgctcacggtacacgaaaccgtgctccaactcgaattccaagcaaggaatccatcccttcctaagaaggtattctacttcctttgccaattgtgcatcatcaaggtctggcaggtaggaaagagtctcaaacttcttcttgccaactggtggccacacctgcatgca

SEQ ID NO: 31531 - DNA, 532 bp, Glycine max
  Clone ID: jC-gmst02400075h09d1
aatattctaaacagcatcataatggaaatttcagtgtcattaagaaaataggcagttcagaaacgcgtataaatggaaggacaaactaaaatagcccagtacatccacaattcataacgaagaacacgaatgcccaaaatctcagtaacattgagattagcattcaacaccttctccctttgaaaacattacagaagggaagttcaatgactaataagcagagagtatggtatgtttaattttgttccccgtcacctttgggtgcggcttctttaatttcatctgcaccatcgtcctgcatgtcagaggtccagagggtgaggttatcacgtagcagttgcatgatcaaagtgctatccttgtatgactcctctcccaatgtatccaattcagcaatagcctcatcaaaagcctgttttgcaaggctgcaagcccgatcaggagagttaagaatctcatagtaaaacacggagaagttcagagcaagacccagcctgatagggtgagttggaggcaactcggtattagcaat

SEQ ID NO: 31532 - DNA, 516 bp, Glycine max
  Clone ID: jC-gmst02400075h11d1
caagacgctcaatcttgttcattcatcaaaacagcaattatgctatctaacaaagtaatgaacccggtttatgatgtacgactaaatgattactcaggcatcccaactctgagaaatataaacaaagcataaaactgaaataaattgactcaagatcaaggaaaaactctcgtagtagtagcccgcaatgtaacaaaaacaatcaccaatgataaagcatataggttgattcttttaatgatattttgttggtggctatgtaggatttactttctccaatctggaaggacataattgattctccaaactgaatcagaagtctttggtatataccagatgttcaaggagtcacaattttgtatgttttctaaccatcacaaattcaaaacacacgacgatggatagcttaacctgctgcttggaaatcaccaaaatcatcatctggtacatcctctgtgcttcgattctcaggagaattctcatgctctgtgtcttctttaactggtttaggagtct

SEQ ID NO: 31533 - DNA, 507 bp, Glycine max
  unsure (1)..(507): unsure at all n locations
  Clone ID: jC-gmst02400075h12d1
atataattcatattcttcttaaaagaaaacattcaatatgtatttgtccaaataacaatgaaactctcactctaattttcaagtcactgtgtttctctttgtttcactattgctatgctcactttccggggacaaagtttgtagcataggcccaggcattattgtttaccgggtcagctaggtgatcagcaaggttttccaaaggtccctttcctgtcacaatggcctgaacaaagaaaccaaacatggagaacatggccaacctaccattcttgagctctttcaccttcaactcagcaaaagcctctgggtcatcagcaaggcccaatgggtcaaagctgccacctgggtagattgggtcagtcacttcaccgagaggcccaccagcaatacggtagccctcaacagcacccatcangataacttgagtggcccagatggcaaggatgctttgtgcatggatcaggcttgggttgcccaagtagtcaagcccacccttactaaata

SEQ ID NO: 31534 - DNA, 377 bp, Glycine max
  Clone ID: jC-gmst02400076a01d1
atgataatcactatcatagcaaccccatttattctcaagtaaatgacagattataagggggttgctaaacaaatctaaatacagaaaagaatgtaaaacatataacactccaagttgaagacaaacccaaatcacatccacacaagtaaaaacacgtggtatggtacttagtcgaagaattcccaattgaacttgggaggacctgaattattggtcactgaggagggtgggggtggtgatgtggcttgcacagggattaatggtgggacagaatcaaacaactcccaatttgtggtaactacaactcctgaggtggaattccttgagggttgttcttgttgctcttgatatagtgctagagaattctcacttgagtt

SEQ ID NO: 31535 - DNA, 450 bp, Glycine max
  Clone ID: jC-gmst02400076a02d1
atgataatcactatcatagcaaccccatttattctcaagtaaatgacagattataagggggttgctaaacaaatctaaatacagaaaagaatgtaaaacatataacactccaagttgaagacaaacccaaatcacatccacacaagtaaaaacacgtggtatggtacttagtcgaagaattcccaattgaacttgggaggacctgaattattggtcactgaggagggcgggggtggcgattgtggcttgcacagggcttaatggtgggacagaatcaaacaactcccaacctgtggttactaccactcctgtggtggaattccttgaggggtgctcttgttgctcttgatttggggccagagaattcttacttgagttccttgggtgttcttggtgccgatcctgaattggtgctatgggccatctatgaccttcatttaaatgcttttg

SEQ ID NO: 31536 - DNA, 133 bp, Glycine max
  Clone ID: jC-gmst02400076a03d1
aacttgttcattttttttttgttggatttacgcttttccatttgattccttatgtatacaaatcttttcaaggattacacatgctgtaagcaaccaatcttttgggggaagggggccagattccaggttaaaa

SEQ ID NO: 31537 - DNA, 469 bp, Glycine max
  Clone ID: jC-gmst02400076a05d1
agctagtaaaacaaaactgatttaaataaaagttacatcactttgaacataacatttggcaagatgaaaaacaaaaatgcacaagctgaaaatgaatggacatacattacagaatacagatacccaattgccatcaatcaattaatagcctagccttgaattctttggacaagattcccaattgtcactaatatttaacaggtttctcagttgaataaccatgcactttatcagaggatggtattgttatttgatttgcaggaagactgcaagaaggaaacacaacaagtcacagttccaaaccttccaaaatctgcatgaattgatcacgggtgaaactcctaaagcaacatgagattctttaaccggttccttgagattggtttcctggttcaagttccttctggagaggatggggtcgggatagcaagctaagctggctactttccatatttgaaaggtacctgaa

SEQ ID NO: 31538 - DNA, 379 bp, Glycine max
  Clone ID: jC-gmst02400076b01d1
caaccaaaactaggagattcatgttcataatcatatacaccatgcaaaagcagacaataagtgaagtctcctagtgtaacgtacacaccaaatggtagattctcacgaagccaaatatggaaaataaactccaaaagaagagcaagaagaaaccctaaaccatcaaattagaatgggctatttggatacattgttctttgacagccctgaagtaccgttttcctttcctttcccagtttccttcccgtttgatagggtaggtttagccaaggctactttgctttcgttgtggttcatcttgtccaatttggttttttgcacctggccattgagattctttgtttgggtggtctgaactcgaacccggacttcagggacg

SEQ ID NO: 31539 - DNA, 534 bp, Glycine max
  Clone ID: jC-gmst02400076b02d1
aacaaaaaattcatttataaattctacaagatgatcacaaaaggaaaagctggcctctatatctcaaatcaatttgttttacaaaatcaaaacatacatacaaaattcgcaggttaagaaaccaacccctcaggaaaatcttgaaagttaaaacacttcagccaccttgctcgcaagaacccgctccctccgttcaatgtaactaaacggaaaccaacctgccctgcctttgcattcaccctcggcccatccgctgtttgtcacctttcgaacaacaacgtaatcaccaactgatagatttagctccacttcagatacagcagaatatggaaataaaacctctcctaagaagtaacccatgctatctgttgatccattgtgtgcctgagaagcaaagacaccattcacttcttcatatgacggaggtggtggcatgctgttatccacactaagagttgtgggggtttcaattcggtgtcgctctgatgtcacctctccctcaagctgatcaagtttttgtagactatttgatga

SEQ ID NO: 31540 - DNA, 529 bp, Glycine max
  Clone ID: jC-gmst02400076b05d1
aaatacacagaaagcatatactacaaatccattcatgtgaaaaaggggcttatactacatcgatccatcaaaggtactataacgcaaagaaacctcacactctaagatacattttatgattaactcatttagctgaaaggcatagctagaaacattgtttttatctacttcctaggtcgaaccaaaaaaaaatcaaaactaaaaagggaaataacaaaggtttcataaaatcagatttcatctgttataggaacatcatctgtaacccccaactacaccaagaggacaaagaacttcacaacaccaaccccaaaacaaccctaccccaccgaccactctttctcacttactaccccctctcttggcacgagccttttgggccggagactttacactcttcggtttcacactcttcactggcgttttcttcgctgccaccgcaactttctttgccgcgggcttagcagcaggagctgctttctttcctggtgaagtcctcgtcgacgtccttgaagacctgacaggcttg

SEQ ID NO: 31541 - DNA, 404 bp, Glycine max
  Clone ID: jC-gmst02400076c01d1
atacaaacagaatttcttcattaacacttaacagcaaacacgagaacattcaatcaccccaaatacataacttaaccatacataggtagatgaaggaatcatattccttctattcacttttattgaaaaccagggaaagtactgcaacaaccatagagcccctagatggagatactgttgggaattcctctgaaagtcaatccctcctcactagaaggatagagcaaagtgtaaggcattttagccggcccactgcggtttctcaacgtctcgtccttgttcttctgtataagcttttgttcaatctcttgaagcttctttccaaacctcttgaaggcctctagtggaccagcatcagaagtccaatagtcaccaccatctctctccccaaggtagaactcatc

SEQ ID NO: 31542 - DNA, 438 bp, Glycine max
  unsure (1)..(438): unsure at all n locations
  Clone ID: jC-gmst02400076c02d1
gtcataaaaatataagttggaacatcaacacaatagataatcagttgttcacatagtctcatacaagcataacagtttaatatgggtgatcactgataagaacacaaagcaaacaatcctagatgtggacagatacacacaattttcatgttacactgttacagacaatttcaggttcagtagctatgttacatataaaacacagttacagaattcataacctaatacaattatatcagtgtctgtgattctacaagcacactcatggtcttccactctatcacacaacatagaatagagcaaacactggttacgctcaagaggcagagacagttggctgaaattcctcctcggatcgattcaaggaaatcagttctggtgcattgtcagcacagaagttgttctctatgntngtcagccactttttgtagttgatga

SEQ ID NO: 31543 - DNA, 446 bp, Glycine max
  Clone ID: jC-gmst02400076c03d1
accacaacaagaagttcaatatatcacatttacaatacaaagggatctcattttgaaaattagagtgaaaaaaaaaatggaatatccaaattctggtttttatcataaaaacccaacataaacaagagggttgattgacaggtcacctcatcacaaacagttcaaactaaactctattatgtagttctagttgcatgtatgtctcaagtccaaatatagatgacaaaaggaaatgaaaaaagatagttttgatttatccagcaaacagttgacattaattgactccaaggataaagatctccacctcctcacaaaaatacagcctcagtcttctttcttgattgagtcttttaattcaccaccggaaggtatcttatactgaagatttgttattgtagttttcaacagaccatctccaactattaacctcagcatcttcacaaaat

SEQ ID NO: 31544 - DNA, 464 bp, Glycine max
  Clone ID: jC-gmst02400076c04d1
gcacaaactgtaataccaaattaactgttgttaaagttcgtttatgttttacagattataaaaatgtataacacttaatgtagtccatataaaactgaaatgagtcccattaacagttgcataccgttggtcaaaagcatctaaagataacataaggtaccgggggggataaaaacaccacctagaaacattgtggcgttccatatggctgacagccaatgattcctcaaatgtcatacaagaaatccttaaacaccttcatatggtcgggctgaagagctatggccacagataagctcccatcattggttgagcttggaattatgaaagacaggccctcgtatgcaattccaccaggtcccatgaatataggcctttcccaaccaaagtcagcatcatggattggaagcctagtccagctagtgataccaagatttggacacttgaaagtatgagccccgcga

SEQ ID NO: 31545 - DNA, 422 bp, Glycine max
  Clone ID: jC-gmst02400076c05d1
atatgaactcctccatgtttatatatacttctttgtttgcctttatttgccccatgtaggactttattgttctctaacaagaagagtaaattaattcaattgactcactcttattgaattacttaattttaacattgttacctttatctaaaatataatttgtacaaactcctactgcacttgatttggtgcaggcaagtccaaattcttaaaagatgtgaaacctccatccacaaccaagttgtgtccactaacatatttggcatcatcagacacacggaaaagtgcagcattagcaatatcattgggttcacaatttgctccctttaagacaccaacattgcgaacaatgtgctcatgtgtttgagcatcaacatgaggatatatctgactcatttcctccatgacaagaagagggggga

SEQ ID NO: 31546 - DNA, 311 bp, Glycine max
  Clone ID: jC-gmst02400076d01d1
aacaacaaataaatgctaaattttctattgcaaatatatcttgcatgctaaatataaagcagacactaagatgtaaacattgaacagaacaaattttcaaatactacactataataacttatttttatatacaaaaaataaaactgcaggcttaagctctgatattggtgaagattcttacagtatctaaaatctttctattccatttctttttaattttctcaattcacaattctttgaagccaaatctctaacgtatccatttttcccttggtaggtgtacacatgtggaactgacaaggttcacatgg

SEQ ID NO: 31547 - DNA, 435 bp, Glycine max
  Clone ID: jC-gmst02400076d03d1
ggattgggagaaactttacatgggaaacatttttttcacttggggcaaaagttttgaagccaaccatataaatcccaacttatagggaatttttaaaaaacacatgggccccctttttgattacaaaggagagatgccttattccgaaaaagttataaataacatttcacctgggatttcaaactaatttaaataaggcacatgtttaaaaaaaaataaggaaacctctcaaaacatatgggggttctacaaacaccacccacaaataacatttttttttgcagggggggttttcaccaacagatccagggatgtggcatggggttttgaccaaaaacttatgcatgtggcagatctttctagggtaaaaagggaaaccatgggatgcccttccatttttttggtgccttttgggccaattcaatccacaaattt

SEQ ID NO: 31548 - DNA, 445 bp, Glycine max
  Clone ID: jC-gmst02400076e02d1
aagcaaaaggtcttttgccctgatattattacatgaacaaatcaccttaaagttgttgtgatttatagtgataaattttagttgaaacaacttattacatttacaagacaaaaagggcaactgtgatttacacttttgagtagtatactgtctcatgtatatatataaaaaagcaaaagggggaccaagctgtagaatgagaatcctaagaacaaataattgcactaagaaaacgtggcacatttcaccaagcaaatcatataaccaatggcctgatatctacggaaaattcatgcttctggaatgggtgggagtagtttctgagcaaactgaagatgcccatgattaacttcagaagttttaacaggtgcatggaagtaggtagcttgatttgaccggaaagatatacttttcgagggaactgttggtaatgtgcgcttaagcc

SEQ ID NO: 31549 - DNA, 472 bp, Glycine max
  Clone ID: jC-gmst02400076e04d1
ggaaaaaaatatttgcatccttcgtcagtgccaaaccaatacagttcacaatgcaataattaattttttccccgtcatacctcatgctctagaggacaatacagtggcaacagtcgtctaacctcgcaaaaacgtcaagccaatcaaatacagtgaaacttcagacatacataattattctaaagtagattacaatgtacaaggaaaaagagaaaagagcaaacacatgctgccagaagagaagagctgaggcttcactaactgcatatccccttaagctggcaattgctcccaaaaaaatagcacttggcgtagtgtactgtagcaaaagcacaaatttaaacatagcatcattctcaactagggaaattagctaatctgacaatgccacattcccaattccaaggacaggaggctccaggagcccttgcaaaagtaataccaatagtagttttaagcccaagtttagact

SEQ ID NO: 31550 - DNA, 327 bp, Glycine max
  Clone ID: jC-gmst02400076e05d1
aaaacaggaaataaatggaaatcaattagcaagcaagatctgcaagaccacattttaacctcattgcgacatagttgagggcatgtccaagcctcttacctaaagaatcaaaaataatattacatgtgaaggaaaccaggaatacaacacagtcttttctggttccaaccttacttccttttatcctatgattgggcatcaaaactatgtcacctcctttctcttccctttgattttgcatcaaaaggatgagacttaagcttttttttccgaatgggcgtggaaggaccacttccctctctgaagggcttacccataagagctaac

SEQ ID NO: 31551 - DNA, 430 bp, Glycine max
  Clone ID: jC-gmst02400076f04d1
gtcaataactattttactgttattaagactgcacggtcagtacaacattgaggaaggtgcttacatcgggtcctttgtattgtagccttcttttcaattcttctctcttgctatgctatttaagtacatgacttaaacttcaatcaataactatagttgaaaatacatataccaccaatatattgcttacattataaattttcctgagaacaaatgaaagtaaataaaacattaaaaaccaaagatattcacatgtactcagatgtcagcacagcattgaattgcttgatgactagtatagtagcactcatcgcctcgaattcatggttggaagctgtacttattaccaccatggttcagcccgtacttctgtctcattcgcgagctccaaaaatcagagtgatttccactattttcacctttgctagac

SEQ ID NO: 31552 - DNA, 452 bp, Glycine max
  Clone ID: jC-gmst02400076f05d1
aaggataatatacaatccagcataaccaaagcagaggggttacaaaccaacgaaaccacagactaatagcactcgaattagcaaccagatacacgcactatttctctcgctcataaatataaatgacaagtaggaaaaaaaagagaaagacacagccctcactactatggtcccatacaccttataagatatataggtgatgcagcagtgggagataatctaatcactgtcactgctgctgctgctgtcatggccatgttcatgcttcttattctccttcttcttcttcttcttctcgccctcggcggtggcgccaccctcctcgccgaggatcttgtccttgatcttgtctaggaacccctctttgtgctcttcttctccatggtgctccggctggtgctcaccaacatgatgctctcctttgtattcagtactgtggtcaccatgatgct

SEQ ID NO: 31553 - DNA, 362 bp, Glycine max
  Clone ID: jC-gmst02400076g02d1
aaaaaagccaagtacattcatgttttaaccattgacattcatatgtatgcatgatcccaatttactggtttcatttctcactatttgttccctatatgcgagtgcacgtgccccctgattatgcggttacaccttgctaagcataaagaattcaaaagaattagcttatcaactaaaattacatggcacaggagggaaacttaaacctggtagtgaactaatgccaacatacaaattcagtatttgttttcctttgaaaaatttgcaaaacttagtagaatgacttaaaattcttgtaatcccgccaataggcaacagcttaaaaggtaattccttgtttttcttgcaaaaactttcccatg

SEQ ID NO: 31554 - DNA, 472 bp, Glycine max
  Clone ID: jC-gmst02400076g03d1
gaaaaacaaatgtattatttttatttatgctagaggtgacaaaatatcttgatattaatgtaaataaacctgaaagaaaaatgcgggtgatctccatccttgtctttggaggtgcaaccaggtcttaacttacagactaggagcgggtgccaattgacagaaggtggattcttgcatccaattcaatttacataaccaaagatgggccttagacagattattaataagcattattctgaaatggggaatgcctctcaatccaagggtttcaagaaccacttgttaaaagatgccttccttttaaagaattggaagccaaatgatatttttcagctccatccttaagttctcgataagtaaacccattgggtagagaaccaatccaattttctggtcccagtgacaagataacctccaacagcccttttttgcataaaaaagactgtgttgatgggttgagcgccccttttgc

SEQ ID NO: 31555 - DNA, 486 bp, Glycine max
  Clone ID: jC-gmst02400076g04d1
gaaaaacaaatgtattatttttatttattctagaggtgacaaaatatctttatatcaatgtaaataaacctgaaagaaaaatgcgggtgatctccatccttgtctttggaggtgcaaccaggtttttatctacagactaggagcgtgtgccaattgacagaagttggattcttgcatccaattcaatttacataaccaaagatgggccttagacagataatttaaaagcattatcctgaaacggggaatgccttacaatccaagggtttcaagaaccacttgttaaaagatgccttccttttaaaaatctggaagcaaaatgatatttttcaggtccatccttatgtcttcgataagtaaccccattgggtggagaaccaatcaaatttctggtcccagtgacatgaaaacctcaacagccccttttggcataaagatgactgtgttgatgggttgagcgccccttttgcacaggtgccctggttt

SEQ ID NO: 31556 - DNA, 253 bp, Glycine max
  Clone ID: jC-gmst02400076g05d1
aggatgtcagaacggaagttaccccttcgacaataataaaaacgcaggggatacactgttcactttctcacaatcatttcatcaaacactacttatctttaagccacacactacagttatggaacatcaacagtattatcatcatatcatcattttcatcaattctgaatctagcttccacacaaaggcattactgctgggcgcactgtaccctctgtgcaccaccaggcatgtcatcatcctcatcatatgc

SEQ ID NO: 31557 - DNA, 357 bp, Glycine max
  Clone ID: jC-gmst02400076h03d1
aacgggaacaccctctttttgattttgattttaaaaaacacattgggggggcttacttacaaacagagagtacctgtttttagtggatcccggtaaaaatttcaaaagaacattctattaacaaatttggggggagaggggagaaacccccagagttagagacgtggaaagttttggtttttagacatattttaagggcgacggtcaaaaaactttccacataaagcaggggaatgaatttcttaggccttttcccacttgagggggtgggccacttcccatgggaaggcagggttttttctttaaagtggccataggcagcagttttcaaaaacctggttttttccccccttttga

SEQ ID NO: 31558 - DNA, 424 bp, Glycine max
  Clone ID: jC-gmst02400076h04d1
aaaaaaaaaattaacactaatccgaagaatttgaatgaaaaaaaaatgatgtaatcaaatcacaaattcacaatacagtcatgtccaaagctcaagtgaccgacgaaaacagaatgaataattgactctgattctctaaagagggtccctgtctgacccaattaactcaatttaagaaacggcgattaattacagatggatggaattgtatcgtaatcgataatcttcagaattgtggatgaatgtgaacggcgtacctatgaatgccgctttccacatggagcgttgcgtgattggtttacatgtgtaagcgcctaccacaccggactgttacacttaaacccactcccaaacgcaatgtgccaaaccctgtgcccctttctgatcctcccctttgccttcgggtaagccaactcgtcccaaa

SEQ ID NO: 31559 - DNA, 419 bp, Glycine max
  Clone ID: jC-gmst02400076h05d1
gacaacaataaggaaaattagtttttagtaacaaaaaatatccatagtataaattaatgacaattatttagaacacatggcttaaggtcaaacagaatgatacaacttacagctgatctggaaagacaacaaagcaatgaatcgagagatccctaaaaacacagaaaaaacgttttccctagtatataaagtgcctcaacatcatgtttagcagcgcatggtctctacattaaaattacatagcagcacagattgccctatatataaattcctacttctccaggaacatacaccaaggctttggggcttatgtgggctatattgcctactggctaacgaaaccaaagggaggaaaattggcgtttttttataaaaccaaccagttaaaattgggcagaacacttgggcaagaccacccc

SEQ ID NO: 31560 - DNA, 412 bp, Glycine max
  Clone ID: jC-gmst02400077a01d1
atatatataatccttaaaatgtaatttgctattcgatattggcagggtacattgaacttgttcattattcttttcctaagagaaaattacgtttttccgggaaagctttggaaagtagcaccacaaccacaacctgaatctcaaaacccaaatgcagcttgacatgaatccatgccaaagaacttaaatctttttgagaaattccatgatgttggtattgaaagcacagcaaacaactcggaaaccttggaatccagaccctttggccagagcctcaaactctttctctgttctctctttcccacctggattatgtgccaacatgatcacatcgatgtgaaccacaccttttgtggccaagctagagtctggagccactggaagaatgcattctgccacaaatacctttcca

SEQ ID NO: 31561 - DNA, 468 bp, Glycine max
  Clone ID: jC-gmst02400077a05d1
gtcataaaacatttccaacttttcatcattcacgggaagttctagaagttcaaaatatccaaatataaaacccgcacatcaaatcaattattatacattcatccatcatattcgcaaacttcaagcaaaatacaggattttgcaaatgtcacgataagttacaggaaatgtacagaagcctaacagcacattgccagcgacctgcaacctcatcttccacgccttggtgacaattcagcagatcttgatctagatccaggtggtgatctcgacgacttgcactgaccacgatcagcatcagacttgtacatagatttctcagcatatccattgctttgattctgttcaataccattgccataagcaggagaataagacctacgcttgtgttcaccatccctttgcctgggaggacctcttggtgatctggggtgctcagcttgcctcctaagggaaacagagtaatca

SEQ ID NO: 31562 - DNA, 444 bp, Glycine max
  Clone ID: jC-gmst02400077a06d1
acacttcaagagataaacaaacggaagtatacaaagattactaaagccacacactttctggcataagatttgtagataaacacttgcgaacctgactatggtcaagccggggcaggtatatgccacactagtgcgctgcaacatagcagctacccgaatagaagacatctacagagccaggcaagacatgtgaccatgggaatgcatatcaaataacaatcggagaagctacaaacactgccacggcacatcataccatgtagcaagcatgtaaggggcgctgatcacactaataaacggctcacgtgagctgaacaaaagggaccaaactgtgggcatcaacgactccgggcaaaaaggcctacacaaacgccacctgaggcgaggcatgttgaagtgcctgatccttccttgccgctccgagagacacccttcacagagaaa

SEQ ID NO: 31563 - DNA, 493 bp, Glycine max
  Clone ID: jC-gmst02400077a07d1
gggtgatataatcccacacaaatctttattgcaattatcaatgaatgagtcaacaagatataacacattagaatacagaggtaaaacccttaggtataaactacaattgtctatagcttaataacaaaatgtgacacaatagaaaaagcagccaacactgatatgacctctaaatttccaccatggagtgaaggtgaacatgctcaatcagccttctgattctttggaccaaaaattcctttgactgtctcaaatacctcttcgataggccttgcagcatcaatcttgcgaacttttccctttgcatcataataattaatcacgggaagactagactccaagaaaaccataaatcgcttacttattgtctcaatattgacatcttctctaccctggttcctactaagtagtcgcctctccatctgttgctcagggcactcaaaaaataggacaaatgctggttctattcctgtcactttttcaaatgctgcac

SEQ ID NO: 31564 - DNA, 493 bp, Glycine max
  Clone ID: jC-gmst02400077a08d1
aatgatccaactgtctgatctttacacaggaaatttcatccaatgcatggaaaagaagtaacaaccatgtttgcaaccttacatttaaagtgcttacacatttcaactgcggctcaaatcacaatcaatcatcatcatcatccatatttttaacatatggtcaaaactttttatataggcagatgacttagcaatctatagaaatgcaggtctgggaaatgcttgcactgtcaggtctgctgataaaagggttaatcttgacccaaaccagagagaaaacagaagccaacatcactgaccacagaataacaatggttggggtgcggttttggcgacccatgagacccttgaggaatggatagagatggaaaatgacccagaaggcaaagaaaacctttccaaaaagtggtccccaagactcatatcctccattgagtgcatcagaaaatgcagcaacaacaccaaccatattaataatgataagggttgttgg

SEQ ID NO: 31565 - DNA, 510 bp, Glycine max
  Clone ID: jC-gmst02400077a09d1
aagagtctattcattaggtctcatccattaagttccattgaagtccgaaaacagaaaccaaaaatacaggatgatgaaatctcaaaaagcaaaaacaaatgggaatgtagtttaagtacaaacaaacaaagtggggtggcggctacaaatgctttgcaaatttttcacacttagaagcctgggggcttgtaggcgatgaagctgatgcactgcacttggcgaacgttgtcgaatccgatgatacggatgaagccgttggggtatgcagtcttagcctcttgaagctccttgaacacctgagaagcatcagtgcaaccaaacataggcagcttgcacatggtccagtagcgtccatcgtagtatcctggtgacctgttgtgctcacggtacacgaaaccgtgctccaactcgaattgcaagcaaggaatgcatcccttcctaaggaggtattgtacttcctttgcaattgtgcatcatcaaagtctggcacgtaggaaagaggttaaactt

SEQ ID NO: 31566 - DNA, 527 bp, Glycine max
  Clone ID: jC-gmst02400077a12d1
aatataaaattgtattttttttttgttttcactggagaacatgaccaagagaggattaaaaaaaaaaaaaaagttacaacatagatttcagattttatctaatgggtaataacacctatctatctccctctttcttccgattaccattctccttcggatcgatcgagttatgtctcactgtacattaaccataattattgcctaaaaacattgattaaaaataaaaaagaacagggaaaaaaacagattcttcttatttttttcccattaggaggagcaaatgaacattcttttctccgatgatactatttacgaatcaaccctgctaattccaatacgcttgacggaagcgttcctaaacccatcattcaccgcagcctgaaaacacatcccattctgattgtgcaactctatataactcctcacctccttccttatcatttcctgcatcaccgaccgaaactctgcgctaaaattaaacggcgccatcaccgtcgctgaaaccgacgtcatcattggcagcaaag

SEQ ID NO: 31567 - DNA, 483 bp, Glycine max
  unsure (1)..(483): unsure at all n locations
  Clone ID: jC-gmst02400077b02d1
aaataaaattttaatcctctctctcatttttaccataaaaattttcggatgatatgacaatttaatcacgatatcagctgaactaggatacgaacagaaatccaagcatcaacgctgtccaactgataaacataatggacaatattagactattactgctacaagttgatagttctaccatccaagaaggaaaaagatgaaaattacgattctgtgatgttagaaaaaacttctcattcttcatcagagcctgaactttctgcagctttgccatgtttattcacggcgccattgacagcttgtttcttattttttgtggtctggccatcttcttcatcttcactgtactcactctcataggcatcatcatactcttcatcctcgatgagctcatgctgctcaactacatcctccatgataggggncttcatcagccaaaacagcacccctggtgccagcccgagttcgttcaaaactttgagc

SEQ ID NO: 31568 - DNA, 548 bp, Glycine max
  Clone ID: jC-gmst02400077b04d1
gctggttcagtgtttacatttttcattacaatttccacaacaaagaaataatctaacgtttaatcataatctaagaatgctataacatacaaagtactcttctttcctcgatattggataacccacaattcattcggataagaaatctcttctatttgtatttagaggaagcgcagctgcagcaattttctcccgcaggttgaatttctttgcaattagtggccggacatcatcaacaccaaccaagctctccaagaacggaagtaacaaaaacaattcttgatctgaacgatcatcaaaccaactctcgattgggattccattatccacttggaatccaaatgcctgtggggaattgtcaattattataacatgtgccaaatcacgaccaagcactgttaaatctttgaggtaattcccctccacataaacacaggactcacggtatacacggtggcgaaatatcttccgctttggatcaagcacatttaagaagttgctcggcataaatgctctgactagcagtaaatttaataatctcaaaaaga

SEQ ID NO: 31569 - DNA, 487 bp, Glycine max
  Clone ID: jC-gmst02400077b05d1
attcaaacctaaagaaacacagtaacacaccatcacaaactcatgtaaccctgccaataaaccatcacccctaaactccagcaccagcagcttgctcacttcaatacacaactcccagaatttctcatgtcaccacgtggcaagcacgctgatgtggagccaagtgttgtgcttacacgtaggtgtaccctccataatacaaccaaagacttaagcatcatataataatattaataaagtaaactaaagaaataaaaagaaaaaaaaaaaagaggcttttcaacatggcatgcaaaatggtagacctgatccccacaactaggaccatttttaaacttgtttttctcactcacactgtccataggtctaagcttcagtcttctcaacaggaacctctactggggtttcaactgactcagctggtttgttctcttcctctgtgggtgctggtggtgctgctgctgctgattctgtttcagtagtttct

SEQ ID NO: 31570 - DNA, 444 bp, Glycine max
  Clone ID: jC-gmst02400077b07d1
ggcaacaactttcaaacattacattacatctttgaaattggaaaagggaggacatattatgaagaatgcaaatgatagcaactaaccttataattctcttttgcatttctccttgattttgcaagaaaggcaatttgtgtacaaaagggaaaatgaaaaagtatacactatgtagaaaactgcactgattatgcagaggggagtgattaaaacacgttattgactctttcactagtaagtgtcagtacattaaaaaaacttgactgtacaacaaaatctcacaaaatacaaaatgccctgaagaacaaaaaactcaaaatttggtttttcagtacctcttgttaaatgtcacctggaaattgagaactaacagcaacacatggggcaacgaattagtccattttcattgcaatcagggcaacgctggaatccacactcccctac

SEQ ID NO: 31571 - DNA, 501 bp, Glycine max
  Clone ID: jC-gmst02400077b08d1
gaatctcaaaaattgtcccacttaataaaattccaaaggaaattgatacccccattaatagcctttaaaccaccatacatacatatagcaagcaactatgaattaaaatttaatgagttaacttcccctacttgcaaatcacacataattggaaaatctaagaagttgatcggttgaagcctaatcaattctacttggaagtgatatggaggagtcaagccatggcccccccattgatttgcttctttgctctatactatcttctgagaatgcagaagagacttgagtttgactgtcttgtgatagcatctcaaaggctttaaatcttacatcttctgcactgtcaccgcgtttaataattggtgcttgaattggagtttttccatcaagcatgctcactactgatgacatacatggtctaagagtgggagaaggattggtgcacaagagtgctaactgcagcattctcatggcctcttctgaggaggactttgaaccaag

SEQ ID NO: 31572 - DNA, 491 bp, Glycine max
  Clone ID: jC-gmst02400077b09d1
ggaaatacaaatattattgaaaccaaaaatggagaattagttctattcttggaataatacatacaaatcaatttacaacggcaatgctgagaagattattgaggcaaatgaactgcatatattctaatacaatgcacaagagtacgataggatttctacagaaaccccgttgatgttttagaacaaacgtagctatattggaaatagaatgggataacgttctaagtacaataattttataggacacgggcaaatcatcttatggagttgaaattgtaggaattgtattgtgaattggaaaatgtagaagaccgtgctttatcagatttgggtgaagtttacgaataggttttctgaagaaagtctctggcttaaaaaatgactttggcttaagggataggtttaacaattggaaatggtttaggtatgggtttaaaaactggaataggaataggtttaacaataggaacaggctttggtataggcttaaa

SEQ ID NO: 31573 - DNA, 52 bp, Glycine max
  Clone ID: jC-gmst02400077b11a1
aaaaaatatgcggggagctagatgcaggctccgtagaacagctatgacgttt

SEQ ID NO: 31574 - DNA, 64 bp, Glycine max
  unsure (1)..(64): unsure at all n locations
  Clone ID: jC-gmst02400077b11d1
gaaaaaaaagagggggcgggtgatccgatgtcgacttcnagcagaacaatttcccggattgacc

SEQ ID NO: 31575 - DNA, 580 bp, Glycine max
  Clone ID: jC-gmst02400077c01d1
ctgttcatcgtatctagatttattcaaaaattcctacataagggggtttcagcatagcattggggagaggacagctgcagaaaaactagccatcacacaggtgagttcatttgcccacatcttcaaatccttaggaaggtcaatgatgcagcagttaagaaagtgaatcatcttctaaagtgttctctcataaagaaggaatgtctaagagcttccttggctgtaagtctttcagaggggtcatatctaagtaacccctgcaagagatgtatgagatcgccagctgaatgatctacatgctgcattacaaggttctgaagcctaggaagcttcattacagctttgatactctccctcgaggttgcaccctcaggccagtctaatctaccccttgtaacatacttctcagcatgtcggtcgactctcttcatcatgggctgtggtaatgaaccaagtaccctttccatcattgcaagatgctctaaattttcatggagtcggaaacaagcttcacctgtgcctaatttaaccaatatacatcccacactccatatatcacatggatagctccagccaagtc

SEQ ID NO: 31576 - DNA, 450 bp, Glycine max
  Clone ID: jC-gmst02400077c02d1
ctgaaaggaatctcaatttatatttaaaccaaaaatagagaaggaggtctattcttggaaaaatacatacaaatcaatttacaacggcaatgctgagaagattattgaggcaaatgaactgcatatatgctaatacaatgcacaagagtacgattggatttctacagaaaccccggtgatgttttagaacaaacgtagctatattggaaatagaatgggataacgtgctaagtacaataattctataggacacgggcaaatcatcttatggagttgaaattgtgggaatcgaatcgcgaattggaaaatgtacaagaccgggctttatcagatgtgggtgaagcataagaataggttctctgaacaaagtttctggcttaaaaaatgactgtggcttaagggataggtttaacaattggaaaaggtgtaggtatcggtttaaaaactgga

SEQ ID NO: 31577 - DNA, 475 bp, Glycine max
  Clone ID: jC-gmst02400077c03d1
ctataaactgggtatcctctcaaaatatgaatcaattctgtgtgaaagatttacaagtgatctgaacaatcatttttaagtacagaaagctacataactttacccccaacttctttttctgtcctctttctcaggaaggggcaggcaacaaatcacaatctttacaaatcttcaacgacatgaattcaggagtttaagttgttaggatatctggaattgtcgtggagtgagcccccagtatcttacccccggcatcggggaaattctcacagtcaggtagggatctaatcttgccatcggaatctacctgtgcaggatacttaagaagatgtccctgcaaaagtgagaaatcttcagaagcgaataattgccaattgttgtctgcaattttattcactttatgcacacactccaatctctctggttcttgaaaagtttcatctaacatgccaagatgctctccccaaagtgacat

SEQ ID NO: 31578 - DNA, 384 bp, Glycine max
  Clone ID: jC-gmst02400077c06d1
gcagaaaacactgcaatattagtattcaaggggacaattaatacaaggtggggtttacatgttttgcctaaaactaagggcacgagatagattaacatatgcaactttacctaagcggagagaacatttttgcaattaaaattgctgcctaccaaatcacaaggcaacatcggtggaccaagacctctcaatatatatatgaatctcgacacaaaggatgaagggacaggcttttgatgtacaagatttaatcaaactggtcccaaacgtgagttactttgggtgaagacaagttatcggatggggcatccgagctttccattccagaatcaaaggtttcccattgggttgtaacttagacatcattgctactggtgctaaaag

SEQ ID NO: 31579 - DNA, 477 bp, Glycine max
  Clone ID: jC-gmst02400077c08d1
ggaggtatatggctctcttactagaaggtaaaatgggcgaccatagtcgtgcccatacaatttgatgtatgactgaatggcattatagattcaaatcaggaggaggcttgattatggagcttatatgaaagaatacaaaacaaatcaatcatcatgtttcatttttgaggggtaaaatcatcattttttttttattctttttttctccccgcacttgagcaatagaaatacatctcagatggcacaaattaacccataatggcattattaggtcattgacaaatctgtatcaatgaataagatattcatcccaaactgcatgcaaagtcaggtcaagctggctcttctaagagaatctccgaacagctcattcccaggcaaagacgggagaaactgtcaatttagaatagatgaacgtatctggaaaccttcatcaccttcagaaagcagcgggaatcttgtcaagaaattgccaca

SEQ ID NO: 31580 - DNA, 525 bp, Glycine max
  unsure (1)..(525): unsure at all n locations
  Clone ID: jC-gmst02400077c10d1
gcgagataaacttaagatttcaactttggacatggacaattgggaatacttgactgaggatcgcaaacaacaggtcctaaaccaccaaatagaagcataatgttgatcacttcacagtttgaataatggagaactatatcacacagcaggagcaaaaacaaaaaagaacgaacaataatggttcagggtaatgtaacgaagcatatacccttttaactcggaaacaattacattgataacaaaaaaaaagccttcgattatcaatagtcctctccttcctcatcatcttccgctccttcagctccaacctcctcatagtccttctcaagagcagcaaggtcctcacgagcctcagaaaactccccttcttccataccctcaccaacataccagtgaacaaaagccctcttggcatacatcagatcaaacttgtggtcaatgcgagagaacacctcancaactgcggggttgttgctgatcatgcatacagcacgcttgacctttagcaggtcaccaccaggaaca

SEQ ID NO: 31581 - DNA, 567 bp, Glycine max
  Clone ID: jC-gmst02400077c12d1
aaaaatatatattaaatttttttcactgggtattaaaccataaaccacgtgtttaccagtttggtgacaactctgggtttataaatcttgactataatgtatgagtatgaccataaaaaagcattgcatcaacgtcatagtaagacataattcagtttccataataaggacactaggaatttattggaatttaggacatcaaaaacttaacattggtgtaacttgcagaatatccctcctggaagttattcatgcataatagttctccacgaaacaaatacaacgatgacaaaaaccagaattacaagacacattaatggaaagcactatctctaaggccaggttcggtattttaggctgcactggcaatccaccacagaagggatgagcaccatagcttctgcagtttctacagctttgaccaaaggcggctcaagctagcttgaattgacccatgaggctcatccgttggcaagtacacatcatcctcaaacttcacaataggaccatccttgtttgagatattgacaggtaagaaatgaagatttggcatctttagactgacat

SEQ ID NO: 31582 - DNA, 459 bp, Glycine max
  Clone ID: jC-gmst02400077d04d1
aactatatgctttatgcaacgttcatatcagaagggggaaatagtttgaatcccatccaacaaaaatcatgcgattaaaatccaattaaaaaagcataaagtaaaataagtttttaaaacaggtatctggaggaaagcaactacatttagtccacttcctcaatcttggggccagcaccactttcaccagaaggaggagcagcatactcatcctctggtgcaccagcaccacccacgtgtggaccagcaccaccttggtacatcttggcaatgattggattgcagatgctttccaattccttcattttgtcctcaaactcatctgcttctgcaagctggttgctgtctaaccactggattgcttgctcaattgcatcctcaatcttcttcttgtcagccgggtcaagtttctcaccaatcttgtcatccttcacggtgttcctcatgttgtatgcatag

SEQ ID NO: 31583 - DNA, 445 bp, Glycine max
  Clone ID: jC-gmst02400077d08d1
ggacatgtccagtcccattcagtattggctatacgaggaaacaggtaatttcaatattcaatccaggatacacatgcacttttaaaatttaaacttaaaagaaaaaattattaaatttcataaaatgctatttaatactacaacatacgttgataaagctaaccaatgcaaatttaccttagactaaagtgcaaactgccccctttctctcctaaaatataatgaattagaagaggccaagaaaaagaagtatcaaaatttcagcttctctttgatgccaatcgcactcttttcccttggatataaaacttgctactacctgtcagcttttggcttaagtgagcaacagactctcttgttgaagaaaaatcagacaaaattgaagatgaatgttcatcaataagaactttgagctgtttgagtttcaatgattctccaggcacct

SEQ ID NO: 31584 - DNA, 557 bp, Glycine max
  Clone ID: jC-gmst02400077d09d1
aagtatacaaatctttgattggccccacactaaaaccacagtggagcagagaatatccagtaaatttacatcacgaaggatttcctcccaactaattatacccaagcaatcatacaaaccaatttacttaactgacattacattaagtgcacaacatgtatgcatacactgatgtttcttgaagccatgaatgtcggaactatcagatatgaagccacagtagcattcgttttttcaatgggaaaagcccaaagatccaatatctcatctgtctcctgtaacacagaaatactagttgtgcttgcatggaagcattgcgcaagacctttattgtcatcatgatccatttgtttggttctcttctccaagtagctgttcaaaccgagccacaatgtgttttccataagtgtattttttcaaagcatgagcatgaagtcttatgcgagaaagtaatgttgctcgctgattttcagaacagatctcaaaaaccttctggatcacataatttgcaaattggtctttcatcattgtcaataaattatcattttgtttgtcat

SEQ ID NO: 31585 - DNA, 462 bp, Glycine max
  Clone ID: jC-gmst02400077d11d1
ggcactgtaatattattttacacaggacaaatacattgggcataatgataggcaactacaatggaatctttattgcaaccttcacattttaggcaacattgaagtggacagctaatatcatgatataaacataggaaatgcatatgtgccttacaatttaaaagggtaactacgctatactatctcactcgactaaaaaagacatctaaagcttgaaggtgtatgcaataaaataaagaacttcaaggccataatattaactctcccaaactttagtagcgtcctataaattaaaatgacagaacgacaaaattcattcgtgtagtctctgcccattttagtcctctagcagcatcccaggttttgaacaaacggctatgttggctttcagaagaaatgaacatgttctcaaggaacattcatcacttgtattgactgcaacatgtcagaaacgggaacgac

SEQ ID NO: 31586 - DNA, 53 bp, Glycine max
  unsure (1)..(53): unsure at all n locations
  Clone ID: jC-gmst02400077d12a1
agaanttatggggggtcatagatgccgcatactgtagaacagctatgacgttt

SEQ ID NO: 31587 - DNA, 525 bp, Glycine max
  unsure (1)..(525): unsure at all n locations
  Clone ID: jC-gmst02400077e03d1
acaaattaataactcttttactcaactcgaaatttttgctacaaaatgaactgcaaaaagaattcccacaaatagggatatatataaaaagggaaaaaaatgaaaagaattccaagaaaaataaaaaaaaaacaaccgagacaccaactcctaatgaccttaagggacctacaattactagacctaagaccctaccctttttgacctgcatatgtctaccctttttttcctcacttctcattacaatcttcccctaactgctaaaataagatcatcatcatctattgctcctattcccccagtccaaccctgtacaaaaaccaatgaaccaaagaaatgaaatatcaaaagaaataacataagacatgactctagagggcagcaatgaaagagaaatttccaacaaaggatcaatcctccttcacatcacatgtactccanggtaaggctgctgttagtgtttggaatgagttcaggtgaagcagctgaattgattgcaaaaccagatttgtcaaatcccctgca

SEQ ID NO: 31588 - DNA, 457 bp, Glycine max
  Clone ID: jC-gmst02400077e04d1
gctattaccttgaatcaaaatacttttaattaaaggaacttcgaaagttcacactgcaggtaacagtgaactatcatgaaaacaaaacccaatcatggtaacaaaataggtatacaactgccaaaggatcgtagctacatggggctttaaatctaaagacaactgaacaggaattgaaaagcagccaaaaaggcaagccagctttataggttcttgggggagcattagttatcaagcttgtgaaataagggaaaatggacatggccaatatcaatagtctccacatgttgggtcccctaggtagaggtgtcaaggggggccatgagtttgtcaaaacctggttgatctggtcttccaatttaggcagtgggcttcaggcttcatagaactcagctgcagggacccatcaagttttagtaagcatggtttctcctccgagaagaaccattctgagaag

SEQ ID NO: 31589 - DNA, 514 bp, Glycine max
  Clone ID: jC-gmst02400077e07d1
atcgatctaatatcaaacctcaaataaccctggaagttgtcacatatttggtgtccaacgtaagaaaaattgtaagaaaacgtacaaataatgctggaaactctgtattgtaaacacaagctaagacagagatcaacagaccaacgaaaacttggaccccgcacaattgtttcccgtaaaaaatgaaccagaaaaacattatgtttaatttcataaaaagtcagcagaaaacaacacaaatgccaaataaaataccaatattagatgtccaagtccaggttgacaaaaggcagcaaacgtctcgaaagatgcagtattcaagctttcaaatatggaccatatggatggcagcagctacagttttctttgtaatgatcacaccgtgctttaatccattcaaaaactaccaataccgggggagcaagattcaaaagtaaatgttccaaatgatgaaatcttaccaattaaagttgagaagtactatgcccaattcctaataatcatactcccggga

SEQ ID NO: 31590 - DNA, 465 bp, Glycine max
  Clone ID: jC-gmst02400077e08d1
ataactatggaattttatcacgaaaaggaaaaattttacatcattgttgactgggaagatggattttggtttggtacacagattgcactcttgattccaacaacacgatgtacttatcaagcatagagaccacagcttcaaactcagttacctgcttctcaatgctatcaatctgctcgacatactcgttaaagctaccactcttgcatttgaactgctccacaaaaaccctcaaccctgaagccaagtcaccaaaccctttgtactcttctgctactcttacattcatcttctccaagagctctagatgattatttgtcccctgaagctctgatttgatcatgggggaaacactactgaatagaccatcaagcgattcagcaagttcatgttgcttccgattgtggggttcatctttcttatattatgcataggtgagcatatattcgaccattcacaagagag

SEQ ID NO: 31591 - DNA, 323 bp, Glycine max
  Clone ID: jC-gmst02400077e09d1
aaattcttgaataaaatagcgatactccgtggttccccaagggaacgtcttatttaaaagcccatatatcaactaatagccatttggtcaacgggggagaggatgcacaatggccttgcccatagccaaatcaactcattaagatctcaagcgagctgcttctaccacttgtttattgcctagatctttattccaagcacaggatgaaccacatttttcactgttttagccaattgaacagctgctccaacataaagatcaagcgtgaactgaaacagattatgatgggctctgtctgggatatccaagccttcaatgaaatc

SEQ ID NO: 31592 - DNA, 524 bp, Glycine max
  Clone ID: jC-gmst02400077e10d1
ccccccttctttttttttggttttttttttttttttttttctttttttccttcttttttttttaaaaaaaaccccaagccttatttctttttaccccccccccccccccacaggggggggggggaaaccccccccccccccccccccccccaaagccccggtccccccccccaaggttttccccccccccccaaaaaaaagccccccccccccccctcccccttttttaaaaaaaccccctaaaaaaacggggggggggggggggccccccctccccccggccccaaagggggggggggtcctccccaaaaaaaggggggcccccccccggataaaaaccccccccccccccctctttaaaagggggggccccccatttggggcccccctttttttggggccccaaaaaggccaccccttcccccccaaaaggctcttttcgcccccccccataaaaagggggccccccacctctttcacaggggggttcttccgccggcctcccccccccccccccggggccc

SEQ ID NO: 31593 - DNA, 469 bp, Glycine max
  Clone ID: jC-gmst02400077e11d1
cggacaagaaaccaaagggtaacggttatttttacaaatttcaacaagacttcatattgggataagaattacccagctaaagagaacatgttttctatacaagctccttgtttaaagaatcaaagaatgatcttttggtggggtattattttgaatctattatttgactgaggatgcaaatgtacactggcccatagaaaacgtttttaaggaatcatgatacacctgcaaggggaggggggcttgaaatcatatgtagtaaaaatttgggctcagaactggtatgggtaccctgaaaggcacctgaaatggttccaaagggatcaaaattgcacatcctggtgaaaatagcactcacttccttgttaaggtgcctagaagtcttcatgtcacaaacttcggtggtaattttgaaaacaggattgagcattggagttattgcacatgcactcaggaataggaaacttgg

SEQ ID NO: 31594 - DNA, 493 bp, Glycine max
  Clone ID: jC-gmst02400077f02d1
ggaatcatcatttattcaaacctaaagaaacacaataacacatcatcacaaactcatgtaaccctgccaataaaataaaccctcatccctaaactccagcaccagcagcagcttgctcacttcaatacacaactcctagaatttctcatgtcaccacgtggtaagcacgctgatgtggagccaagtgttgtgctcacacgtaggtataccctccataatacaaccaaagacttaaccatcatataataataatatattaataataaagtaaactaaagaaataaataaaaaaaaaagcttttcaacatgacatgcaaaatggtagacctaatgatccccacaactaggaccatttttaaacttgtttttctcactcacactgtccataagtctaagcttcagttttctcaacaggaacctctactggggcttccactgtctcagctggttagttctctctctctgtggatgctgctggtgctgattctgtttc

SEQ ID NO: 31595 - DNA, 587 bp, Glycine max
  Clone ID: jC-gmst02400077f03d1
gctccaaaaggctcactcattctttttaattgtaagcattataagggaagtcattataatatacacacatgataacgctctgagtgcttcgccaactggggtcacaagaccgtggatggagttacaagaaagtagagttacaacattaagaaaaggtctatgagtcaagctgagcataccagatgccttgaatcttaacatccttaggagctttagcccccaaatcagtatcagaaggctgaacactctcgaacaccccaataacctcaccagtctcaggcttggacttggtgacactcaaggtgattttccctttggaagatgaagcacttttattgttctccttggcaagttcctcttcatctcctcttccaccagcaggcaaagcaacagcattgtcataaccagttgaggcaccccttcccttggggtccaagaaagaggaaccacggtaagacggcactaggaactccccactgaagctgtctggtttcccagatgccaccaactgcttaatggtgaagaagaatggcacactcttctcccctggaagctgttcagtgacagcagcatagtcaattccgctt

SEQ ID NO: 31596 - DNA, 532 bp, Glycine max
  Clone ID: jC-gmst02400077f04d1
cagagcaatgttaggattttatttagtctgacatgctttttacaattcattatttttcaatcttttctaatataatggtattggaaagaaaatctatattgatttaacagctggctacaatctgaaagtatgtgcattaagttaaaatgggcatacaaaaatatgggagttgtcattggttattcttcattgaagcattgaagcacaaaggctgcaacaaattcagctatttgcagccaatccaaccaccatttcgttggatcaatttgcttcaagacagcagcatttgcatcaaataatcaatcagacatgtaatcttctgctccactagactgataattgtcctggtgtggtgcacctctatgttggtcttcgagaccatcatccatttctaagccaactctcttaaaggaatttccctttgaacttgtatataccccagaatccttccgctcaatcgcagcaacactagaccttcgccttacagtcactctggcaggtactggacattgctcaacttcatcacccgatc

SEQ ID NO: 31597 - DNA, 483 bp, Glycine max
  Clone ID: jC-gmst02400077f07d1
cgcatacataattcgagcggtctaatgttttacggaagaagttaataaaattatggaaagaccttgaaaaaagcagatcattatagcagccacacaaagacactacatttccatagattgtaatccagttgaagcctttgatttcttcttctttttggatccatttttgttcacttttttcttgggttgttcctctactacaagttgtttgctctgtatatattgatgaatggcagacaggggatctgctcgaaagttagggtcgttgagaacagcagaaattcgatctctttcagtcaatactaatatctgcctggatttacacttaagtttgccgtcattctcacaaactggtttctttgatgacttcacctcgggaagggactctaaaagtgaagatagattatatgccttcaatttgttctgccgcctttggtgagtgctctttttctttttcttagaaatagacttttgggtactcaa

SEQ ID NO: 31598 - DNA, 426 bp, Glycine max
  Clone ID: jC-gmst02400077f12d1
cagaaggattttttttgggttttggtttttttttttttttttttaaacaaaaacaaaagggggcccccttgggccttttgcaaaggccctgaaacccgcttaaaggggggctggtgttgccccccccaaccccaaaccaattaaaacaaccgggaccattttccgccccctttttaccaaaacaaggggcaagcccctggaaaccggttcccgaaaatggccccctttaattccccccccaacttctttttttttttaatcgggaaaaggtttttgcccccatgccaagagggcccaaaaggggggccaaatatgtttttttgccccaacaaaaagggggaaatttaccccctcaaaccaaaaacatttttttttccccaccaggcggccacttggaaaaccccgggtcttttaaacttgggcccg

SEQ ID NO: 31599 - DNA, 527 bp, Glycine max
  Clone ID: jC-gmst02400077g02d1
catgtcactattattggatttgaagatactatacattgtagacattttattcacttggggcaaaagtatcgaagccaaccatataaatcccaacttatagggaatttctaaaaaacacatgggcacactttatgattacaaatgagagatgccttattccgaagaagttataaataacatctcacctgtgatttcagactaatttagataatgcacatgtataaaaaaaataatgaaacctctcaaaacatatgttgtatctacaaacaccacccacaaataacatttttttttgcagtggcagttctcaccaacagatccagggatgtgtcatgtgtctttgaccaaaaacttatgcatgttgcagatcttatcagtgtaaaacgtgaaaccatggcatgcccttccattttttgttacctttagtcacaattcaatgcacagatttccaacaccacatcacttttggccaagaatgggttgattctcacccaaagtagggttaaagattgaagacaggagaatag

SEQ ID NO: 31600 - DNA, 456 bp, Glycine max
  Clone ID: jC-gmst02400077g03d1
actaggaacatgccagctctagcatccaaaatgtctcgagcttacacaattcggggattaaagcaaaccgagtttaagacataaagttgaagaaaagatgtacataatcagctagattcaagtctctcttatgcaggcatacatctacaagggggggggatttcacttctttcacttctctgagccctttcaaggggcacatcctcgaagtgtgttcaacatcaaaagcatgagcttcttaatgggcaggataagggaaagtggtgaatgcacggtgcgcatggacagcacaggcacaatgcactgatgtcaagttgaggcagccactcatgatgagtgagtgcctccctgagcatgtgtggagagaagggaatgagtcacaaacagcttgaacagcagatggggtgagtgcagtgcattggctaatgttcaaagtccttaaaccatctttatcat

SEQ ID NO: 31601 - DNA, 508 bp, Glycine max
  Clone ID: jC-gmst02400077g04d1
attcgacaactgtgtaaatttcttttgagtgacaccaaacttgggatagtcaagatgcccaactccacgacagcgcttattcacggggcatacaaaatacaaaataacaacagctaatcatgaaagaaaaacatacaaacataaccacagtaataatatgaaaccagtgaacaggatttgaatcaacgcatcagaggagaggtttctatctgaccagaggattgttgtgagaaaaataaaaaatgaaacccaacacaaaggcaaagtcccgcctgcacaagggactaatatgagctatcctatgatatctgatcacaatctgagacgatgtggtttgagagtcttgtaagtcactggctcagaaggtggactagtgggcttgctctgcctcccccagtacgatttgcacggaacgtagtaaaatgaattcgggttcggacatgttttctttgttttgtaaaactggtagcattctttgggagacttttggttaggaagccccggaatg

SEQ ID NO: 31602 - DNA, 544 bp, Glycine max
  unsure (1)..(544): unsure at all n locations
  Clone ID: jC-gmst02400077g07a1
gaggaacgctagggactctcatgttcttttgttagcttcacttcccattgggtttgccgtcttcatggttcacttggctacaatccctgtcactggaaccggcattaaccctgcaaggagtttcggaccagctgtgatcttcaacaacgacaaagcctgtgacgaccaatggatttactgggttggaccgtttgttggagctgcggtggctgcaatctaccatcaatacattcttagaggttctgcaatcaaagctcttggatccttcaggagcaacgcttaattaaaaaaaaaaaaaatcaagtttctccactacctaaattatgatgatttggtcctgtgtcacccaaaacaagaacagtgtttcagttcaagtctgtctacaggtccctctcttttggcttttctgcttacccgtgggtttgggggaaaagccaaataccgtgggctcttgaatttgtagataagaatgcttttatgtcaagggtgtatntgtatcccttttgtttttaatttcttttttcttccaagtatttatcatcat

SEQ ID NO: 31603 - DNA, 466 bp, Glycine max
  Clone ID: jC-gmst02400077g09d1
ccacaaatcagctcctgtaattaaggatggtgattctatacaaaagggtagtactgaataaaacctaaagatccctaaccccaatgaaagacttctaaggattgaagacaataatacactggccaaatgatacacggattaagacacaatataatgccataacattttgatagctattttaaaagtgggacccccacactggttttgagcatgctttccttacacatttgaataaacatcctatgggtttcttgcctctacaacaattcaataatccttgctcaggcatcatcacaaacaatccctaaaagatggaaagcctcctgtgtcgcaatgatgaaccagatgatttggtatcttcagggactacaaaagtagggctattggaactccctgaagtctctgagctcctattttctccttggcctttccccacaatccataacttgtcaaaaattctccttga

SEQ ID NO: 31604 - DNA, 491 bp, Glycine max
  Clone ID: jC-gmst02400077h01d1
aacactcaaaatctaaaatctccattgaacgaaaaactgaatataaagtaaagatcaggccgataaaacgatctataagagatggaaaattatcattgattccaactacagacacgtgtttctagaaaactaaacaaaaaataaagcagaaaacattatacttggggaagatttgagctggttggcgctccaaaaccaccagatccacgaccaaagccgggccttccgccaggacccccaaaagagggcctgtagtcagcaggagctcctcccttgtctcctccaaagtgaccaccaggtcctgctgggggacctccacggtatccatcacgatcaccaccaaacctacgctccccttcaaagcgtggtggacctctagggcgatcaccggatgggcctccaaagggcctgccaggtggcttggcttgcttcttcaaagtagcagggacaatttccgaaggaaagttaaggtaagttctgagaaactcgat

SEQ ID NO: 31605 - DNA, 560 bp, Glycine max
  Clone ID: jC-gmst02400077h02d1
gccacaacaacttttttacgattatcattatatacaagaatttcagaacgatggtattcattttcataactgatacatacgcttcacatatcatacataaatcgggagggatatggcacagcaacatcaaacgaatatcattatatacaagagatgtcatccataatcaacaatacatgtgagtgtttggtttgccgtttgcacagctccaaactccgttcacgtgttccatagcagcaaacggaacagttatatacagctggattggaaaaaaaaggggggttacgtcgaacccaacatttttccaaacacgcagaaaggcttcaacagaatgttattcatgaggcatcaactgaaacagccaaagcattcagttgaacgtgttggttaccctcactgtctgggtgaacaatgacagtagcatgagcctcagaataagattgattggctccttcttgtgaaactgatatggaacacactttatctgctgtgctgctttggtcatcttggactttggaaataatttcccattcctctttaagggatgctacttctacacc

SEQ ID NO: 31606 - DNA, 578 bp, Glycine max
  Clone ID: jC-gmst02400077h05d1
aagcttccatgtaaaatttataaacttgacttgctacaatctaaatagatggtatactggtgtgtttggttcctgcggtgtggtgaaagggatacaattatttttttcacattcaatctcaccacaactctttgtagcctccagatttctacataaaaaatgtgacttttgtggcgccagcatgaaaccaagcatcaacctaatacagtttacttaacatgattatgtaaaatagagatttatttacacttagttcttattttaagcttcacattctggaaaatgtgtagtccatcgcatccacaaggaagtctgcatcttctttggtgaaacataggggtggtgtaattctgaatacatttccataatagccaccctttgcaatcagcactcctaattctttcatttggtccatcacatgcagggtttcactttgtgctggtgttttaagtttgccatcactgacaagttcaactccaagcatcatgcctcttcctctaacatcaccaattaattcatatttgtccttgagtgcattgagtctctttttcaaataagaacccactacaaaagcattt

SEQ ID NO: 31607 - DNA, 544 bp, Glycine max
  Clone ID: jC-gmst02400077h06d1
attctcatccatatcttaggagaatccatatcacacattgacttttcaaataaactacgatgcatgtcaaatatcacaatattcgtcatctttcaaaaaaaaaaaaatgagcggtagaatgcgaagtgacattaacattacaaccctttatttcttggaaaaaattacagacaaactaagaaggttcagttccactacatccattagtagcaggaattgccactaattgacattttaaggttggattcaaaaaccgtcaaatataaatgtaggaagaagaaaggacaaggactactacatcactgttatacagcccaaacccttgtgcttccccttacctctgtttttttggtcatttccttttaatcaacacttcttcatttaggttcttgtggccataatgtgatgatcactcacttggccatcatcaccttaacgaactcctcgtagtttatttggccatctccatcaacatcagcctcacgaatcatctcatcgacctcttcatcggtgaggtttctcccgagggttggtcatcacatga

SEQ ID NO: 31608 - DNA, 505 bp, Glycine max
  Clone ID: jC-gmst02400077h07d1
ataaagctcgagtaataaggataaaatgcaagtgatatcagagtaatacattgtgtagagtatttggtttatatagtttgtaattacgggcttgtcagaatgtgtatggaccagcccatcagcacaagttcataatatacaatgttcactattgttttaatccgtgttcttcctgttggatttcataacctattacacaactgattgatagcatgggctaaacaaactgcagtatttaaatatggcaccattttctttccgtgagtaatgtagctgctactggttttatcaacaagaacaacattaacctcacatagctccatctttgcttgaactctgctccatgtcagtctgatcttgccatggccacttcagattagaagatgaggagcactgctgtggaactgaaaatgaatatgagcttgtactggcacactgcttcttacatgatgaaaaatcagctgtggagcaaatgtcttggtcaatgcttgacatgccagaatct

SEQ ID NO: 31609 - DNA, 509 bp, Glycine max
  Clone ID: jC-gmst02400077h08d1
aaccatatgcctttggcacccccaacaagtattaaatataaatatatcttacagcaaaagatacaaaatacacatctaaaaagaattcataaatatataccacgcgggcttttgtgctcatagatccaacccgagaagcaattgaggaactaagaatggacaagcgtagctacaacaaataaggttgagagaatttgctccttttaagaagagaacaaaaaaaatgtggattgttcatctagtcttgaagccaaaagcttcaatgccactcaatcctagaagagatgtggaaatagagggttgaaaccaccaaaaacaaccttttctccatattttttttgtttttccttagaaggaagtttagagatgattttactcaaagcagaagagaagctataaacacggccagagtggacaagaagaagcagacagtgactttaggctgtgaatttccctgtggagatttggttccggcattcgggctggaagctggggctattttagcaaca

SEQ ID NO: 31610 - DNA, 487 bp, Glycine max
  Clone ID: jC-gmst02400077h09d1
acaagagttgtattatgaattttttatctaaaattataaagacgggcaattacagccggggaaaaaaaatctcagggcttccccaatatagaaaaataatacatcctcattctcaaaaccctgtggattcacctgttaacattgttaggtttccccacacatgaccagaggcttcctccaaaaatttattgtcttcagcaacaaacctatggaagtgctcaggtctgactcaaaaccttaatcgcacttgatatttctgtagatcctcctcacgaacaaatttgaaccaagaaaacccacagctccacatagaattcctagtccaagagaaaacatcgaagtgtatccaaaataaaagctggtgtggaagaagcctgacatcttcgtcttcacatagaagtagtatattgagtacaaataaacataaacagctgttgaggcagctgaaaagaaagaagttcattgccagtggttgttctcagcattt

SEQ ID NO: 31611 - DNA, 330 bp, Glycine max
  Clone ID: jC-gmst02400077h10d1
ggtaataatattttatgattatgtcaacaacttgatcacatatgggaaatgttctattacaacagagaaggaaaaaaatagatatattgttctatctacaatctctcttgaatttgaatatacaagattgaaaaagataataaacagaagcaatcaacaaatcgcacccacaagcaggtctgttaacacattctctgcaggggtttgaatttcagtcacgctcatatgcacaaattggaagcaatcaataaataaataagttggctttttatggactgttaccaattgaaaatttcaagttatcaaaaaggcttggatccttaaaaatgg

SEQ ID NO: 31612 - DNA, 399 bp, Glycine max
  Clone ID: jC-gmst02400077h11d1
gaccaaaaataggcatttctaaagccttgtttacacccataggtggcagttaggagcactgaaatacataaaagacaaggccagtatcaaattatggacaaaacaagaaaaactaagggatgataaaggtcattataaagaattctatgaagagtatgccaatgcaatcacataggctatttccttgttgaagtgttagcaaaaaactcccagatagcaagtaaatagacaaactctgaaaattgcaaatcctttttaagtctcctttctccggcgtaagatgaaactaccctggcaggcaaattctgctcccaggctgaatattcgtcaagagattgggcaacaatcttacattttatgatatcatatgcaccactccatcagttatcatgactctat

SEQ ID NO: 31613 - DNA, 573 bp, Glycine max
  Clone ID: jC-gmst02400077h12d1
gaaatcatattttattttttttgacaagatagagtaaggatgagacacacgattgatactaccaaaatccacaagatagagtacattgtttttaacacaacagaattctatggactaccattaagcagcaataatttctagatgaaagcaacccaggtagatgttgcagcaacaaccttggcaaaactagatgacaaagttgaggggagatattattaaagattgaaccaatttgtgcgggcttctactcccttgtctacctgttactataagccgcatactaatgtctaagagctcaactttgactattattattaactgggtcgctttgtttctccatattattttgagcatgaaatgaaaatgacagtatgttcctgtcagatttggagactggcagatatggagcttgcaaggctgagaatctcaaatggtggcctattcatcacgtctttcactgttaaggggcatgaatctgtgatccagaaataagtaaatgcagactctggatgccccccatatcatgtccaaagcgtgcccatgatttatttgggaaaataccatgagtcacgt

SEQ ID NO: 31614 - DNA, 560 bp, Glycine max
  unsure (1)..(560): unsure at all n locations
  Clone ID: jC-gmst02400078a01d1
gaaaacaaatatcgattctttttcatgctttagaacacaattgaaatcttgaagattcatgggggggaaacacaatttaatctgcaggaaacgcccaaaagaagtgaggaaattggaaatttttgtctcctcagctctattagtccaggaatcaggatcaaagaagcaatacctactgtcaacaaacatgtgaattcataaatacattactgaataatgttcaacattaattaggctggttgaatcataagccttgtatggatccacccaaaacatcgaggatttccatgtatcaataacagngaatctgttttttctttccacttttggctgaatattctccagcatctcaattttggtagtacaattgggatctaattaatttcctaccttccaagcagaaatgtaactaagaagtgaaaataacaataaagagtaaaggagaagtatattttattggcagcaggtttaacctgaactgaatacatatcatatattaagaaggatgaacctttcagaagagagtcctttccaagctgatttcatggaagcagtggctg

SEQ ID NO: 31615 - DNA, 536 bp, Glycine max
  Clone ID: jC-gmst02400078a02d1
agctcaatgtgaggctttagataaccactttttaccatatatatatagagagagagaatacgaagcacactgatcacaggatgatgctctctttaagtagggaagcagatcttatcagtacacataggtaggttgaaattctagctctagcaatctagctagagaaggtagtacttgcacaacacacagcacatgataatttattttatacacaatctcattctcatggtgctcaagatgcatggactaattaagcaacaatgttggtctgataggcagtgtccacagataaattgggtacccataaaatggccttgcttccaaggaaatggcaaacagggttagttccaggatcaactcccataagttgatgaagcatttgatgattcattccagaagtatttgagtggcaaatagcaagtgcctgagttttggttccatcaccagccaccaatggaaccatgaaagctgttgttttacggacttcatggcagtaaaatactgcagttctgaaatttagcctatgacacatcact

SEQ ID NO: 31616 - DNA, 515 bp, Glycine max
  Clone ID: jC-gmst02400078a03d1
attaacttgggaaagtgtaagatatcacagtatatagtatcagttacatacattacagtaaaaacatttattctttagctagctagcctctggtatcatatcatattatctatatttgtttcacgtacgaaacattttgtactcccaaacacaaaaaaacaaagatcattattccttggattgatgagggtgatgatcgctccaacaataagatggaagaacgcgccgttgcaacaacttgcatgcatgggcggcacaagagagagagattcgatgaatgaagtaagtaagtaataatgcgatcgatcacataattgtgcaagcagaggtgttttcttcacagaaatattcatcgcaacggctcacgtaacaaggcctgctcccaccgtaactatcataaacaggccttccataataagcgtcataacatggtgggggcccaccgccgtacccataaagcatggccaccgggccgacttctagcatggacacagcaaccccaatcggaccaccac

SEQ ID NO: 31617 - DNA, 472 bp, Glycine max
  Clone ID: jC-gmst02400078a05d1
cccaaaaaaaaaaaccccgggcccccttaaaaaaaaaaaaaaccttggcccaaaaaaattttcccaaaaaatttttccaaaagggccggggggaacccccctccgcccggggccccctgaaaaaaaccccccctttttctttgggggggggacccccccaaaaccctgggccttgggaggggggaatttcccaaagggggggggccttttgccccccttaacccctttgcccaaaaaggtttttcccccttggaaggggggatggctttttcaaaaaaaaatttttacccggggggggggaatatttttttgccaaacaaaaaagggaaaacccccctcccccccccccaagggggcccccatggtgttacaaagggggggacaaaatttttttttcccagcccccccttttggccaaggggccaaaattctacttggggttttacgggggccaatacaggaatttttttcc

SEQ ID NO: 31618 - DNA, 493 bp, Glycine max
  Clone ID: jC-gmst02400078b01d1
gttgtatgattttatttaattagacgcagaaaaatcggaagaaattcaagaattgagttccaaggaacaaagccaaatgccttaatatctcagtgatatgtattgtacattaagtaagattggagaaaaacatgaagatgaatgatttagagagttggagctctctcagcagatccagaaatgacagtgagcaagttgttgccaaaagggtcactgagatgttttgcaaggttctcaacaggaccttctccagtgacataagcttggaagtagaaaccaagcatggcaaacatagcaagtcttccatttttaatttccttcacctttagcagtgcagcttggtctggatcatttgcaagccccaatgggtcaaatggaccacctggatgaagtttgtcttcgaaattcaggccattaataattctgtagtactctgcacctcccacaagaacaatctcagcaatgacagccacaataagattgatggggatgg

SEQ ID NO: 31619 - DNA, 445 bp, Glycine max
  Clone ID: jC-gmst02400078b02d1
attctggaaatcgtaatagctatagacggtaagaacgaagttgggtcctaaagatcactatcattatcgctgaacaatgttatttaacaaaagtatcaaccacaaataaaaacaacaacccaacttcccaatcatcgtcacgtccagcaaaatacattcaaaagctatctaaaatctggggaacccacattggcattaaaaaccatgaccatacaattttttagagaaatattatgggcaccatgcctcttcaacaatcccctaaacgttgcttaggcatcagcaaacccaagctcggaaagcttttggtgagcctcagcgtaatcagcaaagaaggcatcttcgtccgctgcatatttatcaacgagagggcggaatacagggtcagacaaaagagccttgtcagaaggtagctgaaggagaaccttcttctaccactcaacac

SEQ ID NO: 31620 - DNA, 539 bp, Glycine max
  Clone ID: jC-gmst02400078b04d1
agaagttggttttcattattggaacacataagtaacctgataatcaacaaattctctcaagtgtactcctcagtttacaggaactcgatccatatttaccaaaactaccttggagattttgtagacagacatttcccacatgagacaagattcagcagtgcacgtggctttcggcttcgaattttcaagcgtgacagctttcgccgggttactcttgatgctttccagcatatcaagctccttgatcttggttccagtctcagattctcttgttcaagcttctcagcaatagaaaccgctttacgttttgaccacccacttctctgaccttctgcctgttggatcacatgagcaagagatactttgcttcttacaagacttcgactttgaccttgctccataagctttctttcgtctaaatgcgacttaacaattggcattttttgggaagctgatgattgtcctatacttgtaccttctaaacttttataagatgttccatgagcatcaacctgctgctcgctattaatgtgctccac

SEQ ID NO: 31621 - DNA, 482 bp, Glycine max
  Clone ID: jC-gmst02400078c02d1
attcaaacctaaagaaacacaataacacatcatcacaaactcatgtaaccctgccaataaaataaaccctcatccctaaactccagcaccagcagcagcttgctcacttcaatacacaactcctagaatttctcatgtcaccacgtggtaagcacgctgatgtggagccaagtgttgtgctcacacgtaggtataccctccataatacaaccaaagacttaaccatcatataataataatatattaataataaagtaaactaaagaaataaataaaaaaaaaagcttttcaacatgacatgcaaaatggtagacctaatgatccccacaactaggaccatttttaaacttgtttttctcactcacactgtccataagtctaagcttcagttttctcaacaggaacctctactggggcttccactgtctcagctggtttgttctcttcctctgtggttgctgctggtgctgattctgtttctg

SEQ ID NO: 31622 - DNA, 334 bp, Glycine max
  Clone ID: jC-gmst02400078c03d1
aggacaaacaattaactttcccatttggataaaaaaaatggtttaaataaattaatccctaacattaagccgaataacaaactgggcttggctccaaaaaaaaaaaaaaaaaaaaccccttgggccttctaaagggggttttttaaagggaaggttagaaactttttttactatacaagctatatgccggggtgggaaaaaatctcattttcatttcttggggaaacccaaaccggccctgggttgccacaagggggtaaaaaacaaatccccctttttgaagattagaaatagctccagcgaaacttttttggccgccctttttttcgacccc

SEQ ID NO: 31623 - DNA, 494 bp, Glycine max
  Clone ID: jC-gmst02400078c04d1
ggattattatttttgtcttgaacattacaattacaattaaatacgatttcgtacacgaaattacacatcccaaattccttgaaacaagtttgctaaattaaaaaaaggaaaataattaacaagcactgctactcctattatattattattacaggaaattgggagatttaaaagtaattaggatttaagcacaggcacaagaagtatcaacaacaagggaatcttcgccctcgttcctgaagaagaagtaaccaacagcgagacccacgacgatggccacaaacacccctccgttgaaggacatcaccgacaacatcaacaagtacccgaccgcggagctcagcccgaagagaaacgctccggcgacctttacgcccaccttgacgcggtttccggcgagcttccgtcgcataagaggggcctcgatctccgccgggaagggcttttcggagccgatgagcttgaggcggatgcggcgattctcgaggaactgg

SEQ ID NO: 31624 - DNA, 475 bp, Glycine max
  Clone ID: jC-gmst02400078c05d1
gaattaaacatttataattggtgaaatttgcaatttaggtacacaattgttcaagtatccatcagacaagaggaggctgaaccagccacattattctatgagtcctattaaaattaagcacttgactaagataatgacaaaagaagcacagtgcatacaaaaaccaaggggtgaaatattgatcatgaaactaagcagtatgagaaggttggtgctcttcctggactacttcatgttgctcttgctcttgctgtggtttttctccttgccaggtccaaacaatgtccttaagcgctggtcttatatcctgtttaaaaagcttctggtactccatggtgtcaccattggactttctaagttccaccatatggaagtgtggggtaatctcaaaaatctcagcatcaacacccagagttcctttcctgccttccttggaaccttccaatttgagcaagcctccatctttcttctttac

SEQ ID NO: 31625 - DNA, 360 bp, Glycine max
  Clone ID: jC-gmst02400078c06d1
acaatataaagtttagaaatgatgcacccccccgggggcacggggggggttactgccccaatccccaccataacctacctcgatcttaacacaacagaattttctggactaccattaagcagcactaatttctagatgaaagccacccagggagatgttgccgccacaaccttggccaaactagatgaccaagttggggggcgattgttttaatgattgatcccattcgtgcgggcgtctactcccttggctacccggtactataagccccatactaatgtctaagagctcaactttgactattattattaactggggcgccttggctctcctttttttttgagcctggaatgaaaatga

SEQ ID NO: 31626 - DNA, 571 bp, Glycine max
  unsure (1)..(571): unsure at all n locations
  Clone ID: jC-gmst02400078d01d1
gaaccataaagatggtttttttttactgtaaaataaaactgtaaatagcaatgaaagaatgtgaatcatcataactacatacaactcatggcatcagctttaaaatacagattttatgagcatgaacgcaacctctacgctttgacgcgatacagtactttgtgcaactcaacctcaaagttgtcttgtcatcgaaacctctaattcttcgcacattgggcctgaaaagctttcaacagagaatagcagtgcttgtgctcaccggttgctgcagcatacctatccttcagatcattacgaattctctcttcttcttgaagtcctacatgaaccctttctagcttctgttgacttcccttgacaattccttccatggaatgaacaagttttatacgtccatcagtgctactaaaggcctcttgaaactgggaaatgatcgaattcaataaagatgtttcctttagcatcaattcttttatttccaagagagcattgtaggtagcatagtatttacgagttngtcgatgttttccctgggattgtgcatacagttctgagagccggcgttcgt

SEQ ID NO: 31627 - DNA, 308 bp, Glycine max
  unsure (1)..(308): unsure at all n locations
  Clone ID: jC-gmst02400078d03d1
ccccacanngaaaaaaagggattgggggaaaatttgaaggccagaaccggccacacaccaccaaaaaaaggaacaaggggagagggaaacaaacaaacaaaaacaaacaaacaaaccgcaaaaaaaaggaaccaaagacacccaaaggccccccaaagaaaaagaagggcaagaaaaaccaaaaaaagagaaccccccccccccccacgcgagaaaaaaaggcacgccccacacggccggggcgaggggaggaaaaaaaagcacaaaagggcccacaaaaaaaaaacccccggggaacagggcaaacc

SEQ ID NO: 31628 - DNA, 525 bp, Glycine max
  Clone ID: jC-gmst02400078d04d1
gttcaagttctttagcataacatttagtgttgaggggagaaacaccctttagatcacaaaaaggacaattacaaatgtagcaacaagccgttacagcattcaaagttcttgtaaacctataaaataaatgataaacaacatatattacacagaacttcctatctgaaacaagccaaaacagatagctatttttctttttcctctccttttgaaataacacctggtttttctatgataaaaaagaaatccaattgcaatcaattgcaataacaagcagctcatactaattttactaatgctctctaaatatcataactgagaactaaaaaggtggtgggatgctgatatgcaagattatctatcacctcacatatacatccattggactttcaccatatgaggctggttaataagataaactatagactccttttttgatctaagattgtatgaagtatccacaaaataagaatggccatgtaccaacctcttaggtcaagcatttatttctgaattgcattgatg

SEQ ID NO: 31629 - DNA, 566 bp, Glycine max
  unsure (1)..(566): unsure at all n locations
  Clone ID: jC-gmst02400078d05d1
atgataatcacctacatagcaaccccatttattctcaagtaaatgacagattataagggggttgctaaacaaatctaaatacagaaaagaatgtaaaacatataacactccaagttgaagacaaacccaaatcacatccacacaagtaaaaacacgtggtatggtacttagtcgaagaattcccaattgaacttgggaggacctgaattattggtcactgaggagggtgggggtggtgatgtggcttgcacagggattaatggtgggacagaatcaaacaactcccaatttgtggtaactacaactcctgaggtggaattccttgagggttgttcttgttgctcttgatatagtgctagagaattctcacttgagttccttggttgttcttgttgctgctcctgaattggtgctaaggctaatctatgacgtccatatgaatgcttttgttggtgctcttgaattggccccttcctttgaccaattgaatgcttctgatggggctttactggngctnggcctccatngctactaagcatagaattcttaactttcagcacatcaag

SEQ ID NO: 31630 - DNA, 474 bp, Glycine max
  Clone ID: jC-gmst02400078d06d1
atgattcttggattttataaagaccatcatagacatagattttattatttggattcacaccatctctcatgccccggatgactcttacttcattgtgttgtcgcgaactcctatccaaagcaagattacccctttgaagcttctggtcagttgtgtgcttatctttattcatgaagaagttcccaccctgaccagtataaattataacatcactatcctcagcatcatcgtcatattctcctgacgaaacaatgcacacagccagagtttcctcctcaaactcacccctgatatgcaaggcatcaattccacccatggagggagcatgcaagcccacaatacacaattccattcggaaataaaaaatgtcaccaatctcaatcccaggaactgctcctattctcttcctcatgtttggccgaattcctctggtcatcaaagtattgcaagctttcaaatctgcacgcttgatcg

SEQ ID NO: 31631 - DNA, 495 bp, Glycine max
  Clone ID: jC-gmst02400078e01d1
gaacaacaattttataattttccaagaacaaaaaaagtccataagttcaatatattttcttttacaagaatcatgaatatcaatgtctattgtatcggcaatcaacacttaattgcaagcaccaaagaaaaaggcaagatgatgggaagaaacttaaaccttcatcaattcaatcatctaatttgatagacaaactttctattttttctttctcactgggggtggttcgtacgaatgaagaaggaccagaattagaagaaagagggtaattgtgtgaactcactcaagagtcatgacaagttcagaacttgttcttcagtttacgccgtgcagtacttccctcttgtgaaagttcctgtggcagccgcaagccgcacacgtaagcgccgcatttgttccttcacaggcactggccatgaattccctgcagccatccacagcataacctcccgtattcgccgcatgattcttctggcactccccgtatcgaatatt

SEQ ID NO: 31632 - DNA, 476 bp, Glycine max
  Clone ID: jC-gmst02400078e04d1
ggaaacacttttattaagacttcaaatcacagcattcaagataatacaatacgcaacactttttagaaagccttataactataaactataaaagctttgcccagatgaaattacactgcaggcaaatttttcattcacctttagcttagttatcttcattgtcgcccaaattattctttgtcacatctttgtattagccctggatggcaacaccaaggggagcagcatccataggtattatcttctcaatttctacacccttgttgttctggttttcataggctgaaatgtgcactccaagtgctgctctaccagagggatcaaggttgttagaccaagcagcatcccactcaacagctttggctgtgctacatgcaacacttgctcctccaggaacagtgagcctagctgagttctgagggaagaacctctcaaagatcattctgtagtaatatgcttccttggtttttggggtg

SEQ ID NO: 31633 - DNA, 422 bp, Glycine max
  Clone ID: jC-gmst02400078e05d1
ggaaacaacccaatatagagaaaatttttctttggggttttataatataaagcagaaccaaatgacttggaagattctactttcttataccattcacttggcaagttcgttgcggatgagttttgctgcggcaaccatgtttgggagggctggcttcacctcagggtacttacgggtcttgagcccacagtcagggttcacccacaagatgtttttttcgagcactgccagcattttgttgattctgtcagcaatttcttcagttgggggtattcttggggaggggatgttatagacaccagggccaattccagcaccatactttacaccttcggggaagactgacagaagcttcttgtcggagcgagagttctcaatggtgataacatcggcgtccatgtctatgatggagtggatgatgt

SEQ ID NO: 31634 - DNA, 562 bp, Glycine max
  Clone ID: jC-gmst02400078f01d1
ataattggaatattgtggatttcattaaacaaatgcctacaaataaaggcatgtatacaagacctaaacccaaacagacctacccaagaatcataggtgatgcttgtccaataacacatgcatttcaaactacgtggacagatagagagatcacgaagcagcttgcagttagcgatgtagttgccacccgtcttaactcgtttccatcagcaatcaatccaccactcaagaattagctgacatagtcaactggcaataacttggttttccatctaggagcagcaaaaactaaaaaccaaaattatgatcaatccttcttgacgcagtgtgcatctgtgccatgttgggtgcaatcatgataacccacactacgtaggaagtctcgaatctcttttgcactgctattactggcccgtaacaagcgctcatcttcttcgtatatgagataaggggcttggcttcctttccttgagagcaactttgatgctcctttaagaacgtgatattcccagccctgaacatctattttaagcagaagcacacgctctgatttcggaatcac

SEQ ID NO: 31635 - DNA, 457 bp, Glycine max
  Clone ID: jC-gmst02400078f02d1
cccaatcgctcttgcagttttaagatttccttaatccttatacaacactctgaaatgacacttattctaaaaggtagtattaatctagtacatcattcagcatagactaacacaaaccacgcaaagcttacattaataaaatgggtatattataacagccaatatcaccactccaagaaacgtggagaaaaaaggtcataaagcttgatggtcaaacacatgacctccccccttagcaaatcctacaatatctatacatctgaatcacaccatgaacaccaatggcattactcagcaacatcaacaaaagccttatccaacttggtgaccaatggcattactcagggaaaaaaaaaatggatgcaagttatctaaagaatgcctaaagcatcagcagacactgccaaatgggccaaccacaggataagtcaccttggcaggaacaggaagaaacatg

SEQ ID NO: 31636 - DNA, 507 bp, Glycine max
  Clone ID: jC-gmst02400078g04d1
agaatgacagtttttccctttattgataataaaaaggttatgtttacatggtagacaattatcatcctttatcaggttgcctacccttacactttggaaccttttaaatcatcaatcacagcttgttttttgttgatgcaacaatcgaacccatactttgatggtttgagatctcaaaccacaaagccatgagtgcaagtgacacatctcgttcaataaaaactagataactaataaagtatagtttgtagtaataaataaataagcatactcttttaaatgaatctatacgtctggacgctcattctgatcaaaaatacgattatggcaagtagggttgcaagggtaggcacaatctatctcacggaagggccttcgatcataaaaccaatcacccactgcctttgcaattgatgtcttggccaccactggggagtcatttctcagccatgtctcttgtattccagtttggcagtgtgcatagcaaccatctataaaatgcccttt

SEQ ID NO: 31637 - DNA, 514 bp, Glycine max
  unsure (1)..(514): unsure at all n locations
  Clone ID: jC-gmst02400078g05a1
tttgttgacattcctccggagatgaaaaaacttggttccgtttagaaaaggctacaattgctttgtgatatcacaggagcctttaggccaggaattctcactgcactgatgggggtcagtggagcaggaaagacaactctgatggatgttctttcaggaagaaaaactggaggtatcattgaaggagatataagaatcggaggctaccccaaagtgcaaaagacatttgaaagagtttcaggttactgtgagcagaatgacatacattctccatatataaccgttgaagaatctgtcacatactcagcttggttgcggttgccaacagaaattgattctgtcacgaaagggaaatttgttgaagaagtccttgaaacaattgaacttgatggtataaaggattgtttagttggcatccctggccaaagtggcttgtctaccgaacaacgtataagactaaccattgcagnggagctggtttccaatccatcaataatattcatggatgaaccta

SEQ ID NO: 31638 - DNA, 508 bp, Glycine max
  Clone ID: jC-gmst02400078g05d1
aaaatatattttttttcttatgaaatgagtctggtcacagaaccactgttatttttctgtagagagagagagagagagatcttgctaatctatgtagccacatatttctatatttctatacatgaacattgaagccagcatactgcagaagaaccaaactgtgtctttgtctgtgtctatcttatctcttttggtaattcattttctttatgaaataggcaaacagagaagcgtagacaattgggtacacaatgagcaccacagccacaaggcttaatctgtcatgccggaagccatagtaatctcttaaaaaggaaccaactgattttcgttccccaaatacgagtacctccttctctatgtctccatattgggaagttaggaggccattcaaggaccaagcagtaggacaaatccagtagcaccaaacccaccatttaggaattttcggtcctggcatgagaaatccagaaaagagattgaatatggtgtagactgcagtcgacaa

SEQ ID NO: 31639 - DNA, 496 bp, Glycine max
  Clone ID: jC-gmst02400078h01d1
cacgaaggggtttgcattttttttaacaataaaaagaaacaacaatacaactgtgttttgttttcaaatctaaagtatccccaattttcgtttgcacatacagggaaacagaagtttcagagaaatcaaatttcaaaccctaagaatctgaagcttggtggagaaagcaatagcgacccaatcaggctgcgaagacgaccactgaagctgctcaatctccgctccggcagtgtacgcaagaatagggtcaagcccaccctccacgggttgacccatggaagaaaggtcccaaatcagcgcctgcgaatcatccccggccgtgcatatatggcacgagctatgtggggcccacgcaatcgcgttcacactcgcctggtgtcgctgcagctccaccacagggagcgtgggaaaacgaatatccaacaccaccacctttgcactgtccatgattatcgtcgccatgtagcgtgggtcctgcttgttccacccgagccgc

SEQ ID NO: 31640 - DNA, 499 bp, Glycine max
  unsure (1)..(499): unsure at all n locations
  Clone ID: jC-gmst02400078h04d1
gatatgttgattttgcattngattcaagcacaagagggaggaagaagtaacttaaattacagtaagttatccgagcatcaatcggcataacaatctctttccacataaattgattcaggttccaaatgaacaagttggaataaccagggtctttatacattaacacaacacacagaataattcccaaattctacatgaagactcctcaaccttttttcgcatatccccatcattatgccattgtggccaatgctctgaatcagctatctgttgttgcctcacttgcattttcgttagaggtctgtcgcacaaattgtccacgaaatcgaggtcgttgttcagctaatctctttctgctctgatatcgaacctttttatgaaagcacctctcccttctctcttttctcttttggcgaaatttagttaaggccacttccctttgagaagtcttggtttgatctactctgttggcactttcacttccactagcatcaccact

SEQ ID NO: 31641 - DNA, 249 bp, Glycine max
  Clone ID: 700895275H1
gatggttgaaagagttgagagatcacacagaccccaacattgtggtcatgcttattggaaataagtcggatcttcgacaccttgttgctgtcccaacagaagatggaaaatcttgtgcggagaaggaatctctctacttcatggaaacttctgcattagaagcaaccaatgttgaaaatgcatttacagaggttctttctcagatataccgaatagtgagcaagagaactgttgaggccggcaagaatg

SEQ ID NO: 31642 - DNA, 250 bp, Glycine max
  Clone ID: 700895276H1
aaacaaagaaaaaaaaaaacccttagccaacacaaccatcatggccacctctgctattcagcaatcagcattcactggtcaaactgctctgaagcagctcaatgagttcgtccgcaagaccggtggcgccggcaaaggtcgcactaacatgcgccgcaccgtcaagagtgctcctcagagcatttggtatggccctgaccgtcccaagtacttgggtccattctcggagcagattccatcatacctgacc

SEQ ID NO: 31643 - DNA, 253 bp, Glycine max
  Clone ID: 700895279H1
gcgtggagtaagggaattgtgaccacaaaagagaattatacaacaaagcatatatgggcaggacctactccaaggaaatggggtcttcagtggaattatttgcaacctactactgatataaatgggactctgttagcttctcatagaaaaatggatatacggtggtggagagcacaggcagtacgctacttaatgaggttcccaactgaatacacatgcaatttaatgaatgaggccgccatgctagctttgg

SEQ ID NO: 31644 - DNA, 246 bp, Glycine max
  Clone ID: 700895280H1
agaatctgtctggttgatttgtgtgaaggaggcgagaccttcaagttggaatgcagctgcaaaggtgaacttgctctggctcaccaagaatgtgctattaaatggtttagtataaagggtaacaagacctgcgatgtgtgcaaagaggaagttcgaaacttacctgtcactctattacggatccaaagtattcgaacatctgaataatggtggtaataggactcagctggaagatgtaaatggata

SEQ ID NO: 31645 - DNA, 249 bp, Glycine max
  Clone ID: 700895281H1
cctggggacaattttgttggtctaatatatgggcctgaaggtgataatcaaaaacaactagaaaaggaaactggtgcgaagataaaaattcatggaatcaaagcagacacaggagagaaaggtgaaattaaacccggaactgatatccagtgcaattacaaagagatgcatgttaacctatcagctgatagttttgaaaaagtggatgctgctatgttaatcattgaactgctaatcacctctgtaaca

SEQ ID NO: 31646 - DNA, 248 bp, Glycine max
  Clone ID: 700895283H1
tgctttagctatatcttctatgccatgtccaactttggaattgaagcaagctgctcctccgattgctgttgcatctatccgaactctgcaatcagagattataaagatttacacactgaggctttgctcttgcatgcgggcatcggttgaagaggtttcaaaggatgtgacatgggttattgtttcaattcttgaaaggaacaaatccccatatgcaatctcattcttgcctttaccattccgttcag

SEQ ID NO: 31647 - DNA, 246 bp, Glycine max
  Clone ID: 700895284H1
ctcagaggagagcccctcaagcttgtggacggtggccagtcccagagaacctttgtttacattaaagatgctattgaagctgtcttgctgatgattgaaaaccctgccagggccaatggccacatatttaatttgggtaacccaaacaatgaggttactgttaggcagcttgctgaaataatgattaaggtttattcaaaggtaagtggcgaacaaactcctgaaacacctaccgttgatgtgagc

SEQ ID NO: 31648 - DNA, 247 bp, Glycine max
  Clone ID: 700895285H1
cccgatgcttccgacgcacttgcagcgaggcagaaagctcaattgtttctgaacgctgctcgaactggatcaattgatctcttaaagaaattggcgttgcagctggacgagggtaaggatttggcgaaatcggtggacgcaataaaggacgccaacaagagaggtgcactgcattttgccgcgcgcgaaggccaaaccgctgtttgcgactacctcttaaccgatttgaagctctctgtcgattctc

SEQ ID NO: 31649 - DNA, 245 bp, Glycine max
  Clone ID: 700895286H1
accatgttctgatattcccccaaccacacacagtcactcttaaaaaaataattcaactttatgcaaatgcaaagcatgtcaaccaccatggcttcgttttctcctccgacccatttctcagccgcaccttcttcctcgaaactccgtcttgtctacaagaacaacaatttcttctctctcaggtcgaagagtcttgctttctctcccttgaaggctgctgctgctgagaacggcgttgggaccgc

SEQ ID NO: 31650 - DNA, 230 bp, Glycine max
  Clone ID: 700895287H1
gttgatcttaagtgcaagctggttgattttggtaatgcttgttggacctataaacaattcacaaatgatattcagacaaggcagtataggtgtcctgaggttcttcttggatctaaatactcaactccagcagatctgtggtcctttgcttgcatttgctttgagcttgcctctggcgatgttctttttgatcctcatagtggtgacaactatgatagggatgagatcat

SEQ ID NO: 31651 - DNA, 247 bp, Glycine max
  Clone ID: 700895288H1
cttgaaccccactagaatggccactttagacgaacgcccttctgcgaaaaggtggcttcctctcgaagctaaccctgacgtcatgaaccagttcctttggggtcttggccttccagtggatgaggcagagtgcggtgctgtgtttggcttagatgaagcgactctggaaatggttcccaagccagttctcgccgtgctttttctttatccaattaccgcgaagtctgaagaagaaaggttgcaacag

SEQ ID NO: 31652 - DNA, 247 bp, Glycine max
  Clone ID: 700895289H1
gtggtctgcaactatgagcaaggattatctaatcatactttctctccttctttccacggtgcttgcaactgcaagttcttcttcttcttcttcctccctctatcttgggaagggcttctcccatcgcaaattgtctcccagttatcacattcacaaaaccattgacgaatcctatgcagttatcttcgatgctggtagcacgggaagccgtgtacatgtctatcgttttaaccaacaattagatctc

SEQ ID NO: 31653 - DNA, 249 bp, Glycine max
  Clone ID: 700895290H1
gatgccttcaatagatttgtggatgacatcaatagtttagctacttatcactggtgggaagggtctatttacagtatcctttgcatcattgcatatcccctagcttggtcatggcttcaaatgtgtcggagaaagaaattacagaaacttagagaatttgttcgatcagagtatgaccatgcatgcttgcgttcttgccgttcacgagcactttatgaagggctgaaggtaggtgcaacatctgatctg

SEQ ID NO: 31654 - DNA, 246 bp, Glycine max
  unsure (1)..(246): unsure at all n locations
  Clone ID: 700895292H1
ctcaaattaactctaattccatccttgtcgcgcttctngattgagattattatgaactccctgagcttgttaaccaagtagttcttctacagtagctagacgcagccgtcggtaaccaccacatcaccatcgtcgcgccgcgaaaccaagccctggcaaccgatntagcncctgaatttaagcgattcctgctctagcctcgcatatcttaggatcgttcagacgctcttgatgtctcaccttctt

SEQ ID NO: 31655 - DNA, 251 bp, Glycine max
  Clone ID: 700895294H1
gttctttaagtaaaattttaatatgatttcagtgcataataattcctgtaatgtgcaccagtaaagaccaaagtatgattattgttacattatgctatatgattgtacttgtatatacatattttgtcccgcctttgtaaatacaattgggacactactaggattgggaagaagggtctttacatttttagtttggcaaatagatattgcaactacctttgtataaatctatttctgaagaagcaattaca

SEQ ID NO: 31656 - DNA, 248 bp, Glycine max
  Clone ID: 700895273H1
cagagagattgatagatgagagaaaagaagacgatcaagtgtcacttgactccttgaagggagataatccatctcaatctgaaagctcactcagaaagagaattggaagcaatgtgaccaaaggtgataatctcgacgataatactgtagatagtgccacatataatgtaaaatcttcaaatgttaaggaaccagttagatcaccaacaagtcttgtgtttggttatctcaatcttttctctgatgga

SEQ ID NO: 31657 - DNA, 68 bp, Glycine max
  Clone ID: 700895235H1
cgttccaatatattccattctctctgtgtagttccctacctcgcccttcaagctgcagagcttcgtca

SEQ ID NO: 31658 - DNA, 248 bp, Glycine max
  Clone ID: 700895236H1
cttcaatcgtacgtgaggtgctctcaaatgtctcccagtctgatccccgcatacttgcaagtctcatcaggctccattttcacgactgttttgttcaggggtgtgacgcatcaattctgctgaacgacacggacacgatcgtgagcgagcaaagtgcagtgccaaacaacaactcaataagaggtttggatgttgtgaaccagatcaagactgcagtggaaaatgcttgtcccggcatagtttcttgt

SEQ ID NO: 31659 - DNA, 249 bp, Glycine max
  Clone ID: 700895237H1
cacacactctcatagctgtagcggcgacactaagatcggagaaagaatggcgaaaacgacgtcgttgctgctctttacactgctcctcttcggaaccctagctctcatccaggcgaagaaatcgaaggaggatttgacggaggtgacccacaaggtttactttgatgttgagattaatggagaagaagcaggtcgtattgtaatgggtctttatgggaaggctgttccaaaaactgcagacaacttccg

SEQ ID NO: 31660 - DNA, 249 bp, Glycine max
  Clone ID: 700895238H1
gtgcaagctttctatcacttagggtcaccgctgacgtcacagtcacactttccatcaccccctctccgactcacactcactgcttccgcgcccttcaagccccgacccctcgcttccatcggaatctcgccgctcccggagaggcgccggatgccggtggccggcgccgtggaggaaagccaagagagttccgaaccggaagcggaagcgcatttggcatcggaactgaagaaggcgatggcggagagg

SEQ ID NO: 31661 - DNA, 164 bp, Glycine max
  Clone ID: 700895239H1
gtccgaagttggagatagtgattctggttctgttctgttcttctttctactcacaacaacatccgaatcagaaaccacaatggccaacactaacttggaagatgttccctctctggatctcatgatctgagctccttgcgtcgttctcaagtggctctatccaa

SEQ ID NO: 31662 - DNA, 248 bp, Glycine max
  Clone ID: 700895240H1
cagaaaatcctcaattttctgagcagccaaacactctctctctgtctctcgaaaattctcagtttgcagagaaaatctgaatcatgtcgtggcaagcgtatgtcgacgatcaccttctgtgtgacatcgaaggtaaccacctcactcacgctgctatcatcggccaagacggcagcgtttgggctcagagtaccgacttccctcagttcaaacctgaggagataactgccatcatgaatgactttaat

SEQ ID NO: 31663 - DNA, 251 bp, Glycine max
  Clone ID: 700895241H1
cgctgttgttgctgctcatcctccgtaacctccgagctctgcaccgaagaacgaagccatggggaagacacatggaatgggatctgctcgcaagctcaagtcccaccgcaggaggcaaaggtgggctgacaagtcatacaagaaatcacatcttggaaatgaatggaagaaaccttttgctggttcatcccatgccaagggaattgtccttgaaaagataggtattgaggctaagcagcccaactctgcca

SEQ ID NO: 31664 - DNA, 249 bp, Glycine max
  Clone ID: 700895242H1
tcttcttcttcttctcttactctctctgtaacaacaccaccatcaacaaccctttcaagccggcctaaaccccattacccaaaatctgtttttggtttttattttttttccggcaacactctttattggatcatcttgtatttcattcctcctttacaatttcctttcaaaaaaaattttaaaaaatattaaaaagtgctcttttttgtgaattttgacccatttggccaccgacagatttcgatcttc

SEQ ID NO: 31665 - DNA, 236 bp, Glycine max
  Clone ID: 700895243H1
ctcgagccgctcgagccgattcggctcgaggaacacttaccttaatgtcaccaaatctaccaatgactaggatctagaatccctaggtactgaagagacagcttgtagctattcggatcaccatgggaaggcgttctaaggcctaggtgctgctggtggatagagagacattgttgctgataacaccagcgagatcactacgtcgacgttaaggactacccgggccacgtacttct

SEQ ID NO: 31666 - DNA, 251 bp, Glycine max
  Clone ID: 700895244H1
cgaactcttggtgttcctgaaaatgccagtcaggacgagataaagaaggcatttcactcgatgcgtactcgtggttcagaagacatagaatatgatcgtgatgatgcagaaaggtttagaaatgcttatcgttctcatttttctgattcatttcataaagtattctatgagatatttgaagaagcaacaactcaattctcatcaaatatagaggtggagatgtctcttactttctccgaagcagcgagagg

SEQ ID NO: 31667 - DNA, 253 bp, Glycine max
  Clone ID: 700895246H1
taaagccaacggcagcttctggatttatctaacgaaccctccgtagttcagcatcatcgtccgtcatcatatcataatcatcaccgaatcaaaccaaacctatcttttaattcaaaacttttattttgggagacgccgtcgtttcggcaacgccggcggcgcctcctcctccagccatggccgccgcagacaaagcgaagcctcgaagacgatgctctcgctccccgtgagcgtcgttgttttggccatcgcc

SEQ ID NO: 31668 - DNA, 254 bp, Glycine max
  Clone ID: 700895247H1
ctcacctggcatgggaactgttccatgggttgtgaactcagagatctatcccttgaggtacagaggggtttgtggaggaatagcatccacaactgtttggatttccaacctcattgtttctgagtccttcttgtccctcacaaaagctctagggacagcatggacattcatgatgtttggacttgtggccattgtggcaatcttctttgtcattatttttgtgcctgagaccaaaggggttcctatggaggaag

SEQ ID NO: 31669 - DNA, 256 bp, Glycine max
  Clone ID: 700895248H1
atttcccttctgagctttgattagtgtggcctagttgttgttttctcgatgagaaaggcttcttccactatgcattgcgcacttctgcgcttttgggttcccttgttgctgcttgctagcttcagctatgctccttctgtttcggccacaactgaaatttcagggaatgaagtgaacacagatgggaaggtgataaatgacgagttagcaaaaccaagtctaaaaggacatgatgaagaagcaaagttcaaaggat

SEQ ID NO: 31670 - DNA, 247 bp, Glycine max
  Clone ID: 700895250H1
cgctcatcccgtggaggtttcgctctctcagtttcttttccccaaattggtttttcatctaacaatttactttgcagaaccgtaaccctaaccccttcccctaccttgtaaccttcctttcgatccttcacctcgcaggtctgattttagttgattcggtgattcccagataatgggagacacaaaggacgaagcatacgaggaagagcttctcgattacgaggaggaagacgaaaaggcccccgac

SEQ ID NO: 31671 - DNA, 249 bp, Glycine max
  Clone ID: 700895251H1
cttttgtctctttttggtctaagcaaaccaccccaccatggcagcaagagcaacagcaatctttaacactccctcctcctcctccttcttcacattcacactctttctctctctctctctcctcctccaactttctctctcctccccctctccctccatccacgaccttctccgctccaaaggcttgccccccggcctcctcccagaggaggtgaaatcctacagcttctccgaaaccggccacttgga

SEQ ID NO: 31672 - DNA, 248 bp, Glycine max
  Clone ID: 700895252H1
ctaacactcattaattgcaagaatggcacttcgttgcttggtgatgtccctttctgttctcttcactcttggtcttgcgagagaaagccatgccagagacgaagatttttggcatgctgtttggccaaacactcccattccaagttcattgcgagatcttctaaagcctggccctgcaagtgttgatatcgatgatcaccctatgcaaattgaagaaacacagtacccgaaaaccttcttctataaag

SEQ ID NO: 31673 - DNA, 247 bp, Glycine max
  Clone ID: 700895255H1
gtgaatttctgcatagagcagctgatcttacattggtgccatcagctgccattgcaaaagatcttgaagaagctcgagtaacagcagcgaacaagatttgtctttggaacaagggtgtcgattctgaaagtttccatccacgattcaagtcccatgaaatgcgattcaggctgagcaatggtgaacctgagaagcccttgatagttcatgttggacggcttggagttgagaagagtttagattttct

SEQ ID NO: 31674 - DNA, 250 bp, Glycine max
  Clone ID: 700895258H1
accaagagaggcatctcggatcttaagtctggaaagatagtgactcctttacctccaaaggccacatttcttgatgatccattacgagttcttcgagcaattagatttggtgctagatttgaatgtactctagatgaagatctgaaagtagctgctgcatgtgatgatgtgaaagatgctactagctgctaaaattagcagagagcgcattggaactgagattgatctgatgatatccggaaatcaacct

SEQ ID NO: 31675 - DNA, 243 bp, Glycine max
  Clone ID: 700895259H1
gcactggacatgggcataattcagaaggctgactatgaacgcatcaagaaagtgatggttccagcctgcgaaatggcaataaaactatgtggcactgatggaaaaatcgcatgcacggcatcatattgtgtttgtaatacaatattcaattccatcatgtcacatgctggggatatcaatgattatggacatcagaaagatgtgtgtagggagccattgctcatgatttttcgaacttggaga

SEQ ID NO: 31676 - DNA, 247 bp, Glycine max
  Clone ID: 700895260H1
cgcaacacaaagaaagaatcccaggcgaggagaaagatggaggggaaggagcaggatgtgtcgttgggagcgaacaagttccccgagagacagccgattgggacggcggcgcagagccaagacgacggcaaggactaccaggagccggcgccggcgccgctggttgacccgacggagtttacgtcatggtcgttttacagagcagggatagcagagtttgtggccacttttctgtttctctacatca

SEQ ID NO: 31677 - DNA, 254 bp, Glycine max
  Clone ID: 700895262H1
gttcaaaggtaaggtaggttaacactcttcttcatcgtcgtcgcaatgggacgtgtgatccgtgcgcacgtaagggagcaggctcggtcttcaagtcccacacgcaccaccgcaagggccctgcacgcttccggagcctggacttcggggagcgcaacggctacctcaagggcgtggtcaccgacgtcatccatgaccctggccgcggcgcgccgctcgccaaggtcgccttccgccaccctttcagatacaag

SEQ ID NO: 31678 - DNA, 267 bp, Glycine max
  Clone ID: 700895264H1
tcggctcgaggggttccaaagtcaggaccctggttttgctctctttgttttgcttagctctatttgtgtccttgcaccaagcaagggcagcaaagtcacataataatgataataatcataatgtggctcgcttgaaggggagaaaggagttgaatagatgtaatttgttcattggaagttgggttattgaccctccttccacatcctctctatgaatcttcaagctgcccctttatagatgctgagtttgattgccaaaagtatggg

SEQ ID NO: 31679 - DNA, 247 bp, Glycine max
  Clone ID: 700895266H1
gtttccgagggggttgagactgcatttactggtttgaaaaagaagaagaagaagcctgttgaaatgggtaacttgaatgatgagagtggagatgcaattgaagatttggatgatcaccctgaagatgatgaaggagaaatggttgttccccaggctcgttatccttgggaagggagtgatcgtaattatgaatatgaggagctgcttggcagggtgtttaacattctacgtgaaaataatcctgaac

SEQ ID NO: 31680 - DNA, 246 bp, Glycine max
  Clone ID: 700895267H1
ttttgtgtacatgtgtggactaaaaggaatggaaaagggaattgatgacattatggtgtcattggctgccaaagatggcattgattggactgagtacaagaggcaattgaagaaagcagagcaatggaatgtcgaagtctattaatttctgttcacttgcacaaatatcatctcctactttatgctgcagcaagtctatcaaccctcctgcgttgtgtagatatatgacgaccctgtaatttttct

SEQ ID NO: 31681 - DNA, 246 bp, Glycine max
  Clone ID: 700895269H1
cggctcgagcggctcgagcggctcgagcggctcgagatttgttccccccacagcctatacttatggagcatacgatcaagctctcgggagacaatcctgctggtactgcttgttatgatgtgatggttgatgttccttttcctattcagagggagttgtctgccttattggctaacgtggaaaagaacaaagagattgagacatgtgatgaagcaatatgtggaatcattagaaaaatccatgagc

SEQ ID NO: 31682 - DNA, 243 bp, Glycine max
  Clone ID: 700895270H1
ggaggaggaaggcctcggggacggtgacccttgcggtggcatagaggaacgctgcgacgtcataattctcggggcagtccagcatgaccttgcggaagaaggaggccttgccgtagcggctggcgccgcagtagagcgagttcttgtcgttgttgaaggcgtcgtaggtggcttggatgaggtccccgcaccggaggatcagggagcggagagaggggtggagagggtctagtaggcccgccc

SEQ ID NO: 31683 - DNA, 247 bp, Glycine max
  Clone ID: 700895234H1
ataaaagggaacgaacgtaatggctgcagcagcgttgctcgaacttgatcgagttctcaagtccaagaaggaaatgttgtcgcctcgggaagcaaatattcgtctatcgtggtaatctacctctctaatagatctcgctgccggtgcacttcctgggtccgcagctgcaggggctgatttatcatttccgtatccttaatgagcgacgatgctgtctgcttactcttctagttataggcttccctga

SEQ ID NO: 31684 - DNA, 247 bp, Glycine max
  Clone ID: 700895191H1
aatttgtccaaggaggaattcgtacatatactgcgtcgccaaagtactggtttctcaagaggaagttctaaataccgaggagtaacactccacaagtgtggccggtgggaagctcgaatgggacaattccttggcaaaaagtgaggacatatttttatatatcaacttaagtagtgatctactgtggttatatgagatattatgaatttaagcacctattgggctgtaaagtgaattggtttcagct

SEQ ID NO: 31685 - DNA, 250 bp, Glycine max
  Clone ID: 700895192H1
caaaaacaaagaaaaaaaaaaacccttagccaacacaaccatcatggccacctctgctattcagcaatcagcattcactggtcaaactgctctgaagcagctcaatgagttcgtccgcaagaccggtggcgccggcaaaggtcgcactaacatgcgccgcaccgtcaagagtgctcctcagagcatttggtatggccctgaccgtcccaagtacttgggtccattctcggagcagattccatcatacctg

SEQ ID NO: 31686 - DNA, 252 bp, Glycine max
  Clone ID: 700895194H1
gttttcttggcacagaaatggctgtagcagactcaatatctttccaagaacaactacttcagagggttgcttcagctcagtttaggaagcctctccttcatcttgtgtccactcaagaacacaagggcagatacctcacccaatgtgtcccacttcacgaagcatcactcaaaggtgactggaaagaagctagaaaactattggatcaagatgggtcacttctcaaaacggccataacaaagggggggtggg

SEQ ID NO: 31687 - DNA, 245 bp, Glycine max
  Clone ID: 700895195H1
tgagcaatggactcataagattagtcactaagagtaaagaaggtttctgatttatttagttcggcacttccgatcatttctccgcggcggcgcaaccgattcccccgccgcatattgccaaagttcgaaaattaacgaccagccggagcgaacgtttttttggaacctacgcctatagccaaggctccgccgccttgaacccatcggagctccgtgaagaacatgtctggggcgccggagatgac

SEQ ID NO: 31688 - DNA, 219 bp, Glycine max
  Clone ID: 700895201H1
tgaatctcagaattctctaaaagagatctttttctgctctttgaagaaagaagggtctttgcttgattttggagatgtctctgctctcagatctcatcaaccttaacctctccgataccaccgagaaggtgatcgcagagtacatatggatcggtggatcaggaatggacctaaggcgcaaagccaggactctcccaagaccagttagcgatccttcag

SEQ ID NO: 31689 - DNA, 252 bp, Glycine max
  Clone ID: 700895202H1
ctctcactctcgactcgtcttctcgcgccgccgccgccgccgccaccgcacaccgcttccatcggcgccatcgtaaccgtctctttcttcacttgcagaatggagtcaaatcaggcagcttcttccatggaagttgagactgtcccatctgaagccaaacttttgccaccaaagccaaagtttgagcctttgaagcctcatgagatgtctgatggtcaggtacagttccgcaaggtgaatgttccacctcat

SEQ ID NO: 31690 - DNA, 243 bp, Glycine max
  Clone ID: 700895204H1
gttcacaatcttgctcgatttatttcagtcatgcagtttcatcctttatcttggcgaacttcccactcttatgttatggtagatcgttttgaagacatcactcctcctgaaaaagtgcacgcaaataataaatgtgacagaaaagtcactctttatggttatcttagaggctgtaatttgaaaatgggcaataaggtgcacatagcaggagtgggtgattatcatgtagctggtattactgct

SEQ ID NO: 31691 - DNA, 252 bp, Glycine max
  Clone ID: 700895205H1
cctcgatcggtcaaaagaacacgcaaagcaaacagcagccaccacagcaacacctagcaccacaacaactgccgccacagccacaggcaccaatatttcagcaaacatatcctccatttcatctgccgcagttccaccatcaccagccgacgctgcagttccagcagcagcctcagccgccacagctattccagcatcaggcacagccaccttcccaccaacagtttcatccttaggaatcaggcccaggct

SEQ ID NO: 31692 - DNA, 162 bp, Glycine max
  unsure (1)..(162): unsure at all n locations
  Clone ID: 700895206H1
actcatcatcctatattctcttcttggatcatcttggttaagctgcagatcagaatagaataataataaataaagataagatggagactcatttggttttcttgcttggtttgatcttcactctagttgnacggcgattggagcccaagacccaagtgccca

SEQ ID NO: 31693 - DNA, 247 bp, Glycine max
  Clone ID: 700895207H1
ctcgagccgctcgagccgtccggtgaccctctccaccctcagggcgccaccacccacgtccacaaagacgccggcagcaaccccacgtggaactaccccgtgaaattctctgtcaacgaatcgctggcgaaggaaaatcgtttatctcttgagatcaagctcatctccgaccgcaccctcggcgacaccgtcatcggcaccgtccatgttcctctcagggaactcctggataaccccggcgatgaca

SEQ ID NO: 31694 - DNA, 250 bp, Glycine max
  Clone ID: 700895208H1
cacctcttccccacatcctcacctttcactaccccacaagtctttcacttgtagaagccaggctgagccatcttctgattcagccaaagtccaagaactgagtgtgtatgagatcaatgagagagatcgtggaagccctgcttatcttagattgagccagaaaactgtcaattcccttggtgatctagtccccttcagcaacaagttgtattctggatgtttgcaaaagagggtggggataacagctgga

SEQ ID NO: 31695 - DNA, 252 bp, Glycine max
  Clone ID: 700895209H1
caatgtgcctgccatgtatgtggccatccaagctgtcctctccctatatgcaagtggtcgcacaactggtattgttttggactctggcgatggtgttagtcacactgtgccaatctatgagggctatgcactccctcatgccattcttcgtttggatcttgctggccgtgatctgactgactctttgatgaagatcctcactgagagagggtacatgttcaccacctctgccgagcgggaaattgttcgtga

SEQ ID NO: 31696 - DNA, 255 bp, Glycine max
  Clone ID: 700895211H1
ccaacatctgcgacggaatcctcaagctcctcgacacgcgcctcgtcccctccgccgcctccggcgactccaaggtcttctacctcaagatgaagggagactaccacaggtacctcgctgagttcaagaccggcgccgaccgcaaggaagccgccgagagcacgctctccgcctacaaagccgctcaggacattgctaacaccgagctgcctccaactcaccctatcaggctgggtcttgctctgaatttctctg

SEQ ID NO: 31697 - DNA, 251 bp, Glycine max
  Clone ID: 700895212H1
gatgctatgaaaatccaaagaataagattactgcagtccctgctgaggaagaggaaatctggggtgcatttttcaaggtggaaggatcaactgttcttgcagccacagagtagaagattcattttcaaatagagtaccgtgtgatgcattaatggcgtaatgcatttatgtgcttgtgacggtaaggcatgcatgaggggtcatgtaaataatgttaatgatgactatgacaagagtgcgactggtggaag

SEQ ID NO: 31698 - DNA, 254 bp, Glycine max
  Clone ID: 700895213H1
aaacaaaatacggtacgttgaatggtggtgccaactttgttgcccctggttacaccaagggtgatggtcttggtgctgagattgttggcactttcgtccttgtttacaccgttttctccgccaccgatgccaaacgtaacgccagagactctcacgtccccattttggcacctttgcctcttgggttcgcggtgttcttggttcacttggcaaccatccctatcaccggcactggtatcaaccctgctcgtagt

SEQ ID NO: 31699 - DNA, 253 bp, Glycine max
  Clone ID: 700895215H1
ttcacgtactatatgtgtttgttttgcacagcaaaaatcataatatattataaataagattcagcacatgtatcaatcgtatgaaggcctgatggcgactagatggaaatggtggtggttagcattgacatggtccattggggagcacagaaatagcattattttctctggcagcaccttcaatgcaaatcaaatgatggaggatgcagtgtctttattatggacttggctgagacatttagagaagggtttt

SEQ ID NO: 31700 - DNA, 242 bp, Glycine max
  Clone ID: 700895218H1
aagaggtaccacaagatgaaggacagaatcgtcggtgtctccgaagagaccaccaccggtgtcaagaggctctaccagatgcaggccaatggctccctcttgttccctgccatcaacgtcaatgactcggtcaccaagagcacgtttgataacttgtatggataccgtcactcgcttcccgatggactgatgagagccactgatctgatgattgccggaacggtagctgttgtgtgtggcta

SEQ ID NO: 31701 - DNA, 251 bp, Glycine max
  Clone ID: 700895219H1
ccaaagcacgccaaattacccacacgcaaacgacaacaaccgcgcgcgtttcacacctccataactcggagtagcatacgcagcgtcgttgactcgcaactcgtaacttggcctcgcgcgccgatggcgtcggtccccagcaccgtcgctccccgcaccttcctgccgtcgattcccaagccgagagctcctcttcacgccgcgaaatccgtcgccagcgccgcgcgaaacttcccgagactttcgcacaa

SEQ ID NO: 31702 - DNA, 247 bp, Glycine max
  Clone ID: 700895220H1
aggtattcaaaattgggaggttttcgtttgaattgtgatgtccaagccactgctaggcataggggaggaggaaggtcaaagcaatgtcactttgttggtttcttcctcagtcatcatggaaagtgtgtgcctgaatagctcaaaattgaaagagcgcaactacatggggttatctgattgttcatctgtggacagctccgcgccgtccttctcagatgagactaaaagcaatctgaaccttaaggct

SEQ ID NO: 31703 - DNA, 249 bp, Glycine max
  Clone ID: 700895224H1
atgagttgccaagtactttcaaggcctaccgctaccaacagcaccgttggtcttgtggtccagccaatctttttaggaaaatggtcatggagatcataaataacaagaaagtgtcattgtggaagaagatacatgtgatttacagcttcttctttgttcggaaggtcgtagcacacataaacacgtttgtgttttattgcattgtattacctgcaacagttttggtgcctgaggttgtggtcccaaagt

SEQ ID NO: 31704 - DNA, 253 bp, Glycine max
  Clone ID: 700895225H1
cgtggaggtcacagagggtgtgagaggcttctactttctatacatggaaacttgtttccaattagcagtttttgcctttttcttcttctaagccttcacagaatttttaggttggtgattttggtgtttgccgcttcaaaactgatggcagtgtttggttggcaaccttgtcctttcaggtgattcctatgatctttcagtcacacacaaacacaaacatcaacactgttatgagcactagttcaacaactta

SEQ ID NO: 31705 - DNA, 251 bp, Glycine max
  Clone ID: 700895226H1
ggggggctgtattagagggacacattgacctattaagttctgatcattcaccaactgttcctgaactcaagcttatggaggaaggtgacttcttaaaggcttgggggggcatatcttctttgcagtttaatcttccagtgacgtggtcatatggtaagaaatatggactaactctggaacaattgtcgttattgtggagcaagaaacctgcaacattggcggggttagaatcaaagggggccattgcagtt

SEQ ID NO: 31706 - DNA, 253 bp, Glycine max
  Clone ID: 700895229H1
cctcgagcgaatcggctcgactgtttcgttccactccctaatcgctgctacagttacagcataacttctattctataagtctttctactcgcaagcaaatcagaagaagagaatggcagcagcagaggggctaaacagagcgcagtacgtgtacttggcgacctgtcggagcaggcggagcggtacgaggagctggtggagttcatgcagaaggtggtggtcgggtcgacgccggcgtcggagctcacggtgg

SEQ ID NO: 31707 - DNA, 255 bp, Glycine max
  Clone ID: 700895230H1
gccaggaagaatgtctcttctgcaagagggacaattgctgtggataagatcactcacagggagcgatcatcgtatgtgggaaggcgcactgaaaccttcacttttctggacagtactgatcctgacattttcacaccacgctctgcccctgactcgtatggaactgcaacatactatcgtcatggtagagatccttcctctgatggttttgctgagatactgatgcgtcaagggagtctactcatgggtggacaa

SEQ ID NO: 31708 - DNA, 259 bp, Glycine max
  Clone ID: 700895232H1
ctcctcgagctcgagccgaatcggctcgaggtttttaaacccatacctaaaccatttccaaacgttaaccctatcccttaagccaaagtcatttattaagccagagactttcttcagaaaacctattcctaaacttcacccaaatctgataaagcacggtcttctacattttccaattcacaatacaattcctacaatttcaactccataagatgatttggccgtgtcctataaaatgattgtacttagaacgttatcc

SEQ ID NO: 31709 - DNA, 245 bp, Glycine max
  Clone ID: 700895190H1
gaatagctctgctcagtgttgctgttggacttccaaatgtgggaggacatttcgagacttggaacacaggaatccttggtccagttgtactccgtggacttaaccaaggaaagttggacttatcttggcagaaatggacttatcaggttgggctgaaaggtgaggccatgaatcttgcatctccaaatggtatctcttctgtagagtggatgcagtctgcattagtttcagagaaaaatcaacca

SEQ ID NO: 31710 - DNA, 247 bp, Glycine max
  Clone ID: 700895153H1
gtggtggctgcgtggcacttcttggtgctgccaaattggtgttggggttggtgttgggaacttctttggcacacattttgaagcagtttcctgtggggattttaggagtgttgcttttgtttgctggaattgaactagccatgtgtgctagggacatgaacaccaaggaagattcctttgtgactcttgttatcactgcagtttcacttgtgggatcaagtgcagctcttggctttttgtgtggaat

SEQ ID NO: 31711 - DNA, 192 bp, Glycine max
  Clone ID: 700895154H1
cgaaaaatgtcgaagctgatcttcgtgttcctttcgcttattcctcttctctgcacctccttctccccagagagaccctcagatcgacgcgtcctcgttttgctcgatgacttcgccatcaaatcctctcattctctcttcttcaactccctcaaatctcgcggcttcgatctccaattccacacaacatac

SEQ ID NO: 31712 - DNA, 251 bp, Glycine max
  Clone ID: 700895157H1
tcttaatttctctctgccttgctcatttacacacctctccaacctttcactttcagctttatttgaatccctctctctcctttccaaatggccagcgttgaggttgcacatcaaacaccatcaacagttccagaaaatgaaacaaccgaggtaatcaagacccaggaaacaaccccggaaccagtaccagccactgaggctcctgcaacagaacaagcagcagctgaggttcctgctcaagaagaacaaca

SEQ ID NO: 31713 - DNA, 243 bp, Glycine max
  Clone ID: 700895158H1
ggactctctagctagcacctctctctattctctccctaagtgactcctacttcataatcagagggcatgcctgaatgtccagagaaagggagagatttgatgagatagggaagaagatcaagagggaaggagatgtttcatctcaaatgggaagaagacacatgttaggccctccaggaaccctaaatactatcaccccttgtgcggcatgtaagttgttgagaagaagatgtgcccaagaat

SEQ ID NO: 31714 - DNA, 248 bp, Glycine max
  Clone ID: 700895159H1
ctgtgtttttctctcgtcgtcctcctcctattttgtttctcatgcctttcatttgtaattttttacatgatcaactaaaaaatgtactctctgttttccgaccattgtgtctcttaatatcagtatcaaaaagaatgttccaagttaaaaaaaaaaaaaaaaaaaaaaaaaaaaaaaaaaaaaaaaaaacaaaaagaaaaaaaatgaatttaagcacctaattgggctgtaaagtgaattggtttcag

SEQ ID NO: 31715 - DNA, 251 bp, Glycine max
  Clone ID: 700895160H1
tctcccttcgcttactgttgcaccttcctcctaaatgattactcccgctcggcgtgcatcgccgccgattgagctcaacaacaacaacaaaaaacaccataaaactcaccgtagcgcaccacagccaaacgcgatctcaacgatgaccagcttctgaaattccaacttcgcccttcatcttcgtatacttttttatttccggtgaggtgagttccatgcctagtcccaagagcagccgcagcggccagatc

SEQ ID NO: 31716 - DNA, 250 bp, Glycine max
  Clone ID: 700895161H1
ataaactgcaaccgtgacaaaagttgcgtacaatagcatactcttactctgattcgttagtgaagaaaaatggcaacaatcatcgccggcaccccaactacatcaatcactcgcacaggtcatgtgctcaaacgacctgttggggcctcatcctctaccgttcttggattgccagcaatggccaaggcggggagagtgaggtgctccatggaggaaaagccttcaagcagctcaaacctagggatggggg

SEQ ID NO: 31717 - DNA, 235 bp, Glycine max
  Clone ID: 700895163H1
aatgcttataaacaccctaatattattgcagaatttatagctggacaattaaagaatagagtttcgtttcgtaaagcaatgaaaaaagctattgaattaactgaacaggcgggtacaaaaggagttcaagtacaaattgcaggacgtatcgacggaaaagaaattgcacgtgttgaatggatcagagaaggtagagttccacacaacatacgagatagcgaaagggggatgtgct

SEQ ID NO: 31718 - DNA, 254 bp, Glycine max
  Clone ID: 700895164H1
cggctcgagcggctcgagcaaccctctctctatattccattgccacccagttttgaatatatttttattccttctttgtttcttcactttcttccatacacataaccatgtcttctcagactgttgtcctcaaagttggtatgtcatgtcaagggtgtgctggagcagtgaacagggttttgggaaaaatggaaggtgttgagtcatttgacattgatctgaaggagcagaaggtgacagtgaaaggaaatgtg

SEQ ID NO: 31719 - DNA, 207 bp, Glycine max
  Clone ID: 700895165H1
gataatattaatggattatcagttatacttttacacaaagcaacaatttgcgaggtgagttcttacaaactcaaaatacgtacttgtagggattaagtataaattgttgctttgtgtaaaagtataactgataatattaatggattatattttgccaaaaaaaaaaaaaaaaaaaaaaaaaaaaaaaaaaaaaaaaaaagggggggg

SEQ ID NO: 31720 - DNA, 158 bp, Glycine max
  Clone ID: 700895167H1
cttcttctcttgcggctaggggggtagcgcagttcggtctagatttgaggatgatgggtaaggataaggttcacatcagtattgtagtcattgtcctggtcgactctgggatagccactaccactaggtgaactgatttacaagctaggttggattga

SEQ ID NO: 31721 - DNA, 246 bp, Glycine max
  Clone ID: 700895168H1
ctctgcttttcgaactttccatcgactccaccatgctattcaattagggttaggaattagggcttcttcttgttttcgctccgttaatttcaacaacggccaacatggttgttctctcgctttcatctcccagcctctccaccgctctcctcgcaaagaagctgcctccccgagaacacacggttaagctagcgacctttcgcaacaattcatttcgctttagatgcgcggtggacacgccctatg

SEQ ID NO: 31722 - DNA, 247 bp, Glycine max
  Clone ID: 700895169H1
aaaccctaatccctatttttcttcctcagtagtgtcatttacgcttctcttctctgcagcaactatgcctaaccctaaggtcttcttcgacatgaccatcggcggtcaatctgctggccgcatcgtgatggagctctacgccgacgtcactccccgcaccgccgagaacttccgcgcgctttgcaccggcgagaagggcgtagggcggagcggcaagcccctccactacaagggctcgtccttccac

SEQ ID NO: 31723 - DNA, 245 bp, Glycine max
  unsure (1)..(245): unsure at all n locations
  Clone ID: 700895170H1
cttcttcgtctcaaacctcttcgttccttcgattcattccatttcttccaaaatggccaaagacccagttcgcgttctcgtcactggagccgcagggcaaattggatatgctcttgtccctatgattgctaggggagtgatgctgggtcctgaccagcccgtgatcctccacatgcttgacattcctccagcagcagaattcctgantngggttaaaatggaattggtggatgctgcattccctc

SEQ ID NO: 31724 - DNA, 249 bp, Glycine max
  Clone ID: 700895172H1
tctcatttcatttgttagttttcacatcctccaacataagtgtctgagtttgaaacacagcatagacatagcaaaatatgaatgccactctccctttttaaatggaaacaaagctgaagacaccacacgagcaatcaatagataacaaactaaagatagagtgagagtgagagacatgtataggttcagcaacacagtaatcgggttcttggacttgtacacacttttagcatccataccactaattgg

SEQ ID NO: 31725 - DNA, 247 bp, Glycine max
  Clone ID: 700895173H1
gccaagcatcactggcctcgcgggtttagatgcaacggacacattatgctcaattctgagaaaatgtccaagtccactggaaatttcaggacgttgcgtcaggcaattgaggagttttcagctgatgctactcggttctctttggctgatgctggtgatggtgttgatgatgcaaattttgtctttgagactgcaaatgctgcaattctccggctcaccaaagagattgcatggtatgaagataatc

SEQ ID NO: 31726 - DNA, 241 bp, Glycine max
  Clone ID: 700895174H1
ggagaatcaatcagcggattgtaaaattgattgtggaacttatgaggaatcatgagactgcagaatcattggtaattgtggcaagttcatcagatttactactgcgagccacagatgggatgctggttgatggagaagcttgcactttaccacagctggagctattggaagcaacagctagagcagttcagccagtgctcgagtttggagaatctggattggctgtggcagatggcctttt

SEQ ID NO: 31727 - DNA, 247 bp, Glycine max
  Clone ID: 700895175H1
aaggcaatgaatctgatgcaggcggttcgctacgacgcctacgggggaggtccggccggcctcaagcacgttgaagttgccgttcccagtccaaaggcaaatgaggttttaatcaaactggatgcagttagcattaaccctattgattggaagattcagaagggtcttctccgtcctttatttctccccaggacctttccccacataccttgcacggatgtggctggagaaatagttgagatcggaa

SEQ ID NO: 31728 - DNA, 234 bp, Glycine max
  Clone ID: 700895176H1
gatgggtcgttctacagaatcagcggatttgactaatattgacatgcttcattttcaaagaggttctttagatgaattcattgttgagggccctaaaattgcacgacttgagtctctctgggtcagtgttgaatcaggtcacggtcagtgtcgcctagtaagttgtatccgtaatggtgattaactgtgtcggggtatcatcagaacgagaagatgaggtaacaagttacgctg

SEQ ID NO: 31729 - DNA, 248 bp, Glycine max
  Clone ID: 700895177H1
tccatatatcaaacgaggaatattatggacataaaagcccagaatgtaagacatatgatgctatgcttgtatttctcatgtatttagaaactacttctgcacgaaagagagaagagggagcaggcagaagtggctcggagaatactgctggagaaatgcagggttcttttcaaccagcttcaagagtgcaatgtcagtcttccttacgaatacgaaggtaggacaattgtgaattcatcatcatcaac

SEQ ID NO: 31730 - DNA, 252 bp, Glycine max
  Clone ID: 700895179H1
ttgaaaataggtgaaggcctgaagggtgaatcacttctcatctgttctccattgtgagccttcgtccattctgagtcagatcgatagctcacaagcattacgagttgaaatcgttggaacctcgtcgaacaaccgttcaaatcgtcaaagacaaacgagctctgactcgccggaatctcagcggacagcaagtctttctgaacctgtcgtgctcggaactcagttggcgaacttgatattgacgcttagggc

SEQ ID NO: 31731 - DNA, 248 bp, Glycine max
  Clone ID: 700895181H1
ctcgagccgatttgttcttagattccattttccaatgttgtatatattgaacattcggacttccggatgcaagattcaaaagattattatggccttgctcctgggaaatctgtgatactcagatatgcatttcctataaagtgcactgaagttattctagctgatgataatgagactattcttgaaattcgagccgagtatgatccttcaaagaagaccaagcctaagggggttctccattgggttgc

SEQ ID NO: 31732 - DNA, 243 bp, Glycine max
  Clone ID: 700895182H1
tggagacaaagcagtgatgtgtcataggctaaatttcagaactgcagtattttactgccatgaagtccgtgaaacaacagctttcatggttccattggtggctggtgatggaaccaaaactcaggcacttgctatttgccactcatatacttctggaatgaatcatcaaatgcttcatcaacttatgggagttgatcctggaactaaccctgtttgccatttccttggaagcaaggccatttt

SEQ ID NO: 31733 - DNA, 111 bp, Glycine max
  Clone ID: 700895184H1
gaataattgcggccaagccactaatacccaaactcaaagccatagccatggccaccctaatttcagtttaggaacgtttcatatccaactttcactttcactttcactttc

SEQ ID NO: 31734 - DNA, 246 bp, Glycine max
  Clone ID: 700895186H1
ctagaactagaactagggtttcatctttgccatcagaaacaacaatgatttacgacgttaactctccccttttccgatccttcctcagccagaagggaggctcctccgataagaggaaaacggatgaacagaagccaaaagagcagaaacccaaagccagcgagaacaaacctataatgacagagtgacaacaaatttgctgcattcagttgtagaatgataataggtggtagatattgcatttgg

SEQ ID NO: 31735 - DNA, 246 bp, Glycine max
  Clone ID: 700895189H1
gtcctatggaagtctatagctaaaccagctttgaggatatcacaagctgaagaaccattgaattttaactaaccaaactaataagcaaaaatgttggcggtgtttgcaaaagccattggaaaaccaccggaggaactgaggcttccggcaatggggtccaataattcaaagaccccagaagaaattgtacagaaatttcaatctttgtggccagattctgcagtttacaaccttccacatgggaat

SEQ ID NO: 31736 - DNA, 247 bp, Glycine max
  Clone ID: 700895151H1
gcctttctctctcttctttttactctctctctgtctctctctacgctttctcgttcgagatccctcaagggatccactaactgaaggagaaatggggttgacattcaccaagcttttcagccggcttttcgccaagaaggaaatgcgaattctgatggtgggtctcgatgcagctggtaagaccaccatcctgtacaagctcaaacttggagagatcgttaccacaattcccaccattgggttcaat

SEQ ID NO: 31737 - DNA, 253 bp, Glycine max
  Clone ID: 700895124H1
cagcttccaaggcttcgttgattccggcagccgctacctctccgcctcctggggcgggatccagtgggagaagcaggtccgcacctccgcccagatccaccgtcaaggcggcatgtccgtcctcgtcaccggcgctgccggcttcgtcggctcccacgtctccctctcgttaaaacgacgcggagacggcgtcgtcggactcgacaacttcaacgactactacgatccgtctctgaaaaaagcccgcaagtcc

SEQ ID NO: 31738 - DNA, 235 bp, Glycine max
  Clone ID: 700895126H1
gtgtttgtcacgagacccatagtgctgccaaattatagtaactctctttctctatctgaagaagaagaagttctgaagaagcatgtgtggaggtgctatcatctcagacttcattggtgtgaagcgtgcccgcaacctcgccgcgcatgaactgtggtccgagcttgaccctttctctgacctccttggcttcgataccaccaccaccaccaccaaccagccaccccttccacac

SEQ ID NO: 31739 - DNA, 250 bp, Glycine max
  unsure (1)..(250): unsure at all n locations
  Clone ID: 700895127H1
cgaagaagcataagagcgtcgatggatagtctcaagttcgcatctttgacgctgcctccttgttctcgacgctctgggatgctaggaaagaggttgaattcccctttacttattattgattcttcagcacagttttgctattgcaagactgatcttgctgccgcatcatcaagtattccactgaccattataaccaantcttgtagattttcaccaagtgtagcagcagaaacatggacctcgaatcttt

SEQ ID NO: 31740 - DNA, 251 bp, Glycine max
  Clone ID: 700895128H1
gttagcaagacgagaaaagcttccagatcctgttgagagagagaaaggtgttagtctttggtcaatgatcaaggacaatgtgggaaaagatctaacgagagtttgtctcccggtatactttaatgagccgagatcatccctacatgaatgttgtgaggacttggagtactcttatcttctggatcaagcttatgagtacgggaaatcaggaaacggtctccttcgggcactgtatgttgctgcctgtgcag

SEQ ID NO: 31741 - DNA, 251 bp, Glycine max
  unsure (1)..(251): unsure at all n locations
  Clone ID: 700895129H1
ggccattcagatgtcttcttttgtctttgtttctcttacaattttattttgcgtctcttctttggagaagagttttgcctttcacacaacatacgacataggcatcaancactcgcgcaggtcatgtgctcagtcgctctgttggggcttcatcctctaccgttcttggattgccagcaatggccaaggtgtggtgagtgtcgtgctccatggtgggaaagtctgcaagcagctcattcctagggatgggg

SEQ ID NO: 31742 - DNA, 252 bp, Glycine max
  Clone ID: 700895130H1
attgattgtttgcagatggaccccttacggaaacactaagtgcaccatttgcaagcagcaagtgcaccagaatgctaagtactgccacacctgtgcttactctaaaggtgttatttccatgttgagatctttttgcatttgctaccatacatattatttttggtacactaattaaatgtgttctatcatgaaagtgcatgactaaatttctgatgtgttctatatggcaggagtttgtgcaatgtgtggaaa

SEQ ID NO: 31743 - DNA, 255 bp, Glycine max
  Clone ID: 700895131H1
aacgaggataagcagaaggagcaaaagcaatggcgccgaagaagccgagaaccacgacaaggaaccctgatttggttagggggattggcaagtattcgaggtcgcagatgtaccacaagaggggcatctgggccatcaaggccaaaaacggtggcgttttgccccgccacgatcccaagcccaagcccgaggccccggcccagaagccgcccaagttctaccccgcggacgatgttaagaagcccctcgtcaaca

SEQ ID NO: 31744 - DNA, 256 bp, Glycine max
  Clone ID: 700895132H1
cccaatttccaaaaacacaaacaagtggcctcattctgaactctgaaactcaaccttctttcttctcttctctctcgtgtttaactgttcagggcatcctagtttctctcagttagccaaaatggtagctgcaaatgagagggtcgtcgctgtgatcatggttggaggacccactaaaggtactagattccgaccattgtcattcaacgtacccaagccactttttccattagcaggacaacccatggttcatcat

SEQ ID NO: 31745 - DNA, 254 bp, Glycine max
  Clone ID: 700895133H1
tagaattcaacgtttgcaaattgcatattgttcttctcttcctctcttcctctgcatccatgtcgtcgataacgggcatccaggggcaacctcttgaggttacggtggtttcgtgctccaagttgaaggacacagaatggatttcaagacaagatccgtacgtttgtgttgagtatggcagcacaaagttccgaaccagaacctgcacagacggcggaaaaaacccggtattccaagagaagttcatctttccc

SEQ ID NO: 31746 - DNA, 249 bp, Glycine max
  unsure (1)..(249): unsure at all n locations
  Clone ID: 700895134H1
ctgatagcccttatgctgggggtgtttttctagttactattcattttcctccggattatccattcaagccacccaaggttgcatttaggactaaagttttccacccaaatatcaacagcaatggtagtatttgtcttgatatcttaaaggagcagtggagccccgccttgacaatatctaaggttttgctctccatttgctccctattgacggatccaaacccgnatgatcccttggtgcctgaaattg

SEQ ID NO: 31747 - DNA, 248 bp, Glycine max
  Clone ID: 700895135H1
ccagaggagaaatatgccaatgcttttcttggatttggccctgaacaatcccattttgttgtggaattaacatacaattatggggtgacctcatatgatattggaactggatttggacattttgctatcgcaactccagatgtttacaaattggttgaagacatccgggctaagggtggaaatgtcaccagggagcctggtccagttaagggtgggaaatctgttattgccttcgtgaaggatcctga

SEQ ID NO: 31748 - DNA, 248 bp, Glycine max
  Clone ID: 700895136H1
caaagcacaagttgcataagtgctgaagaggaaagcacgagcaagaattggaaagatggcattagaagaaagaagggtgttgaagatgatgatgatgaaatgagaaagttcaacccaaaagagccaaattttctgccattggttcctgagccaggacaagagaaggttgacctgaggcatcaaatgatggatgagagaaagaactcagaggattggatgcttgattgtgctctaagacaagttgtgac

SEQ ID NO: 31749 - DNA, 257 bp, Glycine max
  Clone ID: 700895138H1
tcggcagagcaagaagttgatacaatcaaggatattgtattcacatatgatgttgccttcacgggaagtgatatcagatgggcatcacggtgggacacatatcttttaatgaatgatgatcagatccactggttctccatcattaactctctgatgattgttcttgtcctgtctggaatggtggcaatgatcatgatgagaactcttttcatagacattgccaatgataatcagctagaaacccaagatgaggccca

SEQ ID NO: 31750 - DNA, 248 bp, Glycine max
  Clone ID: 700895139H1
cttcgccagttaatagaaactcaactttgagtagataatactgctggatgtctcgtctctaattattgtatttggacaatagttttgagttgaggatctaatcattaccagatttaatatacttggcaaatggggtctgaaggtcctacgacaccgacaacaacaattcatgtgacaggatttaagaaattccatggagtttcagagaatccatcagaaacaattgccaataatttgacggagtacat

SEQ ID NO: 31751 - DNA, 249 bp, Glycine max
  Clone ID: 700895140H1
ctttctttgtattaaagtcgtatattttaatgcatgctgtcgagcttttgttactttgtgacaaatggagggtccttagttctgtttctctttcttctctctgttctctcaaccaagttctcaattcaatcttcttcacccttttgatctgctaattctcaaggtattcaaaattgggaggttttcgtttgaattgtgatgtccaagccactgctaggcataggggaggaggaaggtcaaagcaatgtc

SEQ ID NO: 31752 - DNA, 259 bp, Glycine max
  unsure (1)..(259): unsure at all n locations
  Clone ID: 700895141H1
aaggagatggtcgtgtactgcttcgacaccctcctcgctcactacaacagcacggaagctccttcccctgccttcgatcaggctcaacatccattgtttgttacatggaagaaagtggtgaatggtggagatcctcgtcttcggggttgcatcggaactctggtaagcacgcaagcttgatcaatgcggctcaaagatgtatgcacttgaccagtngccgctcagnnggaccggagattgtccacccatgtacaggcta

SEQ ID NO: 31753 - DNA, 248 bp, Glycine max
  Clone ID: 700895142H1
cgagaagcaaggatcaaagcttcacaagaaggaaacttgtgagcctattacaattattgagacccctccaatagttattgttggtgttgtgggttatgtgaaaactccacgtggtctccgaacattgaacactgtctgggctcagcatttgagtgaggaattgaaacgtaggttctacaagaactggtgcaagtccaagaagaaggccttcaccaagtactctaagcagtatgaaactgaggagggaa

SEQ ID NO: 31754 - DNA, 249 bp, Glycine max
  Clone ID: 700895143H1
ggtggaaaagatagccaaggaggaaaagccagtttctggagcaaagaaaatgtcatccagttctgccgctcccccaaaactaaaaactatgattaaatctaatgatgcaacacgagacaaaataagggaaattctccacgaggctttatccaaggttactggagaagctgatgaagatcttgtagatgtagtcaataattctgatcctatccgtgttcactgtgacagtggagtctgtattatttgaaa

SEQ ID NO: 31755 - DNA, 249 bp, Glycine max
  Clone ID: 700895144H1
gaagaagaaacttaatcgatcatcacttcacttcactaatacatcatggcagacgattcccagaacaagtatgagagctctgaggttgaggtccaggatcgtggtgtttttgactttctcggtaagaaaaaggatgaagaagacaagcctcatcctcaggaggaggtcatcgccaccgagtttcaaaaagtcactgtctcagaccaaggagagaacaagcacagcctcttagaaaagcttcaccgatct

SEQ ID NO: 31756 - DNA, 250 bp, Glycine max
  Clone ID: 700895145H1
tcgcgagcggcgccctttatagtagttttatccttgcagagtcttaggtgttttgtttaagttatatttttaagtttctgccgatttcatgtagccgtaactttcaaaactaggttcttgatcggcggtggtcaattttcattgctgtttgtttttgatgagtactgttttttgttttgatggtaagaagagtctgagatatttcgaatttcacaagcagctatagggttttagtccatttcctttgctg

SEQ ID NO: 31757 - DNA, 252 bp, Glycine max
  Clone ID: 700895147H1
gtgaatttctgcatagagcagctgatcttacattggtgccatcagctgccattgcaaaagatcttgaagaagctcgagtaacagcagcgaacaagatttgtctttggaacatgggtgtcgattctgaaagtttccatccacgattcaagtcccatgaaatgcgattaaggctgagcaatggtgaacctgagaagcccttgatagttcatgttggacggcttggagttgagaagagttagattttctcaaaag

SEQ ID NO: 31758 - DNA, 254 bp, Glycine max
  Clone ID: 700895148H1
gtcaaagcttccggcaaatcaagagcaaaaacatgcttttttggtaaaagttgcatcaataagggaggttgtccttggtgcaccattgagagtaattttagaacatcttgctgccagaactgttgctccagacctggatccacttgttgcccttgttcatcggcctaatgagtctttctttctttttcctcaggctgataaggtgactgtagtgtatcctatgagattcaacgattcaatagacattgttctcg

SEQ ID NO: 31759 - DNA, 251 bp, Glycine max
  Clone ID: 700895149H1
cacaaccaagatgtgaactctctggggctgatttcatcaaggaagactcatgaggctattgagatcctcaagctcatgtcctccactttcctggtcgccctttgccaagccattgacttgaggcatttggaggagaatttgaagaacacggtcaagaacgttgtgagtcaagttgctaagaggactctcaccacaggtgtcaatggagagcttcacccttcaaggttttgtgagaaggacttgctcaaggt

SEQ ID NO: 31760 - DNA, 249 bp, Glycine max
  Clone ID: 700895150H1
tctatccggaattcgttgttagctttaaagtctcgtctgacgctgcaggacatttttatggcagtgaagtctcagaatgttcagcgggcaaatacccattgttacctgccgctgggcccgaaacacacgcactcgccaactgcaactcatggacaactgcaatgaatcatcacatgcttcatcaacttacgggaatcccctcggataccatccccggtgcccattgccgttatcgcagagccggttcca

SEQ ID NO: 31761 - DNA, 248 bp, Glycine max
  Clone ID: 700895122H1
tcatggtcttccaagtttgaggagacatggctgagccaaacattgctagcagatggtctttacaggggatgacagctctcgtcactggtggatccaaaggaatcggatatgctatcgtggaggagttggcacagcttggagccactgtgcacacttgcgctcggaacgaagctgaactcaacgaatccttaaatgaaccgaacacaaaaggatacagagtaactggttccgtctgtgacgtggcgtct

SEQ ID NO: 31762 - DNA, 96 bp, Glycine max
  Clone ID: 700895075H1
caggtctttgacagctgcactggaaagagagttatggtcaaccgccacaatcaatgaggaggttttgagaactctacatgtgatattcatgaactt

SEQ ID NO: 31763 - DNA, 241 bp, Glycine max
  Clone ID: 700895076H1
ctcttttggtctttcctctttcgttctctctctttcactcgcgtcttcgagtttcacagcgaagtcgtaggagggtttcaaaagatggagaacatgcagagcttctggcaattgggcgatgaactccgtggacactcaaaagcatcggaggatcacaaatggttaatggttgcttcgaaattggcggaacagacaagattgaagggggagcgtgtgaacaaccttgatctttcaaagggcc

SEQ ID NO: 31764 - DNA, 158 bp, Glycine max
  Clone ID: 700895077H1
gaaacatatgctccattcaagagcctgcttccaatggtgaaccctgatgatgttgtgtttgggggatgggatatcagtaacttgaacctggctgatgccatggccagggccaaggtgtttgatatcgacctgcagaaacagttgaggccgtacatgga

SEQ ID NO: 31765 - DNA, 245 bp, Glycine max
  unsure (1)..(245): unsure at all n locations
  Clone ID: 700895078H1
cttcttcgctccccccccgctcgttgacctccgattctcccctcatcggagctcaaatctccgatccctcccttcatatcgcttcacggcaaccttctcttcacccatcgcaagatctagttgaatctcgaccggttcgaagctctactcactcaaatcctcttcagatctggggggtttgattgcaattctcactctngctgctcggatttgttcgtttgaaatgtcgattttaccgaaaggcg

SEQ ID NO: 31766 - DNA, 247 bp, Glycine max
  Clone ID: 700895080H1
gaaagagaaagatcacagtaagagaattcatctttctttgcgaacagctaaaaacctctaagggaaagaaggcatgaatagaggtgttcttcagagctcaccagtgcaacaaatgatgactggaaaccctaactggtggaacatcaatatcaatagcatggctccacaagctcctcctttcttgtccactcctaacaactttcctatcccttgtgctcccacttctcttccctttccttcttggcat

SEQ ID NO: 31767 - DNA, 236 bp, Glycine max
  Clone ID: 700895082H1
ttagcagactctgctgcagtgaggtgaggggaggtttgtttgttgtttcgtttttcctttcctttccgccagaatccgttgagaatggcgttgccggtagtcgtcgatgcagagtacctcaaggaggtcgacaaggctcgccgcgatctccgcgcactcatcgctaacaggaactgcgctcctctcatgctccgattagcctggcacgatgccggaacttacgatgctaagcccaa

SEQ ID NO: 31768 - DNA, 241 bp, Glycine max
  Clone ID: 700895083H1
ggctggtcaatttactgttgtaacctcaccattaccgattatttccagacctaccagttcacagatctgttctccaagcggaactcgccggtggcgcacgcggtcggattttgggactaccactccttcatcgccgccgccgcgctttttgagccggaagggttcggcaccaccgggaacaagacgatgcagatgatggagatcgccgccttcttcggacacgtcggcagcaagacctctt

SEQ ID NO: 31769 - DNA, 90 bp, Glycine max
  Clone ID: 700895084H1
aaagtatttctgcttcttggcctgctagtacgttggtctcgtgggacagtttattctcgagtttgtaattttttaacatagggaattcaa

SEQ ID NO: 31770 - DNA, 93 bp, Glycine max
  Clone ID: 700895085H1
ggaagaaattcgcaaagttgttgaacttcaagaaggagctgatattgatgttcctgttcatggagaaccagagagaattgatatggttgagta

SEQ ID NO: 31771 - DNA, 136 bp, Glycine max
  Clone ID: 700895086H1
caacaacatctctgtgcaaaaccagatttctaaggaagcaactcttgcagattcagacaatggacatccaagcaatgcaacattggttgatcacggagtttcatttgaattaaccggggaaaatgttgcccggtgc

SEQ ID NO: 31772 - DNA, 156 bp, Glycine max
  Clone ID: 700895089H1
gggaagggattgaggatgctattgttgggaagagaaggtttcagtatgaggatgaagtgaagaagaatccgttgaattatgattcctggttcgattacataaggttggaagaaagtgtgggggataaggagagaatcagggaggtttatgagaggg

SEQ ID NO: 31773 - DNA, 68 bp, Glycine max
  Clone ID: 700895090H1
atcctcttcactttattaatcgattctagttgctctcctcatcctacagccacaacaagcctcccccc

SEQ ID NO: 31774 - DNA, 115 bp, Glycine max
  Clone ID: 700895092H1
aacgcgtcaacgaaggcggcttctctcgtctcgtctctgcttttctcctttcgctttacgttttcgtgtcgccgccggtaagggcgaaaaagtgtttccctgagaagagaatttt

SEQ ID NO: 31775 - DNA, 244 bp, Glycine max
  Clone ID: 700895095H1
tcgctggccaaatgtgattgtgcagtttgaagatttccaaagcaaatgggcatttaagttattacagcggtatagaaatacctacagaatgttcaatgacgatgtgcagggaacagctggagttgcaattgctggacttctaggtgctgtacgggcgcaaggaagaccaatgattgacttcccaaagcagaagattgttgttgctggtgctggaagtgctggaattggggttcttaatgcagcg

SEQ ID NO: 31776 - DNA, 112 bp, Glycine max
  Clone ID: 700895096H1
gaaacaacttggaggcatagtaactggccatgatgctaagcatgagaatgacttcgcgtgtccctcagagactgaattctgcgaagcacttggatcagtctcatatggagag

SEQ ID NO: 31777 - DNA, 256 bp, Glycine max
  Clone ID: 700895101H1
ccgaatctcccagagaaacaaagaaaagaagaaaatggctgtggccaacaatgtgctttgcattttcttcattatctccttaacatgtatggttcaagctcgaatcccaggggtttactctgctggtgcatggcaaagtgcccacgccaccttctacggaggctccgatgcttccggcaccatggggggagcgtgtgggtatggaaacctgtacagccagggttatggtgtgaacacggcggcattgagcacggcg

SEQ ID NO: 31778 - DNA, 144 bp, Glycine max
  Clone ID: 700895102H1
actggcagatcgggttttcccttgtcacttttgtataattattttggaagaatttatgatgtcaaagttattgtttaatattaatggcgacattgtatttattatttgtaaaatattgggactcaactatgctttggtaccttt

SEQ ID NO: 31779 - DNA, 247 bp, Glycine max
  Clone ID: 700895103H1
tggagacaaagcagtgatgtgtcatatgctaaatttcagagctggagtattttactgccatgaagtccgtgaaacaacagcttgcatggatccattggtggctggtgatggaaccaaaactcaggcacttgctatttgccactcatatacttctggaatgaatcatcacatgcttcatcaacttatgggagttgaccctggaactaaccctgtttgccattgccttggacgcaaggccagttcatgg

SEQ ID NO: 31780 - DNA, 250 bp, Glycine max
  Clone ID: 700895105H1
atgggtcagccaagcaacctacctaggcaatccagttccatggggcaccctacccaccattctggccattgaattccttgctatttcctttgtggagcaccaaaggagcatggagaaggacccagagaagaagaaataccctggtggtgcttttgatcctttgggatactctaaggaccctaaaacattccatgaatacaaagtcaaagaacttaagaatggacgtcttgctatgttggcttttgtggga

SEQ ID NO: 31781 - DNA, 234 bp, Glycine max
  Clone ID: 700895106H1
tgctgctataccaagtggtcatgtggcacctaatattgatccagtgttgaataaccacatgaatgagatgtctgcataccatgcaaccatgatgtctagcactcttggaacctcaactgttgtcttcactagaacgggtttcattgctgtccttctgagccattatcgtccttcgggcaccatatttgcttttacagatgagaagagggtacaacagaggctggctttgtatca

SEQ ID NO: 31782 - DNA, 249 bp, Glycine max
  Clone ID: 700895107H1
caggaatttggagagtattgatatatcaaggtaggataaaccagtagccaaggaagatatggagttttctatgattttcattgttagcaacattatgctgcttttcagttcagcatttgccaaaactgctagtcctccctctctgagcccaactccagcaccagccccggcaccagacttcgtgaacctcactgagttactcagtgttgcaggtccgttttcacaccttccttggataccttgagtcca

SEQ ID NO: 31783 - DNA, 252 bp, Glycine max
  Clone ID: 700895108H1
atatcaggcaattcaaagacagctcatgctagatgaagatgatgatgagagacttgctggcagtgaccgtgtatctagtgatggaagcagcctgtggggtgatatttacaccatcacttatcaaagggcagaaaaccagccagataaggcatccaatggtggatcaagttcaaatacttcaaaatctgccaaatctgggtctgcattaaattccagctcagaagctaaattgcatcagacatctgttctaga

SEQ ID NO: 31784 - DNA, 253 bp, Glycine max
  Clone ID: 700895109H1
gttttaggccgtttgaatcggatagaatgtgttgctttttttttttccggaaagatggaatcttctcagggtttacatatttggtaatttaattcaaatttcattaggattttcgaaggtcgccaatatatagctcttagtcatgatatctcgattaattcctctttatagctctttgatttcttcctaatcatgagcacaatatgtgtgtggaatggtttacttgttaaggcttctgtgtgaagattattag

SEQ ID NO: 31785 - DNA, 250 bp, Glycine max
  Clone ID: 700895111H1
caacaaatcagaaagatttatgaggaaatttaccaagaggacctcatcaaacgcctagagtctgagctctctggtgactttgagagagctgtgtaccgttggatgctggaacctgcagatcgtgatgctgttttggccaatgttgccatcaagaatggcagcaaaggttaccacgtgattgtggaaattgcttgtgtgccttcagctgaagaggtcttgcgcgtgaagcgtgcctagcacaaccgttaca

SEQ ID NO: 31786 - DNA, 252 bp, Glycine max
  Clone ID: 700895113H1
gttctcttgagcgggatgaagtatttgtgccaaagcagaagtcctgtatcaagtggtactctaaataccttaacaatcctccaggcagagtcctcactcttgctgtcaccctcacacttggttggcccttgtacttggctttaaatgtttctggaaggccttatgatagatttgcttgccactatgacccatatggtcccatttactctgatcgtgaacgacttcaaatatatatatcagatgcaggagtac

SEQ ID NO: 31787 - DNA, 254 bp, Glycine max
  Clone ID: 700895114H1
caaagtttcaaactttctctgcttcctctgctcctccagggtaagaactgctttccctttcgagtttacagtgatttgattcttgccccttttgtggtttgatccaaatcaaaggacgtttctctactggtgctttgattctaagttttggtggggggaaatgatgggaaattagggcctgggtctggaatttttcatcatttctatcgaaaaattgtaccttgttgtgcatattttgttaaaaagtttcgatt

SEQ ID NO: 31788 - DNA, 243 bp, Glycine max
  unsure (1)..(243): unsure at all n locations
  Clone ID: 700895074H1
ctcgtgncgntcgagccgattcggctcgagcttttcagctttcattggtgtggcctagctactatttcaattagaaagccttcatctctgcaaagcgcacttttgcgctttggggttcccttgttgcttgttatcaccttctgttatgctacttctactgctgcagcaacaactcaagtttcagggaatgaagagctgccaaagacaaacctaaatgggcatgatgaagaagcaaaattcgga

SEQ ID NO: 31789 - DNA, 253 bp, Glycine max
  Clone ID: 700895115H1
caaggttctggtgatgctaggaaccaagcacagttatatcaagactcgtccatattatatcattttagagacatgcagagaagacaggttgagtttataaaaaaaagagttcttctcttggaaaaagggctcaatgctgagtaccagaaagaatactttggtgatccaaaagcaaatgaagtaacaaatgaagaacttaaaagtgaaaccaaggctactaattttccaggtgataaattaggggacactgaca

SEQ ID NO: 31790 - DNA, 252 bp, Glycine max
  Clone ID: 700895117H1
gttttcatatggcgaacacactatataacggcgccacatgccgaatccctctccggaaccaatccctggccttctctcgccacgtttccagatccctctctttcctccctataacacgtgcggcaaaacaacccaacgcaattgcggttaaggcttcttcgcactctgacttcgacgttgacctttcgctcagtcctcgtgtcaatgccgtcaagccttccaaaaccgtcgccatcagcgaccacgccaccg

SEQ ID NO: 31791 - DNA, 250 bp, Glycine max
  Clone ID: 700895118H1
catcgttctcgatctccgtcccggtctcggaattggacccttctccctcgggatgcctatatgtgaagcatttgctcagatagagcagcaacctaacatatacgatgtggtgcatgtcaagtattttgatgaggaacccctgaagttggatgttgttattagctttcctgatcatggcttccatcttcgctttgatccgtggtctcagagattgcgccttattgaaatatttgatgtaaagcgacttcag

SEQ ID NO: 31792 - DNA, 249 bp, Glycine max
  Clone ID: 700895028H1
ctagttctagatcgcgagcggccgcccgcgatctagatcaagctaggccgcagatctgtagctcatagtggattgttgcctcgggcagttatatcacaccagcaaaaccaggaccaagcccaaggaatgctttactataacaatcccccacctcctcagcaggaaagaagctactacccatcaatggatcctcaaagaatgggtgctcttgtttcatcccaagatggtcctcccggtgggccttctggg

SEQ ID NO: 31793 - DNA, 253 bp, Glycine max
  Clone ID: 700895029H1
ggaatactgggacttggatttcaggagatctcagttgaaaatgctgtgcccgttatggttcaaaatggtggagcaaaaacttatcagtgagaaggtgttctctttttggcttaatggggatccgaatgcgaaaaaaggtggtgaattagtttttggtggtgttgacccaaagcacttcaaaggaaaccacacttacgttccaattactgaaaaaggttactggcagattgaaatgggagattttttcgttggt

SEQ ID NO: 31794 - DNA, 255 bp, Glycine max
  Clone ID: 700895033H1
cttgggctcgctaagcgagtaggagcaaggattctgcttacatcaacttcagaggtatatggggatcctcttgtgcatccccaacctgaaagttattggggcaatgttaaccctattggtagattccttcatttcattctcaacttgctaaagcgcttataataaggaactatttctgtatctttttatacatattaataaagatgtagactgaggacttaaatatatgataatatcaggagttcgtagttgcta

SEQ ID NO: 31795 - DNA, 249 bp, Glycine max
  Clone ID: 700895035H1
aaacagtacccattttcttgtgtagaaaaaagagagcgagagcagaagagaagagtgcagcgcaagcttagaagagcaaagtgtgtgatgtggttggacattcagtcccaatcacatggcttcttcttctccttctcctccatcttatctcacacaccttcctcttcatccctctcatcaaggtgagagtgagaagcgcgtggaggacgatgaatcgcgcgttccgtctcacatcgtgaccgcggcgac

SEQ ID NO: 31796 - DNA, 220 bp, Glycine max
  Clone ID: 700895036H1
aactaattggcatgcttgatgaggtggggtcaattggatcacaaaatgtttaagggcttattttaaactggctcttgatcattttttattgggtcaaaaggggttcctaattctagggttcttattgattattggggaattttaatttttcatttctgaaagctttttcaacctttttgctgctgaaagctagcagagagggagatttaaaatttaaaat

SEQ ID NO: 31797 - DNA, 249 bp, Glycine max
  Clone ID: 700895037H1
gagctgccaaagacaaacctaaatgggcatgatgaagaagcaaaattcggattttttcatcataaaccaatattcaagaaacatattccaattccagtatataaacctgtcccaaagccatttccagtgtataaacctataccaaagccagttccagttccagtgtacaatcctattccaaagccagtgtataagcctattccaaagccagtgtacaagcctattccgaagccagtgtataagcctatt

SEQ ID NO: 31798 - DNA, 139 bp, Glycine max
  Clone ID: 700895038H1
cttaaaataaaattcattgtgttatgtataatcgcctttttaaacatgatcagaagtcatttttatttttgcacattaattaatgattatatcatgatatcttgtttcaacggtataaaaagttgctcttacgttgaaa

SEQ ID NO: 31799 - DNA, 255 bp, Glycine max
  Clone ID: 700895039H1
gttttctatatcactctcaactttactcctcttcaatcagttgcatattctttgctattccaatggccactgttgaggttgtgtcagccaaggttgccctcccagaggacacaaaagaggcatcattgaaggttgacgaggagaagaacacagaagaagttgttgagactccaacaccagacactgtggtcactgagcaaaccaaggaggaaagtactgaggccccacgacctgcagcttcagaagacaagccct

SEQ ID NO: 31800 - DNA, 247 bp, Glycine max
  Clone ID: 700895042H1
tggtggcgacaatgtcgactcctgctaggaagaggctgatgagagacttcaagaggctgcaacaagacccgcctgcagggatcagtggtgccccccaggataacaacataatgctgtggaatgctgtcatatttggtcctgatgatactccatgggatggaggcacgttcaagttgacactccaatttactgaggactatccaaataaaccaccgactgtacgatttgtgtctcgcatgtttcatcc

SEQ ID NO: 31801 - DNA, 249 bp, Glycine max
  Clone ID: 700895043H1
cagatctatctcgtgcaccaaataatatatgccaacttgccagtgccagtgagaacgcagttacttcaccatttgagaatgaaaaaggttcaaatctaatgatgatgagaggaatgacagccaaggatatagaccctgtaagatattcaggaagatggttcgaagttgcttcacttaaacgtggatttgcaggacaaggccaagaagactgtcattgcactcagggtgtatatacatttgatagggaag

SEQ ID NO: 31802 - DNA, 251 bp, Glycine max
  Clone ID: 700895047H1
gtttggaattactgtagttccatctgttctgttagatattggaatgactatctctccagaaagtcctcggtggctctttcagcaaggaaaaatatctgaagctgaaaaagctgttaaaacactatatggaaaagaaagagtggctttggttatgcatgacttgacagcagcaagtgaaggttcttctgaacctgaagcaggatggtttgatctgtttagtagtcgatataggaaagtggtcagtgtagggg

SEQ ID NO: 31803 - DNA, 252 bp, Glycine max
  unsure (1)..(252): unsure at all n locations
  Clone ID: 700895048H1
ggttttctgaatcagaaatatactcggagaaagaaactgaatcgcttacgcacgcgttaacattaccactttcttacttacagcacagcactcctgctaanctttcgtcttcaatttccctttggatttcattcattagatggattcgagttcggggcatcaagaattcgattatttgtttaagttgttgatgattggagactctggggttggcaagagtagtcttcttctcagtttcacctccgatgcttt

SEQ ID NO: 31804 - DNA, 251 bp, Glycine max
  Clone ID: 700895049H1
gctttggcgactagatgcccccatctgaggtccctaggactgtactactgcaagaacatcacagatagagcaatgtattccttggcacacagcaaggtgaacaacaggatgtggggaactgtgaaaggaggaggaaatgatgaagatggtttaaggactttgaacattagccaatgcactgcactcaccccatctgctgttcaagctgtttgtgactcattcccttctctccacacatgctcagggaggca

SEQ ID NO: 31805 - DNA, 249 bp, Glycine max
  Clone ID: 700895050H1
aaataaaataaactttccctgttcaagaatctcagtttcgactttgaagccctatctgccgcgacgcgacttcctccgactaggcaaccagagtgcttataaaaggaatagtagtaagcacattcatctcccctagatatgaactcagttgcaaggcgtttatcaagcttagtcagacattcaggtttcacacctgaacccttcaataatgggcatcatcaaatgcagcagctccagcaatgcagaggc

SEQ ID NO: 31806 - DNA, 248 bp, Glycine max
  Clone ID: 700895053H1
cgcaatgcagacgaggactgttcaagttaagcagctttcagatctagctggtgtaagagagattcacgagttcttctccttttctggagaaatcgagcatgttgagatcctgagtgaagatgggaaatcaaagactgcatatgtgacatttaaagatcccaaagcacttgaaattgcattattattatcgggagcaacaatagtagaccaggttgtgaagataactccagctgagaactatgtaccaa

SEQ ID NO: 31807 - DNA, 248 bp, Glycine max
  Clone ID: 700895054H1
gcaaaagcagcagcagcaacatcaacaacaagctgccgccatttctcgtttcccttccaacattgacgctcacttgcgtcctatcagacccctcaatctccaacaaaaccctaaccctaaccctaacctcaatcccgctcccaaccctaaccctaatcccattctcaatttgcatcagaaccctaattccaaccatctaccaccgcagcagcaaccgccgcaacagcaacagcagcagcagcagaaga

SEQ ID NO: 31808 - DNA, 192 bp, Glycine max
  Clone ID: 700895058H1
gcatgatgcatatcttgtttcgagttactcaattatacactggtcgtctttaaattccaagagatcagaaatcctgaatgtatcagggcatgtagctccatgtgagaaacatcctggaagccttttggaaggatttactcagacacagattagtacactggctgtgcgggataagttgttgattgctggggg

SEQ ID NO: 31809 - DNA, 246 bp, Glycine max
  Clone ID: 700895059H1
cagcattggagctgtgggcaagtcaggaagaggtgtttgtgagctcttgggtgtggatactgctgatgttgacattatgatgggtacattcaccaaatcttttggatcctgtggaggttacattgcaggatcgaaggaccttatccaacacttgaagtacgcttgccctggtcatctttatgcaacttcaatttcaccagcagctgcacaagaaatgaatatcatccataagagttattcttggag

SEQ ID NO: 31810 - DNA, 246 bp, Glycine max
  Clone ID: 700895060H1
aaaatatggacgcagatcagaggataactcacgacttggagaagttaacagcggacttgtctggattggtaaccggaatggtaaagccatctgtggatattttgtggttcacatggagaatgaagctattaacaggtcagaggggggtttccatactctatgcttacatgttacttggtctgggatttttaagaactgttactcctgattttggcgatttgataagccaagaacaacaacttgaag

SEQ ID NO: 31811 - DNA, 248 bp, Glycine max
  Clone ID: 700895061H1
cttgtgtacaccccaaccaactattgttagatggtcatctacacctccagtgtcagatgaagttagacttcagtggaaaggcttttgtgcccttatagcaaatgcatattttatgaagggaatggcttggtgagatgccatccttgcatcttttcttttcttgatatgcttctagtattgcacccccacccccccaaaaaaaaaaagaatattatctaccagaatcgttctctaatctagcggatttg

SEQ ID NO: 31812 - DNA, 248 bp, Glycine max
  Clone ID: 700895062H1
tgatttgatgctaggcaagccccattcaaccaccactcctctcctcgttcacgctacccctttctgctcttcttctacatttctagttttaaaagtataaagatggcagagacattcctatttacctcagagtcggtgaacgtaggacaccctgacaagctctgcgaccaaatctccgatgctgtcctcgacgcttgcctcgagcaggacccagacagcaaagttgcctgcgaaacatgcaccaaaac

SEQ ID NO: 31813 - DNA, 252 bp, Glycine max
  Clone ID: 700895064H1
gctttgcttaggttctgttttgcagacagagagagagagagagagtgtgtttcagaatttagagagagaattttattttgtttttttggttatcttttttggtttctcttacagcgtttttgtaggtactgaggaagaaagttttggcagaataactttgttggagagaataaaattcaggcaaggcgttgaagttggagagtattagattggaagcttagaagtttctctttggaccaaagaaatggaggt

SEQ ID NO: 31814 - DNA, 242 bp, Glycine max
  Clone ID: 700895066H1
cttgtcagtattggcaccgatcgttgaatccgaagaagctaattgatgttggattttcaaggcttggggctaggatgacgatgagccgcactataaaactttacaaattgcctgattcaacggttactcctggattcaggaaaatggagcttcgggatgtccctgctgttactcggctgcttaggaactacttgagccagtttgttgttgcacctgattttgatgaaaatgatgttgcacat

SEQ ID NO: 31815 - DNA, 244 bp, Glycine max
  Clone ID: 700895069H1
ggagttgatgatgcagctgttaaggttgttgacattgttgacacattcagacttcaggagcaacccgcattcgataagaagcagtttgttaccttcatgaagaggtttatcaagaatttgactcccaagctcgatgcagagcaacaggagttgtttaagaagcacatcgagggagcaactaaatacctgctctctaagattaaagatttccaattttttgttggtgagagcatgggtgatgatg

SEQ ID NO: 31816 - DNA, 246 bp, Glycine max
  Clone ID: 700895072H1
aaagtttccaaattgaacgcaaaaacggaaatttcttcctcaaatgccttctgggtcgctcttctttgcatccagattacgaagtttttggtcgccagtaaggttacttattcacttgataattccaccttctttttttgtttttattttctttattcctcaaaccagaacttatatatctaggcaccctttcaaagaagagagagcttttctgtttggttaccttttttttttgggtgcaacaat

SEQ ID NO: 31817 - DNA, 138 bp, Glycine max
  Clone ID: 700895073H1
ctcgagccgctctctttctttttcttcccatttcacccctcgtctttccttgtttccggtgagggccaaccacaacatatgttaaacaaggaacaacctccaaaacataacatcctacgccaaacaaaactttgacct

SEQ ID NO: 31818 - DNA, 250 bp, Glycine max
  Clone ID: 700895027H1
ggaaagggagggattctcgaaggttcccgggtcacagagaggtgttactgtacttgcaggatttcgctgctgaatttgaaatcggagaattggtgaggtttggaacggaggttttgtttgctggattggatcagtgtggaaagtggaggctgacttcaacatcaccccatactcatcctgtggatgagatttacgacgcccttatcatttgcaacggccattacgttcagcctcgtcttcctcatatccc

SEQ ID NO: 31819 - DNA, 245 bp, Glycine max
  Clone ID: 700894983H1
ggagtgtgtttgcagattgatgacaagcaaccccattacgtggaagcctaagaggagaagacgacgaagaggacaaggttaactgaatcgccgcttctgtgtggcttcgttctttcgttttagttttttcatctttttagctttagagggtaatacattctttaaaaaaatggaggttttggtgggtcccgctttcaccatcgacgttccttcgtctccgccgcgggatggcggttccgaaaatc

SEQ ID NO: 31820 - DNA, 69 bp, Glycine max
  Clone ID: 700894984H1
cactcattttcaggctagagaaggtgaacttgagaagatttcgcagtgtagccaaagtcattggaaccc

SEQ ID NO: 31821 - DNA, 246 bp, Glycine max
  Clone ID: 700894985H1
aaccacagccccaacaacaacgcggcgatttcgtcgtgtggggttctgcaaagtcacgggcttttgtcgtcgccttcttcttcgtcgatgaacaactgtttccagttcgcagaaacagtaccagacgacgacgcagtacgtgaagatggaggagcacaattttctcagcgccgacgaggcctgcaatttcttctcggacgaacaagcaccaactctgcagtggtactgttcagaggaatggagtta

SEQ ID NO: 31822 - DNA, 244 bp, Glycine max
  Clone ID: 700894986H1
gagagcatggcgtcttgggatcaaatgggggaacttgcaaatgtggcacagttgactggtgtagatgctgtgcggctgattgggatgattgtgagagctgcaagcactgcacggatgcataagagaaactgcaggcagtttgcacagcatctgaagttgattgggaacttgctggagcagctcaagatctcggagctgaagaagtacccggaaactagggagcctctggagcagctggaagatg

SEQ ID NO: 31823 - DNA, 247 bp, Glycine max
  Clone ID: 700894987H1
cacttggcatcgcttctcctctctcccaagaaagaatcatcaatggcgattgaacacgaagacgatctcaaagacgagaagaaccctcgacctctcgacgaggatgacatcgccctcctcaagacctacggtttgggaccttactccacaagcataaaaaaggcggagaaggaaatcaaagatatggccaagaaagtgaatgacttatgtggtataaaggagtctgatactggtttagctgcaccaa

SEQ ID NO: 31824 - DNA, 247 bp, Glycine max
  Clone ID: 700894988H1
tcttcttcgtctcaaacctcttcgttccttcgattcattccatttcttccaaaatggccaaagacccagttcgcgttctcgtcactggagccgcaggcaaattggatatgctcttgtccctatgattgctaggggagtgatgctgggtcctgaccagcccgtgatcctccacatgcttgacattcctccagcagcagagatggagaatggggttaaaatggaattggtggatgctgcattccctctt

SEQ ID NO: 31825 - DNA, 247 bp, Glycine max
  Clone ID: 700894989H1
caaaacggcaggctagaaactaaaatggaagttgttaaccaaagagatgcagaacttttgttcatgtggcaaatgtatcagagatcaaaccatcagtcagaaaataagacagacatcctcaaacaaattgcggagacagtgaagcataggaaacacatagatggtagcgtggaattgattggagttttactgtatggaccaggaaaaggttcttctgttctacaatccgtgagggctcctggttcgt

SEQ ID NO: 31826 - DNA, 246 bp, Glycine max
  Clone ID: 700894990H1
gctttgttgacacaagtaaccgtgtctttacccagaacttgaggcccggtgagtcgtttgtgttcccaaagggcctggtccacttcttgttcaatagtgattccagggaaccagcaattgccatatccggtctcaatagtcagaacccaggtgcacaaattgcatcacttgcaacatttgctagcaagcctccaatccctgatgacattcttaagaaggctttccaaatttccaaaggagaagtgg

SEQ ID NO: 31827 - DNA, 258 bp, Glycine max
  Clone ID: 700894995H1
ttagttatctaattacctcaattagtcccttaattgcaagcatcatggctgaggagaaacaccaccaccacttccaccaccacaagggcgatgatgtgcctggcgaggttgattataagaaggaggagaagcaccacaagcatcttgagcaccttggggaacttggtgctgcggctgccggtgcttatgccttgcatgagaagcatgaggccaagaaagacccagagcatgctcacaggcacaaggtagaagaggaga

SEQ ID NO: 31828 - DNA, 200 bp, Glycine max
  Clone ID: 700894996H1
tggaaatgctggatttctattcggttaccatatcttatagacatattgtagtgttttctgttttgacattatgggtccccgagtagtgagttttttccccccttaagttggccaaacttttgttgagactgatcttttaaaaaattccaaattgtttgattttatataaaagaaaaaaaagaagaaaaaaaaaggaagaa

SEQ ID NO: 31829 - DNA, 249 bp, Glycine max
  Clone ID: 700895001H1
attctacttaccttttctcttaatccaaatatcatcatctgaaacgatggctgccatggcaaccacaaccctctcttcaaacccgaaactctcatttttccacggaaagcccgttacatattcttcccgcgtcgcacccaccaccaagttattctcatccaaacaaggcacaatctccatgtccctaacccaacccctatgggatctcaaatctttaatattccaccccatcaaagactccatcgtctc

SEQ ID NO: 31830 - DNA, 254 bp, Glycine max
  Clone ID: 700895002H1
ggagaacatcccatggaatggagtagacgagtgggcactaaaggatgaagtgaacagactcattaatgtgacccttgtggaacgagagagagaaattattcgactttattatggactggaaaaagaatgtcttacgtgggaagacataagcaaacggataggtttgtcaagagaaagagtaaggcaagttggacttgttgcattggagaaactaaaacatgctgcgaggaagagacaaatggaagccatgctat

SEQ ID NO: 31831 - DNA, 254 bp, Glycine max
  Clone ID: 700895003H1
ttcactctatatatccacttcatataatttcctccacattgtgcaccgttcatggtgatggcaaaactaaagcacccttcattggtggcacttcttctagtactagcgtgtctttttattgctccaacatcctcaacatccagaaaaacaagtttcaagcagcagcacccttgcccaacaacaaatgggttccgagtcatgcttcgccacgtcgattcgggaaaaaacttaaccaaactagagcgtgtccaaca

SEQ ID NO: 31832 - DNA, 145 bp, Glycine max
  Clone ID: 700895004H1
tgaaaatgctgctactttgaatcacgcgattccgttgtcccaacagttgagttatttcaaggaataccaaggccagctggccaaggtagctggcagtaaaaaagcagcctcaatcatcaaggatgcgttgtatgtgctcagtgct

SEQ ID NO: 31833 - DNA, 253 bp, Glycine max
  Clone ID: 700895005H1
catataccctgcattaattggttatatcaacagagatgacgattggagtttggtgcgaaactcgagattggtgcaattattttaaaatgctagaaatgcccaactaactcccgtacttctagctctagacccaaaattcgggaacggtaaagaacgatgcctccattgacttcgtggctggtgctgcccattctcgtgttgttggcggctccggcaacaacccctccagcacgtgcctcaccggtcgcgtcgt

SEQ ID NO: 31834 - DNA, 136 bp, Glycine max
  Clone ID: 700895006H1
cttaaaataaaattcattgtgttatgtataatcgcctttttaaaaatgatcagaagtcatttttatttttgcacattaattaatgattatatcatgatattttgtttgaacggtataaaaagttgctcttacgttg

SEQ ID NO: 31835 - DNA, 258 bp, Glycine max
  Clone ID: 700895007H1
gttttctatatcactctcaactttactcctcttcaatcagttgcatattctttgctattccaatggccactgttgaggttgtgtcagccaaggttgccctcccagaggacacaaaagaggcatcattgaaggttgacgaggagaagaacacagaagaagttgttgagactccaacaccagaaactgtggtcactgagcaaaccaaggaggaaagtactgaggccccacgacctgcagcttcagaagacaagccctcgg

SEQ ID NO: 31836 - DNA, 255 bp, Glycine max
  Clone ID: 700895009H1
gtttgttgtaggaagaggaatcttgagaaatggcaggggacagcaagagcaagattctgttcatcggagggactggttacatcggaaaattcatcgtggaagccagcgccaaagctggccacccaactttccttttggtgagggagtcaactctctcaaacccggaaaattcacccttcaatggccatttccaaaggcttggtggcaatcctggtttagggagtctatacggtcaccaaagtttggtgagtgcta

SEQ ID NO: 31837 - DNA, 252 bp, Glycine max
  Clone ID: 700895011H1
actagtactaatctcttaattctctttggccatttctttagtaacattaagataatgtaacctgtggaaatggcaccttatggtagattcattgctaacattttgatagctgtgatgtttgtgtgcttgttttttgtgaccaacattgtggcacaggattcagagattgctcctacaggtcaattggaggctggaactgggtttgatttgcctgtttctaaggtgatgatgtgttcttcagtgttggcatct

SEQ ID NO: 31838 - DNA, 238 bp, Glycine max
  Clone ID: 700895013H1
cttcgttgcttggtgatgtccctttctgttctcttcactcttggtcttgcgagagaaagccatgccagagacgaagatttttggcatgctgtttggccaaacactcccattccaagttcattgcgagaccttctaaagcctggccctgcaagtgttgaaatcgatgatcaccctatgcaaattgaagaaacacagtacccgaaaaccttcttctataaagaagaccttcatccaggca

SEQ ID NO: 31839 - DNA, 245 bp, Glycine max
  Clone ID: 700895015H1
aagctcattttgtatcatgtatgtactgtagctaaactaagtttcaccctgaacttgcttgtgagtctgctctcgatagaacagtcttgtacagtaacgaaaaacgctgtaaccaggtccttttctatattgtctcattttgtgttatgcttatgttgatttagcttgtaatggaagtcatttccaattgtttggattaatgtatgatcaaaaaaaaaaaaaaaaaaaaaaaaaaaatttaattt

SEQ ID NO: 31840 - DNA, 256 bp, Glycine max
  Clone ID: 700895016H1
tgctgctgctgctgctgctgcatcaactccttattcttcatacatgtccactgtggctgttacaccaatggctcaatctcatcgcatgaaaaaggctccttcaaatctgggggatgatcctttaaaaatgtcagttatgcagcgtcacaaactaatggtgcactcagtgttgctggtggtctttcaaatgtcaaaattttgagtaaatctaaggtttctcgggaaatggacggccctgaaagtagggttgtgcagt

SEQ ID NO: 31841 - DNA, 250 bp, Glycine max
  Clone ID: 700895017H1
gaatttcacactccctctcccaaactcatcatcctataatacaaagggtttggaatatatatcaaatatcaaaatacatcacaacatcaaaatggcctcaattgttactatggccaccattgtcacattagtcctcgcactagcatgttgtggcatgtctgccccgacctcagtgccgaaaaccactgcagcggccccggccccggagagcaatggctgcttgatggctctagcacacatgtcagattgt

SEQ ID NO: 31842 - DNA, 247 bp, Glycine max
  Clone ID: 700895019H1
ctcagaccaaaattaattacatcctcgtcggcagcgaggttctccactggggcgacaccaacatgatccgcagcctcgtccctgccatgagaacccttcactcagccctcctagccgagggcataaccgacattaaggtaaccactgctcactctctggcgataatgcggtcatcgataccaccaagtatgggctgtttcaggcccgggtacgcaaagcacgtgttgaccccaatgctgaagtctct

SEQ ID NO: 31843 - DNA, 251 bp, Glycine max
  Clone ID: 700895021H1
tagcaatggcagaacaaaaccaaaaccaaacaactgaagctgtaaggcaccaagaggttggtcacaagagccttctccagagtgatgctctttaccagtatattctggagacaagtgtctacccaagagaacctgaatccatgaaagaactgagagagttgacagcaaaacacccatggaacatcatgacaacctctgcagacgaagggcagttcttgaacatgctccttaagctcatcaatgccaagaac

SEQ ID NO: 31844 - DNA, 93 bp, Glycine max
  Clone ID: 700895025H1
attttcttgtttatatagtatagaattctgtgttatgggcgatgggattcatttattggttcggaataatagacaacataatgaccacaaaaa

SEQ ID NO: 31845 - DNA, 92 bp, Glycine max
  Clone ID: 700895026H1
attttcttgtttatatagtatagaattctgtgttatgggcgatgggattcatttattggttcggaataatagacaacataatgaccacaaaa

SEQ ID NO: 31846 - DNA, 243 bp, Glycine max
  Clone ID: 700894982H1
ctatttttcaagtaacttaaggtttcaaacctaggaagttggaagtcatggcagcaacattgatggcagcaacaacaagttctggtactcttaaagcaactcctttccttggccaaggcaagggtgccaatgccaatgctcttagggatgttgtctccatgggaactgggaagtacaccatgggcaatgatttgtggtatggaccagacagagtgaaatacttgggacccttctcagctcaga

SEQ ID NO: 31847 - DNA, 252 bp, Glycine max
  Clone ID: 700894941H1
tggatttggaaacttctcctattattatgttagaaaagattttagccttccacgttttgctcagatgatgtggcggcttaatttttttgtggccttctgttgtattgtgcttaacaatgactatatgctctactatatatgcccaatgcacacgcttttcactttgatggtgtatggagcattgggtatatataacaagtataatgaaattccctctgtaatggctgcaaagattttggcatgctttcttgt

SEQ ID NO: 31848 - DNA, 255 bp, Glycine max
  Clone ID: 700894942H1
cggctcgagtttaactgttcaaaagtgtttttgaatctgcctgccaataatgacttagatttctttggaggcacctgagtgtcagtttctcccttacctacccttccctttcccttcatttgatattgggatcctgtaaccaaaagaataagtgtcttcgcttctgatgagcagttatcattgtttatttccaaacttcaatctcttttactcttaagtcttgttttggacctggcctcgatgaagaaaaaataa

SEQ ID NO: 31849 - DNA, 193 bp, Glycine max
  Clone ID: 700894943H1
cactctctctctctctctctctcattcacacgaatcacactctccacagtgcgattcattcaccaatggatcgcaacggtgttctctctcttgcattcatctgcattgtagtcgccggcgtcggaggccagtctcccgccgcagcgccctcgaacactccggcaacccccgccgccgagactcccgcccaagc

SEQ ID NO: 31850 - DNA, 89 bp, Glycine max
  Clone ID: 700894945H1
aatgtctggtaattggtcgcttctgtataaagttcggctaatctgaattatgaatctctgcttataatattaaatactattactggaag

SEQ ID NO: 31851 - DNA, 261 bp, Glycine max
  Clone ID: 700894946H1
tttttctctcacctgaaaatgtcttgctgcggtggtaactgtggttgcggaagctcctgcaagtgcggcaacggctgcggaggctgcaagatgtacccagacttgagctacactgagtcaaccaccaccgagaccttggtcatgggagtggcacctgttaaggctcaatttgagggtgctgaaatgggtgtgcccgctgagaacgatggctgcaaatgtggaccaaactgctcctgcaacccctgcacttgcaagtgaggt

SEQ ID NO: 31852 - DNA, 79 bp, Glycine max
  Clone ID: 700894948H1
gtgaacaacttgcaatttgctcactgagtactcatggccacagtgtactcgcgtcgactttggtaatgaagcgagtgtc

SEQ ID NO: 31853 - DNA, 253 bp, Glycine max
  Clone ID: 700894949H1
gtttctaccattgattgtgccaccaacaatttatcaagcaggtctttggtcaacttggttgaccgtgctttgttctttgaagatgtttcaagctttggctagagatcgtttggaacggctgaatgcatctccgtctgctacaccctggacatatcttcgagtatattcagcattgttatttgttttcatggttgatgttctctggataaggttttgtctgacaatatatcaagcacatgggtcctctatgtat

SEQ ID NO: 31854 - DNA, 243 bp, Glycine max
  Clone ID: 700894953H1
gagaaagagatagtgtggtagagagagaggagcggaggagagaaaatgacgacgaggttcaagaagaacaggaagaagagaggccacgtcagcgccggtcacggtcgtatcgggaagcaccgcaagcatcccggtggtcggggtaacgccggtggcatgcaccaccaccgcatcctcttcgacaagtaccatcccggtttcttcggaaaggtgggtatgcgctacttccacaaactccgcaac

SEQ ID NO: 31855 - DNA, 252 bp, Glycine max
  Clone ID: 700894956H1
attgtttgttgttgtaactcgttcttcttcttttgttgttctgtgtttgtgtttgttttttctctcacctgaaaatgtcttgctgcggtggtaactgtggttgcggaagctcctgcaagtgcggcaacggctgcggaggctgcaagatgtacccagacttgagctacactgagtcaaccaccaccgagaccttggtcatgggagtggcacctgttaaggctcaatttgagggtgctgaaatgggtgtgcccg

SEQ ID NO: 31856 - DNA, 251 bp, Glycine max
  Clone ID: 700894958H1
ttctgcgagtaaagagtgcagaaggaaaatgggcgaggcatatgcattgaataaagaattaaatggtttggttagtgaagatgatctgaaaaatttgaggaggaaattagatgagagtgaagggcaagaggctggagctaaaagatataagcaacagctgattggctgacccaaaattttactcgttttttcaactgccgtgctttgagttgcagtttatacgtgttagggatattttattttatgcatta

SEQ ID NO: 31857 - DNA, 253 bp, Glycine max
  Clone ID: 700894959H1
aaaccctaaacgactctatctctcttcgttttgttcttccttgcgctcctcctcgttcgttcgttctccctcgcgtagatcggcaatggcggagaccgagacgtttgctttccaggctgagatcaaccagctcctcagtctcatcatcaacaccttctactccaacaaggaaatcttccttcgtgaactcatcagcaacgcctctgatgctttggacaagattagatttgagagtttgacggacaagagcaag

SEQ ID NO: 31858 - DNA, 256 bp, Glycine max
  Clone ID: 700894960H1
ctttgttttttttctctgcagtaatagaaaaaaaagaaagaaagaagaagaagaagaagaagaagaagaagatgttgagggttgcagctagaaggctctcttctctctcctcctcctctccgtggcggcccaaccacgccgcttccgcttatgtctctcgaaacgtagtcgttgatgaccgcagatccgatccttcctcccatcccctttttcccttcagaggttttgctactgaatccctgatccacccaataga

SEQ ID NO: 31859 - DNA, 258 bp, Glycine max
  Clone ID: 700894961H1
aaccacagccccaacaacaacgcggcgatttcgtcgtgtggggttctgcaaagtcacgggcttttgtcgtcgccttcttcttcgtcgatgaacaactgtttccagttccagaaacagtaccagacgacgacgcagtacgtgaagatggaggagcacaattttctcagcgccgacgaggcctgcaatttcttctcggacgaacaagcaccaactctgcagtggtactgttcagaggaatggagttaagagggaagaaga

SEQ ID NO: 31860 - DNA, 259 bp, Glycine max
  Clone ID: 700894963H1
ctaagtggtgttctacaagcaaaagacgataaagctcgtagggaaatgaaagctctgttatcaagattgcttaaagagaatgtgtctaatgatagcagcagacttgatgtttctaaagacacactttatcatctttgccataagtgtattggttctcttctcctatgcctgtccgaagcagccagcagcgatgagaagctggatcggggggctataatgagcgacataactcgtgaagctgacaatattcagtggattg

SEQ ID NO: 31861 - DNA, 243 bp, Glycine max
  Clone ID: 700894965H1
gtttcaccgcacgaatatcttgttgtttggagcgatccgagaaaaactctgtaaacatgttggtttaccaggacctccttacaggtgatgagcttctctctgactccttccgttacaaggaaattgagaatggaatgctgtgggaagttgaggggaagtgggttgttaaaggagcagttgatgtagacattggtgcaaaccccttctgctgaggtggaggagaagatgagggagtcgatgatg

SEQ ID NO: 31862 - DNA, 247 bp, Glycine max
  Clone ID: 700894966H1
atcaactagaaaggagtcattttatgaccttcagcttgatgttaaaggttgtcgtgatgtttatgcttcctttgataagtatgtcgaagttgaaagtcttgagggggataacaaatatcatgctgaacagtatggtttgcaggatgctaagaaaggtgtcctatttattgattttcctcctgtccttcaactccagctaaaaagatttgaatatgattttatgcgggatactatggttaagattaat

SEQ ID NO: 31863 - DNA, 243 bp, Glycine max
  Clone ID: 700894969H1
gaggaatacacgaagcataggcaatgaaatgaggcgttttgactgaccttcttggatctgatcgaatccaaacccaaaccctaatctaatcccaaaaagcttattagtctctctcgatcaatcgaaccagcgagcaagattgtctctctcctaggccatgcgaccaccctgttcctccgccatcgccctctccagagaggtttcctttttcgttttcgccgatttctccatcgattccgccag

SEQ ID NO: 31864 - DNA, 248 bp, Glycine max
  Clone ID: 700894971H1
attgagcaagaatataccttgttgcagaaagatgtaaatgggccacttgggtggccacttggtgggtttcctggaccacagggcccatactactgtggaactggtgctgataaagcatatggccgtgatattgtagatgcacattacaaagcttgtatttatgctggcatcaatattagtggcatcaatggagaggttatgcctggtcagtgggaatttcaagttggtccttctgttggtatatctgc

SEQ ID NO: 31865 - DNA, 247 bp, Glycine max
  Clone ID: 700894972H1
cttctccctttttctctctgtctctctctctcggtctcgctcttgttctcatcaagcacagagttacagactcaccgatcttccgattctctttcgtcttggtttatgagctcgaaggagagacccactcttggtggcacgcggattaagacccgcaaacgaaatattgctgcgccgctggaccctgcagcattctcggatgcagtggtccagatttatttggataatgctggtgatctggaactta

SEQ ID NO: 31866 - DNA, 248 bp, Glycine max
  Clone ID: 700894973H1
gcaaaaatgcaatctatgtccctgacgctgagcaagaggctctccaattcaaagcctctcttcagaatctcttccagcctcgtcgctcacgcatcctccgccacaacctctccgccgccaccttcgccgccagtcccctctccctccgccctcaacagcctcctcaccgctccgtggtccgccactcagtcacgcggaatcacgctttccggatctgatattagagtcgggaatctcattggaaaccg

SEQ ID NO: 31867 - DNA, 249 bp, Glycine max
  Clone ID: 700894974H1
caaatgttgccgaggaagaaacctatgtgatcacagccagaatggaaccggctgttgccattgaagtcaaccctccagcaatgactatcaaagcaggcgcatcgcgcagtttttggtgtcacttacagtgcgctcggtgacaggaaggtatagttttggagaggttttgatgaaagggagcagagggcacaaggtgaggattcctgttctggccaacggataccgacgatagatagcatagtgaagttt

SEQ ID NO: 31868 - DNA, 246 bp, Glycine max
  Clone ID: 700894975H1
cgaagatttctcctttctctcctttcctctctctttcgccttctgggtgttttcaaaacgcgcttaaaaccgtgatgggtgccgtcgtcgagtgttacccacagccgcgcacggcggtgctgtccctgaacaccttgccgttagggttccgtttccgtcccaccgatgaggagcttattgactactacctccgctcgaagatcaacgttgatggtgatgatgtttgggttattcgtgagattgatg

SEQ ID NO: 31869 - DNA, 249 bp, Glycine max
  Clone ID: 700894976H1
aggaaactgaaggtgaacaactttacagcaccagttggagcacgatccagcactacagtttgcgcagttgctgagcctgataggcctctgtggttcccaggcagcacccctcctccatggctagatggcagtttgccaggagattttggctttgatcctctaggtcttgcatctgatcctgagagcctgagatggaatgtccaagcagagcttgtgcactgcagatgggccatgttgggagctgctggc

SEQ ID NO: 31870 - DNA, 246 bp, Glycine max
  Clone ID: 700894977H1
gaacaacaaacaaattgcaggtacatatgcacaacttgggggataggaatggatattaaagatgatgtaaaaagggaggaggtgacaacacttgtgaaagaaatgataaccggagaaagggggaaggaattggccaaagtgtctggagtggaaaaagaaagcattagaagccatggatatgggaggatcatcatataatgatttccatcgattagtgaaggaggttcttcacaatgatgttgtttg

SEQ ID NO: 31871 - DNA, 264 bp, Glycine max
  Clone ID: 700894980H1
aattggataatagccaccaaccagaatcaaaataagaaaaacagagtaattttgcatcgtcgtcacacatggagatgtattactgagagagttagaagcagcaagagcaaaggagaaggaagtgaagaagaaaaggaaacaagagaagaaggccaaactcaaagctgccaagatgaattgtgaatcttcttcatcttcatcgtccgaatcaagtgacagcgattgtggttgtgatcaagtggttgacatgaacaccttcagagc

SEQ ID NO: 31872 - DNA, 247 bp, Glycine max
  Clone ID: 700894981H1
ctcagatgcaccttcaccctacaaccctcttcagagcaagttcttcgagacatttgctgctccattcacaaagaggggattgttactcaagtttctgatattgggaggtggttccacccttgcatacttcagtgcaactgcctcaggtgacattctaccaatcaagaagggaccacaactcccaccaaagctcggttctcgtggcaagatctaatttgatttgtatcagaactccatctattgagtt

SEQ ID NO: 31873 - DNA, 252 bp, Glycine max
  Clone ID: 700894938H1
ctcgagccgcaagtatggaatggccattgagaaggcaacaagcaatactacatggagttggtcaaatatatccagccccatattcagatgctcagacaaggtggtatctttgttgtcctctctccagtgcagtatactgagtatctcagtcaaggatgttcatgatggtcaaacaaaaggtgctactaaacattttgaagctatatttgtgacatctaaaacgaagaacaaggatgtatttgatccattaat

SEQ ID NO: 31874 - DNA, 235 bp, Glycine max
  Clone ID: 700894889H1
aagacagagacgcagcagtggcctctgcagctgccttggtagctgcacagtgtgcaaaagtagctgaagcaatgggggcaaagaaagaacagcttagcggcgtaattggctcagccatgagtggcacaagtgcaagtgacatcctaactctcactgcggcagctgcaacatcattaaaaggagctgccacacttaaagtaagatcaagatgtaagaacagattgaatgggggagt

SEQ ID NO: 31875 - DNA, 236 bp, Glycine max
  Clone ID: 700894890H1
ggccgacatcataatgacatgcaatttgtatttgggttttgcaaacatcctggttaagagctttacctctgagtttcctcatgttgagagatacttttggaccttggtcaatcagccaaacttccgaaaaataattgggcaggtcaagcaggctgaagctattcctcctgttcaatctgcaaagaagccttcccagccaaaagaatccaaggccaaggcaaaagatgaaccaaaga

SEQ ID NO: 31876 - DNA, 193 bp, Glycine max
  Clone ID: 700894891H1
ggtgtttgaaataagtccatcattgtatgtagtagaattaaggaagtcgtatggagatggttctgtgtataaacagttatgcaagaaattattgaatgattgggtgttccccccaagcaagggctagtgagatcagcagcaaattagaagccacattatgtgtaggctattttctgtttttttgctcaggtgg

SEQ ID NO: 31877 - DNA, 237 bp, Glycine max
  Clone ID: 700894892H1
aaatttcacagcttgtgcaaagtgctcttgatggttacaaggtttgcatccttgcctatggtcagacagggtcagggaagacctatacaatgatgggaaggcctggacatccagaggagaagggcttgatacctcgttcattagaacagatatttcaaactaagcagtctcagcaacctcagggctggaaatatgaaatgcaggtgtcaatgttggaaatatacaacgaaacgatcc

SEQ ID NO: 31878 - DNA, 237 bp, Glycine max
  Clone ID: 700894893H1
ctcgagccgcaacaaaggagttgtaaattaagagcatggctgcacaagctcttgtatcatcatcatctcttaccttctcagccgaggctacaagacaaatcttggaccaagatcactccaatctccatttggcttctcaagaaaagcctcctttcttgttaaggcagctgctactccccctgtcaagcaaggatcagacagacctttgtggtttgcatcaaagcaaagtctttccta

SEQ ID NO: 31879 - DNA, 242 bp, Glycine max
  Clone ID: 700894895H1
attcattcaagattcagcaagtgcgttttggaagcagagaccgaaatacttcgagatggcccgtacaaagcaaactgctcgtaagtcaactggaggaaaagccccaggaagcagcttgcaaccaaggctgcacgtaagtctgcaccaacaactggtggtgtgaagaagcctcatcgttatcgccctggaactgttgctcttcgtgagattaggacataccagaagagcactgagctcctaat

SEQ ID NO: 31880 - DNA, 224 bp, Glycine max
  Clone ID: 700894896H1
ggccactgagatgatggggccaacaatggtggcagaagcaagaacttgtgagtctcagagccaccgtttcaaggggccatgtttgagtgacaccaactgtgggtctgtttgccgaaccgaacgtttcactggaggacactgccgtggcttccgtcgcagatgcttctggaccaaacattgttaattttaaaaaattaattaagagtgccgtgatagaagatgat

SEQ ID NO: 31881 - DNA, 270 bp, Glycine max
  Clone ID: 700894901H1
cagagcctctaatcagagagagagagagagagaaagtgagagatggagagaatgttccctcccaagaagccctctactatgaattcccatgacagacccatgtgtgttcaaggagactcgggtcttgtcctcaccactgaccctaaacctcgcctccgttggactgttgagctccatgaacgctttgttgatgctgttactcagcttggagggcctgataaggccactcctaaaaccatcatgagggttatgggggtgaagggtctcacc

SEQ ID NO: 31882 - DNA, 211 bp, Glycine max
  Clone ID: 700894902H1
cacttcggctcgagctctctctctctctctctcattcacacgaatcacactctccacagtgcgattcattcaccaatggatcgcaacggtgttctctctcttgcattcatctgcattgtagtcgccggcgtcggaggccagtctcccgccgcagcgccctcgaacactccggcaacccccgccgcagccactcccgcccaagcaccttcca

SEQ ID NO: 31883 - DNA, 261 bp, Glycine max
  Clone ID: 700894903H1
gccaaagcgtttcttcgtcgtcgcttgatgtcggagtggtgccggacgggaacacagtgtcggacatgtcgtattcgagtgggattgtggcgtcgggtggacaaggcgcgacgcagttgtgtgggatggatcgggaagcgagggtgctgcgatacagagagaaaaggaagaaccgaaaatttgagaagacgattcgatacgcatcgcgaaaggcttatgcggaaacccggcccaggataaaaggccggttcgcgaaacgaa

SEQ ID NO: 31884 - DNA, 246 bp, Glycine max
  Clone ID: 700894904H1
gcagtttcctcgctctcttttctgcaattttcttttttgttccttctctgcggttatctttttgagcttcaatggcggacgctgaaaccttcgctttccaggctgagatcaaccagcttctcagcctcatcatcaacaccttctacagcaacaaggagaatctcttgcgtgaactcatcagcaacgcttctgatgctttggataagattcgatttgagagtttaaccgacaagagcaagctcgatg

SEQ ID NO: 31885 - DNA, 257 bp, Glycine max
  Clone ID: 700894905H1
ctgtgctattggttacgggcccaggttgattcaggtcattaccggatcgccgcccaattgtcctcggaggaggcccttgccggagaatctcaattacccgtcgtttgtggcggtcttaccggtgtcgtcgtcgttgttgagcaagacgttcttcaggacggtgacgaatgtgggcccgccgagtgcggtgtatcgggtgagggtggagacgcaggcggagggggtggcggtgacggtgaggccgtcgcagcttgtat

SEQ ID NO: 31886 - DNA, 260 bp, Glycine max
  Clone ID: 700894909H1
aacagatgatttgctgctgtaacaaaatggatgctactacacccaagtattccaaggccaggtatgatgaaattgtgaaggaagtctcttcctacttgaagaaagtaggatacaaccctgacaagattccttttgttcctatctctggttttgagggagacaacatgattgagaggtccacaaaccttgactggtacaagggtccaactctgcttgatgcacttgaccagattagtgagcccaagaggccctctgacaag

SEQ ID NO: 31887 - DNA, 192 bp, Glycine max
  Clone ID: 700894913H1
ctcgagccggcatcatcttatctttaatttattatagcttctgcattgcatatgtcagataatgtaaaatagaattatgcgtgtcaatttactttcgattgttgtcagacattcaacatgaaaattatagtttgctgaactggttatgatttcatcaaggtttttgaaaaaattagcttcaatttggtttac

SEQ ID NO: 31888 - DNA, 268 bp, Glycine max
  Clone ID: 700894914H1
ctcgagccgaatcggctcgaggcaaaagcggttaagaggtctggctcaaaacctcaaagccaaagcctcggtgatcgacgcagcgctatccaccaagcgtcacctctcttccgtccgtgtccacgtgctccgcgccaccacgcacgccctcgcggcaccaccctccgaggaaacaatttctgctgtcctcgcggtcgggcacggcggctcccaccgtcatccacgcgcgtgcatcgacactctcatggaccgcctccacaccacgcgc

SEQ ID NO: 31889 - DNA, 269 bp, Glycine max
  Clone ID: 700894915H1
attgaactttatctctcaaggatacctcgacgtagcaaacgagagaagttttggaagaaaggaaaagattggtataggttggatggaaggactgagagttctgagaggcagaagcttgttgagagatttaatgagcctttgaataagagggtaaagtgcactctgatttcaactagagcaggctctttgggtattaatcttcatgcagctaatcgtgttgttatagttgatggttcttggaatccaacatatgatctccaggccatcta

SEQ ID NO: 31890 - DNA, 254 bp, Glycine max
  Clone ID: 700894917H1
cttggagacaatatcaaaactggaggagagaataaaagaagctgaggagaatgcaagaaggattaaggagcatgccgatatagcagaaaaagaaatcgaagctttggaattacaagttactaaacttaatgaagaaaaggaagatgctgctctccattatcagcaatgcatggagataatttccagtttggagtataagctctcttgtgctgaagaggaggtgcataggctaaattccaagatagttgatgggg

SEQ ID NO: 31891 - DNA, 104 bp, Glycine max
  Clone ID: 700894923H1
ctctcttctttctttctctggaaacgccgaccaacgacgcgacacgacaccgtttcgatggtggggaagatgatgcggtggaggccgtggcgccctctcgtctc

SEQ ID NO: 31892 - DNA, 257 bp, Glycine max
  Clone ID: 700894925H1
ccaatatattccattctctctgtgtatttccctacctctcccttcaagatgcagatcttcgtcaagaccctcaccggcaagaccatcacccttgaggtggaaagctctgacaccatcgacaacgtcaaggccaagatccaggacaaggaaggaatccccccggaccagcaacgtctcattttcgccggaaagcaacttgaggacggccgtacccttgctgactacaacattcagaaggagagtactcttcacctcgt

SEQ ID NO: 31893 - DNA, 259 bp, Glycine max
  Clone ID: 700894927H1
gtaagaaagctgcagtggaggcggacctgaaaaagattgaagaagaactggagaagaaaaaggcagaagctgcagagaaaataaaaaacaaaattgctacaatccacaaggaagctgaagaaagaagagcaataattgaggcaaagaaaggggaagatcttcttaaggcagaggagcaagctgcaaagtatagagcaactggaacagctccaaagaaactccttggttgtttctaatgctttaaatcttaagcattgtg

SEQ ID NO: 31894 - DNA, 71 bp, Glycine max
  Clone ID: 700894928H1
aaattctcctacaccgacaaaaaatggaactttcaccacaagaattgcatgtccgttccgcacaccacacg

SEQ ID NO: 31895 - DNA, 263 bp, Glycine max
  Clone ID: 700894930H1
ggcaatttctgataataaggagcgtgaagatgacaaacctgaagatattgctcgatctcttctaagaatgatctcaaataatattggacagatctcttacttaaatgcccttcgctttgggatgaagaggattttttttggtggattttttattcggaggcacccttttactatggacacattatctgttgctgttaattcgtggtctaaaggtgaggctaaggcaatgtttttgcggcatgaagggtttctaggaggtgtag

SEQ ID NO: 31896 - DNA, 276 bp, Glycine max
  Clone ID: 700894932H1
accgcacctccctccctcatgctcgtccactctcaagacctttctccctctcttcgctccttctctcacaggcccatttctagaaccaccttctctctctatcctctccttttgaagccctccaaatggctccacatagagcccaaatccaggacttgccatgccctcgtcgccgctttgtctgcagaggtccaagtgcccgaaactttcgacgacacggaggaggacgacggtgctgatggctccaccgccaccaacaccgtcctcaccaccaag

SEQ ID NO: 31897 - DNA, 262 bp, Glycine max
  Clone ID: 700894933H1
aattcttcaatttaaacacagaaacaaaatcaccaccttcaaagtcttctctctcgagaatcatcgaataaaactagggtttccgatcgtcgtcgaggagaatgccgaagaacaagggaaagggaggaaagaaccggaagcgcgggaagaacgaggcggacgacgagaagcgggagcttgtgttcaaggaggacggccaggagtacgcgcaggtgctccggatgctggggaacggccgctgcgaggcgatgtgcatcgacgg

SEQ ID NO: 31898 - DNA, 190 bp, Glycine max
  Clone ID: 700894934H1
cagagccaaaccatgtcgttccccttcaaccactctctcgccatccacacccaccaccgcgggacgacgacgacgacgaacgacccaccgtttaccctccgccgggaaactccttcagcaacccgccacctccgttctacggcgtccctcaaccaccaccccctcagccggagacccacgtgttccattc

SEQ ID NO: 31899 - DNA, 254 bp, Glycine max
  Clone ID: 700894937H1
ccactcttaatttctctctgtctcgtttacacatctctccaacctttcactttcgtttctcagttttattcgaatccctctctcaatctcctttccaaatggccagcgttgaggttgcacagcaaacaccaacaacagttccagaaaatgaaacaaccgaggtaagcaagacccaggaaacaaccccagtcactgaggctcctgcaacagaacaaccagcagctgaggttcctgcacacgaacaaccagccgct

SEQ ID NO: 31900 - DNA, 239 bp, Glycine max
  Clone ID: 700894888H1
ttcagcaattgtgaaggaagacaccactttgaggaatgctattcctgtgaggcaaagggtggctgtgtgtttgtggcgattagccactggggaccctcttaggattgtttctaagaggtttggtttggggatatcaacttgtcacaagcttgttcttgaggtttgcaccgctattaagtctgtgcttatgccaaagtacttgaattggcctgatgaggttgcattgaggagggtgaaga

SEQ ID NO: 31901 - DNA, 246 bp, Glycine max
  Clone ID: 700894854H1
cgggcaccgaggaagctgttagttgtgttagcaatagcacacacacagcgatggaaaacgacgacgaacacaagctccacaatcacagagaacaagtacaagaacaagaacaagaaaatgaagaagaagaacaagaagatgaggtttggagttcttcggattctgaaatcggtgaagcgttggactggttggattcaagggaggaagatgaaggctcctccttctccctcacttcgtggcgcccca

SEQ ID NO: 31902 - DNA, 241 bp, Glycine max
  Clone ID: 700894855H1
tccagtcacagcagagacagagtaagagcacactgcacagatctgagtggtgactctttcacttctcatcactattattattaggtctgaaggctcattgccattatcatgtcaaggaggccagtaaatccttcgcgtcggctaggtgatggtggaagtataccatttgttgcatctatccagtccaaatctcaaaactctcccctactatctattgggcttgtcattgtgggtgcaatcc

SEQ ID NO: 31903 - DNA, 244 bp, Glycine max
  Clone ID: 700894856H1
tcactgtggagtaagcaaaccagcaagatcttcatagcatattacaagatggccatctaatttctcataaggctatcatactgcaacaatgtataataaccctccaactcccttggtgggtgtcaaattgtcaatgataatgtataatgtatgggtcatttcaaattaaaagttctgtcaacaaaaataagtggaggcaaaaagttatcattccaaaagttcctctgtgtgtttaggcgtcact

SEQ ID NO: 31904 - DNA, 243 bp, Glycine max
  Clone ID: 700894858H1
gacataatggaaccttactattatttaagaatgaaactacgctgatgcttccactagagataaaaaagacatgtaggtggggttgagtgaataatagttaataattaaaattcacatcataatggaaccttagcatcgaaggacaaattatagaatgttgtgggtgtataaattccaccaaagccaccccaccaaattcctcctcatcaaaccaagacatagcaaacgatccaaactcttttt

SEQ ID NO: 31905 - DNA, 244 bp, Glycine max
  Clone ID: 700894859H1
agcatcccccacccgttcccaacaacaacaacaacatcatgttttctccacttccacacccaattttctccccaaaaccaaaactttctcccacaaatcttccccttctcttccattctccccctcacccctcaaacccaaaccgtcttctccaactttccatccaaatcccgctactgggtatgcggcacgctggtggacgtcgcccacaacagcaattcccttcactttgttcacagcgatg

SEQ ID NO: 31906 - DNA, 243 bp, Glycine max
  Clone ID: 700894860H1
gaaaaagagagggaataaggtgggccaagttgtctagaaacctcaacattttttagagggtttttgcaattaaaaaatgacttgagtgagggtgtagattataatagtatatatatgatatatctctatcgtatatactaagagagtttgatgggtttggagtaatttttatttttatgttggtgacttattaatattgagtttgcagaattcacctagggaagagggattttgcgacatgtt

SEQ ID NO: 31907 - DNA, 242 bp, Glycine max
  Clone ID: 700894861H1
aacaaatccagaagaaatgtactcttcttgtttcactcgtagagacaaagaggaaggcaaagagtgttaagggacaataattacgttatacaagcatcatatcattgagaggcaagttgattacctttcaagtaatttccgagtgtaaaagcacctgttttgtatatatgttcacccgtgttagaacaactctggctggttcggaagaaaaggcatactggactttgcacacatagtagaat

SEQ ID NO: 31908 - DNA, 248 bp, Glycine max
  Clone ID: 700894863H1
gcaggctatccaatggctagatggaaaccaacttgctgaggctgacgaatttgaggataagatgaaggagttggagagcatttgtaatcccatcatagcaaagatgtaccagggtgctggtggtgatgcgggtggagccatggatgaggatggtcctgcagctggcagtggaagcggtgctggacccaaaattgaggaagtcgattaagcagaagattctcatgggttgttcttgattttgtcaaaga

SEQ ID NO: 31909 - DNA, 250 bp, Glycine max
  Clone ID: 700894864H1
cttcttctcttgcggctagggttttagcgcagattcttctagaattaaggaagatgggtaaggaaaaggttcacatcagtattgtggtcattggccatgtcgactctgggaaatccactaccactggtcacctgatttacaagcttggaggcattgacaagcgtgttattgagaggtttgagcatggagctgctgagatgaacaagaggtctttcaagtatgcctgggtgctggacaaacttaaggctga

SEQ ID NO: 31910 - DNA, 248 bp, Glycine max
  Clone ID: 700894865H1
aactctttcaaaagggagaagaaaaggaaaggaaacaaaacgcacaaaggattattatagcaatggcagaacaaaaccaaaaccagacaactgaagctggaaggcacaagaggttggccacaagagccttctccagagtgatgctctttaccagtatattctggagaccagtgtctacccaagagaacctgaatccatgaaagaactgagagagttgacagcaaaacacccatggaacatcatgacaa

SEQ ID NO: 31911 - DNA, 244 bp, Glycine max
  Clone ID: 700894866H1
cgagaagatgagaaagtgggaggaacatcctaggactgaagagtgaggtatttctcatgtcttgttagatgattcttatttgttatacttacatgttttccacctcttgggtgattggtattgcattgaaatggatccaattttgttttggtagaatggagaacaatttaattggggggttattgtttttcttgcttgggttaatggaaaaggaaatatataatatactacatcttctattgat

SEQ ID NO: 31912 - DNA, 243 bp, Glycine max
  Clone ID: 700894867H1
ggaaaagatggttcttggcttgcatggcttgattctaagaaagagggctctgttctctatgtgtgttttgggagcatgaacaacttccctaccacccagctttgggaaatagctcatgcccttgaagattctggtcatgatttcatctgggtggttgggaaaactgatgaaggtgaaactaaaggttttgtggaggaatttgagaagagggtgcaagcaagcaacaaagggtatctaatatgc

SEQ ID NO: 31913 - DNA, 243 bp, Glycine max
  Clone ID: 700894868H1
acctaacccaagacgagagaatagaggaagcttggggtttgaatcgaatcgaatcgaagcgattcatcgatcgatcgatggctcttgtaggagttgaactgaagcatgcggcggagggcgtaccggaggcgaattgctccgccaagcccaccaagcagggcgagggcctccgccactactattctctcaacatccacgagcatcagctccttcttcgccaaaagactcataacctcaaccgtc

SEQ ID NO: 31914 - DNA, 257 bp, Glycine max
  Clone ID: 700894869H1
gttttcaaagttggagtagtttccgtcaggtaaaaacaatcgagccagccaccgccacatgactgagaataaccccaaaacccattacccttcttcgggtgggattcccagtcccagtgatgatggcccaaaaaagcttccagggaagcagaagatgcatttcaacccgccagagaaagagattccggacgcggccactctgagggatcaatggaggtatgccattaggcagtacagtaaatggtactctcacgctt

SEQ ID NO: 31915 - DNA, 240 bp, Glycine max
  Clone ID: 700894870H1
gctgatgacaacataaaacttgaggttaaagaatgtgtaaacagactactttcccggtttaacgactcattaacagctttgttctgtggttccacagaatcactctctgaggctggaaatattcagttgtttaaatcctatttgactgatttgtcatgggcttgtcagatattgagtaagttggaaattatgagggagtttgttgagtattggtttgatgcatcggataagattgtcaag

SEQ ID NO: 31916 - DNA, 238 bp, Glycine max
  Clone ID: 700894871H1
gcgacaccagatgatggagacgacggcgaacgaaacgctgtcgttgcgccaatcgcggcgttgttgttggtggtgctactcgcggcgagtgtggtggtggagctcaggagaactcggacgtgaagacgctggtgaagcacatgcacgggaagaagtactgcgacaaaggatgggaatgtaagggctggtcaatttactgttgtaacctcactattactgattatttccagacctacca

SEQ ID NO: 31917 - DNA, 239 bp, Glycine max
  Clone ID: 700894872H1
caaagttagaaacaaggagaaagaaagaagatggcaggaaagaaaatcccagatgtgttgctgaattcaggacacaaaatgccagttataggcatgggaacttcagtggagaatcgtccatcaaatgagacccttgcttctatctatgttgaagccattgaggtgggttaccgtcattttgacactgctgcagtgtatggaacagaggaagccataggcctagccgtggccaaagccat

SEQ ID NO: 31918 - DNA, 222 bp, Glycine max
  Clone ID: 700894875H1
tctcaagtctctcgaagcctctttctctctcttctagaagctatctgtgtttggtgttactaagtctccaacaagcaaagtacatggttgatttggaaatccaggtccccaccccattcgacccgtttgccgaggcgagagaatcggatgcccccggagcaaaggagtatgtgcatattcgaattcagcagaggaatgggaagaagagtctgaccacagtgc

SEQ ID NO: 31919 - DNA, 240 bp, Glycine max
  Clone ID: 700894876H1
ctcgagccgaatcggctcgagagcctggcaaaccccagctgcagagcccgggaaagctgattgggaattggcattggtagagactgctagcaatttgtcaaagcagaaggcaactttaggtggtgggtttgatcctctattgttgactggcatgtatgatcaaggaatggtgaggcagcatgtcagcactacccaactgagtggagggagtgcaagcagtgtggcattgccaggacctgg

SEQ ID NO: 31920 - DNA, 238 bp, Glycine max
  Clone ID: 700894877H1
tgctacagagacatccgtttgaaggaagaagaacaagccaaaaccaaatccacaatcgaaaccgctctttcaggatcttcctccgccaccgtcaccgcaaccgccgtcgttgcctcctccgtggaatccccttcggcgccggttgaatccctccctcaaccaccggtgctgatttcgccggatatagccgcaccggttcaggcgaaccggtgcgcgctgtgtaggaagcgcgtggggt

SEQ ID NO: 31921 - DNA, 243 bp, Glycine max
  Clone ID: 700894879H1
aaatgatgcttcaaaatacagcatgagtgttagtatgtatcgaggaggtaggggaaccggaaggccaaaaactgctccaccagatctgccttctttgctcttggatgctcgaatatgctatctgggtatgccgattgtaccagctgtgacagaacttattgttgctcaatttatgtggttggattatgataaccctaccaaacctatttacttgtatattaattcatcaggaactctgaatga

SEQ ID NO: 31922 - DNA, 231 bp, Glycine max
  Clone ID: 700894882H1
tcacatttcaacaaccatagccatggctttctccttctccaaagcacttgtccttgcctgctccttctgcttatttgcgtctttggcttttggacgagattctccattgtgggctattcatcggaggacttaaagtccatggataagctcattgaactctttgaatcatggatgtcaaaacatggcaagatttaccaaagcattgaggagaagcttcttaggttcgagatt

SEQ ID NO: 31923 - DNA, 222 bp, Glycine max
  Clone ID: 700894884H1
ctcatacgttactctttaaatacgcaccacatcttcacgtgcctctcggttcttcagtccaaacaatggccatggttgagctctggtggattacgtgctttctctaactactgttttccacacttaacgaaacattaaacagtgagaaagacataatggcggtggagtacacatgctgctcaacggccttcttcgttcacatactggtcatcgtgctgctcg

SEQ ID NO: 31924 - DNA, 238 bp, Glycine max
  Clone ID: 700894885H1
aaacatggagcttccactcctagcacatcatgcactctttgcactaagcttttgcatctcaattttcttggcatcgtgtgatgatgattttctatccgtgaaaagaattcaagttcatctccatttcctagcaactttctttttggaactgcatcttcttcatatcagtttgaaggagcttacttgactgatggtaagggactaaataactgggatgttttcactcataagccaggca

SEQ ID NO: 31925 - DNA, 237 bp, Glycine max
  Clone ID: 700894886H1
atttttagcaaactaaacacacttctcttagaagataattgtaaaatggcatcactcaaagctgagaaacctgttgaatctcagtcatcagggcaggttaagaaagaacctgcaaaacccagtggtagcactccaaaagctccttcttccaagccagctccaaagaaaactcagaaaaggtctcgtcctaaacagaaggcaagcagcaataaataagatatattagtagaatgatga

SEQ ID NO: 31926 - DNA, 246 bp, Glycine max
  Clone ID: 700894853H1
gcacatagaagagccagaaagaaaacaaagaggagaaagaaagtagttgaggaagatacaaacaatttttgcagattgttgagaatgcctttcaagaagcctcatcacacctcagacaagaactacataacaggggacgacggaggcaagttcgagatacaacctagaggactcaacattgtgtggggaaatgattctcgatactggaaaattccagaacaaggtcctgcggactagatccaagtt

SEQ ID NO: 31927 - DNA, 251 bp, Glycine max
  Clone ID: 700894820H1
caaatttcactgatccagctagcacagttttacagagagcaacaaacaaagcaactacaagatttatgcagctttagatcaatgtctttctctctctctctatctgtctcttccatggaatggtagatttgaggtgaagacgttccgcattggtcaggttagaatctcacgatggggaagtcaccaggaaaatggatcaaaactgtactgttcgggaaaaagtcatctaaatcaaatatttcaaaaggcag

SEQ ID NO: 31928 - DNA, 247 bp, Glycine max
  Clone ID: 700894822H1
gggaaataggacatgtgaaatttgccattctgttgctcggaatgtttacggaggaaatgaggagtcgacggagcatttgagcgacgttaacaatgctactacagcagccaactctccacacctgctccttcagcagaacctcgaagattttggcacggccatcgcttcctgaatttcttgcttgcttgtatggtttttgcgtttgtcatatcatggctattccactttaatgtgccatcatcctaga

SEQ ID NO: 31929 - DNA, 251 bp, Glycine max
  Clone ID: 700894824H1
cctacctctcccttcaagatgcagatcttcgtcaagaccctcaccggcaagaccatcacccttgaggtggaaagctctgacaccatcgacaacgtcaaggccaagatccaggacaaggaaggaatccccccggaccagcaacgtctcattttcgccggaaagcaacttgaggacggccgtacccttgctgactacaacattcagaaggagagtactcttcacctcgtcctccgtctccgtggtggcatgca

SEQ ID NO: 31930 - DNA, 247 bp, Glycine max
  Clone ID: 700894825H1
cccagacaagattccatttgtgcccatctctggtttcgagggtgacaacatgattgagaggtccaccaaccttgactggtacaagggaccaactctccttgaggctcttgaccaaatcaatgagcccaagaggccctcagacaagccactcaggcttccattgcaggatgtctacaaaattggtggtattggtaccgtgccagtgggacgtgttgagactggtgtcgtgaagcccagtatggtggtg

SEQ ID NO: 31931 - DNA, 244 bp, Glycine max
  Clone ID: 700894826H1
taaaaaataaacatatattgagaatggagggttgtgtgaagaagttgctatgccttgttgggtttgtggtgcttgtgagtactattggtggggtggagagtgctggtgaatgtgggaaatctacaacccctgataatgaggcttataagcttgcaccatgtgcctcagcagcacaagatgagaatgctagtgtttctcagagttgctgtgctcaggtgaagaaaattgggcagaaccctagttg

SEQ ID NO: 31932 - DNA, 237 bp, Glycine max
  Clone ID: 700894827H1
agaccaacatgttctggtacaagaatgtgattactgcttgtgttgttcagtgttcaagtttgtcttttgaaatggttaaagtttgggaccatgtttgaacttgcaagcacttggataaccaaaggagtcctatgcttgcatggttgtattttgcaattgtaaatatttgtcatgatggggggggtggggtgcggtccggtttcaagtgaatgggggcgtttcttgacctaatggggg

SEQ ID NO: 31933 - DNA, 247 bp, Glycine max
  Clone ID: 700894828H1
ctctcatctcctcagatcgatcaagcatcagggggctttgagggttgattctctggtgtggtagcaatcagcacaatagaaaatgttttttgacggatatggatatcatgggacatcatttgagcagatatatcgatgctacccagcttcctttattgaaaagccccaaattgaaagtggtgacaaaattatcatgcctccatcagcccttgaccgtctagcatctctgcatattgattacccaatg

SEQ ID NO: 31934 - DNA, 250 bp, Glycine max
  Clone ID: 700894830H1
gtccttttcagcttaccaagaacttgtctcttgtgtggaatgactatggctgggacaaggcatcaaatattatatttgtagaccaacccactgggacgggtttcagctatacttctgatgagagtgacattcgccatgatgaagagggtgttagcaatgatttgtatgacttcttgcaggcatttttcaaggagcaccctcagctcactaagaatgacttttatattactggagagtcatatgctggaca

SEQ ID NO: 31935 - DNA, 247 bp, Glycine max
  Clone ID: 700894831H1
catggcataagtggcaagaatgcctactaccaggccaatgggcgccatgatttcaactgtgacttctctcaaactggtgttattactactactaatccaagccatgataaatgcaaaatctgagcatgtttatttaaaggttataatcagaggcaagaaaggaagatagagaaaagcccattgtcatggtgtcaatgtggcttagtggtatctgtgactctgagattatgcattcatgtactcaaaa

SEQ ID NO: 31936 - DNA, 255 bp, Glycine max
  Clone ID: 700894833H1
tgaatattctgtggccgacacattcatacaaacttatggagggcaaaatacatttgaagaaaagtggtgaatcctcaaaggcttgctagtatgtcattctctatccctgtttctcagtgtgaagctacaacaaatatgtaactgaagaagtcactgaagattagttgcagttcagataccttaaagtaacttctatagatcaaaaaattaaaaacttatatcacacactcactctggtccccccttgtacatttt

SEQ ID NO: 31937 - DNA, 251 bp, Glycine max
  Clone ID: 700894835H1
aattttcatttcattcattttcaggtttagagagacccaaacactaacacactgagcgtgatcaagatcatcaacaatggcggaaaaccctctcgaaacggcgccgtcgagctcacaaccttcttcttctcagaattcgcctcaagattcaccgcaggtccctgcattttcgaattttatgccctttccgggtgggtattatcaaatgattcctggtatgtaccctgcgctagttccagggttgactctgc

SEQ ID NO: 31938 - DNA, 249 bp, Glycine max
  Clone ID: 700894837H1
cgttgattgaagaagatgccgatcagaaacatcgccatcggaaggcctgaagaggctactcaccccgacacgttgaaggcggggttggctgagttcatctccaccttgatcttcgtgttcgccggttcaggttccggcatcggctacaacaagctcaccgacaacggcgccgccactcccgccggcctcatctccgcttccatcgcccatgctttcgccctcttcgtcgccgtctccgtcggcgccaac

SEQ ID NO: 31939 - DNA, 235 bp, Glycine max
  Clone ID: 700894838H1
tttaatcctgtattggaatccgggggtgtccgtgaggggtgaggaggaacttaatttgaacgtttccctctgactctgaggttacaagaatcctccacccaacctctgtcctgtttccggagattaggatctggttgggaaactgctatagaagtgtacggatctcatccatcgtggcatagcttgtttgttgcgatgggttgagaatgacaacgctggattgttcctccatagt

SEQ ID NO: 31940 - DNA, 246 bp, Glycine max
  Clone ID: 700894839H1
cgagaccaagttggatgacgagatcaagtcatggctagcatttgctgcacaaaaaattgttgaagttaacgcattggctaaggcattgtctgtcaacaaggatgtggcttcttctctgctaatgctgcagctcaggcttcaaggaagtcctctccaagagtgtccaacgaggctgttcagaaggctgctgctgcattgaagggttcagatcatcgccgtgctacaaatgtcagtgccagactggat

SEQ ID NO: 31941 - DNA, 246 bp, Glycine max
  Clone ID: 700894840H1
caaaacttgctatagcagtaagctataactcatttgaggctctgtgagaattgagaaatggctaaagatgttgaggttcaagagcaaggaggagagtactctgccaaagactaccatgaccctcctccagcacctttgttcgacccagaggagctcacacagtggtccttctatagagccctcatcgctgagttcatagcaacccttctcttcctttatgtcactgtgctcaccattattggctac

SEQ ID NO: 31942 - DNA, 246 bp, Glycine max
  Clone ID: 700894841H1
gtaagcactatagtaaaaaaaggacattcattcatctatggctacccttattgctcccagcaaccactctccccaagaagatgctgaagctctcagaaaggcttttgaatgatggggaactgatgagaacactgtcatagtaattctgggtcatagaactgtgtatcagaggcagcaaatcagaagagtttatgaggaaatttaccaggaggatcttgtgaagcgcctagagtctgagatcaaagg

SEQ ID NO: 31943 - DNA, 246 bp, Glycine max
  Clone ID: 700894842H1
cgaaccctaaccctaatcctccatcatcgatttgactcgattctctcgctgtctgttatttccttcaaagcaaaacaattccatcgatgaatcgggcttcgcagctttcgtgataatgatcttggcgctgcgaatcgattgcatgggtttggagaatgccggagcttcgtagtggaccgcgacgacgtcgtgctccggttgctcgtaaaagctccgaaccaccgtctccggccgggagatacgtca

SEQ ID NO: 31944 - DNA, 246 bp, Glycine max
  Clone ID: 700894843H1
cttttattagttttttatctttcatttatttcctgctttattactttttacccgttttcattcatttagtgcaaattctttaaaagtatcataaaccttagtattctctacggctagaaagagctctttggaatgaactgaaattcattccctataatagtttaaaagcttaccatttacaatacattgactagtttttttattagtaagagaataaggaccaatcatcagctataggaagaggtt

SEQ ID NO: 31945 - DNA, 245 bp, Glycine max
  Clone ID: 700894844H1
tgaagatggtgaagagcccaaatctgctgccgttagggaacttcgagaagaaactggaatagtgtctgctgagataattgctgaggttcagaaatggttgacatatgatttccctcctgctgtgaaggctaaagtcaatcgtctatggggaggtgaatggcatggacaggctcaaaagtggtttcttatgagattaacaaaagatgacagtgaggtcaacttagctaatggggaagcagaacgtg

SEQ ID NO: 31946 - DNA, 245 bp, Glycine max
  Clone ID: 700894845H1
catcgttaaaggctgcctgggagccctggacaccgcccagaagagcaccgggagcggcggcaagaagaagggccccgcccagctcagagtatacaatctggggaacacttcaccggtgccggttgggaccttggtgtccattctggaaggtctgctaagcaccaaggccaagaagcacgtcattaagatgccatcaaacggcgacgttcccttcacacacgccaatgtcagcttggcctacaggg

SEQ ID NO: 31947 - DNA, 249 bp, Glycine max
  Clone ID: 700894846H1
gcacatagaagagaaagagagaaaacaaagaggagaaagaaagtagttgaggaagatacaaacaatttttgcagatagttgagaatgcctttcaagaagcctcatcagcactcagacaagaactacataacaggggacgacggaggcaagttcgagatacaacctagaggactcaacattgtgtggggaaatgattctcgatactggaaaattccagaacaaggtcctgcggagctgatccaagtttca

SEQ ID NO: 31948 - DNA, 250 bp, Glycine max
  Clone ID: 700894847H1
ctttctcctcggtgcatacagaggactatacattctcaactggatctatcgctactttactgagccccactttgtccattggataacatggatttctggccttgttcaaacactactctatgctgatttcttctattactatttccaaagctggaagaacaacaaaaagcttcatttgccagcatgagtttattcttctgttcttgaaaacaagggtctaagtggacaattaacagtaagcagagaggat

SEQ ID NO: 31949 - DNA, 248 bp, Glycine max
  Clone ID: 700894848H1
caaaattgttcatgaaagcttcgtttccgattaacaattctttgaataatagagactttactttctgaggttttaacccctttaaggctttccctaacttgaggctgtgctctttgctgagagttttgctgcaaggacttgacacaaattgtgtaaatgtctgtggcttttaccaacctctcttggtggttgtggagtggaaagcatcaagagccaagaatcccaaatgggccttctataaattcttc

SEQ ID NO: 31950 - DNA, 245 bp, Glycine max
  Clone ID: 700894849H1
gggatattacaagatctgcagaggtcgcaatgtatgtggggtggactcgatggtctcaactgtcgctgctatacatgtttctaacaattaaatataaggatggatgcctaaacgtggtaggggcaccagtatagtatgtatgtaaataatttgcacgatgtaatgttatgaaggaggaaactgctaagcacatgtttatgcttttattctgtaattctctatggtagctagtccagccacaaatc

SEQ ID NO: 31951 - DNA, 248 bp, Glycine max
  Clone ID: 700894851H1
gattgtgatcattatgttaacaacagcaaggccgttcgggaagtaatgtgttttctcatggatccaggagttggtagccatgtgtgttatgtgcagttcccccagagatttgcaggtattagatcgcagtgatcgatatgccaatcgcaacacagttgtctttgatgttaacatggaaggacttgatgggattccaggaccagtatatatgggaactggatatgtcttcaatagacaagcactttatg

SEQ ID NO: 31952 - DNA, 252 bp, Glycine max
  Clone ID: 700894819H1
gtaccttaacggttcgttttcagtctcctctccgtcgcacaagctcccgtcctcaaacgccaaatactcctcgccgctgccggagattgcggcggcgtttcgtcgtctcgccggcggagtgttcacgcgccggcacggtcggaaaggccagtggaggcgcgtggcattcaggtgcgtgctttgcttcttcgtagggttcttgctgggcatgttcccgttcggccacgtgtcggaggacgttcgctcgcacga

SEQ ID NO: 31953 - DNA, 249 bp, Glycine max
  Clone ID: 700894778H1
aattcatcattgtgattcaaacctaccatgtgatgtatcatgtgtaaaatagatagctgcattgttttagtccagtggactttgtttcttgtgcaattgaacctcttgacaatgttggtgtggcttgatggccaaactaagctgattcataggtttgttgttctgtgctattgtgtgggtttcgattaatgaaatttactgctcaaaaaaaaaaaaaaaaaaaaaaaaaaaaaaaaaaaagaagggggg

SEQ ID NO: 31954 - DNA, 249 bp, Glycine max
  Clone ID: 700894779H1
gcagagattgtgccagaaccactgggggttgtgttggtcatctcaacatggaactttcttttcttgttatcaatggatccagtcattggagccatttccgcaggcaatgctgtggtcctgaaaccatcagaaatttctccagcaacatcatcactgcttgcaaatttgatcgaacaatatctagacaactctaccataagagttgttgaaggggctattcccgaaacatctgcactcctggatcagaag

SEQ ID NO: 31955 - DNA, 263 bp, Glycine max
  Clone ID: 700894781H1
cactaccctgaacatagtaaagaagccaatgcgacggttttggagcagtatatggaggacttaaattctagatatatcaacattttcaaagagtacagcaaagacatgggagaaaaagatctacttctagagaagatcgaagaagaaattagtagattccttgaacgacaagatgttatgatgaaagaatttagtgatcttgactcttggaggtcccatttttctgtgcaactggatcatgtactaagggacaatgctgtttt

SEQ ID NO: 31956 - DNA, 247 bp, Glycine max
  Clone ID: 700894782H1
atttctttctctcttttttttttcttttctgtttttttaaacctcaggaatctgttaagatagaactgaactgagcttcccagcgatttgtattttctgcggaaaatttcgtaatatttcgcaatatttgtctcccgcgttctctctatctgtgtttaaactgttttcggcagttactgattttattttatttgttgagtttgtgctggattcataatcgatctgatcatcatcaacactgaacagt

SEQ ID NO: 31957 - DNA, 247 bp, Glycine max
  Clone ID: 700894784H1
ccatcttgtacatagagaagcaataaggtccattgattggcacatcctaagcatgcaccctttcagctccgctgcatgctactaagcaacacttgtgtattcctgaatattgttattacttactattttcctaacataagagtggagatgaccttggaaattttgctacacttgtattatttgatatacaataaaggtgtatcatagcaatgcatccattgcggttaggcaatatgatgtttataaa

SEQ ID NO: 31958 - DNA, 234 bp, Glycine max
  Clone ID: 700894786H1
gaaggacttggtcggaaactgatggtggattgtactggggaaggtgttttgttcattgaggctgatgcagatgtcactcttaagcaatttggtgatgctcttcaacctcctttcccgtgctgggaggaactcctttatgatgtacctggttctcaaggagtgcttaacactccccttctgcttattcaggtaacgcggctcaagtgcgggggtttcatattagctgtccggctg

SEQ ID NO: 31959 - DNA, 241 bp, Glycine max
  Clone ID: 700894789H1
ggcttcttagcttgtgttgtaacagatgagcatatgtctgcccagaatgagacagatgagcatatgtctcatcctaggcttcttagcttgtgttgtaacgaataatttcgtgccattcaagaaaaatatgtaagagattccattagaatggatatgacttaacagaggatgataggacaagttttaaatgtatcttctagtctcctacagcattaccgaaataaataataaaaagcactgc

SEQ ID NO: 31960 - DNA, 239 bp, Glycine max
  Clone ID: 700894790H1
caaggattaggttcaatcataacgctctctacttaattgtgtcactcaaagttcggcataaagggcagaaatggagaataaggaaataagtgtcttccattctgggaggggtagggtttatcgtgatggtgtttcaattcaaaagtttgaaatttctttgacgttgatttcatgtttcagttaccctgattgatcatatgtttaccatattaacaattgacataatacatgagctttct

SEQ ID NO: 31961 - DNA, 239 bp, Glycine max
  Clone ID: 700894791H1
cggtagcagtgtgccacactgacacatcagaatggaaccctaaacatttggcctttcaggtgctcaaagttaagccaggaactattcctgtctgccacttccttcctgaggatcatgttgtttgggttcccaagtagatttgcattcaagtcctttttccatatatgtccttgaataactagcttcaatagcatcagctacagaactcgatgcatgtatttgctcgtactatatagttc

SEQ ID NO: 31962 - DNA, 244 bp, Glycine max
  Clone ID: 700894793H1
cttgtacttggtttcatgccagattagggaactcttttagttgtcaattagatcacagagacatggaggttgctatggaactggaagatgatcttttttttgctgatttgagcaaggaaattgctctactaattatggatgaagatgaagatcctcttgcttcttgtcctcctgactctcttcaggctttttctggggcaattcatcctcctccacagtttgctttcatctatgagcatgcttt

SEQ ID NO: 31963 - DNA, 244 bp, Glycine max
  Clone ID: 700894794H1
agaagaccgatggaagcgctgatggtttttctgggaatggacctgatttttcttttgaggaggctcagaggtcaaatatggttgccccaacagagtattcatctctggacgatttgctatcttcacttcgtttggtggctcaagaaccccttggagattacagcttcctgaatcctattgtaagcttcttctatgatttcaggaattcgatagttgtggctgatgattctgtaaaagatatatt

SEQ ID NO: 31964 - DNA, 237 bp, Glycine max
  Clone ID: 700894796H1
gtaaaaaatctgggtgcctcaagaagtactgtgagtgcttccaagccaacattctttgttctgaaaattgtaaatgcatggattgcaaaaactttgagggaagtgaagagagacaggctttgtcccatggagatcagattaacaacatggtgtatttccacaagcggccaattgtgccataactggagctatcgggtcctctggctaatcctccaccaccatattcaaggaaaggaa

SEQ ID NO: 31965 - DNA, 279 bp, Glycine max
  Clone ID: 700894802H1
cgcatgcatgcggactcaagattctggtgcatgcgtataaaaggaaaataaagaaattagcgtgaaaaatgttgggtgtgttcagcagctccatagtgtcgccgccggaggagctcgttgccgccggcagccgtacaccgtcgccgaagatgacggcggcggcgctgcggaagtggttcgaggagaagaacccctccgcagtgtcggtggaggtcggagagcatgtccagctcgcttatacccaccagaacgagtcgccgtttcagcccagatcctttg

SEQ ID NO: 31966 - DNA, 254 bp, Glycine max
  Clone ID: 700894803H1
cagaagagaggaatatgaatcacccaagtgttgtgttaaaagtgggaatgcacaacaggacatcgaggtgattcattctgttattcctttttcctccctggatccgttcataatatttgtatataggtctttggaatcacgaaatgtacctttaatggaagtgatctttgttgttgtattgttctacagggagggttttcaatttttttggggtccatacaagggagtttatttagatgtcacatagatcaatt

SEQ ID NO: 31967 - DNA, 248 bp, Glycine max
  Clone ID: 700894804H1
atttattttaaatttcagtagattattgttgctggtaatatggaggccattaacatagaattggattttgattgttccccagacctttttcaactataaataactaagtgaaagattttgatcattataaatttaatagcattgcagttagagaggaatttgttcacgtctgtgttctcatgcaacacacactttaatcggtttcaggttgtgacggaatctgaggtcagtgatgagggttctataca

SEQ ID NO: 31968 - DNA, 254 bp, Glycine max
  Clone ID: 700894805H1
gatggcccaaatgctggtgatccggagccttttcccatgggtgccaatattagactgagacctggaaaatctcgcactgctggcaatgaggagaatcgaagccaagggagccctcaactttgtcaagtggagaagacgctaatggccaagactcttcaaaaaacacttaattgatttagccttgcttgggcactaactgttcaacattgcaccataatgtcatgtcaacccccaagtctgtatattgacatttt

SEQ ID NO: 31969 - DNA, 251 bp, Glycine max
  Clone ID: 700894806H1
caaatggggacgtgaagatgggtgagattgatgaggggcaggttcaggagttggaggagcaccgcattgagttgagtctcgggcaagataataatgttgagagggttgaagttgagaaggagcagggtggagaggagcagatgatggatgtgggttttgagcagtctaaggaggaggatatgcctggaatgtggcttttggatcagaagaactgtgtgggggagccattttgcggccttgtcatggtggtg

SEQ ID NO: 31970 - DNA, 252 bp, Glycine max
  Clone ID: 700894807H1
gatacccttcacctcgtcctccgtctccgtggtggcatgcagatcttcgttaagaccctcaccggcaagactattaccctagaagtcgaaagctccgacaccatcgacaacgtaaggctaagattcaggacaaggagggaatccccccagaccagcagaggctgatcttcgccgggaagcagctcgaggacggacgcacccttgctgactacaacatccagaaggagtcaactctccacttggtgttgcgtc

SEQ ID NO: 31971 - DNA, 139 bp, Glycine max
  Clone ID: 700894809H1
gtatatttaactgaattcagttggcacttgttatatgggctctccccttttaggggtttatggccttctcttcgtgttagtgttagtgtcattgtgtgaatacttaatacattgattgaatgcttatatttgtcttttc

SEQ ID NO: 31972 - DNA, 221 bp, Glycine max
  Clone ID: 700894810H1
ccgtcttgcaactccgtggcatggacttgttttctaagctaaaaaaaaaagatgtatgttcacctaaaaaaggaatatttctacagcagcctggatgcatttcagaattgctccttttttgggtttgacaagaaggaagcaccttcaacagttgaggctcgagaatctgccactctttcagattttaaaattggaagtggcatctgagactcgtcatgatt

SEQ ID NO: 31973 - DNA, 251 bp, Glycine max
  Clone ID: 700894811H1
cttccaccttgtatgccattgcttgtgttatggaaaatgttcctttcatcaatggaagccctcagaacacctttgtcccagggctgattgatctggccatcaagaggaacagtttgattggaggagatgactttaagagtggtcagaccacaatgaaatctgtgttggtggatttccttgtgggggccggcatcaagccaacatctatagtgagttacaaccatctgggcaacaatgatggcatgaatctc

SEQ ID NO: 31974 - DNA, 252 bp, Glycine max
  Clone ID: 700894814H1
aaagcattgaattcaaaaacttaagttcattccttgtgttttgctttcttcctcaaaaccaaacatgtcgaacacatgcggcaactgcgactgcgctgacaagactagctgcacaagggaaacagctatggtgttattgtagagactgagaagagttacatcgagactgttgtcatggatgttccagcagctgagcatgatcggtagtgcaagtgtggcactaactgcacttgcacggactgcacctgtggc

SEQ ID NO: 31975 - DNA, 237 bp, Glycine max
  Clone ID: 700894815H1
agaccacaaaaatctccgccgtcggatcgcccccaatttcacccctaaagccctctccacctacacctcgctccagcagattatcatcctcaaccacctcaagtcatgggtcagtcaggaccaagcccaaggctcctactctattccgctccgcatcctggctcgtgacatgaacctcgagacctcacagaccgtctacgctggtccgcacttgggcctcagaccccgagagcgatt

SEQ ID NO: 31976 - DNA, 257 bp, Glycine max
  Clone ID: 700894817H1
cactctctctctctctctctcatccacacgaatcacactctccacagtgcgattcattcaccaatggatcgcaacggcgttctctctctcgcattcatctgcattgtagtcgccggcgtcggaggacagtctcccgccgcagcgccgtcaaacactccggcaactcccgccgccgccactcccgcccaagcaccttccacagtaccgaaatcaccagctcccgttgcttctcccaaatcatctccaccagctgcaac

SEQ ID NO: 31977 - DNA, 250 bp, Glycine max
  Clone ID: 700894818H1
caacaagctccacccctacacctcatggattccaattactgtatacatttgcttgaggaatttcagtcagcggcttcggaatttctctttaaccctctttgcgtggcttggcagattactttggagacatacatttcccagtttcatatttggttaaggtctaacatgccaaacggacagcccaagtggcttctttctcttatcccggagtatcctatgctcaacttcatgctaacaactgctatatacg

SEQ ID NO: 31978 - DNA, 247 bp, Glycine max
  Clone ID: 700894776H1
ggccgtccatgatgagtgcaagctaaagtttctggagctcataggcgaagaggacgtaccggtatatcgtttttaagattgaggagaaatcgaagcaagttattgtggagaagctgggtgaccctgcaaatggctatgatgaattcgctgccagtcttcctgctgatgagtgtcgatatgctgtttatgattttgattttgtcactgaagagaattgccaaaagagcagaattttcttcattgcttg

SEQ ID NO: 31979 - DNA, 252 bp, Glycine max
  Clone ID: 700894742H1
ctcgagccgattcggctcgagcctctccaagcccgccgccctccgccccaaactaagcccaaagctaaggtccgccgccacacaccaccatcgtctgcagcaccaccaacaacaacaacaacaacaacgtgtcctccgacctgaaggcgttctccgccgcgctggccctctcctccatcctcctctccgcccctctccccgccggcgccgacatctcggggctcaccccatgcaaggagtcgaagcagttcg

SEQ ID NO: 31980 - DNA, 247 bp, Glycine max
  Clone ID: 700894743H1
gcgcgacccaactcctgaatcctccgactctgacgtatttgcctccttccgtttccgcggcaccgcaatgaagtgcaaccagcgcttcaagcgggtcgccaaacccagattaccggttcagacaaccgaaccagttcgtcgttccctcagaaccaaacccaatccctcaccgcaaccggacatatctcccggcaaaatgaaaaccttgaccctcgatttcttccaaatcgacgcgctggacctcgcc

SEQ ID NO: 31981 - DNA, 252 bp, Glycine max
  Clone ID: 700894746H1
gaaattggggtttgatctagagagagagaaaggcataaaatttaaggaagaacagagattgattttccataggaaccctaattttctttttcttgttcttttggggttctgcgatttgtggggttttgtgaagcggtgattggaaagtctacgatctttgatcggttttcgtcgatggagggcgagggttgttcagagggagagaataatcggaaaaggggtggctctgatgatgatagcaatgagaataac

SEQ ID NO: 31982 - DNA, 253 bp, Glycine max
  Clone ID: 700894747H1
atcagaactacgacaaattaagacagttcctaagagttagtgttgtactataggttacagagtgttagctagatggcatctcattgagttcgaatggtgcttctcattgcttgcattcttccagctttggttgcatgcatagtgaggcactatgatttcatgtggtgtctaaataaaccaatatattgtgtacaatcacatctattgtgaccattaatgggaagttgccaggtctcacactttacgctcaggg

SEQ ID NO: 31983 - DNA, 259 bp, Glycine max
  Clone ID: 700894748H1
gtttgtttcacttcagatttggttaattagggttccgttggcgcgagccaagaacgaaggaagtcgaagcagtaaaacccaatcagcgaccctcactctcagcccactcttcacgatctgtaattacaagaagcttagatttgacacaagcaggcacaatggacagcatagttgattctctgaataatgcctatcaagattttgttgctgcagcagctaatgtgttagaagcccaagaaaatgctggttccattaaaac

SEQ ID NO: 31984 - DNA, 257 bp, Glycine max
  Clone ID: 700894749H1
gcggtttcattttcgccctccgattgaatcacagcatgagcgacggattcggcatagcgaaattcatgaaagccttagccgaaatcgcctgtggcgcaacggaaccttccctcactccagtgtggtgcagggagctcttgaatgcaagaaacccacctcgaatttcacgcacccatcacgaatacgaggtggaaaacaaagccaaaggaactatgatgatcccattaaacgacgtggtgcaacgttgtttcttcttc

SEQ ID NO: 31985 - DNA, 252 bp, Glycine max
  Clone ID: 700894750H1
gcttgaagggtaagaaacttggtttgtatttttcggcatcctggtgtggtccatgtcaaacatttacgccaactttggtggatgtgtacaatgaggttgcaaaaaaaggtgacttccagatcgttttcattacggctgatgaagatgatgagtcctttaacggttacttttccaagatgccatggcttgcaatcccattttctgattcagacacacgcagccgccttgatgaattgtttcatgtgaggggga

SEQ ID NO: 31986 - DNA, 252 bp, Glycine max
  Clone ID: 700894752H1
tggcgaatgaagttcggcagctagcatcaaacaggccaatcacagtactgaatgggggttctgaacaaagtaatttatcatctctcgtcgttccagctgctgccttgggtgctctgggttatggctacatgtggtggaagggaatttcattctcagatctcatgtatgtgactaaacggaatatggaaaaagctgttgcagatttaaccaaaaagttgcagcatgcgtcagatgtcattgctgataccaaga

SEQ ID NO: 31987 - DNA, 249 bp, Glycine max
  Clone ID: 700894753H1
cgctccgaattagggttttccaattcgcagagcaactcaacacaacggcccaaaccaacaatgtcgcagccgcagcctcagtcgcagccgcaacacgggcaagcggcgctggagcaggtgcagtgcttcggtcgcaagaagacggcggtggccgtgacctactgcaagcgcgggcgcggcctcatcaagatcaacggctgccccatcgagctcgtcgagccggagatcctccgctttaaggccttcgag

SEQ ID NO: 31988 - DNA, 245 bp, Glycine max
  Clone ID: 700894755H1
gaagaacgaatcgaaaaaagatagatcatggcgatggcaaacttggctcgacggaagggttacgccgtcgttttgtcgtcgaggtcgtcgctttgtctgacaaggtggagggggttcgcgtccggatctgacgaaaacgacgtcgtggtcatcggcggcggtcccggcggctacgtggcggccattaaagcggcgcactgggtctgaaaaccacttgcatcgaaaaacgtggcactctcggcggt

SEQ ID NO: 31989 - DNA, 245 bp, Glycine max
  Clone ID: 700894756H1
ctcacagggagaaatagagcaagagaagtttgattcatatgatgcacatttctatgcaccatcaagggaagagatagaagaagaggtgaggaaatcagggtcattgaagatggagaggctagagatgtttgagatggacaagagtaataatgagcaagaaagtagtgagagctatggcacacaggttgctgtggcagttagggccattcaagaatcaatgatctcacaccactttggagaaggga

SEQ ID NO: 31990 - DNA, 238 bp, Glycine max
  Clone ID: 700894759H1
gaactgcttcagatggctgggcgtgctggacgcagaggcattgatgaaaatgttcatgtatttctcatccaaactcctaatgaaggtgctgaagagggctgcatagtactgttcgctggactagagcctctagtgtcacaggatactgcttcatatggtatggccatgaatctacttgctggtgtgaaatccatacataggtcaaatgaatcagatgacatgataccttccacaggta

SEQ ID NO: 31991 - DNA, 248 bp, Glycine max
  Clone ID: 700894760H1
cttcctctggtggcgacaatgtcgactcctgctaggaagaggtcgatgagagacttcaagaggctgcaacaagacccgcctgcagggatcagtggtgccccccaggataacaacataatgctgtggaatgctgtcatatttggtcctgatgatactccatgggatggaggcacgttcaagttgacactccaatttactgaggactatccaaataaaccaccgactgtacgatttgtgtctcgcatgtt

SEQ ID NO: 31992 - DNA, 249 bp, Glycine max
  Clone ID: 700894761H1
cagaaacaacaaaggaatttgtggcaaagttgggattaaaacctggccaaaaagtactggatgttggttgtggtacaggaggaggtgacatttacatggctgaaaattttgatgttgaggttgttggcattgacctctccataaacgtgatttctcttgctattgaacgtgctattggactcaaatgctcggtagaatttgaatgtgccgattgcactaaaaaaacataccctgagaatacatttgatg

SEQ ID NO: 31993 - DNA, 251 bp, Glycine max
  Clone ID: 700894762H1
gggatattggcgctttaactattcggcaaccacttgtttgccaatactatattactccttcatcccttcactttatctccttaaagccattcccttgtttccaaagatgtctagcccatggttcatacctttcgcatatgtaatactcggggagagttcttctactttgattgatggtttgatttctggaggcacaatcaagggttggtggaatgacttatggatgtggttgtacataagaccaagttctt

SEQ ID NO: 31994 - DNA, 245 bp, Glycine max
  Clone ID: 700894763H1
gggcaagagagaggttgggaaagactgcaatatattctctcatgcaaaagaaagcaccaaaaaaagtaagggagaatttaattccttcccacccttcaacaaaaactggcatgagggggagcaacctttagaagagacaacattttcttttccacttctatttaattattactactttaaattcatctcttatatagctcaacctatatctcagtcttccccggtccatcttgttcggtttctgt

SEQ ID NO: 31995 - DNA, 113 bp, Glycine max
  Clone ID: 700894764H1
tgtgaatgttattggtctctggaattcccaaatcatcagagtgagtttcagcgagcatggcttccaacctcgctgcgaatatggccacttgctctaatctcgtcaaagtaatc

SEQ ID NO: 31996 - DNA, 251 bp, Glycine max
  Clone ID: 700894767H1
cacacactctctctcatctatcaaatggcgacccccccaaacgacgccgcatcgacgaagaagccacaacccatcccttggacccaccaggagaccgtgcacctcattcgcgcctaccaggagaagtggtacgccctcaagcggggcccactgcgccacaaccagtgggaggaggtcgccgtcgtcgtcgccgcacgctgcggctacgaccttgcccaccccgccaagtccgcccttcagtgccgccacaa

SEQ ID NO: 31997 - DNA, 250 bp, Glycine max
  Clone ID: 700894768H1
ggttgctacgttggtatctctgtgttgtaattaaacttcgaattcaaactcatactctggcaactcgttggtatgacagaaaagcttgaaacaaaaaaaaaaaaaaaaataaaaaaaaaaggggggccccccgacaaggggccccccgccccggggattgattccgggccgggcccctgggggggaccagctttccccaaaggggtcccgtttaaaacctgggggagaccagggccaagggggttcccgg

SEQ ID NO: 31998 - DNA, 183 bp, Glycine max
  Clone ID: 700894769H1
gtttgttgaaaaataaaagatcttgcttcatagtactatcctatatttgcgttatacaaatccatatatatatgcgcttgcaaattaatctattagtagattaatttgcaagtgaatatatatatggatttgtataatgtaaatataggatagtactatgaagcaagatctttttgtttgccg

SEQ ID NO: 31999 - DNA, 247 bp, Glycine max
  Clone ID: 700894770H1
aacacacacatttctagtccccaaaccctaaactagaagagaaaaagagaaagtgcaacatcataacatcaaattcgtatgtgcttttgcttaccctaaaatctccatccctacaaaaagaagaagaaaaacaagaagaagtttaacatgtcagctgccgtggccgcttccgctgccgccgctaccatgtcgggttaccaccacaactcctcctcgagacaacaacaacacatagaccatgaattgg

SEQ ID NO: 32000 - DNA, 246 bp, Glycine max
  Clone ID: 700894772H1
tgacctttcctagagataacatggtctatagagagagacactgccccccagaagaagagaagttgcagtgtatgatccctgcacccaaggggtcctgtaacaccatttccatagccgaagagccgtgattatcttccgtatgctaatgctccctacaagagccttatagttgaggatgctattcagaatttgatccaatacgattgaaatgtgttctacttcccttgtggcggaacccaatttcct

SEQ ID NO: 32001 - DNA, 246 bp, Glycine max
  Clone ID: 700894773H1
aaagcacttttaaggtgaataactatgctttgcgaatgcatttgaatcatgcacaacaatacagcccctttcctgggtgtttccctcctgatgccttctagggcgatcagtatgtaggatatcataattgaggcagtaaaatagctgcatctggttaatatcccaaagagaaaaaatgcgtattgttaaattgttgcagtttgtgaaactcctgtaggtcaaggaatagtcactgtttccagttca

SEQ ID NO: 32002 - DNA, 246 bp, Glycine max
  Clone ID: 700894774H1
ccactctctctctttccgaccaaaatgtcgatcaacagcgaatctacgccgccaccggtgatcggaaaaatcgggccttacaccgtcttcatgacgccgccgtctacacccaaacccgccgacgacaaccccgttaccaccaccaagatcgcacctccgccgcctcagattcccaaagccgttccttcccccaaacccaaacctctctccgattccgacgattccgttttcggcttcttcagaaac

SEQ ID NO: 32003 - DNA, 242 bp, Glycine max
  Clone ID: 700894775H1
tccatccaacatcgaaacgaggtcgttttgtgttccgccgaaggcaccggaggttgtagcaggctagcagctatggatttggcatccaatctcggtggcaagattgacaaagccgaagttctctctgccgttcagaagtatgagaagtatcatgtttgctatggaggtcaagaggaagagaggaaagctaattataccgatatggttaataaatactacgatcttgttaccagcttttatga

SEQ ID NO: 32004 - DNA, 251 bp, Glycine max
  Clone ID: 700894741H1
ccctgacttcacatgggaagtggtgaagccactcaagagggagaaaagtttgaatttgaagataaggtgaaagttttgagtaaaggacttgaaaggctgaaagaagttagtggtggagagataaaaccaattgttgatttggcagaggacaatgacaaagttttacagtgtgaaaagataagagccgagagtgaggttgaggtttggaaagacaagtacaagacattggaatcatgggccttcccatcccg

SEQ ID NO: 32005 - DNA, 252 bp, Glycine max
  Clone ID: 700894707H1
agctccttcacctccttagtttcgaaagcatggcttccctggcggcttccaccgcggctatgtcagaaatccttggaaaccccgttaacctcagatgcgcaaccaggtctgctccatcaccaactacacctgccaccttcaagaccgtcgcacttttctccaagaagaagccagctccacctccaaagaaaaagcctgccgctgtatcccccgccaatgaggaactcgccaagtggtatggtcctgacagaa

SEQ ID NO: 32006 - DNA, 253 bp, Glycine max
  Clone ID: 700894708H1
gccagggaacaacactcgcgatcatccaggaatgattcaggtatatttaggaagtgccggtgcgctagacgtggaaggcaaggaacttcctaaacttgtgtacatttcacgtgaaaaacgtcccggctatccacaccacaagaaagctggtgccatgaatgctttggttcgagtttctgctgctcttacaaatgcaccattcatgttgaatctggattgtgatcactacgtcaataatagcaaagcagtcaga

SEQ ID NO: 32007 - DNA, 252 bp, Glycine max
  Clone ID: 700894710H1
gtgcagtcctctttgtcatttcttgtttcggttgtattgcagctctgacacggaatgggtgctgcctgagcttttattctgttttagtgttgttgttgatcttagtggagctgggatgtgcagcctttatattttttgacaaaagctggaaagaagaaattcctacggacaaaactggagattttgatatgatatatggattcctgagagagaactggaatattgtgagatgggttgctcttggaattgtca

SEQ ID NO: 32008 - DNA, 253 bp, Glycine max
  Clone ID: 700894711H1
ctctctctctctctgtctctctctctctagacttagattttgtgaatggctgaagtggaagagggacaggtcatcggcgtccacaccgttgatgagtggaagctgcaactccagaatgcaaaagactccaaaaaactgattgtggtggattttactgcttcctggtgtggtccatgccgttttatggccccagttcttgcagagattgcaaagaaaactcctgaattgatcttcctcaaagtggatgtggatg

SEQ ID NO: 32009 - DNA, 249 bp, Glycine max
  unsure (1)..(249): unsure at all n locations
  Clone ID: 700894712H1
tctcgagctgaatcggctcgacgcattgcgatctgggttttgctatgtttgatccacttcttcgactttgcttcatctcattctctgggttttttaaatattgttcttttatgtgccttttttgtttgaattttcaagctggtttttttctacacctgctggaaatcctgaatggannnttgctntnaaaaaatattaaaatttgtggtccaaatttttaggttgagggatcagggagagataaataat

SEQ ID NO: 32010 - DNA, 254 bp, Glycine max
  Clone ID: 700894713H1
gttgctgaattcaggacacaaaatgccagttataggcatgggaacttcagttgagaatcgtccatcaaatgagacccttgcttctatctatgttgaagccattgaggtgggttaccgtcattttgacactgctgcagtgtatggaacagaggaagccataggcctagccgtggccaaagccatagacaaaggccttataaagagtagagatgaagttttcatcacttcaaagccttggaacacagatgcacacc

SEQ ID NO: 32011 - DNA, 259 bp, Glycine max
  Clone ID: 700894715H1
gtcagcatgaaaacttgcccgtggaacctgactatggtgagattcatgatgattttggagacaaagatgttgcctctgaagagactcctgaagaagtgaccatacctagtggaaaggatgaagaaaacttgacattaccaggattagaagttgcagaggagtttgagggcatgcggtattttgacgagaaaatcaacagattatctgttcgtggtaaacagtttgaggaaggtacaactctaccagcatttggcttgac

SEQ ID NO: 32012 - DNA, 256 bp, Glycine max
  Clone ID: 700894717H1
atccgcttccacagttgtgatcctgaaaccatcacaatttgtttctcaatcatgtcaacctcatcctcttcccaaagcctcaaaattggcatagttggattcggcaactttggccagtttctggccaagacaatgataaaacaaggccacactctcacagcaacttctcgatctgattactctgaactttgtctccaaatgggcatccattttttcagggatgtcagcgcattccttaccgcagacatagatgtca

SEQ ID NO: 32013 - DNA, 160 bp, Glycine max
  Clone ID: 700894720H1
aattcctcgcctgctgcaccgccgccgccgccgccgccgcgattaactccgcggaccgtgagcgaagagcgaaaggcaaatagagacgaacgcttgcaggtgacgtggcatctccaaacttacttttgatttcacttacccaaacccccacacagcagaa

SEQ ID NO: 32014 - DNA, 247 bp, Glycine max
  Clone ID: 700894721H1
gttgctctccttcaaactccatctttccaaatcctctctttgttcttgtgctttgatctgcttcctactgcgatagtttctctactgttacatggccatggcggtttccgcaattggttttgaaggtttcgagaaaaggttggaaatatcctttttccagccgggactttttgctgaccctgaaggaaggggtctaagggctcttacaaaatcccagttgggtgagattctaacaccagctgcttgc

SEQ ID NO: 32015 - DNA, 252 bp, Glycine max
  Clone ID: 700894724H1
gaatcaccatcagcagagttggtggttcctccgtcgccgcacctcccatcctcttcgattatcatcttatcgaccaaaaacttctccaaaacatagtctacgatgctcttgtctggagcaccctcaactgcctccttgttggtgacaaatcagttcagagatcaggaacagttcctggtgttggcctggtgcatctcccgctttctttattacctgggccatttcctgaaaatcattggaagcaagcgtgcg

SEQ ID NO: 32016 - DNA, 251 bp, Glycine max
  Clone ID: 700894725H1
ccatcacctaatcacttccccacttcccctgtaaatcacgtgtagttcgcacaatgttttaaaaaatggctgatgctgaggacattcaacctcttgttgttgataatggaactggaatggtcaaggcgggttttgcaggtgatgacgctcctagggccgtgttccccagtattattgggcgactcacgccataccggtgtaatggttgggatgggtcagaaggatgcttacgtgggtgatgaagctcaatc

SEQ ID NO: 32017 - DNA, 252 bp, Glycine max
  Clone ID: 700894726H1
gttgaacgatgcgattctcgctgaggataagcacaaacctatgtatgaagaattggctaacaatcctaatgtggagtacattgctggaggtgctactcagaattcaatcagggttgctcagtggatgcttcaagcaccaggtgccacaagttacataggttgcataggaaaggacaaatttggagaggagatgaagaagaaatgtacacttgatggtgtaaaggttaactattatgaaatcgacaatacacc

SEQ ID NO: 32018 - DNA, 250 bp, Glycine max
  Clone ID: 700894727H1
gattcgtcacctaacaatagcatctggttccaacaatttgacgggaggtgttgaaagctcgaacattcgatcacttcatgttttcagtgatgaagaattgtcagaatccttggtgaagagtatgcctacaaagtacaggttattaagggtacttcaatttgaatgtgctccaatgtattattatgttccgcgcattgaaagtttgggggacttatcatttttgaggtacttaagcttcagaaggtcacgc

SEQ ID NO: 32019 - DNA, 251 bp, Glycine max
  Clone ID: 700894728H1
gttaatgggtgggtgcaatcctatggttcccgttgtgtgaagccaccaatcatctatggtgatgtgagccgcccaaagccaatgactgtcttctggtcatctctggctcagagctttaccaagcgcccaatgaagggaatgcttaccggtcctgttaccattctcaactggtcctttgttagaaatgaccaacctagatctgagaccacctaccagattgctttggctatcaaggacgaagcggaggacct

SEQ ID NO: 32020 - DNA, 255 bp, Glycine max
  Clone ID: 700894729H1
catatctccatttccatttcctctctctcagtttccaagaatcttaagctatgggaaagtcttacccaaccgtgagcgctgattatcagaaggccgttgagaaggcgaagaagaagctcagaggcttcatcgctgagaagagatgcgctcctctaatgctccgtttggcatggcactctgctggaacttacgacgtgagctcgaagaccggtggtcccttcggaaccataaagcacccctccgaactcgctcacg

SEQ ID NO: 32021 - DNA, 257 bp, Glycine max
  Clone ID: 700894730H1
ctagctcgtcaggcacagagtaaggtgaaaacgctggcaaaaatggaacgtggtggacttgcagagaaggtggtcagagacagagttttggtattccgttttaccgatgttgggaaacttccccctccagttctccagtttgttgaggtgtcatttggttatactcctgataatctcatctacaagaacattgactttggggttgatttagactctagggttgcactggttggacccaatggtgctgggaagagtac

SEQ ID NO: 32022 - DNA, 259 bp, Glycine max
  Clone ID: 700894731H1
agcaatccctcccattttttttccttcaatctgcttcaatggaaggtttggcttccctctaggctccctttccggccaccccatttctctcttccagacccagaacctctcttcttccatcccaagccagttttcgtaaaagaagctcctttttatccttttctgttcatgcccaggtggagtctgatgatggttcagctgtataagccacatctggtgaatctgtgacagaggttctgaaaattaaggagtgggaggt

SEQ ID NO: 32023 - DNA, 261 bp, Glycine max
  Clone ID: 700894733H1
cactctttcattctcattgccgtcacacagagagagaagagacaatgaagtttaacccaagggtttcctcaagccgtcgaaagagccgcaaggctcacttcaccgctccgtcgagcgtgcgtcgcgtcctgatgagcgcgcctctctcgaccgatctccggtcgaagtacaacgtgcggtccattccggttcgcaaggacgacgaggtgcaggtggtgaggggaacctacaagggccgcgagggcaaagtggtccaggtct

SEQ ID NO: 32024 - DNA, 257 bp, Glycine max
  Clone ID: 700894734H1
gacatatgttccttcgatccccttctctattttcctttatcccattgtccgaattcacgttctttttcgtcccaatccttaagctttaagctctaaactggatccaccccacccacatatccagtcttcccttttttgaggtaaacgctatgctatattactcaatataaaatattcattcattcttgcgtgtgcgtgtgtgtttcgataatgacgactcaaattcgataattcccaattgtgttttatttcaaatg

SEQ ID NO: 32025 - DNA, 255 bp, Glycine max
  Clone ID: 700894735H1
cggtaagatgcagaccattgctaggcgcttagggcagcaatcgctgaggccatcgacgtcgctcaagtccatctatccaatttccgatcaccattatggaatggatcacgagcgttacgtttctaccctcgccaccaagggagttggtcacctcgttcgtaagggcactggtggacgatcctccgtcagtggcattattgctacagtatttggggcaactggattcttaggtcgttatgttgtccaacaacttgc

SEQ ID NO: 32026 - DNA, 254 bp, Glycine max
  Clone ID: 700894736H1
acctcactttgttttttttctctgcagtaatagaaaaaaaagacagaaagaagaagaagaagaagaagaagaagaagatgttgagggttgcagctagaaggctctcttctctcttctcctcctctccgtggcggcccaaccacgccgcttccgcttatgtctctcgaaacgcatgtcgttgatgaccgcagatctgatccttcctcccatcccctttttcccttcagaggttttgctactgaatccctgatcca

SEQ ID NO: 32027 - DNA, 260 bp, Glycine max
  Clone ID: 700894705H1
gacagacacaatttgcgaacagaaactctgcaccaacaatataaattggttaaagagaggactatatctggagattcatactatggctctcacgtgatgcagtatggtgatgtagggcttagcagagatgttctcttccattatttgggtacagatcctgctaatgataatttcacttttgtggatgaaaactccttatggtcaccttcaaaaccagtcaaccaacgtgatgctgatctcatccatttttgggataagtt

SEQ ID NO: 32028 - DNA, 254 bp, Glycine max
  unsure (1)..(254): unsure at all n locations
  Clone ID: 700894737H1
ggcggagatcaagcacgcccgtctcgccatggtgggcttcttgggncgtgcagtccaagctgccgccactggcaagggcccgctcaacaactgggccacccacttgagtgacccactccacacaaccatcattgccaccttctcatcctcctcttaagaagaagcaaaagaagaagaatagtctttcttgtgcctggtcattctagttatattgtaaaagtctttttctatcttcttcggctttgggttgtaat

SEQ ID NO: 32029 - DNA, 246 bp, Glycine max
  Clone ID: 700894739H1
gtttccttcggcgcttgcttccgtgacttgagaaaaagaaatttagggtcttaagggtttcattctgcggcatcagacatgggaggaggcaatgggcaaaaggcaaagatggcacgcgagaagaacctcgagaagcagaaggccgcctcaaagggaagccagctggattcaaacaagaaagcaatgtcgattcagtgcaaggtgtgcatgcgaacatttatgtgcaccacatcggaattgaagtgt

SEQ ID NO: 32030 - DNA, 263 bp, Glycine max
  Clone ID: 700894666H1
ctttctgaatatttgaattttttcgtttcaaatcctcagcattgacaccaaaaatgatcttcaaatagcatcgccgaagactcaaatccaccccaatataaaggacaatccattttttttaggctctcacaaaaaggggtgaaagaaagatcgaaacttgaacactgaaaccacgttgaagttgaaagtggctgaaaggggttctggagagttccgtgggggagagaggagtgaacgcgtggcactttcagaggtggtggcag

SEQ ID NO: 32031 - DNA, 249 bp, Glycine max
  Clone ID: 700894667H1
aactgctgcaacccactcactcactctcaaccttgctcctccaagccgcaaacttcgccattctctctcgcatctcaaccctttatcactctctcgagttgcatccaggaaggaggaggtgcaatagagaagggcttgaccaacatgggtcatgttgagaagcccatcatcattaaggtggaacctctggatggaccaattaaccctacaagatcactgatgagagtggagtcgacattgtgagtttga

SEQ ID NO: 32032 - DNA, 256 bp, Glycine max
  Clone ID: 700894668H1
gtcttgcgttgtgttggaatcccaaattcatttctgtttctcattctcaattcttcttctattctcattctgatttgccacacacgcagaaaggttgaaaatagtgggactttattcactggaggtggagaaagatggctaacaacgcagctgcttgtgctgagagagctgctagtgatatgctcattggtccagactgggcaatcaacataacttgtgtgatatcattaatatggaccctgggcaagccaaggat

SEQ ID NO: 32033 - DNA, 255 bp, Glycine max
  Clone ID: 700894669H1
tcgcgaagttgtcaacttaatagcatgtgaaggagaagaaagagttgaacgtcacgagcttctgaataagtggagaatgcgtttcacaaaggctggatttacaccttatccattgagctccgttattaattcttcaatcaaggatcttctgcagagctaccatggacactacactctagaagagagagatggtgcactatttcttggttggtgaatcaagttcttgttgcatcttgtgcttggagatgaaaatcc

SEQ ID NO: 32034 - DNA, 258 bp, Glycine max
  Clone ID: 700894671H1
gccgcagagtcagagagagagattcactgaaacagagcgcagaagaaaatacataaactaatccagacaatgagcagcggcgctggaaaggtggtgtgtgtcaccggcgcttccggttacattgcttcctggatagtcaaattcctcctcaatcgcggctacaccgttaaggccaccgttcgcgacacaagtgatccgaaaaaaataaaccattggttggcctcgacggtgctaaggagaggctgcacctctacaagg

SEQ ID NO: 32035 - DNA, 255 bp, Glycine max
  Clone ID: 700894672H1
ccattccaattctcaacactcagactaactgcaacttgcattccctagagaacacacctctgttgccttccttcacttcagttagctgagtgtgttggtaagcactttccttctcctttgggtagttatgtcatcagcacctatgaccgacaacaacaaggttcaaaacaaaggccttttatcttcttcttcttcttcttctgtgaggatgaggaagagatcatgaagcagggcatcataaccattttgaactca

SEQ ID NO: 32036 - DNA, 252 bp, Glycine max
  Clone ID: 700894674H1
ttttcttgtgaaaaaaaaaatcctcagaaccaaaatcggttttcttctgtctctgatctctcaaagcttcaaattctccttgtttggtttgtttgtgtgtttggagtatgatgtcgccgccggcggtggtaacggaggaggaggggcggacaacgtgtcgtcgaccgtggcgtccggttcttcgcaatccttggaccgtttctctcagatggggctggattgaaagaacgaaattacttagggttatctgat

SEQ ID NO: 32037 - DNA, 254 bp, Glycine max
  Clone ID: 700894675H1
caatcgctgttcttaatcactctttcatctttcagtctcacacccaaaagaaagaaaatgttttagtttcataagggttggttctgacttgaattaggatctgattcaaagagaggaatggagggtggctcattcaatggtgctcagattgatgccaagatcatgcagacatttaagaagaactttgttcaagtgcaggacatttttgacagaacaggctactcatcaatgagataaaccagaaccacgagtct

SEQ ID NO: 32038 - DNA, 253 bp, Glycine max
  Clone ID: 700894676H1
aagattctcacatggtcactttccttttcgggttgtctacaggttgctttgtatccttgttttgtgtatatgcaatcttggcacatttgtgcggtatattctcctctaataacgagccagcttatatggaaacagtctaccccgttttcagtgtgtttacattgttaagcctgcacttgtttatgtatggatgcaacctgttcatgtggagaatacaagaatcaattacaatttcatatttgaattttcacca

SEQ ID NO: 32039 - DNA, 256 bp, Glycine max
  Clone ID: 700894677H1
agccattgcattcctccagctttgacattttggatcattcttttcaaattagagattgttcttcttcctccaatcaagcaatacagaatgggtttccgtttacctgctgttcgacgggcatcattcacggctagccaagcagcttcaaaatctgtacaagttccaaagggctatcttgcagtgtatgttggagagaaacaatagcggttctggttcccgtatcatacttgaatcaaccttcattcgaagatctttt

SEQ ID NO: 32040 - DNA, 258 bp, Glycine max
  Clone ID: 700894679H1
aaaaaacatacagaatataaacttggttcagccaattcatctcatgctgatcctgctattcatttgaactcttcagtgaattttaaccaagatcggggatttaaaaacagtgatacaactcaaaaaagagaagtgactgatgcaattgaaaagccaaacataaacgagtcaaatgctgttcaggataatgtttttcagcatcaccttccctgcgtcaggaaattttggctcataaaaggaaggcagttactttgaaaa

SEQ ID NO: 32041 - DNA, 257 bp, Glycine max
  Clone ID: 700894680H1
atggagttgagcagaacagaaagacatattttgaaagaactgggattcatttgtcatgttgaacatcctcataagttcatatcaaattaccttgctaccctcgaaacacctccagaattgagacaggaagcttggaatctggctaatgatagtttgagaactacattgtgtgttcgatttaagagtgaggttgtggcttgtggagttgtatatctgctgctcgcaggttccaagtaccccttcctgagaatccaccg

SEQ ID NO: 32042 - DNA, 257 bp, Glycine max
  Clone ID: 700894684H1
atccgagatcaaccccgacgaaggcaaggggtttttctcggcttcttcagatttctgaaatggcgcctgtttcagctttagccaagtacaagctcgtcttcctgggtgaccaatccgtgggcaaaaccagcatcatcactcgcttcatgtatgataaattcgataacacctatcaggctacaattggtattgattttctatcaaaaactattatcttgaagatcgaactgttcgactgcagttgtgggatacagctg

SEQ ID NO: 32043 - DNA, 256 bp, Glycine max
  Clone ID: 700894686H1
taattgtattgaagatggtatccatgggaaggcgaagatttggcaccgcctttcagctcatgtttcgtattctcaaggcacttctttttcttggcttcttgtcagtcatgactgtattatttgtggtatgtggacttaccatagcagatttgtttgctgccattatcgccttcatgccatctggatgggcaattattctgattgcacaagatgcaaggtatgcttgaaaggagctaaactatgggactcagtgaaa

SEQ ID NO: 32044 - DNA, 254 bp, Glycine max
  Clone ID: 700894687H1
ataatcgctaatgctttgactgagtgggaaataattctttgctcatcaactaccatggatttagtatgggcgcaggttataagtgatccatttctaaggcggcttattctaagattcatattctgccgatccgtgatatcttttttctgcccacctgaggaaagtgaactgtacctgccactttgtttaccccatctaccgtcttctgtgcaccaacgtctgaagctgtgcgttctgctgttgtgcaacttgcc

SEQ ID NO: 32045 - DNA, 252 bp, Glycine max
  Clone ID: 700894689H1
ccctttctctctctcattctcttctccatcgcgcgtaagaaacacattttagttgctactaatgggaactgttgaagctgcaaacaaggatgcaaatggaagtctcctagagaaaaatccttcagttgtttttgtgttaggtggcccaggaagtggaaagggtacccaatgtgcaaatattgtccaaaattttgggtatactcatctcacgctggtgatcttctgcgagcagaaatcaaatctggttctgaa

SEQ ID NO: 32046 - DNA, 247 bp, Glycine max
  Clone ID: 700894691H1
attgcagatttttgtcggcaatttggatcctaacgtcacggatgaccatttgagacaagtttttgggcattatggagagttagttcatgtgaagattccagctggcaagcgatgtggatttgtccaatttgcggaccggtaatttagtcattcagatatttggtgttttatcttgtgttaaattactttgtctatatgtaggtccttttattgtaccatgaggtttcgttttcatgcatcaggagct

SEQ ID NO: 32047 - DNA, 256 bp, Glycine max
  Clone ID: 700894692H1
gacttgcagcaattcccaatggcttccgtttccaagctctcaacgccaaatccacttgcttccttatcagaagcgcttcgcccccgagattctcgcttcctcaccttcaaaccttcttccatcgcttttaatcacaaaactaacctatccgcttccctccgatccattcactcgctccctcttaaaacctccttacggatcaaatgctccaaacagatgggaatggaagtcctgcaaagaggacagtgcttcatga

SEQ ID NO: 32048 - DNA, 256 bp, Glycine max
  Clone ID: 700894693H1
gcaatgtataacaagggattggattatcctgcagcataggtgagggaagtgtatacttctctttctcatttttataccttgtgatagcaaagacaatttatgagtgctgacatatttagtctttgatgtaacttttttttatggatcttatccctctcaacacttgctgtaaagactcacttatataataaaatcaggttatgtaaaaaaaaaaaaaaaaaaaaaaaaaaaaaaaaaaaaaaaaaaaaaagggggg

SEQ ID NO: 32049 - DNA, 253 bp, Glycine max
  Clone ID: 700894694H1
gtcttaattaagactctcacccttcttagtctctctttgaaaatgaagacctcatatgcaacattgtgcatcatgcttactttgcttcttctaggtcagagtgagttgttgtgtatggcagcagtgacgtgtaacgcgttgcagctgagtgcatgtgccagcgccatcacgtcctcaactcctccttcagctctttgctgtagcaaactgaggaacaaaggccttgcctttgccagtatttgaaagaccccaa

SEQ ID NO: 32050 - DNA, 259 bp, Glycine max
  Clone ID: 700894695H1
attggaaattgcattgcccgaactttaagcaatgttgcagatgatttgttgagctcggtgcatctcacagtaaaaaaaatccgggatagcgtaaatatgtgaagacttcagagtcacatgaggaaaaattcctggacctcaagctgcaacttcaggtccccagtgaaaggaagcttttaattgacgaccaaaccaagtggaatacaacatatagatgctggtggcagcttctgaactacaggaagtgttttcttgtttg

SEQ ID NO: 32051 - DNA, 266 bp, Glycine max
  Clone ID: 700894701H1
agaatgtcttacgcttatctcttcaaatacatcatcatcggtgacaccggagttggaaagtcttgtcttctacttcaattcacggacaagcgctttcagcccgtccatgacttgaccatcggtgttgaatttggtgccaggatgatcacaattgataacaagccaatcaagttgcaaatatgggatacggctggtcaagaatcattcagatctattacaaggtcttattacagaggggctgcaggtgcattgcttgtttatgatat

SEQ ID NO: 32052 - DNA, 261 bp, Glycine max
  Clone ID: 700894665H1
ttatgcttggatgaaggaggctttggatgaattggtcagaagacaaactcaactgcattccaaaaaggatggggatatgagtaggttgtaaaaaaaaaattgtatagcgtgtttggttccaagtcacagacgtgatttttacacgcttaatcagaaactaatagttatagttttcacatcctaaatgcgatttcttacttctcaaaaaatttccaaaaagcacttggtctcttgcttttggaatctacaaagtggtagaac

SEQ ID NO: 32053 - DNA, 250 bp, Glycine max
  Clone ID: 700894702H1
ctggacttaaatttgtctgttttggagcagtatatggaggacttaacttcgtagtatatgtccagtgtctctgggagctgttccgtggatttgaagaaagaccttttcctccaattgccgagtcaaagtttaaggcctaagttctctgagctctcattcaacccacttccatcatcaacttcttccttttcttcaccccgtacattcacaactctggccctcttcaaatctaagaccaaagccgctcctg

SEQ ID NO: 32054 - DNA, 263 bp, Glycine max
  Clone ID: 700894703H1
gttagactctcgacagattcacaaagcgctccaataagtcatactaacaatctcacagacacacggcaaggaaaaggagcacaaagattcaggccaatggggataaccccgagggaagaacaaaggcacagatgacataaaagctcagtcaaatcagctatagcagaataggacataacataacaagatcagctgcaaatgaagttaaacagaaagtttcataagatatccccaaaaagatgaacaggagaaccagtgccttc

SEQ ID NO: 32055 - DNA, 260 bp, Glycine max
  Clone ID: 700894626H1
gttttaacaagaattatatactgatgtattattatacatgcaaatctgtacaaattcaatgtcactgcaaatggtaaaaccaatcaaactccagtaacattgaatttgtacagatttgcataactaataatacatcagttttaacaagaattatatactgagaaaatcatattttgcaaccattttcacattttttgcgttagatacttgaaggtaagcgatcctattgaccaataatatcccgaaacatctggttgatg

SEQ ID NO: 32056 - DNA, 260 bp, Glycine max
  Clone ID: 700894627H1
cacaaggccgaaagcaagctcatcctagagttttaaaaatggcagcagcctcctccatggctctctcttccccatccttggctggcaaggccgtgaagctgggcccatcagcccccgaagtcgggagggtcagcatgaggaagaccgtcaccaagcaggcctcctccggaagcccatggtacggcccagaccgcgtcaagtacttgggcccatttctggcgagcccccgtcctacctcactggcgagttcccaggtgact

SEQ ID NO: 32057 - DNA, 76 bp, Glycine max
  Clone ID: 700894629H1
gtttgtcagagaaggtgtggttcatgcagttgaccaacttattttggctggaaattcaaccaatatatccacacaa

SEQ ID NO: 32058 - DNA, 259 bp, Glycine max
  Clone ID: 700894631H1
agcacacacaaaccctcccctcacactctccaaaccctagcggcactacacacgttatctctctctctctctctctctctccctctctccttccccaagatgtcgagcgccgatcccgagcaccgagaagaggaggaggcacccgccgtcggcgacgacgaggacaccggagcacacgtcgctcccatcgtcaagctcgaggaggttgctgtcaccccggcgaggaggacgaagatgcaatcctagatctcaaatcgaa

SEQ ID NO: 32059 - DNA, 265 bp, Glycine max
  Clone ID: 700894632H1
gccagagaagaataaaaagcctttctcccggggccagtccagttcattgtagagagcagacaccaacaccaaaccttaaaattattttgcccctctgcttctctctctgtctttctcagaagacaactcaaaaaaaccatggacgtgggtcagatgcagagacagtggatcgactacaccaaatccctcttccttgagggcttcctggatggtcagttctgcaacttcagcagcttcaagatgagaacaaccctgactttgtggt

SEQ ID NO: 32060 - DNA, 266 bp, Glycine max
  unsure (1)..(266): unsure at all n locations
  Clone ID: 700894634H1
ggaagagaactggaagtggctgttcagagaaacaggtttcgcccgttacaacatcatcaagatcaacgctcttccttccatcattgaggcgtttccaatctaacgaagaggaagccactacacttcatgtgcgtggttttatgttgcatgtgttgttattattattaacagctatgtgatcttcgtgtgatgtggttttcatcggcacncgtgttatgttgtgtattaaataaaagtatgaagcgccccaccaccaagtaatatgg

SEQ ID NO: 32061 - DNA, 260 bp, Glycine max
  Clone ID: 700894635H1
tatggtggttcaatggacgaaaatgacttatttattgaaccgacaatattgctggatccgccacttgattcagcagtcatggctgaggaaatctttggccctgtacttccaataatcaccctggagaagattgaagacagtgttgagttcataagctcgaggcctaaagctttagctatttatgccttcacgaaaaaccaaactctgcagagaagatggtatctgaaacatcatcaggaagtcttgtattcaacgatgca

SEQ ID NO: 32062 - DNA, 93 bp, Glycine max
  Clone ID: 700894636H1
atccaacagaactgaagatatcgtagctggaaacgtctagcacccacaaatgggtaactcccatggacaccggcatcgcaaacacggtaactc

SEQ ID NO: 32063 - DNA, 259 bp, Glycine max
  Clone ID: 700894638H1
gggaatattaggtctgcatacacaaaagattttaccagtaaagatattacaaagcagcaaattgctgttgctacttatcttattgataaactagctctgagggctggcaatgagaaggatgatgatgaagctgatactgttggttgctgcacattaaaagtagagaatgtgacaagagaaccccccaacaaacttaagtttaacttccttggtaagattctatcaagtacgaaaatacggttgaggttgagcttcctgt

SEQ ID NO: 32064 - DNA, 258 bp, Glycine max
  Clone ID: 700894640H1
ctctgccacttcttcgtcggtgtcaaactcacacaaactcagcattcaaaaccctcttcctgcgccaccgccggaaaatggaggcggtgggttcgagactcagccgcgcctcctcccgctacggcgcccccaccgtgttcagcggccccgtcagaaagtggaagaagaagtgggtccacgtcaccccctcttccttacccaacaacagctctcatctcacactaacaactccaccaccaccagcagcgcttcctctcg

SEQ ID NO: 32065 - DNA, 258 bp, Glycine max
  Clone ID: 700894641H1
atcgttgggatctccatacgccggatctgctaaaatacgcttgatccatatgggcctcctcgaccacttgtgggacgacaccgtcgccggcccaaggccggaaaacggtctcggcaagctccgaaaacaccacaccttcactttccgacctagctccggcaaggaaacggagggcgggagcgtgagatcgtacggagacgaatcgtcggaggaacgacgagagtgacgcgtagtatcatgatcgtgaaaccgcccggg

SEQ ID NO: 32066 - DNA, 258 bp, Glycine max
  Clone ID: 700894642H1
tcttacttcatttaacctcacaacaatcaagttttgaatggcaactgtgagaagtctgaagatcaagacaagtacctgcaaacgtatagtgaaggagctgcattcttatgagaaggaagttgagagagaagctgccaaaacagctgatatgacggaaaaaggagctgacccccatgatctcaagcaacaggaaaatgtgttggcagagtctagatgatgattcctgactgccgcaagcgccttgaggccgctttggca

SEQ ID NO: 32067 - DNA, 256 bp, Glycine max
  Clone ID: 700894644H1
caacagttccataaccctctctctatcttccttcactcacttaattttgacaatcccaattcaattcccatcagaatgattaattttcaagcatgttcaaacaccatctcaaacttgttctatgtttgttttgtccttttaccaaccatggccttaggagattgcacttgtgacacaatagaggccacaaagagtgactcaattgaagtccccactacaaaattggctcaattgcttctgtgcttgttgctggggc

SEQ ID NO: 32068 - DNA, 107 bp, Glycine max
  Clone ID: 700894645H1
gtcagtatataatatacatatacaagtagttctgctttgatactttataataattaaaaccctggattttggtttttcaaaaagaaaaaaaaaaaaaaaaaaagaag

SEQ ID NO: 32069 - DNA, 255 bp, Glycine max
  Clone ID: 700894646H1
cagaatccgagatcaaccccgacgaaggcaaggggtttttctcggcttcttcagaattctgaaatggcgcctgtttcagctttagccaagtacaagctcgtcgtcctgggtgaccaatccgtgggcaaaaccagcatcatcactcgcttcatgtatgataaattcgataacacctatcaggctacaattggtattgattttctatcaaaaacatgtatcttgaagatcgaactgttcgactgcagttgtgggata

SEQ ID NO: 32070 - DNA, 258 bp, Glycine max
  Clone ID: 700894647H1
gaacgacacccaagtcgctccggccttaatcgccgttcaccccgaccaatcctccgtcgccgtcgcagtgggcccgcacctccgggtcttcgacctcctgtaagcaacccttcccaactccatctctctcacttcaactcagttacattatgctgataaacccacagtagcggttctgcagcttctttaaccgacgactctgatggcgccgtccgttccacaaggacaacatcccagccattcgcttcggcgcaaaag

SEQ ID NO: 32071 - DNA, 262 bp, Glycine max
  Clone ID: 700894649H1
ctcgagccgttcgaattggggtcttgctaagaattttagcactagtgtttgtgtcaatattggtagttttaggcctagggtcgtgtccttgacaccgcatgtagcgtcggattttaggaatcactctacatcggttgattctcattctaatgacacgagctttgagaagatttacattcaaagtggcttgaatgtcaagccattgataattgaaagaatgagactgatcacagtaaattggaggaagttgctgaagaaagat

SEQ ID NO: 32072 - DNA, 260 bp, Glycine max
  Clone ID: 700894650H1
cccactgctagaccaactagtgatggtactaacagtatgtcgtcaaacaacacaccttcacattcaggagggttgagcactggaggatctgtggctattggaattgtagttggttttactgtcctcagccttgttatggccgtgtggtttgtacagaagaaaaagacgaagggaacaggatcaagaggtggttatgctgctgcttctccatttacctatcccacaactcaggtacattattcttgaggtcgcagtctcca

SEQ ID NO: 32073 - DNA, 253 bp, Glycine max
  Clone ID: 700894651H1
ggtttctctagttgtgtgtgctttacctactctatatttttaccttatttttgcttactttgtggcactagtatttgttttgggaagtagcgttgcttctgtaaacttggtggcaggggtatattatttatggaaataagtggtggcttggtagttattcccgtccatttctctaatgctgcctaataatttaaaggagttaatcaggccaatgatacagaatgctgcctactatttctttttgttttttatt

SEQ ID NO: 32074 - DNA, 259 bp, Glycine max
  Clone ID: 700894652H1
tccgtccagccctgctagctagtttcaatttcttttgttctatttctgtctatagaaaagatatcacccacttgctactttatattttactgcaaattaaatactctcgtgaataactaactactatttaattccttgcgccattaccaatgtttttatcctgcaaaacatacatagtagtagtatttgatatttgctaggatttcaggtgtgcgctgaaacctccgtgtcccacgaaaaccttacaaaattgaattgt

SEQ ID NO: 32075 - DNA, 260 bp, Glycine max
  Clone ID: 700894654H1
gcagtgctcttatgatgaaagggggaacagtgtcccaacgattctgctgctcgctcgcaaagcgattgtattcagagggaggccttaaagcggaaggaatattccgaattaatgctgataacagccaagaagaatttgtgcgtgatcagctaaacagaggtctggtaccacttggaattgacgttcattgtttatctggtttaataaaggcttgtttagagagcttccaacgggggtacttgattccctcacccccgaac

SEQ ID NO: 32076 - DNA, 257 bp, Glycine max
  Clone ID: 700894657H1
tcggaatggcacaattgaatcagatcacctatgtgtgatgtacgaccaaagatgttctgccttcctatatagcagagccaaaaatcaaaaagagtttaaaatcgaggtttcaatggtgttacgatcctcatccaaagaaattttgacactgccgcagcagatgtttaaaggattcgggatcagcctaatagacaccttgggatttagcagttcaaacaacaaatggaattgcatgactcgctccatgtttaaatttc

SEQ ID NO: 32077 - DNA, 256 bp, Glycine max
  Clone ID: 700894659H1
ctgaaatattcagcgtattttacagtgagtgttgttggacttggacagtagctgctgctttttcccttgtctccagctacctccgttcctcgatctcgttcaccagacagaacaggatgggttgtcaaggtagcaaggagaaaaaatcaaagacagaatttactacttcctatggatcagcagccactggtagtggtggtggtactagttaaacactgttcagcctccgccgccgccaccaccacctactactact

SEQ ID NO: 32078 - DNA, 261 bp, Glycine max
  Clone ID: 700894625H1
gttgattggtcccattgattccgaagagaaaagaaaagatgtttgagccacaacagctatacactcgcgcgaagaccgaggaattcgacctcgaatcaggagaaaccctctacccagggctgagcgtcggcgagaaccagctccgatggggtttcatccgcaaggtctacggcatcctctccgcgcagatcgtcctcaccaccctcgtctccgtaccaccgttttctatactccaatcaatgacctcctcaagggcaattc

SEQ ID NO: 32079 - DNA, 257 bp, Glycine max
  Clone ID: 700894661H1
agatcctaatgatggagatataaatgatgtgagtgaattaagcgggaaagggaagacagcccattatgatgatcatcttacaccggcggagaggcgatacatagagcagagggagcaacttgatgttcacagattggctaagatttctaataaatctcaccgtgatagaattcaggatttcaaccaatatcttgcaaacatgagcgagcatatgatattcctaaagttggtcctggatgattcaatgaaggccaatc

SEQ ID NO: 32080 - DNA, 258 bp, Glycine max
  Clone ID: 700894664H1
gaaaatttacatggaggtaatcaaattcagtgtgctagtgttagccatgatggtcacattctggttacaggggctgatgatgggctagttaatgtatggagagttagcaagtttgggccccgcgccttacgacgcttgaagttggagaagccactttgtggtcacacagccaaaattacatgccttcaagttagccagccttacatgcttattgtagtggatcagatgattgcacagttattatatgggatctcagct

SEQ ID NO: 32081 - DNA, 240 bp, Glycine max
  Clone ID: 700894585H1
cacttagttgacagattgatggaaaatgaaaaaaatgaggtaattgttgctgacaactacttcactggatccaaggacaacctcaaaaaatggataggtcatccaagatttgagcttatccgtcatgatgtcacggagcctttattgatcgaggttgatcagatctaccatcttgcatgccctgcctctcctattttctacaaatacaatccagtaaagacaataaagcaaatgtgattg

SEQ ID NO: 32082 - DNA, 97 bp, Glycine max
  Clone ID: 700894586H1
ctcgagcgtgagattttgcccgttccatgattcttgaagttattgtttaatctctttattaatgtggaatattatatttaaatttataacgttattg

SEQ ID NO: 32083 - DNA, 240 bp, Glycine max
  Clone ID: 700894587H1
cttacagggtccatgtatgtgagcgttgtgggttgatagctattgcaaatctcaaaaagaattcttttgagtgcagggggtgcaagaacaaaactgacattgttcaggtttatattccttatgcttgtaagctcctcttccaagagttaatggctatggccatagctccaagaatgcttacaaaggaggtcaaaactacaaaccaaaagaagggagcctgataaactttttgacgaaagc

SEQ ID NO: 32084 - DNA, 238 bp, Glycine max
  Clone ID: 700894591H1
atgggtttcccttcttttgctgattgttgtcagttgtcttcttttaagccccaaaaagcagcgaaaatagattgagatgtagtatttatattggcgaaggtgtgagcactgagcagatactttaagctctagggaaaagtaatattctatctgcgataagaggaagaccaccaccacacaacatagctctgctcaaaaacacaaacacagtgagtgagtgagtgagtttggctaatat

SEQ ID NO: 32085 - DNA, 233 bp, Glycine max
  Clone ID: 700894593H1
ctcttcttctcttgcggctagggttttagcgcagttcttctagatttaaggaagatgggtaaggaaaaggttcacatcagtattgtggttattggccatgttgactctgggaagtccactaccactggccacctgatctacaagcttggaggcattgacaagcgtgttattgagagatttgagaaggaagctgctgagatgaacaagaggtctttcaagtatgctgggtgctt

SEQ ID NO: 32086 - DNA, 236 bp, Glycine max
  Clone ID: 700894594H1
gagcatcactgaactaacaaagcaaccctatgtcgaaggtggtttgtgtcaccggagccagcggcgccatcggatcatgggtggtcctactcctcctccagcgtggttacaccgtccatgccaccgtccaagatatcaaggatgaaaatgaaacgaaacatttggaggaaatggaaggagcaaagagtcatctccatttttttgaaatggatcttcttgacatcgctccattgccg

SEQ ID NO: 32087 - DNA, 238 bp, Glycine max
  Clone ID: 700894595H1
cgttggcatcattaacgttttccctcctcactctctctcctcctctaaaatcactatacggttgtaccattcaaattaaagattgttcgaactgcagagtaaactgcagtatagagctaataatcctcagatcaacgaaaaaaagagttcttgtaggtttcattgtcatggagctgaattcacagaagagaccattttcaatcaaattatggcctcctagtcagaaactaggcagacc

SEQ ID NO: 32088 - DNA, 238 bp, Glycine max
  Clone ID: 700894596H1
gatgctgccagctcgtccaaaaatgtagaggatgtatttgaacgtaggaaagatgaagacattgatcaatatggaaggaaaatttttgatcatgtttttgggtataacattgaattagctttgtctaatgaagagacatggaaaaatcgtaataggccaaaacctatatacagcaaggatatcctgtccgatgaaccggctcaacaaaatggaaatttggagaaaaatatgaatctgt

SEQ ID NO: 32089 - DNA, 262 bp, Glycine max
  Clone ID: 700894602H1
cacggtttggggcacagttaaggtggtagcagtagcattgttaggccatatctccttttgttctctgccttgtattgaggtaaaactcacaaatattataactttgatctggggaagcaatggcatggagaggacatctttcgaaaaacataaaagaacttcggtttttgatgtgccagtcatctcctgcaagctcacctgcaagggcttttgtggagaggatataaggaactaaagacattgaaccaaaattgccaatatt

SEQ ID NO: 32090 - DNA, 266 bp, Glycine max
  Clone ID: 700894603H1
gcaagccccactcaaccaccacacctctcctcgttcacgctacccctttctgctcttcttctacctttcaagttttaaaagtataaagatggcagagacattcctatttacctcagagtcggtgaacgagggacaccctgacaagctctgcgaccaaatctccgatgctgtcctcgacgcttgcctcgagcaggacccagacagcaaagttgcctgcgaacatgcaccaaaaccaacttggtcatggtcttcggagaaatcacgac

SEQ ID NO: 32091 - DNA, 257 bp, Glycine max
  Clone ID: 700894605H1
cttaattgatgaagaggccaaggataagttgaagcaagttcttcagtccttgcgtgcatttactctaagacttcaaggcaaaaactaagcttgaagttactttaattccacgaattattgttgaaataagctgaggatttagaaataaaccaatgttattctgaacgtgaatgatgccactatgtataaggatggtttttaaaaaaaaaaaaaaaaaaaaagtaaaaaaaaaaaaaaaaaaaaaaaaaaaaaagaaa

SEQ ID NO: 32092 - DNA, 259 bp, Glycine max
  Clone ID: 700894606H1
ctgcattgaacggagcaagaattgtttatttggatgggagattgcatgaaactgctctagttgttgcacatgaggcagttaagaagaatatacctatcttaatagatgcagaaaggctgagagaagggttggatgatctcataaaattagctgattatgtcgtgtgtgctgcacggtttccacaggcatggacagaggcatcaacagtttctaaacacttgtttgtatgcttttaaggttgcccaacatcaaatttgtg

SEQ ID NO: 32093 - DNA, 259 bp, Glycine max
  Clone ID: 700894608H1
aggaaatgctgtttcattagatggatagaacccacaaattcaactggcttatcaccttcactattgttattactcctcggtggctcttcccagcgccatgaaaaattccaattaatgggtggtgctactagtttgttgaaagagcattttttttcaacatcttgatttcatgagtcactattttgactgaacaaagagatgaggtttatgccccttccagattaatttgccgtctccctcggccgcatacacgtgggcc

SEQ ID NO: 32094 - DNA, 260 bp, Glycine max
  Clone ID: 700894611H1
cggctcgaggcaaccaggaatggaaaaatatgctcgcttgcccccagcttgggcatatcgaccaggtgtatgcatgctttcttgttcttcatgaggctcccatttaggtctaaaggattacaaaaatgaaaacataaaaactaggaattaattaagagcaaaaaaatagtagcgtgtttctttgtttattatttttccatatgtttccaatatatgtccccgagtattatttaacacgtacaatgtaacatttggtcgaa

SEQ ID NO: 32095 - DNA, 253 bp, Glycine max
  Clone ID: 700894612H1
caagatgaaagcaagcctgatgttattggtgcagaaattatgccattctctttgcttgagaaatggcttcttgatgaggctggttgccaagagaaattagttggttgtggtgatgatgctaagtttttctaagttgggttcattttgtgacatatatgagactgtggaattttttattttatttcataagttataggtagggcctcatcaataatcttcgctttggccttagagagagaagtttttcaagcct

SEQ ID NO: 32096 - DNA, 261 bp, Glycine max
  Clone ID: 700894614H1
ttcaatcaagcgaaggtggtctcacttgactcgattgcaagtgatccacgacacactgttcgcttcacaaaagcttcgaatccaattcctcagtaacatctgcaggaagtcttctccttcaccatgccaccaaagcctttagactatgggtcaataaatgaaaacgtgaagaagagtcaatatgctgtcagaggtgaattataccttcgagcttcgagcttcagaaagagggcaaaaagattatatttactaatgttggca

SEQ ID NO: 32097 - DNA, 259 bp, Glycine max
  Clone ID: 700894615H1
gtggagatggaggctagcatcatggatggtccaaaacgacgatgcggcgccgtttcgggtcttaccaccgttaagaacccgatctcgcttgctcgtttggttatggacaaatccccgcattcctacctcgccttctccggcgccacagaatttgctaggcaacagggtgtggaggttgtggacaacgagtactttatcacacctgacaacgttgcatgctcaagctggcaaaggaagcaaacacaatcctgtttgatta

SEQ ID NO: 32098 - DNA, 260 bp, Glycine max
  Clone ID: 700894616H1
gccacccactaacttgtttggtccaagacatggctctgatcctgcatgctaccaaaacaaacaagaatgccttcaagactctgattgcggcagagtacagtggcgtccaagtggaattggcccctaatttcgagatgggtgtctctaacaaaactcctgaatttctcaagatgaatcctattggaaaggttcctgttttggaaacgcccgatggtcagtctttgagagcaatgcaatcgctcgttacgttgctcgactaa

SEQ ID NO: 32099 - DNA, 270 bp, Glycine max
  Clone ID: 700894617H1
ggatatattcagatgaagactgcagcgaactgttcttacctggtagttatatctacgagttgttcatcgcctaagttcacaacggataagatcggtatcacgtttggggatgctaatggcaaccaggtatatgaaccaagactggatgatccaatttcaaggacatttgagcagtgttcttcagatacatttcagatagatggtgcttgtgcatctccaatttctatgtgtacctatatagatctggggcagaggaaggttgggagcctg

SEQ ID NO: 32100 - DNA, 265 bp, Glycine max
  Clone ID: 700894618H1
cttctcttaaaagagcctttgctttttctttaggcctttccgaattaagtacttgtttcattgtctctcgaagcaagaaaaatgttcatcgagagtttcaaggttgagagtcctaacgtgaagtacacagagactgagattcagtccgtgtacaactatgaaaccactgaacttgttcacgagaacaagaatggcacttatcagtgggttgtcaagcccaaactgtcaaatatgaatttaaaaccaacacccatgtccctaaact

SEQ ID NO: 32101 - DNA, 241 bp, Glycine max
  Clone ID: 700894583H1
ctaggcacccagagacgaggaagggcgtagtaagcgacgaaatgcttcggggagttgaaaataagcgtagatccggggattcccgatataggtcaacctttcgaactgctgctgaatccacgggcaggcaagagacaacctggtgaactgaaacatcttagtagccagaggaaaagaaagcaaaagcgattcccgtagtagcggcgagcgaaatgggagcagcctaaacgtgaaaacgggg

SEQ ID NO: 32102 - DNA, 262 bp, Glycine max
  Clone ID: 700894619H1
gtttgacaacttgtacgggagccgtcactctctccctgatggtttgatgagggctactgtcgtgatgattcgtggaaaggtggctgttgtggctggatatggtgatgttggcaagggttgtgctgctgcattgaagcaggctggtgctcgtgtcatcgtgactgagattgaccccatttgtgcccttcaggctctcatggaaggccttcaggttctaccttggaggatgttgtttctgaggctgatatctttgtcaccacca

SEQ ID NO: 32103 - DNA, 260 bp, Glycine max
  Clone ID: 700894620H1
cgacgacactgttttgttcccctccgagtggccgtacggttccccagttgattctaccgttggtggctccagtgagaccgagagcgacgaggaggagcacctcgtcgctgagttaactcgccgcttaactcgctcctctcttcaatctgataccaagtctgcgcgtcggtttgtgtctagttctccacaatccacgcttcacgcgttcgcaagtggtgtggttgcggcaaagggtcgagccagggaagccctgatggtgt

SEQ ID NO: 32104 - DNA, 262 bp, Glycine max
  Clone ID: 700894621H1
ccacaagtgttcctttttgtttgccgtatgttatctcagccactatagataaccatgagacacactccgaagattggtgttcacggtgtctttgtgtgttataatatattggtattgttgttgagcagttttcatgaatcaacatcatcctcttcccactgtaaagcatggctagtgcaatccattcccaccgatatgccccacttatcccatgttcaagcaccctctctaccggggatgtacttcagtggctggctgcaaa

SEQ ID NO: 32105 - DNA, 260 bp, Glycine max
  Clone ID: 700894622H1
aagggattgggggaacggaacgcacttgctctaggtctagggttcccttttctatcctatataattattcaaatttgcgaatgattgattagttatcttctgtgcactgtgagatcagatcaaacactccgggattgcttacaacaactagattgattgctcttgcaggtgaaagccggggatcaccactaaacgtttggacggacgcactccatccatcatcacttaataagcttgctagcatgttctcgcagccttta

SEQ ID NO: 32106 - DNA, 79 bp, Glycine max
  Clone ID: 700894624H1
ggttgctacgttggtatctctgtgttgtaattaaacttcgaattcaaactcatactctggcaactcgttggtatgacag

SEQ ID NO: 32107 - DNA, 240 bp, Glycine max
  Clone ID: 700894549H1
caaaccctctttgacattttcttttctttctttacagttcttattaatcgatttacggacacataggggtttcacttttctctacgcagattaattcagatggaagtctctgggcagaatattgtgaaatgtgatgaagagaaagcattgaagtgcttgcttgatgcctttggctcagttttttctcttgaagagattgcttctgcctattgcaaggcgagccgcaatgcggacttggct

SEQ ID NO: 32108 - DNA, 244 bp, Glycine max
  Clone ID: 700894551H1
cccttgaggtggaaagctctgacaccatcgacaacgtcaatgccaagatccaggacaacgaaggaatccccccggaccagcaacgtctcattttcgccggaaagcaacttgaggacggccgtacccttgctgactacaacattcagaaggagagtactcttcacctcgtcctccgtctccgtggtggcatgcagatcttcgttaagacactcaccggcaagaccataaccctagaggttgaaag

SEQ ID NO: 32109 - DNA, 118 bp, Glycine max
  Clone ID: 700894553H1
ctctctctctctctctctctcactcacagattcagcctttctaagtttctctctctagaaaaaccaaacctcgctactctcttctccctttttttttgtagttctttccttatttggc

SEQ ID NO: 32110 - DNA, 244 bp, Glycine max
  Clone ID: 700894555H1
tgacgattgtgatttgcaagaatgtttggagcataatctccctgatagcccttttgcttccccaacaaaaggtgatggagacttcctggttgcactctccaatggacctaatgaggccaatgatgcagatgcctcagctgcatctgccaactccaaatttggtactagcacattacttcctgcaacatctgctcttgacatgggaactttcaaatcctttaattgccaaataccaaggttctct

SEQ ID NO: 32111 - DNA, 242 bp, Glycine max
  Clone ID: 700894556H1
gtaaccaatcatctttagttcttcagtaatttattgtgggattctattctaagattttgagaatgtctagctgtgggtgtggaagcagctgcaactgtggcagcaactgcggttgcaacaagtactcttttgacttgagttacgttgagaagacaaccacagagactctagttttgggtgttgggcctgtgaaggccaattggagggtgctgaaatgggtgttgcatctggaacggtggctg

SEQ ID NO: 32112 - DNA, 242 bp, Glycine max
  Clone ID: 700894557H1
ttttctttgcttgctattctacaccgtgtctttactcttgttcttgttgcagcttggtggttgcattgaatcggagagggtaggtaggttggaagacgtgtcttgttttgtagctttccccttcgctctctctctctttcccggcgcatgtgccggattagacgccaactgcttccataattcacctcctccaaccaaccaacacaagatttccctctggattggatggagaagcatgtgaa

SEQ ID NO: 32113 - DNA, 236 bp, Glycine max
  Clone ID: 700894559H1
tcttcttcttccattgaccattgttgttgttgttgcttttgttcgttctcgccatgccaatgttgtcttcgagaggcttcatcgcttatctcgtatctgctttctcttgtgctgttctgtctgcgctttttctcaccaaccacatccatcatgatgataacaagccaattactttgttagcctctcgtgtgtctgaaactcttaaagtttggccagactttgagccaagtggagac

SEQ ID NO: 32114 - DNA, 242 bp, Glycine max
  Clone ID: 700894560H1
cttttcccctagattcagccacagttggaaaaaaaaaaaaaaacttgttcgaaatggcacgtacgaagcaaactgctcgtaagtccacaggaggaaaggcacctaggaagcagctcgcaaccaaggctgcacgtaagtctgcaccaactactggtggtgtgaaaaagccacatcgttatcgccctggtaccgttgctcttcgtgagattaggaaataccagaagagtaccggcttttgatca

SEQ ID NO: 32115 - DNA, 240 bp, Glycine max
  Clone ID: 700894561H1
ctcagtagtgtcatttacgcttctcttctctgcagcaactatgcctaaccctaaggtcttcttcgacatgaccatcggcggtcaatctgctggccgcatcgtgatggagctctacgccgacgtcactccccgcaccgccgagaacttccgcgcgctttgcaccggcgagaagggcgtagggcggacggcaagcccctccactacaagggctcgtccttccaccgcgtgtcccgagtttca

SEQ ID NO: 32116 - DNA, 241 bp, Glycine max
  Clone ID: 700894562H1
gagagcgagagagagagagagaatggcagcacttggtggcaatcgtgatgtggcaggaagccagaacagccttgagatcgatggtttagctcgctttgctgttgaagaacacaacaaaaaacagaatgcccttttggagtttgaaaaggtagtaagtgcaaaacagcaagtggtttctggtaccttgtacaccatcactttggaggcaaaagatggtgggcaaaagaaggttatgaagcca

SEQ ID NO: 32117 - DNA, 232 bp, Glycine max
  Clone ID: 700894563H1
ggtagcacaaacgataaggtatcagcaaactcagttcctcagactcctcggagagagggtgagatcttgcagtcatccaatttaaagagctttaccttgtcagaacttaagacggccactagaaatttccgtccagatagcgtgttaggagaaggtggttttggatcagtttttaaggggtggattgatgagaattcattgaccgctaccaaacctggcactggcattgtat

SEQ ID NO: 32118 - DNA, 240 bp, Glycine max
  Clone ID: 700894564H1
cttggttgggatgatcactggatcttctgggtgggacctttcattggtgctgcacttgcagcactctaccaccaggtcgtaatcagggccattcccttcaagtccaagtgattcaatcaaaccgttcatgcttaatcaagttgggaacaacaaaaaaaatcaaaacaatgtttctgggtttcggtttcatttcatcaagatgatctgtttatcttttttttttaattttaattaaagtct

SEQ ID NO: 32119 - DNA, 240 bp, Glycine max
  Clone ID: 700894565H1
actagttctagatcgcgatctaaaactagcggagacgaagaagtgaagagaagagaagagaagggatttggatctgaaaagagaagatagggggaggaatggaagcaaacaagaacaagttcatagaggattggggcactgccagagagaatctggagttcaatttccgttggactcgccgcaaccttgctcttgttggcatcttcggcatcgctattcccgtcctcgtctacagggcat

SEQ ID NO: 32120 - DNA, 243 bp, Glycine max
  Clone ID: 700894566H1
acctaattggtacttgcaattagtgtagaagatgagtacgttggatgcaacaagggctgaacttggtcttcttgttttatatttgggcaaggctgaagcaagggacaaaatatgcagggcaatacaatatggttccaaatttttgagtaacggggaacctggtactgctcagaatgtcgacaaaacaaccagcttggcacgaaaagtcttccgtcttttaagtttgtcaatacctacatgctt

SEQ ID NO: 32121 - DNA, 245 bp, Glycine max
  Clone ID: 700894567H1
accaccctctgatcccacgctttttcagggtcaacaatcctggcagcaacaacatccacctcaaactcaacctcaacatttcaacccacagacccataactaccccaaccctcctccccctcccaatcaatttcctcatcaccataaccatcaatctcgccaacacaatgttcctcctcgtccatttccagaaaatggccgaaaccataatcagtggaacccccaacccacacacctcaaaatct

SEQ ID NO: 32122 - DNA, 240 bp, Glycine max
  Clone ID: 700894569H1
tcaactttgaaattcttaaaaccctaactggtccgaaccattggagccaccgtgcaatagttcctcctctcactctctccctcaacacaccattaatttaggtttcagctttatttggaagagggttgtaacgctgacgtgaaatttttctgaagacaaagatgcaggcttgtacaacgatgagttctttgcagcaacaacctatttggaccaaagggttaaatttccctgaaaagggta

SEQ ID NO: 32123 - DNA, 239 bp, Glycine max
  Clone ID: 700894571H1
ctggtaggaagcctgtggatatgtcacagccaactggacaagagaaccttgttacttgggctaggccaatccttagagataaggagcggttggaagagattgctgatccaagacttgggggagagtatccaaaggaagattttgtacgtgtttgcactattgctgcggcctgtgttgctccggaagcaaaccaacgacctacaatgggtgaagtggtacaatcacttaaatggtgcagc

SEQ ID NO: 32124 - DNA, 239 bp, Glycine max
  Clone ID: 700894573H1
ttgcaattaagtggcatagatcttgaagctgagaatcgcgtgcgccatgaatagaggtgaaagttcaggtggtggacagagctcgttggggtacctatttgggtcagaagagaagccaaatcagcctctgcccacaaggacagctccattaccaccctatggcattgacatcgataactccatgccccatcacggttctaactgccaacttgttgtctcaaacaaccgactcaaggcca

SEQ ID NO: 32125 - DNA, 242 bp, Glycine max
  Clone ID: 700894574H1
cctagattcagccacagttggaaaaaaaaaaaaagttgttcgagatggcacgtacgaagcaaactgctcgtaagtccacaggaggaaaggcacctaggaagcagctcgcaaccaaggctgcacgtaagtctgcaccaactactggtggtgtgaagaagccacatcgttatcgtcctggtaccgttgctcttcgtgagattaggaaataccagaagagtaccgagcttttgaccaggaagctc

SEQ ID NO: 32126 - DNA, 239 bp, Glycine max
  Clone ID: 700894575H1
gcgagaggtacttactcacagatatatttttttttttttgtctccatcattttctcgagagctttcagtttgtgtggttcatctttcttcttctccttccctcccccctctgtaacaccccgtttctctgaatccctttctgttaatcatctgtctttcaagctaagattttcgggtttgtctattaattcaccaagaagcaaacttagaaggatttttcgaaagccggtgttttcaga

SEQ ID NO: 32127 - DNA, 240 bp, Glycine max
  Clone ID: 700894576H1
cactcagagtgcaagctagagagagagagatggaggatctcgaggaggaagagaacggagcggaggaggtgttggggtcaagcttgaccatggagaaggtggcggcggcgaagaagttcattgagaatcattatagggctcagatgaagaacatccaagagaggaaggagaggcgttgggttttagaaagaaaattggcgtcatcggatgtgccaaatgaggaacggacaacctcatcaa

SEQ ID NO: 32128 - DNA, 238 bp, Glycine max
  Clone ID: 700894577H1
cgaaccttttctccgataatcagagagagataataatggattggggaaacgtaaccgcggaggatctgatcgacgcgctccgtgaggtggattggtcgtcgccgccgcgccctctgtcggaattcttctcgcgattcaccgttcccaggtcttcctccaaatggaacagccgcctcaaatgcaatctctactactaccggaccaactacttcattttgattgtttcgttctcatattg

SEQ ID NO: 32129 - DNA, 240 bp, Glycine max
  Clone ID: 700894578H1
aattacctgaacaccacagtacctgattcttcattgaatcctggaatgacacacaatattggtgaatcgggcttcctgcaaactccagaaaatggggggcaaggaaacccaactaacaaaacctttgtgaaggtttacaagtcagggtcctttggaagatccttggacatcactaaattcaccagctaccctgagctacgcagtgagcttgctcgtatgtttggcctgaaggtgagttgg

SEQ ID NO: 32130 - DNA, 98 bp, Glycine max
  Clone ID: 700894579H1
actatatataacttatattgtactgtgctgcttttccttttctgtatacttcgtaactttcatgagctatgtgttcatttataacgtaaaatgtaaaa

SEQ ID NO: 32131 - DNA, 244 bp, Glycine max
  Clone ID: 700894548H1
atcgctgccattaaggaagccggtaatgttaagaggtttttcccttcggaattcggtaacgacgtggatcgtgtccatgccgtggaaccagcaaaatctgcattagctatcaaagcccaaattcgacgcagcattgaagccgaaggcatcccctatacgtacgtttccagcaactacttcgctggctattttcttcccacattagcacaaccaggtgcttttgctccacctccaccaaagacaa

SEQ ID NO: 32132 - DNA, 241 bp, Glycine max
  Clone ID: 700894580H1
tgcaaatcttcttgatttcaccatatggttgacaaactagtaggactagttacaagtagcaattgaatttgcttggttctacagcttttactatttgccattctactagttttcttcaatatatgtaaagaaatgccatgccccgatggcttcttgaactctgcttttactgatttttgagactaagcgtttactttggtatctccaacattcaatctcggtgcttttctatctagaaaaa

SEQ ID NO: 32133 - DNA, 218 bp, Glycine max
  Clone ID: 700894581H1
atgcgagtcgcggtcgccccatcagaacgcacgttgtcaacttcaccgccgcacaagtgggtctccccgttgggatcgaagccttcaacgtcgatacgcctcgggaaatgacccccagaatctacatgggcctatcccttctccaacaagtcttcgaaaactcttccatgacttgcaaccggatttcatcgtcaccgacatgttccacccttggagtg

SEQ ID NO: 32134 - DNA, 239 bp, Glycine max
  Clone ID: 700894582H1
tgaaccctctctataaaagcgcttccttctcatttggaacctattccattctctaaaccctaaacgactctatctctcttcgttttgttcttccttgcgctcctcctcgttcgttcgttctccctcgcgtagatcggcaatggcggagaccgagacgtttgctttccaggctgagatcaaccagctcctcagtctcatcatcaacaccttctactccaacaaggaaatctccttcgtga

SEQ ID NO: 32135 - DNA, 249 bp, Glycine max
  Clone ID: 700894506H1
ttatctctctcgccctttcttttctcatcttttagtaaaagggttatctcctagtttcatttttctcttgtttccaccatttttctaaggcgaccttggaactggtttaattcaaagacacttattccatttgacattagaggccgtgttcgaatacttcatcctccagttatgacttgtttcccattctcatttggtaagaaagtgcgctttgtggcaacacatgatccagatattgtgaagtactct

SEQ ID NO: 32136 - DNA, 248 bp, Glycine max
  Clone ID: 700894508H1
gctttttcagttttcctcttctgaatccaccgccactgcagcgtggacggaatcggagtgcagccatatcagcagcagcagaagtccttgaagtgctgctctagtttgaggcacaatgagattggagaaatgctggttttgctcttcaaccatataccctggacatggaatccagtttgttcgtaatgatgcaaagatttttcggttttgtagatctaaatgccacaagaactttaaaagaagagaaa

SEQ ID NO: 32137 - DNA, 105 bp, Glycine max
  Clone ID: 700894509H1
agaagaacacctcgtcatggaccttcattccaaatggggaaataggtttgagaaccatgcagaaataattaaactataagctacctaccttccaatcatcatcac

SEQ ID NO: 32138 - DNA, 245 bp, Glycine max
  Clone ID: 700894511H1
gatcactggagttttgcttaatggacttgatcatggacaaaaagatttgacttggcagaagtggtcataccagattggtctaagaggagaggctatgaatttggtggctcccaatggggtctcatctgttgactgggagaaagactcactagctgtccgaagccagtcacagttgaaatggcacaaggcatatttcaatgcacctgagggagttgaaccattggccttggacctgacagcatggg

SEQ ID NO: 32139 - DNA, 246 bp, Glycine max
  Clone ID: 700894513H1
aaagcacatagaagagaaagaaagaaaacaaagaggagaaagaaagtagttgaggaagatacaaacaatttttgcagattgttgagaatgcctttcaagaagcctcatcacacctcagacaagaactacataacaggggacgacggaggcaagttcgagatacaacctagaggactcaacattgtgtggggaaatgattctcgatactggaaaattccagaacaaggtcctgcggagcgatccaag

SEQ ID NO: 32140 - DNA, 247 bp, Glycine max
  Clone ID: 700894515H1
cttttgcttatttcctttctttgtgggttctcaattcgtgaaatttctgcgacacccagatggattttgcgccgaatccgtgccctttgcgttcttcttcgttcgtgaatctcgttgagaggattaaacagcttggtaccctcgccgtttctgcagtcattgggaacatcttctccgcgatcttgaccttctgcttcgcattagttggcactttgttgggggctttgactggagcttgataggacaa

SEQ ID NO: 32141 - DNA, 245 bp, Glycine max
  Clone ID: 700894516H1
gactttgtcacaacagacatcaggtggtatgcaatcggcacaatccaaatatgtgaaggtctgggagggaagcttgtctggacaaagacaaggacagccagtatttatcaccaaacttgaaggttacaggaattcttccgcctctgagacacttgcagcaaactggccccctgtaatgcaaatagttcggcttatatctcaggaccacatgaataacaaacaatatgtaggaaaggagatttcct

SEQ ID NO: 32142 - DNA, 246 bp, Glycine max
  Clone ID: 700894520H1
ctcactggaagccttgttgtgagtaagggaaaggcttcctgcactgagcaccaagttgaaacctcttgattctttgcttagaattccacagaatatggagacagttcttttcaatgactccccacctttggagttcaagggtatgagcaaggaggaggaagactcattgctagggcaagttgaaatatggaggtacatgacatgcttcacggactccgtggccttgaaatccgtcaagagctgcgc

SEQ ID NO: 32143 - DNA, 246 bp, Glycine max
  Clone ID: 700894523H1
cagcaacgtctcatcttcgccggaaagcagctcgaggacggccgtaccctcgccgactacaacatccagaaggagtcaacccttcaccttgtccttcgtctccgtggtggcatgcagatcttcgtcaagactctcactggcaaaaccataaccctagaggtcgaaagctctgacaccattgacaacgtcaaggccaagatccaggacaaggagggaatccccccagaccagcaacgttcatcttcg

SEQ ID NO: 32144 - DNA, 244 bp, Glycine max
  Clone ID: 700894524H1
gctttgttttgctcttcttttgtaatggaaattgatctttctccccagttggccaagaaggtgtatgaaagcaatggtgggtcttaccatgcatggtccccttctgagcttcccatgttgcctgaagggaacattggtgctgccaaactagctcttcaaaaaaatggttttgcccttccttgttactctgactcttccaaggttgcatatgttctccaaggaagtggagttgcaggaattgtgc

SEQ ID NO: 32145 - DNA, 245 bp, Glycine max
  Clone ID: 700894526H1
caatttctattcttttgaccaagcatgatcaaatggaatggtggaaatgtctagtgaaaggtgatcctgaaattgatacccaaaaggttgaacctgaaaacagcaaacttggtgacctggatcctgagactcgacagactgttgaaaaaatgatgtttgaccagaggcagaagtctatgggcctccctaccagtgaagagctccagaagcaggaaatgttgaagaaatttatgtcgagcatccgg

SEQ ID NO: 32146 - DNA, 248 bp, Glycine max
  Clone ID: 700894527H1
ctcgagccgctcgagccgcgacacgacaccaaatattctcactcgtcgtcttcgtctgcgccctaaagcaaattcaattcaaactcttctcatcaaaatccaaggctcgttcttgaaaccctaattcgatatcctcctcctcagaagaagaaggatcgatgtgggcagcttcttgcctggcgtcatgctgcgcggcctgcgcatgcgacgcctgcaggaccgtcgtatcgggaatcgccgccgttccg

SEQ ID NO: 32147 - DNA, 244 bp, Glycine max
  Clone ID: 700894528H1
agacactgcttcagttactgtcttcatcctccatcttcttcgtgttagggttttcaaagttacagtgatttcgagcatcgaacgaacgtctactaatgcgttttcagtaaccaagtctcgaagaagatcgcgattcccccaacgctttgttgccataactcgcggaatcgacatcatatttcgacaaagtggtaatggcttatttggaggatgatggtacttctggctctggtgagatgtgcat

SEQ ID NO: 32148 - DNA, 245 bp, Glycine max
  Clone ID: 700894529H1
gcgagcaagtccaagatctacatcgccatggagctcgtccgcggcggcgagctcttcaacaagatcgccagacgccgtctccgggaggagatggccagactttacttccaacaactcatctctccactggacttctgccacagccgcggcgtctaccaccgtgacctcaagccagagaaccttctcctcgacgacgacggcaacctcaaggtcaccgacttcggcctcagcacttctccgagcac

SEQ ID NO: 32149 - DNA, 203 bp, Glycine max
  Clone ID: 700894530H1
actcgagcgaatcggctcagaatgaatccaacttaattgtacattttgatacttgtcactgctatcgcagttactaatagcctaaggatttttcatgtcacaaaaaaagaatctgtatattctctctgttatcgacccctttgatctctattctctatgaactatatcctgtgtgcagttgctcataatcttattcttcgact

SEQ ID NO: 32150 - DNA, 246 bp, Glycine max
  Clone ID: 700894534H1
cagctcctaacgccgcctgtttagttttagattctctgaaggggttttactgtacagaagtgtcaaatcaggacgtaaagaaggatgctaacttactgggtgttcgccgaacatgtatcatgctgatggaatgtctatgtgatttcctgagcaactcaggttgtgtttctaatgtaatttcagaagatatcaaggaccgggctaaggcagttgctgaagaatggaaacccagattgatgctcttga

SEQ ID NO: 32151 - DNA, 245 bp, Glycine max
  Clone ID: 700894535H1
tcaagtttatgaagtatagagatggcagagacattcctatttacctcagagtcagtgaacgagggacaccctgacaagctctgtgaccaaatctctgatgctatcctcgacgcttgcctcgaacaggacccagacagcaaggttgcctgcgaaacatgcaccaaaaccaacttggtcatggtcttcggagaaatcacgaccaaggccaatgttgactacgagaagatagtgcgtgcacctgcagg

SEQ ID NO: 32152 - DNA, 244 bp, Glycine max
  Clone ID: 700894536H1
ggctgttgtggctggatatggtgatgttggcaagggttgtgctgctgcaatgaagcaggctggtgctcgtgtcatcgtgaccgagattgatcccatctgtgcccttcaggctctcatggaaggccttctggttctgaccttggaggatgttgtttctgaggctgatatctttgtcaccaccaccggtaacaaggacatcatcatggttgaccacatgaggaaaatgaagaacatgccattgttt

SEQ ID NO: 32153 - DNA, 247 bp, Glycine max
  Clone ID: 700894537H1
gtgcgaggtccctcgacctccgcacaaccccaactccaaggggctgtgcctgtcgccgtcgtcttccacgctcatgtcggacaccgacatccacgcgccgccgttcctgctccagcgcccgccgactcctgcagtcggcctcgccactcttcaagcagcgatcgtggtcgccggacgccttccgcgatgaggcgtggctccggcgcaaggggaactgcaagaaccgccgcagcaaagcgtcaccgat

SEQ ID NO: 32154 - DNA, 242 bp, Glycine max
  Clone ID: 700894538H1
caccgtcgccggggaagggagggaacactccatgtccaccaccaaagtctcctgcacaggctacatgccccattgacacgctcaaactaggtgcttgtgtggatcttcttggtggcttggttcacattggcttgggagaccctgttgcgaaccagtgctgccccgtgcttcaaggcctggttgagcttgaagctgcggtgtgtctttgcaccactcttaagctgaagcttctcacctcaaca

SEQ ID NO: 32155 - DNA, 245 bp, Glycine max
  Clone ID: 700894539H1
gaggagagtaagagaacttctgcttcgagtaatcttgctaaacttaaagatatgtatggtgattacaagggatagtaaaggagatgccaacatggaaagaattcctagaaaggatagtggaggtgaagaggttattagacttggcgggtctacttggaaggattagttatcatggaatgcttgtatcaggtgttggatggctttcatggagaaaaacattgggactagccctttgttgccagatg

SEQ ID NO: 32156 - DNA, 233 bp, Glycine max
  Clone ID: 700894540H1
gaaagggaagctagaaggttgcgctaagagggtctttctttcttgatctttatggtagttagtcggtgctaaaggttatagcaccctatcttgtcttggatctattttcattcgaattatggcttgagttttgctgttttgagtctaagcttcaaggttgaagtatgttttggcttaatatatgattttaattatggcttgagttttggattaatatgatttggcttctatat

SEQ ID NO: 32157 - DNA, 245 bp, Glycine max
  Clone ID: 700894542H1
ttcttcttcttcgtgcgtgcgtgtttctgtaaaatcgaatctcaagactctgaatctgaatctcaacacaaccttcgttgttctcaacactgtgttcgtttttgctgccaaggttacaacactgaaagagacaccggagtaacataaataagatggaccaacaaaaccaaaataacactccagatggttcaggagaggtgcctttgaagcgcaaacgtggtcgtccacggaaaacccaaagccag

SEQ ID NO: 32158 - DNA, 140 bp, Glycine max
  Clone ID: 700894544H1
tatatgtatacatatacctataccccgtgcttatagattatagatggagaagaaatgggcattgttctgcatgagtcatatcatgccctatatatatatttttaatgtaatgaacagatgatgggttaattttgatttca

SEQ ID NO: 32159 - DNA, 244 bp, Glycine max
  Clone ID: 700894545H1
ggcttcgagcatccaacaagtggaaggggacgagtcagttgtgctgcgcgtgactcattccaatctcaaaaccttcgcctccgacatccgcttctcgcttcacctcaccgtcgaagccgtcaaagacaagctctggaaaaaatgcggcacctctgtcaactcaatgcacctccaactctacgacgacgctcgcaacaaaattgccgatctctctgatcattccaaaccccttccttctattccc

SEQ ID NO: 32160 - DNA, 249 bp, Glycine max
  Clone ID: 700894505H1
aggctggcttcgccaccggaatttggttccgttgctggggtggtgtcgccgccgtggtgacctcctccttgtgtatgatttcatggacaatgggagcttagataagtacttgtttgatgggccaaaaacaatcttaagttgggagcaaaggtttaaggtcatcaaggatgttgcttcagcccttttgtatcttcatgagggctatgagcaggtggtgatacatagagatgtgaaggctagcaatgtgct

SEQ ID NO: 32161 - DNA, 244 bp, Glycine max
  Clone ID: 700894547H1
aaaggctccatctttctctggttctgttgttgcctaagaatgggaggaaattccagtttcagggatgaatataccttcgaacaaaggcttggagaatcgcgggatattgtggccaaataccccgatcgagtccccgtgattgtggaaagatatgcgaaatgcgatctgcctgagttggagaagaaaaaataccttgttcctcgagacttgtctgttgggcatttcattcatatttgagttccag

SEQ ID NO: 32162 - DNA, 228 bp, Glycine max
  Clone ID: 700894458H1
ctaggatccatttcatgctttcctcatacgcccctgttatctctgctgagaaagcataccatgaacagctttccgttgctgagatcaccaacagtgcctttgagccatcctccatgatggccaagtgtgaccctcgccacggcaagtacatggcgtgttgtttgatgtatcgcggcgatgtcgtgccgacagatgtgaatgctgcagtggccaccatcaagaccaaga

SEQ ID NO: 32163 - DNA, 118 bp, Glycine max
  Clone ID: 700894459H1
gagtgacgaagatcttgcagctcaatcagccttcgttcatgaagaatttattggaaaacagaatgtatctaaagaatctgttgctgaccaagatattggactgatgagaacagaatgc

SEQ ID NO: 32164 - DNA, 247 bp, Glycine max
  Clone ID: 700894460H1
tttgcatgatcattgtgacccgaagattattcatcgtgatgtgaaagctgcaaacatattgctggatgaagagtttgaggctgttgttggggactttggattggccaaacttatggattacaaggacacgcatgtgacaactgctgtacggggaactattgggcatatagctcctgagtacctctccaccggtaaatcttcagagaaaactgacgtttttggttatggtatcatgcttctggagctg

SEQ ID NO: 32165 - DNA, 249 bp, Glycine max
  Clone ID: 700894463H1
tcattcttctttcgttgctacttctactgtttcttcctccgatccctcattgccgcaaatgactcctcctgctagtgttaggtgaattccctcgcttcacatgcatgatcgcaccttcaactctcttcttcttcttcttctccatggctttttttcaaggttttggcgccgtggagttcgttttgtagcatcaccgtatcatcagcttcagcttgctttcaccaaaacggctttactatttggtgtgtt

SEQ ID NO: 32166 - DNA, 91 bp, Glycine max
  Clone ID: 700894465H1
ttcggttccatcttctccgatctcctcaaactctatcagcgcagaaccaagcctctatcaccatggggaagacacatggaatgggagctgc

SEQ ID NO: 32167 - DNA, 230 bp, Glycine max
  Clone ID: 700894466H1
tgtgattctgattttctgataatcacacaatcgtggaccaagaccaccgttgcttcttctgcaccctagtgatgattggtcatcattgagtggcacctgctaatgcatttaaaagcaatcgatattttccttttatttttttttcttccaaatatttgtgtttgtacttttcttttctctatttatcctgtgaaaaacggtggataattaattcaggcaaatgatttttt

SEQ ID NO: 32168 - DNA, 185 bp, Glycine max
  Clone ID: 700894467H1
cttccactgcgaccccttcttcggttcgacgagattttaacccatttgggtggactggtgatccgctcctgtgcgaggcttacattaaccacgtccacaccggtgaaaggtacgatgtgggatcgcttttcaacgttactgcaaacatcatcaagcgtgctactgcacttgctgaccgtgttgct

SEQ ID NO: 32169 - DNA, 234 bp, Glycine max
  Clone ID: 700894468H1
cttgcatgacggatcacccacccatatcaacaaattacgccgcaaaattcctcgcctgctgcacggcgccgccgccgccgccgcgattaactcctcggaccgaaagcgaagagcgaaaggcaaatagagatgaacgcttgcaggtgacgtggcatctccaaacttacttttgatttcacttacccaaaccgccacacagcagacactggttccttactctcgattcgacgcttc

SEQ ID NO: 32170 - DNA, 239 bp, Glycine max
  Clone ID: 700894471H1
tgagagggcagggtggatgagcaagtacaaaattcaggccaaaaataacacccctgctgctcaggagaaatgtattgttcgcctgttgctttaccattttggtgtcaatctacctgttatggttttttcatatcccgtcttcagatacatgggcatgcggagtagtcttcccctaccgtcctggaaagtagttctaattcaaataatcttttacttcattttggaggactttatattct

SEQ ID NO: 32171 - DNA, 239 bp, Glycine max
  Clone ID: 700894472H1
caaggaaacttgatgagaccactccagtgcctgccacaaacggtaactgagaaaagtgtggatcatgtggtggtaccacttatccgtcgccaccgccaccgttactaccaccaccgtcgccaccaccgccttcaccaaagaaaacaccaccctctcagtattgtccgccaccaccaccgtcatcgttcatatacatcacggggccgccggggaacttgtatccggtcgacgagaatttc

SEQ ID NO: 32172 - DNA, 244 bp, Glycine max
  Clone ID: 700894473H1
ccgaaagttagagtaaaacttaacataaaggaaccaagatttgggtggtccggtccgggcacacacatgcgagcattggaacgatacaagccatcaatgctaatggaaagctccgaatatacacgccagagggatcaaaagcatggatgttggacccttcagaagtggaggtggtggaagagaaggggttctgcattggagattgggttaaggtcaaagcattagtttcacccccacccaccat

SEQ ID NO: 32173 - DNA, 236 bp, Glycine max
  Clone ID: 700894474H1
tgcttgtgcacaggttatgtatgcctttgtaatgcgtcctgagagcttgccaaaatcctatcaagacttcattcaaaagactgggccagttgcagagcctgtatacaaggctgtaagggatagctgtagaggtcattcagttgatgttgcttcactacatgcttatttatctcgtgtaggaaagatcgactatgcaaagttggaagaatttccctccataattccgtgttccccca

SEQ ID NO: 32174 - DNA, 128 bp, Glycine max
  Clone ID: 700894475H1
ctcgagccgaatcggctcgaggtcaagaccgacaactcatgttagcgaattaatttactcactatactaactcctaactccaacttcagtaaaatcccccggggtttcgatggatcttgatcccaatt

SEQ ID NO: 32175 - DNA, 243 bp, Glycine max
  Clone ID: 700894477H1
atggaattgaaatacgcattgcaagaatctttaacacatatggaccacgcatgaatattgatgatgggcgtgttgtcagcaacttcattgctcaagcactgcggggggaaccattgacagtccaatgtccgggaacacaaactcgaagtttctgttatgtctctgacctggttgatggccttatccgtctcatggaaggatcaaacaccggaccaatcaaccttggaaacccaggtgaattta

SEQ ID NO: 32176 - DNA, 184 bp, Glycine max
  Clone ID: 700894480H1
catgactggagcgacgagcactgcatccagatcttgaagaactgcaggtatgcaataccatagactacaggctaactcataatcgtggatcacgatcttcgatccgatagcaaccgaatcttcagagatcgttggcatcgcatccgagatgatgcttctcgatcataacgccggtagcaaagag

SEQ ID NO: 32177 - DNA, 216 bp, Glycine max
  Clone ID: 700894484H1
aatcgtcccaacggcaatagcaacagcattaataataatccctcccttggtcagctggcttcacattacatagcggttaagtttaaaaggctttattcatctcttacaggacgaaagttgtatgtgtcgccggtgaaggggttggagcctggtagtgttgatgcatcacttaaatacgccaaagaaattttgaagtggagtgaagagagaccaaac

SEQ ID NO: 32178 - DNA, 205 bp, Glycine max
  Clone ID: 700894485H1
gggaaaaatcaaatcaacatgctgagagtgggcgcaaagagggttttggaaacgacgttgtttggggttagggttccggcgaggctgtaccacgagagggttgtggatcactacgacaacccccggaacgttggatcgtttgacaagaacgacccgagcgtggggacgggtttggtgggggccccggcgtgcggcgatgtgatga

SEQ ID NO: 32179 - DNA, 206 bp, Glycine max
  Clone ID: 700894486H1
atattttgatgcttgtaggggatgtgccatgggaaatgttcattgagacttgcaaaaggctgaaaattatgaagggttctgatgccattggtttagctcccagggccatggaaaagtctaaaagcaggatttagggtatcctggatttcctcttttgtctaatcaagtgtttattgttggatcctccgaattgggaaaaccaaagg

SEQ ID NO: 32180 - DNA, 236 bp, Glycine max
  Clone ID: 700894487H1
attgaagctgtcaggatgtccaaaaaagctggatggggtgtcatggccagtcacagaagtggagagactgaggataccttcattgctgacctttctgttggtttggctacgggtcaaattaagactggagctccatgcaggtctgagcgtcttgctaaatataaccagctcttgagaattgagaggactttggctctgaaccagtgtacgccggagctaacttccgtacccccgtt

SEQ ID NO: 32181 - DNA, 238 bp, Glycine max
  Clone ID: 700894488H1
gtcaaggttaccaccagggcagctggtcggaatggacaatataggaacatgttgaactctagaggcattcagaagaggagaagttctcttaggaaaaggaagcccgtagtccttcaatggtgagtatacgcagaaatggggcagtagcttctgatttaacaggtggtaggaaaaacaatagccaattgcctgttgtgacctctagcaggaaacttaggagtatggccaatgatagcac

SEQ ID NO: 32182 - DNA, 238 bp, Glycine max
  Clone ID: 700894489H1
tagaaagaaaaaaacttaaatcaaaatacttaatagcatggcgatacatttatacaaaacttctaccccaagcacacgcaatggagccgtagacagtcaagtaaaatccaatccacgagatcatttgatctatggacagcatcgttgtggtaaaggccgtaatgccagaggaatcattaccgcaggcatagagggggaggtcataagcgtctataccgtaaaattgattttcgacgga

SEQ ID NO: 32183 - DNA, 184 bp, Glycine max
  Clone ID: 700894490H1
tttcgatgctcagtcatctcttttaccattctcttctctcttgctcttgcaggagagagccatgtccatgcatcgctacctgaggaagattattgggaagctgtttggccaaacactcccattcccactgcactgcgagagcttctaaagcctctccctgcaggtgtagaaatcgatgcactcc

SEQ ID NO: 32184 - DNA, 236 bp, Glycine max
  Clone ID: 700894491H1
ggcttcctctgcaattacagctgttgccatctctacgccgagttccgggcagaagaatggatcaggaggttgttttcttagtggaaggaatttgagggtgaaaaaggagagagcagcaattggaggacgatcgatgggcactacagtgtgcgcagttgctgagcctgacagacctctatggttcccaggcagcacccctcctccatggcttgatggcactctacctggagacttcg

SEQ ID NO: 32185 - DNA, 240 bp, Glycine max
  Clone ID: 700894492H1
aacaacaacaaaaatcaagccaatgtttgtgggttttggtttcatttcattaagatgatctgtttatctcttttcttctttttaaaatttaaagtctttgtattttgtatgtaaagatgtaaaattatgattattaggtggtgcatgtgtcgcgtcatgggccaatgttatcctctgcttttaagttggaagaggcccaactcatgtgtgatgtacggctgtgattgtgtaatttaattt

SEQ ID NO: 32186 - DNA, 242 bp, Glycine max
  Clone ID: 700894494H1
gcagtgaagacactacagaacacaacacaaacacagagaaagagagtgaataaatccagcattgttctgttctctgcaacattctccactctcaaccatggcttcaaagcttttactcatcactgtcttcgtttttgatttgattgcttttggacttgccgtggctgctgagcagagaagaagcaccgctagtgttgtgacggacaatgaaaagaattataattactgtgtctataactctg

SEQ ID NO: 32187 - DNA, 248 bp, Glycine max
  Clone ID: 700894496H1
acacaacaaaaaaagacaacacagagagaagcgtcttaataaacgctcttctctgaaaaacctgatttcttctcttcttctcttctctttcgtttcgatcttcgatctctgaaaatgagagagtgcatttcaatccacatcggtcaggccggtattcaggtcggaaacgcctgctgggagctctactgcctcgaacacggcattcagcctgatgggcagatgccaagtgataagactgttggtggagg

SEQ ID NO: 32188 - DNA, 252 bp, Glycine max
  Clone ID: 700894503H1
gctcctctgattcattcacccagttttttttttctgtcctcttttcctctcagaggagcctctgagtctgctcaggtgttccttgtgaagagatccttttgtttttgaggtgtgaagggaaagaaaaaaaaaaaaggtgaatcagtgtggttatcagcagaagaatgctttgacaagctgtgaggagatgaggatggaatcagtggtgtgccctaaaccacgaagattgggcctgttgaccactcaaccttt

SEQ ID NO: 32189 - DNA, 245 bp, Glycine max
  Clone ID: 700894457H1
gtacaaagcacacgctccacattgtgttttccggtgaatattccggcaactgcatgcaccggtgaacgacgccggcaatggacgagtcacagagaatttgcatcggcttaatgcgtagtttcgctcgccggagatcggtcgaggaccggtcatcttcccggcggcgacgctccatcttctccggcgcgggcatttcggaatctgtggacgttgacgactttgccgacgtctttggtggcacaccg

SEQ ID NO: 32190 - DNA, 251 bp, Glycine max
  Clone ID: 700894504H1
tcggccagaacctcgacggtcgtaatataaccgtgaacgaggctcaatcccgtggaaaaggtggcggcggcggcggcggcggctacggaggaggtggtggtggttacggtggcggcggaggttacagccgcggtggaggaggatatggtggcggaggaggccgccgtgaaggtggttataaccgcaacggtggtggaggaggatatggtggcggtggcggcggatatggaggtggtggagttatggtggcg

SEQ ID NO: 32191 - DNA, 77 bp, Glycine max
  Clone ID: 700894417H1
gtgactttgttgagaagaatcaacggtacaacatctctgaggatacctggcaacaggttctagctttcagctgggga

SEQ ID NO: 32192 - DNA, 101 bp, Glycine max
  Clone ID: 700894418H1
ctttcttcctcttcctcagtagtgcgattttcgattctcttctctgcaactatgcctaaccctaaggtcttcttcgacatgaccatcggcggtcaacctgc

SEQ ID NO: 32193 - DNA, 238 bp, Glycine max
  Clone ID: 700894419H1
ggaactgggaaaacagcaactttctgctctggaattctgcagcaacttgactatcgtgtgactgaatgccaagccttggttttagcaccaactagggagcttgctcagcaaattgaaaaggttatgcgggcactcggagattatcttggtgtgaaggtgcacgcatgtgtgagaggtaccagtgttcgtgaagaccaacgcatatctatcaagtggtgttcctgatgttggtggtact

SEQ ID NO: 32194 - DNA, 242 bp, Glycine max
  Clone ID: 700894420H1
cgagtgttgaacagagaagaagggagaagccaatcatgggttgcacttcactgccatcttctattcagatgtgatctgctacacactccagctacagtgaaaaactccgcaaccctcacaagaagtctcaaatagagatacctgcatctagatgagcggctctcacaacagttacttgggctttttcttctccatgcaaagctcttcacaaatcagtacctttggctgctccacttgcaatt

SEQ ID NO: 32195 - DNA, 241 bp, Glycine max
  Clone ID: 700894422H1
tgtaataagagtgtcggagatacagaaatttctggacataacaggggtccaaacttacattataaacagtgccaagattgtgttcttgaatgagaggcctcaacctaggcctggcaaaggagttaccaacacctgccaagtctgtgagcgcaccttctcgattcattcagcttctgttcccttggttgtcagatagtaggaacctccaagaagttccggaagaagaaaatgttagctgaga

SEQ ID NO: 32196 - DNA, 250 bp, Glycine max
  Clone ID: 700894425H1
tgtctggaaggcggttatcatgttttagacgaatcaactcattacagcagtgatcttcgcccaactgcgaaacagctgtggaagtccagtattggagttcttgaactgggtatattgagtgctcatggtttgatgccgatgaaaacaaaagatggtaaggggacaactgatgcttattgtgtagcgaaatatgggcagaagtgggtgcggacaaggacaatcattgacagctttgcaccccggtggatga

SEQ ID NO: 32197 - DNA, 238 bp, Glycine max
  Clone ID: 700894426H1
tttgatcgctagataggagctccacccgaagtggtggcgcgtatggctgcggctaagcgcgagtttgaggcacggcaacgatcttcagatggttccaaggaaacttcagaagaccctgaacttgaccacttcttggcaggatactatggcgtgcttgtgaagtatagtgatgaattagcgcggcgtattcacgaggctatggatttcatgcgaaggatacatcctcagctagatatgc

SEQ ID NO: 32198 - DNA, 150 bp, Glycine max
  Clone ID: 700894427H1
acggcatcccgttgttgcatccagggctcgtccctggtggataatccacagttctgaagataggtgatgatctcttgaatcacaatcttggatgcaaacctcagtagttacgacctgcctgtgcgatctaacatgggaaccgttcggacg

SEQ ID NO: 32199 - DNA, 253 bp, Glycine max
  Clone ID: 700894428H1
tctccacccaagcagggatgtagctgttcttgacttctcatacaagtttgataagaatatggtcaacgccaaacttcaccttctagctgtccctaaatagtttccttgggctaaaactgtatctgctgaagaattttcccctcaatggaaaatcacttttcttgaccacctttaaagcttcaagaagtggttagaggagttagaccccttccactgcttgaactggcaaacttattcaatagctaccatttaa

SEQ ID NO: 32200 - DNA, 254 bp, Glycine max
  unsure (1)..(254): unsure at all n locations
  Clone ID: 700894430H1
ggaaaatggggagctgttcgtggcttgtcatgtgtgaggatttcctagttgccgancgtgttatgcgtgcttcaggagtgtattgaatctgagatgtccttaatgcaacactcgagtataagttctacggacgttgtcctagagtagctcgagacgtagaggacaactttgatgcagatgattttgatgatgcgttgccggttaagaatcatcgtgacgatctagatcggaaccccaatgttagtcatattggc

SEQ ID NO: 32201 - DNA, 256 bp, Glycine max
  Clone ID: 700894431H1
tgagcccatctcctggttttcagatgatgcagtcaaacgaggtgcagcagtttgggcatattgactcaaatagtacaaagtcatttgctgttgtaaatacttcaacatctagccttccagatttgaacacttctgcttctccacctattttgtttcatcagcctttcacagatcagcagcaagtacaattacgtgcacagatcttcgtatatggagctttgattcaaggcacagtaccggatgaggcttatatgat

SEQ ID NO: 32202 - DNA, 246 bp, Glycine max
  Clone ID: 700894432H1
gccgttgactggcaagctgacataacgaaatgctatccttatcttgctcaactgcaggtatgcaataccagagacgacaggctaagtcataatcgtggatcacgttcttcgacccgaatgcaacgaactcttcacagacgttggcatcgcatccgacatgatgcttctcgatcacaacgccggtggcaaagagaggaccgaatagaactggaactggctgtacaacgagacggtttcgcgcgttac

SEQ ID NO: 32203 - DNA, 101 bp, Glycine max
  Clone ID: 700894433H1
tggagctggtgataagaaagcaattgaagaaagaagtgagcagattagatcagcaattgaaaataagcacttcagataatgacaaggaaaagttacaggaa

SEQ ID NO: 32204 - DNA, 245 bp, Glycine max
  Clone ID: 700894435H1
cacggatcaacatgacttgtgttaatcatgaaactggagtggttgaaccaaagaaatttggtcttcttgcaaattggcaaagagagtacaccatggaggacatactgacccagctgaagaaggaaatggccgctcctcataaccggaagcttgtccaaccaccagaaggtacctacttttagcacccaagatggtataaatgttggatcgcattgcatatttggcggaatcaaaaaatagtgggg

SEQ ID NO: 32205 - DNA, 241 bp, Glycine max
  Clone ID: 700894438H1
agcggacatactagaccgttatggtaaaccactatccttgtcgcaaatcgtggagaacatagaagacgcaccctccccagatgcctctcttctccagagagtcctgagagtgatggtgcgcagaaagatcttcagtgcacaagaatcagagacaggagaaaccctcttcggcttgacacgagcctcgaagtggatccttcgcgacacgaaaatgaccctagcacccatgttgctgctggag

SEQ ID NO: 32206 - DNA, 245 bp, Glycine max
  Clone ID: 700894439H1
cttaacaacagcacaaagcgggttactgtctgttcaagctaccatctctctctctctttcttagtgcctccttgccagaagttaaaatggcccaagaaactttcctattcacatctgaatcagtgaacgaggggcaccctgacaagctctgtgaccagatctccgatgctgtgctcgatgcatgcttggagcaggaccctgacagcaaggttgcctgtgaaacctgcaccaagaccaacatggtg

SEQ ID NO: 32207 - DNA, 245 bp, Glycine max
  Clone ID: 700894440H1
gagcggagagactcatcgctacgacctgtcgtctattcgcgctgtggtcaccggcgcggcacccttaggaggggaacttcaagaagccgttaaggctaggctaccacacgctacttttggacagggatatgggatgacagaagcaggaccacttgccattagcatggcatttgcaaaagtaccctctaagattaaaccaggtgcatgcggaaccgttgtgagaaacgccgagatgaaaatcgtgg

SEQ ID NO: 32208 - DNA, 241 bp, Glycine max
  Clone ID: 700894442H1
tgcttgtgcacaggttatgtatgcctttgtaatgcgtcctgagagcttgccaaaatcctatcaagacttcattcagaagactgggccagttgcagagcctgtatacaaggctgtaagggatagctgtagaggtcattcagttgatgttgcttcactacatgcttatttatctcgtgtaggaaagatcgactatgcaaagttggaagaatgtccctccataattccgtgttccctcattcat

SEQ ID NO: 32209 - DNA, 88 bp, Glycine max
  Clone ID: 700894443H1
cagaactcaagcaaccaatttcaaatccaatcatggggagctcaaccttctgtgccttcttcctcctgtgtgcaatcttggccgtcca

SEQ ID NO: 32210 - DNA, 246 bp, Glycine max
  Clone ID: 700894444H1
cagtggagtaaaagtcacagtgactccagatagacttcagtttacagagagtagtaataaacttggctaccaagttattttttcctcaacgctgacctctttgaagtgcgaccgtttggatctattacttggagtaacggcaaatatatggttcgaagtccatttgtattaactaaatagtgaaattacaagcagtgatgaataagttcaagttaagttcttaacaaaaaaaaaaatgggcggccg

SEQ ID NO: 32211 - DNA, 247 bp, Glycine max
  Clone ID: 700894447H1
ttccatcttttgtccctgaagggtgtgcggtgaatttggccaagccaagtggccatgaaatcattggagcagtgacttgtagttccaaagaggctgatttcagggccaggggattggccaatttgcaattcagttggatcctttcttcaattctgatatttgcaggaatcatttgcttgaaactttctaggaaatgtacaattacaacaaaccggttggagtatgagagaattcaaactaaaggtgc

SEQ ID NO: 32212 - DNA, 258 bp, Glycine max
  Clone ID: 700894448H1
tgggacagacagtggcaatgcatggaggggacagtatgaagataactcagctgcctcctttaataggtaatgatgtcaaatgctgacgcttaagagagatcaacttgtgcatttcaagtggtggtggagaaccaacttcttaacctaacaaaacttctggttggtgcttctcaaatggaaagtacacattcattacaaatgatgcagtttattggggattgtattagaggtggactggacccataactgcatcctagt

SEQ ID NO: 32213 - DNA, 91 bp, Glycine max
  Clone ID: 700894449H1
tgcaaaggttgctttggacattcataatctgcgtgaagagaatccagataagttttataaccagtttatgaataaagttctatatgcaaga

SEQ ID NO: 32214 - DNA, 210 bp, Glycine max
  Clone ID: 700894450H1
tgaagagtgttagagaattgatctacaagaggggctatggaaaagttaacaagcagagaattgctttgacagacaaccctataatggacaagcttttggggaagcatgggatcatttgcgttgaagatctgatccatgagatcatgactgttggactcacttcaagggggccaaaaattttcctggggcttaaaaaactcaaaccccccg

SEQ ID NO: 32215 - DNA, 239 bp, Glycine max
  Clone ID: 700894451H1
ccttttctcacttggagctcccaattgaaacccaatttcgtaatccctccacactttctcgttcggaaaactcgcgaattggaaagacatcgacggctccgcgtgatacgttctcttcctgtctggttatcaatgttggctattagtgcaattgcatctttgcccgtattaccaccagtcagaagaggtggccactgcattgaacagtttgtttcctccacattgagctttccaagacg

SEQ ID NO: 32216 - DNA, 197 bp, Glycine max
  Clone ID: 700894452H1
agaagtgcaagtttcattgaagggatctccaaatcgtcatatgtgaagcatgcatctgacattaaaggttcctctgttaaggttctaaattgccatgagtctgctatatacatcttagcacctttgagatatgcaactgtctatggatgttcagatgcaacaatagttataggagcagttggcaaggctgtgaaagt

SEQ ID NO: 32217 - DNA, 239 bp, Glycine max
  Clone ID: 700894453H1
gccgttgtaggtatgaaagatgaagctgcaggagaaattccagttgcatttgttgtaaggtcaaatggttctgagattaccgaggatgaaataaagacatacatttcacaacaggtggtattttacaagagaataggtagagttttcttcacggactctattcctaaagcaccccccggcaaaattctgcgaaaggtattaactgcaagacttaacgaaggtttggtggtggccaatta

SEQ ID NO: 32218 - DNA, 223 bp, Glycine max
  Clone ID: 700894454H1
agcataaccatgtggcggagactcttctcttcttcaaacctcaaagccctacacacaacactctctccttctcgtccccgactcgccgcccagactctcctcgcccgccacttcaccgcccaatcaggtgcttcttccctcaaaaagagggttgaagatgtcgtgccaattgctaccggccacgagcgtgaggagattcaggccgatctcgagggaagggata

SEQ ID NO: 32219 - DNA, 262 bp, Glycine max
  Clone ID: 700894416H1
ctaaccctaattagtttttcgagattactcaatagcaaaaccccaggtgagggtgagggaagatcagagatgtggtggagatcagcatcattcatcatggacaggcagcagcagcagaaccagggggactcctcaaaccctaatatctctgcctactatgagaccagagcggcgcaccacggcgtggtcaccagcgactggctggcccaggctcaggccgctattggccccgaacctcaacctcaacctcaactcagccccg

SEQ ID NO: 32220 - DNA, 102 bp, Glycine max
  Clone ID: 700894456H1
catgggcccattgcagaaggcgaatgagaaatcagaaccggagcgggaagtgggcctggaactgggccggaccaaatacaagtacacaacagtgactcacgg

SEQ ID NO: 32221 - DNA, 249 bp, Glycine max
  Clone ID: 700894377H1
atgcgattcgtattcggtgatctggtccgtttcctagacgaaatggtgtaagaattgtaagctccatgattgattgatgggagcagtaaaccatataatttaatttaatttgtgtccacatgagaacgtcgtgacctgcattttctatctcgcaacaccgcgataatggtataaaatagtttcagatacgttgcgttgattgattggtatgaagtgattgactttttttcttcttctattctcacacat

SEQ ID NO: 32222 - DNA, 152 bp, Glycine max
  Clone ID: 700894378H1
cgcttctggctcccgctgtgtgctctgcttcacactactgtatctcatccactccctatcgctgcaatttgggataccaaagatacccgtagatcatcagagaaaaattcaattgaagaagaggttgaaacttaaactgctgaaccgcaagg

SEQ ID NO: 32223 - DNA, 186 bp, Glycine max
  Clone ID: 700894379H1
ataacttttggttgctgttatcagtcgggaaattgtatatttcaagttggttttgtttccatcctctaaaaagctttgaagagaacaagctcattttccctcaacccatttatgcacgagtttcatgctggaacttcatctgtctttaaaatatgctcttctcaaatgcatcatttttgctcctgc

SEQ ID NO: 32224 - DNA, 256 bp, Glycine max
  Clone ID: 700894380H1
gacttctgttgatgaaagttcagactagtttggcacagttcagattccatcaccttggaagcctgttttggaggattcttcaacactacaaatattttttgattactatgccattacaaaaccccctctttcaaaggaggtctgtacatgcgtttgtttctatgattgtatttttaatgtttagaccttgaagttcactaattaaccactaaaatttgaatcctttttagttcttgggaaattgtctactacttac

SEQ ID NO: 32225 - DNA, 134 bp, Glycine max
  Clone ID: 700894381H1
cagagatcggaacgtggaactgcggaaaccggaatatctcacttctcagatcagatcaatccgacgtcgttgcagttataatggctccattcagcggcgatgagacggcaccgtttttcggcttccttggagcc

SEQ ID NO: 32226 - DNA, 164 bp, Glycine max
  Clone ID: 700894383H1
ccaatatcctcttgtaaaccaccaccccctcccaaaataaaagaagtggtgaagatgtattgataataaaaataccctgtggtatgtaatgtatcatatgtactatgtaatggcttgaagatgtgagaatgtaaaataagaagcacagtgattggagtggttta

SEQ ID NO: 32227 - DNA, 225 bp, Glycine max
  Clone ID: 700894385H1
aggcgattcgtattcggtgagctggtccgtttcctagacgaaatggtgtaagaattgaaagcatgatgattgattgatgggagcagcgaaccatataatttaatttaatttgtgtccacatgagaacgtcgtgacctgcattttctatctcgcaacaccgcgataatggtataaaatagtttcagatacgttgcgttgattgattggtatgaagtgattgacttt

SEQ ID NO: 32228 - DNA, 233 bp, Glycine max
  Clone ID: 700894386H1
tagagattaaagagaggaaggggagggggctgacacattgttaccttgtaatagggttttttcatttattctttgattatattttctgtgggttttagtgttattctctttccagtttcatgtattataagaaagaggcattgaatgataaattattccctcttcaaaatgggggatcctcagtctcaagaaattacttggtcatatttttaggtatgggtcttgttctgttt

SEQ ID NO: 32229 - DNA, 234 bp, Glycine max
  Clone ID: 700894387H1
cacaaggcagaaagcaagctcatcctagagttttaaaaatggcagcagcctcctccatggctctctcttccccatccttggctggcaaggccgtgaagctgggcccatcagcccccgaagtcgggagggtcagcatgaggaagaccgtcaccaagcaggcctcctccggaagcccatggtacggcccagaccgcgtcaagtacttgggcccattctctggcgagcccccgtcct

SEQ ID NO: 32230 - DNA, 236 bp, Glycine max
  Clone ID: 700894388H1
gcgcaacttcattcattcaggctaaatggggaggatcaaacctcaggctctgctacagcaaagcaaaaggaagaaggggccttctcgcataagtgccaccattgttacattctatgcattgattcttgtcatgcttgtgtttatcctgtttgttacatacagacattggtccaacaggacaagacttcaaccagagagctatatatcagtctctgaggatgaatatacatctgtgg

SEQ ID NO: 32231 - DNA, 142 bp, Glycine max
  Clone ID: 700894390H1
ctgggactgattatagtgaaagggccatcagccttgcccaaagccttgctaatcgtgatggattttccaacgtcaaatttttggttgatgatgtcctcgagacaaagttggaacaagagtttcgacttgtcatggataaagg

SEQ ID NO: 32232 - DNA, 245 bp, Glycine max
  Clone ID: 700894391H1
ggctgttcttacatccttgaagcatttcaaccctaatgaccttgatgcatttgccatggtctacaatcattttgatatgaaacatgagacggcagcccttttagagtcacgtgcagagcagtcatgtgagcagtggtttcgctgctacaacaaggaccagaatgaagacctgttggattccatgcgctacttcattgaagctgctgaagttcactcttcgatcgatgctggcaacaaaacacgta

SEQ ID NO: 32233 - DNA, 250 bp, Glycine max
  Clone ID: 700894392H1
agcgaggttcgcacgtttgacccatacgacgctgactttttcttcgtccccgtttacgtgtcttgcaacttcagcaccgtgaatggcttccccgcgattggccacgcgcgctccctcatcgcgtccgcggtaaacctcatctcctcggagtaccccttctggaaccgaagcagaggctccgaccacgtcttcgtcgcgtcgcacgatttcggctcgtgtttccacaccctggaggaaaaagcgatggctg

SEQ ID NO: 32234 - DNA, 182 bp, Glycine max
  Clone ID: 700894394H1
tgtactcaatttccgaggcataagcatactgggtctgagccatgacagaaaagaccatgcaatcaaagtgaagaatactttgatattcaatgcatttgtcctcggccaaatctttaatgaatttaatgctcaaaagccagatgaattccacatatcaaagaggtcccaagaaactacctctt

SEQ ID NO: 32235 - DNA, 252 bp, Glycine max
  Clone ID: 700894395H1
atcgcaatagaaatggaaagtaacgcaccagtactagcagagaaagtgtggagcatggtacgtgtgctgttgttcatgcttcgaaaaggcatatcaaaggggaagctaatgatggatctcaacatgatgctcaaacgccgcggcaagctcgccggcaaagccattgccatccaattgtccacaaccacaaccaccgtgggtcccacaagtcgcaacttcggttctctgctccaagggagtacgagttcagct

SEQ ID NO: 32236 - DNA, 253 bp, Glycine max
  Clone ID: 700894396H1
aacaacggcaagaactacaagttcgcttacatctgggtcggaaactccgaaacccaatgcccggggcaatgcgcttggccattccaccaacccatttataggccccagagtccaacctttgctattcccatcgtatttaattggctaatatgtatggtcataaacctcgctagcctccttgccggaaccgccaccaaaccattcggaaacggttacttccagggtaccgcggaagctccgctcgaaactgcgt

SEQ ID NO: 32237 - DNA, 75 bp, Glycine max
  Clone ID: 700894401H1
ggttataaggaagggaagttgaagtggcttgagagatttgcctacgcaaacacaactgtctaccccttcacctca

SEQ ID NO: 32238 - DNA, 249 bp, Glycine max
  Clone ID: 700894402H1
atccctttagcttaattttttggctacgttatggggatccttagcgatcatcataatcagaagcatcaccaccaccaccaacaacaagagaagaaggaggatctgaaggacattccaaaagggtgtttggccatcttggtagggcaaggggaggagcaacagaggtttgtgatccctgtgatgtacatgaaccacccattgttcatgcagttgctgaaaaaacctgaagaggaatacgggttcgcccag

SEQ ID NO: 32239 - DNA, 119 bp, Glycine max
  Clone ID: 700894403H1
ttttatttggcattgaaaagggtccagaagtactcaacgctgttagaccggctggatcggcacttgttgatgactggcactgcctgaaaaccatggtgaggacttttgagacacattgt

SEQ ID NO: 32240 - DNA, 248 bp, Glycine max
  Clone ID: 700894404H1
atgatttgctgctgtaacaaaatggatgctactacacccaagtattccaaggccaggtatgatgaaattgtgaaggaagtctcttcctacttgaagaaagtaggatacaaccctgacaagattccttttgttcctatctctggttttgagggagacaacatgattgagaggtccacaaaccttgactggtacaagggtccaactctgcttgatgcactctagctgattagtgagcccaagaggccctc

SEQ ID NO: 32241 - DNA, 248 bp, Glycine max
  Clone ID: 700894407H1
gcaaaatttaaaatttactggcagccaacctatcaagtgattcagccaatcaacggtgacccattcattggaagcctggaaaccccagttacatccagccctttgatcgcatggtacttgtccaacctgcccgcatacagaaccgcagtgagcccactactaagagggatcgaggtgggcctggtccacggataccttctggtgggcccattcgtgaaggccgggcctcttaggaacaccgagatcgc

SEQ ID NO: 32242 - DNA, 234 bp, Glycine max
  Clone ID: 700894408H1
ggcgtcgtcacaaccagagatggagcatccaaagaaggtttttggttgggctgctcgggactcatctgggcttctctccccattcaacttctccagaagagaaacgggggagaaagatttggtattcaaagtgcaatactgtggaatatgccactcagatctacatatgttaaagaacgagtggggcaacacaacctatcctctggttcctgggcacgagattgctggtgtggt

SEQ ID NO: 32243 - DNA, 254 bp, Glycine max
  Clone ID: 700894409H1
caacagcacaaagcgggttactgtctgttcaagctaccatctctctctctctttcttagtgcctccttgccagaagttaaaatggcccaagaaactttcctattcacatctgaatcagtgaacgaggggcaccctgacaagctctgtgaccagatctccgatgctgtgctcgatgcatgcttggagcaggaccctgacagcaaggttgcctgtgaaacctgcaccaagaccaacatggtgatggttttcggaga

SEQ ID NO: 32244 - DNA, 250 bp, Glycine max
  Clone ID: 700894410H1
tgggcatctaattaatgtaactgaggtcatgctcagtgaagttgtattaaaagggagacatcaagagcaggagcacaatggaggaagatctaatagtggactaaagtttccaagggtaagcatatatagaggtcaccctgtagttagaagagaaaaatgttccatggaagctgggaagctaataaggttgcctgattcaatagaggaactaaaaactattgcaggtaacatttcaagttcccatcaattc

SEQ ID NO: 32245 - DNA, 222 bp, Glycine max
  Clone ID: 700894411H1
tttagttgcctttaaaccttatttccaaattggaggcattgtccaccgttatctaggcggtcaaacccttgttatggaagatgttcaagaaattgctacaaatatttttggaaggatgtccctcttaagagattattccctgagggattacgatggattaattggagcttggagagacaggatcataatgtgcacagggacatatgggcctactcctgacct

SEQ ID NO: 32246 - DNA, 250 bp, Glycine max
  Clone ID: 700894413H1
acttctggtatcgccaccgccggttgcttaacgaagcaatcaataccttacataatgctcgagagagaagactgtttcgcttcgctgtggcagaaatacacctacgatcgtctccaccttcatttgaggaagcaagtttgcgagttaccgcacttaccgtttcccaagtcttaccctcactacgtgcctcggaagcagttcatagactacttgggaaactacgttaaccactttgagatcaagcctctgt

SEQ ID NO: 32247 - DNA, 244 bp, Glycine max
  Clone ID: 700894375H1
cgttcgttcactttcactttaccaactcctaacaatttctctctgtttccttcttcaccgcatcaatggacttggacggcgttctcctcggcatgtgcaaccctctcctcgacatctctgccgtcgtcgacgacgctttcttgcaaaaatacggtatcaagttgaacgatgcgattctcgctgaggataagcacaaacctatgtatgaagaattggctaacaatcctaatgtggagtacattgc

SEQ ID NO: 32248 - DNA, 264 bp, Glycine max
  Clone ID: 700894414H1
cggctcgagggctaccactcgcccagttcgtccatggtttcgcttagcctcaattcgctctagcccacccccacccccaccccctgcacctgcccctgcccaagagccacgcctgccagcatttagaactgcttcagcaccatcatcaccacagattcagccaactcaaccagctccccagcctcaagaacacccttcttctcaacataacagattctcctcttcttcactccctacttccccagagaataaaaacattacccg

SEQ ID NO: 32249 - DNA, 255 bp, Glycine max
  Clone ID: 700894415H1
ctcttcagacaccaccactgaggagtttctcaatgagaaccaagttgaccaccccgtgtggctcattgccactgtggggttgcaagaatcgatcatcaactccatcacggtttgcaagtacaagaagaatgaagggttggttgaaggaaccgagtgttcggtgtgtttgaacgagtttcaagaagaggagacattacgactcttgccaaagtgcaaccatgcttttcacgttccttgtattgacacttggttgag

SEQ ID NO: 32250 - DNA, 246 bp, Glycine max
  Clone ID: 700894343H1
agaaaatatagatggtagctatatgttgcagttcttaaattcatgttatattgttgggttaagctttgaaattgaaatagtacatagtttgattattctacatttagcttcagatccaaatattaacaaaaacaaaacgataccctgttatttctgttaacttgtaggttagttgcatatgctctccaatctctgggtctggagaaaggatctgcaattgcaattgatatgccaatgaatgtcaag

SEQ ID NO: 32251 - DNA, 249 bp, Glycine max
  Clone ID: 700894344H1
ctcgcgtcttcgagtttcacagcgaagtcgtaggagggtttcaaaagatggagaacatgcagagcttctggcaattgggcgatgaactccgtggacactcaaaagcatcggaggatcacaaatggttaatggttgcttcgaaattggcggaacagacaagattgaagggggagcgtgtgaacaaccttgatctttcaaagggccccattgaaacaaggtcaagggataaatttgggttccaggaagaga

SEQ ID NO: 32252 - DNA, 251 bp, Glycine max
  Clone ID: 700894345H1
gaaatgaagtgtccctttgtccagcttgaagaacatcatgtccagtgagtggaggtgcactccttttattgcgatcactctcacacacttcttgaataattagctaactactgtgataaagatataaatgtcacctactagctatagtcatttatttttgtccatggaagttcaaactcactccctctcccccacctttcatttccaccttctctcccaatggaccaccgacaccaaccgaccttctctcg

SEQ ID NO: 32253 - DNA, 117 bp, Glycine max
  Clone ID: 700894346H1
gtttgttgttgtaactcgttcttcttcttttgttgttctgtgtttgtgtttgtgttttctctcacctgaaaatgtcttgctgcggtggtaactgtggttgcggaagctcctgcaagt

SEQ ID NO: 32254 - DNA, 186 bp, Glycine max
  Clone ID: 700894347H1
gaaaagtatagaaaaagcttttccaagaattggcaaaaagagaagaagggagagagattcatgttcatattttccccttcgtgcccgtcaagtttctgattctctttttcaattcctttctctttcaggtgattttttctccacgataaagttgcgatttcgccggtgtcgttttgcggagatggt

SEQ ID NO: 32255 - DNA, 259 bp, Glycine max
  Clone ID: 700894348H1
tttctgatacatttcggcgtatactcataacatctcaggctgagattcttccctcattggacgacgaacaaattgtaaatataccatatagtggtgaatgcctaattcaagggaagaacaaaatctggattggcatatctcgtgctgtgggttccaagtgtgaaagatgctggaattattcagagcaggttggttcatttttggaccaccctaccctctgcagccgctgccacgatgttgttgctgttcagatgccccc

SEQ ID NO: 32256 - DNA, 235 bp, Glycine max
  Clone ID: 700894350H1
gcggcggcggcggcggaggaagctgctacagctgtggagagtctgggcattttgccagagattgcccatcaagtgctcgttgaatttactgttagggttgtttatgttttgcggattgttttaagtttttactttaatatgtcttagggattttaatggtttctgtccaaactatgggttcttatgagtagatgtgtgggatttttcttttttggttatttaaatgaagggtttc

SEQ ID NO: 32257 - DNA, 237 bp, Glycine max
  Clone ID: 700894351H1
ctctagcacacaaaacttgctatagcagtaagctataactcatttgaggctctgtgagaattgagaaatggctaaagatgttgaggttcaagagcaaggaggagagtactctgccaaagactaccatgaccctcctccagcacctttgttcgacccagaggagctcacacagtggtccttctatagagccctcatcgctgagttcatagcaacccttctcttcctttatgtcactgt

SEQ ID NO: 32258 - DNA, 234 bp, Glycine max
  Clone ID: 700894352H1
gaccattctctcagcctagctaataagatttgtgagagaaagggagaaagggtgtgagaatggagagcaaagaggaagatgtaagggttggagcaactaagttctcagaaaggcaaccaattggtacagcagctcagggtgacaaggactacaaagaaccacccccagcacctttgtttgagcctggtgagctaaagtcatggtccttctacagagctggaattgctgagtttg

SEQ ID NO: 32259 - DNA, 239 bp, Glycine max
  Clone ID: 700894353H1
gatcggtccaggttgggagaaccctcgcgagcttatagctgatgatgcctggttgaatggtgaattcattactactgttcaacaacgtggtgctgcaattatcaaagctagaaagctttcaagtgcactatcagctgctagtgctgcttgtgaccatattagagattgggttcttggaactcctcagggcacctgggtgtcaatgggagtatattctgatggttcctacaatgttccag

SEQ ID NO: 32260 - DNA, 238 bp, Glycine max
  Clone ID: 700894355H1
cagccaccgccataccaagaagaagaagaagaagaaagtggttgaagagtttggtggcaaaccagatattaaatggagactttatgttttcaaggctggtgaagtgctaaacgagcccctttatatacatcgccaaagttgttatctttttggaagggaaagaagggttgctgatatccctacagatcatccatcttgcagcaagcaacatgctgttattcaattccggcaagtcgaa

SEQ ID NO: 32261 - DNA, 177 bp, Glycine max
  Clone ID: 700894356H1
gcgcatccttccgtttctaccaccgactcaggggaaggaaagaaggaaggaaggtgtgaacaacaatcccagcacaaaacccatgagaaacgagttgttcgtcgttggaatcatgtattaactgatcctcactatctcactcgctatttggtctttgacagatgaagaaaggatgag

SEQ ID NO: 32262 - DNA, 243 bp, Glycine max
  Clone ID: 700894358H1
gttttcctgatattctctccctttttggtggggttcttttcagttttctcagcctttcttcaaactctttctctgcgtgatagatgtgtttctcctgatcttcagctctggattctgggcttggttgcaaaaaggtcattttttattggcttatgagggtgcaggttttcagcagataagtagcttagcttccttgttcataagccttgaaggtttttgatgctgtttttctgcactttttga

SEQ ID NO: 32263 - DNA, 244 bp, Glycine max
  Clone ID: 700894359H1
ttctggttcagtggagataaatgatgggaaaataatatctgtcgttgagggacatgctattcaggggaagcctaagcaagaagaagtaattgattatggagatgctgttatcatgcctggcttgattgatgtgcacgtacatcttaatgagcctggaagaactgagtgggaaggatttgatactggtaccagagctgctgctgctggtggtgtaaccacagtggttgacatgcctctaaactgt

SEQ ID NO: 32264 - DNA, 239 bp, Glycine max
  Clone ID: 700894360H1
gaaaaatttgcaaatgtcgaatttcctgagcaacactaatccggaacctaacaagtcctttgaggtgaatcagcctcccactgattccgtgtccagtctcagcttcagtcccaaagccaacttcctcgtcgccacttcttgggacaatcagggtcgttgttgggaggtagcacagaatggagttaatgttgccactgttcccaaggcttctataacgcacgatcatccggttttgtgct

SEQ ID NO: 32265 - DNA, 256 bp, Glycine max
  Clone ID: 700894361H1
caaccactcttaatttctctctgccttgctcatttacacacctctccaacctttcactttcagctttatttgaatccctctctctcctttccaaatggccagcgttgaggttgcacatcaaacaccaacaacagtgccagaaaatgaaacaaccgaggtaatcaagacccaggaaacaaccccggaaccagtaccagccactgaggctcctgcaacagaacaagcagcagctgaggttcctgctcaagaagaacaa

SEQ ID NO: 32266 - DNA, 118 bp, Glycine max
  Clone ID: 700894362H1
caactttttctacttaccttttctcttaatccaaatacgatggcagccatggcaaccacaaccctctcttcaaaccccaaactctcattcttcaacggaaagcccgtcacatattctt

SEQ ID NO: 32267 - DNA, 175 bp, Glycine max
  Clone ID: 700894363H1
ggggagttctagccgtggctcaagcagcggcagaggtctagttggcgatccatctgaaccaatcaaaggttacgccatgccccagagttggatttaatgctagttatcgttttcattgtcatggtctccgtagttaacaagttttatcagcatgttacattattactccattcta

SEQ ID NO: 32268 - DNA, 189 bp, Glycine max
  Clone ID: 700894364H1
attgcttttattgtattccccaactttgatgctccggcttgtgctgaacacagaaaactttaaccgaaaggctccttgaatcttgtagactaggtattaggacttaagggaatgtgagctctgccattgaaattgtatttaattggctaatatatttgtatccacagcaaagttgtgaccacctttgca

SEQ ID NO: 32269 - DNA, 165 bp, Glycine max
  Clone ID: 700894365H1
ctgggctgacaactgaggttaagtctgttgagatgcaccatgaggctctcacagaggctcttccaggtgacaatgttggatttaatgtgaagaatgttgcagtcaaggatctcaagcgtggttttgttgcatccaactccaaggacgaccctgccaaggaagctg

SEQ ID NO: 32270 - DNA, 238 bp, Glycine max
  Clone ID: 700894366H1
cttcaaattgctcggaccaggaccaggatattcatgtggccctgccaagattgttccatccactgccatcctcacagatgatcgcaggcgaaaaatgcaggcattgatgtcctggaatgtgacatgcacttactcacagtttcttgcctccaagaatccaagctgttgtgtttctttgtcatctttctacagtgacaaagtcacaggttgcccaccttgtgcttgtggttgccagaat

SEQ ID NO: 32271 - DNA, 232 bp, Glycine max
  Clone ID: 700894367H1
ctcaaagctctctgcttttttgtgacacagatcccttgctgggttcaagttcctcactttggattctctccctaatgggttcctctgatcgattgtttaaccggcaaagaagtcttcatgagatccttggtggtggtcaagttgcagatttaatactgtggaggcggaagaaccttactgtggggatattgttggtcacactagctgtttgggttgtgtttgaaagatctgg

SEQ ID NO: 32272 - DNA, 232 bp, Glycine max
  Clone ID: 700894368H1
ctttttctacttaccttttctcttaatccaaatacgatggcagacatggcaaccacaaccctctcttcaaaccccaaactctcattcttcaacggaaagcccgtcacatattcttcccgcgtcgcgcccaccaccaaattatcctcatccaaacaaggcacaatttccatgtccctaaccccacccccctacgacctccagtccttcaaattccagcccatcaaagaatcca

SEQ ID NO: 32273 - DNA, 230 bp, Glycine max
  Clone ID: 700894369H1
agaggctccattggatgttgacatcaagggtggtggaagggttgtggtgttgaacaccaagaatcttcccttggttggcgaggttggactaggggctgatcttgtgaggctggatggaagagccatgtgttcgcctggattctcttgtgattctgctttgcacgttacttatattgtcaggggtagtggccgggttcaggttgttggtgttgacggccgtagggttttgg

SEQ ID NO: 32274 - DNA, 235 bp, Glycine max
  Clone ID: 700894371H1
taatgatctatatttatcattcttagttctcataataattaagagttcttatatggtatactgtttatatttatagtcttgcttccatcaataatatcatcagcttgagttttgattatggttttggttcttaaccccttctgcatttgtgacatctactggaagattgaatggttcaagttcagtctcggaaacgtatgggaatccatgccttgcaaattctcaagactttgaa

SEQ ID NO: 32275 - DNA, 233 bp, Glycine max
  Clone ID: 700894372H1
gaagtgtgaggcttctggattttgctatgttaatgatatagtccttgcaatcttagaacttctcaaacaacatgagcgtgttctatatgtggacattgacatccaccatggagacggtgtggaggaagctttctacactactgacagagtcatgactgtttctttccataaatttggtgactattttcctggtactggggatgtacgtgatattggatatggaaaaggaaaat

SEQ ID NO: 32276 - DNA, 236 bp, Glycine max
  Clone ID: 700894340H1
ggctgctaatgacttaccatccatcaatgatgtgacttgttctgagctagttgaaattatatcaaagttaaaggatgaagatggacagcttgtgggtgtcagtacttcaaatctcttaattgcgaactctggcaatgatttacctgtcattgatcttacaagagtgtcacaggagcttgcttaccttgccagcgatgcagatcttgtcatcttagaagggatgggtcgtggaatag

SEQ ID NO: 32277 - DNA, 234 bp, Glycine max
  Clone ID: 700894373H1
attttggagtccaagtgtaggtattaaaagatttcacttggactccaaaatgttgagaattggttgaatcatgcacatatagatattattctattctgctgcaaaaggcttgtgaaactaagcagagcagcatccagactttttaacagctgagacatcatccctactgccaacattgatggtctgccccttgggcaagtttattgttttctctttttctttttcttttctttt

SEQ ID NO: 32278 - DNA, 242 bp, Glycine max
  Clone ID: 700894374H1
tgaacttgaagctctatacaaagaaaagagcaagactactcagaacccctttggcgcttcgttccacaacatgaagccacatgagatgatggagccattgatggtgcaaccggagcagcaatggagacctcccactcaatatgaacaaggtgcagccaaggagaacaataatagtgaaagaaaagaaagagaggaggaggaagaagaagaagatgatgatgaaaatgaagagggagatctag

SEQ ID NO: 32279 - DNA, 227 bp, Glycine max
  Clone ID: 700894306H1
aggcgattcgtattcggtgagctggtccgtttcctagacgaaatggtgtaagaattgaaagcatgatgattgattgatgggagcagcgaaccatataatttaatttaatttgtgtccacatgagaacgtcgtgacctgcattttctatctcgcaacaccgcgataatggtataaaatagtttcagatacgttgcgttgattgattggtatgaagtgattgacttttt

SEQ ID NO: 32280 - DNA, 207 bp, Glycine max
  Clone ID: 700894307H1
gtcagctttttcttgcttccgtagttcatatggcgtgtgttcaagtcatcacagtttttctctttgcattggctctagctaaaatttacccctcaacatgtcaagtggtgcagggaaaagtctcctgcgttgactgcactcacaactatgacttatctgatattaaggtttcggtgaggtgtgatggtgtgaaaaaactggctttgg

SEQ ID NO: 32281 - DNA, 152 bp, Glycine max
  Clone ID: 700894309H1
gagcatttgggagttaggttctgcacgctctgcttccagcgagtgttctttcttcgtttcaacaccttaatttgcacacgctgcttcttcggcttgagaaatggcacaagaaacctttctattcacatctgaatctgtaaacgagggtcacc

SEQ ID NO: 32282 - DNA, 249 bp, Glycine max
  Clone ID: 700894311H1
ggcagaaagcaagctcatcctagagttttaaaaatggcagcagcctcctccatggctctctcttccccatccttggctggcaaggccgtgaagctgggcccatcagcccccgaagtcgggagggtcagcatgaggaagaccgtcaccaagcaggcctcctccggaagcccatggtacggcccagaccgcgtcaagtacttgggcccattctctggcgagcccccgtcctacctcactggcgagttccca

SEQ ID NO: 32283 - DNA, 253 bp, Glycine max
  Clone ID: 700894312H1
agcgacaccgttttgccgtggaaggttaaaagcggaaaggcaagtcccgatgatattgtccacgtccacaacaacgtcgtgacagaggttcataatgataatgacgatgataacgagaacgcacattcaaccgttaactccgtttctgaaattgccaccagcgaaaccgacgctgttgaaggacaacgacatgttcatgttaatcacgttcaatacgaagttcgagtggcccccaaaccgcagtttcgaaact

SEQ ID NO: 32284 - DNA, 250 bp, Glycine max
  Clone ID: 700894313H1
gcctgttcggatcaaaacttggatgtggagaaagaattaatagagcaggaaatgaatttatcttcttcatatgaggagaaaaatgataatcaaaggcattcagaaggtgttattggagatgtgaaggaaaatagttcatacagtttctaccaggctgctgatggtcagcatctaattcttcatcctctgaacatgaagtgtttgcttcaccattatgggagctatgatatgcttcctcacagaataagtg

SEQ ID NO: 32285 - DNA, 176 bp, Glycine max
  Clone ID: 700894314H1
caggtcgccggcgagtggcgcttaccggagcagccgtgtggcggcgttgacggggctcggaaggttgggtgaggctgtgtcggaatgtgacgaggctgtgaggttggatcctagttatgggaaggctcatcagcgtttggcgtctcttaatccttaggttgggacaagttgataat

SEQ ID NO: 32286 - DNA, 153 bp, Glycine max
  Clone ID: 700894315H1
ctacgcacaggaccaagagctgggggtgatgcgtccactgttggaattggctcaaaatggaacagacagaggcaaaagaaaggctggacaattgctagagcgtatgagcaggctagttgagcaacagcaggaagttccaacacaaactgactc

SEQ ID NO: 32287 - DNA, 231 bp, Glycine max
  Clone ID: 700894316H1
gttttccatgcaaattgctatgagacaggggaaactgtggctataaagaaagtgcttcaagacaagaggtacaagaaccgggaattgcaaaccatgcgtcttctggatcaccccaatgttgtaactttgaagcattgcttcttttcaacaactgaaaaagacgagctttatcttaatttggtacttgagtatgttcctgagactgtccaccgagttatcaggcattacaac

SEQ ID NO: 32288 - DNA, 205 bp, Glycine max
  Clone ID: 700894317H1
ctcgccgaagagatcaaccgccgccagaccatcaccgtcctggccctcgacaatgccgccatgtcctccctcctcgacaagcacctctccctccccaccatcaaaaacgtcctctccctccacgtcctcgtcgactacttcggcgccaaaaagctccaccagatcaacaacagcaccaccctcgtctgctccatgttccaggcca

SEQ ID NO: 32289 - DNA, 240 bp, Glycine max
  Clone ID: 700894318H1
gacaggagtagttacatatcaggtttttggagatgatgaatggtcatttgggttctgtgagcaaggtactggggtttttagttgcccttctggaaagaatccaatgtatacatatcgtgaatccattgttttagggaaaacaaactgttccattttcaaggtaaatcaaatactaagagaactcagtagagagtggccagggagttcatatgatctgctgtccaaaaactgcaatcactt

SEQ ID NO: 32290 - DNA, 238 bp, Glycine max
  Clone ID: 700894319H1
aaggaatcgagtttttgcatacagggattgtccctggtgtatattccaatgatctgaagatagaagatgttttattggatcagaatcttgttgcaaaaatcagcagttaccacctgcctttgttatctaacatgggaaaggttcggtgtggaaattcttccagtggattaagaaattctagcaatagtaaaagtgtaaagcatgaagataaggctgatatatacgactttggagtgat

SEQ ID NO: 32291 - DNA, 237 bp, Glycine max
  Clone ID: 700894320H1
gtccttgcagcttctgtggttgtaacctccactgttgagaattcagccaaccctggaagactagtctttcacgttgttactgacaagagaacttatactccaatgcatacttggtttgccatcaactctattaactcagcagttgtacaagttagagggttacaccactgtgattggtctaaagaagtgaacgctggtgttaaagagatgcaggaaacaaatcagttaatttggaag

SEQ ID NO: 32292 - DNA, 228 bp, Glycine max
  Clone ID: 700894322H1
gaaaccctcttcggcttgacacgagcctcgaagtggatccttcgcgacacgaaaatgaccctagcacccatgttgctgctggagaaccacccaattcacctgaaccctgcgcactacatcagtgagattattagagaaggcacaaaaaatggcactgctttctttaagtgccatggacatgagcaatttgagatgacgggtttggatcctgagtataataggttgttc

SEQ ID NO: 32293 - DNA, 241 bp, Glycine max
  Clone ID: 700894323H1
tgaaagcacaaagcaaaggtcgcagctgctgctgaatctggtttaacgcaacgcaacattctccatcaaatcaaatcaaagttccagatttggtggcaaccgataatagggacaacaaatcgcctcctcctctcccaccttcttcttcccgttacgtgaaatcggaacaacaagcttcattatcagcatcgtcgtcgttcagccacgacgacataagcggaatgccggagaatccaccgaa

SEQ ID NO: 32294 - DNA, 168 bp, Glycine max
  Clone ID: 700894324H1
aattcaaatcccgtcctcttcatttcagatctcataaagaacacgaaacagtgtactacacgcgctctctctttctcttgaactttcttcttccttttcgttttctcactctcttgttcttcattcacccccacacattattcttactgtttccaacattttctccat

SEQ ID NO: 32295 - DNA, 243 bp, Glycine max
  Clone ID: 700894325H1
ttgcaattaagtggcatagatcttgaagctgagaatcgcgtgcgccatgaatagaggtgaaagttcaggtggtggacagagctcgttggggtacctatttgggtcagaagagaagccaaatcagcctctgcccacaaggacagctccattaccaccctatggcattgacatcgataactccatgccccatcacggttctaactgccaacttgttgtctcaaacaaccgatctcaaggccacca

SEQ ID NO: 32296 - DNA, 236 bp, Glycine max
  Clone ID: 700894326H1
aatcggctgaggtaaaaaaaggacattcattcagctatggctacccttagtgctcccagcaaccactctccccaagaagatgctgaagctctcagaaaggcttttgaaggatggggaactgatgagaacactgtcatagtaattttgggtcatagaactgtgtatcagaggcagcaaatcagaagagtttatgaggaaatttaccaggaggatcttgtgaagcgcctagagtctga

SEQ ID NO: 32297 - DNA, 247 bp, Glycine max
  Clone ID: 700894327H1
agcgtcctcactacccggttggatagtcgaatccaaccgtgccgtccggtacattgattctgatcattactctgttccacaaggcaggagagccattgagttgctctcaggaaaggaaggaatcatatctcaaatggttgagaccaaaccagacaagctctacagcttgaccttctcattgggtcatgctgatgacaagtgcaaggagcctcttgctgttatggcctttgctggtgaccaggctcag

SEQ ID NO: 32298 - DNA, 59 bp, Glycine max
  Clone ID: 700894328H1
gatagaacagtatgtaataagtaagttatactaaatgtagtaaatgcaagtcttgtgta

SEQ ID NO: 32299 - DNA, 257 bp, Glycine max
  Clone ID: 700894329H1
aaagcgtctcaaattcacattaaattttcccaaaactcaaactcaaactcaaactcaagtaattctaattttccctccccgaaaacgatgtcgctcgaggtggaggaggaggaggcgttcgagcacacgctcctggtggtgcgcgaggtgtcggtgtacaagatcccgccgcgaacacctccggcggctacaagtgcggcgagtggctccagtccgacaagatctggtcggggcggatccgcgtcgtgtcccggcgc

SEQ ID NO: 32300 - DNA, 226 bp, Glycine max
  Clone ID: 700894331H1
aagaggcggaagatgagtggtagggtttctgggaaggtgaagtggttcaatgatcagaaggggtttggattcataagcccttgcgatggcagcgacgatctcttcgttcaccaatctcagatcaaatctgacggtttccgaagcctcgccgaaggagagtccgttgagttcgccattgaatctgaatctgacggacgcgcgaaggctgttgatgtcaatgggcccg

SEQ ID NO: 32301 - DNA, 263 bp, Glycine max
  Clone ID: 700894332H1
ggactggcaggccaactattcagcaagaacaagtcagctgaagaaacccaaaatgcggaggctgataacaggaagaaacaacaaaacaaggaacataattcaaatagcaatttaagcccactagcaagatttcttctctcaagatggcagggccaaacctcacgggatctaaacccatcttgagcagagtttgaagttacaagataccaatttgtgtgttgtctctatttatgccttttttttttctctcaattaattgtaca

SEQ ID NO: 32302 - DNA, 163 bp, Glycine max
  Clone ID: 700894333H1
tctagcttcacttggacagttggattcactctccgattccctctctcgtagtcaatgcggtggccggcgccgccgggtaacgccgtgctgggtatagccgccatgtcctatatcaccgtcgactacctccgccacctttccccggcgtggcactcgcgtctgc

SEQ ID NO: 32303 - DNA, 119 bp, Glycine max
  Clone ID: 700894334H1
cttactttcaaattagctagatatatagcttttcttttcttttgctttctgtttggtccctacttaattatgattttaattttggaataaatgaacaacatgtgaattatgaaggagac

SEQ ID NO: 32304 - DNA, 171 bp, Glycine max
  Clone ID: 700894335H1
gtccctgcatcatcaaataaaataggagttcctgttgaagtatcaaaggaaaactatgatttgacaactgatgaagtagggataaaatctaagcaaagaataaccacagactgtgggggaataattgagtcagttgataagcccacaacatctgaagtaggtttagaatca

SEQ ID NO: 32305 - DNA, 232 bp, Glycine max
  Clone ID: 700894337H1
ctcgagccgcttcccctatggctcgtcactccttgctcttagccctcctcctcttcgccgccgtggccaccgccgcgatggcgtggcagcgtccgacgccgacgacatcctgatccgtcaggtggtgccagatgttggcgaagcgaagaggaggacaacctgctgaacgccgagcaccacttcgcgagcttcaaggccaagttcgccaagacctacgccaccaaggaggagc

SEQ ID NO: 32306 - DNA, 222 bp, Glycine max
  Clone ID: 700894338H1
aagaaagtctcaacctttattcgaaagagcaaggatctgagttgagttgagtgatcatgtgtggtggtgcgattatctccgacttcataccggcaggtcccgccagcggggcgcggcgcgtgaccgccgacatcctgtggccgagtttgaggaagcgcttctcgaagccgctgctggacgatgatttcgaggctgggttcagagaattcaaggatgattcgg

SEQ ID NO: 32307 - DNA, 236 bp, Glycine max
  Clone ID: 700894305H1
cttacgtgaattagaccttgctcatcctgctgcaaagtctatgcttgagttaagtcgcacccaagatgaagaagtcggagatggaacgacatctgtcatcattcttgctggtgagatgcttcatgtcgccgatgcattcattgacaaaattcaccctacagttatttgccgagcatataacaaagctttggaggatgctattgctgtccttgacaaaattgcaatgcctattgatg

SEQ ID NO: 32308 - DNA, 198 bp, Glycine max
  Clone ID: 700894339H1
acgtcgtctccgcgttcggctcgaggagatggacttactggagttatgggcaattttcggccccggcgtcgatggagccgtcttcggcgatgtctggtgtgtctggcttgtcgccgtcgtctgcagtaccgtcaccgttaccttccttcattaccttcccggaattctcgcatctcttgcggctttgatgttcaattg

SEQ ID NO: 32309 - DNA, 251 bp, Glycine max
  Clone ID: 700894265H1
taaggtcgagttttaaaagagagtaatgattttgctactgttgggaagactagagatagctcagatagggccttttacaaagatttggttaaggtcattgaagcctctgatgtcttactggaggtgcttgatgcccgggatcccttgggtactcgttgtgttgatatagaaaagatggtgatgaaatcgggacctgataaacgtctcgtcttgcttttaaataaaattgatcttgttcctaaagaagcttt

SEQ ID NO: 32310 - DNA, 239 bp, Glycine max
  Clone ID: 700894266H1
cctgtccttcgttgcacttcgctttttccaaaaccaatcacatcagcatcactctcgtcgccgccgtcgtcgaccaccgcaagagccatcgcactccgccgtcatccgttagggcaaaaatgagtcgaggaagtggaggtggatacgatcgtcacatcactattttctcccctgaaggacgtctcttccaagtcgagtatgctttcaaggctgttaaggccgcaggaatcacctcaatt

SEQ ID NO: 32311 - DNA, 234 bp, Glycine max
  Clone ID: 700894269H1
agggatcaaaggatcggagagggtcctataaaagaaggtctttttttttctttctccttctccgatctaaactgattttacgttatgcataagttaattttagtttccggcaattttttctttctcttcacttaagaatagttgtagtgaaacttatctaaatggggttatattatgtggatgttgttatcttatgacttcctcagtcaacaaaggttgtgtgtcaggactttg

SEQ ID NO: 32312 - DNA, 236 bp, Glycine max
  Clone ID: 700894270H1
ctagtagcacttgataaagcagagattctgcttcaagtgtcaatcaccatccttttaccacttgttatcatccacacattacactgcatatctctattcaaaattcaataacccacaaactaaaactaatggctctgttttcaaatcaccgacactcttccgaagcgctcttgggctttctactcttcctcgtattcagaggggtttcagtttcaggggcaacatttaccttcgtg

SEQ ID NO: 32313 - DNA, 233 bp, Glycine max
  Clone ID: 700894271H1
cttggccagttaatagaaacaaactttgggtagataagactgctgcatgtctcatctctaattattgtatttggcaaatagttttgagttgaggatctaatcattaccagatttaatatatttgacaaatggggtctgaaggtcctacgacaccgacgacaacaattcatgtgacaggatttaagaaattccatggagtttcagagaatccaacagaaacaattgccaataat

SEQ ID NO: 32314 - DNA, 232 bp, Glycine max
  Clone ID: 700894272H1
gtccttatgggtttttgcttgtgttgttgttagttgtggaggcccgcgataagcaacgaggagctccccaggtcgtagagaggtggggcgaccctgaatcatccaaatgtgtgatggctgtttcaatgattgaccgagagtctcaccctttattagctgtagcgaggaaaaacaaccagattgaagttttgagccctgtaaatggagatattcaggctacaatcacggatgc

SEQ ID NO: 32315 - DNA, 235 bp, Glycine max
  Clone ID: 700894274H1
tgggtattcgcttttcgtcctcccaggcggcgccgtcggaatcgtcgccggcgtcgagtttgggcgaattgcccgagagttgtgtcgctcagatcatgacctacatggatccgccccagatttgcaagctcgcaaccctcaaacgcgcttttcgcggcgcttcctccgccgatttcgtctgggagtccaagctgccgcccaattacgacgtccttctccgccgcatcttcgccga

SEQ ID NO: 32316 - DNA, 235 bp, Glycine max
  Clone ID: 700894275H1
cgcaaagccagagaagaataaaaagcctttctcccggggccagtccagttcattgtagagagcagacaccaacaccaaaccttaaaattattttgcccctctgcttctctctctgtctttctcagaagacaactcaaaaaaaccatggacgtgggtcagatgcagagacagtggatcgactacaccaaatccctcttccttgagggcttcctggatggtcagtttctgcaacttc

SEQ ID NO: 32317 - DNA, 234 bp, Glycine max
  Clone ID: 700894276H1
cttggccagttaatagaaacaaactttgggtagataagactgctgaatgtctcatctctaattattgtatttggaaaatagttttgagttgaggatctaatcattaccagatttaatatatttgacaaatggggtctgaaggtcctacgacaccgacgacaacaattcatgtgacaggatttaagaaattccatggagtttcagagaatccaacagaaacaattgccaataatt

SEQ ID NO: 32318 - DNA, 234 bp, Glycine max
  Clone ID: 700894278H1
gtggccctaagcaaagttgtggcgattacaccagggtttgctaagaactcgttccaacccttgtgatttcatttctgatttttaagattgtgatatgatggaatcttatttatgtcaatttgtttagtttaatttccatatgttattgttttttttaagattaagtcaggtaccagaaaatttgcatcaattcacactcatgagtcacctgaacaagagctagacccggtttta

SEQ ID NO: 32319 - DNA, 236 bp, Glycine max
  Clone ID: 700894280H1
ttagggtttgcagtcactgctttgtttagatcagaaccagatcgtgttctcttcttccattggcaaacatggcaactcaaatgagcaagaagagaaagtttgtggcggatggagtgttcttcgccgaactgaacgaggttctgacacgtgagttggcggaggacggttactccggcgtggaggttagggttacgccgatgcgcaccgagattatcatcagagccaccagaacccaa

SEQ ID NO: 32320 - DNA, 237 bp, Glycine max
  Clone ID: 700894282H1
atcatatttcattttcagtcgagtgaatatctagtttcaaattgtttgtagacacctgccgtattctatgaaaacacttttaatttagtttattatttttgttcttattgtctctttccccctctcttgacagcaaggatcctggttatatcaggatgaatatgcatgacaatcaggatacaaaagatgacgagcctctcttgaagattgagataaataatcctgctttgctagctg

SEQ ID NO: 32321 - DNA, 234 bp, Glycine max
  Clone ID: 700894283H1
ggacaaggttacgaggttggcaacagaaaagggtgtggtggttttcaccaagagctcttattgcctctgctatgcagtcaacattctgttccaagagcttggagtgatccctgtggttcatgaaattgacaaagaccctgagggcaaggaaatagagaaagctataacaaggttggggtgtcctacacctgttcctgcagtcttcatcggagggaagctggtggggtccaccaa

SEQ ID NO: 32322 - DNA, 102 bp, Glycine max
  Clone ID: 700894284H1
agtttatttggggtctgtggctgcacatatccaaccttaagttcggccgtcgaatctttctggtagttgagtgagtttagttctttcaaaaattcaaacaca

SEQ ID NO: 32323 - DNA, 233 bp, Glycine max
  Clone ID: 700894285H1
aggaaacagtgatagtagaagctgagaaaccttctgaggaaactcatatcaatgaaccagctaaggaaataatgatagtagagtcagaagctgagaacccttcaaaggaaactcttgtcaatgaaccagctaaggaaacagtgaaactagagtcagatgctgagaagccttcagaggaaaacaatcaaagcagcgagtcactgaaagaagaatttgtagaggccatggaggca

SEQ ID NO: 32324 - DNA, 232 bp, Glycine max
  Clone ID: 700894286H1
tccatcacctaatcacttccccacttcccgtgtaagacacgtttagttcgcacaaggttttaaaaaatggctgatgctgaggacattcaacctcttgttgttgataatggaactggaatggtcaaggcgggttttgcaggtgatgacgctcctagggccgtgttccccagtattattgggcgaccacgccataccggtgtaatggttgggataggtcagaaggatgcttacg

SEQ ID NO: 32325 - DNA, 230 bp, Glycine max
  Clone ID: 700894287H1
ggaacaagcttcagtgattgcagcattcaacagtcaattgcctggcacacagtccattgctctaacgttgtttgcagcgacgccaccggttccagacaatgtgttaaccaaggcgttccaggtgggtaccaaggaggttgagaaaattaagtctaggcttgctcctaagaaataattaatactaatgtgggatgtggttgtaatgtctctctcattgttcttacttctta

SEQ ID NO: 32326 - DNA, 232 bp, Glycine max
  Clone ID: 700894288H1
gtttaagatgtgaaaaaccacgaccatttgagcctctatatataggtgtctcgtatgctcaaacatgacaagccagtgatagttgctttcagataactgatagttgtgtgcaattatttgaattcaagaatgtctcaacccgactcgttggtggctgagattgaggtgaaaacctctgctgatcacttttacgacaccttgaagggtaagaaacagcatcgtattcatgatg

SEQ ID NO: 32327 - DNA, 232 bp, Glycine max
  Clone ID: 700894291H1
tatgcctccaccagccaagtgaatttcactactactaataacccaataatgggaattagcacaggcaataacaatacccttctttctcagcctcaaattcgaacccaaaattcaacctcagtacccttcaacatgttccaagattattataattatatgaaccaaggaaaacaatgcaagatggagcaattctcaaacactaagaaccagcctgtggtcagtgcctctcaag

SEQ ID NO: 32328 - DNA, 231 bp, Glycine max
  Clone ID: 700894292H1
cttgcatgaatggcattttcgttcagggcttgaccgctacatatggataattggaatgatttatgcttattatcatccaactgttgaacgatggatggaaaaattggaggaagcagaaatcaagcgcagaatatcaatcaaggcaactgttgttctgatatgttcattggtgggttatttatggtttgagcatatatacaagctggacaaggtcacatacaataaatacca

SEQ ID NO: 32329 - DNA, 232 bp, Glycine max
  Clone ID: 700894293H1
accaaaatcaaaaccttactcgcgtattgtcataaacgacggtcgaataaaaaaggaaaagaagcgaggcaagtggtgtgttgagttaaacgacagacagcgacagtagtgtagcagacacgataaaaataaaagggtaaccaaccccagaaacctattcatctactctctttagctgcccttgttcctccaaaattctatgtggtgttgcagatggtgatgattactgctt

SEQ ID NO: 32330 - DNA, 232 bp, Glycine max
  Clone ID: 700894294H1
cctccctcctctcggtgtcttcctcaagtatggatgcaaggtagagttctggatctgtttggtgcttactctttttggttacattcctggaattatctatgctgtctatgctatcaccaagtgatcatattcatcacctcttgtagacaatgaataatttgtcaaagtacaacggttatgcatgtttctcaactccagcattgatataatcgtttgatctcagaacaatgtg

SEQ ID NO: 32331 - DNA, 233 bp, Glycine max
  Clone ID: 700894295H1
gagagaagagaagatgactacacgcttcaagaagaacaggaagaagagaggccacgtgagtgccggccatggccgcatcgggaagcaccggaagcaccctggaggacgcggtaatgccggaggctgcaccaccaccggatcctctttgacaagtaccaccctgggttcttcggcaaggtcggaatgcgctattttcacaagctccgcaacaaattctactctccgatcctcaa

SEQ ID NO: 32332 - DNA, 233 bp, Glycine max
  Clone ID: 700894296H1
tacgactccgatgttcgcgatgatactgaaaccttcctcaatcggatagttcctgaggtttctttctttctatcaccaatttgatgcattcatctgctccatggaagcatactctagaggggccagatgacatgccagctcatattaaatcatcgatgtttggttgtacactcgcggtgcccattacaaatgggaagcttaacatgggcacatagcagatgcacacaagcaca

SEQ ID NO: 32333 - DNA, 161 bp, Glycine max
  Clone ID: 700894301H1
gtttgtgagtgtgctataaatccttcgtggtttttggtgaccctttgggttctatagtgagtgcaaggtaacccactttggattggaaggttgtcgcaatggggaaggttgtgttgttgtttctttgcatggtgttggtggtggtgtctttggcttgtgcg

SEQ ID NO: 32334 - DNA, 238 bp, Glycine max
  unsure (1)..(238): unsure at all n locations
  Clone ID: 700894302H1
gagtgattcgtcctaatattcaagtatggttcactcgcatgaagggtccactttatgtgccacttttcaagccatttggtattgcatttgccactacttttgcagtttgcttcttttcaaacagccttcattatggaagtgtgataggaacaactgtacttggaatggggcattatacagtaatgtatggacaactcagagaaaatgaagaagagacaagctgtgacganagctctga

SEQ ID NO: 32335 - DNA, 238 bp, Glycine max
  Clone ID: 700894264H1
gttagctttaaagtctcgtctgacgctgaaggtcatttttgtggaagtgagggtaagaatgtttctggggttaatacagcctgtgacggtcctcatggcttgttaaattcagaatcttctactgtagataatggaaaagctcctagtatggtttctagcaccccaaaagttccaaaatccccttggatgccttttcctgtgcttcttgatgctatcagagatcaggttcctcccacgg

SEQ ID NO: 32336 - DNA, 235 bp, Glycine max
  Clone ID: 700894304H1
ctcacttttttcagcttctctaaattctctgtctacttcaccaagcacttttggttgcagctttggttaatttccaatatggtgtttcctctcctatctatctttgctttactcaatcttgcagtggtggcaacccatgcagaaaccttgccccctgaagtttactggaagtcgaagcttcccaccactcaaatgcggaaagccattacggatatccttcacccagatttggcag

SEQ ID NO: 32337 - DNA, 244 bp, Glycine max
  Clone ID: 700894234H1
caagaaattacgtccagaggtagaaattaagggagtttcgtgccagagtaagaaggagaattcgggaagtgatggaactgtggttgatcaaggaaaaggtggtagcccagttgcatcgtctcatgcaacaacaaccacaaccactagcagtgcacaaactcataggaaagctagaaggtgttggtcaccagacctgcaccgaagatttgttaatgcccttcaaatgcttggtggatcacaagtg

SEQ ID NO: 32338 - DNA, 239 bp, Glycine max
  Clone ID: 700894235H1
gggcaatacccagctgctcttccaccttacccttccccaccccacatgtatggcagcagaagtcccccgacaaatccttatgctgcttattcacctgagccggcaccggctattgcagggtcttacccggcagctcccatgaactatcctcctgcatatggtggctatggaaatgttttggctcccacttatcagcaggcttactaccgatagaaatgacaacccttgaagatggtaac

SEQ ID NO: 32339 - DNA, 239 bp, Glycine max
  Clone ID: 700894236H1
gcttagtagtgacaggactgcttttagagatgttgctgataaccagtctacactaagatccagcgtcaagtcagatggtgcttcctcatcataagctcgtaggatacgaagtcgtatcagcattacaccagagatgagtgatgatattgctagggctgtccgggcgatgaatgaaccattaaagcaaaatcgtacttctgagagagctggggggtgatagttcattgtctcattctcca

SEQ ID NO: 32340 - DNA, 240 bp, Glycine max
  Clone ID: 700894237H1
cgaacacactctcacatattattagcttttagctctctctctctctctctcagtccttcttcttcgcccagccaacatgagctcaatcgttcagggtttcaccaagtcgctggccatgaccattctctctgagatcggcgacaaaactttttttgcagctgcgatactggctatgcgacacccaagacgcctagtcttatcaggttgcttatcggctttgattgtgatgaccattctctc

SEQ ID NO: 32341 - DNA, 240 bp, Glycine max
  Clone ID: 700894238H1
ttcttcttctaccttttcctcacgcatcaccgtgtcactattcttgtttctgtctacgtgtggtgtcccactacacaatagaccaacaaacaatcgacacacacacaaacataactctctttatttctctctctcttttgctgaggtaattactgaaatccgtgcctgctgcgttcacccttttgtgccaaagtttgcaattttttttcgattatattgtgcctctgctctgcttgccac

SEQ ID NO: 32342 - DNA, 239 bp, Glycine max
  Clone ID: 700894239H1
ggaaaaaggaaaccataatgaaagaggaagatgctaggaaacaagcgacaaatggtgttggttctgaagtagaatacacaccaattcccagtggacctggcagtgacattgcaaaggacaccagaaacgaggaggtgtctatgcttgacaatgtgtactggaaggagtttggacttcttgtttttgtttgggtttcattccttggaatacagattgccatgaaccagacaagcaaatgt

SEQ ID NO: 32343 - DNA, 237 bp, Glycine max
  Clone ID: 700894240H1
catttactcactcactgtgagagcggcgaagaagaagaagaacaataatgaaggacgccggaaagagccacaaggcgaatgcaaagctgtcgccggagacgcggaaggatcggaaatcggcgacggggctgagtggatcgccgaagaagggaggccacggcgggaagttcacgtggatcggcaacggctacgagaacgtcgagatggagcacggtgctatggacgccaaggacccga

SEQ ID NO: 32344 - DNA, 238 bp, Glycine max
  Clone ID: 700894241H1
gtcgaagaagaagaagaagaagatggcattgggtgttcctgctcttcccctgacatacgtggctcacgttctggcacttgttgccagcatcttggtcgtgctctgggtcctcaattttaggggtggcttggcttgggattctgataacaaggccctcatcttcaatcttcatccagttcttattgtcattggcttactagtccttgggggtgcagctattataagctacaaagcatta

SEQ ID NO: 32345 - DNA, 240 bp, Glycine max
  Clone ID: 700894242H1
gaagctctctatgacatctgcttccgcacgcttaagctcaccactccaagctttggggatctgaaccatctaatttcagccaccatgagtggtgtgacatgttgtcttcgtttccctgggcaactcaactcagatcttcgcaaacttgctgtgaatctcattcccttccctcgtctgcactttttcatggtgggttttgccccactcacatctcgtggttcccaacagtacagagctctt

SEQ ID NO: 32346 - DNA, 239 bp, Glycine max
  Clone ID: 700894243H1
gcgtcttcttgttcctctcgcccagaatccgagatcaaccctgacccctaaggccaggggtttttctcggcttcttcagagtcctgaaatggcgtctgtttcagctttagccaagtacaagctcgtcttcttgggtgaccaatccgtgggcaaaaccagcatcatcactcgcttcatgtacgataaattcgataacacctatcaggctacaattggtattgattttctatcaaaaacta

SEQ ID NO: 32347 - DNA, 240 bp, Glycine max
  Clone ID: 700894244H1
ctttgatttcaaacagagagtaacaatgactcagttgaaagcatctcctgcgtctgcgtgttcgttccttgccattgctccttcctttcatcatgcatcactaacaacagggcaccttctgcgccatcaattctccaaggcaaagcctttctcactcaaagagctggggctaaaaacaagcgttggtgccaataaacttcaagttattaaagcagctgcacgcattgatacagaggtagt

SEQ ID NO: 32348 - DNA, 125 bp, Glycine max
  Clone ID: 700894245H1
aaagtttgttgggttatttcattaaactttttattcatataacaccaaaagtattcatttataagcagagattgatgaatacttttggtgttatatgaataaaaagtttgttgggttatttcatt

SEQ ID NO: 32349 - DNA, 238 bp, Glycine max
  Clone ID: 700894247H1
gattttcgtttccttcacgatcgtgtctctgattactttgctgagtgtctgaggaaggatcacgagtttttgaaatctgggctggtgacaaaagtcagtcttgcggcgaaatggtgtccctctgtcgattcctctttcgatcgtcacacgttgttgtgtgaaactattggcaagagggtttttcctcgtgatgagtataaggagtatgagggggttgaggaggcttattatgcttaca

SEQ ID NO: 32350 - DNA, 243 bp, Glycine max
  Clone ID: 700894249H1
gtttaatcagagtgtggctttgcctgaggtgaaggaagaccaggtcctcatcaaggtcgctgctgcttcccttaaccccattgatcataagagaatggaaggctatttcaagaacagcgactcccctttacctactgctccgggttatgatgttgctggagtggtggttaaagtgggaagtgaagtgaagaaatttaaggttggggatgaagtttatggtgatatcaatgtgaaagctttgga

SEQ ID NO: 32351 - DNA, 242 bp, Glycine max
  Clone ID: 700894250H1
catgcctgcaggtttagcctatcaactctgtttttttcccacagtaagtgatccttacagttactttttgtttggtagaaggacaagataagctggtttattattatttttttttcattgcttctgcaggagagaataccatgagttctcttggtcggttggtgatgctcatatggttatttgtggttttgatcctcacttccagctacactgcaagtttaacatccatactcacagtgcag

SEQ ID NO: 32352 - DNA, 239 bp, Glycine max
  Clone ID: 700894251H1
caatcaaattgttttatacctccaacatgcccatcattcttcagtctgcccttgtttccaatctctacttcatctcccagctgctccaccgtaagtacagcggaaacttcttcgtagatctattgggaaaatggaaggaatctgaatatggaggtggtcagtctgttcctgttggtggcattgcatactatatcactgcaccatccagcttagctgatatggcagccaatcctttccat

SEQ ID NO: 32353 - DNA, 238 bp, Glycine max
  Clone ID: 700894252H1
ggtgtatgctcaatgtatgtaatgtgtcacagaggttctgcagtctatttccaaggttgcaaaatctgcaaagctggagaaaactgaaattcctgcaaagattaagttgctgccggatccatggactcctgaatctggattggtcactgcagctctcaagataaagagagagcagctgaaagccaaattcaaagacgatcttcagaagttgtatgcatgaaatgtagtatctaacctc

SEQ ID NO: 32354 - DNA, 237 bp, Glycine max
  Clone ID: 700894254H1
gtgtttggacaaggagaagtgtgagacttttgaagattgtattacatgggctaggctaaagtttgaagattattttgctaaccgagtaaagcaattaatttatacttttcccgaagatgctgcaactagtactggagctcctttctggtctgcaccaaaacggttccctcatccactgcaattctcatcctctgatctgggtcatcttctgtttttgatggcagcttctatattacg

SEQ ID NO: 32355 - DNA, 235 bp, Glycine max
  Clone ID: 700894255H1
gcgttacccattgtagcgttatcgcttctcttgggtgccatcatcgcatttctctttttcagcacctactaccggaagcggcaatccgaaatccaatctatcgccgatcccaatcccaaacccttatcctccaaagcccctcccaagaagcctctctccaaaccccattcctccgacaaggatcaaaacaagcgacatcatccgttggatttgaataccttgaagggtcatggtg

SEQ ID NO: 32356 - DNA, 237 bp, Glycine max
  Clone ID: 700894256H1
ggtttcaggtggcacaacctctgtggctcaaagccaaacaataaaaaaggatgtggaagatgcttctccttccaaacctgatgtgaacactgatggtgagaagggaaatttacagaaggatgatacattttccattaccatttcttccaacgacggggctgatcccatgcaagggcttatgactgatgatgcattaaaggaccctgactttcttccacctattgtatctcttgatga

SEQ ID NO: 32357 - DNA, 237 bp, Glycine max
  Clone ID: 700894257H1
aagaagtttttgggcatggtttttccactaaattgagtagtgctggtcttgtttataagcattttggaaaggagattatagccaaagaacttgaggtagatgaggaacaccgagatgtgcatcacatatatttggctgtttacaagagcttcatggaggcaattgatgctatagacaatgggatcaatcagtatgatacagaccagcctccaagatacgtgaataatactcatttat

SEQ ID NO: 32358 - DNA, 237 bp, Glycine max
  Clone ID: 700894258H1
gttgagagaaggaaagggaaaatgggtaaggatctgagcgaggaacaagtgtcttccatgaaggaagccttctctctattcgacactgacggagacggtcggatcgctccgtcggagctggggatcctgatgaggtctctgggaggtaacccgacgcaggcccaactcaaagccatcgtggctgaagagaacctcacggcccccttcgacttcccccgattcctcgatctaatggcc

SEQ ID NO: 32359 - DNA, 237 bp, Glycine max
  Clone ID: 700894259H1
cctcaatcagccaaaccggttcaggaaaacaatgatcagtttgctgcaacaaatgcccatgcaattgctcctgctgctaaggcacaagttgtgggatggccaccaattcgatctttccgaaagaacacgatggcctctaatttgacaaagaacaatgatgaagctgagggaaaatcaggatttggttgtctctatgtgaaagtcagtatggatggtgccccttatcttagaaaggtt

SEQ ID NO: 32360 - DNA, 238 bp, Glycine max
  Clone ID: 700894260H1
ggaacattatggagcccagattcgtaatctccgcatcggaggccgaatcccaatcaatctccaaactcctcccttccctcgtttcctcttctcagtccctcgcccgtccttccatctccaactttcccgtcgccgccgtcggactcgccgcctccggccgcatcttcgtgggcgtgaacgtggagttccccggcctccccttccaccacaccatccacgctgaacagttcctcctcac

SEQ ID NO: 32361 - DNA, 238 bp, Glycine max
  Clone ID: 700894262H1
actcggttctgccttcacaaaaaaattatcgagatcccctttttctcctaagagaagccatggctaagggtcccggtctctactctgacatcggcaagaaagccagggatctgctgttcaaggactaccacagtgaccagaagttcaccatcaccacctactcacccactggagttgctataacagcatcaggaaccaggaaaagtgaactgtttgtggctgatgtcaacacccagtt

SEQ ID NO: 32362 - DNA, 238 bp, Glycine max
  Clone ID: 700894263H1
tctcattacatacacaaaacccattttactccttctttcacaaaagaacaatatctcttgctatttgccaaactacgaacatcatttagaaccatgtctttctctaccaaattgcctttggtccttttattttcatccctttttatccatgcatctttagctgagatggtgtgtgaggacctgccaaaggaagtgtgtgctttctcattagcttcatcagggaagaggtgtttgttgg

SEQ ID NO: 32363 - DNA, 237 bp, Glycine max
  Clone ID: 700894233H1
ctcgagccgattcggctcgagatttgatccaaattgtagaagaatacgcaatttaccaatgatcagaaattgtatgaacttgcaaacaagtttgaggagtgtactgcccatgaagaaaaacaactactggagaaagtagcagaaatgcttgctagctctagttctagaaagaaaaaactggttcaaatggcagttaatgatcttcgggagagtgcaaacgctaaaatcagtaggctg

SEQ ID NO: 32364 - DNA, 246 bp, Glycine max
  Clone ID: 700894205H1
tttaaaactctaataaaaaaattaatcatatctatatttttctataggtgtcgattaacacaaggtgtcatttaatcatttttcatttgtttttatctatatactacagaaacaaaggtaacaatttatctcccatgaattaaccttgtttgtctaacaaaaaggctaggtgaaaccaagtctctatgtgatatgatgctgctatgaagagcagattagcaaattgcaacgccaataacaatatta

SEQ ID NO: 32365 - DNA, 243 bp, Glycine max
  Clone ID: 700894206H1
attaactggaaaggatggtgctgcccaagttctctccgttctcacggcttctcctttcttcccttgtgattctcttaataagctatccagttaaatgtgacgatgatgaggaagacaatctttatcagggtatcaacaagtatcgagcatcgttaaacttgaaagctctaacaaggaatgacaatgcagattgccttgctgaaaaaatagctgaccaattcaagaaacaaccctgcacaaata

SEQ ID NO: 32366 - DNA, 245 bp, Glycine max
  Clone ID: 700894207H1
gggcaagcccatccaagccgcctaatgcacgccaccacaatagatcgatctttgcaataccacgtccaggagttcgagaggaccctgcaggagaaatttccagcatgctccatagccgcaaagagacggatttcttcaacaacaacaatattgcatgtacagggcttgggaatgaaaaatttctcacgtactgctgcaaatctcttgtctgctgtgacaaaaatagatagcagttactatcctga

SEQ ID NO: 32367 - DNA, 243 bp, Glycine max
  Clone ID: 700894208H1
gtggaatttgtggggttgcagcaaatgcatctgtcaaggctttggcggatatgaaatccataaatctttttggtgttcagcaaatttgtcgaaatgctattgcattagaacaggcattggcagctattccatccataaatagtgaagcagtgcaacagagattggatcgagtccgcacctactatgaactattgaacatgccatttgaggctttggttgccttcattacagaacatatacact

SEQ ID NO: 32368 - DNA, 245 bp, Glycine max
  Clone ID: 700894209H1
gcaaaatatattataaacaataaagaaggaaaatttttctggtgttgaaaaagagaacagaggaaaagtgagaaagagcaacgtcagagtttgccgtagggttctccttagttcgtggtttctggtacagatagaagggaatccttcttctctctctctctctctctttctctctctttttctgagtttgaacttggagtaactgggtctatatttttgttcatattagagtggccatcacggga

SEQ ID NO: 32369 - DNA, 246 bp, Glycine max
  Clone ID: 700894210H1
atttcaacccaaggagcttgggaacaaactcctgctccttcttctccttggtcataggcaatgggaggtgcactgggaaagagtgaatcacctagaaagggatcgatgccagaaactaagctcgaggctaaaatggttgaagcaatgcagcggagggaatctcaaggaagttccgtgaaatcattcaacactataatcttgaaattcccaaagattgatgagagccttagaaaatgcaaagtcata

SEQ ID NO: 32370 - DNA, 244 bp, Glycine max
  Clone ID: 700894211H1
aaaatggatgctactacacccaagtattccaaggccaggtatgatgaaattgtgaaggaagtctcttcctacttgaagaaagtaggatacaaccctgacaagattccttttgttcctatttctggttttgagggagacaacatgattgagaggtccacaaaccttgactggcacaagggtccaactctgcttgatgcacttgaccagattagtgagcccaagaggccctctgacaagcccctca

SEQ ID NO: 32371 - DNA, 243 bp, Glycine max
  Clone ID: 700894212H1
gagaagaggtgtgggaaaggaggaggaagaagagcgagatggcgtcagtggtgaagaacgtactcaaatcggtcagagaaaagggtttcggcgctttcctcagggagctcaaggatgaaggctacctgagatgccttccggatggaaatctcttgcaaaccaagatccacaatattggggcaacacttgttggtgttgataaatttggtaacaagtattatgagaagcttggagacacacagt

SEQ ID NO: 32372 - DNA, 245 bp, Glycine max
  Clone ID: 700894213H1
aaggagttgtggagcttgtttcggattttgttgtttgcgacgaaggaaagcctttgtcaccagaggctgctcgtatactgcgtttaatgggaatcaagatggctacatttcgacttaacttaatttgcagatggagtcccgatgagtttgaacgttacattgatgggcctgatgaatcagatattgaatgctcgtaggacctcttttaaaatgtagaagattatggagcgccctcctcccaaaaa

SEQ ID NO: 32373 - DNA, 236 bp, Glycine max
  Clone ID: 700894214H1
ggaaattagtaatttgatggcattttgtttcttaatgaaagtatggaatacttgacatgtttcaacgtgtctattgctagggataacaaggataccaaatagagaacatgtgtgttccacggtgcacttttcctcgtattttttggtggaaaatatatgaaatgtgctcaagcgtttgcgcagtatgagtacaaaattatttgaattcagataatgactagtcagaaattcagcag

SEQ ID NO: 32374 - DNA, 246 bp, Glycine max
  Clone ID: 700894215H1
cttatttccccattttcaaatatttttttcccattttggatatctgagctatggttacatcgattctatataagattttcttactcagttatgtattccctcttcagctattagatacttgatattgaaatctgatagatgatttcaagcataaatatagccatgtcatgtcttatatataatttctaaaaattttcatatcctgatatatgttaccaactataaatgattaaagaaatagtgtag

SEQ ID NO: 32375 - DNA, 246 bp, Glycine max
  Clone ID: 700894216H1
cgacgctggtgaagtacaagcacgggaagaagtactgcgacaaaggatgggaatgtaagggctggtcaatttactgttgtaacctcaccattaccgattatttccagacctaccagttcgagaatctgttctccaagcggaactcgccggtggcgcacgcggtcggattttgggactaccactccttcatcgccgccgccgcgctttttgagccggaagggttcggcaccaccgggaacaagacga

SEQ ID NO: 32376 - DNA, 235 bp, Glycine max
  Clone ID: 700894217H1
gttcgtcagcgcagttcatgtataataacgatgccttaattacaaaaagtgtttggctttcaaggtgcaaaatagtctattatacagtattcagctgcttgtatggatttgtaggatcttgtgcacacctagctatggtcaattcatcttggactaaatcccatattgaaaatctttggagatttcctgaccgtattaagcgagtttatcctccttgtgatacttcaggactcca

SEQ ID NO: 32377 - DNA, 248 bp, Glycine max
  Clone ID: 700894218H1
ccacagtcagggttcaagacccgtaagtacactgaggtgaagccagccctcacaaacatggttgccgcagcaaaactcatccgcaacgaacttgccaagtgaatggtataagaaagtagaatcttccaagtcatttggttctgctttatattataatacaccaaagaaaaattttctctatattggggtgtttccataactgtgtgtggaatatttaggtgtcttagcatgctctgtgagcaattgat

SEQ ID NO: 32378 - DNA, 244 bp, Glycine max
  Clone ID: 700894219H1
atcatcttgctttcttggaatgcaatatgctactctttccctttcctactgtttttgcttttgtgttgttgtgtgccactaatgagcaccctccttggatacaacatgagcatggggtcctctgctagaggggcatctgaagatcaaatctcacaactcccaagttggagatataaaggggttcacaccaacttggaccttggcaatgactctcaaagcagtgaaagattgatcaatgaagatc

SEQ ID NO: 32379 - DNA, 243 bp, Glycine max
  Clone ID: 700894221H1
gttcaatttctcaaaacagcgtggatactcgcaaacaaccaatattcaggccatctttacaaatttgaccataaatgtatatacagattttgtttttcaggcagcagtcccaaaggtatgctacttagtatgctgttgagtgacagctttctaattgtacttctaagatcatcataattcgggtgttaaacatataagttttgcctactgctttcaacagtatcatgatcttaattattattg

SEQ ID NO: 32380 - DNA, 242 bp, Glycine max
  Clone ID: 700894222H1
cgcacgacgtatctgccaccaggagcaatctaggacttttgctatttgtagtttgaaatacaacccagctagtggtgaagactcagaaatgcacttcgtccgcttgctggatgaccagacttttgagttcatatcaacttattctcttgacacttatgagtatggttgcttcataattagctgctccttctcagatgacaataatgtgtattactgtgttggaactgcatatgtactgccag

SEQ ID NO: 32381 - DNA, 89 bp, Glycine max
  Clone ID: 700894223H1
gaattagggttttccaattcacagagcaacacaacgaaccaacaatggcgcagctcagccgccgtcggcgccgcagcacgggcaagcag

SEQ ID NO: 32382 - DNA, 243 bp, Glycine max
  Clone ID: 700894224H1
cttttctcagagattattattattattattattcagatatcatttcctctttcttcttcttcttttttttcttcttttcccccccatgcagcctcctcgaagaaaaactcctctattcaccacctcagaaatgggggcaatgaagggtcgcaagaacaacaacctctccatcttcgtggtggtgttctccatcttcctctttgggctcttcatgtacaacgaggatgttaagtccattgccga

SEQ ID NO: 32383 - DNA, 242 bp, Glycine max
  Clone ID: 700894225H1
cagtctatgaatggcaaagccaagatcttggactcagatatggtcttctattgtcggagtgtgtgttctgaattttgttctgaacttcaagatcgtggcagtagcagatgacactggaagcaacagtattgtatcagaaggtgactgcaagaacacaaattatcagattttcctccctccaccttatcagaatatatcctctaccatatgcaaacctgtttcgcattcatacgaattgaggt

SEQ ID NO: 32384 - DNA, 242 bp, Glycine max
  Clone ID: 700894226H1
tttggcttctgcctttccttttccagggagctcattgacaatggctgaaacaaagtgggtcatgaaggacaaaagatggtctctccatggaatgacagctctagtcacaggaggcacccgaggcatagggcatgccattgttgaagagttagctgagtttggagcaactgttcatatctgtgcacgtaatcaagatgatattgataaatgtttagaagagtggaaaaacaagggacttaatg

SEQ ID NO: 32385 - DNA, 242 bp, Glycine max
  Clone ID: 700894227H1
ggccatttcagcgaccgtgaccgcagccggagtccaagacgtagtcctagtccagaagacaggcgtcctcccattagtgaccaattaaaatcccgacttggtccaagaagtgatgaacgattgccagacagggggaggtcaaagtccaaatctaggagcaatggctcttcttgctccagatccccagatgctacaccaccaaaacgttatgataaaaggacttccgtgtctcgcagcaggtc

SEQ ID NO: 32386 - DNA, 240 bp, Glycine max
  Clone ID: 700894228H1
gttaactgcaggttcattgttggaattgaagggaattctcattcggaacttggggtttttcttagacatggcaacattttttatggcacttggccattacttgtatatatggtggcttcatggcatggctttccatctagtagatgcattcatatttctaaatatacgtgcattgcttagtgcaataataaatcgcataaaaggctttatcaggctaaggatagctctaggaacacttca

SEQ ID NO: 32387 - DNA, 242 bp, Glycine max
  Clone ID: 700894229H1
attctgtgaacatagatgcggagcgagggaaggtgatggtgtcagggcatgtagatccagctaaactgctaaaaacgctaaagaggtcagggaagcatgccgaactttggggtggccagagaggcatgatgtacaaccaaaactaccccacctaccctcagttcaagaacatgcacatagataacaccaaagggggcagcaaggacaacaagtctcagaatcacaaaggtggtgctcagaaa

SEQ ID NO: 32388 - DNA, 78 bp, Glycine max
  Clone ID: 700894231H1
gttagaatgaagctcctgcacaaacaagggaacaagcctcaacaagacaaaaacaacaactgcttccacacatcatac

SEQ ID NO: 32389 - DNA, 245 bp, Glycine max
  Clone ID: 700894204H1
gtgctctctcttcattccttccagttctgccatatctccctgtttcagcagatggatcagatggcctaaactatgatggtagagatggtaaaagacatggacgtggacattcatattcaagtgggtatggaggctcaagtgatttagcagctggtgacatttatggaagctatggtggttctcagcttggaagcaacagtgcttatggggcttatggaagttattctttgggacggtctagtact

SEQ ID NO: 32390 - DNA, 244 bp, Glycine max
  Clone ID: 700894232H1
ttaagatcaaaagaagttgcacattgtagtcagtcttcaattgttcaaatgaatggattggagactcacccttgaagattgatgttattgtgtaggatgactgactctgagtacaattgttattggtgatgaattgcatttatattttcctcttaaaaataagtgcatttttgttgttttttccaattccttttttgccaagtgcttcctggtatggccatatttaagtgcctttttttttgta

SEQ ID NO: 32391 - DNA, 247 bp, Glycine max
  Clone ID: 700894169H1
tttacttctcaggaggtataactactatttttcgctttttttttaaaaaaaaaattgattaaatcttttgccatgggaacccagattttgcgacctcaggactgcttggtagaacgaatcagggctcctccggctgacttttcccggcggaggagttccggtaattactgtaattattattactacaacaacaacaacaaccatgtcgccacttccaggtcgtgccggaagcctgttagccgacccg

SEQ ID NO: 32392 - DNA, 239 bp, Glycine max
  Clone ID: 700894170H1
gtgatttggagtttggagcgactgaactaatcattaatttgcactcgctgtttcagcttcatcacccttcttttgcatcatttatatctcttgagaaatggcacaagaaacctttctattcacatctgaatctgtaaacgagggtcaccccgacaagctgtgcgaccagatctctgatgcagtacttgatgcgtgccttgaacaggaccctgacagcaaggttgcctgtgagacatgca

SEQ ID NO: 32393 - DNA, 247 bp, Glycine max
  Clone ID: 700894172H1
tatatgcggatgatctgattgaagtcttgaagaaaaaacatgcttctggaacgtataaaaacctagtattttatctggaggcatgtgaatctgggagtatctttgaaggtcttcttcccgaagatatcaatatttatgcaaccacagcttccaatgcagaagaaagtagttggggaacatattgccctggggagtatcctagtcctcccccagaatattcaacctgcttgggtgatctgtacagtgt

SEQ ID NO: 32394 - DNA, 244 bp, Glycine max
  Clone ID: 700894173H1
gcaggtggtgggttggccacctgtgcggtccttccggaagaacatgttggctgtgcaaaagagcgttggagaagagagcgagaagaacagcagccctaatgcaagctttgtcaaagttagcatggatggagcaccttaccttcgcaaagtggacttgaagatgtacaagagttaccgagagctctctgattctttaggcaaaatgttcagctgcctcacctttggcaattgtgaatcccaagga

SEQ ID NO: 32395 - DNA, 245 bp, Glycine max
  Clone ID: 700894174H1
cttagttatctaattacctcaattaatcccttaattgcaagcatcatggctgaggagaaacaccaccaccacttccaccaccacaagggcgatgatgtgcctggcgaggttgattataagaaggaggagaagcaccacaagcatcttgagcaccttggggaacttggtgctgcggctgccggtgcttatgccttgcatgagaagcatgaggccaagaaagacccagagcatgctcacaggcacaa

SEQ ID NO: 32396 - DNA, 240 bp, Glycine max
  Clone ID: 700894175H1
cttccagtgacgtggtcatatgggaagaaatatggacttactctggaacaattgtctttattgtggagcaagaaacctgcaacactggcggggttagaatcaaaggggaccattgcagttggaaaccatgcagatattgtagtttggcaaccagagctggagtttgacctggatgatgattatcctgttttcatcaaacattctgagctctctgcttacatgggaagaaggttatccgga

SEQ ID NO: 32397 - DNA, 241 bp, Glycine max
  Clone ID: 700894176H1
ggaaaagccaaaactgaagctcgaggaagataactacgatgaaacaagaggaatggatgattacgacagcgttgctatcgttgctgtttgtttcatcttttccgccgttgagttacggagttgttcctcctcgtactctgctcaataagctgtcggagggcaaatatctcaacactcaggagctctggttcgaccaaaccctcgatcacttctctccctatgatcaccgacaattccggca

SEQ ID NO: 32398 - DNA, 242 bp, Glycine max
  Clone ID: 700894177H1
tagtgttcttccacccccgtaccgtctctgcctctctgcaatccacagccgaaaatgcctttcaagaggtacgttgagatcgggagggttgctcaaatcaactacggcaaggaatatggcaggctcgtcgtcatcgtcgacgtcattgaccagaacagagcacttgtcgatgcccctgatatggtgaggtcccaagtcaatttcaaaaggctttcccttaccgacatcaagattgacatcaa

SEQ ID NO: 32399 - DNA, 244 bp, Glycine max
  Clone ID: 700894179H1
gcgaatccctctctctatctctcacacacactttctctctctctctctctcacccagatcttgtagcaatggcgagcgctcccactccacgcgaagagttcgtgtacatggcgaagctggcggagcaggccgagcgctacgaggagatggtggagttcatggagaaggtctccgcctccgccgagagcgaggagctgaccgtggaggagcgtaacctcctctccgtcgcctacaagaacgtgat

SEQ ID NO: 32400 - DNA, 241 bp, Glycine max
  Clone ID: 700894180H1
caaattcagcaaatccgtagtgctttaagaataattgctgaattgtgtcaccgtttaagtcacatagtattgtgctgtgcttgagccttaaggtcctgtgttgtatgtatttgcttttatctgcctttatgacgcgttcatgtgaaagtacgatgtaataactgctcacctgagtactgttgttggtgttttggggtatgatgtatcataatgcttgacttgactctgagaaataataaat

SEQ ID NO: 32401 - DNA, 245 bp, Glycine max
  Clone ID: 700894182H1
ctttaactccagaagaacaagttcaacttgcaatagagtgcttacctacatcttcagaaaaagcacataatggaacaaactcttcgttctctcgttggaccataatggattattccagagcctacagctcgggagaaataacaccactcatggttgctgaacgatttattgccgctgttaatgaatcttcaaaacctccactccgaatgggattttttattcactacagtgctgatgatatacta

SEQ ID NO: 32402 - DNA, 246 bp, Glycine max
  Clone ID: 700894183H1
tttgcatgagcattttggcttaactaatcatctcaactgtggtacgagggtggatacttggcttaacaaaacatcacaactgtgtcacttagcttaaggtttatggcattaggcattttttttctttcataatttaattttcttgttatacgatgttacgttcaaaagtcaagcgaagagtgacttatttttcaatagttgtcttgttttctctgaatttgaagttacaacctccctattggtcaa

SEQ ID NO: 32403 - DNA, 247 bp, Glycine max
  Clone ID: 700894184H1
gtgataagctgtaatagtctttccaagatgccaaacattacgttcacaattggaaataaaccttttgtcctcacaccagagcagtatattctaagaactggagaaggcattacagaagtctgccttagtgggtttattgcttttgatgttcctcctccaaagggtccattgtggattcttggcgatgttttcatgagggcatatcacaccgtctttgactatggaaatctccaagttggctttgccg

SEQ ID NO: 32404 - DNA, 246 bp, Glycine max
  Clone ID: 700894185H1
ctttggcagaaccaatggatgttgatgatgcggacaatcgaagtagctggagaagtccacgtgaacagcttcaacattggcagatgaacaggaggaagttggcattttcaacagtggggacaccagactacattgctcctgaagtacttttgaaaaaaggatatgggatggaatgtgattggtggtcactgggagcaataatgtatgaaatgctggttggttacccaccattttactccgatgatc

SEQ ID NO: 32405 - DNA, 243 bp, Glycine max
  Clone ID: 700894186H1
gaaagttcaattccgcacaaattcgagtatactgctgatgtcgaagctcgcgttgcgcatgggtaagattctgatagaaaccgcgagaccgttctcgaattgttcgtcgtagtcagcgtctccgttgtcggcgccgacggtaacgacgtcgtcgacgtcgttgacggacacggtgatggggtcgcaccggttcaagatcacggggtattcgctgtcgaaggggattgggattgggaagtacat

SEQ ID NO: 32406 - DNA, 249 bp, Glycine max
  Clone ID: 700894187H1
ttcatacacttcttctgcaaacaaaaaaaatccccgcattagggtttcctttctccggcgacaatggaggtagctgcgaacgcgcggaaccccgccgctaagcgaaaattcgacgacgccgtttctaacggcgtcgccgcccccgccgacgtcgatctctccctcctcgaagccatcgagaagtcgcagaacgcggtcgaagccctcgatctccgagccctaaagaagcacgtgctctccttcgagcgt

SEQ ID NO: 32407 - DNA, 246 bp, Glycine max
  Clone ID: 700894188H1
cattcctctcttatctctagctatataataaacttttcctgtttccactcatcgatatctaacgctttagtcttgcaattgatatataattatcatccaaaacatgtcaccaacaaacaatacttttgcaatttttgtcatcttctgctgtgccatatcctttgccttcgcttctgaccctgacacacttcaagacctttgtgtggcacttccctcttcaggtgtgaaggtgaatggatttgcctg

SEQ ID NO: 32408 - DNA, 243 bp, Glycine max
  Clone ID: 700894189H1
gtgcaaagggtaaccgttctgctttgccatcatcaacaataatgataagacagccaattgcaaggtttcaaggtcaagcaacagatgttaaccttgcaagaagagaagtcaataatgtgaagacagaattggttaaattgtatgcaaagcatatggaaaaaacacctgagcagattgaagctgatattcagcgtccaaagtattttagccctagcgaagtgtatgagtatggcatcatagata

SEQ ID NO: 32409 - DNA, 244 bp, Glycine max
  unsure (1)..(244): unsure at all n locations
  Clone ID: 700894190H1
gtcttgttatatgcttgacaccaatttcttttcttaatctatctcattctctaacacactcanatgcttggctcttattcctattctcatggttggtgctgtttcagaaatatttgttccgtatagatttgctttcctctttatgtttttgacagaaactgccacgagccaacgaccttctatcttccatacaaaccattactaccctgttaggaattttctgttttgttgatcttagaggctg

SEQ ID NO: 32410 - DNA, 241 bp, Glycine max
  Clone ID: 700894192H1
accagtttcactgcataaatttgagagaaaactctgcaaacatgttggtttatcaggacctccttacaggtgatgagcttctctcggactccttccgttacaatgaaattgagaatggaatgctgtgggaagttgaggggaagtgggttgttaagggagcagttgatgttgacattggtgcaaacccttctgctgagggtggagaagatgagggagtcgatgacgcagctgttaaggttgt

SEQ ID NO: 32411 - DNA, 241 bp, Glycine max
  Clone ID: 700894193H1
gcgacgacgatccaagtgatagacactcgttgcgatggaacttgtagctgaatccgagcgaactctgtacccatacgtgactggatcctctgtagtcgctatcaaatacaaagatgggattctaatggccgctgacatgggaggttcgtatggatctaccctgcggtataagagtgttgagcgtatcaagcctattggaaagcattctcttcttggtgctagcggggagataagtgacttt

SEQ ID NO: 32412 - DNA, 242 bp, Glycine max
  Clone ID: 700894194H1
gccaatatggaaacgcagattgactactgttaaaaaaaaaaaagagcggaggaaacatgcatattcttttgatagagtttattagtttcatgtttaaagtatatccagtagtaaatcgattcattcttgtataggcttggcttgaccatgcagtgagggttctgtttcctccaaatgcaccgtctcttataactgattgatgattcttgagttgtcagttgctagtgtagccaatatggaaa

SEQ ID NO: 32413 - DNA, 241 bp, Glycine max
  Clone ID: 700894195H1
acggcccggtttgttatcttttaaagaccgttcgggtcgggtcaggacccggttcgggaatggggatttgttcgacccatttttgtttggtgaaagtgaaggacttcagggaaacggtgcagtcgcagctaaaaaattgttggcttttgcagagccagtgccagtggaataactataaatgaatcaatgaaaatattcaatattgtacatttttttctcattgagtaatttttttttggtg

SEQ ID NO: 32414 - DNA, 244 bp, Glycine max
  Clone ID: 700894196H1
ccaccacacctctcctcgttcacgctacccctttcagctcttcttctacctttcaagttttaaaagtataaagatggcagagacattcctatttacctcagagtcggtgaacgagggacaccctgacaagctctgcgaccaaatctccgatgctgtcctcgacgcttgcctcgagcaggacccagacagcaaagttgcctgcgaaacatgcaccaaaaccaacttggtcatggtcttcggagaa

SEQ ID NO: 32415 - DNA, 138 bp, Glycine max
  Clone ID: 700894201H1
gctgcgaaaacccccaactccaacctctgttcatcgtctaccgcgctttcttttcaaccagaactatgattaagctttttaaagtaaaggaaaagcagagagaacttgcagaaaatgcaagtggcggaccacctgtta

SEQ ID NO: 32416 - DNA, 249 bp, Glycine max
  Clone ID: 700894168H1
ggcaaaatggaaagcagaccatactggacgctgccgtgctatgccacatataaagacttttgctcgttacaaaaatcagagtcttgcttggttcttgttaacctcggcaaatcttagcaaagctgcctggggagctctccagaagaataatactcagttgatgattcgttcatatgagctgggagtactatttttaccatcattattcaaacgacacgaatctgtattttcctgtaccagtaatgttac

SEQ ID NO: 32417 - DNA, 247 bp, Glycine max
  Clone ID: 700894203H1
ggtttggtgtggcgattgctactggcacccaatttattcagaattttcctgagcgaacttataaatcaatgcttattccacttctgcaagaagataatagagctggcgaaacaactcgcaaagggttttatttgtatgatgataaacgcaaggctagtcctgatcctgaattgaagaactatattgagaaggctaggagcatttctggtgtctccgttgatccaaagcttgccaaattacaagaaaa

SEQ ID NO: 32418 - DNA, 251 bp, Glycine max
  Clone ID: 700894131H1
cagcttttctagcttttcctttctcggcttcaatactcctctctcaagcattagtcccttcaccttcatccctcttgccccaaatctatagccgcctaaggactctctttgatgctgcaggcttcccttcttcacacttgtttaccattctcaacctcaaggtctctcaaacaatcacttcttcaatcctcgcccttcctttcaccctcacttttcttctcattgcaaaagcatccataatccaggctctc

SEQ ID NO: 32419 - DNA, 261 bp, Glycine max
  Clone ID: 700894132H1
ttcggctcgaggtccttgaagtacagctctgcagtgtcaactcttcttgcagtggcatttgttggcatatgttgtgggttggctatcacagctctggtgcaaggaaaaacacaaactcctagattgtttcctcggctagactaccaaacctcattctttgatctgttcactgcagttcctgttgttgtcacagccttcacatttcactttaatgtgcaccccattgggtttgagcttgccaaggcatcccaaatgacaaca

SEQ ID NO: 32420 - DNA, 254 bp, Glycine max
  Clone ID: 700894133H1
gcgtttcaaaaaaacgtgtctctctattttgaatctggatccagcgccttctattcagcattcacccaaaccctatttctctctctctttcttccctgtttggtatcagcgagcacaatgaggagaggagctaagagaaagacgaagcaggaccaagaagccaaacacgtcgcagccgaagataacaagaccgaagctcagcctcgagctaaacgggccaaaacctccaagcctcaatccgaacctgagtactt

SEQ ID NO: 32421 - DNA, 249 bp, Glycine max
  Clone ID: 700894135H1
cgctgagaagcttgaaatgctgtccattgcatttgctggggagagcgacaagggaatgctctatgtgttgaatggatgcaagaagcttaggaagcttgagattagagactgcccttttggcaatgtggcacttctgacggacgtagggaagtatgaaacaatgcgatccctttggatgtcgtcctgtgaagtgaccgtcggagcctgcaagttgctagcgaagaagatgccgaggttgaacgtggagat

SEQ ID NO: 32422 - DNA, 252 bp, Glycine max
  Clone ID: 700894137H1
gccatggcggtttccgcaattggttttgaaggtttcgagaaaaggttggaaatatcctttttccagccgggactttttgctgaccctgaaggaaggggtctaagggctcttacaaaatcccagttgggtgagattctaacaccagctgcttgcaccattgtttcttcgctcaaaaacgataatgtcgactcctatgttctatctgagtccagcctctttgtttatgcctacaagatcatcatcaaaacctgt

SEQ ID NO: 32423 - DNA, 251 bp, Glycine max
  Clone ID: 700894138H1
ggaagagaactggaagtggctgttcaaagaaacaggtttcgcccgttacaacatcatcaagatcaacgctcttccttccatcattgaggcgtttccaatctaacgaagaggaagccactacacttcatgtgcgtggttttatgttgcatgtgttgttattattattaacagctatgtgatcttcgtgtgatgtggttttcatccctacccgtgttatgtttgtgtattaaataaaagtatgaagcgcccca

SEQ ID NO: 32424 - DNA, 247 bp, Glycine max
  Clone ID: 700894139H1
gaggaaactaacctaagcaacacgcatccacactgattccaaaccttgcagttgcagagcagaggttccaatggctactgcgcataacactctttcctctctcctcgcgcctcaagctaccggacgaaccactcttcgtattccaatttcttcaaaacgccacaggaaaaaccatttgcgacccaaaattctgaaaatccttactaaaccctaccccctcgcacttcctcttctaccgtcactgccg

SEQ ID NO: 32425 - DNA, 252 bp, Glycine max
  Clone ID: 700894141H1
aaagaaagaaagaaagaaaaccctagcttaccttttcaactttcaagatgcaaatctttgttataacactcactggtaagacaatacacccttgaggtggagagttcagataccatagataatgtaaagtccaagattcaagacaaggaagggatcccaccagaccagcaacgtctcatttttgctggcaagcagcttgaggatggacgtacacttgctgattacaacattcaaaaggagtccactctacac

SEQ ID NO: 32426 - DNA, 248 bp, Glycine max
  Clone ID: 700894142H1
taaaaaaaatacatcaagggaggctgatttcttcaagcaacaaacgcagtaccaaaatcatctacagctagtttagctcaaatcattttcaattcggaaagaaaaaagtcctttccaagatttcattgccatccatcatcaagaagatacaaatcatcacagacaaagtgctgttattactagaattgcattatacaggcttaagtgcagctatgaagaagtacccaaaaaaagtggttaaattagag

SEQ ID NO: 32427 - DNA, 249 bp, Glycine max
  Clone ID: 700894143H1
gtttgttgtttcgtttttcctttcctttccgccagaatccgttgagaatggcgttgccggtagtcgtcgatgcagagtacctcaaggaggtcgacaaggctcgccgcgatctccgcgcactcatcgctaacaggaactgcgctcctctcatgctccgattagcctggcacgatgccggaacttacgatgctaagaccaagaccggtggacctaacggttcgatccggaacgaggaagagtattctcacg

SEQ ID NO: 32428 - DNA, 74 bp, Glycine max
  Clone ID: 700894144H1
atctttctccgtgtctgtactagaaatctagaactacaaagaatcgctctcttggagcgtttccctccacagaa

SEQ ID NO: 32429 - DNA, 248 bp, Glycine max
  Clone ID: 700894145H1
cggctcgagtgagttagcttgctcttggaattaatcgccactttttttgatataacagatcaaactgaagacgctggtcacaataagtgaataaagctcagatcgagtttcatcagagtcacaataatgaagcaagaagtggttccaaggtcactagcaccaccaccaccaccaccacctcctccacttccaaaattcagggtcttctcaagaccaagagcagaagagagtgtcacaaaccgagaaat

SEQ ID NO: 32430 - DNA, 245 bp, Glycine max
  Clone ID: 700894148H1
gattcgaatcgttcccagcctcgcaccaccatgaatcccgaatacgattatttgttcaagcttttgctgattggagattctggtgtaggcaagtcatgtcttctcctgaggtttgctgatgattcataccttgacagctatatcagtaccattggagtggactttaaaatccgcactgtggagcaggatgggaagactattaaacttcaaatttgggacactgcgggtcaggaacgtttccgaac

SEQ ID NO: 32431 - DNA, 85 bp, Glycine max
  Clone ID: 700894149H1
gttttgttagcttgagttctttgtaaatcatcaccttcagtttagtgtcttcaaatttcaaataataatttatgatgattccttt

SEQ ID NO: 32432 - DNA, 203 bp, Glycine max
  Clone ID: 700894150H1
tttacaatggattaccgttatccactctctgccttccaagcctttgccatatgcttgagcagctttgataccaaaccagcctgtgaatgagaccgatggcactggatcatctgctggagcagcattgataccaaaccagcctgtgaatgagaccaatgacactggatcgtctgctggtttgaaccatatatatataattggca

SEQ ID NO: 32433 - DNA, 251 bp, Glycine max
  Clone ID: 700894152H1
ggcattcacacactgcactgcactgcacttcacttcacttgtcgcttaattcgtcaatgtcatttggcattcattaatggcagcgagttctagaggcttctccactacgcagtttgatttcaagctcagagtaacgcgactcaatgccgctctgcttcctaagagtcccgtgctcgaattaggtcccagaaagcgtagaaagctttgtttcgacgctgaccgagttcgactcggtaatggcgcaatacgct

SEQ ID NO: 32434 - DNA, 157 bp, Glycine max
  Clone ID: 700894153H1
ctggaatgctttgattgcagtgtaataatcttgtgagtatgaaaagtcacgggatctgcgtgttgcgaagaaagtgtttgatgcttgagaaatgatgactataatctctatctttgtacttttttagtggggtacctgtatacattacactggtttt

SEQ ID NO: 32435 - DNA, 248 bp, Glycine max
  Clone ID: 700894154H1
cttttctcttctccctttttctctctgtctctatctctcggtctcgctcttcttctcatcaagcacagagttacagactcaccgatcttccgattctctttcgtcttggtttatgagctcgaaggagagacccactcttggtggcacgcggattaagacccgcaaacgaaatattgctgcgccgctggaccctgcagcattctcggatgcagtggtccagatttatttggataatgctggtgatctgg

SEQ ID NO: 32436 - DNA, 251 bp, Glycine max
  Clone ID: 700894155H1
gtacatttttatttttatctttttttttttgcagacgagcaatctcaaatgattacaaagagcatttcacgaaggaccggccatggattcaacttgatactttctcacgtaatcgccgatagttcttcttccaccagagacgctcgcgtttgttacactttacccatccctggcgctcctcaactctttttgacacaaagagtggacaaccgtgctgacctcagtgattttgagatatgtaacagatacaa

SEQ ID NO: 32437 - DNA, 249 bp, Glycine max
  Clone ID: 700894156H1
cgctgaactcatcacttactggaagccttgttgtgagtaagagaaaaggcttcctgcaccgagcacaccaacttgatacctctgattctttctttgcttagaattccacataatatggagaacattcttttcaatcactccccacctttggaattcaagggtttgagcaaggaggaggaagactcattgctagggcaagtggaaatatggaggtacatgacatgcttcacggactccgtggccttgaaa

SEQ ID NO: 32438 - DNA, 248 bp, Glycine max
  Clone ID: 700894157H1
ctgcatcggaagaaaccctagccactctcccggcgtcacgatgcagatcttcgtgaaaaccctaacgggtaaaacgatcacgttggaggtggagtcttcggacaccatcgacaacgtgaaggccaagatccaggacaaggaaggcatccctccggaccagcagcgcctcatcttcgccgggaagcagctggaggacggccgcaccctcgccgactacaacatccagaaggagtccacgcttcacctcg

SEQ ID NO: 32439 - DNA, 244 bp, Glycine max
  Clone ID: 700894159H1
ctggtggactggttgactatgatgatgatgaggatgaagattacaggccacccccaaagaggccagaagcttctgaagaggatgaagggataatggagtctctcaggcagaaaagaaaattgccttctgagaaccctgagcttgcaaagaagttgtcaaaaaactcaaaatcaaaagatagtgtttttgcttccttgtgttcaacattgagccagactgtgctgcctggtaagaaaccttcagt

SEQ ID NO: 32440 - DNA, 246 bp, Glycine max
  Clone ID: 700894163H1
cttcttcttcaaagattctgtactatatacatcaagggaagaagagaagggcataattaagcagctttcagtggtgtaatcatattgcagtgttgatggggcatttttcatctgcgttcaataggttggcaaagtcattcacaacgaagaaaggaaggagttctgatgaatgtaatggaagagaagccgcggaagcaatggcaaaggaagccaaaagaaatcacttcatgttgcatagctctggca

SEQ ID NO: 32441 - DNA, 263 bp, Glycine max
  Clone ID: 700894164H1
ttcggctctcggttctagatcatctctaccctcttggcttttgcaattaaagctcaaaatcatggcatcagtgcgattggaaaatttcaacaaggaataaatcctccatcatggaatatgttgctctttcatggaagtcacctaggcctagttatgaaaacagggcttatcaccgggattttgtccctcactgaaggtattgcagtaggaaggacatttgcagctctcaaaaactacaaagtggatggaaataaggaaatgat

SEQ ID NO: 32442 - DNA, 245 bp, Glycine max
  Clone ID: 700894165H1
ctccagagagaagaagaaacttaatcgatcatcacttcacttcactaatacatcatggcagacgagacccagaacaagtatgagagctctgaggttgaggtccaggatcgtggtgtttttgactttctcggtaagaaaaaggatgaagaagacaagcctcatcctcaggaggaggtcatcgccaccgagtttcaaaaagtcactgtctcagaccaaggagagaacaagcacagcctcttagaaaa

SEQ ID NO: 32443 - DNA, 244 bp, Glycine max
  Clone ID: 700894167H1
cactcattaattgcaagaatggcacttcgttgcttggtgatgtccctttctgttctcttcactcttggtcttgcgagagaaagccatgccagagacgaagatttttggcatgctgtttggccaaacactcccattccaagttcattgcgagatcttctaaagcctggccctgcaagtgttgaaatcgatgatcaccctatgcaaattgaagaaacacagtacccgaaaaccttcttctataaag

SEQ ID NO: 32444 - DNA, 249 bp, Glycine max
  Clone ID: 700894130H1
aaaaatgaaacctgttttctgtggaaacctggatttcgacgcgcgtcaatctgacgtggagaggctcttcagaagatacggcaaagttgatagagttgacatgaaatccgggtttgcttttgtctacatggaagatgaacgtgatgctgagtatgcaatcagaaggcttgatagaacagaatttggtagaaagggtcgccggaaccgtgttgagtggactaagcaagaacgtgacagtagaagatcagg

SEQ ID NO: 32445 - DNA, 248 bp, Glycine max
  Clone ID: 700894092H1
caatatttgcccttagcagtaacaaaattgctgtggtcaagtattctctgttgggttctattctttcaaaccttcttctggttcttgggacctctcaattatgtggtggcaatgaaaccttaaagtggaacaaaaatatgacagaagacaagcagatgtgaactcacttatgctgttgttgggattgttgtgctacttgcttccaatgctgttcaaatacagtggtgcctcagctgctctcactgtag

SEQ ID NO: 32446 - DNA, 252 bp, Glycine max
  Clone ID: 700894093H1
ttgatgactagagagcaaagttgtatgctagtattgtggataaaggttgtgccgcaacgtttgcatttgcagctataatatttggtgaatcctcagaagctctgttttggctacagctgcctcaggcacttaaacatttgttgaacaaggtattgagaaagcctccaccaaaagaatccacagcagcacctatctctgatgttgatcatgagacatctctactatctcggatatcatcaaagggaaaaccga

SEQ ID NO: 32447 - DNA, 159 bp, Glycine max
  Clone ID: 700894095H1
agtcccatccgaatatggtaattcttggtgacgaagttgctgcatcaaagcttaacctttgctgcaattgtcaaacacggttactgaatgcaattcaggctagagctatagaagacaaataccatggaggtcatctccttccagaaaggctgatagaga

SEQ ID NO: 32448 - DNA, 259 bp, Glycine max
  Clone ID: 700894101H1
ctcagaattctctaaaagagatctttttctgctctttgaagaaagaagggtctttgcttgattttggagatgtctctgctctcagatctcatcaaccttaacctctccgataccaccgagaaggtgatcgcagagtacatatggatcggtggatcaggaatggacctgaggagcaaagcaaggactctcccaggaccagttagcgacccttcagagcttcccaagtggaactatgatggttccagcacaggtcaagctc

SEQ ID NO: 32449 - DNA, 254 bp, Glycine max
  Clone ID: 700894102H1
ctaagatgcaggttgtggttgataaatatcctacatggggtgatgttgttcaagtagacacgtgggtttctgcatcagggaagaatggtatgcgtcgtgattggcttgtgcgtgacgccaaaactggtgaaatcttgacaagagcctccagtgtttgggtcatgatgaataaagtgacaagaagactgtctaaaattcccgaagaagtcagggcagagataagctcttattttgtggattctgctccagttgtg

SEQ ID NO: 32450 - DNA, 257 bp, Glycine max
  Clone ID: 700894103H1
tattagagttacgaacaaagcgtggtgatacacccactaatgttagtgatcaatgtccttgtgacacacctaaaagctgtaaaataaaagaatcacaaaattatagtaggatggacactttagaaacttcccatgattcttaccatgaaaatattttagaaagcataaaaacagaaatcgaaatacaatatgaattatccgtagcataatctgattaaaattccgtcaaaattaataaaattataactttcgataat

SEQ ID NO: 32451 - DNA, 256 bp, Glycine max
  Clone ID: 700894106H1
cggaaaagaagtggtggcttgtccctattcattgaatgaatcgataaggtgtccatatctatcatcaaatcattcaaatgcacctgttgttgtgattgtgaaactaaaacaccgtatcttatcgatcttcaaacacagcaaaacagtggcatcagttattttgaggttgttttgttgggtggcggcggagagtggaagctgctaattaaaggaaggaaagcattgctgtgtgtcagtggaatacaactactacagt

SEQ ID NO: 32452 - DNA, 254 bp, Glycine max
  Clone ID: 700894107H1
aaagaatgcccgtggacagcaggggtcttatccaatcaagtcattttatacctccaacatgcccattattcttcagtctgcccttgtttccaatctctacttcatttctcagcttctacacagaaagtacagtggaaacttcattgtagatctattgggcaaatggaaggagtctgaatatggaggtggtcagtctgttcctgttggtggtattgcatactacatcactgcaccttccagcttagctgatatgg

SEQ ID NO: 32453 - DNA, 256 bp, Glycine max
  Clone ID: 700894108H1
gcgaagagaatggctcccaagggtttaatctttttggctgtgttatgcttctcagcactgtcactgagtcgttgtcttgcggaggataatggacttgttatgaacttctacaaggaatcatgccctcaggctgaagacatcatcaaagaacaagtcaagcttctctacaagcgccacaagaacactgctttctcctggctcagaaacatcttccatgactgtgctgttcagagttgtgatgcttcactgttgctgg

SEQ ID NO: 32454 - DNA, 256 bp, Glycine max
  Clone ID: 700894109H1
tgcttccctgcattggcaagaagattccctattggtttctgccacagtcttcaacacagctacgaatacaatcaatctgggcctccctccattaagatggctgcagaaggctacacttttgggtctaacaagatacaccacactgaagtgttctactccacaaatctctcttacgccatggttaacctgcgtcctcttctccctggtcatatcctttacatgggtttcatgtttcaataacacagtgatggggtgg

SEQ ID NO: 32455 - DNA, 255 bp, Glycine max
  Clone ID: 700894110H1
agtaggagcccttacaccttgcagaatcatctctacattcccaagggctcctactacgcaataactccaagcccgatctcaaattaatatttcatttactcatcttaatcaatattaaataagaaaagatgggagagatgtcaaacttccaattgggtgtgattggtgcactatttctctctgtggcttcttctgtctccattgtcatctgcaacaaagccttgatgagcaatcttggcttcccttttgccacaa

SEQ ID NO: 32456 - DNA, 248 bp, Glycine max
  Clone ID: 700894113H1
tgttgaagcatgagacaaagcatgaacacatctttgtggttggaaatactggcaagaagtttgagattattcttgattttcttggtttggtggagaaattttattacctctcagggagatatgacattgagctgactgtcggggatgctgtcatggagaactctttcttatggctgcttggtcaagttgatttagatcttcctgaagcacctgagaaggcagcccgtcttcctccactccctgttgat

SEQ ID NO: 32457 - DNA, 151 bp, Glycine max
  Clone ID: 700894114H1
ctaacgccctctctctccaatcccaaggcgccaccctcgccctctccccggcccaactggcccaactctccgacgtcctcttcaccatggtgggccccccctccgacgttcgctccctcctcctcgactcccccgtcctctcctccctccg

SEQ ID NO: 32458 - DNA, 250 bp, Glycine max
  Clone ID: 700894115H1
ctgccacaatgcctcctgaggcccttgagatcaccaggaagtttatgaacaaacctgtgaggatccttgtgaagcgtgatgagctcaccttggagggtattaagcaattttatgtcaatgttgaaaaggaggaatggaagctggacacactctgcgatctttatgagacattagctatcactcagagtgtcatttttgttaacaccagaaggaaagttgattggttgactgacaagatgagaagccgtga

SEQ ID NO: 32459 - DNA, 251 bp, Glycine max
  Clone ID: 700894116H1
aagacaacgactgttgtctgacatttcgagattggaggccaaagtggagaggcttgaaggtcaactacaagtcaaagacagggagatagcgactattactagaacggaagctaaaaacactgcagctctgaaggcccaaattgagaagctgcaacaggagagggatgaattccagagaatggttattggtaatcagcaagtaaagactcaacaaatgcatgagatgaagaagaaggaaaaagaatacataa

SEQ ID NO: 32460 - DNA, 267 bp, Glycine max
  Clone ID: 700894117H1
tccgctcgagagagcagtgtcgtgtgtgtgtgtgtctctctctttctctgcttttgagtaattaaatgagagcaaaaatgacgctcaaaacagcggcggtggctgtggctatagtgtgcatttctgcctttagcatcactgtggtggctgaagatccatacaggttcttcaactggaatgttacatacggagacatttatccacttggtgttcgccaacagggaatacttatcaacggtcaattcccaggtccagacattcattctg

SEQ ID NO: 32461 - DNA, 256 bp, Glycine max
  Clone ID: 700894118H1
tggagcggcgaagatagagtcagatcggaagcggaagaaggcgtcgacctcggcggcggagaaggagaaccggaataagaataagaagttgaagatgtcgtcgtcgtcgtcgaaggctggtggcggtggtgaggttagggcttcgcacatattgataaagcacgaaggttctagaaggaaggcctcgtggaaggatccagaaggccgcatcatcaagagcacaaccagagaaaacgcggtttctcagctcaaggcc

SEQ ID NO: 32462 - DNA, 254 bp, Glycine max
  Clone ID: 700894119H1
ccatctcacacacccctcgcatccaacaatgtctctcaccattccctccaacctctccaaaaccgccgccctccgccccaaactaagcccaaagctaaggtccgccgccacaaccaccatcgtctgcagcaccaccaacaacaacaacaacaacaacgtgtcctccgacctgaaggcgttctccgccgcgctggccctctcctccatcctcctctccgcccctctccccgccggcgccgacatctcggggctca

SEQ ID NO: 32463 - DNA, 255 bp, Glycine max
  Clone ID: 700894120H1
gtatgtttgagaagtaagaagcatggctcagtatggttacgcataccgaagcgctcaaatatccacctacaacactagatatgtgagaaacattgaaactggtgcaaagccatttgctccctacgaccccaaatttagtaacggtaatggttactcagacgggatcgttaccaagaaaaaaataattccagttgctagcaggccttattatgaggacgagagtgacaacgaccatgatgacgatgaagggaagca

SEQ ID NO: 32464 - DNA, 254 bp, Glycine max
  Clone ID: 700894121H1
ggcaactaacagacctgacattattgacccagcacttcttcggccaggccgtctggatcaattgatctatattcctctccctgatgaggattcccgtcatcaaatctttaaagcctgcttgaggaagtcacctgtcgcaaaaaatgttgatttgagaacattggctaggcatactcaagggttcagtggtgctgatattacagaaatatgccagcgagcatgcaaatatgcaataagagaaaacatagagaagg

SEQ ID NO: 32465 - DNA, 251 bp, Glycine max
  Clone ID: 700894122H1
atttctttgtggaattttgtgtgagtggaactggaagtctcgttgattttgttgaattattgtgtgaggactgaatcctgatgcatatgtacgaatagttgacatttttttgcctcttcattcaatgcccacctttgaagggaatggatagtcgcttcttgaaggaattagggctcaaattggttcaaagttaaccaatctattatctaactaggtaaaaatctcacccagatgtcaaatgttgggaactc

SEQ ID NO: 32466 - DNA, 256 bp, Glycine max
  Clone ID: 700894123H1
cgatggtatagggttttccccggcgggatacagtcccgtaatcccttcttcatcctgttttcctaaaaaattgagagtccagccgcaacgggccttgagctctgacccctacgttctggaactcgccgaaaccctagaagactccttcccctcctctgcctccaccccactccctctccagaacctccgcctctcctcctcccaatccctcctctccactccatggccctcccgccgcgacgagcccttccgcttt

SEQ ID NO: 32467 - DNA, 252 bp, Glycine max
  Clone ID: 700894124H1
gcaaaacctgatctggtaaagaaagccttgaagtatgtacattctgctgtacttgataaacttggtgggaaagaactagagttgttgattgccattcttccagacaacaatggctagctgtatggcgatctcaaaagaatctgtgaaaccgatctggggttgatttctcagtgctgtcttacaaaacacgtattcaagatcaataggagttatttggcaaatgtggcactaaagatcaatgtcaagatggga

SEQ ID NO: 32468 - DNA, 250 bp, Glycine max
  Clone ID: 700894128H1
gaatgttttggaggcatttcgaagggctataacaacttggagtagatggattgatgccaacataaatcaatctaagtctatggtattcttcagaggctattctgcttcacatttcagtgggggacaatggaattctggtggacaatgtgacagtgaaaccgtgcctatcaagaatgagaagtacttgagggaatacccccctaagatgagggtattggaaaaggttttgaagaacatgaaagcccatgtc

SEQ ID NO: 32469 - DNA, 248 bp, Glycine max
  Clone ID: 700894129H1
aagcacaaaaaaaaagtgtctggtcccaaaatacaacaagagtgtaaaatggtggtggcagagttcactagtggtggcttgaggggaatgaaggccttcagctaccatgttctcacggggcgttggttcatgctatttgcatctttactcatcatgtccgttgcaggggcaacctacatgtttgggatatactctaacgaggtcaaaacctcattaggggtacgaccaatccactctcaacttgctaa

SEQ ID NO: 32470 - DNA, 247 bp, Glycine max
  Clone ID: 700894091H1
cacttctggatgcagaccttgaaagtgatatcttgggttggcaatatatctcaggaggcttaccagatggccatgagcttgagcgcttggacaatcctgagattcaaggggctaaatttgatccagaaggtgaatatgtgaggcaatggctacctgagttggcaagaatgccaactgagtggatccatcatccttgggatgcaccacttactgtgcttcgagcagcaggagttgagctgggccagaa

SEQ ID NO: 32471 - DNA, 246 bp, Glycine max
  Clone ID: 700894058H1
attaattgcaagaatggcacttcgttgcttggtgatgtccctttctgttctcttcactcttggtcttgcgagagaaagccatgccagagacgaagatttttggcatgctgtttggccaaacactcccattccaagttcattgcgagatcttctaaagcctggccctgcaagtgttgaaatcgatgatcaccctatgcaaattgaagaaacacagtacccgaaaaccttcttctataaagaagacct

SEQ ID NO: 32472 - DNA, 248 bp, Glycine max
  Clone ID: 700894059H1
cacttctggatgcagaccttgaaagtgatatcttgggttggcaatatatctcaggaggcttaccagatggccatgagcttgagcgcttggacaatcctgagattcaaggggctaaatttgatccagaaggtgaatatgtgaggcaatggctacctgagttggcaagaatgccaactgagtggatccatcatccttgggatgcaccacttactgtgcttcgagcagcaggagttgagctgggccagaat

SEQ ID NO: 32473 - DNA, 257 bp, Glycine max
  Clone ID: 700894060H1
cttcttccaaatttccaacttccctctgcctcttctaatggtatcttatctttcgatcgaagggtttgcaagggcttaagctcaaccaaaccctaaaccctaaatttccctatttcttttctcgatcttccactctatctctttccttctcataaatttcgcatccatattctctcacctcatgcactcagatcaaatccgcactcttttatcactgaagtgagtgacgttgttgaggtgtggttcttggtggggta

SEQ ID NO: 32474 - DNA, 259 bp, Glycine max
  Clone ID: 700894062H1
tgagaattccctgctgttttatacagcaggtcttgagattcaagggcaggtcttggggcgaaacagacccgagattcggtgagacgtgtcgctatgtggccgaggcacatgttcaggcactgcagtttgatgaggctgagaagctgtgccagatggctcttgacattcacaggggaaatggagctcctgcttccatcgaggaagctgctgataggagactaatggggcttatctgtgactcaaagggtgattatgaagc

SEQ ID NO: 32475 - DNA, 207 bp, Glycine max
  Clone ID: 700894063H1
tcgaattctgctttcttctgatggagagatgttgagttctatgaaccttcttctttacatggctccgattactgtagttatgccgcttcctgctagacttataatgtaagaggatgcagcatgtattacatatgctcttgtctgatatgatgtgaagaacattaggtatctgctatttacttcagcacttggttattttgtcaacct

SEQ ID NO: 32476 - DNA, 242 bp, Glycine max
  Clone ID: 700894065H1
ctaaacaacaaaatagacacctgttaataaggaggacaacgatggtgctgccgctatttactgctttcattctctttgcttttattccgaatggattgttagcagttccttccaccgtcccggcattcctttggtcatcacattatgaactggcctctgaaaatatattgaaggaatctgtaaattaccaagtcatttctccgaaggatctagcaaaatctattttatctgaagcaggctgg

SEQ ID NO: 32477 - DNA, 241 bp, Glycine max
  Clone ID: 700894066H1
gttcgtgtccattcctagtgctgatgctatttacatgaagtggattctgcatgactggagcgacgagcactgcatcaagatcttgaagaactgcaggaaggcaataccagagaagacaggataagtcataatcgtggatcacgttcttcgacccgaaggcaacgaactcttcacagacgttggcatcgcattcgacatgatgcttctcgctcacaacgccggtggcaaagagaggaccgaa

SEQ ID NO: 32478 - DNA, 238 bp, Glycine max
  Clone ID: 700894068H1
agctgaaggcggtgtcggaggagaaccctaacgagactgtgaaaagggaaacggtggatctcggaaacggaagcgacgtcgtttacattcagaggttaataccctccgatcaatcatggaaatggttccattatctcgacaaacacatcccatggaccagacccaccattcgcgtcttcggaaaatctttccttcagcctcgagacacatgttatgttgcaactccaggattgactga

SEQ ID NO: 32479 - DNA, 239 bp, Glycine max
  unsure (1)..(239): unsure at all n locations
  Clone ID: 700894069H1
gcttctagtaaagataagacactaaagatctatgaaggaagttaccacggcattttggaaggggaacctgatctgctgctccatggagaatcaataatggagcagaaacctgcatcaccctcatgttgccacctactgcacttttaagggtattaaatcttttgtctaaggtgatgccagaggcaaaactgtttccacacaacatacgaatcaaannnnnactagccttgtgtaattgt

SEQ ID NO: 32480 - DNA, 178 bp, Glycine max
  Clone ID: 700894070H1
ggagatggtagtggaagtgtcacttctattttcggatttgcgttttagattggagtaggagatattgattggattgctattggtatagagttatgatgtgttgtcgaatcttgttggtggttagcgctctctagatagaggcacaattaggagggtgttattccattcccggcatctc

SEQ ID NO: 32481 - DNA, 226 bp, Glycine max
  unsure (1)..(226): unsure at all n locations
  Clone ID: 700894072H1
gttgtaaagctgtatagattttattctaaactgtaaactggcatgttgcaatgcgatatgtcagtttacagtttagaatataatctgtagagctttaccagacataagtcttgtaagaactgctcgtgttccggctcagagtattcgtgcacacaaagtaaattatcttgctttcaccaagcccannaatagttgtagagctgtatagattttattctaaactgtg

SEQ ID NO: 32482 - DNA, 242 bp, Glycine max
  Clone ID: 700894073H1
gtcttgtttgttatgtttttcttcccttgtctacatctatatttattagaatttattggttgtgcatatcaattccaaagtaccctattgttcatttttttttttctgatttattgctattccacaaatcggacgttataaaggaaaccaattgtttaatatattaaggagtcttcaagagattgtcttgccctttggtttgctataatcaaacgctcaaccacttggtaaaaaagccttat

SEQ ID NO: 32483 - DNA, 247 bp, Glycine max
  Clone ID: 700894075H1
gaatacttctaccccttggcgggaatcaggctcataagggaggacttgaactacaagaataaacccatcatccctgtgctcaaccctcaaggccgggtcgtcaactacaatgcaatgcacatgattttcgtctggggcatcgatgccttccctttcagaccctctgatgatgatgtcctcacccagaaatggaattggttctgggccgaaatgaagaaagtcaatcccaagctgcaagaccttataa

SEQ ID NO: 32484 - DNA, 252 bp, Glycine max
  Clone ID: 700894076H1
ctctttaccagtatattctggagacaagtgtctacccaagagaacctgaatccatgaaagaactgagagagttgacagcaaaacacccatggaacatcatgacaacctctgcagacgaagggcagttcttgaacatgctccttaagctcatcaatgccaagaacaccatggaaattggtgtctacactgggtattcacttcttgccaccgctctcgctcttcctgaagatggaaagatcttggccatggaca

SEQ ID NO: 32485 - DNA, 254 bp, Glycine max
  Clone ID: 700894078H1
cgttcacattgttatgtgggtattcttttgcttccatttatcatgagcaacatcccaagatctctcaccgactcttccctaaccctcttcaaccttgccatatcatcctctgacccctggcctttctcactcgttttcttatagccctaattaacgtgttaataattctcactccacttttcttaaaccttgctctttctttctttttttcccctatccctttagcttaattttttggctacgttatggggatc

SEQ ID NO: 32486 - DNA, 259 bp, Glycine max
  Clone ID: 700894080H1
gtggaaagtgctacctctatttaggaacatacaccacagtccagacaacttcaaggagccagaaaaatttgatccctcaagatttgaggctgctccaaaacccaacacttttatgccatttggcagtgggatccacatgtgtccagggaacgaattagccaagttggagattttggtcctcctacatcatctgaccacaaagtacaggtggtctgttgtgggtgcaaagaatgggattcaatacggcccttttgctctt

SEQ ID NO: 32487 - DNA, 238 bp, Glycine max
  Clone ID: 700894081H1
gacatttctcattattattgttggtacgtggattatatcaattgtggggagctggtgcaatttcttgaccttgttctacattgtctttgttttgttgcatacggttcctgtcatctatgacaagtatgaggataagatagaccctctggcagagaaggcattcatcgagttcaagaagcagtatgctgtgtttgacgaaaaggtcttgaataagatcccgaaaggcccattgaaaggg

SEQ ID NO: 32488 - DNA, 239 bp, Glycine max
  Clone ID: 700894082H1
cactccttcatctacgtaatttccttccttcctttctttctttctttctttctttatcttctcatttttctcaatacaatttttttctttctttctcaagttttgctacttttctcttctcaaccatagttcacatattatatcatcacatatcatagtgatatcatatcacaatgtgtggcatacttgctgtgcttggttgctctgattcatctcaagccaaaagggtccgcgtcctt

SEQ ID NO: 32489 - DNA, 238 bp, Glycine max
  Clone ID: 700894083H1
cgcaacaaaaagaaagaatcccaggcgaggagaaagatggaggggaaggagcaggatgtgtcgttgggagcgaacaagttccccgagagacagccgattgggacggcggcgcagagccaagacgacggcaaggactaccaggagccggcgccggcgccgctggttgacccgacggagtttacgtcatggtcgttttacagagcagggatagcagagtttgtggccacttttctgtttc

SEQ ID NO: 32490 - DNA, 227 bp, Glycine max
  unsure (1)..(227): unsure at all n locations
  Clone ID: 700894084H1
tgtttttcggacaaagtttgaagtctccaccatcatctcgcaactgttgttcccagaactgggttcttgatcgacggtggcaaaattgcttttatttatctgtgttttaatgtgttgtgtttgttggaacccctgattacatttttgttaagcgcacgangtttcaggactttgctgcgttgtgttgctttggtttattaaatgtcaactttctatttgtagtgttc

SEQ ID NO: 32491 - DNA, 237 bp, Glycine max
  Clone ID: 700894085H1
gtgtttccaatgtcaattacaaacacgttgaagccaagctcttgagtaaataaagaaatatgcatgcgtgattcagacttcagatactgaacgtaattggggcaagagattattatcaattctcaatctttatctcttgccccatgtacgttcagtatctgaagtctgaatcacgcatggggcaagagataaagattgagaattgataataatttctttaagcattatatgtgtttt

SEQ ID NO: 32492 - DNA, 238 bp, Glycine max
  Clone ID: 700894086H1
caggacggtggaagagtttcagaaagggcatgtggatgcagagaagatcattaacgttgcatacatgtttaatacaccagaaggcagagtgaagaatccagaatttcttaaggaggtttcatatgcttgcaagaaagaagatcatatcatcgtgggttgtcaaagtggagtgagatctctgtatgcaactgctgatcttctaacggaaggatttaaggatgtgagcaacatgggagga

SEQ ID NO: 32493 - DNA, 239 bp, Glycine max
  Clone ID: 700894087H1
ctgaaacttcaattaattgtgaacacatattttgcagcatagagaaatggaagactatgttataaggacaattgttgttggagttgtttcatggacatcagcttttgtcctagtgagaagaatctttcccaagcgttcttttgatttctgcaaccgcgttgtgtccacgctccatgcaactttagcagtcacattggcttggctctctgttgaagattggaagtgtccaatttgtcctg

SEQ ID NO: 32494 - DNA, 241 bp, Glycine max
  Clone ID: 700894088H1
cccgagataacagcaacaattacggttacaacaacaacatcaacaacgattcattctcgtttctcggccaagacgtttctctccagatccaacagcagcaactcgacatcgagcacttaatcatgcaacgcatggagaaggtgagaatggagattgatgaaaagaggaagaggcaagcgaggaggttcatcgaggctattgaagttggagtgatgaagaagctgaaggcgaaggaagagga

SEQ ID NO: 32495 - DNA, 240 bp, Glycine max
  Clone ID: 700894089H1
cttgattcccttcatgttcactaagtatttgcaagatgtgtttaaggttcctttggttatatagctcactgatgatgagaagttcttctggaaaaatctttctatagacgagtgccgaagacttgcaagggagaatgcaaaggacatcattgcttgtggttttgacatttcaaagacattcatcttctctgatttcaattatgttggcggttccttctacaagaacatgtgtgaggttgg

SEQ ID NO: 32496 - DNA, 243 bp, Glycine max
  Clone ID: 700894090H1
gtaattttggtcattgattaattctgcaattgagcagaggagccatggccaaaatcgcacttggaagcacccgagaggccactcagccagactgcattcaggccctcatcgttgaattcatagccaccttcctctttgtctttgttggcgttggttcttccatggtcgttgacaagcttggtggggatgcactagtgggattgtttgctgtggccgtggcacatgcacttgtggtggctgtaa

SEQ ID NO: 32497 - DNA, 247 bp, Glycine max
  Clone ID: 700894057H1
gcattgcactgcagcacctcctccctaccaaacccctcttgccttgtctccgacccgccctgactcgttgagctcgccggaaactttggccaaaagggtctccgaattcgcccatggcccttgatttccgaccttagagacccttcaagttttcgcctttttcttattcgcttttcccctttttttgggtcctcaatttctgaaacctgcaactgagaaaaagattgctctgataactcgtgcctcg

SEQ ID NO: 32498 - DNA, 241 bp, Glycine max
  Clone ID: 700894028H1
caaaagacaatactattggaactgctaataatcccaattcaaatgtgggtaaaagaagttgggattttaaaggatcagtaatggggaaaattaaggttcattgtggtgtcctttttcatgatttctggtgtaggagcactcattgaagataaaggaattagtaaaggacttggtataaatgaagaagtgcaacctagcatggaatcaagtacaaaatttagtgatgtacaaggtgtcgatg

SEQ ID NO: 32499 - DNA, 107 bp, Glycine max
  Clone ID: 700894029H1
gacaaagtccccggtgttgtctatacaatgcccgaggttgcatctgttgggaagacagaggagcaggtgaaggaacttggagttgaataccgtgttggcaagttccg

SEQ ID NO: 32500 - DNA, 252 bp, Glycine max
  Clone ID: 700894031H1
ctctctcttctcttcattctccctcttaattcttttctcttttctttctttcacacaaactcctcttcttatgatgggtcttgatcaagatgctagcagcaactctggccttcatcttattctagcgttagctttgactgccaccaccaccactactccatcactaccatccatttccaacaagcttgatcatgttgatcatcatcaccatcttataactcttagaccaacaacaaagtcaccctataattc

SEQ ID NO: 32501 - DNA, 259 bp, Glycine max
  unsure (1)..(259): unsure at all n locations
  Clone ID: 700894032H1
ctcgagccggtttatccattaggcaaaagaagagtaggccagtagggagatttatatttggattgcatgccancttgttaggattgnaattatttagtgggtttggtttggattttacctgtgtatatgttttcttggttgaatagtaatatgggtctgtaaaaaatcccctctagaacctctggttttgcaattgagtgatctttctttgcaaaataaaccaatgtagaatctaaaaaatgtatgcaagagtgagggt

SEQ ID NO: 32502 - DNA, 248 bp, Glycine max
  Clone ID: 700894033H1
gtctttcgaatcctctcacccagaggttcgattcgtaccatgtagtggtgggatttcagcttcgccatttcttgattccaaaaaattttgtttctttttttccccctaatttgatttccccagttagggtttttaattctactcgatcgccggtttcgaatacccggaggctcgaatcgtgttgggggttttggtttttgattaaggaagtttccgttttttgtgttgggtgatcaagggttgtttga

SEQ ID NO: 32503 - DNA, 245 bp, Glycine max
  Clone ID: 700894034H1
ctcaaatcaaaaatcgaatattcgaatttcaccgcttcgaaaccctttctttatcgccagataattttcaaaccctaaaatccgaatttcgctgatgatctttcctaatcgtcatcataccaaacaatttttcttcatatctgtctccgggagagtcgctttgacgggaaacaagggttttcgctgcaattctaatcggtcaaattggaatcgtcggatcaatttgtcatgaagttcctggagtg

SEQ ID NO: 32504 - DNA, 246 bp, Glycine max
  Clone ID: 700894036H1
gtctttcattcccaacctaactttcttccctctctctctctcacatctataagcaaccaatccaatcccatctctctctcgcaaaccacgacgacgacgacgatgttgggtgtcctccgcagcaaggctgggttcctccgccgcctcatctccctctccgtccccctccggcaccggtcgatcaaggcggcggcggcgggtggacatgtggtggaggttgacatggcggagtacgacgtggcgctg

SEQ ID NO: 32505 - DNA, 246 bp, Glycine max
  Clone ID: 700894037H1
aattatcaactctttcaaaagggagaagaaaaggaaaggaaacaaaacgcacaaaggattattatagcaatggcagaacaaaaccaaaaccagacaactgaagctggaaggcaccaagaggttggccacaagagccttctccagagtgatgctctttaccagtatattctggagaccagtgtctacccaagagaacctgaatccatgaaagaactgagagagttgacagcaaaacacccatggaac

SEQ ID NO: 32506 - DNA, 246 bp, Glycine max
  Clone ID: 700894038H1
ataaatatacatgacgttccttgttaatttcatgaagaaaataatacgtgcatacatagctatctatttatctatagcaagtgcgtcaagagacacgtggtaccctagctagagtgccattctgtggtttctttctttctttctttctgcatcacatcacaatttgctttgcctcgtgtcctttttcttctttgctttctaaaaatctcacacacacaggtatctagcaaatgggttctcaccaac

SEQ ID NO: 32507 - DNA, 246 bp, Glycine max
  Clone ID: 700894039H1
cagaatattctgcttttcgagaagcaagctacggacattccacactggagataaaaaataggacccatgctatctaccactggaatcgcaatgatgatggcaagaaagtaccgactgactcttttgtactgcataatcagtactggggacacaatcgcagaagaagaaaactgaagcattttctattgaaagttattgatgaagttgccagcatgtaatttgaagttgaagcactagcatatttgg

SEQ ID NO: 32508 - DNA, 247 bp, Glycine max
  Clone ID: 700894040H1
cacacacacaaattctcaaacccaaatcccaagtctcctaaaaccctaattcgcagtgaaaatgagagaaatcttgcacatccagggagggcaatgcggtaaccagatcggagcgaagttctgggaggtgatatgcgacgagcacggcatcgaccacaccggaaagtacagcggcgactccgagctccaattggagcgcatcgctgtttattacagtgaagccagcggcggaaggtacgttccacgc

SEQ ID NO: 32509 - DNA, 248 bp, Glycine max
  Clone ID: 700894041H1
tgtatatatgtggtattataactagaaaaccttatttgtacccttaatttgtccttagtgtctgcttcacccgagtatctttccatcctaatccctcatgttgaaaacatcaatatttcagcattcaaatgccactactagtccccatatgcttggaacagtatgaacagtatagtttatgcgcaaatcaataagtaactgttctgtttagtgcatgttctttaaatgaagatacattttttagatgt

SEQ ID NO: 32510 - DNA, 252 bp, Glycine max
  Clone ID: 700894042H1
tgaaagatctctcccttcaccctagaatcccaggcacatgctgtgattctagggtgaagggagagttctttcaccaaaccacatttagcatcagtttgtctgttgcaaaaaaatttattgaagatgtgcaaaatctagttcaattggagccgaagggattttgtggcatagagctttacaatggaattctcatgcgttatgtcaaggcttcgagtgcctatttggggaagcaagatgatgctttagacattg

SEQ ID NO: 32511 - DNA, 203 bp, Glycine max
  Clone ID: 700894043H1
attcgcttgaaagcaagtaactttgttccttctaaggagctacttcgtgtatctatacgcatgcataggttcttagatgggagcttggatgtcaaagacgtcgctgtcactgaggtgccatgcacatcatgttcgttctggagatctatgtcttccgtatcattagctgttgtcattgtgtcctcagctggagatggaatatg

SEQ ID NO: 32512 - DNA, 257 bp, Glycine max
  Clone ID: 700894045H1
tttatataataaaattccatgttatgtgggtagagccttaatttccttgcttgctattgtaattgtatgctatgctttgacttaatcgttctgaatcttcttctataaaccttaattgttattttttcaggccttcaatgggttactattattgtaaacccaggccttgtgatactcatactcccaatgttgttctgatcttggccgtggccttgattcttctatgtgccccaaagttcttctcaggtgaagcagag

SEQ ID NO: 32513 - DNA, 249 bp, Glycine max
  Clone ID: 700894046H1
ggcttccgcttgtgcttcctctgcaattacagctgttgccatctctacgccgagttccgggcagaagaatggatcaggaggttgttttcttagtggaaggaaattgagggtgaaaaaggagagagcagcaattggaggacgatcgatgggcactacagtgtgcgcagttgctgagcctgacagacctctatggttcccaggcagcacccctcctccatggcttgatggcactctacctggagacttcgg

SEQ ID NO: 32514 - DNA, 263 bp, Glycine max
  Clone ID: 700894047H1
ctccgtggtggcatgcagatcttcgtcaagactctcactggcaaaaccataaccctagaggtcgaaagctctgacaccattgacaacgtcaaggccaagatccaggacaaggagggaatccccccagaccagcaacctctcatcttcgccggaaagcaacttgaggacgggcgcaccctcgccgactacaacatccagaaggaatctacccttcacctcgtcctccgtctccgtggtggcatgcagatcttcgttaagaccct

SEQ ID NO: 32515 - DNA, 263 bp, Glycine max
  Clone ID: 700894048H1
ggtgtttgaaataagtccatcattgtatgtagtagaattaaggaagtcgtatggagatggttctgtgtataaacagttatgcaagaaattattgaatgatttgggtgttccccccaagcaagggctagtgagatcagcagcaaattagaagccacattatgtgtaggctattttctgtttttttgctcaggtggatagctacgcagatgatataaaaaccaattgtaaatgcattatagttaaagagtagagaaatgcacaca

SEQ ID NO: 32516 - DNA, 237 bp, Glycine max
  Clone ID: 700894049H1
ctctctccatccaacatcgaaagccggtcgttttgtgttccgccgaaggcaccggaggttgtagcaggctagcagctatggatttggcatccaatctcggtggcaagattgacaaagccgaagttctctctgccgttcagaagtatgagaagtatcatgtttgctatggaggtcaagaggaagagaggaaagctaattataccgatatggttaataaatactacgatcttgttacca

SEQ ID NO: 32517 - DNA, 243 bp, Glycine max
  Clone ID: 700894051H1
aaagtgttgtaagtcgtaataatcatagacaggcacagacacagagggccaatatgaagactcgtacctctaagaagatctctgcaaaatgggttccaattttctctgtatcttccttccttattggaatgctcataacaaccaggatgtgggaaccaccagaatctaacggggtgttactgtcaaatcaccgacatgagctttaactacaagtggtgtcaggggattgtgctactaaaaagc

SEQ ID NO: 32518 - DNA, 235 bp, Glycine max
  Clone ID: 700894052H1
ctgtttgatgctgtggtttacctgatgctgactaatgatgtcattcatgggctcttccctgaggctgttacaattggtgaagatgtgagtggaatgcctacattctgccttcctacacaagatggtgcccttggctttgattatcgcctgcacatggccattgcagacaagtggattgagattctcaagaagaacgatgaagactggaaaatgggtgatatcatccacacaacat

SEQ ID NO: 32519 - DNA, 242 bp, Glycine max
  Clone ID: 700894053H1
gcaaagagagagtgtgtgaaaagtgaaacaaaaaacagaacaacaatggcgacacttaaggttcctcagcctcttccccccgttgcagatgattgtgagcagctccgaaaagccttctcaggttggggaactaacgaggagctgattgtatcgatcttggctcataggaatgctgctcagaggaagcttatcagagaaacttatgcccagacctatggagaagatctcctcaaggccttgga

SEQ ID NO: 32520 - DNA, 241 bp, Glycine max
  Clone ID: 700894054H1
cttgtggatttcctatcccatgctgcaatagtaggatttgtagcaggagcagccattgtgattgggcttcaacagttaaagggactcttaggaatcacccattttacgaccaaaaccgacatagtctctgtcatgaaagctgtttgggaagcagttcataatccatggagccctcgaaattttatcctgggatgctccttcttggtcttcatcctaacgacgagatttttgggtaaaagga

SEQ ID NO: 32521 - DNA, 242 bp, Glycine max
  Clone ID: 700894055H1
cacgtagagaacctctaaaaacaaaaataaaaacattctctcccattcctcccccccttagcccttccttccttcattttttttctctttcttttgttggtttgtttgttccttttgttgtacgttctcctttgttctcttcttccgcatttggtacatgcggtgttctacttctctcttggtttgataacaggatttgactcaagtgttgtggtctcccatttcaggagaatcactcactg

SEQ ID NO: 32522 - DNA, 224 bp, Glycine max
  Clone ID: 700894056H1
attctatcttgtgcattgtgcttttgttggatttggatgaatccttttttttgttcctacgatgatactccctctctctctctatatatatatatgtatatatactttcctcaactgttaacaattgttactcaatttgatctgtaatgcatattaatgttagagactaaaaaaaaaaaaaaaaaaaaaaaaaaaaaaaaaggggcacccaaaaagaaccacct

SEQ ID NO: 32523 - DNA, 251 bp, Glycine max
  Clone ID: 700894026H1
caatatggttgggattagttggagctgccctctttattcaaagataaactacacttaaaacacggagtttgagttctccaatttgtgatgtataccttctaatttgttgttatagtttttctttttagtttatatgatgtgaagtccatgttgtaacattattatagaatgtatggaatagatttgtaaatttattgtgtgtatcaaatagatgaagatgttatattatcctactgtggtgcttttatgtt

SEQ ID NO: 32524 - DNA, 219 bp, Glycine max
  Clone ID: 700893991H1
actactactactgcacacactctctctctctctctcattgtatggccgccaattcgagtagccgagggatcaccgccttggggaagcgagtcgccaaccagatctggacttccaaccccccctcagctcctctcacttccaggaggggagcaatagcagctgcatacagtagcagcggcgggtcagtgtatgacaagaaccctgatgatcagatccact

SEQ ID NO: 32525 - DNA, 214 bp, Glycine max
  Clone ID: 700893992H1
attaacatatacaaattctctgtgttgtgttgtgtacttgtgttaattgtgttgttgttgtaggaaatttaagtgaagagagaatgatgatgaagtctgctatgtgtgcattggtgcttgtggcactggttgtggttgaagtggggcccatggctgaggctgcggtgacttgcaacccaacacagttgactccttgtcttccggcaattaattc

SEQ ID NO: 32526 - DNA, 185 bp, Glycine max
  Clone ID: 700893994H1
tgtatgtttgagaagtaagaagcatggctcagtatggttacgcataccgaagcgctcaaatatccacctacaacactagcaatgtgagagacattgaaactggtgcaaagccatttgctccctacgtccccaaatttagtaacggtaatggttactcagacgggatcgttaccaagaaaaaaata

SEQ ID NO: 32527 - DNA, 226 bp, Glycine max
  Clone ID: 700893995H1
atttgtcagctattttttgtaccccacttgtcttctccttagattccctttcagttcaaatagttgttgtgtatttgtgcttttatattgatggttcttctaaggttgatctcttagattgggtggagggaaggttgagagcacacttttctatttacccggagccaagagaaattgtctagacggtttgtataacttggatttatggatgctcctacttatgttg

SEQ ID NO: 32528 - DNA, 229 bp, Glycine max
  Clone ID: 700893996H1
tcaagttccaatcggaatcggaatcggaatctgaaatgagtagtagggtttggtttctactattccttctgctgatctcgaaatgccatcaagtgtggggctcctacgcgggttccgctagctccatcgtcaacccttccaaggtcaaacagatttcctggaagccaagagctttcgtttatgaaggtttcctcacggatttggaatgcgaccacttgatctctttagc

SEQ ID NO: 32529 - DNA, 253 bp, Glycine max
  Clone ID: 700894001H1
tagatcaccatgatgcattcatcgcatatctgaggaagatcaatgaccttcccactgcaaagtcttatgccacaaggaccatccttttcttgaaagatgatggcaccttaaagccattggccatcgaattaagtttgccacatcctaggggagatgagtttggtgccgttagtagagtcgtcttgcccgcagaccaaggtgctgaaagtacaatttggctaattgccaaggcatatgttgttgtcaatgactc

SEQ ID NO: 32530 - DNA, 252 bp, Glycine max
  Clone ID: 700894002H1
caccattctcacaaaacaactttcaaactctgagaaagaatggctgccaacacattgatgagtactgctatctcagccttcccatctctcctttcttcctcaaaatccagatttgccaccgcagttcctctttctagctttggtgtcaccaatgcctcttcttctcgcttttctatgagtgctgactggatgccaggccagcctagacctccttaccttgatggttcagcacctggtgactttggattcgac

SEQ ID NO: 32531 - DNA, 248 bp, Glycine max
  Clone ID: 700894004H1
atattattaagatgatcaacattattggagcacttgttctactctttgcatttctcttcctcagttgtgtgtatgcacaagacacaacaacccttgtgcctgcaatcataacttttggtgattctgctgtggatgtagggaacaatgactatcttcccacccttttcaaggctgattaccctccttatgggagggactttgttaaccaccaacctactgggaggttttgcaatggcaaattagctact

SEQ ID NO: 32532 - DNA, 247 bp, Glycine max
  Clone ID: 700894005H1
ctgtctctctctctctctctcgatcaatcatggctttgcccaatcagcaaaccgtcgattaccctagtttcaaactcgtcatcgtcggtgacggtggtacaggaaagacaacgttcgtgaaaaggcatcttaccggtgaatttgagaagaaatacgaaccgaccattggagtggaggttcacccattggatttcttcacaaactgtggaaagattcgcttctactgttgggatactgccggacaaga

SEQ ID NO: 32533 - DNA, 250 bp, Glycine max
  Clone ID: 700894007H1
tgaacatatcaactggggtggtgaatgccacactcacaggcattgtgtacactgataagacacttgccatatatcatgtggacaaggtgctcattcctttggacttctctaagccaaagcctatagctccagcaccagctgtggccaaggctcctaaagctgataaggagaactcttcagcagaagatgaggaccaggctcaggcagccaaggacagctctggtgcaacaagttttgttagcattcatgg

SEQ ID NO: 32534 - DNA, 250 bp, Glycine max
  Clone ID: 700894008H1
gacatggtcaattggctaggaagttgtcagctgttgatctcgttggaattggggttggagctaccataggagctggagtgtatattctcattggaacagttgctagagagcaagcaggaccagcacttgtgatatcacttctcattgctggaatagctgctggactgtcagctttttgctatgctgagcttgcatgtcggtgtccgtctgcggggagtgcttatcattatacatacatatgcattggaga

SEQ ID NO: 32535 - DNA, 252 bp, Glycine max
  Clone ID: 700894009H1
cagcacaaagcgggttactgtctgttcaagctaccatctctctctctctttcttagtgcctccttgccagaagttaaaatggcccaagaaactttcctattcacatctgaatcagtgaacgaggggcaccctgacaagctctgtgaccagatctccgatgctgtgctcgatgcatgcttggagcaggaccctgacagcaaggttgcctgtgaaacctgcaccaagaccaacatggtgatggttttcggagag

SEQ ID NO: 32536 - DNA, 251 bp, Glycine max
  Clone ID: 700894010H1
gttagatgattcaattcttaaaacgattgaatcttcttctcaacaagagctgaaggaatccagggacttgatccaacgcattcgaagaagggatctataccagtactgcaatgaattttctgttcccaaggaaagactggaccacttcagaagtatcacaccccaagatatcgtttgttcccagactaatggtgccaatctgaaagaagaggatgttgttgtgagctatgttagaattgatttaacaagag

SEQ ID NO: 32537 - DNA, 257 bp, Glycine max
  Clone ID: 700894011H1
ggaaggcagacagtgccacaacctcatttctctcaccacatttgcactttggtgaggtgagtgtgaagaaagttttccaccttgtccgcatcaagcaagtgttttgggccaatgaaggaaacaaggctggtgaagagagtgtgaacttgtttctcaagtctattggcctcagagagtattcgagatacattagtttcaaccacccttatagtcatgagaggccccttctagcccaccttaagtttttcccttgggtg

SEQ ID NO: 32538 - DNA, 210 bp, Glycine max
  Clone ID: 700894012H1
ctagatttgggattccagatgtagatgccttcttgttaacatatgctgatgtcaatgaaataatctcaggtgacaaaatgttgaacatagttatactatagttgtcgatgatcgttatggatgagtggagtctagcttggtcatggtcgatgtatgagtcgtgagctcatcgatcacatacaaggatagcgtgtcatgtcagatacatga

SEQ ID NO: 32539 - DNA, 245 bp, Glycine max
  Clone ID: 700894013H1
gaagaatggtggcctcaaattggtctacctaaagatcaaagccctccaccttacaagaaaccacatgacctaaagaaggcatggaaggttggtgttctcactgcggtcatcaagcatatgtcccctgatattgccaaaattcgcaagcttgtgaggcagtctaagtgtcttcaagacaaaatgactgcaaaggaaagtgcaacctggcttgccatcatcaaccaagaggaagccttggctagaga

SEQ ID NO: 32540 - DNA, 248 bp, Glycine max
  Clone ID: 700894014H1
cctcgagccgattcggctcgagggcatagtcagcaactgggacgatatggagaagatttggcaacacacattttacaatgagctacgtgttgcccctgaagaacaccccgtacttcttaccgaggcaccactcaatcccaaggccaacagagagaagatgacccaaattatgtttgagactttcaatgtgcctgccatgtatgttgcaattcaggctgtcttgtctctgtatgccagtggacgtacta

SEQ ID NO: 32541 - DNA, 251 bp, Glycine max
  Clone ID: 700894015H1
aatcaaggtctcaacccctcacgctgcttccatcattctcgaccctttccctccctctcaggcttacttcaaccaatccctcgtttccgttattctccctctccttcagttcctttcacgaaccggttcccctctcatgatgaacctttacccctactacgtcttcatgcagaacaaaggtgtggttcctctcgacaatgctctcttcaaacccctcactcctaataaggaaatggtcgaccccaacacct

SEQ ID NO: 32542 - DNA, 267 bp, Glycine max
  Clone ID: 700894016H1
gaagacccatatcaagttttatccaattggggtacggtgaaatcagatccttgtaactggtttggcgtcttatgcactatggttcgagatcatgtcatcaagctaaacatatcaggatcatcattaaaggggtttcttgcaccagagctggggcaaatcacctacttgcaggcactaattttgcatggcaacaatttcattggaacaatacctagagagttgggtgtgttggaatctctcaaggtgttggatttgggaatgaaccaa

SEQ ID NO: 32543 - DNA, 231 bp, Glycine max
  Clone ID: 700894018H1
cttccctttcttcctctaccaaattaacttcatcctcatacgaataataacaaataaataaaaggagggaaaaagaaaaacaaaaaaaatctaatagttattttgcttccgcaccaacagtttgtgctaagactttccagtgtgcagctgcagctggttcaatgattcaaaattgtagttctttgttggagcattcatcatgtccaaattgcaattttcagaagatagcac

SEQ ID NO: 32544 - DNA, 245 bp, Glycine max
  Clone ID: 700894019H1
ggaataccgataatcttgaagaactcgatagtgttgcagacattcggcgtcattcaccagcatccgtgtcaagaggttgagaatgtggtgataccgccttacgtttcgccggaaagtgtaaggagtacgctggaaaagtttccggtgaccggccggcgagacatttttgcttttttccgagggaaaatggaagtccatcctaaaaatgtcagccgacggttttacagcaagcgagtgaggacgga

SEQ ID NO: 32545 - DNA, 247 bp, Glycine max
  Clone ID: 700894022H1
gaaattgatgatgatgttgctgatgtggggctctgaatcccaaggccgattactgtctatcccaacaaaacctaacccagatgatgctcctgcctctgctcgttggctcgtctccctcaatttctggggagtcttgaatactatctcatctgatttgggtggagctccctttgggaatgtggtatcatatagtgatggactacctaacgaaagcactggaatcccatacttttacttgacaactcta

SEQ ID NO: 32546 - DNA, 247 bp, Glycine max
  Clone ID: 700894023H1
cttgaattcacatttcaacaaccatagccatggctttctccttctccaaagcacttgtccttgcctgctccttctgcttatttgcgtctttggcttttggacgcgatttctccattgtgggctattcatcggaggacttaaagtccatggataagctcattgaactctttgaatcatggatgtcaaaacatggcaagatttaccaaagcattgaggagaagcttcttaggttcgagattttcaagga

SEQ ID NO: 32547 - DNA, 249 bp, Glycine max
  Clone ID: 700894024H1
cttaagcttgctactgagtttccacactgcataccttaggtcttccgaattcgaagttaatttgcaagatggctaaggaaaaggctcagatcaacattgtggtggttggtcatgtggaccctgaggaggcaaccaccattaacgagctgaagaagcctgttgtggagaaagaagctccagggcatgccatatgagggcatgcacgcacggcctcggaggggaaccagaaaattatgttaacaaaataat

SEQ ID NO: 32548 - DNA, 250 bp, Glycine max
  Clone ID: 700894025H1
gaaatgcttcagcaacatagtagtctaaagacaatcaagaagaaacttattaggaaagcccttgatatgatccgtaggattgctgatgaggatcctgatgagtccactgacaaagaaaagaaagatacgtcatctgacaataatgacgagaaaggtcaatattccaagttctggaatgagtttggtaaatccattaaacttggtatcatcgaggatgccaccaacagaaatcgtttggcaaaactgctca

SEQ ID NO: 32549 - DNA, 216 bp, Glycine max
  Clone ID: 700893990H1
ctcattctccatacctcaacgaagaggttaaagagccggcaacactttgctgtccgccttgaccgagcagagcttcgtcttggccctcgattttgccctaaagtactctcagtcacaacagacaccgtcgtcgtcgtcgtcgtcatcaatggcaccgaagcagaccaaggctgagaagaagatcgcttacgatgcgaactgtgcgacctaatggag

SEQ ID NO: 32550 - DNA, 217 bp, Glycine max
  Clone ID: 700893949H1
agaatgatgcttactttctctgttttcccatctccaaaggtttcagacactgttgtggaaccctacaatgctactctctctgttcaccagcttgttgaaaatgcagacgagtgcatggtgcttgacaatgaagctttgtatgacatctgcttccgtaccctcaagctaaccacccctagctttggtgacttgaaccatttgatctcagcgacaatgt

SEQ ID NO: 32551 - DNA, 219 bp, Glycine max
  Clone ID: 700893950H1
caagcccatgctggcattgccctcttcgtctcgaaccgcaacccctatcagagccatgaactcctccacctcctccgtcaggacctctctctcctccaacttcgtcgcttcttacactggaatctacagcgcctatagcctcttctccggccacaagctccgactctcctccctcaatccggggtcgtttcgcggctccaactccaaacgaggcgtcgt

SEQ ID NO: 32552 - DNA, 219 bp, Glycine max
  Clone ID: 700893952H1
ctccctaggtaatttattcaatctgtgtgactaggtaggtgcaattacggcttgatgagtgtccttctgctgtaaagtgccaagtaacgatattaatctccaattttttttaaccctgacgggttattattatttttattttcttttgtgactgttttctcgggttcatcatgtattttacttaagttatttgcatcgtaacttattgctaccttaaaa

SEQ ID NO: 32553 - DNA, 223 bp, Glycine max
  Clone ID: 700893954H1
cggatctagagtcttcagtttctcctcgttgttcttcgctttcctgttttcaatttcgattctttcgttaatttaataagatgtttgggagggcaccgaagaagagcgataatacgaggtactacgaaatcctcggcgtctccaagaacgcttcgcaggatgatctgaagaaggcttacaagaaagccgccattaagaatcaccccgacaagggcggtgatcc

SEQ ID NO: 32554 - DNA, 223 bp, Glycine max
  Clone ID: 700893955H1
ggctacccctgccccagttcgtccatggtttcgcttagcctcatctcgctctagcccacccccacccccaccccctgcacctgcccctgcccaagagccacgcctgccagcatttagaactgcttcagcaccatcatcaccacagattcagccaactcaaccagctccccagcctcaagaacacccttcttctcaacataacagattctcctcttcttcactc

SEQ ID NO: 32555 - DNA, 216 bp, Glycine max
  Clone ID: 700893956H1
cttcttcatactacatgtggcactcctaattatgttgctcctgaggtccttaacgatagaggctatgatggggtaactgcagacttgtggtcatgtggggttattctctttgtattggttgcaggttacttgcctttcgatgaccctaatcttatgaacctgtataaaaaaatctcagttgctgaatttacttgccccccatggctttctttcagt

SEQ ID NO: 32556 - DNA, 224 bp, Glycine max
  Clone ID: 700893957H1
aacggaatcccacttaaaagtcgttctccttcctcttcgcagctgttatatagtactattttcatttcatatgtttatgcacctctatatatacatagacacatgtaaatggttgcaaaggaagataagataggtaccagctatcacatagtttatttaatccgttatatgccacctgatatataggcatattagctagttaggtaggtatagtagtttaagtt

SEQ ID NO: 32557 - DNA, 224 bp, Glycine max
  Clone ID: 700893958H1
ctcgagccgttttctctctgcaactctcccttttcttccttcgtagatcgaaagggaatcaccttccatggcctccaagcggattctgaaggagcttaaggacctccagaaagaccctccaacctcttgcagcgccggtcctgtagcggaagatatgtttcattggcaagcgactataatgggtccccctgatagcccttatgctgggggtgtttttctagtta

SEQ ID NO: 32558 - DNA, 223 bp, Glycine max
  Clone ID: 700893960H1
caggtctaattcttccttcactgccctcaagtgcgcgttttcaaaaaaattcatcactggtaaatggtagcagttatttagttggctgaccgaaaccatttatagtttctacggagcacaatgttgttccatgaaacttctgcaatcaatgctcttcgaaaattgcaacaaaaatacatacaacggaactcatccaatttcaatggttgcgagagctaacgga

SEQ ID NO: 32559 - DNA, 228 bp, Glycine max
  Clone ID: 700893962H1
agaacacactctcacatattattagcttttagctctctctctctctctctcagtccttcttcttcgcccagccaacatgagctcaatcgttcagggtttcaccaagtcgctggccatgaccattctctctgagatcggcgacaaaactttttttgcagctgcgatactggctatgcgacacccaagacgcctagtcttatcaggttgcttatcggctttgattgtgat

SEQ ID NO: 32560 - DNA, 230 bp, Glycine max
  Clone ID: 700893963H1
tatagcccaagccctatacaaccaaaccctaacacacacccatttgattcagtttccatggctagcctcaaggttgcatttttggctgcagtgctctgcatggttgtggtgagtgcacccatggcacatgcagctatcacgtgcgggcaggtgacgaatagcctgatcaattgcatcggttacctccagaacggaggaacgccgccgtcgggatgctgcaacggagtgaa

SEQ ID NO: 32561 - DNA, 234 bp, Glycine max
  Clone ID: 700893964H1
caatactattttcttgtcgttgagaagcttcgcgaacgaaagcaaagaaccctagaccgtcacagaaccattccatagccatgtctggtgttggccctctttctcaggattgggaacctgtcgtcctccgcaagaaggctcccaccgccgccgccaagaaggacgagaaagccgtcaacgccgcccgccgctctggcgccgaaatcgaaaccctaaaaaagtataatgctggga

SEQ ID NO: 32562 - DNA, 216 bp, Glycine max
  Clone ID: 700893966H1
agcagccacacctcccgcagcagccatggttctcaaaactgaactatgccgattcagtggtgccaagatctacccaggaaagggcatcagatttgttcgtggtgattctcaggttttcctgtttgcaaactcaaaatgtaagaggtatttccacaatcgcctgaagccttcaaagctcacctggactgcaatgtacagaaagcaacacaaaaagga

SEQ ID NO: 32563 - DNA, 216 bp, Glycine max
  Clone ID: 700893967H1
cagatagggcacgtctctcgcggcctcttctctccctcgcgccgcccacactaaaaggttattgctctattattgtttgacgatggctgatgctcatgggactgataagaacattgaggtgtggaaaatcaagaaattgatcaaagctcttgaggctgccagaggaaatgggacaagtatgatttcccttatcatgcctccacgtgatcaaatatc

SEQ ID NO: 32564 - DNA, 218 bp, Glycine max
  Clone ID: 700893969H1
caggaggagcactagctaagttcacaatttcaaaatggctaggggactaaagaagcatttgaaaaggctcaatgctcctaagcattggatgcttgacaaactgggtggtgcatttgcgcctaaaccctcatctggaccacacaaatcgagggagtgcctccccctcattcttattctgcgaaaccggctgaagtatgctctgacataccgtgaagtca

SEQ ID NO: 32565 - DNA, 219 bp, Glycine max
  Clone ID: 700893971H1
cggctcgagctcgagccgaatcggctcgagtgccaaaatttggcagctacattttggaggtgcacgaacacctactgaagctgatgatgaagccgatgatccaggtgctcttgctgctgttggttgtttgcgtgctattagcactttacttgaatcagtgagcagtcttcctcaactctttgttcatcttgagccagccttgctacccataatgcgtag

SEQ ID NO: 32566 - DNA, 221 bp, Glycine max
  Clone ID: 700893973H1
ctggggttagggtttcctctgcgtcgatggcttcgaattcgatcgacggcgacgccgttacggggtcgggactgtgcataaacgacgtgttaagggacgacgagctgcgttccattctggggcgagtggagagcgagaaggacaaggaaacgttcgggttggtctgcaagcgatggcttcggttgcagagcacggaaaggaagaaactcgccgcacgtgcg

SEQ ID NO: 32567 - DNA, 221 bp, Glycine max
  Clone ID: 700893974H1
caaaaagtcaaatgtccaaagctcagctggccctaaacctgataaagtgcaactgattgagcataggcgagcatataattgtgaaatcatgctttcaaaagtgaaagtgccattgcatgatttaatgagctcagtgttagcactggaggagtcagcactcgacactgatcaggttgagaacctcataaagttttgtcctacaaaagaggagatggaattac

SEQ ID NO: 32568 - DNA, 222 bp, Glycine max
  Clone ID: 700893975H1
cctcctcacacaacacaaacaccaaatcaaacatggccaccacttttctttctctcctcttcctcatcttctctctcctcaccccagccctcatttcctcttcccctgtccaagaccctgaatttgtggcccaagaagttaacaggaaaatcaatgcttccgtagctagaaggaatttggggtacttgtcctgtgcgacagggaaccccattgacgattgtt

SEQ ID NO: 32569 - DNA, 220 bp, Glycine max
  Clone ID: 700893976H1
ctcaaacattaagaaaagcttatgcctcagccatcgtttctactcgctagagcgtaagcatgggcactcagagaagcaaacccagttgtaccatcgttgcgatctttctagcattttgttgttttgtttcttcttcgaaagcaaagcttgagagtctccaacatgcgcccaaagctgatgggtctctaagcttcttggtggttggagactggggtagaaa

SEQ ID NO: 32570 - DNA, 222 bp, Glycine max
  Clone ID: 700893978H1
ctctcatctgagaatccaaacctcctcctaatttaagtggtgggtcagctactatggcttcgtctctgttactagcggtggtgtttgtgcttgatctggttgcttttgctctcgctgttgctgcagagcagagaaggaatactgcctcgttaaataaagacagtgcaggtagaaactactgtcaatatgactcagacattgcaaccggcctaggtgtggggt

SEQ ID NO: 32571 - DNA, 230 bp, Glycine max
  Clone ID: 700893980H1
ggcaaaaggaatccagtttttgcatacagggattgtccctggtgtatattccaatgatctgaagatagaagatgttttattggatcagaatcttgttgcaaaaatcagcagttaccacctgcctttgttatctaacatgggaaaggttcggtgtggaaattcttccagtggattaagaaattctagcaatagtaaaagtgtaaagcatgaagataaggctgatatatacg

SEQ ID NO: 32572 - DNA, 215 bp, Glycine max
  Clone ID: 700893981H1
actcaagttagatttgccagatgacaaggcaaagcagaaggccctgaaaacagtttcaacactttcagggattgatgccatctctatggacatgaaggagaagaaattaacagtgataggaacagttgatccagtgaatgttgtgagcaaactccgcaagtattggcagacagacatactctcagtaggtccagcaaaggagcccgagaagaaag

SEQ ID NO: 32573 - DNA, 215 bp, Glycine max
  Clone ID: 700893982H1
gataatccacgaaaaggaagcagagaaaactaaccagcaagagctctcacatgaaaaccacgaggctgagatcaagcaattgatgaagaccatgactttcaaagccactccaatgccaagtttctacaaggaacctcctccataagtcgacttgaagacgataactataacgagctcagaatctccaaagcttcctatgcacgaacgatctgctg

SEQ ID NO: 32574 - DNA, 87 bp, Glycine max
  Clone ID: 700893985H1
gcgaagagaatggctcccaagggtttaatctttttggctgtgttatgcttctcagcagctgtcacttgcagtcgttgtacttgcgga

SEQ ID NO: 32575 - DNA, 219 bp, Glycine max
  Clone ID: 700893986H1
aagctgttgatcttttgatggaggttgaagatctggatatgttgagtggacatgttgacaaaacaaattttaaaaggacttgcctatatctcaccagttctgcaagatacctcccaggaccagatgatatgctagttttggacattgcatattcaatttacaaacaatttgaagaatatccaaatgcactccaaattgcattgttcatggataattcgc

SEQ ID NO: 32576 - DNA, 220 bp, Glycine max
  unsure (1)..(220): unsure at all n locations
  Clone ID: 700893987H1
ccctttctctcaattttcattcaacaccatggccacaacaancaagtccattttcttcaccttcttattatgctcttgggtggacgtagtagtagcccaagaggtagcaattgcaaaatccgaaagtgaagcattaggggaaccggaattagaaaaaagagaaacacttgaaatcatcattggtggtggtggtggtggtggttaccctgctccttctcct

SEQ ID NO: 32577 - DNA, 222 bp, Glycine max
  Clone ID: 700893988H1
ctcgagccgctcgagccgcatttttattggccggttctccccacaatccatgtttttatatacttggccttcgccttgccctccaattttttataaccatctcagttcgtgagagttctcttgggctcccaaagagtccatctggtggaataaggaaacagctttcacagctattggttgctctaagaaagcctgaaatctcatattcaatatcatggttta

SEQ ID NO: 32578 - DNA, 79 bp, Glycine max
  Clone ID: 700893989H1
gttttataaatatacctatgctccaatcacaattacttttgctaagcttggcttgttgaaaactaagcagttctgaggt

SEQ ID NO: 32579 - DNA, 234 bp, Glycine max
  Clone ID: 700893948H1
aatgtgataagttatggtgggagtgtgaacatctcaacaggtgaggttaacaccaccatcactggcattgtatatactgataagcatcttgctatatataaggtggggaaggtgcttcttcctatggatttctttgctgtggccaaggcaccagcaaaggcaccttctctggcaccagaaccttcagcaaaggctcctaaagctgataaggatccattatccccagatacctca

SEQ ID NO: 32580 - DNA, 229 bp, Glycine max
  Clone ID: 700893911H1
agctacaccagtcaagctttgagccagaacctacaaggactaagggcgagaagtccgatacgtaggatgagccgcagaatgctgtactacttgcaagaaaattggcggagactttgggttttagcattgtggatttccgctatgattggactgtttacctggaagttcatcgagtacaagagaaaaaatgcttatcatatcatgggtaactgtctactagcggccaaag

SEQ ID NO: 32581 - DNA, 231 bp, Glycine max
  Clone ID: 700893912H1
ggaacaccccttttgcctattcagctttatctcactcttcaactgtgtctctgataaggttcagcccttcctttgctctctatgccattcccgcaggatgggcaagtgcaagggttgtggaaagttaggaagaatgaggccaagtcatatgagcgcgtatgaattttctctgatgctggctcctgttgtttctgtttgggattgcatagttcgcaaaatgaggtactccta

SEQ ID NO: 32582 - DNA, 233 bp, Glycine max
  Clone ID: 700893913H1
ctgcatcggaagaaaccctagccactctcccggcgtcacgatgcagatcttcgtgaaaaccctaacgggtaaaacgatcacgttggaggtggagtcttcggacaccatcgacaacgtgaaggccaagatccaggacaaggaaggcatccctccggaccagcagcgcctcatcttcgccgggaagcagctggaggacggccgcaccctcgccgactacaacatccagaaggagt

SEQ ID NO: 32583 - DNA, 212 bp, Glycine max
  Clone ID: 700893915H1
ctaacgagtaaggaaaaatggcgcgtaagaagatcagagagtatgactcaaagaggttgttgaaggagcactttaagagactttctggcaaggagttgccgatcaagtctgcacaaattactgcatcaactgatttcactgagctacaagaggaaggaaccctgggctttcatcttccaaaatggtttgggaacctgacatggtatttggaa

SEQ ID NO: 32584 - DNA, 179 bp, Glycine max
  Clone ID: 700893916H1
ctttctctcttctctctctgtccgaagatggcttcacgcaggttcgtatcttctctgattcgatcctcccttcgtagatctcaatcgaaaccctcgatttccgcatcagattcgagtacacacgtcatccaaccgtgcctctccgcacggttacttgctgaaacgcgtcgccgaatacg

SEQ ID NO: 32585 - DNA, 224 bp, Glycine max
  Clone ID: 700893917H1
ctttaggttgggatttgggaattagggttattcgcgtggcgaagatgattgaggtggttttgaacgatcgattggggaagaaggtgcgcgtgaagtgcaacgaccgatgataccatcggcgacctgaagaagcttgtggcggctcagactggcacaagagccgacaagatccgcatccagaagtggtacaccatctacaaggatcacatcactctcaaggatta

SEQ ID NO: 32586 - DNA, 221 bp, Glycine max
  Clone ID: 700893918H1
acagaagtaatcttgaagacttatctgcagtttctcctaatgtgattttggtgaatgcttttttatcattcagaaaggcaataacaaactaaaatcaaagcataactacacccatagcatcagctagaagaagagggtgtaacagagggggacatatatcccaagtacataaagcgtattctgaacctgctacacactttgctagtcaatctgcacaagca

SEQ ID NO: 32587 - DNA, 225 bp, Glycine max
  Clone ID: 700893920H1
aattcccaccgcaaggtaaaaaaaaaaaaaaaaaccagtggtgcgcgatgccaccgaagttcgatcccttgcaggtggtggacgtgttcgtccgattcaccggcggcgaggtcggcgcggcgatttccctcgctccaaagatcggtccattgggtctctccccaaagaagatcggagaagacattgcgaaggaaaccgcgaaggactggaagggcctccgcgtga

SEQ ID NO: 32588 - DNA, 226 bp, Glycine max
  Clone ID: 700893921H1
gcagcaggttggcatgtaaatagtattccaggtgctgacaatgtgaggccaaatgggaagttactacaaactcaaagcataagaagtgtgagtccaaatcatttggagcaatttggtcaaactccttataaagaatattctcatttccttggaccagcagactactcatctgctggagtgggtggttattgcaagccaatgggtgcatcatcatcccctccaccta

SEQ ID NO: 32589 - DNA, 227 bp, Glycine max
  Clone ID: 700893922H1
cttaaagaccaatggttaacgatggctctgatgggcggttttgctagaataaacaataatgagatcactgttttagtaaatgatgcggaaaagggtagtgacattgatccacaagaagcacagcaaactcttgaaatagcagaagctaatttgaataaggcggaaggcaagagacaaacaattgaggcaaatctagctcttagacgagctaggacacgagtagaggc

SEQ ID NO: 32590 - DNA, 224 bp, Glycine max
  Clone ID: 700893923H1
cgtcgtcgttatcttcttctcttgttgtctgtgtgtttgttttttctctcacctgaaaatgtcttgctgcggtggtaactgtggttgcggaagcgcctgcaagtgcggcaacggctgcggaggctgcaagatgtacccagacttgagctacaccgagtcaaccaccaccgagaccttggtcatgggagtggcaccagttaaggctcaattcgagagtgctgaaa

SEQ ID NO: 32591 - DNA, 229 bp, Glycine max
  Clone ID: 700893925H1
atttccactcgcaaaccctcccatttaacagtcagagcctccgctgcctccatcaccccggcgcaggctccggtacagccatggcaaggcgctgccataaaaccgctaatagcctccatcgcgacgggagtaatcctctggttctcaccggttcccgccggcgtgaaccgcaacgcgtggcaactactcgcgattttcctaggcacaatcgtcggcattataacgcaac

SEQ ID NO: 32592 - DNA, 226 bp, Glycine max
  Clone ID: 700893926H1
taaaaatggagttaaaattgtgaaacatgtcaaaggggggttgaatccaagctccctccatcagttagacttcaataacccctacattggagaagtggccaaaattggactagtggttgctgtcgttgcccttactgagtctattgctgttgggcgatcctttgcatccatcaaaggataccaacttgatggaaacaaggagatgatgtcaataggtttgacaaac

SEQ ID NO: 32593 - DNA, 193 bp, Glycine max
  unsure (1)..(193): unsure at all n locations
  Clone ID: 700893928H1
ggggatatcgttaaatcacaagatctcgagagcggaagtagttctgcagacaatgtcgaatctggaactgcagtttttctcgtggagcttgaggaaaaaagagctattaaggtttttgggaagagcactttgattggattggctctaacattctttgctggactttgcttctctatgntctcaccagcattca

SEQ ID NO: 32594 - DNA, 226 bp, Glycine max
  Clone ID: 700893929H1
gagtgatttcagtgagtgatcggtgttcacttgatctcatcataatcgtcagcgtcaattgaagaagatgccgatcagaaacatcgccgtcggaaggcctgaagaggcgactcaccccgacacgttgaaggcggctttggctgagttcatctcaaccttcatcttcgtgttcgccggctcaggctccggcatcgcctacaacaagctcaccgacaacggcgctgcc

SEQ ID NO: 32595 - DNA, 232 bp, Glycine max
  Clone ID: 700893930H1
cgaaaaggttcacctgcaaaatatcgtcacgaggagttctctcctgaaagggtgtcaggtcatccagcttctgaacatcattatgataacaatgattggagtaagaaaggccaggagataatgcgtgataaatcttctggaaagggcaatgaatttcctgctcaaaagtcatcaatgaacaaagaaactttttccagggagaagcctcaagaatcttatgctgtagatatta

SEQ ID NO: 32596 - DNA, 221 bp, Glycine max
  Clone ID: 700893933H1
gcgttcgattcgtttctatctctctctctctctgtcatgggttcgctcgaggcaccaaccgccgcggaaaacggctccgctcccgccgccggcaacggaaaatcccactccatcaacggcgcggaggcggcgccggagcccgacgcgtcgaagcggcgcagatcgtcggtgctcccgttggaggtgggtacgcgcgtcatgtgccgttggagggacaacaa

SEQ ID NO: 32597 - DNA, 220 bp, Glycine max
  Clone ID: 700893934H1
atctcatcaacctcaatctctcagaatccacagaaaagatcgttgctgagtacatatgggttggtggatctggtatggacctcagaagcaaagccaggactcttcctgggccagtgagtgaccctgcaaagcttccaaagtggaactacgatggctctagcacagaccaagctccaggggatgacagtgaagtcatcctatacccacaagctattttcaa

SEQ ID NO: 32598 - DNA, 221 bp, Glycine max
  Clone ID: 700893936H1
gtcttttctcaaaacttcatttaccaacttctctctctctctctctctctctcaatagcacagctaggatcaagtgaaaactgattgttttccattgagtctgatttagttcttagcttctgcttcgatgccttcaatcatgtcacctcagtggcaagataaggctgctggtttcttttcttcctccggggtgaagcttaaagaagccaaggaatcagcag

SEQ ID NO: 32599 - DNA, 225 bp, Glycine max
  Clone ID: 700893938H1
cctcgagtccctcaggcccattagggaggacgaggtcaccaccatggttgagtccgtttacaatcactgcaccaccactggatatttatggaaagcaatattggtgaggaagcacttggggtctgtggcattcaacaacatcaccaggttggcatttggaaaaagatttgtgaactcagaaggtgttatggatgagcaaggagtagaattcaaggccattgtgga

SEQ ID NO: 32600 - DNA, 226 bp, Glycine max
  Clone ID: 700893939H1
ctcagtttttgcaccgtttctccgatactctcttctctctaaaggtaaatccctcttcactcacaaaatcagatttttagtgctttagtgttagaatttttcagatatgccccaatgtctatgaacaacaacaacaacagcaacccccatggaccctcttcctccgggccagtaccctctttcccaggcccacgggctcacactcaacccgaacgccaaacgtttc

SEQ ID NO: 32601 - DNA, 214 bp, Glycine max
  Clone ID: 700893940H1
ctttaagatagaccgtaaaagccttctctagcatgagttttttatttcacaagttgttaaaggagaacattagtcttactgtaatcatactatcccttggaattttgccgtaccatatcagtcttaacacaatgttcaagttcctagaaaaaaaaaaaaaaaaaaaaaaaaaaaaaaaaacggacgcagcacgatgagatcccaagtgcaccct

SEQ ID NO: 32602 - DNA, 224 bp, Glycine max
  Clone ID: 700893941H1
caatgacgaaattgctgctgacctcaaagagcatgtgatcaagcctgtgatcccagagaagtaccttgatgagatgaccattttccacttgaacccttcaggccgttttgtcattggtggccctcatggcgatgctggtctcaccggccgcaagatcattatcgatacttatggaggatggggtgctcatggtggtggtgctttctccgggaaggaccctacca

SEQ ID NO: 32603 - DNA, 212 bp, Glycine max
  Clone ID: 700893944H1
aaaaagagtaaagaatttgctttgcgaggaagtaagtaggagatgctctgaactttcaaatttgtacaacccctaggaagagaagcagaaggttcaaaatccaatccatttttcatttcgaaagatcgtgatcgcaatgtccctctccaccgtgaagcagcggcgctcggagccgtctgatccgtcgccatcagatccgtacacgaagctgg

SEQ ID NO: 32604 - DNA, 223 bp, Glycine max
  Clone ID: 700893945H1
gtttgttgttgtaactcgttcttcttcttttgttgttctgtgtttgtgtttgttttttctctcacctgaaaatgtcttgctgcgttggtaactgtggttgcggaagctcctgcaagtgcggcaacggctgcggaggctgcaagatgtacccagacttgagctacactgagtcaaccaccaccgagaccttggtcatgggagtggcactgttaaggctcaattt

SEQ ID NO: 32605 - DNA, 229 bp, Glycine max
  Clone ID: 700893946H1
atcaacgatccctcttctgtgcccacttccaaatcttctcctctcgctatgggttgcggctcctcccttccagataggggctcaaggcagttgggtcgacccaattcagagaatggtggagggcaggacgccaagaatctgagggtcaagcttgttctcttaggtgattctggtgttggtaaaagctgtattgttctacgatttgttcgtggtcagtttgatccaacat

SEQ ID NO: 32606 - DNA, 230 bp, Glycine max
  Clone ID: 700893947H1
tgaggaaacattatttggcacacgttagcctgcgacacatgttgagaaacgagttgcctgtgtttgaaacttgatgttaaagtgtgaagggacaaggaaacatagagtctcgttggttcaatacacttgtgcaatttggccactatgaacacagggcttgctgcaggtgcagccttgcttgcactcttggctatcaccttctccttgttgagccctcaaaccctgttttc

SEQ ID NO: 32607 - DNA, 230 bp, Glycine max
  Clone ID: 700893909H1
gtacttgtaattggttctttgatatttttccaatccaattgaatggggaagccaagaggagaagcgattctttgttttttatttttcttctggttttggagctcttcgaatgctttgccgtctccaaagggtgtgaactttgaagtgcaagctttaatgggcataaaagcttctcttgtggatcctcatggtattctagataattgggatggggatgcagttgatccatg

SEQ ID NO: 32608 - DNA, 236 bp, Glycine max
  Clone ID: 700893874H1
attccaggcaaaattttcgttcgcaaacgtacttttggctgtaaccaaacatgccaccaaaatgagtttactctccaaactgtgtttggattactccaaacggaaaaccaaacataccctaaaaccttttgcaactaagcgtgtttttatacctttcaatagagtgatctgtcttttgactatgtaaacccacttgctaccaattgggatcacagccgcacgtttttctatgatca

SEQ ID NO: 32609 - DNA, 233 bp, Glycine max
  Clone ID: 700893875H1
cttacagtctcgaaggctaaagcaacttcccttaatctcttgcacgaagaccctgaagtaatgggattctcagagcagtttggagatcttgcaaaagaggggaatgtagccatatctccaatggaaatacaagcctacagattggaattgaggccacaaccacaatagaacactcattgccgagttgctgctgctgattttaagctgaaccacgagggattcttggattgatt

SEQ ID NO: 32610 - DNA, 235 bp, Glycine max
  Clone ID: 700893876H1
gtctttcctttatcttgtcactggtaacatggagaaactgtccaagatgttgaaaattgctgaagtcaagaatgatgtgatgggccagtttcacaatgccctatatatgggtgatgttcgagaacgtgtcaagatattggaaaatgtgggccatttgccactgtgcttacatcactgcatcagtccatgggctacatgatgttgcagagcggcttgcaactgaactgggagataa

SEQ ID NO: 32611 - DNA, 229 bp, Glycine max
  unsure (1)..(229): unsure at all n locations
  Clone ID: 700893877H1
gaaattctcagatgaaagttccttaattaaaacaacctttttgcctaggttggaggaccttcttggcctgttgcattaggccgaagagatgcaacaaaagccaatcggatggaagctaatcaacaaattccttcaccgttcgaactgctnagataacatcattgcaaagtttacttcaaagggtcttaacttgagagatgttgtagccctttcaggggcacatacaatt

SEQ ID NO: 32612 - DNA, 238 bp, Glycine max
  Clone ID: 700893878H1
tgttttttgacggatatggatatcatgggacatcatttgagcagatatatcgatgctacccagcttcctttattgaaaagccccaaattgaaagtggtgacaaaattatcatgcctccatcagcccttgaccgtctagcatctctgcatattgattacccaatgttgtttgaactccgtaatgatgctgccgagcgggtttctcattgtggggttctggagttcattgctgaggaagg

SEQ ID NO: 32613 - DNA, 240 bp, Glycine max
  Clone ID: 700893879H1
gcagaaagcaagctcatcctagagttttaaacatggcagcagcctcctccatggctctctcttccccatccttggctggcaaggccgtgaagctgggcccatcagcccccgaagtcgggagggtcagcatgaggaagaccgtcaccaagcaggcctcctccggaagcccatggtacggcccagaccgcgtcaagtacttgggcccattctctggcgagcccccgtcctacctcactggcg

SEQ ID NO: 32614 - DNA, 231 bp, Glycine max
  Clone ID: 700893881H1
ctagaaaactggttcttcttttcgcgttgcgttttcttggtgtctctgtcgattcttcttctgaattttaatacttaggaagtttagttttctctcttggcttctccggttggagtttccggcgaccttgtcggagattttgttgtttatttttcacaccacttgtgaaacttctcaagaaaaagaaaaaggatgtttcttgttgattggttctatggaattttggcgacc

SEQ ID NO: 32615 - DNA, 228 bp, Glycine max
  Clone ID: 700893883H1
cagcacttctttttgccaataacatggtctaagtttgtgatcattatatgcttcagaatcttcgcctgagccttctgccgagcacaacctgggagttcttttggttcattgtttttatttctatggaagcaaattgaacacctcagatgttggcatgtcttgtaatgggacaggcacctttttgtgcagagtagtgaagggcaccagagaatgacattgggaagaact

SEQ ID NO: 32616 - DNA, 231 bp, Glycine max
  Clone ID: 700893884H1
attgggatgatactatcaaacaatgaagactatggggaagagttagttgctgactcctatctcctccctgcagcagctttgggccagaaatcaagcaatgagttaaagaagtatgttttctcatctcccaatcccacagctaagcttggatttggtggcacccaattaggggttcaaccatccccagtggtggcagctttcagctcaagagggccaaatgtgctcacacca

SEQ ID NO: 32617 - DNA, 78 bp, Glycine max
  Clone ID: 700893886H1
ggtgaagttggtttcgtcgacgaaattgattggaacaagtttttctatgcaattcatccgggtggggctgttattgtg

SEQ ID NO: 32618 - DNA, 231 bp, Glycine max
  Clone ID: 700893887H1
gtcttcaggtttggttccagtcacggcacacgccccggctgagaaaggggtgtctggatttttgttggatttcctgatgggcggagtgtcggcggctgtgtccaagacagctgcggctccaatcgaacgagttaagttgctcatccaaaaccaggatgaaatgatcaagagtggtcggttgtctgaaccatacaaaggaattggcgattgtttcactcgaaccatgaagga

SEQ ID NO: 32619 - DNA, 231 bp, Glycine max
  Clone ID: 700893888H1
tggcactcttcctggtgacaatggatttgaccctctggggctagctgaggacccagagaacttgaggtggtacgttcaagccgagcttgtgaatggacgttgggccatgttgggtgttgtaggaatgttgcttcctgaggttttcaccaaggttggaatcatcaatgcccctcaatggtatgatgctgggaaatcagagtactttgcatcttcctcaaccctcttcgtgat

SEQ ID NO: 32620 - DNA, 233 bp, Glycine max
  Clone ID: 700893889H1
attcgcgaggcaattgaggacgctggtttcgaagccgcgttactcacagacgacaaaaaatccgttcaagtatgccgcatccagatcaaaggaatgagctgcacctcctgctcctccactctggaatccgttctgcaagcccttgacggggtccttgaagcccgcgtgggccttgccaccgaagaggcccaagtccactacaacccaattctcctcaccaccaaccacatcct

SEQ ID NO: 32621 - DNA, 232 bp, Glycine max
  Clone ID: 700893890H1
cctgccagtagtcatatgcttgtctcaaagattaagccatgcatgtgtaagtatgaactaattcagactgtgaaactgcgaatggctcattaaatcagttatagtttgtttgatggtatcttctactcggataaccgtagtaattctagagctaatacgtgcaacaaaccccgacttctggaagggatgcatttattagataaaaggtcaacacaggctctgcctgttgctt

SEQ ID NO: 32622 - DNA, 234 bp, Glycine max
  Clone ID: 700893891H1
gcaacaacagcagagttcccttcggctgcctcaacaaaggcaaatgcatccgcagatgcagcagatgattcattcccaaaatatggcttttcatcagcagcaacatcaacaacaacagcagcagtttgagagattgcgaaggcgtgcagcagcagctactcctcgccctgctatggatatagataaagaaagaccattggttcaagtcaagattgaaaaccaagacttaccact

SEQ ID NO: 32623 - DNA, 235 bp, Glycine max
  Clone ID: 700893892H1
gcaaaatgctgcagatgcatctctgcctctgaatatatataaatatattttcactgctatgccgaaaaacctttgatcccaccagccaccactctctctctccgatggccactgttacttcttctttctctttctccactctcactcaatcttcttcgccgaggaacctctccacactctcttccaattcaccaacttttcgcatccgcgttggtttctcctgtcactatgttgg

SEQ ID NO: 32624 - DNA, 235 bp, Glycine max
  Clone ID: 700893893H1
gcatactatgggatgagcacaaatcttgtgacttatttcaatactaaactaaatcagtctggtcctactgcttccaagaataatgcaaattggggtggaacatgctacatcactccgttgattggagcatttgtggctgatgcctatcttggaagatatcttaccatcctttgtttttccatagtttatgttattggaatgacactcttgacactgtctgcttcagttccaggca

SEQ ID NO: 32625 - DNA, 234 bp, Glycine max
  Clone ID: 700893895H1
gtatcatgcagtgtcttggagccatctgtggggctggtgtggtgaagggatttgagggcaatgctaggtatgagatgttcaaaggtggagccaattttgtgaattctggatacaccaagggtgatggacttggagctgagattgttggcacttttgttcttgtctacaccgttttctctgccactgatgccaagagaaacgctagagactcacacgttcctattttggctccac

SEQ ID NO: 32626 - DNA, 238 bp, Glycine max
  Clone ID: 700893896H1
cggctcgaggaaacagtgctggtgttgtcacacagaataataggagtagtgtaagctacttggagttcagaaagaagagattgaatgcaagtaacttctgctgcaataagagccatgcttctatattctgcctcagtactagaccttgcaacaactgattgcttcttagaccaccaagagatgagttcaggtccaagaaaaatagcaggtccaggggtagacctcctatcatcaggat

SEQ ID NO: 32627 - DNA, 212 bp, Glycine max
  Clone ID: 700893901H1
gtcggggaacattattgtgggcaagagaatgaataggggcttgagctctccctcttgcatgatgattcagccgtggaggacacgtcttgatcaatgcttgagggagagttcaagctcttattcattctctgtcccacaataatgttcctcgtcttctaatatcaaatttttttaagtcctttatagcttctcttgattcactaaggcattgt

SEQ ID NO: 32628 - DNA, 224 bp, Glycine max
  Clone ID: 700893902H1
gtgctgttatcctacttcagggtctgtgtagtcatgcagtctgaatcatgtccagttcctgtcatagttattaacagccatggttgtggcattctataaaaaaaaaaaaaaaaaaaaaaaaaaaaaaaaaaggggggccccccccctaggggccccccccccccgggatttattcccggcccggacccccggggggcaccactttccccaaaggggggccgttt

SEQ ID NO: 32629 - DNA, 230 bp, Glycine max
  Clone ID: 700893903H1
tgaagtcggctctacgcacatccacgaaaaggaagcagagaaaactaaccagcaagagatatcacaggaaaaccaggaggctgagatcaagcaattgaggaagaccatgactttcaaagccactccaatgccaagtttctacaaggaacctcctccaaaagttgaattgaagacgataactataacgcgctcagaatctccaaagcttggtaggcacgcacgatctgctg

SEQ ID NO: 32630 - DNA, 226 bp, Glycine max
  Clone ID: 700893904H1
cttccaatccttccaaccaccactattggatccttcagtcagactgtataattgaggagggtacgacgtgagttcaatgctaacaagatcagagaggaagtgtatgataagtcaattaaggaggaaattcgcaaagttgttgaacttcaagaagagcttgatattgatgttcttgttcatggagaaccagagagaaatgatatggttgagtacttcggtgagcaat

SEQ ID NO: 32631 - DNA, 229 bp, Glycine max
  Clone ID: 700893905H1
ccggaactcagaagagaacttaggggagataatgatgatcacagaagatgaaacgactcttacagcaagcaaagaacaacaaagtgaaatgatgaacggagacgaggacaatcatggaagcgaagatgacaactccaaagagtggttgaacctgagcataggtggaactactactttactctcaacagctgtaccaccagccactgccaaagttttttcatgcaacttc

SEQ ID NO: 32632 - DNA, 223 bp, Glycine max
  Clone ID: 700893906H1
gttaaagcaaaaaccaaagtgagagagcaaatgatgaagccatcgatgctcagatctcttcactctgccgccacccgcggcgcctcccacctctcccgccgtggctacgcctccgagccggtgccggagcgcaaggtggccgttctaggtgccgccggcgggatcgggcaacccctctcccttctcatgaagctcaaccccctcgtttccagcctctccctct

SEQ ID NO: 32633 - DNA, 230 bp, Glycine max
  Clone ID: 700893907H1
aaccaagcttctctgttaaaaaaaaattaggcgtctaaagggccaaagcttagaaagttgaagctttttttgttgaggtgaaagtgaaatggttggcaaggataatctgagggctgaggacttgaacttgtgctttaagaagcttatgatggtggccgggaatggggacaatgagaaagggtgaacttgaaggttggggtgatcaccgagtggaaggatattcctgtggg

SEQ ID NO: 32634 - DNA, 232 bp, Glycine max
  Clone ID: 700893908H1
gaagattgaatctgaagattctggtactttaagagatgttgtgactttgtctgttgagaaaactaatgtggaagattcaccaggaagaattcctgatgctgaaaatgaagcagagttgtcatttgctgttgtaaatgattcttttgatgttcagagggtacaatctggcaatgatatcgtcgaggttgaagctgaccatgaaccttcagttgaaaacctgaacaatgttgac

SEQ ID NO: 32635 - DNA, 235 bp, Glycine max
  Clone ID: 700893873H1
gttgttttgtgtgtgcaatcctcattaccattgccgccgccaccaccaccgcctatcaccctctcatccaccaactgatacccgtaacttcttcaccttcctctccttccccaatttaaaactaaataaaaaaactgtccactaaggttgaggcacgtcaccatctcgtccttcccctcgctcatctcaaatccatggttcggaattagggtttccatttggatttcgcaattct

SEQ ID NO: 32636 - DNA, 241 bp, Glycine max
  Clone ID: 700893837H1
tggggacctgtgcaatatgcctttacacaatgaaaccagggcagggacatgccatttttactgcagaatgttctcactctttccatttccattgcatcacttctaatgtgaaacatgggaaccagatttgccctgtctgcagagcaaaatggaaagaagttccttttcagagtcctgcttcaaatatgccctatgatcgactcaaccaagtatctcctcgggaagaaggctgggcgactgt

SEQ ID NO: 32637 - DNA, 238 bp, Glycine max
  Clone ID: 700893838H1
cgggtgactagtgcgtaccctagcaggaagtggattacaagtattctgttatcgttattcctcttcttcttcttattgctccaccctgcctggtggacccaaacgaagaagacgttcggttttccctctgcttttcgaactttccatcgactccaccatgctattcaattagggttaggaattagggcttcttcttgtttcgctccgttaatttcaacaacggccaagccggttgttt

SEQ ID NO: 32638 - DNA, 237 bp, Glycine max
  Clone ID: 700893840H1
gagctgcagaggttttgatgttgaaacccctaatcatatatcacttgaagaattttttcttggtgaagactgaaaaggatagggaagaggctatggatcctgggagtattggtttcaacactggagaacctcgaatacaattgtactttttgctgggtctagtctatgcttcagttacacctactgttcttcctttcataatagttttctttgggctcgcctatgttgtgttccgtc

SEQ ID NO: 32639 - DNA, 239 bp, Glycine max
  Clone ID: 700893841H1
tggcatcaaagtctctgacatccgatcaattaatcgattttgtgagcctcctgaaaaaaggctgatgtgtgacttgctctggagtgatccacaacctctccctagcacgggaccaagcaagcgtagtgtaagcctttcttttcgtgcagctgttacaaaaaggtttttgcaggtaaataatttagctttcgttgtgcgctctcatgaagtaaaggccgagggttatgagattgaacatg

SEQ ID NO: 32640 - DNA, 129 bp, Glycine max
  unsure (1)..(129): unsure at all n locations
  Clone ID: 700893843H1
cggctcgagagttaagttactttctcgttcgttccctctcaaccaaaaccgacnacttcatgttatcattgctatgacccttcaagcttttcatggctctgcatgttgtttccgttcccaccttcttca

SEQ ID NO: 32641 - DNA, 181 bp, Glycine max
  Clone ID: 700893844H1
gctcggaattcgaggcgagatgaagggggcgaaagggcgtatcctggttggtaaatacgagttgggaaaaacaattggagagggaagctttgccaaggtgaagttcgccaggaacgtccagaacgataactatgtcgccatcaaaatcctcgaccgtaaacatgtcctccgcctcaacatg

SEQ ID NO: 32642 - DNA, 141 bp, Glycine max
  Clone ID: 700893845H1
aagaaatggaggcaaatcgtgacttatgtgaagcatcgattacattggataggtcacaggcattgatgatcccggtgatgagctcttttagcttgcttttgatgttctacttgttctcatctgtctcgcagcttctcactg

SEQ ID NO: 32643 - DNA, 242 bp, Glycine max
  Clone ID: 700893846H1
ggactgtccaagatcagtaaggatgcaatgctgaaaatgcacgtgaagccggagacttctctgattcgtccatatgttgtatgtgctgtattaagaggtataacttttgataaagcaagatacaacagctttatcgatctccaagacaagcttcaccaaaacatatgtcgccgaagaacccttgttgccattggaacccatgacctggatacattggaggggcctttcacctatgaggcttt

SEQ ID NO: 32644 - DNA, 138 bp, Glycine max
  Clone ID: 700893847H1
tgctggggagagaatggatattacaagatctgcagaggtcgacatgtgtgtggagtagattccatggtctcaactgtagctgcgatatatccatccagccattaaatacaaagatgtgcctgattgtggttgtgatgt

SEQ ID NO: 32645 - DNA, 217 bp, Glycine max
  Clone ID: 700893848H1
tcggctcgagtgtatgtagggtacatacattcttggtttcacaaaccaacaaagtggcaatgcacaaggttcaataagggtaatctctacgtattatgtcgcgttgagtgtgggtagcatactcgtacttgataattttcatatctgcaattgcaagtgctagtgccgtcgtgccgtggtatctgttcactgggtattaatctaataggggcggccg

SEQ ID NO: 32646 - DNA, 127 bp, Glycine max
  Clone ID: 700893849H1
aaatgattggatttactaattaatcgacaacgttgggaaaaaaggttgatatttacatggccatactactacaacagagaatattaaataagaaacgttgtcgattaattagtaaatgattggattt

SEQ ID NO: 32647 - DNA, 237 bp, Glycine max
  Clone ID: 700893851H1
aattggagagcgctgccaagaatctggcagctgtcaatccagaaaggaccatctttgatgtcaagagacttattggaagaaagtttgaagataaggaagttcaaagagatatgaagcttgttccttataagattgttaacaaggatggaaaacctggcatacaggtgaaaattaaggatggtgagaccaaggtgttcagccctgaggaaatcagtgccatgattctgactaagatga

SEQ ID NO: 32648 - DNA, 235 bp, Glycine max
  Clone ID: 700893853H1
ggacaagtatgttgatcttcttatacaggatcgcttcgtaacatccatatctgagcaggtatcacattttgcgcaaaggttttgcagatgttctttcaaactcaaagctccagcagtacttcttccaaagtttagaccttgaagatcttgattggatgctgcatgggagtgaagataccatttctgttgaagattggaaagcgcacactgagtataatggctatagagtgacaga

SEQ ID NO: 32649 - DNA, 187 bp, Glycine max
  Clone ID: 700893855H1
gtattttcctagtcatgagcctcatactgtggaagtgtgtcccccttgtgtaggatacctcttcctctatgggtgcttgatgagatacagaaagatatagagttagcgtattgtgacaggtttggaagaagaaatattgaatacatttcccttggatgtgatattcttcctgtgctacatgggcgtt

SEQ ID NO: 32650 - DNA, 214 bp, Glycine max
  Clone ID: 700893856H1
ctctctctctctctctgtgaaatggagccgtttgcttagagctgcttcttctgatctttgaatcttgatctagatatctagatacagaattggaaatggattcaaatgggagcctacgtgctaacacctgggcaaggtcgtcgtccttgacctctcctgcaagtggtttatcctcagatcctctttctttcccaggttttggtttgcagcataa

SEQ ID NO: 32651 - DNA, 234 bp, Glycine max
  Clone ID: 700893857H1
cacaaattctcagtctacgacttgggtgttggatttcattaagttgtgataaacatgggaaaagactcaaagccaaaggagtccggaggcaagggaaaggggaaacaggctgcaagtggaagtgatgagaatgcttctaagggaaaaggaaaaggtgggaaaggtggagatgggcttggtacttgcacctatgtcaaagctaggcatatcctatgtgagaaacaaggtaagatc

SEQ ID NO: 32652 - DNA, 238 bp, Glycine max
  Clone ID: 700893858H1
tgtgagatttgccacatgttgatgagggaaccatgcatggaatgaaaagtcatgattgtcatatattcatagagtgtttacttcctattgcttttagctcattgccgccacatgtcttaaatccacttaatgaaataagtcatttcttcaaagatttgtgttctacatctttgatgaaggatgacttgagtagaatggaacaaaatattcatttattttgtgcaatttggcgggaata

SEQ ID NO: 32653 - DNA, 238 bp, Glycine max
  Clone ID: 700893859H1
ctacaatttgctcacaaaggaggaaaaatggcacctttcgtttccctctctttgttgcttctctttctcaaccaccccctcctttccctctcaaccaaccctgaagggaacgctctgcatgctttgagaagcaggctttctgatcccaacaatatgttgcagagttgggacccaacactggttaatccctgtacttggtttcatgttacctgtgactccaacaatcatgtgattcgct

SEQ ID NO: 32654 - DNA, 238 bp, Glycine max
  Clone ID: 700893860H1
catccgctgacgtggcagtcgaaggtttctgtatgagccgatgtgggacccacggctcctcctcttctgcatctcacgtgaagaagaacaacaacggcaagaactacaagttcgcttacatctgggtcggaaactccgaaacccaatgcccggggcaatgcgcttggccattccaccaacccatttatgggccccagagcccacccttggttgctcccaacaacgatgtgggacttga

SEQ ID NO: 32655 - DNA, 240 bp, Glycine max
  Clone ID: 700893861H1
cacattttagaagaataccccctcttttgctgcatcagaggagttgtaaattaagagcatggctgcacaagctcttgtatcatcatcttctcttaccttctcagcggaggctgcaagacaaagtcttggaccaagatcactccaatctccatttggcttctccagaaaagcctcctttcttgttaaggcagctgctaccccccctgtcaagcaaggatcagacagacctttgtggtttgc

SEQ ID NO: 32656 - DNA, 241 bp, Glycine max
  Clone ID: 700893863H1
gttagtgatccatctgaaccaatcaaaggttacgccatgccccagagttggatttaaatctagttttcattgttatggtctccgtagttaacaaattttatcagcatgttacattattactccattctacgttaggttgttgacgaattgagttattctgtcatcagttgaaattgagttgagagaatatccaaatcgtttggcaatctggtggtggagggggtatcaaggtaggaaaatt

SEQ ID NO: 32657 - DNA, 186 bp, Glycine max
  Clone ID: 700893864H1
ggtcaatctaagaatacccagaaaagagttgcttaggttctcccaccaaatcccagctttcaaactgacagacgagcatggcaatcttaagggcttctaggaacttgatccaggtgcactaccaatgcattattatggcttgacatgaccggccatgggtgactgaatagcccaatgttttttttt

SEQ ID NO: 32658 - DNA, 236 bp, Glycine max
  Clone ID: 700893865H1
gaagatttatgcaaataataagatgctaacgaagggtaaggcacttgtcaagctaatggctgatagtggggtgaggataggcccattaacatgggatgcacttgtgaaactgtatatccaagctggggaagttgagaaggcagactctattttgcataaggcaatccaacagaatcagctgcagccaatgtttaccacctatttggctattttagagcagtatgcaaagaggggtg

SEQ ID NO: 32659 - DNA, 140 bp, Glycine max
  Clone ID: 700893867H1
caaggctcggatcttgttaatgtccgcaaggttctggggccacatgcaaagaatattcagttgatgtcaaaggttgagaatcaggagggagtcctgaattttgacgaaatcctgcgggagactgatgcattcatggtggc

SEQ ID NO: 32660 - DNA, 233 bp, Glycine max
  Clone ID: 700893868H1
gagtggtgtcattaagcttgatgataagcagggtgaaagcaagtgtgctcttgtgtatggtcaaatgaatgagccccctggtgcccgtgcccgtgttggtcttactgggcttactgtggctgaacacttccgtgatgctgaagggcaagatgtgcttcttttcgtagacaacattttccgttttacccaagctaactcagaggtgtctgctttgcttggtcgtatcccatctg

SEQ ID NO: 32661 - DNA, 233 bp, Glycine max
  Clone ID: 700893869H1
gttagggtttaacttataattgcgtgatcgattccgattcgattgattctcttctctctcacacgaagtagaaacacgaaactcagaatccatggcgacaccagcgacgacgaagcgaaaaccggtgttcgtgaaggtggatcagttaaaacctggcaccaacggccacacactgacggtgaaggtggtcagttccaagccggtgaagacggtgagcaccgcggcggtcgacc

SEQ ID NO: 32662 - DNA, 232 bp, Glycine max
  Clone ID: 700893870H1
gtcaatcatagttctgattttcatacacttaccctgagacctccattctcagatcaagcttgcaccaaaatacatacatagctatggacaataatactagtgcctgtgcctacccccaacttgagtcagaagaagcatcttcagagcacaaatcagaaactcaaacatcaaagaaaaggaaaatggttgagaaaacagttgtggcagtgagggtaggagagaaggttggcaa

SEQ ID NO: 32663 - DNA, 235 bp, Glycine max
  Clone ID: 700893871H1
atcaatcatagttctgattttcatacacttaccctgagacctccattctcagatcaagcttgcaccaaaatacatacatagctatggacaataatactagtgcctgtgcctacccccaacttgagtcagaagaagcatcttcagagcacaaatcagaaactcaaacatcaaagaaaaggaaaatggttgagaaaacagttgtggcagtgagggtaggagagaaggttggcaagct

SEQ ID NO: 32664 - DNA, 237 bp, Glycine max
  Clone ID: 700893836H1
ccagtttcgagcactgaagcacagtgatgcatttctgatgtgcactaccctcatgacaactgtgtttggggcaatggtggtacacctgctactaagggctggatgtttttctcctggccaagttgatgccattcctggaatcatttttttgttctttgtaggtcttctcatttgcccatttgacattttttatcgccctactcgtttttgcttcatccgggttattcgtaacatagt

SEQ ID NO: 32665 - DNA, 240 bp, Glycine max
  Clone ID: 700893803H1
caaacacaagccaagtgaaagtgagacaaaataaaaatcaaagagcataatgtcagggatcattcacaagattggggagacccttcatgtgggagggcacaagaaggaggaggagcataagggtgagcaccatgctggagaatacaaaggggagcaccatggtgaacacagtagtgagtacaaaggagagcatcatggtgaacacaaagctggagagtaccatggtgagcacaagccaga

SEQ ID NO: 32666 - DNA, 242 bp, Glycine max
  Clone ID: 700893804H1
gacacaactctgccatattccatcttttatttgcttttacagctatatttgtttctgaatcatgccacacttttcaagtcccaacgcattcaactaggattttcaaggctgtatatacataaattcagctactgaggtcgtgtgctagaagcaaaatcaagaacaatttgatctttgttcaatttggtggatcattgggctgttgatgtgattgtgaagcataagaagcttttgttaaaaat

SEQ ID NO: 32667 - DNA, 244 bp, Glycine max
  Clone ID: 700893805H1
ggagaattgatcccaaatacgcctaagattgatctgtggcaaagtctcctcaagcgaactctttcctggaaacggtaaacataacattaaaaacttgtaaattacgcatgaaatgggaaacgcaagcagatgcagaagtaatatgcacctcactgttgtcgtgaccataacgaattaagatgttttctgcaacctctaatatcttgcattatcctttgtatctctagaatgtgagcatcatagt

SEQ ID NO: 32668 - DNA, 133 bp, Glycine max
  Clone ID: 700893807H1
ggaaaatcttgatgaatctcctcccgagggcattaaagttgtggtaaatgatgatgatttttcgacaatatttgctgacattgaaggcccagctggaactccttatgagaatggagttttccgaatgaagctg

SEQ ID NO: 32669 - DNA, 236 bp, Glycine max
  Clone ID: 700893808H1
tgtctctctctctccaccattgccatggatccttacaagctccgtccatccagcgccttcaattctcccttctggactacaaattctggtgctcctgtttggaacaacaactcctctttaaccgttggagctagaggtccaattctgcttgaggattatcatcttgtggagaagcttgcaaactttgacagggcacgtatcccagaacgtgttgtccatgccaggggagctagtgc

SEQ ID NO: 32670 - DNA, 244 bp, Glycine max
  Clone ID: 700893810H1
gaacagtcttctgccactgctgtgacaagcagagatatgacaggacaaacttctagtcagagttaccttctgagattacaggggcctctccacccagtttgtgttgactttgcagggccagctggtgagacagacaatgctttggaaaatgctgaaaatggtgttgtacctgttgtgactcaaaagatgtcaactagagatcaggccacttctggtgaacacatgcctgttggtctttcctctt

SEQ ID NO: 32671 - DNA, 238 bp, Glycine max
  Clone ID: 700893811H1
caagattgcgtctttccagcagtttatccctcatgattttgatgccagtgctcatgggacatcgagcttccctgttgcttctgtgcatcgtatagggattttggacattaggattcttaacacggataggcatgctgggaacttgttggttaggaaacttgatggcatcgggagttttggtcaggtggagttgattcccattgatcacgggctctgcctgcctgaaactttggaggat

SEQ ID NO: 32672 - DNA, 244 bp, Glycine max
  Clone ID: 700893812H1
ggcaaaaaggacacaccgtttcatagtttttaagattgaggagcagcagaagcaggtcattgtggagaagcttggtgagcctgcccagggctatgaagatttcactgccagccttcctgctgacgagtgccgttatgctgtttatgattttgagtatctgactgaagggaatgtccctaaaagcagaatttttttcattgcgtggtcccctgacacatcaagggtgaggagcaagatgatttat

SEQ ID NO: 32673 - DNA, 246 bp, Glycine max
  Clone ID: 700893813H1
cgccagtgcatgtgtcagttggctcaaagtctccatttgattacgtctacgccgccacggaaactcaattacacgatgaccccaacgtggcactcttcttcttggaaaaggacttgcattctggaacaaagttggacttgcacttcaccaggagtacatctaatcaagccacgttcttgtcacgccaagttgcggattcgatacccttttcatccaacaaggtggactttatattcaacaagtttt

SEQ ID NO: 32674 - DNA, 244 bp, Glycine max
  Clone ID: 700893814H1
tctgaggggactgctgcactccgtattactgatggaggtctagttgtggtccgttgtgtggaaggcgtttgtgtccaaactgaaactgtgctaagacaagcccttggagaaaggattaggcctgttctgactgtcaataagatggacaggtgcttccttgaactaccaagttgatggagaggaggcttaccagacattccagaaggttattgagaatgctaatgttatcatggctacatatgaa

SEQ ID NO: 32675 - DNA, 197 bp, Glycine max
  Clone ID: 700893816H1
tcgaatcgaatgtatgtaaggtacatacattcttggtttcacaaaccaacaaagtggcaatagccaaggatcaataaggatagagtgaaaattttgtgtatcataaatgagtgttatcatatttgtaaatgttctcaaggacatctgttttggttggaactgcccaaaaattgcagttttatctattcactgggtat

SEQ ID NO: 32676 - DNA, 250 bp, Glycine max
  Clone ID: 700893817H1
gctcgagcactcatcaatctcgtttgttctcactaactattacttcatcatgtcgtcgagcacagttggtcaagtcatcaaatgcaaagctgcggtttcatgggaggcagggaagccacttgtgattgaagaagtagaggtggcaccaccacaagctggtgaagtgcgtttgaagatcctctacacctctctttgccacactgatgtttacttctgggaagccaagggccaaactccattgtttcctcgt

SEQ ID NO: 32677 - DNA, 243 bp, Glycine max
  Clone ID: 700893818H1
ataaggtcggaggattgattgagaatcgttcgagactgcaaaatccaaaaccaaacacaacgcacaacattcgtcattcaccgccttgtcttgtcttcttctgtctccgaatcacggaatctctctgaatcgcgggattaagagaggaatatgcaacagaggctaaagttgcagcaacaacaggccctcatgcagcaagctttgcttcaacagcagcagatgtaccaccctggcatgctcgcc

SEQ ID NO: 32678 - DNA, 141 bp, Glycine max
  Clone ID: 700893819H1
caccttcacaattagaaaaaaaaaaaaacacaaaatgggcgtttctcgttctcaaaagcctcatgttgtttgggggccattcccagcacaaggccacgtgaacccttttatgcaactaagcaaactccttctttgcaccgg

SEQ ID NO: 32679 - DNA, 242 bp, Glycine max
  Clone ID: 700893820H1
gaagaagaagccctttgggttctctcgctccaacaacaaggctgcttctaagcctctctctcgtggagcaacaactgtgaaatctgtggaatcaaaggggcaagctgagaagtgtgccaagagaaagaggaagaaccagtatcgcggaatccgccagcgtccatggggaaagtgggctgctgagattcgcgacccaagaaagggggttcgcgttttggcttggaactttcagcactgctgaa

SEQ ID NO: 32680 - DNA, 239 bp, Glycine max
  Clone ID: 700893821H1
gaagtatgccatgggctgatttgtgtttggataatgtatattgaaatggattgcatctatgaaaacttttgtgggtttgcttttcacttcctgttttctgggtaagattatgtttctgttatgaggggctagggaagggaggtgtcttaatttgataaaaaaaataactgtgttcaacaaccactgtgatgtttttatcatgatgcaaacgcatgaacaggatgttatttgtgtcattg

SEQ ID NO: 32681 - DNA, 139 bp, Glycine max
  Clone ID: 700893822H1
gttttgctttaagccaattttgtatgtaatcatgtttataagtgtcgtcttgtgatgattttagtttagtgtacaaaggtgtgaaaactgaaaagggttcttttctttcctttaaaaatttatacttcctctcttctgc

SEQ ID NO: 32682 - DNA, 239 bp, Glycine max
  Clone ID: 700893823H1
gtggatttgtcctcaaatcttttgactgggagcttacctagatgtttagtgtcaaattccagtgatagcactgtcctgtatgctagaaattgtctagacaccgtgaatcaaaatcagcagccgcagcccttttgccacactgaagctttacctgtgggaatattacctgagagaaagaagcacaaacaagtatctacggtagttctttcccttggcatagtaggggggactcttggagg

SEQ ID NO: 32683 - DNA, 242 bp, Glycine max
  Clone ID: 700893824H1
gtttaccaaaacaattagcatactaaaacgcattcatgtgacgataattgttcctgatgatgcgagtttcagtcaaatcaaaatcatttttttcaagagtgtctgtctttggccactgaactacctcagtgtttcgcatgtggttttgtgttctcagcaaaaaccaaagtcgcttcctctatgctaaaagggacaccgagagagagagagagagagagataaagagagggtttttcaatccc

SEQ ID NO: 32684 - DNA, 241 bp, Glycine max
  Clone ID: 700893825H1
caaaaaaaaaattctttaattaaatctttaatgaaattaaatatttaaattaataaaattagtcgtgttttattcgattttttgaattggttttttttttacagtagctaatgctagtcatcgaacttagtcaatgagctagaatgggttataaagatatctatagatatatatagatatatttatctatagatatctttagaaaaaaaaaaagacaataaccaaataagacgtatcattt

SEQ ID NO: 32685 - DNA, 240 bp, Glycine max
  Clone ID: 700893826H1
gcattattcatcgagatattaagtcatcaaacatcctgcttgatctcaactatgaagctcgagtttcggactttgggcttgcaaaattggcattagattcaaatacacatgtaactacacgtgtaatgggaacctttgggtacatggcaccagaatatgcgacaagtgggaaacttactgaaaaatctgatgtatattcttttggggttgtgctgttggaactaattacaggtcggaagc

SEQ ID NO: 32686 - DNA, 240 bp, Glycine max
  Clone ID: 700893827H1
gatttatcttgttcataccgggtttctactacacgcggattgcgtattatgcttacaaaggatacaaagggttctctttctctaacataccacccgtgtagctctactagctagccatgtctcatactttaggttcacatagcttcctcttgtacagatcttccatggttgtactctatgttctttctttctggtgttgtgtttttttttttgcaaccatagaaagtgccagtatatgat

SEQ ID NO: 32687 - DNA, 243 bp, Glycine max
  Clone ID: 700893828H1
ctcaagacagtgaatttggacaattctcactctcgacggaggcggatcttcgtgctctcgacgcggagcctcgctcactcactctcgaatgcgaagcctccctcatgaacttcactctctgctgtataaacattctagttatggaagattctgatcaaccagtcaaatctgctgaaaaccagcaaactgaacaagtgtgtagtttttacagaaagccagttaatcacaagactataaggttac

SEQ ID NO: 32688 - DNA, 161 bp, Glycine max
  Clone ID: 700893829H1
gttctaatgatgaaacagctcctatggtggtacaacttgttcctctcatcatgatggcgctccatcagactcttgagaatcagaaggtttcatctgacgagaggcagaatgagttacaaggccttctatgtggttgcttgcaggttatcatatcgaagtta

SEQ ID NO: 32689 - DNA, 245 bp, Glycine max
  Clone ID: 700893830H1
cttttgttgtttgtgtgtttgttttttctctcacctgaaaatgtcttgctgcggtggtaactgtggttgcggaagcgcctgcaagtgcggcaacggctgcggaggctgcaagatgtacccagacttgagctacaccgagtcaaccaccaccgagaccttggtcatgggagtggcaccagttaaggctcaattcgagagtgctgaaatgggtgttcccgctgagaacgatggctgcaaatgtggag

SEQ ID NO: 32690 - DNA, 271 bp, Glycine max
  Clone ID: 700893802H1
gtcgcatgctcgcgaatgcggctcgaggtataatatggtgctgaagtttccaaggagttaactcctttatggattttgggcccacttattgtggctacccaaatcttggcaatccgttggctatgtgcactctatgttttcagcttcaatcagactgtcaaattactcaagaattctccttattactgcattttggcctacagctatgtttttcgtggcaagctcaaagaggatatctcaacttatgttttgcagcctatattgcgcgtta

SEQ ID NO: 32691 - DNA, 69 bp, Glycine max
  Clone ID: 700893833H1
gcaagactttaccgagtccttacgcgttgtttgtgtttgcgtcggaaggaagagaagatgagtgagaat

SEQ ID NO: 32692 - DNA, 237 bp, Glycine max
  Clone ID: 700893835H1
gtttgcatctaatgggtctcttcatgatattttacacggcagagaaggtgttaaaggagcacagcctggcccagttttgacatgggcacaaagagtaaaaattgccgtaggggcggcaagaggacttgaatacttgcatgagaaggctgatccacacattatccaccgggacatcaagtcaagcaatgtgctaatctttgatgatgatgttgctaaaattgcagattttgatttatc

SEQ ID NO: 32693 - DNA, 232 bp, Glycine max
  Clone ID: 700893763H1
cattattcctctctcttctcttctcttctcttctcccatggcttattccattcctctcatcatcacctacttcttcttcctcttcggcactctctcccacgctcaagcccctgcatctttcctaatcccagtcaccaaagacgcttcaactctccaatacataacaacactttcatatggcacccctttggttcccaccccactggtgcttgatttaggaggtccttttctc

SEQ ID NO: 32694 - DNA, 223 bp, Glycine max
  Clone ID: 700893764H1
cgattggtcccattgattccgaagagaaaagaaaagatgtttgagccacaacagctatacactcgcgcgaagaccgaggaattcgacctcgaatcaggagaaaccctctacccagggctgagcgtcggcgagaaccagctccgatggggtttcatccgcaaggtctacggcatcctctccgcgcagatcgtcctcaccaccctcgtctccgtcaccaccgttt

SEQ ID NO: 32695 - DNA, 226 bp, Glycine max
  Clone ID: 700893765H1
tcgtcccactttcttctccttttagggtttcctttttgtttctcctttccagatctgcatcttccattttttaggattaagcggtgagattcgtgaatctgagaaatgtcggattcttctcgggaggagactgtttacatggcgaaattggcggagatgccgagcgttacgcggagatggttgagttcatggagaaggtagcaaagactgtggaggttgaggagtt

SEQ ID NO: 32696 - DNA, 234 bp, Glycine max
  unsure (1)..(234): unsure at all n locations
  Clone ID: 700893766H1
ctaagagttgctgcttcttcagccactccgcaccttgagcagcctctagggncctcaacaaccatggctgaaatcgaaactaccgttccagatcccacccaaatcgacgtcaaactcttcaatcggcggagcttcgaggatgttgaggttaatgatatgtctctggctgattacattggagtgtccccatcaaagcatgctacatatgttcctcacactgctggtaggtactca

SEQ ID NO: 32697 - DNA, 231 bp, Glycine max
  Clone ID: 700893767H1
caattgtgataagccattcactcaggtgaaaagataaaaaaaacatatagtaacaaaaccatggtgattcacagactcgaattgtgcataaacatggttcaactcgccatagagttcgtcgtgagcgtcgcggaaacagtggtcatagttcagcagagaaccgtggagcctctcggaatgttgaatcgcgcaagtacacctcttcctttctatggctacctccgttgaatg

SEQ ID NO: 32698 - DNA, 229 bp, Glycine max
  Clone ID: 700893770H1
gacttcactttcctgaaaaaaagaattttgaacctgcctctgttaaagtttgcattttttttgggtgggttgatagtactgtgcaagctttggaacttcttcacaagctgctacttcaatggccactgaagaggttaacaaacctcaatcgcttcctccataccctgagatgatagtgaaagcacttgaagccttgaatgaggctgatggatcgaataaatcagcgata

SEQ ID NO: 32699 - DNA, 229 bp, Glycine max
  Clone ID: 700893771H1
gaaattcccgaggataacgatgtggatgccgcagacatggaagaggatgtcgatggcgaccttgccgaccttgaaaacctaaactatgatgacttggacagtgtttccaagttgcagaaaacccagaggtacactgatgttatccagaaagtggaagaggcacttaataaaaaggaggctgaggtcttgttgcatctagtggatatagacagatgatcctgaataccaa

SEQ ID NO: 32700 - DNA, 198 bp, Glycine max
  Clone ID: 700893772H1
agtgactttgtctacttgtgtcccccagaagccttaaagctcttctctgctttgaaaatggctgattggggcccggtggtgatcgcagtggtgctgttcgtgctgtgaagcccggggtttctgtttcagatgccagccaggggaagggtagcagagtttgggaacatgcaaaccagtggggcctccattttggttcac

SEQ ID NO: 32701 - DNA, 226 bp, Glycine max
  Clone ID: 700893774H1
tgatttgaggccaggcaagccccactcaaccaccacacctctcctcgttcacgctacccctttctgctcttcttctacctttcaagttttaaaagtataaagatggcagagacattcctatttacctcagagtcggtgaacgagggacaccctgacaagctctgcgaccaaatctccgatgctgtcctcgacgcttgcctcgagcaggacccagacagcaaagttg

SEQ ID NO: 32702 - DNA, 228 bp, Glycine max
  Clone ID: 700893775H1
gcattcctcttattcaggaatttggagagtattgatatatcaaggtaggataaaccagtagccaaggaagatatggagttttctatgattttcattgttagcaacattatgctgcttttcagttcagcatttgccaaaactgctagtcctccctctctgagcccaactccagcaccagccccggcaccagacttcgtgaacctcactgagttactcagtgttgctggt

SEQ ID NO: 32703 - DNA, 227 bp, Glycine max
  Clone ID: 700893776H1
ttgtttgtctgtcacgagactcatacattgtgctgccaattatagtaactctctatttctctttccatctctcaagttctgaagaagaaacatgtgtggaggtgctatcatctcagacttcattggtgtgaagcgtggccgcaacctcgccgcgcaggaactatggtctgagcttgaccctttctctgacttccttggcttcgataccaccaattccaaaaaccaac

SEQ ID NO: 32704 - DNA, 226 bp, Glycine max
  Clone ID: 700893777H1
gtcacccgtagcaatgacggagctgcagaagctatgtgataaagttccttcatttgcagatgatgtggctatggctctaattgaggaggagcttggtcagccatggcaaaacatctattctgaactatcatcttctcccattgcagctgcatctcttggacaggtatacaagggtcgcctaatggaaaatggggatttggtagctgttaaagtgcaaagacctttc

SEQ ID NO: 32705 - DNA, 227 bp, Glycine max
  Clone ID: 700893779H1
ctacgcactgcggagagagaaattgagtttccgagataaccagtagtctctttgattcatcaatggcaactgcgaggaccgtgaaggatgtttcgcctcacgatttcgtgaaggcttatgcttcccacctcaagcgttccggcaagatggagcttcctgagtggaccgatattgtaaaaacagcaaaatttaaggagttggctccatatgatcctgactggtactac

SEQ ID NO: 32706 - DNA, 228 bp, Glycine max
  Clone ID: 700893780H1
tgaaacttgggtgcgattccttcactcacaacaacaacacatcactatggctcttctgagtcgagcctcttcacgcttccctcagctggtttcccctcaaagggtagtttcactccacacaacgctcgcaacactgaacgcatccccatccacagccacgcctacaccatatgccccggcaccgcctccgtccgcttcctctcccgccggcgtttcgaaggcggcgga

SEQ ID NO: 32707 - DNA, 227 bp, Glycine max
  unsure (1)..(227): unsure at all n locations
  Clone ID: 700893782H1
cagaaaaaaatggagaactatcagtacccggcggcgtaccctgagtccggcgagtcctccccgcgctcgcgcgagatcgacttcgagatatcgccgccgtgggacgagcagcagaacaaagaatanaaggccaagttcatgtgcagctacggcggcaagatccagccccgcacccacgacaatcagctctcctacgtcggcggcgacaccaagatcctcgccgtcga

SEQ ID NO: 32708 - DNA, 225 bp, Glycine max
  Clone ID: 700893785H1
caccgagtccagaatattccgaacggcatgttccagcgccgttcagatcgagagaattgcgttgatggggggtaacaattctaaggaggataataacaattggaggcagaattcatctgtgcgttcaagttcctctgcgtcttcttggggttcatatcctgacccccaatcaggttatggtcacgggggttacgcgtatgagccacaacagccttcttatcctac

SEQ ID NO: 32709 - DNA, 219 bp, Glycine max
  Clone ID: 700893786H1
ggaatgaactttatcatgatttacccagcaagcagctcaaggtcaaagttactgacagaacggctgttgttacaacaaatgcagaaactgtggttgtgagccctccgggtctacaagaagccataaatgaagaaactgctaaggagccccaaggtcgatactttatgcgaccatctggcactgaagatgttgtacgtgtgtatgctaaggcatccacac

SEQ ID NO: 32710 - DNA, 228 bp, Glycine max
  Clone ID: 700893787H1
gacacaaatataatttcttttggtgggttcccagatgaaagggatattatctctgtgggtaggcctgctgcagagtatgatcaattatataatcaatcttcagtgcatgggtcaacaacagcccacgagaaagagttggatgtgtcaagtgctgatgcagttgcaagtacacttcaggtagcaaaagttaagtctgaaactgtatccaagaataaacaagagctcaaa

SEQ ID NO: 32711 - DNA, 229 bp, Glycine max
  Clone ID: 700893788H1
catcgctagcaatatctatcgccgaccttttcttttttagcactgatattcattcctagcatttctcaattttgttaactctaatagcaaattggagatattggcagatcttgttgctagctatgtccatggatagttcttccaattcagtgatggaggatgaatttgagtcaacaaccttgcattcagccccatcatttgcactatcacacaaccttcatggagatga

SEQ ID NO: 32712 - DNA, 224 bp, Glycine max
  Clone ID: 700893790H1
ctttgttagtgataattttgctatgctgttttggttcttttgatttctcagtttgattgagtaggctttaatgggtttgtttttcttgtgatggttgtttctttaatcaagaaggtggtgttgttgctatttactaaaccatgagtggatcatgtatttgttagcttaattgaatgcatctcttattctggatgttcactgggttgatttgattctgggatctg

SEQ ID NO: 32713 - DNA, 242 bp, Glycine max
  Clone ID: 700893791H1
tcggattcggcgcatgcttcaggttctggatctctaatacttctactcactgtatgctcttgagtaatttttgcagagaagtacactatgagcaggccaggagactggaattgcaggtcatgccagcacctgaacttgcagagaagagattcatgccagcgatgtggggacgcaaaatatggcgatagagttgatttttgtggctttggaggacgaggatggtcttcatttggtttaactgg

SEQ ID NO: 32714 - DNA, 221 bp, Glycine max
  Clone ID: 700893792H1
aggttctggaaatcaaggttccttttctgaacattgatgagaacacaagtcaagaaaacaagccatttactgacatgcaattagcaaagagtgtcagctcaggaagtttgagctcaatggactggatgcgtggagctgcaatgaagcctgctttcattgatatctctgcaatagatttcaatgcagattatggcatgcggagatcatttagtgaaggagat

SEQ ID NO: 32715 - DNA, 223 bp, Glycine max
  Clone ID: 700893793H1
gcgaagaagaagaaacgacagagcaagaaggaaatggcgaccaacattgggatcatggatgcggcttacttcgtcggcagatctgagattctttcttggatcaactcaactctgcaactcaatctctccaaagtcgaagaggcatgttccggcgcggttcactgccagcttctcgatgccgctcatccagggatcgtgcctatgcacaaggtcaatttcgacg

SEQ ID NO: 32716 - DNA, 223 bp, Glycine max
  Clone ID: 700893794H1
ccggggttttggttgcgctcacatcgtgttctctgcggcgcgagctagctagggtttagaacctcgcagttacagaaaacatggcgactgtggtgccaacctccgaagaagacgctgcactctccgtcgttcgattcgcctctgaacttgcctgggccgatgccggtcccgaggttgctgagccccaagttagcagactctgcgtggaggctgaagaattcat

SEQ ID NO: 32717 - DNA, 226 bp, Glycine max
  Clone ID: 700893795H1
tagcattccgttcccgttccgttcaaacagtttgtctttctcacatacactttcttcctttgtttgtcaccgcagtttcaatctcagatccaacattgttcagtccaaattcaacgcattccatggcaaatcctgcatccgcgagattctccgttcttattcttctcgtttctttgctagtcaacatcgccgccaccgccgccaccgccgccgaatcgccagctcc

SEQ ID NO: 32718 - DNA, 227 bp, Glycine max
  Clone ID: 700893796H1
gtttttgcccttgaagtgaaagggttttgaagtttgatttttggtttagctgtgccacaagagtatgaggaaaaatgtcggttctcattcaggaaggatgtttagtgataggaagtggattctccccttttttgcaagtttgattatatctatgagtctagttctgacagccattcttggattacttagttctgatggcgggggagaacagtcaccgtttgaaatca

SEQ ID NO: 32719 - DNA, 56 bp, Glycine max
  Clone ID: 700893801H1
gggctcgaggtccatcacgaccttccttctcctcctcgtgctctcgccggcgatca

SEQ ID NO: 32720 - DNA, 229 bp, Glycine max
  Clone ID: 700893762H1
ggaactcggagacactctcagagctaaattccccaacgccaaacttgaccagggatacggaatgactgaggcagggcctatgctaacaatgtctttagcttttgctaaagaaccgatagacgtgaaaccaggtgcatgtggaaccgttgtaagacatgcagagatgaagattgtcgatcctgaaaccggtcattctttacccagaaaccaatccggtgaaatttgcata

SEQ ID NO: 32721 - DNA, 237 bp, Glycine max
  Clone ID: 700893723H1
tgggagaggcttttactacccttgttggccatacacagtgtgtgtctgctgtggtttggccacaacaggagtcaatttatactgcatcctgggatcattctattaggaaatgggatgttgagacaggaaaaaacttgacagatgtattttatgggaaggttctcaactgccttgatattggtggggaaggttctgctctgatagctgctgggggttctgaccctgtcattaggattt

SEQ ID NO: 32722 - DNA, 111 bp, Glycine max
  Clone ID: 700893724H1
cgaaaaaaaagaagaaaaaagactcagttgtgtatcgttgcagctctactagctagggtttcgcaagtgcgatcgaagaagaacgatggcgatggctgctgctctgcgtcg

SEQ ID NO: 32723 - DNA, 234 bp, Glycine max
  Clone ID: 700893727H1
gaatatggttgggattagttggagctgccctctttattcaaagataaactacacttaaaacacggagtttgagttctccaatttgtgatgtataccttctaatttgttgttatagtttttctttttagtttatatgatgtgaagtccatgttgtaacattattatagaatgtatggaatagatttgtacatttattgtgtgtatcaaatagatgaagatgttatattatcctac

SEQ ID NO: 32724 - DNA, 244 bp, Glycine max
  Clone ID: 700893728H1
ttctgctcattcgaggatggctaagtgctcctacattcgaattcagtgaatgctcgggaaactagaattccatatccatgggtagtttttaatgagaagataaaagtgaactctgtatttcttcgtgactcaacagctgtgcctgattcagtggtgcttcttttgggtggaagcatctcaataggagatacggatggtcacttgagaatgtcaggaggatatttggagttttttatgaaacctg

SEQ ID NO: 32725 - DNA, 234 bp, Glycine max
  Clone ID: 700893729H1
caaccctaacgcgtgcagagcagagagagacgcagccatggggcgaagacccgcgaggtgttataggcaaattaagaacaaaccataccccaagtcacggttttgccgtggtgttcctgatcccaagatcaggatttacgatgttggtatgaagaagaagggtgttgatgagtttcctttctgtgtccatctggttagttgggagaaggaaaacgtttctagtgaggccctgga

SEQ ID NO: 32726 - DNA, 230 bp, Glycine max
  Clone ID: 700893730H1
cctttttcttttatctgtagtagctgaatgaaccacaggttaaaataacacacaaagaatcatccgagtcaatgtgtagtaggaactccatggcactgtaatttcttctcattacccttggatgtagtagtttagattgttagtcctatgttgttacaggtataatttcaagtctttgtacagctggagcattacccagagagaaagcatgcatagatgaagtggtaaaa

SEQ ID NO: 32727 - DNA, 237 bp, Glycine max
  Clone ID: 700893732H1
ctcgtttaaggattctgcttgtcgctgctttgggtacatggtgtctaagaagaagtacatctacaccatcgacgacgactgcttcgttgctaaagatccttctggaaaggacatcaatgcacttgagcagcacattaagcatctcctatgtccatccacaccatttttcttccacaccctttatgatccttacagagctggtgctgattttgtccgtggatacccttttagtcttcg

SEQ ID NO: 32728 - DNA, 236 bp, Glycine max
  Clone ID: 700893733H1
ccacctcctgttccggttcatcctccagttaaacctcctgttccggttcaccctccagttaaacctcctgttccggttcaccctccagttaaacctcctgttccggctcaccctcctgttaaacctccggttgttccggttcaccctcctgttaaacctccggttgttccggttcacccctttcctagaagctttgtcgcagttcaaggagttgtttatgttaagtcctgcaagta

SEQ ID NO: 32729 - DNA, 235 bp, Glycine max
  Clone ID: 700893734H1
cgtgaatgcgtataaaaggaaaataaagaaattagcgtcaaacatgttgggtgtgttcagcagctccatagtgtcgccgccggacgagctcgtggccgccggcagccgtactccgtcgccgaagatgacggcggcggcgctgcggaagcggttcgaggagaagaacccctccgccgtatcggtggaggtcggagagcatatccagctcgcttatacccaccacaacgagtcgccg

SEQ ID NO: 32730 - DNA, 235 bp, Glycine max
  Clone ID: 700893735H1
caagaatggcacttcgttgcttggtgatgtccctttctgttctcttcactcttggtcttgcgagagaaagccatgccagagacgaagatttttggcatgctgtttggccaaacactcccattccaagtccattgcgagatcttctaaagcctggccctgcaagtgttgagatcgatgatcaccctatgcaaattgaagaaacacagtacccgaaaaccttcttctataaagaaga

SEQ ID NO: 32731 - DNA, 231 bp, Glycine max
  Clone ID: 700893737H1
gattaccagtagagttccttataaaactgttttgagagcacacagtgctgttgttttgaaggctgaaagtgcagctgataaggttgaatggattaaaaagataagccaagttatacaagcaaagggaggacagattaggacatctgatggtggccctacaatgaggcatagcctctctgatggttccttggacacaatggctcgaagacctgctgatcctgaggaagaact

SEQ ID NO: 32732 - DNA, 232 bp, Glycine max
  Clone ID: 700893738H1
cacatctttgggcccgctgtgtctgtgactcacctcttcggttccaagtcgccacccaagctttgcgtctttactctcagatgctctgctggcaatggagaaaggccttggaaaacttcaggcgctagacttatgttagaagatggatcaatctggaaagcaaagtcatttggtgcttcaggaacccaagttggagaagttgtttttaatacatcattgactgggtatcaag

SEQ ID NO: 32733 - DNA, 103 bp, Glycine max
  Clone ID: 700893740H1
cttaaagatcgtccatcttggttccgtgactgtcggagcctagaggtttttactatgtttcctgctggaaatggaggaaccattgaacttgtttccacacaac

SEQ ID NO: 32734 - DNA, 235 bp, Glycine max
  Clone ID: 700893741H1
ccaatatattccattctctctgtgtatttccctacctctcccttcaagatgcagatcttcgtcaagaccctcaccggcaagaccatcacccttgaggtggaaagctctgacaccatcgacaacgtcaaggccaagatccaggacaaggaaggaatccccccggaccagcaacgtctcattttcgccggaaagcaacttgaggacggccgtacccttgctgactacaacattcaga

SEQ ID NO: 32735 - DNA, 233 bp, Glycine max
  Clone ID: 700893742H1
agtaaacatgagggcacgccaatcttggcaaaatggacaatgggttgtcatgtcaaagggatcaggaatgtctggagatgtgatgtctagccggtatttgatttcaaacagttacaaggatcaacctgaaaatcagtgcagaaatattttttctccaggattagatgccagtggtcttcaggaatctcgtctggcttcatcttcaacattgaagagaatgtccccttatgact

SEQ ID NO: 32736 - DNA, 231 bp, Glycine max
  Clone ID: 700893743H1
caactctttgggcttgatctcatctagaaagacaaatgaagccatcgagatccttaagctcatgtcttccacattcttgattgcactttgccaagcaattgacttgaggcatttagaggagaatttgaaaaactcggtcaagaacaccgtgagccaagtttccaaaaggattcttaccacaggtgtcaatggagaactccatccttcaagattttgtgagaaggatctgct

SEQ ID NO: 32737 - DNA, 230 bp, Glycine max
  Clone ID: 700893746H1
ggagacttcttggtgggtgtgacatagcaattgctatgcatgagagtggggaactgaaggaagtttttaaagatcatggaattgatactactaatgaagcaaaagagaaagaatcaggaaacggcaaaggtggcatctcaaaatctactgatttgagtacaaccttatcctctcgtctggaaagcctggtaaattcaagtgcagttatgctgtttatgacaggaaagcca

SEQ ID NO: 32738 - DNA, 234 bp, Glycine max
  Clone ID: 700893747H1
agcgaccatgccggcaccggcacggttgacggtggtaacagctggggaggagtacaatgcatgcaggtgtggccaccaattggcaagaagaagttcgagactctttcctacttgccagacctcgatgatgcccaattggcaaaggaagtcgaataccttctaaggaaaggatggattccttgcttggaattcgagttggagcacggtttcgtgtaccgtgagcacaacaggtca

SEQ ID NO: 32739 - DNA, 235 bp, Glycine max
  Clone ID: 700893748H1
gttcttttcctgaggatagaaagattcctctagaagttttaatcaatatgtgggttgaaatctatgacatcgatgaaggggaagcatatgccattgtggttgagctttcaaacaagaatcttctcaccttagtacaggaggcacgtgtcgggggcatgtatagcagttgctttgagatttctgtcactcaacatgatatattgagggaccttgctcttcatttgagcaaccgtgg

SEQ ID NO: 32740 - DNA, 227 bp, Glycine max
  Clone ID: 700893749H1
cttgtgctctgctcgtgcctctagggttatcatatctccatttccatttcctctctctcagtttccaagaatcttaagctatgggaaagtcttacccaaccgtgagcgctgattaccagaaggccgttgagaaggcgaagaagaagctcagaggcttcatcgctgagaagagatgcgctcctctaatgctccgtttggcatggcactctgctggaacttacgacgtg

SEQ ID NO: 32741 - DNA, 231 bp, Glycine max
  Clone ID: 700893752H1
tggaagaataagagcaccatcacattcactgccatcttcactagaaaacaatgtcaaatgtttcttttcttttggccttgttcatgatagtagctttgtctatctttccttccatagtgggtgcaataggtgaacaccggctaaggtggatgcctgagacaacaacaccatgccaaagctccatagaagagtgcatggcagatggtgagtttggaatggattcagagtccc

SEQ ID NO: 32742 - DNA, 232 bp, Glycine max
  Clone ID: 700893753H1
ctccgtctggtccccctacctctacgccaccgccgtccccgtctcccccttcacgctccagatcctccagcaggacaaaacctccggaggaattctggtcaacgtaaaagtcaacggaagagtcaagtggaaggtcggaacttgggtttccggaatttaccatattaatgtcaactgtccggcgtacctcaggctcgccggcgaccgggacgacgccatcggatttgccggt

SEQ ID NO: 32743 - DNA, 233 bp, Glycine max
  Clone ID: 700893755H1
aaccagccaagaggccttgaagatcctgaacttcttgctagagagactgtgttcagtgtaagcgaaatagaagcactttacgagctcttcaaaaagattagcagtgctgtaatcgacgatgggttgattaacaaggaagagtttcagttggcattgttcaagacaaataaaaaagaaagtctgtttgctgatcgggtatttgatttatttgacacaaagcacaatgggatact

SEQ ID NO: 32744 - DNA, 230 bp, Glycine max
  Clone ID: 700893758H1
ttttagtctagcaagatttgctcagatgatgtggcggcttaatttctttgtggtgttcagttgtattgtacttaacaacagttacatgttatactacatctgccccatgcacactcttttcactcttatggtttatggggcacttggtattctccacaagtacaatgagcttgggtcagtcattgctgtaaaaatcattggttgcgtcttggttgttatcttagtatggg

SEQ ID NO: 32745 - DNA, 230 bp, Glycine max
  Clone ID: 700893759H1
ctatggcttctgcagaagtagagttccgatgctttgttggtggacttgcttgggccaccgaccacgatgctctcgagaaagccttctctcaatttggcgaaatcgtcgaatcgaaggtcatcaacgatcgtgaaactggaagatccagagggtttcgatttgtgaccttcgccacagagcaggcgatgagagacgcaattgaaggaatgaacggccagaacctcgacggt

SEQ ID NO: 32746 - DNA, 236 bp, Glycine max
  Clone ID: 700893721H1
cagcagagggaaaataagcctggaaacgatggaagatgatgacgcagcgattgaggtgaggaaccatgtttccccagagccagaggtggaggattccagttgctgttgcccaatttgcttgggatcattccttcaactttcctacctcgacaaatgttttcataagttttgcttcaattgcattttacgctggaccaaggtggttgctagcaagcaccgttctccaccttcttctg

SEQ ID NO: 32747 - DNA, 221 bp, Glycine max
  Clone ID: 700893760H1
aggctctggaaatcaaggttccttttcggaacattgatgagaacacaagtcaagaaaacaagccatttactgacatgcaattagcaaagagtgtcagctcaggaagtttgagctcaatggactggatgcgtggagctgcaatgaagcctgctttcattgatatctctgcaatagatttcaatgcagattatggcatgcggagatcatttagtgaaggagat

SEQ ID NO: 32748 - DNA, 228 bp, Glycine max
  Clone ID: 700893761H1
gtggttttgaacgatcgattggggaagaaggtgcgcgtgaagtgcaacgacgatgataccatcggcgacctgaagaagcttgtggcggctcagactggcacaagagccgacaagatccgcatccagaagtggtacaccatctacaaggatcacatcactctcaaggattccgagatccatgacggcatgggtctcgaactctactacaactaaacacaacaaggtgtg

SEQ ID NO: 32749 - DNA, 206 bp, Glycine max
  Clone ID: 700893669H1
aggaaatatgccgttacctctataatcatcaaaacaaggatggtgggtggggtttgcatattggaggtccaagcaccatgtgtggctctgtcttgagttatattactctgagattgctaggtgaggggcctaatggtggacaaggggaaatggagaaggcacgtgactggattctagggcatggtggtgctacttatattacgtca

SEQ ID NO: 32750 - DNA, 224 bp, Glycine max
  Clone ID: 700893670H1
gaataaggaagatggttctaaaggtgatcaacttgctctggacgtaaagagtttaaatttgaaagaggaggcttctcaggatagaaaagataatggtaatcgggcacagacattcagttttaatgaacttgaagctgcgacgggaagttttaggttggattgttttttgggtgaaggaggctttggcaaggtttacaagggacacttggagagaataaaccagg

SEQ ID NO: 32751 - DNA, 231 bp, Glycine max
  Clone ID: 700893672H1
ggcagttggtgtcttgctctttttgggaacaagctttttccagtttggtggtctccatatttgttacccattctttttaccatacggtggtttccatcattcattcttgcatggtgttctatagcaacatggcttcagttttgagattgcagagtcaattgtgattggaaagggaactttctgtagaatgtgtatattatgagtgttaatagtgcgattgagtccaaaaga

SEQ ID NO: 32752 - DNA, 227 bp, Glycine max
  Clone ID: 700893673H1
gtttgaaccaacaaaggatggggatatgtgatgcagttgctgtggcaaagatactgaatgctactctggtgattccataccttgaattaaatcctgtatggcgagattcaagctccttcatggatatatttgatgtggatcatttcattgatgtattgaaggatgatatttctatagttaaagagctgcctaaagagttcagctggagcacaagagagtactatggc

SEQ ID NO: 32753 - DNA, 229 bp, Glycine max
  Clone ID: 700893676H1
ggcacatgagtgtccaatttgcaacaagattttcaggtaaggccaagccttggggggtcacaaaaggtcccattttgttggaggttctgaggaaaacacacttgtgataaggccaagtgctcctcctgctgctgttccttgcctcattgatctcaatctaccagcaccggttgatgaatagggagaaagaaatgttggtgccaaaatcctggtttttttttttttggca

SEQ ID NO: 32754 - DNA, 231 bp, Glycine max
  Clone ID: 700893677H1
cagacatcaggctgatgtttgtcacgcctatcaaatactaaggaaaggtggcctgaaagaagaaaatattattgtttttatgtatgatgacattgcattcaatggggaaaacccaaggcctggagtcatcattaacaaaccagatggaggtgatgtttatgaaggagttccaaaggattacaccggcgaagatgttactgttggtaacttttttgctgctttacttggaaa

SEQ ID NO: 32755 - DNA, 235 bp, Glycine max
  Clone ID: 700893680H1
gaaaaatctctctctaacaccttcaaatcttaaattattattcactttctctctctctctctcagcatggcatctcaagcaatcaccttcaagtccttcgccaccgttatcatcgtggcgcttttcttcgccgccgccgccgcctccgctcaggatttgtctccggcgccggcaccgggacccgatgccggagcagccggatccgtttcgagctcggtggccgtgattggagctt

SEQ ID NO: 32756 - DNA, 233 bp, Glycine max
  Clone ID: 700893681H1
cctttcctctccgaaccctcgatcactctcacgcgctcctatattcgctcctccaccgtcgctctctcgaacaaccacaacaccatcttcatcacatggcaaacgcagcatctggtatggcagtccatgatgactgcaagttgaggtttttggagctgaaggcaaaaaggacacaccgtttcatagtttttaagattgaggagcagcagaagcaggtcattgtggagaagctt

SEQ ID NO: 32757 - DNA, 229 bp, Glycine max
  Clone ID: 700893683H1
ctactgtaggacacctgcagctagctgatcaagataagatcatttctgcaattaaagaagcaggaaatgttaagaagttctatccatctgagtttggaaatgatgtggaccggactcatgcagttgaaccagccaagtctgcatttgcaacaaaggccaaagttcgccgagctattgaggctgaaggaattcccttcacttatgtgtcaagcaacttctttgctggtta

SEQ ID NO: 32758 - DNA, 231 bp, Glycine max
  Clone ID: 700893685H1
gttctgttttgttctcattctgtgactctgtgcttagttaacgttaacagtgacttaagatggcggattctgcagatgtcacccacgatgttgtgtccctcctctcttctcctcaaagggactttcttcttcgaaacaacggcgatcatgttaaaattgacagcttgaagggtaagaaacttggtttgtatttttcggcatcctggtgtggtccatgtcaaacatttacgc

SEQ ID NO: 32759 - DNA, 227 bp, Glycine max
  Clone ID: 700893688H1
ctcgctttctctgattcggttcttctcgtcgttttatggatccggcttctagaactttcctttctcattgtttctcttctctctcgtcgaagccagaaatttcttagatgatttggtgcgattcgtcttttccttgttcgcttcaatttttcaggtgattgcagttttgtggtgtaaggaagattgatatgctgtgggaaaatgtcgttgaaaagcttagtaaggga

SEQ ID NO: 32760 - DNA, 227 bp, Glycine max
  Clone ID: 700893690H1
cttgctttccccttcaatagcaatggcctctgcaacagaagccattaataaattgttgttcatattcctctttcttcaacaatattccttattaataatggcggatgattcagtttcagttccagttccagctgattggccgcaacagttccactcggttctgttcacaaaccgaagcggcgatctccagaaaacggacttgtggtacgactggcccaacggtcgca

SEQ ID NO: 32761 - DNA, 228 bp, Glycine max
  Clone ID: 700893691H1
tatatatccctatatgtataggactgcctctttaatgaagacagggaatgttcaaggtgcactggctgaaatcaaccggattcttggctttaaactttcgttagagtgcttggaattacggttttttatctatctggcccttgaggactacaaagcagcagtccgagatgttcaagcaattcttaccctgtgtccatcttataaaaaaaaaaaaaaagggcggccgcc

SEQ ID NO: 32762 - DNA, 223 bp, Glycine max
  Clone ID: 700893692H1
attgtgcccaaggacggcagctatggtggttggaggggttgtacactggtttgcaatgtggggaaaacttgccatttatgatcctcgtcttggagacaggtatatagccttgattaaactaccaacaggtgtgttaacacatgagcatgaggaatctgttcttggggagtcatctgatgggcttttgcagtatggccagagcaataatttgggcctggagata

SEQ ID NO: 32763 - DNA, 230 bp, Glycine max
  Clone ID: 700893694H1
atcatctttacgtgtttgttcgagaccatggccaaaagccccttcaagcttgaacatcccttggaaagaaggcaggctgagtctgctcgcattagagacaagtatcctgatagaatacctgtgattgttgagaaagctgaaagaagtgacatcccagacatcgataagaagaagtaccttgtcccagcagatttgactgttggccaatttgtttatgttgtccgtaaaag

SEQ ID NO: 32764 - DNA, 239 bp, Glycine max
  Clone ID: 700893702H1
cagaagtatcgtgtggagaacttgtatgagggtcctcttgatgatcaatatgcttctgggctgttgatggagagggtagatgaaatatcatcagcccagaagtatcgtgtggagaacttgtatgagggtcctcttgatgatcaatatgcttctgctatcagaaattgtgatcctgaaggtcctctgatgctctatgtctccaagatgcttccagcatctgataaggggagattttttgc

SEQ ID NO: 32765 - DNA, 121 bp, Glycine max
  Clone ID: 700893703H1
gcgtgatgcagtagataaggctcttatgtctttgctgaggcaggatgtaaaagcttctttgacggctttgtttaagcacattggcagtgttgaagagccaagcacggatgatgtcattcgt

SEQ ID NO: 32766 - DNA, 237 bp, Glycine max
  Clone ID: 700893704H1
aaactggattcttcctgaaatgcctgggcttataactgattttctgatttctcttgatgatcggtttaggtatgttgtaaactggcttcatggggatataaggcagtgtaacatcgaggacgttaaaaatcctaaactgactggacaagtatgggttggtggacttatccagaaaggaagccctgtagtagctataactgatgatggtgaaacatggcaagctgaagttccagagat

SEQ ID NO: 32767 - DNA, 233 bp, Glycine max
  Clone ID: 700893705H1
agccaacacagagaggtacagcaacgtggttgtgggactaaacgacaccatggaaaacctctttgcttccttggacaggaatgaggctgagatttccccttccaccttgtatgccattagcttgtgttatggaaaatgttcctttcatcaatggaagccctcagaacacctttgtcccaggactcattgatctggccatcaataggaatagtttgattggaggtgatgacttt

SEQ ID NO: 32768 - DNA, 236 bp, Glycine max
  Clone ID: 700893707H1
atcagttggaatcaatcttgatatgtataattcccttggtagtaagaactacaaatttgaacagcatctcatttcaggagtgaaaggagtgggaagaagtgggaagtctcttcattataaagggagcacattccataggattataccgagctttatggtccaagggggtgatttcacccgtggtgatggaagaggtggagaatcaatctatggtgataagtttgctgatgaaaact

SEQ ID NO: 32769 - DNA, 102 bp, Glycine max
  Clone ID: 700893708H1
tttattttctgtatgtatgtgacatcatgcgtaaacagtgtgtcatgtgtgtttgctgttggtaggaaatatagagactaaacaatccatgtttttgcaggc

SEQ ID NO: 32770 - DNA, 244 bp, Glycine max
  Clone ID: 700893709H1
attctacttaccttttctcttaatccaaatatcatcatctgaaacgatggctgccatggcaaccacaaccctctcttcaaacccgaaactctcatttttccacggaaagcccgttaacatattcttcccgcgtcgcacccaccaccaagttattctcatccaaacaaggcacaatctccatgtccctaacccaacccccatacgacctccaatccttcaaattccaacccatcaaagaatccat

SEQ ID NO: 32771 - DNA, 234 bp, Glycine max
  Clone ID: 700893713H1
cttcatttcttactctcactgaaataaaatagcttgttcacacgatcctattttttcaactcatatatacaaatatatataacatggcttctaccttctctcgaagcctagcacttgtaagcttttacattgtcgttcgtgctgccggtaacttgaaccaagactttcagcttacgtggggagatggtcgtgctaaaatactcaacaacgaaaatcttctcactctctcccttg

SEQ ID NO: 32772 - DNA, 239 bp, Glycine max
  Clone ID: 700893715H1
atgggtgggatgatcctcgtttgatgacactagctggtttgcggcgtagaggcatgactccaactgcaatcaatgcttttgtacgaggaattggaataactagaagtgatggcactttgatttctgtggaacgccttgaatatcatgttagggaagaattgaacaaaacagcttctcgtgcaatggttgtcctacatccactcaaggttgttattactaatcttgaagccaactcagta

SEQ ID NO: 32773 - DNA, 238 bp, Glycine max
  Clone ID: 700893717H1
aagagttcttcttttccttttttatatatacttgggtgctaagctgtgtgagttcattgacaagcctgaaatggcaactatgctgacaaaggagcatggtctgaacctcaaggagaccgagctttgcctcggtttgcctggtgggggaggcggcggcggcggcggtggtgaggtggaaactccaagggccactgggaagagagggttctctgagactgttgatctgaaacttaatctt

SEQ ID NO: 32774 - DNA, 238 bp, Glycine max
  Clone ID: 700893719H1
ctgcaatcaaagctcttggatccttcaggagcaacgcttaattacaaaaaaaaaaaaatcaagtttctccactacctaaattatgatgatttggtcctgtgtcacccaaaacaagaacagtgtttcagttcaagtctgtctacaggtccctctcttttggcttttctgcttacccgtgggtttgggggaaaagccaaataccgtgggctcttaaatttgtagataagaatgcttttat

SEQ ID NO: 32775 - DNA, 233 bp, Glycine max
  Clone ID: 700893720H1
ggactatatttatgggcagcacacgacctagtatagtgagattcggtacttgtgttcttgacccggttccttgcttccacaaaattataaccgataaaatccccttgataatgaaagtatgttggaatgtttgtccatttcataccaacattatctgtgttgtagcttgttttaatggttgtctgttactaagtttggagagatataagtcaaaagtgcaaagtatacacata

SEQ ID NO: 32776 - DNA, 233 bp, Glycine max
  Clone ID: 700893668H1
catccctcttgatttgaaggttgttttgtgcttatagataaaagttctgccaaatcaagaggggttttcagatcatagtgtgtgtgtgtgtgtgttaaacaatggctaagttctttgctgctatgatcttggcactcattgccatttccatgcttcaaacagtggttatggctgctaatgagcaaggaggccacttgtatgacaacaagagcaaatatggaagtgggagtgtc

SEQ ID NO: 32777 - DNA, 237 bp, Glycine max
  Clone ID: 700893630H1
attgaaatggattgcatctatgaaaacttttgtgggtttgcttttcacttcctgttttctgggtaagattatgtttctgttatgaggggctagggaagggaggtgtcttaatttgataaaaaaaataactgtgttcaaacacaaatcagcccatggcatacttatgaggccactgcacgcagctggacccagaagtatgccatgggctgatttgtgtctggataatgtatattgaaa

SEQ ID NO: 32778 - DNA, 239 bp, Glycine max
  Clone ID: 700893631H1
cacttgtcaatcaatgcattgatagggtggccagatcagaccttgaccagatttcatctgaccaagagcttccaaatgaactctcacaaaaagttaaattgctccgccgcaaccctcatcgagatgttgaaaacgatgcttctatagtggatgctttgtctctaaaaagaatcactagaatactcaaggcattggattcagatgatgttgagcttgttaaacttcttttaaatgaatca

SEQ ID NO: 32779 - DNA, 240 bp, Glycine max
  Clone ID: 700893634H1
gcaagctacaaagatgaggtctcagatacatcttttgtggggaaccttgttgtatgaacgttctgttgtggaatataagcttggccttcccacatgggaggaatcgtttggaggttgcagtcgaaaagtttgaactagctgggacttctgcaacggatattgctttcattgtaaagaatcactgctcaaatgaaacagcacttgaaggattcaaaattgatgagatagtacaggcatgga

SEQ ID NO: 32780 - DNA, 234 bp, Glycine max
  Clone ID: 700893637H1
cgagaaccagttgaacggaattttcattttagccgaactttaagtgtcggaaggcttcgtgacagagttctccgtcgatcaacattatctgacctcacctttttccctttgcaacaagagacagagctgagagatgctagcctgcctagccaggatatggacaggcaagcagtggagggaaattcaagagtgtcaccatctgatcatagtaccattaattcttcaacaaataga

SEQ ID NO: 32781 - DNA, 222 bp, Glycine max
  Clone ID: 700893638H1
gttgggagctcaagctaagaaagggaaagagaaagatcacagaaagagaattcatctttctttgcgaacagctaaaaacctcaaagggaaagaaggcatgaatagaggtgttcttcagagctcaccagtgcaacaaatgatgactgcaaaccctaactggtggaacatcaatatcaatagcatggctccacaagctcctcctttcttgtccactcctcacaa

SEQ ID NO: 32782 - DNA, 235 bp, Glycine max
  Clone ID: 700893639H1
cccaaagggtgctaaaccagttgttcccgagagtaagattgtagccaatggggttgtttctaatggtgtctaagctctactgtgtttgaaggaggcggtccaatacacctcagtggcatatattggtgttcttagaagtatatttatcagcaatttggtaccgcccggatttgatctgtcttgccttctcttgcagtctgaagatagtgtgattggttgcctagtgaagataaag

SEQ ID NO: 32783 - DNA, 237 bp, Glycine max
  Clone ID: 700893640H1
atacaagcctattccgaagccagtgtataagcctattccaaagccagttccagtgtacaagcctataccaaagccagttccagttccagtgtataagcctattccaaagccagtgtacaagcctattccgaagccagtgtataagcctattccaaagccagttccagtgtataagcctattccaaagccagttccagtgtataagcctattccaaaaccagtgtacaagcctattcc

SEQ ID NO: 32784 - DNA, 151 bp, Glycine max
  unsure (1)..(151): unsure at all n locations
  Clone ID: 700893641H1
ctcgagccgttcccaacctccgcgtcggaaccctagactctctcctctccctcagcgatgaactcgccaagtccaacaattctcgtcgaaggtagtcatgcgcacaagatcaggacgccaagatctgatggagctncgatgagagttgtcc

SEQ ID NO: 32785 - DNA, 234 bp, Glycine max
  Clone ID: 700893642H1
aattcacacccacataccaacacaatctctctgaattgaaacccaccatgttgattaaagggcatcaaattaaggcaccaattttggtcctcaatttgttccttgtcctaatttgttccacagcttcttccgtcaacgttgttgaatcaaggaaacttgatgagaccactccagtgcctgccacaaacggtactgaagaaaagtgtggatcatgtggtggctacacttatccgt

SEQ ID NO: 32786 - DNA, 233 bp, Glycine max
  Clone ID: 700893644H1
ggccaggcaagccccactcaaccaccacacctctcctcgttcacgctacccctttctgctcttcttctacctttcaagttttaaaagtataaagatggcagagacattcctatttacctcagagtcggtgaacgagggacaccctgacaagctctgcgaccaaatctccgatgctgtcctcgacgcttgcctcgagcaggacccagacagcaaagttgcctgcgaaacatgca

SEQ ID NO: 32787 - DNA, 235 bp, Glycine max
  Clone ID: 700893646H1
ttcttctcttgcggctagggttttagcgcattcttctagatttaaggaagatgggtaaggaaaaggttcacatcagtattgtggtcattggccatgtcgactctgggaaatccactaccactggtcacctgatttacaagcttggaggcattgacaagcgtgttattgagaggtttgagaaggaagctgctgagatgaacaagaggtctttcaagtatgcctgggtgctggacaa

SEQ ID NO: 32788 - DNA, 235 bp, Glycine max
  Clone ID: 700893647H1
cagaggcattacccttcttcagaggatgggaattggccttgtaatccacacactgatcatgatcattgcatctgggactgaaagctatagactcaaggttgcaagagaacatggggtagttgaaagtggagggcaagtccctttgagcatattcattttgcttcctcagtttatactcatgggaactgctgatgcattcttagaggttgcaaaaattgagtttttctatgatcaa

SEQ ID NO: 32789 - DNA, 237 bp, Glycine max
  Clone ID: 700893648H1
ctgctcgagctcgagccgattcggctcgagactgaactcatctcactacattaatattcccttgagtttcattaattgtgacatttagctttttttattgaaccgtgtcaatggccgctactatgaaggctttagcttttgttgctttgcttgttaccattaatgcaatagtgtgtgaaagtagagtggcgagaaaggaccttggattggaccttggtggggtgggaattggggtgg

SEQ ID NO: 32790 - DNA, 240 bp, Glycine max
  Clone ID: 700893649H1
ctcgagccgaatcggctcgaggtcgtcgcgtgtactttcttgcgacaacagaagggcgaagaggcaaacacaacttttttgattttttgtagagcgagagagaaaaaaatgttggggatcttcagcagttccgtggtgtcgccgccggaggagctggtggctgccggcagcagaacgccgtcgccgaagacgacggcggggaagctgctgaaccggttcgtggagaacaaggcgtcggcg

SEQ ID NO: 32791 - DNA, 237 bp, Glycine max
  Clone ID: 700893650H1
gaaaccaacattttcgaatggagtgtcaccataattggaccgcccgatactctttacgaggggggatttttcaatgctattatgagtttcccatccaattacccaaatagtccaccttcagttatgttcacttcagagatatggcatcccaatgtatatcccgatggccgggtttgcatatcaattcttcatcctcctggtgaggatccaaatggttacgagcttgcgagtgagcgc

SEQ ID NO: 32792 - DNA, 235 bp, Glycine max
  Clone ID: 700893651H1
attttcccttttcagctttcattggtgtggcctagctgttttctcaatgagaaagccttcatctctgcaaagcgcacttttgcgctttggggttcccttgttgcttgttatcaccttctgttatgctacttctactgctgcagcaacaactcaagtttcagggaatgaagagctgccaaagacaaacctaaatgggcatgatgaagaagcaaaattcggattttttcatcataaa

SEQ ID NO: 32793 - DNA, 234 bp, Glycine max
  Clone ID: 700893652H1
ggcgtcttcataaacgccgcccaaaacttctcatacccgtttattcattccattcgtttctagggttttctattctttgccgagaaaatgagagagtgcatttcgatcccattggccaggccggtatccaggttggaaacgcctgctgggaactctattgccttgaacacggcattcagcccgatggacagatgccgagtgacaagaccgttggcggaggagactacgccttca

SEQ ID NO: 32794 - DNA, 235 bp, Glycine max
  Clone ID: 700893653H1
gaacaatccgctgtacattcagagcttcacggaggccgacgatgctcttaagctccaccacatcgtccattgctcgctcgatgtggtcgacgagcgagtgaacaatcctaaaaagtctggaccgatgcttaatgagacgtttttgggactgctttatcctattgaaaactacaaagtatatggatatctgactaatacgaaggtgaaatttatcttggtgaccacggatctggat

SEQ ID NO: 32795 - DNA, 231 bp, Glycine max
  Clone ID: 700893657H1
aaactgccagccatgccaacaagacattgagaattactgcagcaagaagatctggtcttacaatgatgtttatgtcgatggaaaacccacacagggtggctttgctgaaaccatgatcgttgagcaaaagtttgtggtgaagattccagagggtttggcgccagagcaagtggcaccattactgtgtgcgggtgtgacagtgtacagtccactggtacactttgggctgaa

SEQ ID NO: 32796 - DNA, 229 bp, Glycine max
  Clone ID: 700893658H1
cttcaattttttcttcaaaagcttcctctgtgggggaatttattgttccttgcaatatagataggaaacaccaccatagtttttgtgtaacttaaacgtagaaaatattatcaagttgttgcacaaatcattatgggtactctcatgcttctcaagaagttcaccctcctctttctcctcatttctggatcacttttatcaacttcctttgcaggtagagtacgatcca

SEQ ID NO: 32797 - DNA, 229 bp, Glycine max
  Clone ID: 700893659H1
ctttagccgaggtcaggaggagcactagctaagttcacaatttcaaaatggctaggggactaaagaagcatttgaaaaggctcaatgctcctaagcattggatgcttgacaaactgggtggtgcatttgcgcctaaaccctcatctggaccacacaaatcgagggagtgcctccccctcattcttattctgcgaaaccggctgaagtatgctctgacataccgtgaagt

SEQ ID NO: 32798 - DNA, 228 bp, Glycine max
  Clone ID: 700893660H1
ggcggtggatatggtggtcgtagtggcggtggcggtggcggtggtggataccgtagccgtgacggtggttatggcggtgggtatggtggtggtggtggtggtggttatggcggtggcagagaccgtggttactctcgtggtggtgatggtggtgatggaggctggagaaactaaggcttgatgtcgtcaattagggtttatgattatgccccgtatttttagttgttg

SEQ ID NO: 32799 - DNA, 229 bp, Glycine max
  Clone ID: 700893661H1
cattctctctgtgtatttccctacctctcccttcaagatgcagattttcgtcaagaccctcaccggcaagaccatcacccttgaggtggaaagctctgacaccatcgacaacgtcaaggccaagatccaggacaaggaaggaatccccccggaccagcaacgtctcattttcgccggaaagcaacttgaggacggccgtacccttgctgactacaacattcagaaggag

SEQ ID NO: 32800 - DNA, 236 bp, Glycine max
  Clone ID: 700893663H1
atcgaaagaaaaaagaaacaataacaactaaacaagcaccataaattttttaaaacctctcttctttcttctccatcgctgccggagaatgaacattccggcgaccctaacttccccgtcgatgaataatgctcgtctctccgaccaccgtcgccacgtcttccacacaacatacgaaccatattcatcgacggggaagttagggtcgccggaatgttcattctccggcagcgatg

SEQ ID NO: 32801 - DNA, 227 bp, Glycine max
  Clone ID: 700893664H1
cggtcgagccgctcgagccgctcgagccgatccaagcaagcaggggacgtgggggtattatgtgctcagaggtacaaagctcttcaaaacccaaagaacagctccacggaccagccctactgctctgctctgcaatggccgacgaggaacctgttgatcagaagagatatcttgaagagtcttgcacaccaaaatgtgtaaaaccattactggaataccaggtgggc

SEQ ID NO: 32802 - DNA, 236 bp, Glycine max
  Clone ID: 700893665H1
cagatatatatcgtattgctagttgtggcatggataatactgtaaaaatatggtctatgaaggagttctggacatatgtagaaaaatcatttacatggactgatcttccttctaagtttcccacaaaatatgtccagtttcctgtatacaatgcttcagttcatttaaattatgttgactgtaataggtggctaggtgattttatcctctcaaagagtgttgacaatgaaattatc

SEQ ID NO: 32803 - DNA, 238 bp, Glycine max
  Clone ID: 700893629H1
tagaaactgtcgtgaggacaaaagaagaagtatcactcatataatactctgtatcatttcatttcgataatcatccatagctactgaagaaaatggcaaccatctctgctgctatcacaaccccatcgatctcccgcgcaactcttgtgcaaaagcgggtctcatctcccgttcttggtttgccagcaatgggtaaggtgggaagagtgagttgctccatggaggaaaaaccttattc

SEQ ID NO: 32804 - DNA, 221 bp, Glycine max
  Clone ID: 700893589H1
gatagaagcgtaacagcggttaccctaacctcgtcttcctctctactaatttcagctatggccgacgaagctgtggttgttccagatcccacccagatcgatgtcaagctctttaaccgctggagcttcgaggatattgaggttactgacatttcactggctgattacattggagttgcggcatccaagcacgccacatatgttcctcacaccgccggaag

SEQ ID NO: 32805 - DNA, 222 bp, Glycine max
  Clone ID: 700893590H1
aacggcaagactttcaatcaggttgaaatcaaacccgagatgattggccattatctcgctgagttctctatttcatataaacccgtcaagcatggtaggcctggtattggtgccactcactcttccaggttcattcctctcaagtgaaagccttaccgaaactcttgtcagattttctttttatttaagcattttatttttcacttgtctgtctatcatgac

SEQ ID NO: 32806 - DNA, 217 bp, Glycine max
  Clone ID: 700893591H1
aaagcttctctctctctctttggtcctttctccatcactaggaggatttcaaattggtcattgagggtggctcaaaagctctgcttctggtcaaacgggacaaagtggatctcactcatatgaagagacttacaactttcgtggatgggtttttggatcttgcattgttcagctgtagcacatggacagtgtggcgcagctcatgctgcaatcagat

SEQ ID NO: 32807 - DNA, 214 bp, Glycine max
  Clone ID: 700893592H1
atggaacaggaatggttaaggctggatttgctggagatgatgccccacgtgctgtgtttcccagcattgtaggtcgtcctcgtcacactggtgtgatggttggcatgggccaaaaagatgcatatgttggtgatgaggcacaatctaagaggggtattttgactctcaagtaccccattgaacatggaattgtgagcaattgggatgatatgga

SEQ ID NO: 32808 - DNA, 223 bp, Glycine max
  Clone ID: 700893593H1
ggccattcaaatgtcttcttttgtctttgtttctcttacaattttattttgcttctcttccttggagaagagttttgcctttcaaacaacaaaggaggtacacagaaagcaacaatcttcatcaatatactcatcttgttcacctcagctcactccttccttcatcttcctgcagctcttctgccaaaggtcgcaaaagaaaagcatcattagaagtggtaca

SEQ ID NO: 32809 - DNA, 68 bp, Glycine max
  Clone ID: 700893595H1
tgaagagcgacgagaatggctcccaagggtttaatctttttgcgctgtgttatggcttctcagcactg

SEQ ID NO: 32810 - DNA, 246 bp, Glycine max
  Clone ID: 700893601H1
aacaccttggatccttatgccaatatgaacgagcactgtccttcccttcctcccacttatgacaggcccttgaaatgttagtctcttctccggcatttccattttctgatttgcctgttatccatgatctcaaggtacctaatagtttgctattgtggaaagtgcaccacggaacttcgcctttgccttgtcaagttgactaagggacattgtatataacaaatttatattggtgggatggtgtga

SEQ ID NO: 32811 - DNA, 245 bp, Glycine max
  Clone ID: 700893602H1
ttcattttcagaggaatgatcatggaagaatcctcggtacacgagatcaaaacccctctcctgtcatctaacaaggaggaagatgaagttggaagcagtactagccataggcagcaaaatgaagagaactcgcccataaaacaagtggccctaacggtgccaaccaccgatgacccatctcttccagttctgacgttccgaatgtgggtgttgggaactctatcatgcgtgctgctgtcgttcct

SEQ ID NO: 32812 - DNA, 243 bp, Glycine max
  Clone ID: 700893603H1
ctggcatcagtggggctccccaagacaataatattatgctttggaatgctgttatctttggaccagatgacaccccttgggatggaggtacgtttaagttgacacttcagtttacagaggattatcctaataaaccacctactgtgcgttttgtttctcgaatgtttcatcctaacatttatgcggatggcagtatatgcttggacattttacagaatcagtggagccctatttatgacgtag

SEQ ID NO: 32813 - DNA, 241 bp, Glycine max
  Clone ID: 700893604H1
cctcgctctatttctcagtctctgtgtttgcggctgaggattccgaacgagtgaccttcagtcgttctcgcaaagtttaagtaatcatgggtaaggaaaaggttcacatcaacattgtcgtcattggacatgtcgactctgggaagtcaactaccactggtcacttgatctacaagcttggaggtattgacaagcgtgtgattgagaggttcgagaaggaggctgccgagatgaacaagag

SEQ ID NO: 32814 - DNA, 232 bp, Glycine max
  Clone ID: 700893606H1
cgaatccccaataaggccattattagttctagggagatttcatcaaacagtactgcatctgatgatagacgatttgtgagacacatcattactttttcaaagatctggagcagcgaacaagaatacaacggtcgatgctcgttatgcagcagaaaacagatctcgcaagatggcagaatatgtagcatttggaggcctgtgtgtcctgttggatatatatatattggggata

SEQ ID NO: 32815 - DNA, 239 bp, Glycine max
  Clone ID: 700893607H1
attttaatttcctctcaaaccctaaccctaaccctaaccctccccgtcacaaaagaaaaccctctttgtccgatcatcgtcgtcaagatgttggaactccgtctcgtgcaaggctccctcctgaagaaggttttggaatccgtcaaggagctcgtgaacgacgcgaacttcgactgctcctccaccgggttctccctccaggccatggactccagccacgtcgccctcgtcgctctcct

SEQ ID NO: 32816 - DNA, 238 bp, Glycine max
  Clone ID: 700893608H1
gaccagtgtcgttagggttcaccgacaggaggaggctgacttgttatacatacccttcttcaccactatcagcttcttcctcatggaaaaacaacaatgcaaggccctttatagggtgaagctttgaagtggatcactgatcaacctgcatggaagcgctctggtggcagagatcacatactccccgtgcatcatccctggtctttcaagtctgttcgtagatacgtgaagaatgcaa

SEQ ID NO: 32817 - DNA, 237 bp, Glycine max
  Clone ID: 700893609H1
agagaagagagtttcaagaatggggagcgaagaggagaagggtgaattctacttgcgatactacgtgggccacaagggcaagttcgggcacgagtttctggagttcgagttcagacccgatggcaagctccgctacgcgaacaactccaactacaaaaacgacaccatcatccgcaaggaggtttacctcaaccctgccgttttgcgtgagtgccgccgtatcatcgccgagagcga

SEQ ID NO: 32818 - DNA, 238 bp, Glycine max
  Clone ID: 700893610H1
attccaatatattccattctctctgtgtatttccctacctctcccttcaagatgcagatcttcgtcaagaccctcaccggcaagaccatcacccttgaggtggaaagctctgacaccatcgacaacgtcaaggccaagatccaggacaaggaaggaatccccccggaccagcaacgtctcattttcgccggaaagcaacttgaggacggccgtacccttgctgactacaacattcaga

SEQ ID NO: 32819 - DNA, 237 bp, Glycine max
  Clone ID: 700893611H1
ctctccgcatcgctgcgttttccgaatcgaaaggtacgtaagtaacaatggtggaggccaagggtaggaaagaggaggtcgtcactcgagagttcaccatcaacctccacaaacgcttgcatggctgcacattcaagaagaaggctcctaaagcaattaaggagataaggaagtttgctcagaaagcgatggggacgaatgatgtgagagtggatgtgaagctgaacaaggctgtgt

SEQ ID NO: 32820 - DNA, 238 bp, Glycine max
  Clone ID: 700893613H1
caatctacaaggtacctatgtagattgtgattcccgtgtccttgaaatcctccgagtacaactatttcaagtgatcgagttaatgaagttaatttgacattggtaaaaaaaaaaaaaaaaaaaaaaaaaagggggggcccccgattaggggccccgtcgccccgggaataaatcccggacgggccccccgggggtaccagtttcccccaaggggggccgtattagacctgggggaaac

SEQ ID NO: 32821 - DNA, 239 bp, Glycine max
  Clone ID: 700893614H1
gctagttctattgtaaaactttttacgtgtcctgagcaagctgctggtgtacaccttcccccaaggataattttagactgacttcaaccagcaaatgttgtcttttctgtatggatgtataatttagctgtagcatatagtgaaactaatttagccttcaatcctattattttgttgggtttgtttgtctaggttttaattgtgtataatatgtaatctgcagctagtgctatgtgtga

SEQ ID NO: 32822 - DNA, 241 bp, Glycine max
  Clone ID: 700893615H1
caaaacctgaagcctagaaccttcttccgtctcacagtttgccggaatcagcgatggatcctcagcctgagccagttagctacatctgtggagattgtggaatggagaatacgctgaagcctggtgacgttatacagtgccgtgagtgcggttaccgtatcctttacaagaagcgcactcgtcgcattgtccaatacgaggcacgctgaagaaaactgctctgacattggcaagtaatttc

SEQ ID NO: 32823 - DNA, 110 bp, Glycine max
  Clone ID: 700893616H1
actaccgtcccctcgccccagacttcacgtcccaccgccacctccactcccactcccacttcctctcctgctcctgctgcttcgcctcctgggagaagcaggtccgccag

SEQ ID NO: 32824 - DNA, 151 bp, Glycine max
  unsure (1)..(151): unsure at all n locations
  Clone ID: 700893617H1
aaaagcatggttgtatgacaatttgggtactcgtgtttattcagaagcaccnggacgttggtgcacaaccatggcttatagtgctgatggtacaaggctcttttcatgtgggacaagcaaagatggggaatcctccattgctgaatggaat

SEQ ID NO: 32825 - DNA, 241 bp, Glycine max
  Clone ID: 700893618H1
actcgagcgattcggctcgagtgtagatttgtgatacacataaaagccggggcatacttcgagaatgtggaggtaatcaggaagaagaccaatctgatgttcgtcggagatgggattggaaagactgttgtgaaggccagtaggaatgttgtggatggctggaccactttccaatcagccactgttgctgtggttggagacggattcatagcaaagggtataacctttgaaaattctgctg

SEQ ID NO: 32826 - DNA, 241 bp, Glycine max
  Clone ID: 700893619H1
attggaaggttaaacttggtagaagggattccacgactggctttttcaaccgtgcaaacagtggtgtgcttccaggaccgaattcttccctcagcagccttatccaaagatttgatgatcaagggctctctaccaaggacatggttgcattatcaggagcacacacaattggaaaggcaaggtgtgtcagttatagagatcgcatatacaatgaaaacaacattgacagtttatttgccaa

SEQ ID NO: 32827 - DNA, 238 bp, Glycine max
  Clone ID: 700893620H1
ctcgagcgtgcggagagagaaattgagtttccgagataaccagttttctctttgattcatcaatggcaactgcgaggacactgaaggatgtttcgcctcacgatttcgtgaaggcttatgcttcccacctcaagcgttccggcaagatggagcttcctgagtggaccgatattgtagaaacagcaaaatttaaggagttggctccatatgatcctgactggtactacattagggctgc

SEQ ID NO: 32828 - DNA, 237 bp, Glycine max
  Clone ID: 700893622H1
cacgcatttcctcgtttttttcttcccttttctctttctccggcgacgatctcagattccggccactcctctcgccggcgagcccttactcttccctcctccgtcgagccctctccgattcgaatcgttcccagcctcgcaccaccatgaatcccgaatacgattatttgttcaagcttttgctgattggagattctggtgtaggcaagtcatgtcttctcctgaggtttgctgatg

SEQ ID NO: 32829 - DNA, 236 bp, Glycine max
  Clone ID: 700893624H1
cctttgcaaacatctgcaatgtagggataaagaatgagcaaatggctgaggcctctgcacaagcttgtgtctctattccttccaatccttggagttctctgcaaaggggtttcagtgcataataattcctgtaatgtgcaccagtaaagaccaaagtatgattattgttacattatgctatatgattgtacttgtatatacatattttgtcccgcctttgtaaatacaattgggac

SEQ ID NO: 32830 - DNA, 236 bp, Glycine max
  Clone ID: 700893627H1
aagatctctgtgttgtcatcacacttcgctagatccagccccatcatggcttcagagaagcaagcggctcttgccgtcactccctctgatgctgatgctcctaccatatttgacaagatcatcaataaggagattccttctactgtggtttatgaggatgacaaggtgcttgccttcagggacataactcctcaagctcctacacatattcttatcattcctaaattcaaagacgg

SEQ ID NO: 32831 - DNA, 219 bp, Glycine max
  Clone ID: 700893586H1
tgctcatcaagtccaagaaccaacctaccttttgcaatctcaattcaatggcgtcctctctcattgcgaacgcttcctctcctcttccctcctctccaggtccctccttcgccccgccgcttccgcttcccaccgctctttcaacaccaacgccatgcgccagtatgacaaccgcgccgacgaccacagcaccgacatcgatcgtcactccgaacgctc

SEQ ID NO: 32832 - DNA, 227 bp, Glycine max
  Clone ID: 700893543H1
aagagaagcaaggagaaagagaagggttagaaggcgaagaagcatggcttcactcaagaagaagaaaccctattacccgcttccgttaattcctatctattactacttcttattcaaagggtgatatgatcttcttcttccaagagtctcatgcatgctactttcttctctcttctcggggaattgaagcgttgtggtccgattgtttgctagatcaagcaaattaa

SEQ ID NO: 32833 - DNA, 226 bp, Glycine max
  Clone ID: 700893545H1
agttaataggtctttatatttagttgttgacatcaacaaagtcatggaggaagttaatgtggttcaaaccaagaatggaactgttgcagtagcttctgcgtttgctggacataaggaagctatacagcaaagggaccacaaatttttaagaattgctgttgaagaagcctataaaggggtagactgtgaagatgggggtccctttggtgctattatagtatgtaat

SEQ ID NO: 32834 - DNA, 227 bp, Glycine max
  Clone ID: 700893546H1
tttccttcttcttcttccttccttcactcgtatatcacttccttcctcgtttcgttaaccttctaattcaatccattcctcacttccttttcaaccgaagcttttctccgataatcgcagagagaaagaataatggattggggaaacgtaaccgcggaggatctgatcgacgcgctccggaggtcgattggtcgtcgccgccgcgcccgctgtcggaattcttctcg

SEQ ID NO: 32835 - DNA, 130 bp, Glycine max
  Clone ID: 700893547H1
aatatatcattcaaaagtttttgaaatgttgtcaccccttcttctatttctatgcctaactcttcctttgtttttgttgtccttcttcaaataccgtaaaaccttcaagaatccaccacttccacaaggt

SEQ ID NO: 32836 - DNA, 224 bp, Glycine max
  Clone ID: 700893549H1
gctcgagctgaaactttgtttaactttctgttccctaacatcccagtattaaaatattgcttggcgttgaactttgatatttcagttggcgcgttaagtttaaacctttggtttcttctatttgtagattgaagatgataaaacaatcataccacggaattcattggttgatgttaaccagtcgggtcttctgatggttattattatcgacattactcctcgtt

SEQ ID NO: 32837 - DNA, 226 bp, Glycine max
  Clone ID: 700893551H1
ccgttatgttggaccgcattttgcggctcttggcttgctacaatatcctttctttttctctccgtactctccctgatggcaaggttgagaggctctatggtctcgcccccgttgctaagtacctggtcaagaccgaagatggtgtctccattgctgctcttaacctcatgaaccaggacaaagtcctcatggaaagctggtactatttgaaagatgctgtccttga

SEQ ID NO: 32838 - DNA, 115 bp, Glycine max
  Clone ID: 700893552H1
atattaaatactattataggcagagattcataattcagattagccgaactttatacagaagcgaccaattaccaaacattagacgcgagaggctgagcggaggaggccgggtggg

SEQ ID NO: 32839 - DNA, 226 bp, Glycine max
  Clone ID: 700893554H1
gtgagacacacacggtcactgcccagattgatccacagaacacagaacacgaacaaggtaaaaaaaattcgagctttatttgtctcaaatggcaaatgaagaggagcaacaacaacaacaacaacacccaccttacgcatacaccttaattctgaacatcttcagcaagaggagaacatgggcatgtctatttctggttgtttacggtacccttttggcatcttca

SEQ ID NO: 32840 - DNA, 218 bp, Glycine max
  Clone ID: 700893555H1
ccaaacgacagttgcgtcagaactacgctgtagaatatcatcaccatcaaagtgtttcgttggaaggggaatttggcagatcattggaagaaaatggcgggtggtggaaaggtttcgttcaaagtcacactcacctccgatccaaaattacccttcggagtgtttagcgttccagaggctgcgccttttactgccgttctcaaattcgccgccgaaga

SEQ ID NO: 32841 - DNA, 224 bp, Glycine max
  Clone ID: 700893558H1
atttgaagtgacatcatgaatatggaggggcagaagaaaaacaagagggtggctgttttggtgggttgcaattaccccaacactagcaatgaattgcatggttgcataaacgatgtgttggcaatgaaggacacgctggagaagcgctttgggtttgatccctctaacattgagcttctcactgatgcacctcactcttctaataaattgcccactggtgctaa

SEQ ID NO: 32842 - DNA, 224 bp, Glycine max
  Clone ID: 700893559H1
aagcaattggaagtggtggagctcagcgagaacgcgctcaccggaaccgtcgagtcgtggttcttccttttgccgtcgctgcagcaagtggacttggccaacaacaccttcacgggggtgcagatctcgaggccactcgaggcgcgtgagggaagcagcaacagcaacctcgtcgcgctcaacctcgggtttaacagaatccgaggctacgcgcccgcgaatct

SEQ ID NO: 32843 - DNA, 80 bp, Glycine max
  Clone ID: 700893560H1
atattaaatactattactggcagagattcataattcagattagccgaactttatgcagaagcgaccaattaccaaacatt

SEQ ID NO: 32844 - DNA, 101 bp, Glycine max
  Clone ID: 700893561H1
gtgaagatggggtcagaggtgtctaaacagatggcgcgaagaaagacaatccagacagagaagaagagtctgtccgatctgaaaagcagcggagaagacta

SEQ ID NO: 32845 - DNA, 230 bp, Glycine max
  Clone ID: 700893562H1
caaggatatccagtctctacaggaggaactgacagctgtttctcagaagagggacaaggcttttgagagcatgcagcagctaagaaaacagcgcgaggaggggaacacctatttctaccaaagtcgtacagttctgaacaaagcacgggagctggctgcaaagagcgatattaatgctcttgatgaagtttcacagacagaggttgagaaatttatggcactctggaaca

SEQ ID NO: 32846 - DNA, 231 bp, Glycine max
  Clone ID: 700893563H1
gttttcttatgacaacatcttaaacatcgggaacccgttaaaaatgtcacttgtctgattatcaatcagccttgtctctcgggatacctgcagacgctagctatgttgagaaagtggtactggtaacagctcaagtaatataaattgtactacaatccttcttgaaataaaataaaagcgtaaatgtcttgttcaaaaaaaaaaaaaaaaaaaaaaaaaaaaaggggggcc

SEQ ID NO: 32847 - DNA, 231 bp, Glycine max
  Clone ID: 700893564H1
aggtgttggtgtcttgctctttttgggaacaagctttttccagtttggtggattccatatttgttacccattctttttaccatacggtggtttccatcattcattcttgcatggtgttctatagcaacatggcttcagttttgagattgcagagtcaattgtgattggaaagggaactttctgtagaatgtgtatattatgagtgttaatagtgcgattgagtccaaaaga

SEQ ID NO: 32848 - DNA, 227 bp, Glycine max
  Clone ID: 700893568H1
gaggatttgaagcaatatgagcctgtttaccaaattcggtttacgaaagaactctttcaagattatcatgattatttgaagcaattgaatctataccgccagagggtttggatgtgtaaagtcactggaaaaactggcttgacttatgaagaggctttggtgtctgaacaacttgctaccgagaaagttcaacagtttcctaaagaactgatgactgttgctttaag

SEQ ID NO: 32849 - DNA, 226 bp, Glycine max
  Clone ID: 700893569H1
gagtggtttcagtgagtgatcggtgttcacttgatccttcataagtcgtcatcatcatcatcatcatcaccgttgattgaagaagatgccgatcagaaacatcgccatcggaaggcctgaagaggctactcaccccgacacgttgaaggcggggttggctgagttcatctccaccttgatcttcgtgttcgccggttcaggttccggcatcgcctacaacaagctc

SEQ ID NO: 32850 - DNA, 223 bp, Glycine max
  Clone ID: 700893570H1
caagattgacaggcgatccggcaaagagcttgagaaggagcccaagtttttgaagaacggtgatgctggttttgttaagatgattccaaccaaacccatggttgttgaaactttctccgagtatcctccacttggtaggtttgctgttagggacatgcgtcaaactgttgctgtgggagtcatcaagaacgttgagaagaaggatcctaccggagccaaggtc

SEQ ID NO: 32851 - DNA, 221 bp, Glycine max
  Clone ID: 700893572H1
aaagattcttgttttgcaccgtttcacaaaatgccacaaagaaaaggttgcagttctctgaatgagcctcgtcttgttgccaggaaattcttggcacgacctcagattgagggtgttgggactgttgttagaagaagcataggagggtaagtagtaagagaaaatgaaaaaaaaaaattaaaattaaagcttcaagacccttttttcaatttgcatcaaaa

SEQ ID NO: 32852 - DNA, 224 bp, Glycine max
  Clone ID: 700893573H1
attggttgtggagtcattattggagttgctggatgaggagagtttgaggaaggacacagcacttccttcacctgaatggtcctcagatcacattgctctcttagctgagtttcgctgctgcaagaataaatctaggcgttgacagttaaggtcactttcagtgatacatacagaaaaagtctgaaagaagcatttggttggtaagttttttgtaaaaatggtag

SEQ ID NO: 32853 - DNA, 224 bp, Glycine max
  Clone ID: 700893575H1
cctcattcttcttcttcgtgcgtgcgtgtttctgtaaaatcgaatctcaagtctctgaatctgaatctcaacacaaccttcgatatactcaacactgtgttcgtttttgctgccaaggttacaacactgaaagagacaccggagtaacataaataagatggaccaacaaaaccaaaataacactccagatggttcaggagaggtgcctttgaagcgcaaacgtg

SEQ ID NO: 32854 - DNA, 115 bp, Glycine max
  Clone ID: 700893577H1
aaacaagagtggcacatttaatttccttaagagaatattaaatgtgccactcttgtttacatgcatgttgtagttctatgcacgtaaacaagagtggcacatttaatattctctt

SEQ ID NO: 32855 - DNA, 226 bp, Glycine max
  Clone ID: 700893578H1
gtgcgagcaccacaaggggaagaagaggaagatcttccggcaagtgttctggtgcttagtggtgttccttttcatcgtgctggtcacaattcttttgatatgggcaatccttagacccaccaaacccaccttcacgctccaagacgtcaccgtctacgccttcaacgccaccgtggcgaacttcctcacttcgaattttcaggtcacgctcatctcgcgtaacccg

SEQ ID NO: 32856 - DNA, 230 bp, Glycine max
  Clone ID: 700893579H1
acactacccatccatcattcgttttctctctagattttttcagttagttattgctgtcttctttttgtgtgtgccaacaacacagaaagagagagaaagacatggctctgaaccaatcaaaggccgtgttgttgagggtgagtttggtggtggtgatcgctgtgtatagcaggatacatagtgggtccccctctctactggcatttcgttgcagtgaacaaccactcttc

SEQ ID NO: 32857 - DNA, 232 bp, Glycine max
  Clone ID: 700893580H1
cctcgagccgattcggctcaggttgttccttcacctttcttatactcaggaaagtaagatcatctgcatcgccgacgcttccaacaataacaatggccgataatgcaacaacgcaaggaagcaacaccctattttctccttacaagatggccaaattcaacctctctcatagggtggtgttggctcctatgacaagatgcagagcgttgaactggattccacaggcagcgct

SEQ ID NO: 32858 - DNA, 242 bp, Glycine max
  Clone ID: 700893581H1
ctcgaagcacaattagcaaagaacagtgtcccagatggtaaatttactgggagatgagaacacaactgcaaattacctgagcaagtgcatttattcaattggaatgggtagcaatgattaccttaacaactatttcatgccgcggttctattccagcagcaggcaattcacaccacagcagtatactgacgtgcttgttcaagcatatgctcaacaactgaggattctttacaaatatgggg

SEQ ID NO: 32859 - DNA, 224 bp, Glycine max
  Clone ID: 700893583H1
aaatcaaggaactcagctatgactaccagagaaatccttcaaaagatgaaggtaaaagttggtttgggttcatcagaccctgactcagggaaaggaaagagcaagatgtcaaagaacataactcatggttatcatttggtgaaaggaaaatcatatcatgacatggaggattacgttgtggctcaatttaagcaaatagataacaatgaattgggtttgtttgc

SEQ ID NO: 32860 - DNA, 227 bp, Glycine max
  Clone ID: 700893542H1
tccacattcaattatcaagttttacacatatgaaagcttgaagcaagtgatgccatctagtattcaacccaactcgtttaagactgtagtgtgtggacgattagctggatctacggctgctttattcacgactccttttgatgtgatcaagactagattacagacacagattcctgggtctgcaaatcaatatgatagtgtgctccatgccctttacaaaattagta

SEQ ID NO: 32861 - DNA, 216 bp, Glycine max
  Clone ID: 700893584H1
gcagcggatgacacaagtgactactggtgctgctgccattaagggaaaatttcatgcttttaatcaggatattagcaatcaagttgctgcttatatgagagatcctaatagaatgatcaatcagatgcggctgagaagatcagctgttaatatatttggatctgttccagaggttgacgataaacataaagaagctgaaacacgtactgatggtga

SEQ ID NO: 32862 - DNA, 234 bp, Glycine max
  Clone ID: 700893503H1
gttcttttcataaacaacaacattttaactcaagggttgcctgataacttagcctccactcatattctcttactcaccttagcaaacaacaagttcatgggtccaattccaagaagtcttcctaaggctttgtccactctaagtgaagtgcttttactaaacaaccagttaactggttgtttgccttatgagattggttttcttgaagaggcaacagtgtttgatgctggcaac

SEQ ID NO: 32863 - DNA, 227 bp, Glycine max
  Clone ID: 700893504H1
tttccattgattgagcgaaactttgttttttctgcgatcattttacattgggtggaagcaagtctcaacctttagtcgaaagagcaaggatctgagtgagtgagcgatcatgtgtggtggtgcgattatctccgacttcattccagcgggtcccgccggcggggcgcacgcgtgaccgtcgacatcctgtggccgaatttgaggaagcggttctcgaagtcgctgct

SEQ ID NO: 32864 - DNA, 234 bp, Glycine max
  Clone ID: 700893505H1
cacaacgccatcgccaaagggtttcagcaggttgaaataagtgatttgttataatcaacatgtcatctccaagcaagagaagagaaatggatgtaatgaaactgatgatgagtgattatacagtggagacgataaatgatggactcaatgagttcaatgtggagtttcatggtccaaaagaaagcctttatgaaggtggagtctggaaaattcgggttgagcttcctgatgctt

SEQ ID NO: 32865 - DNA, 211 bp, Glycine max
  Clone ID: 700893506H1
tctctttattaaagaagggaacatcggctgctgcttactatatagaaggtcaatattaattatatttgtcgtacctacattgttggaacaagttgagtctgatcaaataagtaacacccttaattccatagtgtaatagtgttttacagtaatattgtattgtcttatcagaccacatgaaatactcttatttataatgaagaaggtttac

SEQ ID NO: 32866 - DNA, 228 bp, Glycine max
  Clone ID: 700893507H1
gttatgctgatcttgtggaagagttttctcttggggatgggaagattgtgaagattactggtattaaggagatggggaagaccaccactgtgcttgtacgtgggtctaatcagcttgtgctcgatgaggctgagcggagtttgcacgatgctttgtgtgttgttaggtgtttggttgccaagaggtttctcattgccggcggtggtgcccctgagattgagctctcca

SEQ ID NO: 32867 - DNA, 159 bp, Glycine max
  Clone ID: 700893508H1
ctccccttgctgcggttgctccatcacctaatcacttccccacttcccctgtaactcacgtttagttcgcacaaggttttaaaaaatggctgatgctgaggacattcaacctcttgttgttgataatggaactggaatggtcaaggcgggttttgcagg

SEQ ID NO: 32868 - DNA, 231 bp, Glycine max
  Clone ID: 700893510H1
gttctgcttacttttttatttttattgagtcaatgggatgccgttttggttaatcaacttgatttaaaggctcgccaacacatgttcaaggtgcacctaggagatactccccataacttggctgaaagtgattttgaacatttggctcgcaagacagaggggttttcaggttcagatatatctgtctgtgtaagtttgacttctatatttaatacctggttagaataatga

SEQ ID NO: 32869 - DNA, 231 bp, Glycine max
  Clone ID: 700893511H1
accgaatgagagcatcaaactcttcttcttcgatttccattgcgaacgttactttttcttcttctttctcttcattttcttcgctcttcgatcttcgtccggggactgctccgaataccaccaccaccactcgccgatggccacgatcggaggcttacacgactcccaaggctctcaaaacagcgtcgaaaccgaagccctcgctcgattcgccgtagacgaacacaacaa

SEQ ID NO: 32870 - DNA, 232 bp, Glycine max
  Clone ID: 700893513H1
ctagggataacttgtcatattgtgattgatcatggtggaaatgttccctactgggaaggacagagttatggtgttattccaccggtaagtgatagttcttctttgcttcctcccattctgtgagtactgattgtgaattcataattattgatctttgtattcagttttgtttcgataaattaattttgatggaaggaatgcattttcgatatgtgtcctttatcatcatagt

SEQ ID NO: 32871 - DNA, 219 bp, Glycine max
  Clone ID: 700893514H1
gtgttctccctccatcagaaacccacactttcatgatgaggccttctgcttcttctggtttgcgcatgatgcgtaccagtcgcattacctgttgcaccctttctcagtcttctaagccagcccgcaaaatccgtggtatcatgaaaccccgcaaagtctcccccgagatggaagacctcgtcggcgctcccgagatggctcgaacccaagtcctccaac

SEQ ID NO: 32872 - DNA, 235 bp, Glycine max
  Clone ID: 700893515H1
gcattcctaacataaaatggtccggcatagatggggaggataatgtgcttgttattgacttgcttgggccgagtcttgaggatctctttgtgtattgtggaaggaagttttcattgaagactgtattattgttggctgatcgaatgatcactagaatagaatatgtgcattctaaaggatttttacacagggatattaaaccggataactttctcatgggacttggtcgaaaggc

SEQ ID NO: 32873 - DNA, 239 bp, Glycine max
  Clone ID: 700893516H1
gggatgatctggaatctcttggttatgtgctcatgtacttcttaagaggaagtcttccctggcagggactgaaggctggcaccaaaaaacaaaaatatgataaaatcagtgagaagacaatgtcaacttcgttagaggggctctgcaagtcatatccctcagagtttgtatcatattttcaatattgccgaacattgcgatttgaagacaagcctgattattcatatttaaagaggctg

SEQ ID NO: 32874 - DNA, 204 bp, Glycine max
  Clone ID: 700893517H1
gcattaatggtgcaactccgtgatcctatgagaaactatgagccggttggaacaccaatgcttgctcttatacaagatgacaagagagcgcgtgacgtctaaacctttggtttccaacagtgtgtctgagataaggataaattattcatacgctgacttcagtggtatatgttcaccagtcgggtcttcttattcgagcaagag

SEQ ID NO: 32875 - DNA, 231 bp, Glycine max
  Clone ID: 700893518H1
ctctttcttcctcttcctcagtagtgcgattttcgattctcttctctgcaactatgcctaaccctaaggtcttcttcgacatgaccatcggcggtcaagctgccggccgcatcgtgatggagctctacgccgacgtgacacagagcaccgccgagaacttccgcgcgctctgcaccggcgagaagggcgccgggcggagcggcaagcccctccactacaaaggctcgtcct

SEQ ID NO: 32876 - DNA, 225 bp, Glycine max
  Clone ID: 700893519H1
aaggatcagctgccaccagcgcctttcgtccagcataccctcgtaacaattctgataatgaggagaatgtcatctgttggtggaaactcctcagagatttccaagcagaggcaggattgccttgattttgatctgaatgtggctgagggtgaagaaggactgctaaaacaaattggtgaatcttcaggccttccttctggccaatcatcagtggaacttagtcct

SEQ ID NO: 32877 - DNA, 224 bp, Glycine max
  Clone ID: 700893520H1
cattcccatattgtcccattcactaagacatggaagccagcgctggactggtcgctgggtcacataaccgcaatgagctagttgtcattcatggccatgaagagccgaaggctttgaagaacttggatgggcaagtgtgtgagatttgtggtgatggcgtgggactcacggtggatggagacttgtttgtggcttgcaatgagtgtggttttccagtgtgcagg

SEQ ID NO: 32878 - DNA, 227 bp, Glycine max
  Clone ID: 700893521H1
cttgatgaagaacaaattgctgcaaacctagtaaagaatggccctcttgcagttgctatcaatgcagtttttatgcagacatatgttggtggcgtctcatgcccatacatctgtgggaagcatttggatcatggggttcttctagttggttatggtgaaggtgcatatgctcccattcgttttaagaacaaaccttactggatcattaagaattcatggggcgagag

SEQ ID NO: 32879 - DNA, 226 bp, Glycine max
  Clone ID: 700893523H1
cttctttttactctctctctgtctctctctacgctttctcgttcgagatccctcaagggatccactaactgaaggagaaatggggttgacattcaccaagcttttcagccggcttttcgccaagaaggaaatgcgaattctgatggtgggtctcgatgcagctggtaagaccaccatcctgtacaagctcaaacttggagagatcgttaccacaattcccaccatt

SEQ ID NO: 32880 - DNA, 228 bp, Glycine max
  Clone ID: 700893527H1
ctgaagaggccaagagaagagaagaagccttggagaacgatttagcaaatatgtgggtccttgttgctaagttaaaaaaagacgggggtgcagttccagaatcaaacatcgataaaaaaaatgatggcgcagaacacataaatggtccaaaaactaatgacgttgaaagtaatattgttcccaaggagcatcttttggatgcaccgaaaccagatgaggaaatgccca

SEQ ID NO: 32881 - DNA, 225 bp, Glycine max
  unsure (1)..(225): unsure at all n locations
  Clone ID: 700893528H1
gggatgtggcagcactgtacaagtataagaacactgttattgatgttaaacttgacaccgcatcaactatctccacaaccctcacatttaatgacgttcttccatccaccaagactatcgnctcatttaagctgcctgattataattctggcaagttagaggttcaatacttccatgaccatgctaccttaacaacagctgttgcactgaagcaatcccctgtca

SEQ ID NO: 32882 - DNA, 231 bp, Glycine max
  Clone ID: 700893529H1
ctgagaggaagagagagggagattctttgtttgctaccttctctcggaaaaatggttacgttcaggtttcaccagtaccaggtggttgggagggctcttcccacggaagcagatcagcaccccgggatctaccgaatgaagctctgggccaccaacgaggttcgcgccaagtccaagttctggtattttctgaggaaactgaaaaaggtgaagaagagcaatggccaagtg

SEQ ID NO: 32883 - DNA, 234 bp, Glycine max
  Clone ID: 700893530H1
agaatatccagttgtaataaccctagaagaccaccttacaccagatcttcaggctaaagtggctgagatggttacccaaacatttggagacatactatttactcctaactcagaaagtgtgaaggaattcccttctcctgaatcacttaagaagagaattattatatcaaccaaaccacctaaggagtaccttgaggcaaaagaaaaggaaaaaggggatgattcacagcacga

SEQ ID NO: 32884 - DNA, 231 bp, Glycine max
  Clone ID: 700893536H1
gcgtgatttcgcatccgcaggcactcgcgcagtgcgagcacactctcaccaaactcggcctgaacgtggcgcgcgaggccgtggacgacaccgccggcgctgccgagttcgtcgccagcaacaatctccgcgacaccgccgccatcgcgagcgcacgcgcggcggagctctacggcctgaacgtgatggcggacggaatccaagacgatccgagcaacgtcacgcggtttg

SEQ ID NO: 32885 - DNA, 227 bp, Glycine max
  Clone ID: 700893537H1
cgctaacacctaatagccagaagaagcgaaatcgtaatcgcaatctagcggatatgaaggtcgtcgctgcatacttgctcgcagtgttggcaaggaatccatctccttcggccgatgatatgaaatacatcctcggcgcagtcggagctgaggctgagcatgagttgattgagttgctcttgaccgccgtcatgggcacagacttcaatgagctacttgctagtgga

SEQ ID NO: 32886 - DNA, 227 bp, Glycine max
  Clone ID: 700893538H1
caagaccaaggcaatggtagaggatctgctgaagaactatgataatgtgtgcacattgcgagtgaggatgcctatctcatccgatttattgaacccgcgcaattttatcactaagatcactcgatatgagaaggttgtggatattccgaattcgatgactatattggatgaactgcttccaatttcaattgagatggggaagaggaatctgactgggatctggaact

SEQ ID NO: 32887 - DNA, 227 bp, Glycine max
  Clone ID: 700893540H1
cgtcaacgttagtgctttgtttaggtgaactaattcggagaccttgcaagacttcatcaatggctgtcaaagtttatattgtgtactactccatgtatgggcatgttgagaaactagcagaagaaataaagaaaggggcttcctctgtggaaggtgttgaggccaagttatggcaggtacctgagacactgctggatgaggtgcttggtaagatgagtgcaccaccc

SEQ ID NO: 32888 - DNA, 226 bp, Glycine max
  Clone ID: 700893541H1
atttgttaaccaggtaaagcgatgtgcagaaatgtcaagaaagctacgattcttcgaggatcaaatcaataaagctggtctaatgtcttctccttcagtcttgcaaacagatatttatctggaggatttagagatacaacttgctgagcatgaacatgagctaattgaaatgaactctaacagtgagaaacttcggcaatcatataatgaactcctggagttcaag

SEQ ID NO: 32889 - DNA, 229 bp, Glycine max
  Clone ID: 700893502H1
gaagtttacagcttgtcgacgagtgttgccaataggccctatttgtaattgtaggaatgatgagttgagaaaaagtgtgagcttttgggaagaagatatgagctgcttgaagtggctagaaaagcagaaggccaagtacgttgtatacatctcattcggaagttgggtgagtcccattggggaagcaaagttgaaaaatttagcactggcactcgaggcttcagggagg

SEQ ID NO: 32890 - DNA, 156 bp, Glycine max
  Clone ID: 700893457H1
gagacggcgagttgagttttgaaagcgtgtgcgtgggagggtccgaagttggagatagtgattctggttctgttctgttcttctttctactcacaacaacatcagaagtcagaatacaacaattggccatcactacacttcggacagatcgttccc

SEQ ID NO: 32891 - DNA, 226 bp, Glycine max
  Clone ID: 700893458H1
aacagcacaaagcgggttactgtctgttcaagctaccatctctctctctctttcttagtgcctccttgccagaagttaaaatggcccaagaaactttcctattcacatctgaatcagtgaacgagggcaccctgacaagctctgtgaccagatctccgatgctgtgctcgatgcatgcttggagcaggaccctgacagcaaggttgcctgtgaaacctgcaccaag

SEQ ID NO: 32892 - DNA, 226 bp, Glycine max
  Clone ID: 700893459H1
caaacaccgttcccgctcctccatcttctcttctttcattctaagaaagcgagaatttaactgttctcggattggtaccagctggtgcatctttttttcttcaattttttttttcggaattctttttgttcctaattttatcaggagaagctgaattttccgggaaaatttgcgttgttttctcttccttgcgaccttcgccgacggctgctactgattcgtcaac

SEQ ID NO: 32893 - DNA, 226 bp, Glycine max
  Clone ID: 700893461H1
gtttacaccgagcagccacacctcccgcagcagccatggttctcaaaactgaactatgccgattcagtggtgccaagatctacccaggaaagggcatcagatttgttcgtggtgattctcaggttttctgtttgcaaactcaaaatgtaagaggtatttccacaatcgcctgaagccttcaaagctcacctggactgcaatgtacagaaagctacacaaaaaggac

SEQ ID NO: 32894 - DNA, 230 bp, Glycine max
  Clone ID: 700893463H1
tttccttatacatgaccagaggaaaataatttcttttaataaaaaaaacttagaatcgaaacgaaaaatcgccatgaatcccaaaatcctcttcgtgtttgctctgcttctgaatctcgtatccaattcgtccaaaaccctaaccctaaaacccccaaatcaacgtcatcgcaggcttacgtggagctcatcaaccacggcttacccgccggtcttctccccgccaccac

SEQ ID NO: 32895 - DNA, 236 bp, Glycine max
  Clone ID: 700893464H1
ggaaaaggtgactgcacagaggtatcgaataaagtcaaaagtcggaatggtttcactctgatcaaactgaggaatcgaggaaggaagggttaggattagggtaaggattgggaagccataggagaagagaacagaggaagaagaggtcaattcaaaatgccggaagaggatttggtggacatcaaatttaggttgtacgatggttccgatatcggacccttcaggtactcctccgc

SEQ ID NO: 32896 - DNA, 135 bp, Glycine max
  Clone ID: 700893465H1
atcatcatcccctctccccaacggataaagagagagtagggtcccttcattctctcacacagaaaaatggcagcgtcagtttcgtgctcatggctaacccttccctcccaaatgaggagcctctccctcactcct

SEQ ID NO: 32897 - DNA, 132 bp, Glycine max
  Clone ID: 700893467H1
ctcataacacaaagcacaaagcaaagctcatccttgagttaaaaaatggcagcagcttcttccatggctctctcatccccatccttggctggcaaggccgtgaagctgggcccatcagccccagaagtggaa

SEQ ID NO: 32898 - DNA, 227 bp, Glycine max
  Clone ID: 700893468H1
agatgagtgatctaggtcaaggttacaacatcctgagactttctcagggaaaatttcttggtagaggagctgtggaattttgtgatggacccaccttaggaggtttatgttgttctctcacgaattatccaacgttgtttggatcaacgttgggagagtcgagttgtttttttcttcttcattaggtgcgtccggatctgtcattgtgcattggaaaatactttcca

SEQ ID NO: 32899 - DNA, 129 bp, Glycine max
  Clone ID: 700893469H1
gtggagcaatatgctcacttgggattacgtacattatgtttggcttggcgtgagttaaagagagatgaatatcgagaatggtctttgatgtttaaagaggccagtagcactttggttgataggggtgga

SEQ ID NO: 32900 - DNA, 237 bp, Glycine max
  Clone ID: 700893471H1
gataagctcgagctcgagccgctcgagcaattatgaatgaacattgagaaaaaaggcagaggcagaaacagagacgcagaagacaaccacacttttttcatggccaaaatcattggcaggagcagaagaagaagaatacaacgactactactcaacaactatgcaacagaatggttcatcatcatgtcaatgtccgctgcaacctgttccatagcatgtcctttcttggtcgtttta

SEQ ID NO: 32901 - DNA, 222 bp, Glycine max
  Clone ID: 700893472H1
acaacaacgaccaagccgccaatgagaaatacttctacaacaacaacaacaatgatgatgctgccaacaacaggtattacaaaaccaaatctgtcaacagcaattacaacggcgagaggcaggtttgagtgacacgaggtttatagagggtggaaaatacttctatgatgttaagtctgaaaagtacaaccatccaacacaatatggtggctcaaccagagg

SEQ ID NO: 32902 - DNA, 224 bp, Glycine max
  Clone ID: 700893475H1
gtcccaggaagacgagggatgatttcctgtcgcagggtttcaaattgacattatgaggaagtctaagaagaagaagcaatggtacatgggggtagctgaaactggctcggcgggtttgttttgagttgattcaagccaaagggaggttgaggaaaagtaagaaaatgttgcttccgttacaatgactgtaatgtatagttaaattaatactatcagctacatat

SEQ ID NO: 32903 - DNA, 225 bp, Glycine max
  Clone ID: 700893476H1
ctgtattgtgttttgttccttccttggttcgttccctccacaaaccaaaaacccaacaaaagaacgttcatttttcattttcgtttctaataaagagcatggccggtggttctatcaagagacatctttctccgaagaggaccatggtttcgcttcttccatggagcctgggtattctgggcacaaccaccacttccatcatggtttcgtgtctaggactttggg

SEQ ID NO: 32904 - DNA, 227 bp, Glycine max
  Clone ID: 700893477H1
ctctcttctctctagctataaaaaatataccttttcagtttccactcattgatctaaagccttactcttgcaatcaatacaattaagtattattcaaagtcccaaccatgtcaccaacaaacactttgcaattttggtcttcttctgctgtgccatttcctttaccttcgcttctgaccctgacacacttcaagacctttgtgtggcacttccctcttcaggtgtga

SEQ ID NO: 32905 - DNA, 232 bp, Glycine max
  Clone ID: 700893480H1
ccacattcacctgagctttttgtgaggattccaaagcatggcttcccttgcagcatccactgctgctgcttcccttggcatgtcagaaatgcttggaaaccccatcaacctcagtggtgccacaaggccgctctatctgcctctagccctgcctccttcaagactgtggctcttttctccaaaaagaaggctgcacctccaaaaaaagctgcagctgctgctcctgccaatg

SEQ ID NO: 32906 - DNA, 225 bp, Glycine max
  Clone ID: 700893482H1
gtgccgtgcagatattagtggttattgttttttctctttatcttcgtaaaatatctgttcttggacaccgcatatttctaatatatgcagttcctttgggtctggcaattacgtgggctgttgcttcttgttgactgaagctggagtctacaactacaaaggatgtgacataaatatacctgcctcgaatatggtttcggagcactgcagaaagcatgtctcaag

SEQ ID NO: 32907 - DNA, 227 bp, Glycine max
  Clone ID: 700893483H1
gccactcttccatctttcccttgtcccagattccctccactcattgcaatttcttcgatccgctttctaaattccacacccctccgttccactgcttcgccgcgacaagttacaagaatggcttcgagaatgctcaacaagacacgcgcttagccagaatcgcctctgcgatccgagtcatccccgactttcctaagccaggaattttgtttcaggacataaccacg

SEQ ID NO: 32908 - DNA, 214 bp, Glycine max
  Clone ID: 700893485H1
ctctctcttcctctttagcttcatcgccatggcatcaccagcaagaaccttctttgctctcattctcgccgtcgtcgctctcttcttcgccgccgccaatgctcaagacctctcccggctccgagtcccgatgccggagcggcgggatccgtttcgagctccgtcgccatgatcggagcttcggttgtgctgtcattgatggctatcttgaagc

SEQ ID NO: 32909 - DNA, 223 bp, Glycine max
  Clone ID: 700893486H1
aaaacatgttcttgtggaattcagaaaaagcggttaccaaactacttctgctgaagccatccatcgcagagcttcacctgaatatagcatcataaaaaatgaggaagagatctcacaaagcttgaagatggtgtggttcaacaattcaaaaggagtaaaagctcaaatgaaactagagcttctgattatgattccaacaagcatgatgctcgcctcatgcgaa

SEQ ID NO: 32910 - DNA, 219 bp, Glycine max
  Clone ID: 700893487H1
gagaaataggcagatagataaaaagagcgacttttgagttcaaaagatgactaacttcccattgatcaacttggagatgctcagtggtgaggaaagaaacgataccatggaaaaaattaaaatgcttgtgaaaactggggattctttgagctggtgaatcatggcattcctcatgacatattgatcgctgtggagatgttgaccaaagagcactacagg

SEQ ID NO: 32911 - DNA, 212 bp, Glycine max
  Clone ID: 700893489H1
gtatttttttttgcagatactgtagataatcgatgagaagaacgcagatccagccgcttccgcttgttcgatcgctacagacgcttgtatcggattattcatgattgattcataagcagcattcttcctccggctatagttgttgcagatctcggatgttgtaaaattagtgtatgatgtgaagctatgggctggaaaatgtggatgtagga

SEQ ID NO: 32912 - DNA, 219 bp, Glycine max
  Clone ID: 700893490H1
gagggttttgttcttcaatggaaagccagaagcagaacagtaaaaagcggaaacaagttttcccatacggcaactacaagagctactatggctatcgaattggtcaaggcgtggatgaggacctcgattgaaggtgctgaggaaggaatggtttgaaggcaaggactgtcttgatattggctgcaacaatgggatcatcaccatacagattgcacagaa

SEQ ID NO: 32913 - DNA, 220 bp, Glycine max
  Clone ID: 700893491H1
caccatcttcttcttcttctgctgtctcccccatagatggattggcaagggcaaaagctagcggagaactgatgcagataatgctgcttgcatttgctgtgattgcatttgttggtggatagtcatggcttctttccaaatgatgattctcatatatgctgggggtgtggttttcaccaccttgctcactgtccccaattggccccttttcaatcgccat

SEQ ID NO: 32914 - DNA, 223 bp, Glycine max
  Clone ID: 700893492H1
atctgagagctgaagagagggaacgagtttgtgaagtaaagttgactcagtggaaactcggttgaactcgaaatggcgaaacttgaagcgaagctaggaatgatcgtggactaggtggggcattcttctccggcaaagaccatcttccttattgtgactctgacgtcgtcgctggatgtgaaagagaggtattggaggctgaaaaacaatcatctgaagagca

SEQ ID NO: 32915 - DNA, 246 bp, Glycine max
  unsure (1)..(246): unsure at all n locations
  Clone ID: 700893493H1
atctgagagctgaagagagggaacgagtttgtgaagtaaagttgactcagtggaaactcggttgaactcgaaatggcgaaacttgaagcgaagctaggaatgatcgtggactcggtggcggcagtcttctncacggcaaatgaccatacttccattgttgtgcactactgcaacgtcgtcancatggatgtgcaaagagagggtaattggtaggctcgaacaaacaattcgatctgaacgagcata

SEQ ID NO: 32916 - DNA, 230 bp, Glycine max
  Clone ID: 700893496H1
caagaactcgaaatggctccaagagaatctgacggatatggattccaaggtgaagcaaatgatcaagctgatcgaggaagatgcagattcatttgccaggagggctgaaatgtattataagaaacgccagagcttatgaaattagttgaagagttttatcgcgcataccgggcattggctgagagatatgatcacgcaactggagtgatacgtcaggcccatcatactat

SEQ ID NO: 32917 - DNA, 223 bp, Glycine max
  Clone ID: 700893456H1
gatgtatggtaattgaaatatcatttcactttttatgcttctgtattttatcttttttggttcatgattttcttctttacaattaaagctagccccaaaacacatccttttgaagaacattattttcatcaatatatttctgtgtaagttcagttgttgaagggaattttttgaagttcaccaatcatttgttaaatttcaggagtacttagctaacccagtg

SEQ ID NO: 32918 - DNA, 236 bp, Glycine max
  Clone ID: 700893501H1
tctggtcatcgttgggatctccatacgccggatctgctaaaatacgcttgatccatatgggcctcctcgaccacttgtgggacgacaccgtcgccggcccaaggccgaaaacggtctcggcaagctccgaaaacaccacaccttcactttccgacctagctccggcaaggaaacggagggcgggagcgtgagatcgtacggagacgaatcgtcggaggaagcgacgagagtgacgc

SEQ ID NO: 32919 - DNA, 240 bp, Glycine max
  Clone ID: 700893416H1
actttctgcgcttcttggcggcgacgcggcggcggcggcgtcttcgccggagagttctacttctagagtctcctccttccactcgtcgccgcgctggcagctctacttcaacgagatcaaagataccgataagctcgtgtgatagatttctcggcgtcgtggtgcggtccttgcaaattcatagagccagcgattcacgccatggccgacaagttcaacgacgttgacttcgtcaagatc

SEQ ID NO: 32920 - DNA, 241 bp, Glycine max
  Clone ID: 700893417H1
gaaaaaagagaaacaaatggcagcactgggtggctttaccgacatcaccggagcacagaacagcatcgatatcgaaaatctcgctcgctttgctgttgatgaacacaacaaaaaagagaatgcagttctggagtttggagggtgattagtgcaaagaaacaagtggtttctggcaccttgtactatatcactttggaggcaaatgatggtgtgacgaaaaaggtttatgaaactaaggtgt

SEQ ID NO: 32921 - DNA, 219 bp, Glycine max
  Clone ID: 700893418H1
atttttgtttctcctagggttaagcggtgagatttgcgaatctgagaaatggcggattcttctcgggaggagaacgtttacatggcgaaattggcggacaggccgagcgttacgaggagatggttgagttcatgagaaggttgcaaagactgtggaggttgaggagttgacggtggaggagaggaatctcctctctgtggcttacaagaacgtgattgg

SEQ ID NO: 32922 - DNA, 231 bp, Glycine max
  Clone ID: 700893419H1
cgaatagatagataggtgaaaatggcgcagtgtgtgaccaacacattcgtgcaaggaaaaccctttcttccagttgcagcagctcccactaaaaatcaggttcggagagcggttcagtgcggtgtgtggtgcaaaagaaggagatacacccggcaattctacgaggaatcgaaggtgtattaacgggagctggtgctcgacgacaggtgggaccagaaggaatacgtggtg

SEQ ID NO: 32923 - DNA, 224 bp, Glycine max
  Clone ID: 700893421H1
cagctaaggaggccaaatgaatttaaaacttatgagatcctgggaattgatgtcaatttgggtgtatttgtgtgtaccttggtgagcaatgacttattcccttagattttcttttagatatgtacagagagctttttcaatatagcttacattgttctttggtaggtatacgtttaaggtacagagagcctttttctgtatatcccccttcatttttaactaat

SEQ ID NO: 32924 - DNA, 229 bp, Glycine max
  Clone ID: 700893424H1
gggatttcaaaagaaatggagtgatatttgtcagcgtcttcatcacacaagttcactacctcaatttgatatttctcaaacaaggtcccaagctccaacagttgaggttttacggtttggtctggcttttaggaaagcagcaataaagacccatcacacagtgaattccaatattctagtcaaatttcctgcatgcccaaagagttgcatagtatttttccttcgaagc

SEQ ID NO: 32925 - DNA, 230 bp, Glycine max
  Clone ID: 700893425H1
ccatctccaatgccagacagctggaagctgagggagatatttgccactggtgttgtgctaggagcttacatggcactaatgacagtagtatttttctggctcatgaaggataccgacttcttctcggacagttcggtgtgaggtctataaggaacagccccggagaaatgatggcagccctgtacctacaagtcagtattataagtcaagcactaatttttgtgacaagg

SEQ ID NO: 32926 - DNA, 231 bp, Glycine max
  Clone ID: 700893428H1
ggaaacaagtcgtttgagcagacctgctttctggatgttaagggatactgtcgtgaagagaggagccacgaagggcttggaatgggtggttctgttgtctaccaaaaattcgggaagactagtgactgtggtcacctagatcaactctaaagtgctggaatgaggaagatgaggaagagtagtttccttaagtgtctttattattctgtccttgtgaaaataagtctggtt

SEQ ID NO: 32927 - DNA, 236 bp, Glycine max
  Clone ID: 700893430H1
tctcgagccgaatcggctcgaggcaaaagcaaagattggtatggtatattcgagtttattctacgtctgccttacaccaagtgtagaactgtagataaaataggttctaagtagtcttaaattaattttggaggtatggaccagcaagtttagctgtctgaataatttaagcccaagttgttgtgttgatgcccagatatgaatatttgatgttagaatattgaaatattgcaatt

SEQ ID NO: 32928 - DNA, 236 bp, Glycine max
  Clone ID: 700893431H1
tctctgtttccttcttcaccgcatcaatgctgctggacggcgttctcctcggcatgtgcaaccctctcctcgacatctctgccgtcgtcgacgacgctttcttgcaaaaatacggtatcaagttgaacgatgcgttctcgctgaggataagcacaaacctatgtatgaagaattggctaacaatcctaatgtggagtacattgctggaggtgctactcagaattcaatcagggttg

SEQ ID NO: 32929 - DNA, 240 bp, Glycine max
  Clone ID: 700893432H1
cttcttcgtctcaaatctcttcgttccttcgattcgttccatttcttccaaaatggccaaagacccagttcgcgttctcgtcactggagctgcagggcaaattgggtatgctcttgtccctatgattgctaggggatgatgttgggtcctgaccagcccgtgatcctccacatgcttgacattcctccggcagcagagtcattgaatggggttaaaatggaattggtggatgctgcattc

SEQ ID NO: 32930 - DNA, 104 bp, Glycine max
  Clone ID: 700893434H1
gaaagaaagagatgctattatgggagaatttcgtgctggaacaacccgtgtactaataacaactgatgtttgggcccgtggtcttgatgtacagcaggtttctc

SEQ ID NO: 32931 - DNA, 227 bp, Glycine max
  Clone ID: 700893435H1
tttgccctctccttttctctctctagaattctcagatttgcggggcgagatgatgcagcagccaggacccggcatggcacctcccaccatgggccagcagccgcagcaacagtaccagcagcagcctccgcccagcagcaacaaccctacgtcatgctgccgccgcagcatcaggcgccgcagcctatgtgggccccatccgcccagcctccgctgccgcagcagcc

SEQ ID NO: 32932 - DNA, 131 bp, Glycine max
  Clone ID: 700893437H1
tgcgcgttgggatttatggatgatcattacccgattcggagtgcgttttctcttctcaaccaggtaatagatgaatatcaaaaaaactttggcgagtcatggagaaatgctcaggaagacagtactcaaca

SEQ ID NO: 32933 - DNA, 230 bp, Glycine max
  Clone ID: 700893438H1
attttatggacaaagacggcctgtgctgcagcgtggtgcaaaacttttgtgtgttagtgacttgcttttattaggaagatccaaccattgaagaggcacgcagtctcttacactggttggactctgaggaggttttggcaagatgggtgtttgtggacttagtatgggaggagtacatgctgcaatggttgggtcacttcaccctacacctgttgcaacactcccttttc

SEQ ID NO: 32934 - DNA, 226 bp, Glycine max
  Clone ID: 700893440H1
gaagcacaatttctttttctctctttttttgtgtgtccaaaatggctcctagttctgctcacaacaatgggttctatgtgcttatgctagttgggatagtggttagcactatggttgctacctgtgcggtagcttctaccaagactttgatctaacatggggtggtgaccgtgctaagatattcaatggtggccagcttctatcactttccctagacaaagtctct

SEQ ID NO: 32935 - DNA, 229 bp, Glycine max
  Clone ID: 700893441H1
ggcatgcaaaggctaggatcaatgcaggggctaacttctatatcgttggtcgtgaccccgcaggcatgagccatccagttgagaaaagagatctgtatgatgctgaccatggaaagaaagtattgagctggcaccgggactagagcgtctaaacattcttcctttcagggttgctgaaatgacaagacttcagggtaaaatggcattctttgacccttcaaggcctcag

SEQ ID NO: 32936 - DNA, 225 bp, Glycine max
  Clone ID: 700893442H1
tgtttttcgtggtctcaccgtcgcgcttatgatacttgttgatgatgctggcggactcattcctgcactcaatcattcaccatggaatggtttaacgctagctgattatgtcatgccatttttcctattattgttggtgtttcgcttgcactcacatacaagaaactgtcttgcggagttgatgcatctaggaaagcaagtttacgggctctaaaacttcttgtg

SEQ ID NO: 32937 - DNA, 228 bp, Glycine max
  Clone ID: 700893443H1
tgggtgtagaaacagcgaaagagaaagagagagagagagagagatggcgtcgggctggggaattaccggaaacaaaggtcgctgctacgatttctggatggatttcagcgagtgcatgtctcgctgcctgagcccaaggactgtgcttttctccgcgaagactacctcgagtgcctccaccattccaaagagtttcaacgacgaaaccggatttacaaggaggagcag

SEQ ID NO: 32938 - DNA, 227 bp, Glycine max
  Clone ID: 700893445H1
gacggcgtgatcctcgagtctgagcacctgcatcgccaagcctacaacgatgcctttgttcacttcaacgttcgcttcccctcttcttcttctccgggcccactcaactgggacgttaaattctacgacaactccagcttttcattggtggaggcaaacccaaaatgcgatggtactttaaggaacacgggtggcctaagtccacgttgttcgagacgtatcccact

SEQ ID NO: 32939 - DNA, 232 bp, Glycine max
  Clone ID: 700893446H1
aatgaatctgatgcaggcggttcgctacgacgcctacgggggatgtcctgccggcctcaagcacgttgaagttgccgttcccagtccaaaggcaaatgaggttttaatcaaactggaagcagttagcattaccctattgattggaagattcagaagggtcttctccgtcctttatttctccccagaacctttccccacataccttgcacaaatgtggctggagaaatagttg

SEQ ID NO: 32940 - DNA, 236 bp, Glycine max
  unsure (1)..(236): unsure at all n locations
  Clone ID: 700893448H1
tattattcagattttagagactgaaaacatcatggccaacctcgacctcgacccattccagacaagcatcttaacactcgtcccaatagcactcctggtggcgttactatctcgtactcgtcgaagagcacccacccaccaggcccaaagggtttaccaatcataganaacatgttaatgatggagcagctaacccaccgcggcctcgccaacctggccaaacactacggcggcat

SEQ ID NO: 32941 - DNA, 230 bp, Glycine max
  Clone ID: 700893450H1
tttaccatcaactatcactgtaagtgattttaagacgtattttgatcagtttggtacaattactgatgttgtagttatgtatgatcataatacacagaggccaagaggttttggcttcatcacttatgatctgaagaagctgtggatagagttctttacaaaacttttcatgaactcaatggaaagatggttgaggtgaagagggcagttcccaaagaactttcccctgg

SEQ ID NO: 32942 - DNA, 233 bp, Glycine max
  Clone ID: 700893451H1
gaaacagtcagagcaataactgctgctattgaaaaggacttatgggctactggatctgtgaatgatgagtatcttaaagccttaaattctctatttagcaacttcccaagactgagagcaactgaaccagaacacttagcattccccattgggtacgttccttaaagacaggctctgaggctactcaggaagctgccttgaatgcacttttcctgcttaggcaagcttggtca

SEQ ID NO: 32943 - DNA, 230 bp, Glycine max
  Clone ID: 700893452H1
accgagcagccacacctcccgcagcagccatggttctcaaaactgaactatgccgattcagtggtgccaagatctacccaggaaagggcatcatatttgttcgtggtgattctcaggttttcctgtttcaaactcaaaatgtaagaggtatttccacaatcgcctgaagccttcaaagctcacctggactgcaatgtacagaaagcaacacaaaaaggacattgctcaag

SEQ ID NO: 32944 - DNA, 226 bp, Glycine max
  Clone ID: 700893453H1
aacacagcaaaggttggttacggctggctgaaaaagatgactcctgtaaacagtgcatttgcttggcagtcatacaatgaagaacctgcctcatccagtcaagctgattccattgcagcatatgcacttgggagcaggtcaacgtgacccgcgattcttcagattatttgtggtatatgacagatgtcaacgttaatgctaatgaaggatttctaaagaatggaca

SEQ ID NO: 32945 - DNA, 224 bp, Glycine max
  Clone ID: 700893454H1
gtttgttgttgtaactcgttcttcttcttttgttgttctgtgtttgtgtttgttttttctctcacctgaaaatgtcttgctgcggtggtaactgtggttgcggaagctcctgcaagtgcggcaacgctgcggaggctgcaagatgtacccagacttgagctacactgagtcaaccaccaccgagaccttggtcatgggagtggcacctgttaaggctcaatttg

SEQ ID NO: 32946 - DNA, 237 bp, Glycine max
  Clone ID: 700893415H1
ggagacgtacactggctttatacctgttggctaggctagcccagtgtgcttataattctgcaaaatctaaaaacaagtttcacctttgggggagtcattggagacatggagattcattgctgtttgcccttgctttgcacaggttatgtatgcctttgtaatgcgtcctgagagcttgccaaaatcctatcaagacttcattcaaaagaccgggccagttgcagagcctgtatacaa

SEQ ID NO: 32947 - DNA, 270 bp, Glycine max
  Clone ID: 700893378H1
caatggcggttcggctgcattcctagactactctctttttccgcaatttttcattggctgcgttcgttcgttcgttgcgtgctttagttgttactcttccgttacggcgatggagttggagcacccgaccgcgacgccgctcaactccgccatgacctacgacgaagcctccatgtagcgcagaagagcttcgtcaacgccttgcaggaacttaagaacctaaggcctcaactttattctgctgcagaatactgtgaaaaatcttatctc

SEQ ID NO: 32948 - DNA, 276 bp, Glycine max
  Clone ID: 700893379H1
ctcatatgtgcgccttctctgtgctatattcatctcagttcaaagtggctagtatagaagaaccataagcactgagggaaaaagtgattagtactttagccaacaaattaaaaatggctgtcaccaagatctacattgtgtattactccttatatggacatgtagacaccatggctagagaagtacacagaggggctgctacagttgaaggtgttgaagcaacactttggagggtactgagatgctttcggagctaatattgggatagttgaaggc

SEQ ID NO: 32949 - DNA, 276 bp, Glycine max
  Clone ID: 700893380H1
attgtttgttgttgtaactcgttcttcttcttttgttgttctgtgtttgtgtttgttttttctctcacctgaaaatgtcttgctgcggtggtaactgtggttgcggaagctcctgcaagtgcggcaacggctgcggaggctgcaagatgtacccagacttgagctacactgagtcaaccaccaccgagaccttggtcatgggagtggcacctgttaaggctcaatttgagggtgctgaaatgggtgtgcccgctgagaacgatggctgcaaatgtg

SEQ ID NO: 32950 - DNA, 107 bp, Glycine max
  Clone ID: 700893383H1
cctaaactcagtggtgattaggaatttgggtttttagggttccaatttttatattttgggaagtgggtgtaaccgtagtggagtggttctagggttttttgaggtgg

SEQ ID NO: 32951 - DNA, 103 bp, Glycine max
  Clone ID: 700893384H1
catactcagttcctctctgactgtgtgcacgcaaaccctaacctagttcttcttctgtctcggcacctctctcccctcccctgaaccctgttccatcctccaa

SEQ ID NO: 32952 - DNA, 259 bp, Glycine max
  Clone ID: 700893386H1
aagaaagattgcagggtgagcttggaggggtgtagagaaggtgtgaaggggcctatgactattgctgctgaggtttttgagttgacaccttccttggtggtggtggaggtcaagaaaaagggaggggataaggccgagtatgagaagttttgtaactctgagttgagacccgcgttggagaatttagggatggaggaatctgcttcttcttcttcttcttgtcatcaatctacacacactcaatctgaattccaacaac

SEQ ID NO: 32953 - DNA, 261 bp, Glycine max
  Clone ID: 700893387H1
gtcaaaaaggactacatgtgtctgtactgcaatgatcgatgttatccattcagcagcttggaagcagtcaggaaacatatggaggcaaaaagtcactgtaaagtgcattatggtgatggtgatgatgacgaggaggtagaattagatgaattctatgattatagcagcagttatgtggatgcatcaaggcaagcagcttgttgcatcttgtgatgcatctaacaatgtagaacttgttggtgggtctgagctcataatcac

SEQ ID NO: 32954 - DNA, 160 bp, Glycine max
  Clone ID: 700893388H1
cggatatacaacctgtgcagctagtggacctgggcattgcaagataaacaatggaggttgttggcatgaagctaggaatggacatgcatattctgcttgttcggatgatggaggggttaaatgcaagtgtcctgcaggctttaaaggtgatggtgtcaaa

SEQ ID NO: 32955 - DNA, 239 bp, Glycine max
  Clone ID: 700893389H1
tgtccaagagattaagatcagtttctttgggcgatcctggtttctatacagactcctttgctcttgtttgatgcttttattatagcccgggaatcattttgttgatttatgctaaagcaagtagccatgttccgcttaaaattctttcaatagaagatggtactggtttgaagtcattcagccatctcctttatcggaataagaaggtagattttattgaacagttcaatgaaaagcta

SEQ ID NO: 32956 - DNA, 265 bp, Glycine max
  Clone ID: 700893390H1
gttgaaacaagccaaattgaatctaggcaaaactataaatgaacttggggagatacagtcctctgttgaatctttgaataagaagatgaagaaggagaaactttttctggagaggacaacgcgaaaagctagcaacaaagtttgcagcagtatctgctcaagagagggtccaagagcaaacaagattagatccaccagcacctcatgtagagttcaattttggtaacactgcaaataatttcaattctgattctaggcagtgcaa

SEQ ID NO: 32957 - DNA, 250 bp, Glycine max
  Clone ID: 700893391H1
agatgatgaccctatattagagcaagcaatagggacggagattgagtggcatccaggaaagtgtttgacacataagattcttaagaagaagccaagtaaaggatcaaagaatgctaaacccatcacaaaaacagaaaaatgtgaaagtttcttcaactttttcaatcctccccaggtctcagaggatgatgatgatattgatgacgatgctgtcgaagagctcgagaatttgatggaacagattatgaca

SEQ ID NO: 32958 - DNA, 94 bp, Glycine max
  Clone ID: 700893392H1
actgcatcagttagtttcaaactgtaatgacctcaagacattgtcagttaacttgagtctgaaccaactatccactgggaacttccaggcatca

SEQ ID NO: 32959 - DNA, 259 bp, Glycine max
  Clone ID: 700893393H1
ttgatctcccctttatcctgttttttggttcccaacaagacaaagtcttcttcagcatctttgtggtgaaaaacaactcaaaggggattcaatttcagattccagttctgattcctgtgatcagtgccttacacaggtttaggtttggctttggcatcttacaagggacataaggccaaccatagtcttgatggttggttatggattgggatgtgaaagagtatgcttgggatacacgtcggttggaactggctaatgg

SEQ ID NO: 32960 - DNA, 236 bp, Glycine max
  Clone ID: 700893394H1
attatgataaccctagcaaacctatttacctgtatattaattcatctggaactctgaatgagaagaatgagaccgtgggatcagaaactgaggcatattccatagctgatatgatgtcttatgtcaaagcagatgtttatactgtgaattgtggcatggcatttggtcaagcagcaatgcttctgtcgcttggaacaaagggttatcgtgctgtacagccaaattcatctacaaaa

SEQ ID NO: 32961 - DNA, 225 bp, Glycine max
  Clone ID: 700893395H1
gcagatcttcgttaagacactcaccggcaagaccataaccctagaggttgaaagctccgacaccatcgataacgtcaaggccaagatccaggacaaggagggtatccccccggaccagcaacgtctcatcttcgccggaaagcagctcgaggacggacgcaccctcgccgactacaacatccagaaggaatcaagccttcacctcgtcctccgtctccgtggtgg

SEQ ID NO: 32962 - DNA, 276 bp, Glycine max
  unsure (1)..(276): unsure at all n locations
  Clone ID: 700893396H1
attggacatttatcatttttattttttaaagaaacatcttcttacaacaattaaaaattatttatttacctatatagtgttgagaattacacttcaaaaaaatatcgtacaaatataagagattccgccactcaatagtagcaaatagcaattaagacattcagatcttaacccctaagaaaagtatcgaaaaaagactcatagtccatcacccagcaagaaaaaagaaaatcgaagaggaagagcaaggacacaacacaaagaagcanaagaaga

SEQ ID NO: 32963 - DNA, 142 bp, Glycine max
  Clone ID: 700893401H1
ggctattgagatcctcaagctcatgtcctccactttcctggtcgccctttgccaagccattgacttgaggcatttggaggagaatttgaagaacacggtcaagaacgttgtgagtcaagttgctaagaggactctcaccaag

SEQ ID NO: 32964 - DNA, 240 bp, Glycine max
  Clone ID: 700893402H1
ataacacctaaagatggtgaatggatgtcttctactgacttcaagtttaagaggactgatctccatgcaaaagatgatcgtactagttataactggcaagatagagcatgggatctgctaaatcaggttattaacatgtaaaactgataatcataagcttttttaggtattggaaatcactcacacaaggagcagaatctcctccttattttgttcaggtgtctatggatgtcaacttct

SEQ ID NO: 32965 - DNA, 239 bp, Glycine max
  Clone ID: 700893403H1
gtaaaaagaagcattctctctctctcttatctcagtctcaataaactaatcaagtttaaagcaccacacacagcatatacacaaagaagctctctttcactatcaccactctccctttcgcttttcgtcctaaccaaaaagaagaagaagatctaataaaccaccaattcattcatcatttcaacaacgtgtgtgtgtgtgcgtgtgaattattatgggaggggtgacgtcctcgatgg

SEQ ID NO: 32966 - DNA, 238 bp, Glycine max
  Clone ID: 700893404H1
cacctttctatcttttccatcagagcattatttgataccctctctgcagcaacgcatttttcctcattctcttaaacactttctcttttctccttcgtttgatctgcattaaaattgcataaatatataaaaaatgagaagtttgtactcaagttagatttgcatgatgacaaggataagcagaaggccttgaaaacagtttcaactctttcaggaattgatgccatcgccatggata

SEQ ID NO: 32967 - DNA, 139 bp, Glycine max
  Clone ID: 700893405H1
ggcaactcccaaggcatcgtcgaaatggaccgagaacatttcctcaatagcagctcgcatcttcttccttctcatcatctttcagatccctcttttcagggtgacttgcagatctggcatgtgtacaacccctttcatg

SEQ ID NO: 32968 - DNA, 230 bp, Glycine max
  Clone ID: 700893408H1
attccacctcaaagcaacactagaacactctcttgaacattcatggatccagtgagcgtgtggggtaacacgcccttggcgacggtggatcccgagatccatgacctcatcgagaaggagaagcaccgccaagccgcggcatcgagctcatcgcctccgagaacttcacctccttcgcagtcatcgaggccctcggcaccgccctcaccaacaaatactccgagggcatg

SEQ ID NO: 32969 - DNA, 233 bp, Glycine max
  Clone ID: 700893409H1
cacgacggaagaaagcacggcgcagctcaaaaaaccaaatggaagcacaaagctctcagcatacacaagttattgagatcagtggtgattttcctgatggtggaaggaagatttgtggggaagcaccgtgtggtttgcagatgctggatccatctctaaggattctgaagaaagatcaacttctatgcgaaagcttttcatggcagtggtcctttgtgttattttcatgactg

SEQ ID NO: 32970 - DNA, 222 bp, Glycine max
  Clone ID: 700893410H1
aaaaaagccactctatacatctgctcgtttaaagaagggagaagttctttatctggagacacactcctgcagatatgagctctgttttactggagagaagatggtgaaggctataccagcaactcagatgcatacccagatacagagaagtctcaaaatcaccatcaccatcaccatcctgcaaatggtgacaaagctgattctgatgtcatggttgatgta

SEQ ID NO: 32971 - DNA, 233 bp, Glycine max
  Clone ID: 700893411H1
gttcttgtaggtactatttgaaagatgctgtccttgaagggggtattccatttaacaaagcatatggaatgacagcctttgaataccatggaacagatccaaggtttaacaaggttttcaacaaggggatggtgatcactccacaatcacaatgaagaaaattcttgagacctacactggctttgagggtcttaaatctctggttgatgttggtggaggaactggagccgtag

SEQ ID NO: 32972 - DNA, 234 bp, Glycine max
  Clone ID: 700893412H1
cacagagcgagagagaatcgtaacagaaacggtcactggaagttgtctctaccaccctctcagccatggcaacaattccccctagccgatcatcatcacacgcgtttgttgccatggcaaccttcacgactctttgttgtgcacggcggcggcgaaggagagcgtgtacgagatactccccaagtacgggctcccgagtggtctgttaccggataccgtcaccgactacaaact

SEQ ID NO: 32973 - DNA, 235 bp, Glycine max
  Clone ID: 700893414H1
tggtttctctgtgtttgctggtgttggagaacgaacccgagagggtaatgacttgtacagagaaatgattgagagtggtgtcattaagcttgatgataagcagagtgaaagcaagtgtgctcttgtgtatggtcaatgaatgagccccctggtgcccgtgcccgtgttggtcttactgggcttactgtggctgaacacttccgtgatgctgaagggcaagatgtgcttcttttcg

SEQ ID NO: 32974 - DNA, 268 bp, Glycine max
  Clone ID: 700893377H1
tcctttcatcaatggaagccctcagaacacctttgtcccaggactcattgatctggccatcaaaaggaatagtttgattggaggagatgactttaagagtggtcagaccaaaatgaaatcggtgttggtggatttcctagtaggggccggcatcaagccaacatctatagtgagttacaaccatttgggaaacaatgatggcatgaatctctcagcccctcaaaccttccgctcgaaggaaatttccaagagcaatgttgttgacgat

SEQ ID NO: 32975 - DNA, 271 bp, Glycine max
  Clone ID: 700893329H1
atttccttgatatcttagttatctaattacctcaattaatcccttaattgcaagcatcatggctgaggagaaacaccaccaccacttccaccaccacaagggcgatgatgtgcctggcgaggttgattataagaaggaggagaagcaccacaagcatcttgagcaccttggggaacttggtgctgcggctgccggtgcttatgccttgcatgagaagcatgaggccaagaaagacccagagcatgctcacaggcacaaggtagaagaggag

SEQ ID NO: 32976 - DNA, 283 bp, Glycine max
  Clone ID: 700893332H1
cgcgaagagaagagatcaattaagatggaatggaaggagcaggatgtgtcgctgggagcgatcaagttcccggagagacagccgattgggacggcggcgcagagccaagacgacggcaaggactaccaggagccggcgctggcgccactggttgacccgacggagtttacgtcatggtccttttacagagcacggatagcagagtttgtggccacttatctgtttctatgcatcactgtcttgaccgtcatgggagtcgccggggctaagtctaagtgcagta

SEQ ID NO: 32977 - DNA, 115 bp, Glycine max
  Clone ID: 700893335H1
aaacgatccaaactcttttttcatttgcagcatcaaaatgagtggtagcaacgatggtagcggcagctggagctctaggtttttgaaggtggctagtgcagctgccgctacaccc

SEQ ID NO: 32978 - DNA, 266 bp, Glycine max
  Clone ID: 700893339H1
gcttcttcttcttccttgccctctctcgctattgagcttttctttttaacacggaatatgagttacacaaaagggttttgaggctttctatcactctaaagctcttagctcattcacctcttgggtggtgtggtctattatgtaaattaccatttgtgcaattttttctcagatctatccaacttctcttttttatcctttattctgtttgcaaatcgccatcatcaccatttgatttgcaagaccataatttttctgctttggtt

SEQ ID NO: 32979 - DNA, 267 bp, Glycine max
  Clone ID: 700893342H1
agggtttgtagtgtagcaggaacaagcagcaatggcgccgaaggtaacacgcaaggttagcagaaaccccgaattgataaggggaattggaaagtactcgaggtcgcagatgtaccacaagaggggcatttgggctatcaaggccaaaaatggtggcgttttacctcgccacgaccctaaacccaaacctgaaacacccgctgaaaaaccacccaaattttaccctgctgatgatatcaagaagccccttgtcaacaagcacaaacc

SEQ ID NO: 32980 - DNA, 230 bp, Glycine max
  Clone ID: 700893343H1
gtagtattatttcatcgattctctcccttctctttctctctgcgacaccagatgatgcagacgacggcgaacgacaacgctgtcgttgcgccaatcgcggcgttgttgttggtggtgctactcgcggcgagtgtggtggtggaggctcaggagaactcggacgtgaagacgctggtgaagcacatgcacgggaagaagtactgcgacaaaggatgggaatgtaagggctg

SEQ ID NO: 32981 - DNA, 272 bp, Glycine max
  Clone ID: 700893345H1
gactagttctagaaaggctacaaattctcagtgctgatctcagcaatccagaaagttttattgcttccattgaagggtgtatgggagttttccatgttgctacaccagtcgactttgaattaagagaaccagaagaagtagtgaccaaaagatccattgaaggtgcacttggcattttgaaggcatgcctcaattccaagacagtgaagcgagttgtttacacctctagtgcctctgctgtcgataacaataaagaagaaattatggatgaa

SEQ ID NO: 32982 - DNA, 121 bp, Glycine max
  Clone ID: 700893347H1
actcgagccgaatcggctcgagtgcaatcctatcattgccaagaagtaccaaggtggtgctggtcctgacatgggtggtgatggtgctggggcagccgaggatgattatgctgctccttct

SEQ ID NO: 32983 - DNA, 283 bp, Glycine max
  Clone ID: 700893348H1
aactgctgtgccagtatggtacaatatggtgaagcaaaatcttgtaagcgaacaggtgttctctttttggctcaatggtgatccaaaagtgaaaaatggtggtgaactagtttttggaggtgttgatcctaaacacttcaaaggagaacatatctatgttccagttactaaaaagggttactggcagattgaaatgggagattttttcattggaggtctctcaacgggtgtttgtgagggtggctgtgctgctattgtggattcaggaacatctttgcttgct

SEQ ID NO: 32984 - DNA, 222 bp, Glycine max
  Clone ID: 700893351H1
ctcgagccgaggaaaggaaacaaaacgcacaaaggattattatagcaatggcagaacaaaaccaaaaccagacaactgaagctggaaggcaccaagaggttggccacaagagccttctccagagtgatgctctttaccagtatattctggagaccagtgtctacccaagagaacctgaatccatgaaagaactgagagagttgacagcaaagcacccatgga

SEQ ID NO: 32985 - DNA, 109 bp, Glycine max
  Clone ID: 700893352H1
gaaactttcctattcacatctgaatcagtgaacgaggggcaccctgacaagctctgtgaccagatctccgatgctgtgctcgatgcatgcttggatcaggaccctgaca

SEQ ID NO: 32986 - DNA, 268 bp, Glycine max
  Clone ID: 700893353H1
tactactattacttctactacgcaggcaaatagtgttatgtcctcttgtttgcagacgcataacctagatttgccagaaaacaatcccccacaagtcattgaggagccacaggctgctactgctactgctataagtgggagctgtggcagcagcagctcctgctcaactagcaatggtggtgctacttgtaatagtaacagtagtagtagtgtgtttgcgagtttgtttgcttcttcaacagcatctgtgaccctacaatctcaaaca

SEQ ID NO: 32987 - DNA, 128 bp, Glycine max
  Clone ID: 700893356H1
gctcggggttcggctcgagaacacggcacagacactgtgtttgtgaaactcgctctcacacacaagtcacagggacaacttgtgttgttccaatggcatcagcaacaccccttttgaaagatgagctc

SEQ ID NO: 32988 - DNA, 100 bp, Glycine max
  Clone ID: 700893357H1
cacataaatgcccaaattcttgctcaaacaaaattgagagtactatatatctgcctttacttgagatctgatcatatccttcagtaaagcagcaaagcag

SEQ ID NO: 32989 - DNA, 267 bp, Glycine max
  Clone ID: 700893358H1
caagaagcgaaccacaacagactgagtcttgtcgaccggttcacggagtcactgcactattattcaaccctattcgactcgctggagggttcgcctgtgaaccctaacgataaggccatgtcggaggtttacttagggaagcagatctgcaacgtggtggcgtgcgagggaatggaccgcgtggaaaggcacgagacgctgaaccagtggcggaaccggttcgtttcgaccggattttcttcggtacactggggttcgaacgcgtac

SEQ ID NO: 32990 - DNA, 264 bp, Glycine max
  Clone ID: 700893360H1
acaccctgagcttccttgggccgaagcccatccccatgaagcacgcgggcatgcctccgaagcccacgaagctttacagaggggtgagacagaggcactggggaagctgggtggctgagatcagacttcccaagaaccggaccaggctgtggctgggaaccttcgacaccgccgaggaagccgctctggcatacgacaaggccgcgtacaagctccgaggtgacttcgccaggctcaacttcccaaacctgcgacaccagggtt

SEQ ID NO: 32991 - DNA, 250 bp, Glycine max
  Clone ID: 700893361H1
tctcgagccgaatcggctcgagcggctcgagcagggagtctgatgatgatactaaggtccaatcccagacttttcctttaactggaaacacaggccaagatgtttctcaagattttcccccagaagctaaatccagacctactcagggtgacattctgattgatatcgaggacaggtttccccgtgattgcctttatgacatgttctccaaagcaataatttctgaagatccctcaagcattggtccatt

SEQ ID NO: 32992 - DNA, 267 bp, Glycine max
  Clone ID: 700893362H1
gaatcatccaaatgtaattattagggtaattgatagttatgtagataagggtgctcgtgacttgctggcagtggtctaaaggagtttattgcagtggtggccacacgagttacttggggatgaagctactatcgtcacttgactacaaaaattgttgggggtgtgtacatagcacgctgatagtttaagttgattgactagtatcagctatagagacatggagggcattttcaagggtcacgcttggatgtacagtatttgtacagg

SEQ ID NO: 32993 - DNA, 281 bp, Glycine max
  Clone ID: 700893364H1
cgactttccaacacgtccggaaaataaaataggacagaacatattgtataataataataataaaaaacaacagacaagtttgttgttcctgttctaatctctggaccatgtcatacaactgaatctaattgcaattcctgtgagccgtggcaaagcttttgaatttagtgcctctcctctctgtttacccttccagatattgcagatacagcaagatcatgagtgggacttcggaaaagaaacttgtaagaatcgatgttagttctgatactgtatgccca

SEQ ID NO: 32994 - DNA, 117 bp, Glycine max
  Clone ID: 700893365H1
gaggcactgtggcagaagtcctaggagtgtaaaacagagacgcaaaatgaagacgatcttgtcgtctgagaccatgtttattcccgacggcgtgagcatcaaggttcacgctaaggt

SEQ ID NO: 32995 - DNA, 109 bp, Glycine max
  Clone ID: 700893368H1
ggtgaacgtggtggaattgcagaaacagttgcagaggtggcagcagagtgggaatgtgaatgtgaatgtgaatgttgatgccaacggagaactcatgtatgtcaaggtc

SEQ ID NO: 32996 - DNA, 265 bp, Glycine max
  Clone ID: 700893369H1
tttagatctatccactcacctgcctcttcctcacccctttctccatctaacgagtaaggaaaaatggcgcgtaagaagatcagagagtatgactcaaagaggttgttgaaggagcactttaagagactttctggcaaggagttgccgatcaagtctgcacaaattactgcatcaactgatttcactgagctacaagagaaggaaccctggctttcatcttctaaattggttgtgaaactgacatgttatttggaaagcgtggcaa

SEQ ID NO: 32997 - DNA, 222 bp, Glycine max
  Clone ID: 700893370H1
ggaatgaactttatcatgatttacccagcaagcagctcaaggtcaaagctgctgacagaacggctgttgttacaacaaatgcagaaactgtggttgtgagccctccgggtctacaagaaggcataaatgaagaaactgctaaggaccctcaaggtcgatgctttgtgcgaccatctggcactgaagatgttgttcgtgtgtatgctgaggcatccacacagg

SEQ ID NO: 32998 - DNA, 273 bp, Glycine max
  Clone ID: 700893371H1
aattcggctcgatctactgtcgtgtgtcattctgtacctttttagctcttctttgaatgatagtgatgctggatatttcaattaagactctctaggtgaagattggacttcgagttcttactcgcccggtgcccaaccaattacctacggtttatcggactcttggagagagttatactgcaagggtttcaccttcaatcatacatgaaactttgaaagccgtggttgcccgttacaatgccagccagcttatttatcagcgagaggctgtta

SEQ ID NO: 32999 - DNA, 272 bp, Glycine max
  Clone ID: 700893327H1
cccactttcatttcattttcgttttctctctcttctttctttctctttaaacgccgaccaacgacgcgacacgacaccgtttcgatggtggtgaagatgatgcggtggaggctcgtggccccctctcgtctcgaagaagtacgaggttaagctcgtcgtgaaaaccctcactctccagagctgcgatctggtgcgtgcgtccgcagagaaaggcttcatgctccagattaagtggaagggtcccaagcttaccctaagctcgctgagacgca

SEQ ID NO: 33000 - DNA, 258 bp, Glycine max
  Clone ID: 700893372H1
gctcattgttgtcgaatgaaaagttccggccaaggcagtgcgtatgaggtgaagaagaagaagaatcaaatgggctaaggcagtcttctagaaaagattatttttcactggctttagtttacacgtgctcatttagttaggatgatcagtaaattagtgtttctttcaagtaggagaagaaatagtgaaagcatacagtctttgatattgagaagaaaaaaaaaagtgagacaattctggtgaaatgtgatgactaga

SEQ ID NO: 33001 - DNA, 217 bp, Glycine max
  Clone ID: 700893373H1
caaatattattattcaatagaaaagtaagatgagtccaacatgggtttttgtgttaggtgttgcagcaatgttggtggttgtgagtggacaatcatcagtgaagcctttggtgaagacagtgaaggggaagaaggtgtgtgacaaagggtgggagtgcaaaggttggtctgcatattgctgcaatgagactatctccgactacttccagacatacca

SEQ ID NO: 33002 - DNA, 259 bp, Glycine max
  Clone ID: 700893374H1
cttccctggcggcttccaccgcggctatgtcagaaatccttggaaaccccgttaacctcagatgcgcaaccaggtctgctccatcaccaactacacctgccaccttcaagaccgtcgcacttttctccaagaagaagccagctccacctccaaagaaaaagcctgccgctgtatcccccgccaatgaggaactcgccaagtggtatggtcctgacagaaggatcttcttgcctgagggtctcttggacggatctgagat

SEQ ID NO: 33003 - DNA, 230 bp, Glycine max
  Clone ID: 700893288H1
gatcaatgtgcgcaccgatcccaatgcgctggtggatctcaccgaggatgctgaggttcaggccgagtttttgtacacggttaagtggaaggagactaacacgccattcgagaagaggatggacaagtactcgcagtcttcatcgctgccgcatcatttggaaatccactggttctcgattatcaactcctgtgtgacggtgttgctcttgaccgggttcctcgccacca

SEQ ID NO: 33004 - DNA, 230 bp, Glycine max
  Clone ID: 700893289H1
atcgaatctctctctcttgtgccgcccatgcatgcaagttgttgcaacggcgcgttcttccatcttattgttggagcgatcatcaccctcatcaatccaaggaataatgatctttgtttttttgtgtttgggagtacaaaatgtttcgtacgtgaaacaaatatagataatatgatatgataccagaggctagctagctaaagaataaatgtttttactgtaatgtatgt

SEQ ID NO: 33005 - DNA, 231 bp, Glycine max
  Clone ID: 700893290H1
cactagctatagtaagctacacttatttgaggttggagaaatatggctacagatgttgaggttcaagagcaaggatgcgagtactctgcaaaagactaccatgaccctcctccagcacccttgttcgacccagaggagctcacagagtggtccttttatagagccctaatcgctgagttcatagcaacccttctcttcctttatgtcaccgtgctcaccattattggctag

SEQ ID NO: 33006 - DNA, 230 bp, Glycine max
  Clone ID: 700893292H1
gacactgaggaaattgttgatgcttaaattaagtttcaaattatataccttttcttttctgttttgtctctgcttatgatttgaattttagaataaatttttaaaaaaaaaaaaaaaaaaaaaaaaaaagaaaaaaaaaaaaaaaaaaagaaaaagaaaaaagtaaaaaaagaaaaaaaaaaaaaggaaaaaaaaaaataaagagaaaaaaaagggggggggggccatta

SEQ ID NO: 33007 - DNA, 234 bp, Glycine max
  Clone ID: 700893293H1
cgtacacggaaagaagcattgcacgctcttgatgcattgtcacaatcagatgaagctcttgcatccttgcatcatgccggggccatttcagtaattaggtctgcaccaaattcacttgaggatgcagaagttgagcgattcaagttgagcttgatgaaaaggtttcaagatctcagatacgatgatgtgtcatcatgagttgaggtgcatgcctatttgttttttttttttggg

SEQ ID NO: 33008 - DNA, 235 bp, Glycine max
  Clone ID: 700893294H1
atcagaattgccagaagggccgttgaacttgagaatcttccctatggtttgtctcaaaaacctgctgttctgaaggttagggattggtatgtggattctttccgtgatgtcagagccttccctgacatcaagaatgtgaatgatgaaagagagttcactgaaatgattaaggccatcaaagtgaggcacaacaatgtggtacccacaatggccatgggagttcagcaattgaaga

SEQ ID NO: 33009 - DNA, 239 bp, Glycine max
  unsure (1)..(239): unsure at all n locations
  Clone ID: 700893296H1
gtgagtgtcaccttggaaatccattcatagctcccactcttacatgcaattcatcttttataactagcactcctcattcaagggtgaccctccggaatccaaggctgagagtctttgccaagaagtctggatcattcccatcttttgggctaggcaagcccaaagatgattcttcttcttcaactgaagaaaaagatggctcatccaattccaanccctttcgtttggacttcggaaag

SEQ ID NO: 33010 - DNA, 134 bp, Glycine max
  Clone ID: 700893303H1
gcgaaccggctcgaggtcctggaaacctggctgaggttgatgaatcaatggaagaagatgatgttggcaagaacaaggggaacagtgaagctggcatgcaaaatgaaaaattatatgctgcagatggtatgctt

SEQ ID NO: 33011 - DNA, 224 bp, Glycine max
  Clone ID: 700893304H1
aataatatctgctagcattgctggcgatattgttcttgctgcagcatatgcacatgagctgccacgatatggtcttgaagtagggcttacaaattatgctgcagcttattgtactggtctcctgttggcccgaagagtcctcaaaacacttgaaatggatgaggagtacgaaggaaatgttgaggctactggagaggactattcagtggaacctgctgagagca

SEQ ID NO: 33012 - DNA, 117 bp, Glycine max
  Clone ID: 700893305H1
ttcaagcatagaatcaccaaccaaattatctggacatactgatcagggtttaatgaagaaatcaaaagggtttgatgggcttgcaatgtcaataggcaattgcaatgctgagagtgc

SEQ ID NO: 33013 - DNA, 270 bp, Glycine max
  Clone ID: 700893307H1
aatacacttatcacaaaattttttggtctgcacaggattaaaccttcaagtggtcaaaagtttcgctttgttgtaatgggaaatatgttctgcacagacttaaggatccatcggaggtttgatttaaaaggttcttcccttggaagatcatcagacaagatagaaattgatgagagtactacgctcaaagatttggatctgaactacagcttctacctggaaccatcttggcgagagtctttactaaagcagattgaaatagacagcaat

SEQ ID NO: 33014 - DNA, 267 bp, Glycine max
  Clone ID: 700893308H1
gagattttgaagggaaagggaagggaggacaattttttatttttaaattaagagagttatataatgtttataaaaataagcaaaagattagaggacattaagtttatgctaatctatcattatgtttcctttatattaaattaattatcaaattaaaagtcaggtagattgaaggttgttgaagttatatagggttttaggtattgtggaaagaatttagagaatacaaatcataaagcattaactcttaactaaatcatagtaaga

SEQ ID NO: 33015 - DNA, 120 bp, Glycine max
  Clone ID: 700893309H1
cggcccactgggccagaagcttgtcaagctcaagcatatgctattctagttagagaccaacgtacttggggctaatgtaggatctgctcaaggacctacaggtttcggcacatatctagg

SEQ ID NO: 33016 - DNA, 271 bp, Glycine max
  Clone ID: 700893310H1
ctattttcgtgtctacaagggcaatgaaaatagtcacaagaaggtttctttgatgggtgctgctcttcatcctttcttggcgacatcatacactaatgttctcaaggactattttgagaaaaatctgcttacaggtcaaaatttacttgctatcgaggagagatatgagaagatccttggcatgattcctgatgaatccattgcttctgaacttaggggaagatggcaagatagtaggcggtcttctagtgcaaaagaagacatcaatgtt

SEQ ID NO: 33017 - DNA, 223 bp, Glycine max
  Clone ID: 700893311H1
cggctcgagctcgagccgaatcggctcgagtttctttcttcttcttcttctcaccttcttcacgattccgacgacgatccaagtgatagacactagttgcgatggaacttgtagctgaatccgagcgaactctgtacccatacgtgactggatcctctgtagtcgctatcaaatacaaagatgggattctaatggccgctgacatgggaggttcgtatggatc

SEQ ID NO: 33018 - DNA, 274 bp, Glycine max
  Clone ID: 700893312H1
ggaatacatgctgtctgttcccgagcattatggacagatgaaattgaaagtatttgatcatgacacattttctgctgacgatataatgggagaagcagacattgatcttcagtctctgataacatctgctatggcatttggagatgctggaatgtttggtaatatgcagataggaaaatggttaaaatcagatgacaatgcccttattgaggatagcacagtcaatattgttgatggtaaggtcaaacaaatgatgtcactcaagctccaggat

SEQ ID NO: 33019 - DNA, 275 bp, Glycine max
  Clone ID: 700893313H1
agtcaagctactgccagtacagtaacatccccaaggcaagtggctgtcggccaaagcaagaggcacaggctgataaacgagatggaaactgagtcatacgctttgcagaggtcactgcaacgtggatcagcttctagcagtgaaaacaacagaattaaagttcatttgccgcagagggaatcaagaactggaagtggtgggggaagcagcactagggagcaacagcaggatgattcttccctgctcgcgcatcctggtgaacttgttgtatgcaa

SEQ ID NO: 33020 - DNA, 236 bp, Glycine max
  Clone ID: 700893315H1
gatgtacttaacaagatcagtgatttccgaaagcctgaagcaaatccacttgccaaattactagctactggtcttgtaaactatgatggagaaaaatggaacaagcacagaagattaattaatcctgcattcagtttagaaaaattgaagattatgttaccaatattcttcaaaagttgcaatgatctaattatcaagtgggagggaatgtggcctaatgatggaccatgtgaaat

SEQ ID NO: 33021 - DNA, 192 bp, Glycine max
  Clone ID: 700893316H1
ctcgagccgttgtgttattctttagtttttaaagtatattaattttcctttcttccatattatgaaattttgtttggtgcgctttcgcactggcttggaggggtgagtgagagttgtgtcgtgttgaggtttatgtaccgagaaactataggttcttccaaaggtatttgtgatatattctacagttttgtg

SEQ ID NO: 33022 - DNA, 120 bp, Glycine max
  Clone ID: 700893318H1
gtgttggagagctaaagcttcaagcagaaatggcccttagaaataatgataaaaactatatgtagtttcaaaacttcagaattatgtagtatgtattatgttgcactctggtgttttgtg

SEQ ID NO: 33023 - DNA, 116 bp, Glycine max
  Clone ID: 700893319H1
cacgccttcttctagctccatcaggccaaactactcttcaagttcaagcccaaaaagtgctgaagcagagtccaacacacaccaagagcaagagaaggagaagctttggatcaaaa

SEQ ID NO: 33024 - DNA, 271 bp, Glycine max
  Clone ID: 700893321H1
aacctcttggagcacagtgggctcatcctattccagtacctgagactggttgcgtacttgtggctaccgaaaagcttgatggtgttcgcacatttgaaagaactgttattctccttctcagatctggaactagacatcatcaaggaggaccttttggaattgtcatcaaccgtcctcttcacaaaaagatcaaacacatgaaacctacaaaccatgatctattaactaccttctctgattgttctctgcatttcggcggacctcttgaggc

SEQ ID NO: 33025 - DNA, 268 bp, Glycine max
  Clone ID: 700893322H1
ctcgagcgtgcggagagagaaattgagtttccgagataaccagttttctctttgattcatcaatggcaactgcgaggaccgtgaaggatgtttcgcctcacgatttcgtgaaggcttatgcttcctccctcaagcgttccggcaagatggagcttcctgagtggaccgatattgtaaaaacagcaaaatttaaggagttggctccatatgatcctgactggtactacattagggctgcctcaatggcaagaaagatctatttgagagg

SEQ ID NO: 33026 - DNA, 187 bp, Glycine max
  Clone ID: 700893323H1
attggacatgataagtgataaaacagagtttcgttgaatctgcactaaaaccctacgcacacatcttggtgtaagtccaatcgatatagcagctatgtctacgcttgaaattgaagctcgagatgtcatcacaattgtgcttcagttttgcaaagagaattcgttgcatcagacttttcagatgctg

SEQ ID NO: 33027 - DNA, 228 bp, Glycine max
  Clone ID: 700893324H1
ctttgtacctggctctgctgatcccagtgatagttggaatagctgcaaggttaatatgagcaactgctcgcctgatcaactaagtaaattgcaaggcttcaagagtgaattcgaaagggcattgagtgaggtaggagattctccatctaaaggaatgtttattgactcttgctatgcccactgccaaacagaaccacaggagacatggttaaagactgactctcaaaa

SEQ ID NO: 33028 - DNA, 270 bp, Glycine max
  Clone ID: 700893325H1
ctaaacctaaaccaaaatcacctgcgccagttgcttctctcacttctaaaatggaccgcagaagcctcctctgcctcgcaatcatcggcattgtcgtcgccgccgtcggaggtcagtctctcgcggcggctcccaccacttcctcggcatccccagccacagccccttctaaacctaaaccaaaatcacctgcgccagttgcttctccaacttcatctcctccagcttcatccccccaatgctgaaaccgcaacccctccggtttcgtct

SEQ ID NO: 33029 - DNA, 229 bp, Glycine max
  Clone ID: 700893287H1
ggattctgctgggagcacgaacctttcctcacacttggctgcaagagattacgccctcttgctcccaagcttcccaacacccaaactaatactatccctaccaccccttctgttcctttcgatctcaagagcttcatcaggcctgaaagtggccccagaaaacccgtttcctctgacgacagtaagaaggatccaccttcaccccaaggccaggttgaaacgcatccag

SEQ ID NO: 33030 - DNA, 238 bp, Glycine max
  Clone ID: 700893326H1
ggagaagaacacagaagaagttgttgagactccaacaccagaaactgtggtcactgagcaaaccaaggaggaaagtactgaggccccacgacctgcagcttcagaagacaagccctcggttgaagttcagactaaagaggtggcagaggaagttgtgtctgagaccatcacacaagagccaacagttgagaagcaagaagctgctgagggaacaaaagaaaatgccgatcctgctgag

SEQ ID NO: 33031 - DNA, 232 bp, Glycine max
  Clone ID: 700893251H1
gactgcggcaacttcttcgaccacatcgacgacctcctcgaattccccgacgacgccgccgccgctgacacctccgccgccgctcctgtccctccaccggcgaacttctggtccgccgagtccgactcgctccccgccaccgacacggtgttttccgacaactccgtgacggacctctcggccgagctctctgttccgtatgaagacattatgcaattggaatggctgtcca

SEQ ID NO: 33032 - DNA, 216 bp, Glycine max
  Clone ID: 700893253H1
agaagatggacttactggagttatgggcaattttcggacccggcgtcgccggcgctgtcttcggcgcagtatggtggatctggcttgacgcggtcgtctgaatcttggtcaccgttcccttccatcactaccttaccgtagttttcgcatctttagcggctttgatgctcaattgcgttagaccagaagacatcgattattctccatatgacgaag

SEQ ID NO: 33033 - DNA, 233 bp, Glycine max
  Clone ID: 700893255H1
cgttcttcttcttttgttgttctgtgtttgtgtttgttttttctctcacctgaaaatgtcttgctgcggtggtaactgtggttgcggaagctcctgcaagtgcggcaacggctgcggaggctgcaagatgtacccagacttgagctacactgagtcaaccaccaccgagaccttggtcatgggagtggcacctgttaaggctcaatttgagcgtgctgaaatgggtgtgcccg

SEQ ID NO: 33034 - DNA, 233 bp, Glycine max
  Clone ID: 700893256H1
ctgaagtatggttcgcttgttattgctacaggatgtacggcatcaaggtttccagagaaaattgggggaaacctacctggtgttcactatattcgggatgttggagatgccgatgcactaattttatcgttggagaaagcaaaaaaggttgtagttgttggaggtggttatataggaatggaggttgctgctgctgctgttggttggaaacttgatacaacaatcatattccc

SEQ ID NO: 33035 - DNA, 236 bp, Glycine max
  Clone ID: 700893257H1
cgaacacaccgatgttgctgtgcttctcgacaacgaggctcatctacgacatttgcaggagatctcttgacatcgaacgccctacctacaccaacctgaaccgtctcgtttcccaggtgatatcatccctcactgcctctttgaggtttgatggagcactgaatgttgatgtgactgagtttcaaaccaacttggttccttacccaaggatccatttcatgctttcctcgtatgcc

SEQ ID NO: 33036 - DNA, 234 bp, Glycine max
  Clone ID: 700893258H1
gtaaatgagtgttatggttgagctccctggtggatgcttaatcgggcattgccaaagtgcttcagaagtaattcttgccacttgttactcagttctcatctcatatggtgcggttgtaccactctttgacgaatcaactaaccttctacagtcttccaatattcaatttctaatcgctgagttcatagcaatacttctcttcctttatgtcatcgtgctcaccattattcgcta

SEQ ID NO: 33037 - DNA, 238 bp, Glycine max
  Clone ID: 700893259H1
tctcgagccgaatcggctcgagggctcgagatagaagggacatggacagctatggaagagtagctacaagttgggaatagcaaagtccattggcatatgcaattatggtatcaaaaaactcactaaactcttggaaatagccaccattcctcctgcagtcaatcaggtggaaatgaacccatcttggcagcaagggaaactcagggagttctgcaagcagaaaggaattcatgttagt

SEQ ID NO: 33038 - DNA, 237 bp, Glycine max
  Clone ID: 700893260H1
ccaacaccaatcttctccgccatgccaacgtcgacaccttcatcgtcttccgatccctcacccctctcctcgtcgccctcgccgacaccgtcttccgcagccagccctgcccctccaacctcaccttcctctccctcctcgtcatcctcgccggctccttctgctacgttgccaccgactccgccttcaccctcaccgcctactcctgggccttcgcctacctcatcaccatcacca

SEQ ID NO: 33039 - DNA, 240 bp, Glycine max
  Clone ID: 700893262H1
atcgaattttcctttcaactatatgatctcaagcagcagggttttattgaaagacaagaggtgaagcaaatggtagttgctactcttgctgaatctggcatgaacctatcagatgacgttatagaaagtataattgacaagaccttcgaggaagcagatacaaagcatgatggcaagattgacaaggaagagtggagaaaccttgttttgcgccatccgtcacttttgaagaacatgacc

SEQ ID NO: 33040 - DNA, 244 bp, Glycine max
  Clone ID: 700893264H1
tttcgtttctcagttttattcgaatccctctctcaatctcctttccaaatggccagcgttgaggttgcacagcaaacaccaacaacagttccagaaaatgaaacaaccgaggtaagcaagacccaggaaacaaccccagtcactgaggctcctgcaacagaacaaccagcagctgaggttcctgcaacagaacaaccagccgctgaggctcctgccccagaatcaaccaccgaagcaccacagg

SEQ ID NO: 33041 - DNA, 236 bp, Glycine max
  Clone ID: 700893266H1
gcggaggcgtatctaggttccaccataaagaatgcgatatgtcactgtgcctgcttacttcaacgactcacaacgtcaagccaccaaggacgctggtgtcatttctgggctcaacgtgatgcgaattatcaacgagcctaccgcggctgccattgcttatgggctcgacaaaaaggccactagctctggggagaagaatgttctcatctttgatctcggtggcgggacttttgatg

SEQ ID NO: 33042 - DNA, 230 bp, Glycine max
  Clone ID: 700893268H1
tttcactgcaggacctgatgaggttaagtgttggcaaattcgacgccaaacaaaggctccccaagctgcaggggctatccatactgattttgaaagaggatttatttgtgctgaggtgatgaagtttgaggatctaaaggaacttggtagtgagtcagctgtgaaggctgctggaaagtataaacaggaagggaaaacgtatgtggtccaagatggagacattatattct

SEQ ID NO: 33043 - DNA, 230 bp, Glycine max
  Clone ID: 700893269H1
caatcatcttttgtttgttcttcagtactttagtgtgtgatttaattccaagattttgagaatgtctagctgtgggtgtggaagtagctgcaactgtggcagcaactgcggttgcaacaagtactcttttgacttgagctatgttgagaagacaaccacagagactcttgttttgggtgttgggtctgtgaaggcccaattggagggtgctgaaatgggtgttgcagctg

SEQ ID NO: 33044 - DNA, 231 bp, Glycine max
  Clone ID: 700893270H1
catagacacatgtaaatggttgcaaaggaagataagataggtaccagctatcacatagtttatttaatccgttatatgccacctgatatataggcatattagctagttaggtaggtatagtagtttaagttaattcaaccatggaagacagggatcactgttgttccaacaattcaacgatgatcacaacaacaaagaaaagaacgggtagaagaagtccaacatcggata

SEQ ID NO: 33045 - DNA, 231 bp, Glycine max
  Clone ID: 700893271H1
aaaacggtgggattgagcctcgaatcttcaaaagttggagttgcagggattggtgtttgctcaagttaatgagagatggcatgaattcccgtatattgctggacgctgcaaaaagttgcatattggcttcttctcctgttttcagaaggcaacaattcttgataaggtgtgtgggaggctccactgatcaaagagacatgcaagcccttaggtctcttgaggttgactctc

SEQ ID NO: 33046 - DNA, 233 bp, Glycine max
  Clone ID: 700893273H1
atgctgtaaaattctcaaactcacagtttcagttcaatcacattttggtctaaagatccgtgccttgacccttggcagtttcagctttcaaaagggttggagtttttcttcctcataagccactgaatagtccaaatttttcttttttcttttttttcccctctctctctctctctctaaagttcaaagtttttgttgttttccccccgagtctttctctctcttgctgtgga

SEQ ID NO: 33047 - DNA, 235 bp, Glycine max
  Clone ID: 700893274H1
tcagttacttaattttgtattaaatataagagacaaaaatattgttttgagaaatattcatcacagaaaattaattggattagtgataaaaattaaattgtttatattaacaacattgaaattgctcttggtgcgctgaagtattcattttttatttttacttttgcccttcatgatgatgactatcagacaaaatttctcatttctctactattaatgtgacagtaaaatttaa

SEQ ID NO: 33048 - DNA, 229 bp, Glycine max
  Clone ID: 700893275H1
cttaagcttgctactgagtttccacactgcataccttaggtcttccgaattcgaagttaatttgcaagatggctaaggaaaaggctcagatcaacattgtggtggttggtcatgtggaccctgaggaggcaaccaccattaacgagctgaagaagcctgttgtggagaaagaagctccagggcatgccatatgagggcatgcacgtacggcctcggaggggaaccagaa

SEQ ID NO: 33049 - DNA, 234 bp, Glycine max
  Clone ID: 700893276H1
gaagatggtcacagaaacaaggggcttacacatcacagcacgaaatttcttaccttacataccggttgcgtgaaagacgcgccactcatccttttccgattgggcgagaggcatcagatcagagcagggtcccctgatatctacatattctcattattctgtccagaaactaactacactgacgtatttgttctcgtgtcaatttctaaatccagcagcacaccctctcttctc

SEQ ID NO: 33050 - DNA, 235 bp, Glycine max
  Clone ID: 700893277H1
aaagtttaaaccctacagaaaaacgctacataaaccccgcaacaaacaaccaacccccaaacccctcactcttctcggcgtccatcggaactttccaaggtaaaaagatgaatctgaagaacatgaagattccgaacgctccaggcggcggtgcgtcctctgcgctgctgaagcttgggcttcttggtggaattggtttatatgcagctgctaacagtctctacaacgttgaagg

SEQ ID NO: 33051 - DNA, 235 bp, Glycine max
  Clone ID: 700893278H1
taaagatggcagagacattcctatttacctcagagtcggtgaacgagggacaccctgacaagctctgcgaccaaatctccgatgctgtcctcgacgcttgcctcgagcaggacccagatagcaaagttgcctgcgaaacatgcaccacaaccaacttggtcatggtcttcggaggaatcacgaccaaggccaacgttgactacgagaagatagtgcgtgacacctgcagggacat

SEQ ID NO: 33052 - DNA, 240 bp, Glycine max
  Clone ID: 700893280H1
cccacgatagaattttcgttcgccggcgggtcacggtgaagctgcctccacagggtatactcttcgtggcgagtaccaagcaggtttgtttggcttttgccgcaaatggtgacgatagtgatgttactatatatgggaacgtacaacagagaacaatagaggttgtgtatgatgttggaggtgggagaattcggtttcgtgctagtgggtgcaagtgattaatgattaaacatgctttgg

SEQ ID NO: 33053 - DNA, 231 bp, Glycine max
  Clone ID: 700893281H1
attggctcagccttcaatataaagggggcaatgcagtgccccaattgtcgtaagactgaaaaaggtcattggctttatgctaatggtagccgctcatatccacaattcagcatagatgcatcgtcactcgatgaggatctctatgctgtgagctactctgagatgccctgtggagttcactgctgcccttgcggtaacttgacccggcttccttcatctttcgaggaaggg

SEQ ID NO: 33054 - DNA, 221 bp, Glycine max
  Clone ID: 700893283H1
ctcctcctacttagagccattagatcgaattcgatcatttcggatttgatctgatggttttggacttctaattagtctaaggtaatctaaattagagtcctctctctctctctctctcatttttttacatttctttattttgttgctgtactttttgtctcttggaaaagaattttaatttctatacactatattcaaagatggacaaggttacgaggttg

SEQ ID NO: 33055 - DNA, 229 bp, Glycine max
  Clone ID: 700893284H1
aaggaactgttgcatgtgagtcatcatcatcatttgactttgactcatcatgatcatgtgtacagaaaccttctgaaagatctcattattcagtgtttgcttagactgaaagaaccttctgtcttattgagatgtcggaaagatgacctgcacttggtagagcatgtgctggattcagctgcacaggagtatgctgagaaagttaatgttgatcccccagagatcattg

SEQ ID NO: 33056 - DNA, 240 bp, Glycine max
  Clone ID: 700893250H1
cttactctccttctctctctaaagggattcctttgtgctcttccaacttccaagacatgtcgattatatcacgcagaggcatctgttacatgccaagactagatgcagccacagtatctgctgctttgctagacataggccaaaatcgtgtcatagatgcttcacttagacttattcgagaaagagcacagcctaaggcataacttctgcgtgctttgggacgcgctatagcaacttcaa

SEQ ID NO: 33057 - DNA, 229 bp, Glycine max
  Clone ID: 700893285H1
gggagacttcaaggtgcactgaacagcccggcactggacattcgatctaatttcatgccacaattaaattacttcgaaaatgatgccagactacaattattgatgcaaagatctctcgcaccacagcaaaaccttagattttctgaaattgggaatactttttctcaacttggcgattcctatgctgtttcttcaaggttagatcaatcccaagtcagtaatctaggcc

SEQ ID NO: 33058 - DNA, 100 bp, Glycine max
  Clone ID: 700893286H1
ccataaaatagcagtttgacatggcgtgtgtaaaacgcaaacccaaaaactccttccaagaccaagccacaaaaaaaacctcacacaactcccatggagg

SEQ ID NO: 33059 - DNA, 236 bp, Glycine max
  Clone ID: 700893217H1
aaaagcacacccatggcacaagatattccacaaaaagatgcctccagaagcaattgatcttgcatcccggcttttgcaatactccccaagtctccgatgcactgcgcttgaagcatgtgcacatcctttctttgatgaacttcgataaccccatgctcgcctgccatatggtcgtccatttcctcctctatttaacttcaaacaggaattatctgaagtatctcgagtgcttgtta

SEQ ID NO: 33060 - DNA, 227 bp, Glycine max
  Clone ID: 700893218H1
ctcgtttccagcgttaacaaccgattgcgaccaactttacactttctgatgaaattagggtttaatgggccccactcgctcacgtgtcagaccacattgcttctcgtttccagcgtggaggacacccttttgcccaagattgagtttttgaagggcttggggttcactcacgaagaggtggctaacatggtcgtgatgtcacctgggttgttgactcttagtgtgga

SEQ ID NO: 33061 - DNA, 237 bp, Glycine max
  Clone ID: 700893219H1
ggggtgttcatggagataaatggtacttgtatagctgcttacaagactgtaaatattggtgctgtaatttaatacacgagactagcagttctttttcgatggttccttttgagtgaacaaaaccttgtacttctcatcagctttctttggagagatcttaaagacgacattgactgctatcaacaataaagtggatcaatcattaaaggcttacttcttcttcttcttcttcttctt

SEQ ID NO: 33062 - DNA, 237 bp, Glycine max
  Clone ID: 700893220H1
ttttgtgactaggtgcattgccatagcacctagtcttattgtttccatcattggtggttctcaaggggctggtcggcttatcatcatcgcatcgatgatactttcattcgagctcccattcgcattaattccactccttaagttcagcagcagcagtaccaagatgggacctcacaagagttctataattatcattgtcatctcttggatcctaggcttggtgatcattggtatcaa

SEQ ID NO: 33063 - DNA, 239 bp, Glycine max
  Clone ID: 700893221H1
ggtgggagcagccgcaagcaagaggtagcgaatcagattgagatggggtcgtttggtcggagaagcatgtccactgtggcgaaagcggtggaggacatcaccggcactggcaacaccaagatccgcaaatcttccagcgagctgctgcaccttcctcggcatccctcgccaatctcgttccgaaatcgctctcattctctccaagttcatcaaactctataatttcaagagtcccggca

SEQ ID NO: 33064 - DNA, 237 bp, Glycine max
  Clone ID: 700893222H1
actcaatcctgcatggaccccaatgtgatggaggctaaggtggtggtgagttcttgtggccatgatggaccctttggcgccactggggtgaagaggctcaagagcattgggttgattgatagtgtgccagggatgaaagcccttgacatgaacaaggcagaggatgccattgtgaagctcactagggaggttgtgcctggcatgattgttactgggatggaagttgctgagattgat

SEQ ID NO: 33065 - DNA, 208 bp, Glycine max
  Clone ID: 700893223H1
agtcgctgttgaacatgacgggtctgttacagttaagtgtcggagataaccctttcgacttaacgccctttcccaaagaggttgtgagtctcaagaatctcaattggttctacctatcgaactgcaccctcggatggaagcttccggtaggactcggcaacctcacggagctcaccgaattagaattctccgataacttccacacaac

SEQ ID NO: 33066 - DNA, 235 bp, Glycine max
  Clone ID: 700893224H1
cttggtttagagaactaccaactggggtattggaccctctttcgccagagcaggtgatgcaatcccagtcagaagaagaatgtgctcagcttgtgaggcttcttcctccaacagaagctgctttgctagattgggcaataaacttaatggcagatgttgctcaaatggaaaacttgaacaagatgaatgcacgcaatattgcaatggtttttgctccaaacatgactcaaatggc

SEQ ID NO: 33067 - DNA, 236 bp, Glycine max
  Clone ID: 700893227H1
cctcgagccgaatcggctcgagcggctcgagatagaagggacatggaccgctatggaagagtactacaagttgggaatagcaaagtccattggcatatgcaattatggtatcaaaaaactcactaaactcttggaaatagccaccattcctcctgcagtcaatcaggtggaaatgaacccatcttggcagcaagggaaactcagggagttctgcaagcagaaaggaattcatgtta

SEQ ID NO: 33068 - DNA, 241 bp, Glycine max
  Clone ID: 700893228H1
cgaaaattgaataaatgcttatacaccctctcttttttatcttcttatatctgaaagattatgaaaagatttttttctgttcctttgtcttcaaaacttctgaatcaaaagcaacctcatattttcaatccttaaagccatattatttttctgttcacctttgaattctttcattttcccacttttgttttcatccttttgtgtctgtggaaggaacctgtgtggttatgtgctcagaaac

SEQ ID NO: 33069 - DNA, 245 bp, Glycine max
  Clone ID: 700893230H1
gaaaaggaaaaaacagaagaacagtgttcgaagatggagaaaatgatgcgactgagaccattgttccgatcactgagttgcagatcttatcatttcgttcttcgtccttctcttctctctcgctctcccaatcctcttccttctccttcaccctcagaatgcaggtctcctctctcaatgggtttagggagtatgagattctatagtgaagatgtgacccacatgcccaatattaaggaccctgt

SEQ ID NO: 33070 - DNA, 248 bp, Glycine max
  Clone ID: 700893231H1
tataataacatctttctctctccgaacagatcacactatggccacctcaagcgccaaatcagtccatgatttcaccgttaaagatgccaagggaaatgatattaatcttggtgactacaaaggaaaggtccttatcattgtcaatgttgcctcacaatgtggcttgactaattcaaattacactgagctcagtcagttgtatgagaaatacaaacagaaaggtctggaaattctggcatttccatgca

SEQ ID NO: 33071 - DNA, 248 bp, Glycine max
  Clone ID: 700893232H1
ctcgctgacgtcacgtggttaagttgagaaacaacaacagagacacggtggtgtactcacggaatgaattggaatcggatcgtgtcgtagccaccgctcctacctggcgccgtctttcactttctgcttctcccatctcccactaaacaaccatggacctggatcctcgccaatacgaaaaccttgctgtaaatgataatgacatccacaacattgttctgtcatatcttatacataattgctacaaa

SEQ ID NO: 33072 - DNA, 238 bp, Glycine max
  Clone ID: 700893233H1
gtttgttgttgtaactcgttcttcttcttttgttgttctgtgtttgtgtctgttttttctctcacctgaaaatgtcttgctgcggtggtaactgtggttgcggaagctcctgcaagtgcggcaacggctgcggaggctgcaagatgtacccagacttgagctacactgagtcaaccaccaccgagaccttggtcatgggagtggcacctgttaaggctcaatttgagggtgctgaaat

SEQ ID NO: 33073 - DNA, 262 bp, Glycine max
  Clone ID: 700893234H1
cacgcgaacctactctcgacatcacctaccccttctctgttcattgctcaattgtttccaccacaactcataacctctttcccatttaacctttgaaaaaattccatactgtaacaacagctcaccatggctctatcacgtttgttccaccgcagcatcacaacacactctcacaaaacccttctccgccgccgccgcctcctcccgttcgatctccacctcggacacccccttaacaatcgagacctctgtccccttcacc

SEQ ID NO: 33074 - DNA, 235 bp, Glycine max
  Clone ID: 700893235H1
gtgttgtgagtcgccggcgttttccactcgaagcacacaccagccataatcgattacacaccgtgataagataagattgaaaagatgtttagggacgtgtcaagctgcaacacgtacaactacggcgaggctgggtattgggacgcgcgctacatccaagagggtggttccttcgattggtaccagcgttactctgctctcaggccttttgttcgcaatttcatccctctttctt

SEQ ID NO: 33075 - DNA, 227 bp, Glycine max
  Clone ID: 700893236H1
tctctccaatggccaaagacctcgaaacggagattcaaagtgggttgcctcacaaggactaccacgacccacccttcgccccattctacgaccccgccgagctccgaaagtggtccttcttccgagccctcatcgccgagttcgtcgccaccctcctcttcctctacgtcaccatcctcaccgtcatcggctacaaccaccagacagtcaccgccgccgagccctgc

SEQ ID NO: 33076 - DNA, 236 bp, Glycine max
  Clone ID: 700893237H1
tgtagttggagaacatcaaagtagtggagttcaagaactttaccacaagctcaggtcatcgtcatcagttaattattggggaagtgataactcaccagtgtttctaagcaacatggcttcttcatcctcttctttgtccaacattttggagtcatcttcattttctgggagtgaattcgggtgctggaatccaaccctttcctggtctgaccttcccactaccaatggagcatatc

SEQ ID NO: 33077 - DNA, 217 bp, Glycine max
  Clone ID: 700893238H1
agatgaaagccactgagtgcgattcaataattgcgcttaacctcggggactgttatatgattcggtaccggctggaccaggtcctggatagagatgagatgctttcggcttaagaaaacttcgttaaccggggaaaccaaacgcaggatcggcggcagctattggcataggaagtacgtcgaggaggttctctactactaagaataatctcatccac

SEQ ID NO: 33078 - DNA, 236 bp, Glycine max
  Clone ID: 700893239H1
cgcaacaaaaagaaagaatcccaggcgaggagaaagatggaggggaaggagcaggatgtgtcgtcgggagcgaacaagttccccgagagacagccgattgggacggcggcgcagagccaagacgacggcaaggactaccaggagccggcgccggcgccgctggttgacccgacggagtttacgtcatggtcgttttacagagcagggatagcagagtttgtggccacttttctgtt

SEQ ID NO: 33079 - DNA, 238 bp, Glycine max
  Clone ID: 700893241H1
tgaagctgcggcttatataagaaaacacgtgataaaattcttcttcgaagatgtcagtttcccacagacatccgaagtcgataatgtatttttggaagaggtagaggattccctcagaaaggcatttcttttcgctgattcagctttggccgatgattgcagcgtgaatagttcatcagtcactacggcccttactgctttgatatttggaaggtatatccatattcatatttcacat

SEQ ID NO: 33080 - DNA, 237 bp, Glycine max
  Clone ID: 700893242H1
tttactacggattagttgttgaaggccaaccttgggtgaatgtgaaagctgcagttaagaaggattatccatcagtgcagtatacatcatggacggtctggcctgttgtggggtggataaatcacaaattcatgcctcttcatttccgtgttgttttccaaagcttagtagcatttttctggggagtattcttgaaccttcgagcacgatctatggcattgattaaagcctgaagca

SEQ ID NO: 33081 - DNA, 135 bp, Glycine max
  Clone ID: 700893244H1
agaatttattagggaccttcaccatgactatgtgaggatttttgttggggaggaagtggaattcagcaatacactttttttttcacacatcagggtaaaattttatacaaaactcgctaaataacgagtttcatt

SEQ ID NO: 33082 - DNA, 242 bp, Glycine max
  Clone ID: 700893246H1
agcaaggataaagagaagggttagaaggcgaagaagcatggcttcactcaagaagaagaaaccctattacccgcttccgttaattcctatctattactatttcttattcaaagggtgatatgatcttcttcttccaagagtctcatgcatgctactttcttctctcttctcggggaattgaagcgttgtggtccgattgtttgctagatcaagcaaattaacctgtatactggtttatatat

SEQ ID NO: 33083 - DNA, 234 bp, Glycine max
  Clone ID: 700893216H1
ctcggtgtcatgtgcagcagtggtatgtgatcgcgacgttgtgctagtactcggagatctagagaaagaggcatacagatggacggggtgcagacgaccactcattagaccgattttggtgacaccgaaacaacacattgatgggaccaagcgggtctcgactagagcgaagcatcacgacaagggtaaggggcatgagatgtcaattgagtgcatgagcaatgggaattataa

SEQ ID NO: 33084 - DNA, 244 bp, Glycine max
  Clone ID: 700893247H1
cagaattcctgttctatgcctccttttgcacagaaactactaatttaccactcattgccataaactcccatgtgttgctgttccctttctctttccccttacctttcacctgtgtgtgatgatgtagatagagaataaaaagagaccagtgtgcagtgagaaagaggttggtcacttcttgtgtggctttgttttgttctttgtgttggaatttgttgatgggtgaagagggagaagaggtgtc

SEQ ID NO: 33085 - DNA, 237 bp, Glycine max
  Clone ID: 700893249H1
acaagattggaggtattggaactgtgccagtgggacgtgttgagaccggtgtcttgaagcctggaatggtggtgacttttgcaccaactggactgacaactgaagtcaagtctgtggagatgcaccatgaatctcttacagaggcacatcctggtgacaatgtgggattcaatgttaagaatgttgctgttaaggatttgaagcgtggttatgttgcctcaaactcaaaggatgacc

SEQ ID NO: 33086 - DNA, 238 bp, Glycine max
  Clone ID: 700893178H1
tgggaattgaagcatggaaaagtgcccgggacagtacaggtttgacccctaacgaccatgcttgccttaggggctattactcttacattcaactagtccagaacaagaccaacaaaaaaggtgaaagacaacatttggttgatatccctggaactgttgtagatagtaacacaacgcagaagcaatcagatggaaataggacatgtagagttccaagcttaaagactgagaagattga

SEQ ID NO: 33087 - DNA, 241 bp, Glycine max
  Clone ID: 700893179H1
cagaagacttgtaaaattaagtgtgtaggacaatggcactaccaaatgttggtcaatgcctagttgaccaacaaggaagatcagtgccaaattataaggttttcttgccttcctatcagtgagaataaatttgtgaatgtgtgttagctcctcgctaacacatatcttatagtggtttaatttatatggatgagtgttagctcctcactaacacatcttgtagtggtttaataaatctgtg

SEQ ID NO: 33088 - DNA, 91 bp, Glycine max
  Clone ID: 700893180H1
gtcattctctgcctcgtctctcgagtctcttaaccaggaaagaaccttgtactattagtagtggtgaattactgcgatggcaatagactgc

SEQ ID NO: 33089 - DNA, 249 bp, Glycine max
  Clone ID: 700893181H1
cttcagaagaaaaaagagtcacttgaaggttcaatgggcgaggaagagaaaaaattagaagacagcaaagaggagaacaaaaaagcagaggaaccaaagaaggaagaagagaagaaagaggagagaaaaactgaggaatcaaaagatgacaaagaatctaaggaggaagttgcgccgtcagaaatcgtgcttaaagtgatcatgcattgtggaaggtgtgctcgcaaggctcgtcgctccctcaaagga

SEQ ID NO: 33090 - DNA, 240 bp, Glycine max
  Clone ID: 700893182H1
ttatttttcaacattttaactttcactctcttcagagacatgatgacagcatgcaaatgcatcaaacaactaataaattgatgaagctttaggtcacattttcagtttcactctctcttcttccatggaattgtaagattttaggacaagagcttccacgtttatcagaaaacgatctcaaaatggggaaatcaccaggaaaatggatcaagaccgtactatttgggaaaaagtcatcca

SEQ ID NO: 33091 - DNA, 245 bp, Glycine max
  Clone ID: 700893183H1
ggatttgaagctggtggccctaacactccttcaaatattgacccttggtcaattattggaaatgaatcattgataaatattgaaactgatcgcacctcttgctttgaccgtaacaaggttgcactccgattggaggtgttatgtgacagccaaggtgacaacatctgccccgctgattgtgttggtgtctataaccctggtttctggggcatgcatattgagcaacggcagtgatacacagtggt

SEQ ID NO: 33092 - DNA, 238 bp, Glycine max
  Clone ID: 700893184H1
gggctaccttaatttcatgggcaatgagtttggccatccagagtggattgatttcccaagagaaggcaatggatggagttatgagaagtgcaggcgtcagtggaatctggtggatacagatcacttgagatataagttcatgaatgcatttgacagagcaatctccttgcttgatgataaattcgcattccttgcatcaacaaaacagattgtgaacagtgcagatgatgatcacaag

SEQ ID NO: 33093 - DNA, 232 bp, Glycine max
  Clone ID: 700893185H1
gacgcttaaaagaatgaataaattgattggcactactagatatcggaatgtgatggacatgaatgcaggccttggaggatttgcagctgcacttgaatcacaaaagtcttgggtgatgaatgttgtgccgtcaattgctgagaacactttgggtgttgtctatgagagaggtctgatcggcatttatcatgactggtgtgaaggcttttccacatacccaaggacatatgat

SEQ ID NO: 33094 - DNA, 233 bp, Glycine max
  Clone ID: 700893186H1
gaaaattgccaaagtttatatatgatgaagaaaaggctttagagaaaacccggaaagtactggctgagaagattgaacaactgaatgctgccatagatgatgtttctgctcagctaaggtcagaggaggcctcaaatggagtagctgtgaactctgatgaaattgaagctgccacatgagactgctgcagtgatgtcatggtacacaatcggctattactctgtccagtaaaa

SEQ ID NO: 33095 - DNA, 231 bp, Glycine max
  Clone ID: 700893187H1
agcggccttctgctaaagaattgatagagaatccaattttttgtaggattcaaaaaacagcaagttgataaaccacgatttattgtgtttcggttggaccatatacgaccggtcttgattatgtcatggccaattttgtgaaatatcttttcggatatgtatgcaccaaatttatctcgagtatggtgcaaatattgtaaatttaacggtccaattatgcattgtattgta

SEQ ID NO: 33096 - DNA, 235 bp, Glycine max
  Clone ID: 700893188H1
ctatgagcaaccttcactgttgctagaagaagctggtgctgttgtgtcagtcttgcttggttttgctcctccttccacccttccagctgccagctcatccaagttgaatgatgttctgattcctaacccattcaagaggcctcgtgctgtgtttttgctggaagtgaatggaatcaatggtcttggaaatattgtccaggataatccaatgttcagcaattcattttggagtaca

SEQ ID NO: 33097 - DNA, 233 bp, Glycine max
  Clone ID: 700893189H1
gaaagctgaaaatcgacgcgtggtttggttctcggaaaacatccgccgccattcgcaccgccttgagccacgtggagaatcttatcaccggcgtcaccaagggctaccgctacaaaatgatgttcgtttattcccatttacccatcaacgcaagcatcggcaacagcaacaagtctattgagatccgaaatttccttggcgagaagaaggtgaggaaagtcgacatgcttgat

SEQ ID NO: 33098 - DNA, 233 bp, Glycine max
  Clone ID: 700893190H1
aacaacatttgcggttctgcctgcaaattttcttcccctcaatcgtatattgctcaggtggtgttcctgttcccccccaagcacccctgagattcgttcgcaaaaagcttaataagaacaaaaaataaaaataatattcttcgttattatttcatttcaatttcgttttcgttttcgttttctgttttgatttgatcttccaatggcgtccgatggctttaccgacaagaaca

SEQ ID NO: 33099 - DNA, 234 bp, Glycine max
  Clone ID: 700893191H1
gtgagatttgcgaatctgagaaatggcggattcttctcgggaggagaacgtttacatggcgaaattggcggagaggccgagcgttacgaggagatggttgagttcatggagaaggttgcaaagactgtggaggttgaggagttgacggtggaggagaggaatctcctctctgtggcttacaagaacgtgattggtgcgaggagggcttcgtggaggatcatatcctccattgag

SEQ ID NO: 33100 - DNA, 236 bp, Glycine max
  Clone ID: 700893194H1
tctctctctctctccctccctcttctcttacaattcaattcaatccattttgaagaaatgatgattagttgagagtgtacaaatctctactgatagtgcatgaaaattgatctctctctctctcttgctgatttctttacagaacttggaaaataatttctttaaaactgaactttttcaaatttgtatttaattttgatttgattattcatgcgactgattagtttagattaact

SEQ ID NO: 33101 - DNA, 236 bp, Glycine max
  Clone ID: 700893196H1
cttcgcaggatgatctgaagaaggcttacaagaaagccgccattaagaatcaccccgacaagggcggtgatcccgagaagtttaaagagctggcgcaagcttatgaggttctgagtgaccctgagaagcgtgagatatatgatcagtatggtgaagatgcgcttaaggaaggaatgggtggtggcggtggccatgatccatttgatatcttttcatctttctttggcggtgggagt

SEQ ID NO: 33102 - DNA, 231 bp, Glycine max
  Clone ID: 700893202H1
ctcgcttactgttggatcgttgagtcgctgtctagattcttggcgcttccttctgggagctcaccaccggttccgtcatgtacccgtgtatagtctcatctcgatcacgtacagttcttggttgtacatacctcctcagctcgccatttatgctgcgacgaaactagaaggtctaaagcagtggttcccgcgagactcatctgcaccaatatcctatgcaactttctcatg

SEQ ID NO: 33103 - DNA, 246 bp, Glycine max
  Clone ID: 700893203H1
cggctcgaggagcaccatcacattcactgccatcttcactagaaaacaatgtcaagtgtttcttttcttttggccttgttcatggtagtagctttgtctatctttccttccatagtgggtgcaataggtgagcaccggctaaggtgggtgcctgagacaacaacaccatgccaaagctccatagaagagtgcatggcagaaggtgagtttggaatggattcagagtcccaccggcgcattctagcg

SEQ ID NO: 33104 - DNA, 240 bp, Glycine max
  Clone ID: 700893204H1
ctcggagtattatgtggcagtggtttgtgatgaagaggttgtgctgcttctcggtgatctaaagaaagaggcatacagaaggacggggtgcagaccagcactcattgaccccattttggtttcaaagaaagaacacatttttgggaagaagaagttctccactagagccaagtttcacgagaagggtaggtggcatgagatttcaattgagtgcaagaacaaggggaattataatgtgga

SEQ ID NO: 33105 - DNA, 239 bp, Glycine max
  Clone ID: 700893205H1
gcctctgacaaccaacccatcactcgcagcattaaagaccaacacattgaggtttcaatggctaaatacatagtgaagcagtacgtggcggcggtgggaggagagcgtgctttgaatagtgtggacagcatgtatgctatggggcaggtgaagatggcaacatcagagttttcagcaggggaagggagtgtgaatagtaagaaggtgaagaacttgcagatgaagggagaggtgggggg

SEQ ID NO: 33106 - DNA, 241 bp, Glycine max
  Clone ID: 700893207H1
cttccaggggataaaatattgggtttagcaaattttttcctgggaattggaatcccaggagatgccaaggacttcttcaatcaagttgaatcattagctcttctagagaacaacatggtttcgatcccattggtactgtcacttcctgcaacggtttattcattatccaaaaaagatcagctcaaggttagggtgaacactgtacttggttcagctgcaccacctttaacagttaagcttg

SEQ ID NO: 33107 - DNA, 238 bp, Glycine max
  Clone ID: 700893208H1
cggcgaacgaaacgctgtcgttgcgccaatcgcggcgttgttgttggtggtgctactcgcggcgagtgtggtggtggaggctcaggagaactcggacgtgaagacgctggtgaagcacatgcacgggaagaagtactgcgacaaaggatgggaatgtaagggctggtcaatttactgttgtaacctcactattactgattatttccagacctaccagttcgagaatctcttctccaag

SEQ ID NO: 33108 - DNA, 240 bp, Glycine max
  Clone ID: 700893210H1
ccgtaaccacagcgccactcgaacaagtgcggccattcccaacgcttctcttcctttctaaggggagtctgaatcccgtgagttttcaatatgacgtcgttcttgaagcctgagaatgctctgaaaacggcggaagaattactcaatgttgggcataagcaggatgctttgcagactctccatgatctcatcacctcaaagcgatacagagcgtggcagaagacacttgaaaggattatg

SEQ ID NO: 33109 - DNA, 240 bp, Glycine max
  Clone ID: 700893211H1
agaacagtttgtacactctcttggattaagttttaatccttacgttgctcagattgaaactcatgactacatggcaaagctttttcattcgctcatccagttcaataatatattaatcgattttgatagagatgtgtggggctatatatctttgggttactttaagcagaccactaaggctggggagattgggtcatcaactatgcctcacaaagtgaatcctattgattttgagaacag

SEQ ID NO: 33110 - DNA, 242 bp, Glycine max
  Clone ID: 700893212H1
gttatgctgatcttgtggaagagttatctcgtgcggatgggaagattgtgaagattactagtagtatggagatggggctgaccaccacagtgcttgtacgtgggtctaatcagcttgtgctcgatgacgctgaacggagtatgcacgatgctatgtgtgtagttaggtgtttggttgccaagaggaacatcattgccggcggtggtgcccctgagattgagctctccaggcagctgggtgcc

SEQ ID NO: 33111 - DNA, 242 bp, Glycine max
  Clone ID: 700893214H1
agggagcttgtgccaacttgggcaatcgatcactcgccgtcttgcccatggagataagaaggctgttgctcgccgatgttttgcctcagaagctgagctgaaaaagacagtgtttcatgacttccatgttgctcatggtgggaagatggtcccatttgctggatggagcatgccaatccaatacaaggactctttcctggactctaccatcaactgtaggcagaatggtagcctttttgatg

SEQ ID NO: 33112 - DNA, 134 bp, Glycine max
  Clone ID: 700893215H1
ataaaaaaaaaagaaaaagaattggcagaagggcagttaaatgtaaaaatctccctgtggtttgtctcaaaaacctgctgttctgaaggttagggattggtatgtggattctttccgtgatgtcagcgccttcc

SEQ ID NO: 33113 - DNA, 237 bp, Glycine max
  Clone ID: 700893177H1
ctcttctccacttctcaatccacacaaacttcaaaacctacacctcttctctctgtttctcttcactctctctctccctccctcttcaactaacatggcaattcaaaaccaagacaccgctgtcagagaaatcaagcccaagaacaggagaatcatgggtgctggagggcctgatgatgaggacaataggtggccaccgtggttgaagccactgctgaaagagagcttctttgttca

SEQ ID NO: 33114 - DNA, 246 bp, Glycine max
  Clone ID: 700893131H1
cagaaagcaagaaagaaaatgggagtggagaagcagttgttgaggcctggcaccggtcccaagccaattcccggtcagaacgtcaccgttcactgcactggtttcgggaagaacggtgacctttctcagaaattctggagcaccaaggatcctggccaggaccctttcactttcaaaatcggccaaggttctgttatcaaaggatgggatgaaggtgtgcttggcatgcaaattggtgaagttgct

SEQ ID NO: 33115 - DNA, 247 bp, Glycine max
  Clone ID: 700893133H1
gcagagagtgcggtaggctcttccgagacccgaagcagccatggggatcgatctcaaggccggaggtaagagcaaaaagaccaaaagaacagcacccaagtccaatgatatctatctcaagctcttggtcaaggtttatcgcttccttgttcggagaactggcagcaacttcaatgctgttatacttaagagattgttcatgagcaaggttaacaaacccccattgtctttgtcaaggttgattaag

SEQ ID NO: 33116 - DNA, 236 bp, Glycine max
  Clone ID: 700893135H1
atcccaatccactgccattgaaacatcagattctccagtgaattcatctagagtccttagggatgatgtgtctcaaagcttcgacagtggatccatcggagagtgttctcttccagctccatatgaatcatcaggcaaaattttatcagattctatctctaatggacaaggtgctgtaccactggaggctggattgactctgtcaaagtccatggtgcctgggatttcaagcgaaa

SEQ ID NO: 33117 - DNA, 96 bp, Glycine max
  Clone ID: 700893137H1
gaaaattcattcattgagtggaatccatgtattcgtttccttcgtactccgtgtttacgtcgttcgtgtctggaaagtggggaaaaaagataacac

SEQ ID NO: 33118 - DNA, 240 bp, Glycine max
  Clone ID: 700893138H1
caaatacatggatttctctgaagtctttccaatttattccctgcacgagcttctttatatagtaggattgtgtcttccttcatcacactaaacaagttaaaagaagagcatcactgaactaacttagcaaccctatgtcgaaggtggtttgtgtcaccggagccagcggcgccatcggatcatgggtggtcctactcctcctccagcgtggttacaccgtccatgccaccgtccaagata

SEQ ID NO: 33119 - DNA, 238 bp, Glycine max
  Clone ID: 700893139H1
agcaaattcagaagcatctgaaagagggactggctatggacatatcacctgaagatcactatatgttgaaacttacgaatgtgaaatgcttgggtttacagtgggcagaactagccaaaaaggtggcaactgattctggggcactcagcctggataaagacaaaaacattatggtggtaggtgaaaacttgcccgttgacatgaacgaggaactaaggatattaagggcacgatgcat

SEQ ID NO: 33120 - DNA, 241 bp, Glycine max
  Clone ID: 700893140H1
gaaagagagtgtttgggagtctgatttgtataacaagtgctgcgacggtggttataaatcggggatgaacgcatttgacataatatcgatgtcgtcggggttggatttgcgagggttgttcgaaacgacgtcggagaaggggagaaggagggagaagaggttcacttcggataaaaaagtggaaacagtggaagcgaaggtgaaggaagttggagagaaattagggtttaggattgagata

SEQ ID NO: 33121 - DNA, 241 bp, Glycine max
  Clone ID: 700893141H1
gatttgcctggattcacacgcatgttataagagtaatcatgctttggtatcaccagaaagtcatgtatatggcccattgcctgattggatcgacacgtcaggcgcatatttaatttcaccagaaatgggttcacactttgtaatgtacctagctaagttgaaagaaaaatcaaaatcaggactacccctgcctggtgtggagagatttatctttgtgctccaaggtgctgtcaccctcact

SEQ ID NO: 33122 - DNA, 241 bp, Glycine max
  Clone ID: 700893145H1
cacagaccatgaatcagattcttggggccaataatgagcagcgtggcatgcctgatttacattctctaagggaggtgatgcaaaacccagagtatctacgcctgttctcctcacctgagacactgcagcaactcttgtcttaccagcaaactcttctatctcaacttggtcatcaacaatcagcacatgaaccaggtcatacaggtagacgcactggaccattgaacaacatggggctgga

SEQ ID NO: 33123 - DNA, 236 bp, Glycine max
  Clone ID: 700893152H1
atggctgggaaataaagtttgtactaatgctgaaatagatagcattgcactttggcacttcggttggagaaaaatgcaggatatggggtttcaatttgttgaccaacatgattatactgtagctttttatggagattaaaggtcacagattgatcactttgaagtgatggagatggtagtgggggggctttgctgtaaatgaggacacttttttatctctctctcaagtgttgcac

SEQ ID NO: 33124 - DNA, 214 bp, Glycine max
  Clone ID: 700893153H1
cggagacctctcttcaggtcaccatctagactgcagtcatggctgatggaccaacgcatccaacagttgttcagatgctagctggacagtcttacctggtgtccaggcttagccccaactgtaactctaggaattatgctgcaactggaactgacttcaatggcggaatgtactcgcctgggttagctgatgtgtcacctgtatctccagttac

SEQ ID NO: 33125 - DNA, 239 bp, Glycine max
  Clone ID: 700893156H1
cttggaggcttccaagaaaaaggatccgatcctcaacgcttgtctaatactcatgttatcgtagatgacaccggaaaaattataagctcttatagtaagatacacctgtttgatgtagatgttccgggtggaagggtatacaaagaaagtagttttacagaatcaggcaaggatattgttgcagtagacagtcctgttgggcgtttgggcctcagtgtttgctatgatttgagatttcc

SEQ ID NO: 33126 - DNA, 240 bp, Glycine max
  Clone ID: 700893157H1
attccacaagaactctccaaggatcctccttcccacgagattctttggtgggaaaaatccaagaggtttgaaatttgaaggcagggaagatggattatttcaatgcaccaggaagaaaccatctctttgttccagggccgagttaacattccggaccagatcatccgggccatgaacagaaacaatgaggactaccgttctccagcaattccagctatgacaaaatctttgcttgaggat

SEQ ID NO: 33127 - DNA, 157 bp, Glycine max
  Clone ID: 700893158H1
gagagatcggatacaaagagatcgagcaatggcattagtgtcttcactttctcctgcgaccccttcttcggttcaaaccaacactttgaacccattgggttggactgatgatcagatcctggagaaggtttacattacccacgtccacacaacataa

SEQ ID NO: 33128 - DNA, 240 bp, Glycine max
  Clone ID: 700893159H1
cctcaggccccctaaggtagagaatcttgttcaatgtcctagggtcatccacagccctgatggtgtaggttccaatgtcctcttcctcaggccccctaagaacatttactcgttcaacgagcttgtggccttgtgggagaacaagattggcaagaccctcgaaaaaatttatgtaccagaggagaaggttctcaaggacatcgaagaggcacctcttccaatcaatgtggtattagcaat

SEQ ID NO: 33129 - DNA, 240 bp, Glycine max
  Clone ID: 700893160H1
cgaacttgttagcaacactgggggatctggagagggactccttcgtggctcttctttcgaagctgatcgctgaatcgaagtacgtccagaacaacccgccggtgctcattccccaagaggacagagtcgtgaagcacgtcttggacgttctgttaccgttcagcaccaccaccggcggtggacccttgctcgtaaaccacgtcacctaccacgtctgcagagggaacctcatcgtggagt

SEQ ID NO: 33130 - DNA, 237 bp, Glycine max
  Clone ID: 700893161H1
gcaaccccgatttcactatgtctgatcctgtcaccgaaattcctataaagcctaccactaagcaaactgtggaaattgctatttatgagaagtgcattattgtttgggagctgcgcgtggtgggctgggaggttagctacaatgctgaattcaagcctgatgttgaagatgcatatacggttatcatacagaaggccacaaagatgtcccccaccgatgaaccagttgtttccaata

SEQ ID NO: 33131 - DNA, 243 bp, Glycine max
  Clone ID: 700893164H1
atgggccataaccttgttctctctctccaccctcccaaacactttggttatgggcatccctttgctcaaagggatgtatggtgacttctcagggagcctcatggtgcaaattgtggtcctccagtgcatcatttggtacaccttgatgctcttcttgtttgagtttagaggtgccagaatgcgcatctctgagcagttccctgacactgctgcctccattgtctccatccatgtggactctga

SEQ ID NO: 33132 - DNA, 241 bp, Glycine max
  Clone ID: 700893165H1
caaaaacgtgtctctctattttgaatctggatccagcgccttctattcagcattcacccaaaccctatttctctctctctttcttccctgtttggtatcagcgagcacaatgaggagaggagctaagagtcagacgaagcaggacctagaagccaaacacgtcgcagccgtagataactagaccgaagctcagcctcgagctaaacgggccaaaacctccaagcctcaatccgaacctgag

SEQ ID NO: 33133 - DNA, 237 bp, Glycine max
  Clone ID: 700893167H1
ccagatctcactctcactctcactctgttttgctcagtgcagagtagagaagaaaatatggcggtgatggcggttcaccaattcgcgcaatgcatcacttgccacgcttggagccccgatcaatccatggttgctttatgtccaaacaataatgaagaccacatctataggttggtggacgacaaatgtgcaaagttgtatgctcttcaaaagacaacaaatgtgcagtgggctgtg

SEQ ID NO: 33134 - DNA, 238 bp, Glycine max
  Clone ID: 700893169H1
ctttcttcttcttctcttaaaagagcctttgctttttctttaggcctttccgaattaagtacttgtttcattttctctcgaagcaagaaaaatgttcatcgagagtttcaaggttgagagtcctaacgtgaagtacacagagactgagattcagtacttgtacaactatgaaaccactgaacttgttcacgagaacaagaatggcacttatcagtgggttgtcaagcccaaaactgtc

SEQ ID NO: 33135 - DNA, 155 bp, Glycine max
  Clone ID: 700893171H1
cgcagacagaggaaatactagcgaatagagatgggtgtgaactccaacagagtggaacactttgatagccatgaaagcaccatcaaaatccaggacgagacaatgcaaatccatgcagtgcagttgccaccacaccgaaccacactccacacaac

SEQ ID NO: 33136 - DNA, 238 bp, Glycine max
  Clone ID: 700893172H1
gtcagtccaactataaccgaaaacccgtgactcagccccacttttgctttgcttggcctacccactaaccaaaccaaacctctcaagtctcaatggcttctcagcaacacgacgccgttttccgcgaagaagacatggacgacgacgacgacgagtctcaggaggacggagactacgaagaagaagacgacgacgttttagccgacgacgaagaaaacgagccctctccctccacggg

SEQ ID NO: 33137 - DNA, 83 bp, Glycine max
  Clone ID: 700893173H1
gacgctatgcagaatgacgcaatggagtggcactcctcgacatcggaatgtgatgactccgagcgccggccgtggaggagtcg

SEQ ID NO: 33138 - DNA, 239 bp, Glycine max
  Clone ID: 700893174H1
cttctgggcagaaatgggattgcgggtaataacagaggacctggatataatcctgttccaccgagctcttcatttttgagttttcctatgaatcaaacctctgaaatgtctgtcaacaatagtttcccaattggaaccaccccaggtatatcaagtatcacaacaaaaggctcttttcaagaagaagttacatcaggacattaaaggatccagtgggtttccaagttatgatatttttg

SEQ ID NO: 33139 - DNA, 236 bp, Glycine max
  Clone ID: 700893175H1
cgttaagaccctcaccggcaagactattaccctagaagtcgaaagctccgacaccatcgacaacgtcaaggctaagattcaggacaaggagggaatccccccagaccagcagaggctgatcttcgccgggaagcagctcgacgacggacgcacccttgctgactacaacatccagaaggagtcaactctccacttggtgttgcgtcttcgtggtggtatgcagattttcgtgaaga

SEQ ID NO: 33140 - DNA, 235 bp, Glycine max
  Clone ID: 700893176H1
ccgtaacctcaaaatgaaagcgcctgtggcatcaaccaagttagttattaaaaagaaacaaatttcaccagacactgaaggttcttgcaaactgaagattgttagttctaaggcagattcaactggtgctagaggtattgtaatatctggaagttcctcctttatggggcctaatctagtcacagaagtaccagaaggtgaagatgacagaaaatttagttctccacagctactg

SEQ ID NO: 33141 - DNA, 245 bp, Glycine max
  Clone ID: 700893130H1
aaagctcccaggaagcagcttgcaaccaaggctgcacgtaagtctgcaccaacaactggtggtgtgaagaagcctcatcgttatcgccctggaactgttgctcttcgtgagattaggaaataccagaagagcactgagctcctaatcaggaagcttcctttccagaggttggttcgtgaaattgcccaggatttcaagactgatctgcgtttccagagccatgctgtgcttgcattgcaagaggc

SEQ ID NO: 33142 - DNA, 242 bp, Glycine max
  Clone ID: 700893091H1
gttccacaataataattaaagatataatttgtaattttgttctcaaagaaagaagactctgtccctgtgtctctgtatctgtctttgtctctgttcgtctcgctgaaggaatcgctaaggatcacattctttgcaggtttagtttctgcttctggccacctctcaagttctctgctttttttagggttcctttgattctgaattggattgcaattgggtgcctcactctgctttgctccatt

SEQ ID NO: 33143 - DNA, 243 bp, Glycine max
  Clone ID: 700893093H1
gcaaaagttgcttcttgtgaatctgacgttgaaggatctcatgctaatggcttttgtgacttgaattggctttcctctggcaatgctatgaatgaagaagatgttttccaaaggtaccttacaatgacctcagcaaatgaggccaacggttggtatggaggtagtctccttggtgatcaagatgaaaacagtgagatatatgaacattatgcagagttatgtcagggacctgccttggaactt

SEQ ID NO: 33144 - DNA, 246 bp, Glycine max
  Clone ID: 700893094H1
atttatttattcattcattcatttcgctctctctctcccccttctcctttcttcctctgcaaccaaaatctgaatcttagggcaccaacacctttgatccaatgggttcggttgccgcagaagaactgaacttagatttaagatcctccttcgtccccaaaaccatcaccgatttcctccgccacctctccgccaacaacaaccaccctgccaccctccgcgatttcctctcccgcctcgaagacg

SEQ ID NO: 33145 - DNA, 239 bp, Glycine max
  Clone ID: 700893103H1
gcgccccgcgccgtcttcgtggatcttgaacccaccgtgatcgacgaatccgaaccggtgcgtaccggcagctcttccacccggcgcagctgaccagcggcaaggaagacgccgccaacaactacgcgcgtggccactacaccatcgggaaggagctcgtcgatctccgcctcgagaggatccgaaagctcgccgacaactgcagcggtctccacggtttcctcggcttcaacgccgtc

SEQ ID NO: 33146 - DNA, 242 bp, Glycine max
  Clone ID: 700893104H1
ctcgagccgctttgcacaaaccctaacacctaaaagccagaagaagcgaaatcgtaatcgcaatctagcggatatgaaggtcgtcgctgcatacttgctcgcagtgttgggagggaatccatctccttctgccgatgatatcaaaaacatcctcggcgcagttggagctgaggctgagcatgagttgattgagttgctcttgaccgaagtcaagggcaaagacttcaatgagctacttgcta

SEQ ID NO: 33147 - DNA, 246 bp, Glycine max
  unsure (1)..(246): unsure at all n locations
  Clone ID: 700893105H1
gggctaccttaatttcatgggcaatgagtttggccatccagagtggattgatttcccaagagaaggcaatggatggagttatgagaagtgcaggcgtcagtggaatctggtggatacagatcacttgagatataagttcatgaatgcatttgacagagcaatacanaagcttgatgataaattctcattccttgcatcaacaaaacagattgtgagcagtgcagatgatgatgacaaggttatagt

SEQ ID NO: 33148 - DNA, 246 bp, Glycine max
  Clone ID: 700893106H1
cattcaggcaaaacctaaccacagagaataacgttggtgaaagaacgacgatgacggacgcagcgtccgattcacgaaacgatgcagccgtgcaagccaccaacgacgacgcttccgccagtaaattgtcatgtgtaaaaaagggatacatgaaagatgattatattcatctatttgtgagaaggcctgtgaggagatctccaatcattaatcgtggttactttgctcgctgggctgcatttcgga

SEQ ID NO: 33149 - DNA, 244 bp, Glycine max
  Clone ID: 700893107H1
cgccccgtaaaaatcatcgccgccgccgatgacttcggcactcctctcaaagacgccctcgtcgctcacttgcgcactctcaacatccaagtcgaagatctcggaacctcttcctactactccgccggagccgaggtcggtcgccgagtctcccaatcctcctcctccgacatccgtggcctcgtcgcctgcggcaccggcgccggcgtctccatcttcgccaacaaatatcccggcgtctacg

SEQ ID NO: 33150 - DNA, 244 bp, Glycine max
  Clone ID: 700893108H1
atgctgtatatcatggacccgaaggacttaaaaccattgcccaacgggttcatggtcttgccggggtgtttgctcagggattaaaaaaacttggaaccgtggaagttcaggaccatccattctttgacactgtgaaaattaagactgccaatgcccatgcaattgctgatgctgctcgcaagaatgaaatcaatttgcgggttgttgatgggaacactatcactgttgccttcgatgaaacaac

SEQ ID NO: 33151 - DNA, 243 bp, Glycine max
  Clone ID: 700893110H1
gcctggtgtgcttatccaggtctttgagggtgaaagagcaaggaccagagataacaatttgttgggcaaatttgagctatctggcattccttctgcacccaggggtgttcctcagattacagtgtgctttgacattgatgccaatggtatcttgaatgtctctgccgaagataaaaccactggccagaaaaataagatcactatcaccaatgacaagggtagattgtcaaaggaagatattga

SEQ ID NO: 33152 - DNA, 243 bp, Glycine max
  Clone ID: 700893111H1
ggccaccgccgcgatggcgtggcgcgtccgacgccgacgacatcctgatccgtcaggtggtgccagatgttggcgaagcaccgaggaggacaacctgctgaacgccgagcaccacttcgcgagcttcaaggccaagttcgccaagacctacgccaccaaggaggagcacgatcatcgcttcggcgtcttcaagtccaacctccgcagagccaggctgcacgccaagctcgacccctccgccgt

SEQ ID NO: 33153 - DNA, 244 bp, Glycine max
  Clone ID: 700893113H1
gaaccacttgatctctgcgaccatgagtggtgttacatgctgtcttcgattccctggtcaactcaactctgatctgaggaaatttgccgtgaatctcattcccttccctcgtctgcacttcttcatggttggatttgcgcctctcacctctcgcggctctcagcaataccgcgcattgacagtgccagagctgacacagcaaatgtgggatgccaagaacatgatgtgtgctgcagatccaagg

SEQ ID NO: 33154 - DNA, 245 bp, Glycine max
  Clone ID: 700893114H1
ctccttcgttcactcttcttctcttgcggctagggttttagcgcacttcttctagatttaaggaagatgggtaaggaaaaggttcacatcagtattgtggttattggccatgttgactctgggaagtccactaccactggccacctgatctacaagcttggaggcattgacaagcgtgttattgagagatttgagaaggaagctgctgagatgaacaagaggtctttcaagtatgcctgggtgct

SEQ ID NO: 33155 - DNA, 244 bp, Glycine max
  Clone ID: 700893115H1
tgttagcaatggatcttgagtcaaggtagtgggaaagctttgaaacaatggctcttcatcttctgaattctatccctagtatctgcagtgcatatttcattccaagctctcatcaagtttcatggctaagagatgaatgtaatggaggctggaacacaggttcagactaggacaaggtgataatagtcacggggacacaagccgttgtgtgatgatgatccctctaggaaataggaatgcttaa

SEQ ID NO: 33156 - DNA, 246 bp, Glycine max
  Clone ID: 700893117H1
atgctgtatatcatggacccgaaggacttaaaaccattgcccaacgggttcatggtcttgccggggtgtttgctcagggattaaaaaaacttggaaccgtggaagttcaggaccatccattctttgacactgtgaaaattaagactgccaatgcccatgcaattgctgatgctgctcgcaagaatgaaatcaatttgcgggttgttgatgggaacactatcactgttgccttcgatgaaacaacca

SEQ ID NO: 33157 - DNA, 241 bp, Glycine max
  Clone ID: 700893119H1
ctgatgcacaaattaaccaagtagttagtggagccttggatagattgcattatgaacgtgatccttgtgtacaatttgatggggaaaggaaactgtgggtttacttgcatagagaaagagaagaagaagattttgaggatgatggcacttcatccacaaagaaatggaagaggcagaaaaaggatgctgcagatcaatctgatcaaggaacagtaactgttgcctgtcctggaactgggga

SEQ ID NO: 33158 - DNA, 236 bp, Glycine max
  Clone ID: 700893120H1
ggcgaagatgttactgttgataactttactgctgctttacttggaaataagtcagcactgactggtggcagtgggaaattcatgatctgtggtcccaattagcatatctacatatactatacggaccatggatgtcctatggtgctcacaatgcctgcctgtccttacttatacgcggatgatctgattgaagtcttgaagtgaaagcatgcttctggcacatatacaaacctagt

SEQ ID NO: 33159 - DNA, 243 bp, Glycine max
  Clone ID: 700893121H1
ctcgagccgctcgagccgaatcggctcagcgagtatttgcccaatgggagcttgtggagaccggcttcacacgagtaggaagatggagcttgattgggaaaccaggtatgaaatcgctgttggggcagcgaaagggttggagtatttgcatcatgggtgtgcgaggcccgtcattcatagagatgttaagtctagtaacatattgttggatgagtttttgaaacctaggattgccgatttcgg

SEQ ID NO: 33160 - DNA, 242 bp, Glycine max
  Clone ID: 700893122H1
cctgcttcttctcctgcaacctcaccagtcccttccgctagttctccaccagcaccaggcaccgccggacccgctcccggacccgcaggtcgcgccgagccaccaccgccaccctccgccgcattccccgccagcaaggccttcattgctggctccgcactctctggaatcttcgtagccatggtcttggcttaaaaactttcgagagaagcattgtctttgatgattcgtccacgtggagg

SEQ ID NO: 33161 - DNA, 239 bp, Glycine max
  Clone ID: 700893123H1
cgttgagcctgaaattcttcttgatggagaccacccaattgagcggatgctggaagtggctgagacggtctggtcagaagtctacttctatttggctgaaaacaatgacctcattgagggacttttgctcaaacctagcatggttacaccttaggctgaacaaaaaatctaaaattctccagaaaccattgctaaatatactctaaccatctatagaagaagagttcctcctgctgtcc

SEQ ID NO: 33162 - DNA, 245 bp, Glycine max
  Clone ID: 700893124H1
cgagcccacgaaacataaatcccccgcaacgaacaaaaacatatataactccacccctcaacgacaacaatcccttcttcttccctcagatccacaacccgcgtcctcacctaagccgccggcaccggaagatggaggacgacgagaagacacccttggtgggagaaatcgaggaggtggacgcgagtcccgtggaggaggagggcacgagcgagcgggagaagcgcgtgcggaccaaggtcccg

SEQ ID NO: 33163 - DNA, 222 bp, Glycine max
  Clone ID: 700893125H1
actaactccaatctccctatccatgtatccctcttcctcttcctcctcctcctcttcctctcagtccatgacccaagctggcctcactcgctacggttccgcccccggttctcttctcaccagcacggttgattctcttattggtggatcccgtcccagtccctacttttccggagagtcttctgagtctccctgcaaagagcaaagatctttccacaaaaa

SEQ ID NO: 33164 - DNA, 243 bp, Glycine max
  Clone ID: 700893126H1
gagaaatggttttgagtaatgggaaaactgaggcaccattgccaagtagtaatgggggaggtgctgagattgataacaattcgaagaagcccttcaagatcttcgtagggtatgaccctcgcgaagatcttgcctatgaggtatgtcgccactccatcttgaaaaggtcttcaatccctgttgagatcataccaattaagcagtcagatctgaggaaaagtggtttgtattggcgtgagaggg

SEQ ID NO: 33165 - DNA, 245 bp, Glycine max
  Clone ID: 700893127H1
gaactatcctggcaagaactcagagcactaacatcttgcagccacaaaaatgggcttctttctgttaccaaaagcaactccttgcattttgttcttggctctgctgtcttgtacttgctttacttctacagatgcttatgatccactcgacccaaatgggcatatcacaatcaaatgggatattataagttggaccccagatggatatgtggctgttgttacgatgaacaacttccaacaatatc

SEQ ID NO: 33166 - DNA, 245 bp, Glycine max
  Clone ID: 700893129H1
tgttgttgtgctatcaaatttgatccttttcgttggcatcattaacgttttccctcctcactctctctcctcctctaaaatcactatacggttgtaccattcaaattaaagattgttcgaactgcagagtaaactgcagtatagagctaataatcctcagatcaacgaaaacaagagttcttgtaggtttcattgtcatggagctgaattcacagaagagaccattttcaatcaaattatggcct

SEQ ID NO: 33167 - DNA, 243 bp, Glycine max
  Clone ID: 700893087H1
gtgatttcagtgagtgatcggtgttcacttgatctcatcataatcgtcagcgtcaattgaagaagatgccgatcagaaacatcgccgtcggaaggcctgaagaggcgactcaccccgacacgttgaaggcggctttggctgagttcatctcaaccttcatcttcgtgttcgccggctcaggctccggtatcgcctacaacaagctcaccgacaacggcgctgccacccctgccggcctcatct

SEQ ID NO: 33168 - DNA, 252 bp, Glycine max
  Clone ID: 700893045H1
tccgacgcagccaccgtctttcagcacttcatcccaacaatgtccacgcttccgaagcaccaacccgaagcgaaaccccaagatctccctccggatcaaccagcttcggcgccctcggatgcaaaacccgaagatcttcatccgaaccagccaggttcggagtctcccgaagccaaagcagagggggaagaagaggatgaagaagaagaaggagagtgcgggttctgcctcttcatgaagggtggtgggtgc

SEQ ID NO: 33169 - DNA, 252 bp, Glycine max
  Clone ID: 700893046H1
gaacttgccaatgggagattggctatgttggcattcttgggattcatagttcaacacaacgtgacaggcaaaggaccatttgagaacctcttgcagcacctctctgacccgtggcacaacaccatcatcaatacaattcgtggctactaagtttgtatccaatgacatggataagcctgtgtccttctcgtgtaatcctgaatggatgaattttgagagtgatttgggcgtgattgttgtgatccatctatt

SEQ ID NO: 33170 - DNA, 258 bp, Glycine max
  Clone ID: 700893048H1
cggctcgagctcgagccgatcggctcgagtgagaattgagaaatggtggagggaagagaaacgctatgaagctatgttgctcccatcggttgggtcatatttttcagagaagatatctgaagaaatctgcaattcagctgctaagatggccaataatttagaggtggatgcactttttgtgtacacaaagacagggcacatggcatctctattgtcacgctgccgtcctgactgcccaatctttgcttttactaccac

SEQ ID NO: 33171 - DNA, 259 bp, Glycine max
  Clone ID: 700893049H1
cagaacaaccagccgctgaggctcctgccccagaatcaaccaccgaagcaccaaaggaagaaaccaccgaggcaccaacagaaacagtagaaaaaacaactacagaagtagccccagaggagcctaaagaagttccagttgagaccgaggaggtggtggcaaaggagacagaggaagagaagccagcagaagagaaatcagaggagaaaactgaagaagtgaaagaagaagcagaggagcctaaagaaactactgaaac

SEQ ID NO: 33172 - DNA, 256 bp, Glycine max
  Clone ID: 700893050H1
gtgtttaatctgaaatttgtttgaccaaattcatggcggaactgatagggcctcgcttgtacagctgctctaattgtagaaaccatgtctcactccatgatgatattatttccaagagatttcatggaagaaacggccgagcctttctgttttcccatgcaatgaatattgtcacggggccaaaagaagacaggcatctcttgactggcctccatactgttgctgatgtttattgtggcgattgccgtgaagtgtt

SEQ ID NO: 33173 - DNA, 252 bp, Glycine max
  Clone ID: 700893051H1
gaaaagggtagaaccgtggtggtgtccgctctgcagtttgcttgcaccgatgatgtctcaacaaatgtcgccaccgccgagaggctagttagagctgcacataaacagggtgcgaacatcattcttattcaggaactctttgaaggttattacttctgtcaggcacagagagaggagttcattcaaagagctaagccacataaggaccatcccacaatcctcagaatgcagaaacttgcaaaagagttaggt

SEQ ID NO: 33174 - DNA, 251 bp, Glycine max
  Clone ID: 700893052H1
gatgaatatcgagtgaacatgatattggataaccttccagttgctgttcatagacaaaggagggatggaagtcaatcaacaacatatgaacatggttttcgtgttgggttcaaaggaaactatcaagggagcaaggaggagaaatattttattaataaccacttgagtttcagagtcatgtatcacaaggatcctgaaactggttctgctcgtattgttggatttgaggtcaccccaaacagtataaatca

SEQ ID NO: 33175 - DNA, 251 bp, Glycine max; identical to SEQ ID NO: 28359
  Clone ID: 700893054H1

SEQ ID NO: 33176 - DNA, 246 bp, Glycine max
  Clone ID: 700893055H1
ctcgagccgattcggctcgaggctatttgtgcccttttccgtggaggattagatggcgagagcggactgctggcctcatacattctggcaatgagattttggagacatacacttattacccagatgccagtcttcaagagagagaacatgttttggaacagcaaactgtgttacgacaacttgagtcaatattgtctattcacaaattagtaaggcttggacattatgttgatgcattaagggagg

SEQ ID NO: 33177 - DNA, 246 bp, Glycine max
  Clone ID: 700893057H1
caaatcaggattggcaccaaatgtctcagatgctcatactattaatggccttccaggggcagttaccaattgttctacacaagatgtttacgaactacccgtggagagtggaaagacctacctgttgagaattatcaatgctgcactcaatgaagagctcttcttcaaaattgctggccacaagctcacagtggtagaagttgatgccacatatgtaaagcccttcaagattgaaacaattttgat

SEQ ID NO: 33178 - DNA, 246 bp, Glycine max
  Clone ID: 700893059H1
atttgcactaacctcccttctatggagcctcaggtaatgccatattttattttttcccctgtttctaccgagtagagacctttagaggcatcttccttggtttcttgtgttgtttatcaagcaaattaaatgtcatttgctcccatacgatcctctgattaacttttctgaagtattaaaagtagagacagctgtgattttagttttatcgggtcactcttgtctgcaataaaattcatttttctt

SEQ ID NO: 33179 - DNA, 241 bp, Glycine max
  Clone ID: 700893061H1
acaggttatgttgtataggataggctggccagattaagaaagtcatagtctgtgcgccggtcatgtcccaagagtgggccatgacactaatccttactatttgatgatgaacagataaagtaacttgattggaaaataagcattatttatggaatagcaggaggcctattataccttcatgaggactcttggctcagagtaaatcatagagatctcaaagctagcaatgttctattagacc

SEQ ID NO: 33180 - DNA, 248 bp, Glycine max
  Clone ID: 700893062H1
ctgctctgctgcaaatagcgcgttgcatctgctcccaatcattcatattttcgccaaacagccgattccgttaagtgtttctaccgtagcgctcaggaaggaggcattggctggtggtgttggttgtggtggaggtggttttgccgatcagttgtggtagagggtaggaaagaaaaaaaaagtggaaaatgagttcagacagccgcagcaggagcaggagcagaagcaggagcccaatggaccgtaag

SEQ ID NO: 33181 - DNA, 258 bp, Glycine max
  Clone ID: 700893065H1
ccccaatcccaatacactcccaactcacaaagccatgtctccaggtcctgttgtcgacgcttcccctgaggttgaagcagagcaacaacttccctccgtcgatgacgcaacccagttgaagaaatcccaaccgcagaggatgatgctcccgttgtcgaggacgtgagggatgatgacaaggacgacgacgatgaggacgacgacgacgatgatgaagatgacaaggaagacgatgctctaggtggtgctgagggttca

SEQ ID NO: 33182 - DNA, 254 bp, Glycine max
  Clone ID: 700893066H1
gacggcgctcaactccatccaccacaaccggagccgcctcttctccggcggagcctgtctgatctccggccgctgtccggcgtcgttggacctgacgtctctggcgcggcagcggggagctccgacgcgaagaatagggtgagccaagccgatgactctctgaggaaagtgatgtactttagttgctggggtcagggctgaaccacacgtgatgaacggtggagattaaagtagtcgccggagaaagtgaaccg

SEQ ID NO: 33183 - DNA, 249 bp, Glycine max
  Clone ID: 700893068H1
cagcaatctcaactgcactgaaagaaagcaatccggtgtatataagcattagctgtaacttgcctgggattcctcaccccactttcagtcgtgatcctgttcctttttcgttatctccaagattgagtaacaagatggggttggaggctgcagtggaggcagcggcagaattccttaacaaggcagtgaaaccagtgctggtgggtggtcctaaactgagggtggcaaggcatctgatgcctttgttga

SEQ ID NO: 33184 - DNA, 247 bp, Glycine max
  Clone ID: 700893069H1
gcagaaaccagagaacattccgcccgaaaaaaagtactccttctgggagtaagggagctcaacttagaaaacatattgatgccacgttgggtagtggaaatctgagggaagcagtaaagctacctcctggggaggatttaaatgagtggctagctgtcaacactgttgatttcttcaaccaggtgaatctgctttatggtacccttacagagttctgtactcctgagaattgtcggacgatgtctgc

SEQ ID NO: 33185 - DNA, 248 bp, Glycine max
  Clone ID: 700893070H1
tggattatgagcaagaacttgagactgcaaagagcagttcttcagttgagaaaaactacgagcttcctgatgggcaagttatcaccattggagctgagagattccgttgccctgaagttcttttccagccttctatgattggaatggaagctgctggaattcacgagaccacctacaactccatcatgaagtgtgatgtggatattaggaaggatctgtatggtaacattgttcttagtggtggctca

SEQ ID NO: 33186 - DNA, 249 bp, Glycine max
  Clone ID: 700893071H1
ggcgtgtaataaagggcaacatgtgagaaaggcaaagaagaagcaggtgaaagacaagttggatagactgaaacaggctgaaaagaaaaagaggcgcttggaaaaagctctagctacttctgctgccatcatttccgaactggagaaaaagaagcagaaaaagaaagaagagcaacaaagactcaatgaagagggtgccgcaattgctgaagcagtggctctgcatgttctacttggcgaagactcaga

SEQ ID NO: 33187 - DNA, 245 bp, Glycine max
  Clone ID: 700893074H1
aaccgcacaattgagctagttgcaagtcaccaccatggcacttgttcaaccctttgcttctctttcaatctcttttcgcgatgctcgtgttttcactgcaccaaaatgctctcccaccactcactttcctcatcggaatttggttccaactcgagcatcattcatcgctggttccccactgttgattcgaagaaatcatggaaggaatggtgcatgcaaagcaatgcctgtttcaataagatgtg

SEQ ID NO: 33188 - DNA, 247 bp, Glycine max
  Clone ID: 700893077H1
tctctcaccaaattcttattagaacgaaaaaagaaaagaaaagaaaaaagagcgatttttccctcaccaaagaagaaccaaaacaatggcggatcaactcaccgatgaacagatctccgagttcaaggaagccttcagcttgttcgataaggacggcgatggttgcatcacaaccaaggagcttggaactgttatgcgttcattggggcaaaacccaactgaggcagaactccaggacatgatcaat

SEQ ID NO: 33189 - DNA, 221 bp, Glycine max
  Clone ID: 700893081H1
agaggctcgtgaggaccttgctgctcttgagaaggattatgaggaggttggtgccgagtctggtgatggagatgatgatggtgaaggagatgatgattattagagtgtctgaaatatcgtgtgtttgatgtctactttttcgtcttctgtcggacatgtgtggtttttgaatgatgattgttatcaaatatatgtgctatgtatagcacagaagtttctat

SEQ ID NO: 33190 - DNA, 104 bp, Glycine max
  Clone ID: 700893082H1
gactcagctcacgtttggtttggcagtgctcttacctccaacttttgtattcttcttttccttttctattctttctctctccattcttcctccttccacacaac

SEQ ID NO: 33191 - DNA, 247 bp, Glycine max
  Clone ID: 700893084H1
atcgagaaggagaagcgccgtcaatgccgcggaatcgagctcatcgcctccgagaacttcacctccttcgccgtcatcgaggccctcggcagcgctctcacgaacaaatactccgagggcatgccgggcaaccgctactacggcggcaatgaatacatcgaccagatcgaaaacctctgccgctcacgcgccctccaagccttccacctcgacgcccaaacataaagcgtcaacgtccagccctact

SEQ ID NO: 33192 - DNA, 218 bp, Glycine max
  Clone ID: 700893085H1
gtggtgaggttgaacattgcccaggttttgacggtgatttctcagaagcagaaggctgcgttgagggatgcctacaagaataagaagtacttgcctctcgatctccgccctaagaagaccagggctattcgcaggaggcttactaagcaccaggcatcattgaagacagagagggagaagaagaaagagttatatttcccactaaggaaatatgctat

SEQ ID NO: 33193 - DNA, 252 bp, Glycine max
  Clone ID: 700893041H1
ctcatcacttactggaagccttgttgtgagtaagagaaaaggcttcctgcaccgagcacaccaacttgatacctctgattctttctttgcttagaattccacagaatatggagactattcttttcaatcactccccacctttggaattcaagggtttgagcaaggaggaggaagactcattgctagggcaagtggaaatatggaggtacatgacatgcttcacggactccgtggccttgaaagctgtcataa

SEQ ID NO: 33194 - DNA, 251 bp, Glycine max
  Clone ID: 700892991H1
agagaagaaactttcgaacccaatgagggagataaaagtgcagaagctcgtcctcaatatctctgttggcgagagtggagatcgtctcaccagagcctccaaggtgttggaacaacttagtggccaaaccccagtgttttccaaagcaaggtacactgttcgttcctttgggattagaagaaatgagaagattgcatgctatgtcactgtcagaggtgacacagcaatgcaacttttggagagtggtttga

SEQ ID NO: 33195 - DNA, 205 bp, Glycine max
  Clone ID: 700892993H1
gagcaccataccaaaccacattgtttgcaaggcacaaaagcaggttgtccaagagggtgaggacactactaacattgtctctcgcaggttggccctcactgttctcattggtgctgctgctgttggctctaaggttgcacctgctgatgctgcctatggagaagctgccaatgtgtttggaaagccaaagacaaacactgacttc

SEQ ID NO: 33196 - DNA, 85 bp, Glycine max
  Clone ID: 700892994H1
ccaatacatatgctacacaggttggaactgattttatccggaaccacctggttcttggtgtggacttcgcttctgttcacatgta

SEQ ID NO: 33197 - DNA, 254 bp, Glycine max
  Clone ID: 700892996H1
gatggtcagctaggaatcggaagcaacgaagagaaagaatgggtctgcctcgtcaaagccctccagccccaccgtattcgctccgtcgtcgccggcagcagaaactccctcgccatcgctgacgacggcaaattgttcacttggggttggaaccaaagggccacacttgggcaccctgctgagaccaagtctgagaacaagactgagaacactcccagccaggtcaaggctctttccagtgttaaaattgttca

SEQ ID NO: 33198 - DNA, 267 bp, Glycine max
  Clone ID: 700893002H1
cttcagcttctggatctctaatacttcaactcactgtattatcttgagtaatttttgcagagaagtaaaatatgagcaggccaggagactggaattgcaggtcatgccagcacctgaactttcagagaagagattcatgccagcgatgtggggacgcaaaatatggagatagagttgattttggtggctttggaggaagaggagggtcttcatttggtttaactggctcagatgttcgccctggtgactggtactgtgctgctgcta

SEQ ID NO: 33199 - DNA, 265 bp, Glycine max
  Clone ID: 700893003H1
acaacacaatcatggaaattgatggtaggtttctgaacactggcctcctccttgtggccacaatccttgtagccaaactcatctcagctttcatagtgcccaagtccagaaagagggtacccccaattgtgaaggggtggcccttaattggagggctaatccgtttccttaaaggtccaatctttatgctccgtgaggagtaccctaagcttgggagtgtcttcaccctcaagctcttccacaagaacatcacccctctcgttgg

SEQ ID NO: 33200 - DNA, 256 bp, Glycine max
  Clone ID: 700893004H1
attcaaatcagtttcctcaaaatcgcacccactttgcttcgcatcacaattcgaaagaaactggtttcgatggtgcgagctccggatccgcagcatcgggaatcgaacacgcccttagttgtacagggagagggtttgacaaatgatgggcttattcctcagatattttcatctatgccagctcgcaatgaagctgcttcttatcgtgcacaaacaatatcatacataactggatgtgtctctgattatctcagtg

SEQ ID NO: 33201 - DNA, 258 bp, Glycine max
  Clone ID: 700893007H1
cggctcgagcagttcttaattgtttcaacctcttcttacttacatgacaagaaaaataatgggtactctcacctcaaacataaaccttagcccacaatacaatgttcccaaagactatccaccccatggttctgtagttgaggaaatacaagggcttattagagtacacaaacatggatacgtggaacgaccacaagttgttccatgtgtcactgctagtagtaaaatgagtccagaactaaatgtgacatcaagaga

SEQ ID NO: 33202 - DNA, 248 bp, Glycine max
  Clone ID: 700893010H1
gaatgtgattactgcttgtgttgttcagtgttcaagtttgtcttttgaaatggttaaagtttgggaccatgtttgaacttgcaagcatgtggataaccaaaggagtcctatgcttgcatggttgtattttgcaattgtaaatatttgtcatgatggggggggggcggtgcggtccggtctcaagtgaatgggtgtgtttcttgacctaatggggggttcatggaaactgtgaatttgtagaataatta

SEQ ID NO: 33203 - DNA, 255 bp, Glycine max
  Clone ID: 700893011H1
atttcatctgtggtccaaacacaaaatcttttgtttgccctgcttttgttttgttttgttccattccatccattcaccttgttctatgttcatctccagcaccccttgattcattcattcaaaagccacaaacttgaattgatgatggggtacctctacctttcttgcagagccgaatccgctgtctcaacctccaattcggtgtcctcttccaaagagaaaagcagcagcatcaagatccaagagtttctgtac

SEQ ID NO: 33204 - DNA, 254 bp, Glycine max
  Clone ID: 700893013H1
gtttcacactttgtccgatctttcacagtgaactcttcaattttcgattctctttttcttgcaccaccctctcctttcttcttcttcttcttcttcttcttcttcaaacaccttcaccatttgcataccacttagctccaaaaacccatttctgtttctttctgttgatttgatggatccgcagatctaatgatttcacacactttcctcactacggatcatctacttcttcatctggggcacccaatagcttc

SEQ ID NO: 33205 - DNA, 257 bp, Glycine max
  Clone ID: 700893014H1
ctgcatttttctttgcaaaaaccaaaaaatacccctggttttcatacagccgttgtccaccgaggtactgaacaaaaccaggggtactttttggtttctgcatttttctttgcaaagcttgtggagtgcctgacccgaaggcattggttctttaggttgcagcaagttggactccgaatccgagcgctgcttgtcacaatgatctataataaggctctgaccctttcttgtcaatcaaagcagggtcacacttctgg

SEQ ID NO: 33206 - DNA, 266 bp, Glycine max
  Clone ID: 700893017H1
gtccctctctctcttctttcttctctcaccttttcctctctcaatttcctttcccttttgaaattatgatataagagaacaaaaactcccccttaaacagataaggtatatataagccacccttcagagcaatttgtccatcttcttcaatttattagcagaagatgtggtgcattagattaccttagtctttgtcctagtgtcttccacaacaacttggacatacgtttccaaatattcacataagagaagaacaatagttctct

SEQ ID NO: 33207 - DNA, 255 bp, Glycine max
  Clone ID: 700893021H1
cttttctcagctgctgttcctgcgcgtgaacaagcctcaggtaagccaaagccatggttaagcataacaatgttatccccaacggacacttccgtaagcactggcagaactatgtgaagacctggttcaatcagccagcacggaagacaagaagacggttggctcgtcagaagaaagctgtgaagattttccccagacctacagctggacctcttagacccattgtacatggtcaaactttgaaatacaacatga

SEQ ID NO: 33208 - DNA, 252 bp, Glycine max
  Clone ID: 700893026H1
caagctcaccgacaacggcgccgccactcccgccggcctcatctccgcttccatcgcccatgctttcgccctcttcgtcgccgtctccgtcggcgccaacatctccggcggccacgtcaaccccgccgtcaccttcggcgccttcgtgggcggcaacatcaccttactccgcggcatcgtctacgtcatcgcccagctcctcggctccatcgtggcctccatcctcctcgccttcgtcactgcctcccctgt

SEQ ID NO: 33209 - DNA, 251 bp, Glycine max
  Clone ID: 700893027H1
tttgaggccaggcaagccccactcaaccaccacactactcctcgtttacgctacccctttctgctcttcttctacctttcaacttttaaaagtataaaaatggcagagacattcctatttacctcagagtcggtgaacgagggacaccctgacaagctctgcgaccaaatctccgatgctgtcctcgacgcttgcctcgagcaggacccagacagcaaagttgcctgcgaaacatgcaccaaaaccaactt

SEQ ID NO: 33210 - DNA, 247 bp, Glycine max
  Clone ID: 700893028H1
ctgctcagtacaatccccgtcctaatagcagctcttctcatattagtcctgggaagtcttgtggatttgggatccactgcaaatgcatcaatctcaaccattagtgttattgtctatttctgtttctttgtcatgggatttggaccaattcctaatatactttgtgcagagatcttccccactcgagttcgtggtctctgcattgctatttgtgcccttaccttttggatctgtgatatcattgtca

SEQ ID NO: 33211 - DNA, 250 bp, Glycine max
  Clone ID: 700893029H1
attctatatgcttctgcttatgatttgaatgcagttggttcagcttcactgcaatctggtgacaatcctgatagtcttcctatgccaatagttctaatagatcaagaatcagattctgaagcaacaattgtgcagcttagctttgggaatcgccttggagctcttcttgacacgatgtaagcattaaaagatttgggattggatgtttcaaagggaactgtctccacagagggattagtcaagcaaacaa

SEQ ID NO: 33212 - DNA, 255 bp, Glycine max
  Clone ID: 700893030H1
gctgaagggggaggctagcaatttgcctgaaaggtgttgggaccttgatccggctgcaactccagatgagcttcttcatgctgctacagaacctaatgctttgtaggttatgcaatagtaaaaacaattatttgggttgtgctttagcattcttcccagagtattttagatttaactgtacactatgtctcacttggttagagaccgatgagatattaacaacggatgttttagaaggtgaaattttattttgta

SEQ ID NO: 33213 - DNA, 256 bp, Glycine max
  Clone ID: 700893031H1
attttgtactctgctagcccatgctgaaccggagcaacgtattgtagcagttaagcatttgggaatacttcttggtcaatgtacaaatggagaaagagctgagatgaattctaaaatttgcactgacttcattcgaaataagttagttttatccattcctaattatgttctgtcttgtctggtttctagtacttgggatgaagttgttgtgctggcatcatctgatttgtcattacaaataaggattcatgcgatg

SEQ ID NO: 33214 - DNA, 255 bp, Glycine max
  Clone ID: 700893033H1
atcaaagtggtgtttacaccttgtagttaaatgttgagatcttacattgactagagacatggattagtagtgaagtctaagggttgtatatacccttcacttcaaacccgctgttgatatttatttgagccatgttttatattgctgctaattactttctatgtgccctttttcttaattcatttccccactatcctatttatctgctctttgaatgtctcagcatggcatgagatgaaatcgaccaaaataatc

SEQ ID NO: 33215 - DNA, 256 bp, Glycine max
  Clone ID: 700893036H1
gaaggatctgcgtgtaaccatcccatggttctagttcagattcccatgtgtaatgagagggaggtgtatgagcagtctatttctgcagtatgccaaattaattggccaagggactgtttactaattcaagtacttgatgattcggatgatgagagcatacagtggttaattaagactgaggtcacaaaatggagccaaaagggaatcaacataatctacaggcatcgcttagtcaggacgggatataaagctgggg

SEQ ID NO: 33216 - DNA, 254 bp, Glycine max
  Clone ID: 700893037H1
ccaaaccaaaccctctctcttccggcgttctgggggtggcgtcgccggcgattcccccctccggttccctctccacccttcaattcaactctctcgtcttcgcttcactgattccctctttcaaaatgcttccgatcgcttgctagggttttccctctcccaaatctcctcctcggaaagcaccctgtaccttttattcctccgactaatcaacttctttgctatggctattcgtgtaaccttttccttttcgg

SEQ ID NO: 33217 - DNA, 253 bp, Glycine max
  Clone ID: 700893038H1
cgagaccatcaagctgacttccttcgcctgataaatgaacctgcagaaggtgctgaagggaacatattggggcagatggcttctgcgatgccacaagcagtaaccgtcactcctgaggagcggcaggcaattgaacgtctttaagcaatgggtcttgatcgtgcaatcgtattggaggtgtacttcgcttgtcacatgaatgtggtattggctgccaactaccttttggatcacatgcatgagttcgaggaac

SEQ ID NO: 33218 - DNA, 253 bp, Glycine max
  Clone ID: 700893040H1
gcaacatcaagagcttcaacctctccggcatgggttgcagtgctggcttgatatccgttgacttggctcgtgaccttctccaggttcaccctaactcaaacgccgtcgttgtaagcaccgagatcatcacccctaactactaccaaggcaaagagagagccatgcttcttcctaattgcctcttccgaatggggggtgctgctattctcttatccaaccgaacctccgaacgcaggagagccaagtacaggtt

SEQ ID NO: 33219 - DNA, 250 bp, Glycine max
  Clone ID: 700892990H1
gacttttaagcgcaggaatggaggtcgcaacaaacacggccgtggccacgtcaagttcattcgatgctccaactgcggcaaatgctgtcctaaggacaaggctatcaagaggtttctggtgaggaacattgttgaacaggctgcagtcagagatgttcaggaggcttgtgtctatgaacaatacacgcttccgaagctttatgtgaagatgcagtattgtgtttcctgtgctatccactctcatgttgtg

SEQ ID NO: 33220 - DNA, 258 bp, Glycine max
  Clone ID: 700892942H1
gtattctcctccgtgtctccctcctcattttttttcttttccgttcacgaaatcgatggattttctggtgggtcccactttcaccatcgacgtcgcctcctccccgcctccgtacgactccgacctccccggtgtcgccaccgccgccgaccgaccgtacggactcttctccggccactcctccgacagcgagtcctcgatcggaacccctgacgacagcgatgacgacgaaaacgatgtcgtttcgtccaaaagaaa

SEQ ID NO: 33221 - DNA, 260 bp, Glycine max
  Clone ID: 700892943H1
ttccctgtcacaaacacagattcacttcgaaactgaacgctgcagcagaagatgttcaaaaaattttctggcgaagatgtgtctgcacagaaccaagtgaaggcatctgttcaacgaaaaatacgacaaagtattgctgaagagtatccgggccttgaacctgttttggatgatatacttcccaagaagtcccctcttatagttgctaaatgtcagaaccatctcaatctggttcttgtgaacaacgtgcctttgttttt

SEQ ID NO: 33222 - DNA, 76 bp, Glycine max
  Clone ID: 700892945H1
gagaaaatccgaagaaggcgggccatggtttccccggataacagcaattggctgttcgattacccgctgatcgacg

SEQ ID NO: 33223 - DNA, 260 bp, Glycine max
  Clone ID: 700892946H1
attatcaactctttcaaaagggagaagaaaaggaaaggaaacaaaacgcacaaaggattattatagcaatggcagaacaaaaccaaaaccagacaactgaagctgccaggcaccaagaggttggccacaagagccttctccagagtgatgctctttaccagtatattctggagaccagtgtctacccaagagaacctgaatccatgaaagaactgagagagttgacagcaaaacacccatgggacatcatgacaacctct

SEQ ID NO: 33224 - DNA, 261 bp, Glycine max
  Clone ID: 700892948H1
cctgagcatcccaaggaattatggagatggaaatcaaaaaggctcaaaggtgtcagctcctgtcaagcctgaaacacaaaaggcacctccacctattgaagctccagccttatctttagatgagctgaaggagaagacagacaactttggttcaaaggcattaataggtgaaggatcgtatggaagggtgtattatgcaaccttaaacaatggaaaagcagtggctgtgaaaaagcttgatgtttcatctgaacctgaatc

SEQ ID NO: 33225 - DNA, 133 bp, Glycine max
  Clone ID: 700892949H1
gttaatttgaaaatcgagatgatactggataaatctgaagttatatgtgtgtgttgtggtgtatagggagctgtaatttgatgtattattccagtagattgaaaataaactggatcataatactcacctcccc

SEQ ID NO: 33226 - DNA, 135 bp, Glycine max
  Clone ID: 700892950H1
atttgagctgtttatttggaaggatcagcccaaatactctattaatttgaattagttattagaagtatatatagtttataagagatcatagcccttatttcttataaactatatatacttctaataactaattca

SEQ ID NO: 33227 - DNA, 255 bp, Glycine max
  Clone ID: 700892951H1
ttattttgcacctgagtatgcaattgttgggagagcctctcttgagtcagatgtcttcagttttggagtggttcttcttgagcttataagtggtcggcaacccatccctaaatctgcaggcaaagaagaaagtcttgttatatgggcaacttcacgcttacaggatagtaggcgagcattaacggagttggctgatccacaattgaacgggaacttccctgaagaagagctgcagataatggcatacttagcaaa

SEQ ID NO: 33228 - DNA, 253 bp, Glycine max
  Clone ID: 700892952H1
ggaagataccctgctgcgcctgcatcacgtgggttctgcagacgtgaaatctgagccgttggattgccagaaccatcgcgagaatcaggaaacgccgtggttgagtccgtgtcacaggacaaatcaaagggtgtgcaactgacacgcggcgacggctaatcgaatgaaacattttagattagatacgtagtgctgtagggaatccgaaaccggcacgcggagacgtcacgtgcgtcgtttaaccgtttgggac

SEQ ID NO: 33229 - DNA, 255 bp, Glycine max
  Clone ID: 700892953H1
ggggctcaaatgtttctcctcgtttggagagtcatgcattcctttttctcaacataaagaagactctgttgcatcttcaatgaaattaaggttccttggaagaagagaaccaagccaacacaaagctatcggatatagctgacttgttggaaaaaaaaataattaagaacagcaaagcttggcccttggaaaggccaagcccaaacgaaccatcttcttaacttgggcccaagacgggctaagtaaaagtacaga

SEQ ID NO: 33230 - DNA, 258 bp, Glycine max
  Clone ID: 700892958H1
gcacccgaaggctgaagcgagtgggagaggcagcaagaagagaaaaaggggaatggcatggttgcagttgcagagacatcatcaccaataccaagggaggtgctaatttgatctcaccgctcccacgattcttctcgaaatgttccccctatgttttgaaagttggaataccagagtttctaaacgggattgggaagggggttgagtcccacgttcctaagcttgaatctgaaatcggtgatttccagaaacttctcg

SEQ ID NO: 33231 - DNA, 252 bp, Glycine max
  Clone ID: 700892959H1
attccaaacaagatcaaggaatgcaggtcttaccccttgtacaagtttgtgagagaggagttggggacagcattgctaactggtgaaagggttatctcaccgggtgaagagtgtgacaaagtgttcactgctttgtgccaagggaagatcattgatccacttttggaatgccttggggagtggaatggggcacctcttccaatatgttagtttttcttattttctgttttcttgaagagtggttcctttcct

SEQ ID NO: 33232 - DNA, 84 bp, Glycine max
  Clone ID: 700892962H1
ctcgagccgctcttattgtctctccatcatggctcacattctccctttgctcctcctcaccctcctcgccgccaccgcctccgc

SEQ ID NO: 33233 - DNA, 259 bp, Glycine max
  Clone ID: 700892963H1
ctttgaggttttatcagctcgccttggacgtaagcctgaggatatcgtgaagttagatgctaatgaaaatccttatggtccccctccagaggtcatggaagccctaggatcaatgccaatcccatatgtctatcctgacccagagagccgcagattgcgcgcagtcttgcccatgattcaggccttgaagctgaatatattcttgcagggtgtggtgcagatgagcttattgatttgatcatgcgttgtgtgctggatc

SEQ ID NO: 33234 - DNA, 258 bp, Glycine max
  Clone ID: 700892964H1
gtcaatcagaagtacccttctccaataacagaggaaactggttggccatccagaggcagttgctgcaactggaaaggcaacaagttcatctgatgaatatgctgcaggatttcatgggcggatctcatgatagcatggtgactctagagaacagagtgcgaggtcttgagagaattgttgaagacatgtcacgagatttatccatatcatcaggtcgtagaaactttgcaggatttgaaggatcatctaataggcctt

SEQ ID NO: 33235 - DNA, 246 bp, Glycine max
  Clone ID: 700892965H1
gatgataagcttggagctctttgcatgcaatggctaaaggacaaggtatactcaatccgtgatgcagccgctaataacatcaaacgcttggcagaagaattcggaccggattgggcaatgcagcacattattccccaggttttggacatggttactgatccacattatctgtatcggatgacaatcttacaagcaatttctctactagctcctgttctgggctcggagattacttcttcaaaactg

SEQ ID NO: 33236 - DNA, 94 bp, Glycine max
  Clone ID: 700892966H1
gccccaaataggtttgcctaaagttcaaggtcctccaccttataagaaacctcatgacctgaagtaggcatggaaagttggtgttctgactgca

SEQ ID NO: 33237 - DNA, 252 bp, Glycine max
  Clone ID: 700892967H1
gtgagtgagttccatctagttccagaactaacagccaaaacacaaatgcagattgtttcctaggcgtcttaaattctatcttcgagcttgcctctgccaactacatttgaattttgcgcaacctcattcttatttgttatattaaattaaattgatccaggggaaatcagaaatactctgattgacttatatatggatcttattaattgaaacgaaattgagttgtctgtagcgacgatgagttgcttttcg

SEQ ID NO: 33238 - DNA, 251 bp, Glycine max
  Clone ID: 700892968H1
atgtaattgcggatagaaacattgccatctccattcaagatctacgcccggtcaccaacaactttgcttcagaaaatgagctaggccatggtgcgtttggaactgtttacaagggtgagctagaaaatggtaaaaaaatagcagtgaagagaatggaatgtggagctgttagcagtagagcactggaggagtttcaagctgaaatagctgttctttccaaggtccggcaccggcatttggtatccctacta

SEQ ID NO: 33239 - DNA, 253 bp, Glycine max
  Clone ID: 700892970H1
cggctcgagctggattccaaggtttccaagtcctgtgctgtgctttcaatacctacgtcatggaatttctcaaaaaggtttaagttctttggcgtggattcatatcaagttgcatttggattttgactttgagactctgcttggggtgctacttacgaatgttttcccggaaaaacgtaaatttcttctaatgctttatgaaaagaataacgaacaagttcaatgtataccgcctttataaaataataacaag

SEQ ID NO: 33240 - DNA, 251 bp, Glycine max
  Clone ID: 700892972H1
gtgagactgattcagggagtgacacaattgatgtggagggacatgatgaagagttggatgaggagaatcatgatgatgggtgtgagactgaggatgatgatgatgatgatgatgatgggcctggaccagcttctgacgaggaggatgaagtccatgtgagacaaaaagtgaccgaggtggaccctctggaagaagccaatttcgatcaggagctcaaggctgtagtacaggagagtatggaacagcgaagg

SEQ ID NO: 33241 - DNA, 253 bp, Glycine max
  Clone ID: 700892973H1
ctttctctctcttctttttactctctctctgtctctctctacgctttctcgttcgagatccctcaagggatccactaactgaaggagaaatggggttgacattcaccaagcttttcagccggcttttcgccaagaaggaaatgcgaattctgatggtgggtctcgatgcagctggtaagaccaccatcctgtacaagctcaaacttggagagatcgttaccacaattcccaccattgggttcaatgtggagac

SEQ ID NO: 33242 - DNA, 127 bp, Glycine max
  Clone ID: 700892974H1
cttgtttgtttccatttcttgcttctatgatttacttgtgtttctctagtattcatggtgctcgctggtaaacttagtactgaacttggggtgaaagcatccgctaccaaatggttcaacctcttaa

SEQ ID NO: 33243 - DNA, 219 bp, Glycine max
  Clone ID: 700892977H1
ctccgcaccagtttcaccgcacgaatatcttgttgtttggagcgatccgagaaaaactctgtaaacatgttggtttaccaggacctccttacaggtgatgagcttctctctgactccttcggttacaaggaatttgagatggatgccgtgggaagttgaggggaagtgggttgttaaaggagcagttgatgtagacattggtgcaaaccttctgctgag

SEQ ID NO: 33244 - DNA, 257 bp, Glycine max
  Clone ID: 700892980H1
cggctcgagggcagcacaagaatcccacattctcattctcttaagcctgtcattaaaaaccagtttctctgtacttcatacattttcacaaaccccaagaagtactggaacggggaagaagaagaagaagctcttttggtcctatgtcctcaactattccttgtcttctcctccttttgttctgtctctcaggatctgctgaggcctacaagaattacacagttggcgactctttaggatggtttgacaatactgag

SEQ ID NO: 33245 - DNA, 250 bp, Glycine max
  Clone ID: 700892981H1
aggggaatagctgcactattgacccaattagcgatagccagtacgagcatatccttgagagttttgcagagaaactagtgaaagaaaggccttcaccatcatttgttatggctacttctaacagttcttttctgaagctgatgcaccggctcctccaccggccttgcttccatcttggctttccaattccaatggcactgcacctgtgaggccaccttccccttctgtgactcttagtctttctccctcg

SEQ ID NO: 33246 - DNA, 79 bp, Glycine max
  Clone ID: 700892983H1
caacaaactacaaggtccactaccacagtctttggacaaagaaacgctagagatcaggacatctggtaatttgtgtctt

SEQ ID NO: 33247 - DNA, 246 bp, Glycine max
  Clone ID: 700892984H1
gtatcctgacaggatgatgcttactttctccgtttttccttcgcccaaggtctccgacactgttgttgagccttataacgctactctctctgttcaccagttggtggagaatgctgattagtgtatggtgctggataatgaggcgctctacgatatctgcttcaggactctcaagttgaccatcctagcttttgtgacttgaatcacttgatctccgcaaccatgagtggtgttacatgctgtctt

SEQ ID NO: 33248 - DNA, 257 bp, Glycine max
  Clone ID: 700892941H1
atttaagtgaggagctagagaatgatgatgaagtctgctatgtgtgcagtggtggttgtagcacttcttcttctggcggaggtggggcccatggctgaggctgtgacatgcaccccaacagagttgagtccgtgtcttccagcaatcacttccggtgctaaaccttccaatgcttgttgcacgaagctgaagcagcaaaaaccatgcttatgtggctacctcaaaaacgctagcttgaagcagtatgttaactctcc

SEQ ID NO: 33249 - DNA, 236 bp, Glycine max
  Clone ID: 700892893H1
gtcgctccgcaccagtttcaccgcacgaatatcttgttgtttggagcgatccgagaaaaactctgtaaacatgttggtttaccaggacctccttacaggtgatgagcttctctctgactccttccgttacaaggaaattgagaatggaatgctgtgggaagttgaggggaagtgggttgttaaaggagcagttgatgtagacattggtgcaaacccttctgctgagggtggaggag

SEQ ID NO: 33250 - DNA, 235 bp, Glycine max
  Clone ID: 700892894H1
gatcgttgttgttctaaagcactcatccacacattctccgtcgccacgacaacaatggctccaaagaaaggtgcgaaaggtggagttgtagcagcaaagaagaaggttcaggagaaggtaacgaaccctttgttcgagaagcgtccgaagcagttcgggatcggaggcgcgctgccgccgaagcgggacctgacgcgcttcgtgaagtggccgaagaacgtccaaatccaacgca

SEQ ID NO: 33251 - DNA, 237 bp, Glycine max
  Clone ID: 700892895H1
caggaccaaacagcatccgcggcagcgacggtaaccctccaacaacaacacttccgctgcgaaaaatgtctctggtggcgaacgaggatttccagcacattctgcgtgtgctgaacaccaacgtggatgggaagcagaagataatgttcgcaatgacctccatcaagggtattggaaggagattcgccaacatcgcttgcaagaaggctgatgttgacatgaacaaaagggctggtg

SEQ ID NO: 33252 - DNA, 238 bp, Glycine max
  Clone ID: 700892896H1
gaaattaccaacagtgcttttgagccatcgtccatgatggccaagtgtgatcctcgtcacggaaagtacatggcgtgttgcctgatgtaccgtggtgatgttgtgcccaaagatgtaaacgctgctgttgccgccatcaagaccaagaggaccattcagtttgtggattggtgccctactggtttcaagtgtggtattaactaccagccacctaccgttgttcctggaggcgaccttg

SEQ ID NO: 33253 - DNA, 141 bp, Glycine max
  Clone ID: 700892904H1
aaaaccagcgggtatatatatagatatacatatctagggttaatgttatcagcgacgaaattaattgcaattaagtggcatagatcttgaagctgagaatcgcgtgcgccatgagtagaggtgaaagttcaggtggtggac

SEQ ID NO: 33254 - DNA, 86 bp, Glycine max
  Clone ID: 700892905H1
gcgtaggggaatggttcctccctcagttgcttccttcctcttgtgtccacccagttccccctttcatgttccattcaataattcaa

SEQ ID NO: 33255 - DNA, 121 bp, Glycine max
  Clone ID: 700892906H1
caacacatcacagcctaagagaattggattctaagctctagagagagagagagagagagagagagagagagaacaaagactcatgtggtgctggaaaggagacggaggctagaagaagaag

SEQ ID NO: 33256 - DNA, 262 bp, Glycine max
  Clone ID: 700892907H1
tctgagagtgatgttttcgtaccggcaatatcaggtctattttatgcaaatgtagctggtaagagaatcggctcgggtaaatcccagatactggttccggccaatattccagattcatctgcttctgcctccagtttcttgtcccattatgtctccaagaaaaaccactttgcctattcttgttactgttagttcgaagtgaagacattcttagcatccagtgggtaatgttgtgtaccaattgtactgaatgatgctttcc

SEQ ID NO: 33257 - DNA, 259 bp, Glycine max
  Clone ID: 700892908H1
gtcttggctcgctccctctcggatcagatctgcgctctccgttttcagatcgcgttttgtttcaattcgacactttcctcgcttcaaagattaagcgaacaatatggttgtccttgctgcatccattgtgagcaaatctggcaaagtgctagtttctagacagtttgtggatatgactcgcataagaattgagggtcttctagcagcatttcccaagttggtagggactggaaaacagcacacgtatgttgaaactgag

SEQ ID NO: 33258 - DNA, 262 bp, Glycine max
  Clone ID: 700892909H1
cgaaccagcacttctcagcttcacgctccgattttccactaccctttaatgagaggaaatcttcacaacactatgcatcatcatcatcctcagcaacaacaaggagggagcccaactagctccactggtgaagttgaagccataaaagctaaaatcattgctcaccctcagtactctaatcttttagaagcctacatggattgtcaaaagataggagctacacccgaagtggtggcgcgtatggttgcggctaagcaagagt

SEQ ID NO: 33259 - DNA, 259 bp, Glycine max
  Clone ID: 700892910H1
aggtaagcacaaccaaagcaacaccccaaatggcttcagcttctgttcccatggcgttgtcactgagctctgttaccaacaacaacaagccttcatccgaagccttcttcaggccactacccctacgccaaccaaagaggaccctcttcaccacgaaggcagtgtcaaactccaagcctcaaatcaatgcatctttgaaggagaaggcagttgccggactcacagcagcttctgtgacagcatctatggtggttccgga

SEQ ID NO: 33260 - DNA, 264 bp, Glycine max
  Clone ID: 700892911H1
gagcgatcatttccaatcacaatggcagatcaactcaccgatgaacagatctcggagttcaaggaagccttcagtttgttcgataaggatggcgatggttgcatcacaacaaaggagcttgggactgttatgcgttcgttgggtcagaatccaacagaggctgagctccaagacatgatcaatgaagtagatgctgatgggaatggcaccattgacttccctgagttcttgaacctcatggctagaaagatgaaggacactgat

SEQ ID NO: 33261 - DNA, 263 bp, Glycine max
  Clone ID: 700892912H1
aaaataaccaaaacacgaggtgtcaagctctctgatttccgtgtcatcaatcaggatccaccagccatttctgatgaagcagtcatcaaggcagtagagactgcaacaaaagaactaaacttgacaagcaagttgatgattagtagagcctatcatgattcattgtttatggccaggttgtctccaatgggcatgattttcattccatgttacaaagggtacagccataagcctgaagagtttgccaccattgaagatatgtc

SEQ ID NO: 33262 - DNA, 264 bp, Glycine max
  Clone ID: 700892914H1
aacactcattaattgcaagaatggcacttcgttgcttggtgatgtccctttctgttctcttcactcttggtcttgcgagagaaagccatgccagagacgaagatttttggcatgctgtttggccaaacactcccattccaagttcattgcgagatcttctaaagcctggccctgcaagtgttgaaatcgatgatcaccctatgcaaattgaagaaacacagtacccgaaaaccttctgctataaagaagaccttcatccaggca

SEQ ID NO: 33263 - DNA, 82 bp, Glycine max
  Clone ID: 700892915H1
caatcttcaaagacttgaattcttcttacttaggttctgaatggctggaatttgctgtggtgttgtcggagaaggtgacact

SEQ ID NO: 33264 - DNA, 91 bp, Glycine max
  Clone ID: 700892917H1
atgaaagaggccatccattatttttcttttgtgtttgattctcaagtttttaccatattatagtagaaaatcatcatcatcgtatccattg

SEQ ID NO: 33265 - DNA, 259 bp, Glycine max
  Clone ID: 700892923H1
ataacgacgacgacgatgacgatgagtgtattaaacatctatggctatttctctggtgttgtagctgttgttgtgttccttatattattgctttggcagcgtcacagatttttcttcgcttcatctccgtcgtctccatccacttcattactgctcttcgattctatcaattcaaactcaaactccagaagcagaacctcaaattttgtgacagatgcagatttgaaatttttaatggagattttggatgagaagctcg

SEQ ID NO: 33266 - DNA, 259 bp, Glycine max
  Clone ID: 700892925H1
cgtttccttcccttccctaacgatctgaggaagacaccaagcttctctccacgcccttcttgggtaatctgaagtgcagcgatggcggatggattgcactcgcggcatccatcagtagttcagaagttatctggacagtcttatttgttgtctaggcttgcccctactcactcaagaaactattccacaactggtagttacctcaatggaggcttgcagtcttcgggtttggttccagtcatggcacatgcaccggctg

SEQ ID NO: 33267 - DNA, 260 bp, Glycine max
  Clone ID: 700892926H1
gtcttttgctcttccaattataagcacaacccaatcttttaattcgttacccgatctccatttccactgtgtctacaaaacacaaaaaacacaagtttttgagcacaatggaatctgaaaacggggttgctgtggaggaagagaaacgtgtcattggggtaacaaccaaggtggcgaatgtaaagaaagaagttgaaaatgactgcaatggtgcagaaattatgcccaagaatgaagtatctaaacccacagtagtggct

SEQ ID NO: 33268 - DNA, 91 bp, Glycine max
  Clone ID: 700892927H1
cacgattttgccttgtctagcaactgggtatgatgttgatataatacgtaattgcatgtcaaattaatgattgtgatgctattgtagtttg

SEQ ID NO: 33269 - DNA, 153 bp, Glycine max
  Clone ID: 700892929H1
aacaattctatatcatttttctcaatagttgcacgcgtctcgatgtcatgattagacatcattttttcctttagtaaattaaaatcatagtacttcgatttatctgtaaaaatcataatggaactcaaattaaatctcctatggtctcaatat

SEQ ID NO: 33270 - DNA, 265 bp, Glycine max
  Clone ID: 700892931H1
gagaaagtgggatcaaccggcggagtcattgatgccagttgggatgacagtccctggagcactccctttgagcaatgccgtgactcttggaggggttgcatttcccgccatggctccggtgatctccggcactcttttgacgaatcctctggcagcttctgctcagcttccgcaacatgcagctgcagctgctgttgccgcgcaaaagttgaatcaacataagatccaagatgaattaataattgctcgagaaattgtcataaat

SEQ ID NO: 33271 - DNA, 259 bp, Glycine max
  Clone ID: 700892933H1
caacccctatggcatatggcgatgactacaacaatttggggttgaatatgaagaaaaagtcagccaacctttttactcagcatgtgccatctgaatgtgaatcaatccttcaacttggtctttcgggtgtaacaaatgaggcatcaagtgtgcttgactgctcaggttcaactgagactgatgtgaatatgtcatgtttctcaagccaaacttcttcagaaaattattattcaaggattcctgttgttgatgagggttc

SEQ ID NO: 33272 - DNA, 90 bp, Glycine max
  Clone ID: 700892934H1
agcagagttcaagatcacgaaaagcggcattgagagtcagagttccttcgcggaagctcatgattctctctctcgccattttcgccattc

SEQ ID NO: 33273 - DNA, 256 bp, Glycine max
  Clone ID: 700892936H1
attggctcagccttcaatataaagggggcaatgcagtgccccaattgtcgtaagattgaaaaaggtcagtggctttatgctaatggttgccgatcatatccagaatttagcatggatgaatggacacatgatgaggatctatatgatgttagctactctgaaatgtcctttggagttcactggtgcccttttggtaacttgaccggattgcttcatctttcgaggaaggggattttgcttcaattgcatatcatga

SEQ ID NO: 33274 - DNA, 257 bp, Glycine max
  unsure (1)..(257): unsure at all n locations
  Clone ID: 700892938H1
ccaactcaatgcacagctcctcactactaaatatacatgaatcaccattcttgncccagatgacagttccttctctgaactcaaagctggcttcctcaactctctttctgatggccaaaagctcgagctcttacagttccacgttatttcagactccgtgtctagctccaactttgatacactgaccaaccccgtgagaacactggcaggggctaaacctggaaaggtggaacttaatgtgataagttatggaggga

SEQ ID NO: 33275 - DNA, 256 bp, Glycine max
  Clone ID: 700892939H1
atctctatatataccccattcctctcgttcttgtttttccacattcacattttcacatcgtttcctttcattttccctcactttctcgctccccaaacgcccctctctctcctccaatggccgaccagctcaccgacgaccagatcgccgagttcaaggaggccttcagcctcttcgacaaggacggcgatggttgcattactaccaaggaacttgggactgttatgaggtcacttggtcaaaacccaactgaggc

SEQ ID NO: 33276 - DNA, 235 bp, Glycine max
  Clone ID: 700892892H1
ggggtttattgccaaatgaagaaggctcacgagatacgcatgggatcagtcacatgctagcgctcctccttcttcttctctctccggtggtggtgactcgccggaagacaccaacttccaccttcaacgccgcctctggtgaacacccttctcaaaatctcacctgacccaattccactttctcctttctcttctcaatttcccatctgggtatccctgtttcctcaaaagttct

SEQ ID NO: 33277 - DNA, 258 bp, Glycine max
  Clone ID: 700892940H1
aaaaaacttggacggtgaaattggaaggttttccgggatcccaaggccgaatcttggttcaattttcgaaaagagaagagagaggaacaacaacacccgttgttgaatcttcaagctgaatcaaatcatatagagagagaaagagagagacccggataggaaaatagcgtttagagagagaaaggtgaagtgaggttgtttaaagtttgggtcttggtgggtgaaagggaaagatgacggatgtggtactgcatatat

SEQ ID NO: 33278 - DNA, 237 bp, Glycine max
  Clone ID: 700892854H1
atcttctgccccaccctgcatttcagcagagtgattctgttcactacaatgccatcatcactatcctctttcctccatatggttcctattctctcccttcttgtactctcatgtgtgatttgttctagtagttctcagggaccaccttcacctggctactaccccagttccaaaattagtcctgttagtttttatcaagggtttagaaacctatggggacctcagcatcagaggcta

SEQ ID NO: 33279 - DNA, 239 bp, Glycine max
  Clone ID: 700892855H1
cggctcgaggaatgaattcccatcagtttgatcgcggccttagagcggatcgcaagaccacaaggaagggcagccaaggtgttgcagccacacggaggccatcaatcacgtctactcatgctcgcagaagtgtggattcaccaaaactgtccaagggtaagcagcctctcctgccaccaactagaaccaaagtatcaacccaaagtcgctatcattttgatgctcccgacaaagcattg

SEQ ID NO: 33280 - DNA, 213 bp, Glycine max
  Clone ID: 700892856H1
cgtgaggcgagggtaaggtcgcgttgtgttgcgtcgtgtcgtgcgctggtcctctgtatctcgcttttgtgttcagaccggatcctagctccgcatcgcaaacatgtcgagcaagcaatgtggaaaagctaagcctttgcaagaacccgagtctgataacaagggttacgacgagaatgatgtggctaacattcagcaggaaaaggaagagga

SEQ ID NO: 33281 - DNA, 228 bp, Glycine max
  Clone ID: 700892859H1
aagaatgtgacacagccattgaagttcctgtatcctgttgaactgagtataaaagagaaaatagaggcaatagcaaagtcatatggagccaggggtgttgagtactcagaacaggctgagaagcagattgagatgtatagcaagcaaggattttcaggtcttccaatctgcatggctaagactcagtattctttctcagacaatgctgcagcaaagggagctccaagt

SEQ ID NO: 33282 - DNA, 237 bp, Glycine max
  Clone ID: 700892860H1
gcgaaaatgacaaccaccttcgcgaccgtcgcaggactcggtggtgcatcactgtcatccacctcatctcgtctcacctcagggtttgtgaaatcgccagtgagtgctaggaatcccttgaggcaagctgtggcaatgggaaatgggagggttacatgcttcgagaggaattggctgcgggcagattacagtgtgattgggtttgggttgattggttggctagcaccctcaagcgta

SEQ ID NO: 33283 - DNA, 237 bp, Glycine max
  Clone ID: 700892861H1
cttgctgtcaccctcacacttggttggcacttgtacttggctttaaatgtttctggaaggccttatgatagatttgcttgccactatgacccatatggtcccatttactctgatcgtgaacgacttcaaatatatatatcagatgcaggagtacttgcagtatgctatggccttttccgtcttgccatggcaaaaggacttgcctgggtggtgtgtgtttatggagttccattgcta

SEQ ID NO: 33284 - DNA, 239 bp, Glycine max
  Clone ID: 700892862H1
ctattctgtaggttatgcgagaccccactggaatcggtagaggatcaggatttgttgcattttcaactcctgaggaagcatctcgtgctctcggtgagatgaatggtaaaatgattgctggaaaacctctgtacgttgcccttgcacagagaaaagaagacagaagagcaaggttacaggctcagttttcacagatgaggcctgttgcaataacgccttctggaataaccccgtatgcc

SEQ ID NO: 33285 - DNA, 261 bp, Glycine max
  Clone ID: 700892864H1
cctcgttctgcgcgctcgagctcaccatctctaaggtactgctttctatctgctcattgctgactgatccaaatcctgatgatccacttgttccggaaatcgctcacatgtacaaaactgaccgggccaagtatgaggccactgcacgcagctggacccagaagtatgccatgggctgatttgtgtttggataatgtatattgaaatggattgcatctatgaaaacttttgtgggtttgcttttcacttcctgttttctgg

SEQ ID NO: 33286 - DNA, 239 bp, Glycine max
  Clone ID: 700892866H1
ctaggtactataacggattctggaattctggaaggttcttcaagtcaaacgcgagtcaatgactgaggccgcgagcctgcaagcacttatacgaagtcccgcagttttcatggagttcctgcagaggagcgtctacactggcgttctttcttggttaaactaggagctgacaatcttaagggtgtaaaaaatgaagaactcctagttgcttgccataatgtcagaagtgatctttgtga

SEQ ID NO: 33287 - DNA, 237 bp, Glycine max
  Clone ID: 700892867H1
atcaaggatagccttgataatgatgaagaaaaagttggagctgatattgtgaaaagagctcttagttaccctttgaaattaattgccaaaaacgctggtgtcaatggtagtgttgtcagtgagaaggtattgtccagcgacaatccaagatatggatataatgctgccaccggaaaatatgaagatttgatgtctgctgggatcattgatccaacaaaggtggtcagatgttgcctg

SEQ ID NO: 33288 - DNA, 235 bp, Glycine max
  Clone ID: 700892868H1
aaaatgaagagcctcctcttctctctcttcctcttcctcttcttagcctcctccgccgtcgccaccgtccccgcccacaacatcacccgcatgctggccgcacaccccggcttctccaccttcaaccactacctctccgtcacccacctggccgaagagatcaaccgccgccagaccatcaccgtcctggccctcgacaatgccgccatgtcctccctcctcgacaagcagctct

SEQ ID NO: 33289 - DNA, 237 bp, Glycine max
  Clone ID: 700892871H1
ccatcttccactctttcacactcctctatggccccaatctcaaaactcattcctttcctattcttaacaacccttttactttccctccaagttaatgccagagacagccaattcttcagcaaagtaacccctctcaacaacaacatcaaagcgactgagactcccaaaaatgaaggccaagtaaacaagccagaacaacaaccaacattcattcctgaaactgaaaacagttatggc

SEQ ID NO: 33290 - DNA, 235 bp, Glycine max
  unsure (1)..(235): unsure at all n locations
  Clone ID: 700892873H1
ctctctctctctctctctctgaagatggcttcacgcaggctcgtatcttctctgattcgatcctcccttcgtagatctcaatcgaagccctcaatttccgcatcgaaatcgcccctcacgtcatccaaccgtgnctcaccgcacggatacttgctgaaccgcgtcgccgagtacgccaccgccgcggctgctgctaccatcccacatgcctgattgttccggggaagaaggagct

SEQ ID NO: 33291 - DNA, 237 bp, Glycine max
  Clone ID: 700892874H1
ataacttggtatctctaaaggactctcagcattgatcaaaatgggcctctctagtctcccagcaccatctgaaggagtattatgtgtccttctggtgaacactgtattgtcaatttccatattcaaaggcattgtaaggacaatcctgcacattgttggcatccatcttccatcatcctccacttcaccctcttcaccagatccctcccaagccgcacctgagtcatttgaattgca

SEQ ID NO: 33292 - DNA, 236 bp, Glycine max
  Clone ID: 700892876H1
ctcaacaattcaactgcagggaactgtctggcaaatggaacttctgtaaatggtggtaaaggttattcttcaacactgaaaaggaagagatcacaagtggcaaatgctcatgaattattgaaaaggaaaaatcgacgccggcccttgactaaggttttggagagtacagccatggtgtcagttcctgtcatttgtaatcagcttcccagttcaagcagttctccactgtgtggggt

SEQ ID NO: 33293 - DNA, 237 bp, Glycine max
  Clone ID: 700892879H1
aatccctctctctctttctctttctctctcatccagatcttgcaaaaaaaaaaaaaacacaatggcagggagcgctcccattccacgcgaagagttcgtgtacatggcgaacatgggggaccaggccgagcgctacgaggagatggtggatttcatggagaaggtctccgcctccgccgagagcgaggagctgaccgtggaggagcgcaacctcctttccggagcttaaaagaaggt

SEQ ID NO: 33294 - DNA, 239 bp, Glycine max
  Clone ID: 700892881H1
attttcgtggcattcgtcactctcgtgtcgggtgaaggcgaaaaccaaatcaagatgctgagagtgggcgcaaagaggcttttgggaacgacgtcgttgggcgttagggttccggcgaggctgtaccacgagagggttgtggatcactacgacaacccccggaacgttggatcgttagacaagaacgacccgagcgtggggacgggtttggtgggggcgccggcgtgcggcgacgtgat

SEQ ID NO: 33295 - DNA, 236 bp, Glycine max
  Clone ID: 700892882H1
gactaatacattgaagacacgcagacgggatttggcggatgttttgataaataggggagtaaatttggatcctttaagcaagtggtcaaaggttggacttgttgtgtatgattctcaagtgcctattggtgccactccggagtatatggctggtttctacatgctgcaaagtgcaagctcttttctgcctgttatggctttggctcctcaagagaaggaacgtgtcattgatatgg

SEQ ID NO: 33296 - DNA, 235 bp, Glycine max
  Clone ID: 700892883H1
gtgctggaaattccagctatatgagatctgtgatgacaatagcttttgaatttgcatttgaaagccatatgcaagagcatgtagcatctatggcacgtcaatatgttcggagcattatatcatcggtccaaagggtagcattagcactttctccttctcatttgagttcacatgcagggcttaggtcaccattgggtactcctgaagcgcaaacccttgctcattggatttgcaa

SEQ ID NO: 33297 - DNA, 232 bp, Glycine max
  Clone ID: 700892884H1
gagaaagagagtgaataaatccagcattgttctgttctctgcaacattctccactctcaaccatggcttcaaagcttttactcatcactgtcttcgtttttgatttgattgcttttggacttgccgtggctgctgagcagagaagaagcaccgctagtgttgtgacggacaatgaaaagaattataattactgtgtctataactctgatatagcaactggctatggtgttgg

SEQ ID NO: 33298 - DNA, 168 bp, Glycine max
  Clone ID: 700892886H1
agcaggggcaaatgacaatggttttgtggtagtggtaatttgtgaaacattgatttggtacagatggcgtggagaaaagggtgtgaggaagtggctaattcggagcctctgttccacacgatctacgcttgtgtcagcatgggcgttaaggacggctacggctgcatc

SEQ ID NO: 33299 - DNA, 238 bp, Glycine max
  Clone ID: 700892887H1
ccgcccccctcgcctccgcctcaagcttccctccttcaccctcccctccccgaacgccgtcttcgccctcctcctcctcacctacttcatggtcgtctccggcattgtttacgacatcatcgtcgagccccccggcatcggctccactcaggacccctacaccggcgccgtccgccccgtcgtcttcatgtccggccgcgtcaacggccagtacatcatcgagggcctctcctccgga

SEQ ID NO: 33300 - DNA, 235 bp, Glycine max
  Clone ID: 700892888H1
ctctgggaaggatcctaccaaggttgataggagtggtgcctacattgtgaggcaagctgcaaagagcattgttgcaaatggacttgctaggagggcaattgtgcaagtttcctatgccattggtgtgcctgagcccttgtctgtgtttgttgacacttatggcactgggaagatccctgacaaggaaatcctcagcattgtgaaggagagttttgacttcaggcctggcatgatc

SEQ ID NO: 33301 - DNA, 238 bp, Glycine max
  Clone ID: 700892889H1
aatttacgcactcttaccttggagtcttgcaaggttactgcttctgaaattaagaagcttcagtcaactgatcttccaaatttgataagctttcggccagaataaatcaggagaataagagaattctgttatctgcctgttgaacaattctctgtacatatttatggctactgtttggataaaaaaatgtacataaaaatggcatgcaagaagttaaattatgctttattttgcatgt

SEQ ID NO: 33302 - DNA, 234 bp, Glycine max
  Clone ID: 700892890H1
ctagctcgagtttttttcttgcttccgggagctctgaacttgaccgacgtcgttttcacatcaaaacccttcaacaaaaaaatggcgttcttcttgaaccaaactagtatcgcttcccattttcgatctcactctcagaagactgaagatttggcttcttttcctcgccgtcgattccacgtcgaatcaggggctcgtgaaaaagctctcttggcagaagatgcaactctgaaa

SEQ ID NO: 33303 - DNA, 234 bp, Glycine max
  Clone ID: 700892891H1
ctcgagccgctttgcaaatcaacaatgggtttggatttgttcttttggtttgtgctttgtttgcctctcaactttgcttttttagcctcaacgttctaccaggttttgatgttgtctgacttggaagctgactttatcaacccctatgatgctgcatctcggattaactactttatcgttcctgagtttattgggcagggattgttgtgcgctttctgccttttaactggtcat

SEQ ID NO: 33304 - DNA, 240 bp, Glycine max
  Clone ID: 700892848H1
cttttaattcaaaaccctaattttcttttttccaccctccagcgacgccgtttctcaacaagtcttaccctaatcgtcaaccattcaccaataacgattcaaaaacccaaactttgtgtgaagtagttcattccccattactcactcgcttgttttgaattttatttgttgcttcgtttcccactatgaaagaaggtaaatcagttaaactcaaccatcaacaaccgcaccagaacggtc

SEQ ID NO: 33305 - DNA, 241 bp, Glycine max
  Clone ID: 700892810H1
gctcgaggacggccgcaccctcgccgactacaacatccagaaggaatcaacccttcacctcgtcctccgtctccgtggtggcatgcagatcttcgttaagaccctcaccggcaagactattaccctagaagtcgaaagctccgacaccatcgacaacgtcaaggctaagattcaggacaaggagggaatccccccagaccagcagaggctgatcttcgccgggaagcagctcgaggacgga

SEQ ID NO: 33306 - DNA, 241 bp, Glycine max
  Clone ID: 700892812H1
aaaagttattaagagcttttgcttttctttctgcgcgcttttcccaattaagtagttcttccttttctcaaagcaaaaaaaatcttcatcgagagtttcaaggttgagagtcctaacgtgaagtacacagagactgagattcagtccgtgtacaactatgaaaccactgaacttgttcacgagaacaataatggcacttatcagtgggttgtcaagcccaaaactgtcaaatatgaattta

SEQ ID NO: 33307 - DNA, 239 bp, Glycine max
  Clone ID: 700892813H1
gagcatttttgtttctcttggttagtcaagtcctgataatggtggcaagtcgatgcttctgttgcgggaagcctcttaaccctggaggctcaagggcctgtgcagttgttcttttcataatctgctgggtgtttttcatcatagctgaggtgtgcttgttggctggatcagtggaaaatgcctatcacaccaagtacaggaccatcttcggggagaatcctccgtcttgcgaaacagtt

SEQ ID NO: 33308 - DNA, 242 bp, Glycine max
  Clone ID: 700892814H1
gatttccaacacaactttgatcgcataaatgcccaaattcttgctcaaacaaaactgagagtactatatatctgccattacttgagatctgatcatatccttcaataaagcagcaaagcagcaatgagatccaaaacaacccaattcacatgtaccttcaaggtagcccttctcagccttgcggttttctgcctcttcatcttggtattcaggtcatccatattctcattgtctcctcaact

SEQ ID NO: 33309 - DNA, 240 bp, Glycine max
  Clone ID: 700892815H1
tctggatggagatatctactttgtttgttgggaccatgaattgattccttctcgcccaattgatccaatggactatactgctcctgcaactgtggaattggatcatgatgtgatgatcgaggaggttgaggagtattttgccaattacatagtcaatgacagtctgggaataattgccaatgcacacactgtctttgcagataaagaacatttgaaagcaatgtctgatcaatgtgttaa

SEQ ID NO: 33310 - DNA, 241 bp, Glycine max
  Clone ID: 700892816H1
ctctcttatcacacattctatattctctctctattatttttcaccctttttctctcttttgcaaagaactcaatttaattagtctatttgtaccaaaatggcttctcaagtttgtgagactttgactttcatcaacggtgatgatgggttgaaaatcaacggtgctcttctaatgtcatcattgatggaagagccatcaccaagtgatgagagtgatgatgatcgattggatagcttgatt

SEQ ID NO: 33311 - DNA, 248 bp, Glycine max
  Clone ID: 700892817H1
gctcgagctcgagccgcttcatcattcccctccttccatgccacccccactctccgcccccacaggccacgcgcctccatgtccgcggcaggccaccgccgccctacgactccggctcgttccggttcgagccgattagggagtcgatcgtgtcgcgcgagatgacccgcaggtacatgaccgacatggtcacccacgccgacaccgacgtcgtcgtcgtcggcgcaggctccgcgggtctctcgtgc

SEQ ID NO: 33312 - DNA, 240 bp, Glycine max
  Clone ID: 700892821H1
atcattattatatttttaattagaatgtgactctttttaacttgttcattggctcactcttagaatagtaattttgatccataagcaaattagacatgatatgctcatttacgttaatgataactgactattgctaactatgttttgctgtctaccttctcttccattcgggtgacacagcactgagatgcttactgggtaacactttattaagctcttaaaagaagggtggtcatggcc

SEQ ID NO: 33313 - DNA, 238 bp, Glycine max
  Clone ID: 700892822H1
cattttggctttcctcttctacaattctaaaatcacgcaaatggcatccaagagaatactgaaggagctcaaggacttacagagagatccaccaacttcatgcagtgcaggacctgtgggtgaggacatgttccaatggcaagcaaccatcattggtccaaatgacagtccctatgctggtggtgttttccttgtgaccatccatttccctcccgattatcccttcaaacctcccaag

SEQ ID NO: 33314 - DNA, 242 bp, Glycine max
  Clone ID: 700892824H1
attggggtttgaaaagaagccggtgctgtctccttgttctccatcgtaagatataactaattatttttatatcttcatcaagatgcgccgagggagaaccgccgccgccgctgccgccgttgtggatcccacgccggaccaggccaaggagacgacgcggttccgtggcgtgaggaagcggccgtggtggcgattcgcggcggagattcgagatccgtggaataagcagcgcgtttggctgg

SEQ ID NO: 33315 - DNA, 243 bp, Glycine max
  unsure (1)..(243): unsure at all n locations
  Clone ID: 700892825H1
ggaattttcgggaggaaaatcaagtatgcttgcaggaaggctcttgctgacagtcagccaagaatccgtgggagatttgcaaggactgaagagtctgatgtcaagagggaatgaatgacttataactgatttagtaggaagaaagtagagttgagtagctatatctgatcaagctatatggaaaaactcagcagtaatatgtgattagaacttatgccggggncccctctatccttgagcaga

SEQ ID NO: 33316 - DNA, 226 bp, Glycine max
  Clone ID: 700892826H1
ctcgagccgattcggctcgagttcagggttaagcggtgagattagcgaatctgagaaatggcggattcttctcgggaggagaacgtttacatggcgaaattggcggacaggccgagcgttacgaggagatggttgagttcatggagaaggttgcaaagactgtggaggttgaggagttgacggtggaggagaggaatctcctctctgtggcttacaagaacgtgat

SEQ ID NO: 33317 - DNA, 240 bp, Glycine max
  Clone ID: 700892827H1
gtcaggaggacctcactgagttggcacatggcattgagctttcaaatttgcctttcttttgggcattgaagaacctgaaagaaggtgtgcttgagttgccagaagggtttgaagaaagaaccaaggaacgtggcattgtttggaagacttgggcaccccagcttaagatcttggctcatggagcaattggacggtgcatgagtcactgtggctctggctctgtgattgagaaggttcatt

SEQ ID NO: 33318 - DNA, 240 bp, Glycine max
  Clone ID: 700892828H1
gttggattcaatgttaagaatgttgctgttaaggatctcaagcgtggttatgttgcctcgaactcaaaggatgatcctgccaacgaggctgctaacttcactgcccaggttatcatcatgaaccatcctggtcagattggaaatggctatgcccctgttcttgactgccacacttcccacattgctgtcaagtttgctgaactcatgaccaagattgacaggcgatctggcaaagagctt

SEQ ID NO: 33319 - DNA, 239 bp, Glycine max
  Clone ID: 700892829H1
cacatttgccatattcagttggctgctacagctttgcctataacaggaactcaagcagcacccaagaaagttacaaaggatgaactaggtaatgtagcaggaattgcagcaactgcaacagctagtggggggaaatttgacaagaaattggcaggtgaaaagcctcagaaacatgaaggaaaatatcggaagtttctgccagtagtggaaggaaccgggataggattactggagaggga

SEQ ID NO: 33320 - DNA, 253 bp, Glycine max
  Clone ID: 700892832H1
ttcggctcgagatggagtcccagacttccacacgagagaaggagtctctcaatctcagggaagtcccagaagcagataaaaccttgggcttggacatggccaagggcagcgcattctgcaagatgggtgaaggttggacatgcatcataactaaaactgaggggcctgatgctggcaaagttttcgttaaatgtggtgaaaattgcacctgtaccattgagggcgaacagtgtcccaagaattgaatttgcca

SEQ ID NO: 33321 - DNA, 245 bp, Glycine max
  Clone ID: 700892833H1
cttaccttttctcttaatccaaatacgatggcagccatggcaaccacaaccctctcttcaaaccccaaactctcattcttcaacggaaagcccgtcacatattcttcccgcgtcgcgcccaccaccaaattatcctcatccaaacaaggcacaatttccatgtccctaaccccacccccctacgacctccagtccttcaaattccagcccatcaaagaatccatcgtgtcacgggaaatgacgcg

SEQ ID NO: 33322 - DNA, 239 bp, Glycine max
  Clone ID: 700892835H1
ctggttgagtgcccacttcatagacgcgcaataccatataaagaaaccaatactggtggcagaatttgggatatcatttaagggttcgagttcctacgagagggatgaggtgttcaattcagtgtattacaaaatatacgcttctgcaaagagaggaggtgcagcgagtggagcactgttctggcagcttctaacggagggcatggagtctttccaagacggttacggaatcattcttg

SEQ ID NO: 33323 - DNA, 238 bp, Glycine max
  Clone ID: 700892836H1
gaggacatgaaacccagcagggtacatttgttcatgtacggtctcttgttcggtctcgccgacacgtgggcggccatgccggataacaaaatggtcggaaaggccatcagggatcccgagaagttgaaggtcatagcgtcgaacccgaggcgctacacgggcccacccagggtggggaccatgcgggagctgcttagggtgacacagtatgtacaggataatttctccaaggtaacga

SEQ ID NO: 33324 - DNA, 238 bp, Glycine max
  Clone ID: 700892837H1
gaaaccgattcttcatctcaggcttctatgagcagaagaggaagtgttaatcaggggtcacttgagtttaatggtaaggatgataaattggattccagatctcataatcaacttgccaggttttcttcaatggaatccttgaaacaagtggacagcagatcttcaaagaaaaacaaaaaattggaattcaacagtagccgtgtctcacctgctccaaatggtggttcacagtggggag

SEQ ID NO: 33325 - DNA, 236 bp, Glycine max
  Clone ID: 700892838H1
cgcggtttcatcggccctagacatgtcgataatctcgtacgacaacgcccacgccgccacgtcgcgcagagatgtgagctgatgtccatgtacgaccagtggctagtaaagcacggcaaggtgtacaacgcgtacggagagaaggagaagaggttccagatcttcaaggacaacctgcgattcatcgacgaccacaactcccaagaggaccgaacctacaagctcggactgaaccg

SEQ ID NO: 33326 - DNA, 236 bp, Glycine max
  Clone ID: 700892839H1
atgaccactgccacaccaatgagtcgcactcttaatcctgatgctgaattcgcatatggcgcgggtctaattaatcctcttaaggcggcaaatcctggtttagtgtatgatattagcgaagggattatgtcaagttcttgtgtggagagggctatacagatgaaatgcttcgagttctcactaaagatcatagtagatgcagcaaacatgctagaaaggaagctgtatatgacctt

SEQ ID NO: 33327 - DNA, 240 bp, Glycine max
  Clone ID: 700892840H1
cacaaccactcttaatttctctctgccttgctcatttacacacctctccaacctatcactttcagctttatttgaatccctctctctcctttccaaatggccagcgttgaggttgcacatcaaacaccaacaacagttccagataatgaaacaaccgaggtaatcaagacccaggaaacaaccccggaaccagtaccagccactgaggctcctgcaacagaacaagcagcagctgaggtt

SEQ ID NO: 33328 - DNA, 238 bp, Glycine max
  Clone ID: 700892841H1
gccaaggtaggttaaacactcttcttcatcgtcgtcgcaatgggacgtgtgatccgtgcgcacgtaagggagcaggctcggtcttcaagtcccacacgcaccaccgcaagggcccggcccgcttccggagcctggatttcggagagcgcaacggctacctgaagggtgtcgtcactgacgtcatccacgatcctggccgtggcgcgctctcgctaaggttcgcttccgccacccgttc

SEQ ID NO: 33329 - DNA, 236 bp, Glycine max
  Clone ID: 700892845H1
tggagtgtttggtgtgttgactaagggaattcaattgcactgaactccatgaataccaattgagttggatgcttggataaaaatggctgttcaaaactctctccaaataactagaagtggtagtggtggttatgacgatgacgggcgtgctaaaaggactggaactttatggagtgctgtggctcatatcatcacagccattatcggtgtggttgttctgtctttagcttggagta

SEQ ID NO: 33330 - DNA, 238 bp, Glycine max
  Clone ID: 700892807H1
gcctgatgaatccaaggctcttgtcttggttgagaagactcaagaagttgctgaagtgaaaccaactgagggctctatcaaccgagatgcggtgcttgcaagagttgcaactgagaagaggttgtcattaatcatagcatgggaagaaagtgaaaaatcaaaagctgaaaacaaggctcacaaaaagctttcatcagtttctgcatgggaaaacagtaagaaagctgcagtggaggcg

SEQ ID NO: 33331 - DNA, 237 bp, Glycine max
  Clone ID: 700892847H1
gagaaggagtctctcaatctcagggaagtcccagaagcagataaaaccttgggcttggacatggccaagggcagcgcattctgcaagatgggtgaaggttggacatgcatcataactaaaactgaggggcctgatgctggcaaagttttcgttaaatgtggtgaaaattgcacctgtaccattgagggcgaacagtgtcccaagaattgaatttgccacctgatgttgtgagcagca

SEQ ID NO: 33332 - DNA, 94 bp, Glycine max
  Clone ID: 700892748H1
cgacaccattgacaacgtaaaagctaagattcaagacaaggcagggatcccacctgaccagcagagacttatctttgcgggtaaacaacttgag

SEQ ID NO: 33333 - DNA, 94 bp, Glycine max
  Clone ID: 700892749H1
tgaaaaagtacacctatggaaagcacattgtcgcccgtgtggagaaacttgttgctcctggagaaaggagaattgctgctcaggctcctcctca

SEQ ID NO: 33334 - DNA, 87 bp, Glycine max
  Clone ID: 700892750H1
caagtggacccatcgctctactctctggtctaaaccctagcccgctgaatttaattctccatttttttgctgttgcattatatgggg

SEQ ID NO: 33335 - DNA, 94 bp, Glycine max
  Clone ID: 700892751H1
ctttctatggaagtctctgaactggctgggatggtcagtgtgggtacccttcttgcattcaccatggtggcaatatctgtgctaatactaagat

SEQ ID NO: 33336 - DNA, 90 bp, Glycine max
  Clone ID: 700892752H1
ttcggcgatagaaccttctcaccgatggtttcatgaggaatagtatcactgaaagcgaagatggcatgattagtttggcgctgatttgct

SEQ ID NO: 33337 - DNA, 254 bp, Glycine max
  Clone ID: 700892753H1
cccttcaccatcttcctcagcaagaggctgtgttaggatgaagtttggtcacaccccagcagcagtgaggattgaaggttttgattgcctcagcagggataggcgcaactgcagcatttctgctgttgcttaattcaattttaaacaaagaaaaagaaaagaaaagaggattaaagaatcaccaaagttctaagagcagaggagatttttgcactgaggagctaatcttaatttcaatcttattgtattatatc

SEQ ID NO: 33338 - DNA, 89 bp, Glycine max
  Clone ID: 700892754H1
cagcaattcactcaccctcttcaccacctctttaagctcaagctatctaagaattgttattacttctttctttgcaagtttacgtcttt

SEQ ID NO: 33339 - DNA, 99 bp, Glycine max
  Clone ID: 700892755H1
cggctcgagcgagatttctttcgattgaactcatttctctcttcttcgccacgcactcttgtctctgtaagcggtgattttggttctggacaatgtctc

SEQ ID NO: 33340 - DNA, 103 bp, Glycine max
  Clone ID: 700892757H1
ctgtaacaatgacacaatgcaggaagacttgaaacgtcagctatttggtttgcctccaaggtatcgagattctgttagggctataacacctgggttaccatta

SEQ ID NO: 33341 - DNA, 98 bp, Glycine max
  Clone ID: 700892761H1
ctcaacataaatattccgttttgcgtttctctgcctaaaaggattgacagatgggtcaagcactaggttgctatcaagttgatcagtcaaatgtggct

SEQ ID NO: 33342 - DNA, 246 bp, Glycine max
  Clone ID: 700892764H1
aagaagacttgtaaaattaagtgtgtaggacaatggcactaccaaatgttggtcaatgcctagttgaccaacaaggaagatcagtgccaaattataaggttttcttgccttcctatcagtgagaataaatttgtgaatgtgtgttagctcctcgctaacacatatcttatagtggtttaatttatatggatgagtgttagctcctcactaacacatcttgtagtggtttaataaatctgtggatga

SEQ ID NO: 33343 - DNA, 241 bp, Glycine max
  Clone ID: 700892766H1
cgaccgcgttcttttctacggagcctcgaccaagaagaatcgcagagagaagagggtcagagtgagaaagagagagagagagagagaaactgagagaaattcgcaaaccctaatttcggaaagatcggcgatggctgcctccaaggatcgcgagaacttcgtctacatcgccaagctcgccgaacaggccgagcgatacgaagaagatggtggatccatgatagacgttgcgaatctcgac

SEQ ID NO: 33344 - DNA, 255 bp, Glycine max
  Clone ID: 700892768H1
attctacttaccttttctcttaatccaaatatcatcatctgaaacgatggctgccatggcaaccacaaccctctcttcaaacccgaaactctcatttttccacggaaagcccgttacatattcttcccgcgtcgcacccaccaccaagttattctcatgccaacaaggcacaatctccatgtccctaacccaacccccatacgacctccaatccttcaaattccaacccatcaaagaatccatcgtctcacgcga

SEQ ID NO: 33345 - DNA, 123 bp, Glycine max
  Clone ID: 700892769H1
ctggtactgtccagaacagtggagctgagatagaagaaacatgggaaaattggaaaccgctttcagaaatttttgtgtaatatgttgcacggttgtgttgaacactgctcattgaggtaaaag

SEQ ID NO: 33346 - DNA, 123 bp, Glycine max
  Clone ID: 700892771H1
actgaaccaaatcatcacacacacatactaaggagcaacaattcttctacaatggatctcctccttctggaaaagaccctcataggtctcttcctcgctgcggtggtcgccatcgccgtctcc

SEQ ID NO: 33347 - DNA, 124 bp, Glycine max
  Clone ID: 700892772H1
tattattacaataataataataataataacaataataataatttcatgatgaatcccatgcacatggcatatcttaaccaaccaattgtggccactgcagacaacaacatgtttctgtggtgaa

SEQ ID NO: 33348 - DNA, 81 bp, Glycine max
  Clone ID: 700892773H1
caatatttgcccttagcagtaacaaaattgccgtggtcaagtattctctgttgggttctattctttcaaaccttcttctgg

SEQ ID NO: 33349 - DNA, 246 bp, Glycine max
  Clone ID: 700892775H1
cgaagattctgtagagaagaagagcaatggcgtccaacgattccgattcgcagatgaagatcgtacatggcgatgctggttacatacttgaagacgttcctcacttcgccgactacattccaaatcttcctacatatccgaatccgcttcgatccaatcctgcttactcggttgttaagcagtatttcgtgcacatggacgacacttccctcagaaggttgttgttcacaaggatagtccaagagg

SEQ ID NO: 33350 - DNA, 81 bp, Glycine max
  Clone ID: 700892776H1
acgttaggtccccttctgatccaactctgctctcggcttgtaaatacccagttaattgttaaaaacaagtataatttttgc

SEQ ID NO: 33351 - DNA, 99 bp, Glycine max
  Clone ID: 700892778H1
gcccagaggcgaactggggttgcgagtggaggatttatgggacattcaagaaccacagctaagtcctgatgagaagctcaatgcttgctttgaaagcat

SEQ ID NO: 33352 - DNA, 101 bp, Glycine max
  Clone ID: 700892779H1
cctgcccaacatcaaggttcctctcattcttggtatctggggaggcaaaggtcaaggaaaatccttccaatgcgagcttgtctttgccaagatgggaatca

SEQ ID NO: 33353 - DNA, 253 bp, Glycine max
  Clone ID: 700892780H1
gaggctgaagggttcaccggatgtttatctgagtggccccatccgaaagtacatcatggacagagggggcaggttccatcttaggtggggatgcagagaactgctttatgacaaatctgctgatgggagtatttatgttacaggactttccatgtcaaaggccactgccaagaaaattgtgaaagctgatgcttatgttgctgcttgtgatgtccctggaattaagagattacttccatcagagtggagggaa

SEQ ID NO: 33354 - DNA, 100 bp, Glycine max
  Clone ID: 700892784H1
gtgattctgaaaatctgaaatttcatttctctctgtataaatatcctagtccttatcagcttcactatttcgattgacatcgccgaagaaggtattgacg

SEQ ID NO: 33355 - DNA, 100 bp, Glycine max
  Clone ID: 700892785H1
gaaaattcagaaatgaaggatggtagaaaaatcttgtcagaggaagcatctaagatgaaagaagccactgatgcacctgaggataaagccatctcaactt

SEQ ID NO: 33356 - DNA, 97 bp, Glycine max
  Clone ID: 700892788H1
ctttcttctcggtccagtgtctctttcaaagtgctgctgctgccagcattgacctgagctagagcagtaaccggcatcaccactgccagtacggtac

SEQ ID NO: 33357 - DNA, 248 bp, Glycine max
  Clone ID: 700892789H1
tggaaacactggcggtaacagtaacaataacaatattgttaatgtttggtattcatcatgggatgctactactacaactaatgcaccacacaccaccacggccgcggagggctacgccggcggcggtcaccgcctccatcaccaccaactatacggcggcgaagggtgtcacgtgcaggcggaccctcacctcacgtgcttgcatcttggtaaaagacattactttgaggatgctactaacggtgatg

SEQ ID NO: 33358 - DNA, 243 bp, Glycine max
  Clone ID: 700892746H1
atcaaagtttcacttcagccttatccggtttagggtttcggtttttgacccaacctttgacgtatcgaaaccttaagtttcggatcaggtctgagcaatctggttggtagaacctttggtcttagagagtcaagttttatgtctgaattagacgatcaaattcctactgccttcgatccttttgctgatgcaaatgctgatgactcgggtgctgggtcaaaggagtatgtgcatattcgcgta

SEQ ID NO: 33359 - DNA, 248 bp, Glycine max
  Clone ID: 700892790H1
attccaatatattccattctctctgtgtatgtccctacctctcccttcaagatgcagatcttcgtcaagaccctcaccggcaagaccatcacccttgaggtggaaagctctgacaccatcgacaacgtcaaggccaagatccaggacaaggaaggaatccccccggaccagcaacgtctcattttcgccggaaagcaacttgaggacggccgtacccttgctgactacaacattcagaaggagtgtac

SEQ ID NO: 33360 - DNA, 247 bp, Glycine max
  Clone ID: 700892791H1
aaaattattaaaagaagaaattgataatttaaagaaagaacttgagaaagagtctacaataaattcaaacaaggaatctgtggatgaggctggtggagaccaaaccagtacacatgcaatattacaacagaaagaaaaggagctggaacttcttatccgtgatttggacgacaaagttcgttttgggcagaaagccattgaaaggccaggttcatcggcaggaaagtcgtctactttttctgataag

SEQ ID NO: 33361 - DNA, 245 bp, Glycine max
  Clone ID: 700892792H1
atccctagtaagccgccatggtgaagtactcaagggagcctgacaatccaaccaagtcttgcaacgctagaggcgccgaccttagggttcattttaagaacactagggaaactgcctttgcaatcaggaagttgcccttggttaaagctaaaaggtacttagaagatgttcttgcgcacaagcaggccattccgttcagacgtttctgtcgtagtgttcgaaggacagctcaagcacagaataga

SEQ ID NO: 33362 - DNA, 248 bp, Glycine max
  Clone ID: 700892793H1
agagcattgaatcttcagaccttaacttttcaagatacggcgataccttttttgaggttgttttcactgggggtcgtacacaacctggaactaccaagcctgatgagggggaccgccatccatactctataatagagtgtgagcctaagcgggaagtcattttaccatctgtaatctacatacaaaagattttgcggcgaaggccatttcttatcaagaatcttgaaaatgtcatgcggaaattcctt

SEQ ID NO: 33363 - DNA, 248 bp, Glycine max
  Clone ID: 700892794H1
tgctgtgtcatggttcacgggggaggctgcacagagtgattttgaggatatagatgaagttgattatgatgatgaagaaggtgatgaggatgaggatgaggatgaggatgaggaggaggaggaggaggaagaggaggaaaagaaagggaagagcaggagtaagagtggtggcagggtcaaacctggtaaggatcagccgactgagcgccctcctgaatgcaagcagcagtagtgtttggctgtgtaca

SEQ ID NO: 33364 - DNA, 100 bp, Glycine max
  Clone ID: 700892796H1
gaaagattcgaaacgaagaaagaaagcgttgtgaagaatggcggaagagggacaagtgatcggtgtccacagcgtagaggagtggaaggaacatctcaag

SEQ ID NO: 33365 - DNA, 241 bp, Glycine max
  Clone ID: 700892802H1
catatacaaattctctgtgttgtgttgtgtacttgtgttaattgtgttgttgttgtaggaaatttaagtgaagagagaatgatgatgaagtctgctatgtgtgcattggtgcttgtggcactggttgtggttgaagtggggcccatggctgaggctgcggtgacttgcaacccaacacagttgactccttgtcttccggcaattaattcaggttctgcaccttcgagtgcttgttgccaga

SEQ ID NO: 33366 - DNA, 240 bp, Glycine max
  Clone ID: 700892804H1
atgtgattgaggcagatagtgaaatcctaagattgtttagttggaagatggaggcagtggaatcaatagcggttccggaaccggacgaagacgatccttcatcgacgcttctggatctctcgagttaccagctccacgaccttgactcggtcgagttgccacccagcctcaccgagttggacctcaccgcgaatcgcttgtccacgctggacccgcgcatagggacctctcccatctcaa

SEQ ID NO: 33367 - DNA, 241 bp, Glycine max
  Clone ID: 700892805H1
ctcgagccgaatcggctcgagtcaaagttcaattctttctctgtcgtcgctctttcttcaacttcaagcttaattcctcatgtctttcagaggcctcagccggccaaatgccacatcaggcatgggtgttgctgatcacagcaaaaacaccttcatggaattgaagcagaagaaggttcatcgttatgtgatctttaaggtcgatgagaagaaaagggaggttgtggttgagaagactggt

SEQ ID NO: 33368 - DNA, 136 bp, Glycine max
  Clone ID: 700892806H1
atttttttacaccattattattttgcatctttttgtttgataaagagagacaaagagagatcatatgtatcaaaaaatgtttttcttattttattattaaaaaggatataaaaagtatataaaatatagatgtaat

SEQ ID NO: 33369 - DNA, 209 bp, Glycine max
  Clone ID: 700892688H1
aagctaatgcttcgggccatagagcacgaaggccgctgtcaatatttgctgtgcaaggtcattgctgttacttataacaaaagggagcatggcaaagacgtagaactgggaagggagataacctatgcatgagagttaataacctgatgactgaaaacactgttttacccaatttgagttttgaatcacatcacaatgatgtagaaatt

SEQ ID NO: 33370 - DNA, 203 bp, Glycine max
  Clone ID: 700892689H1
caagatttcaatcagaaaaaagaagaagcaaagaaagatgataatggttgtggttatgacaggtatattaggagagtacacagcagtgctaacaagggtcacagagcgccttcttcctcgccatggcataagttttcgtggtctaaggaggaaccttcgttttgcttccacaacctcttcttcagattcagcttcttcttttc

SEQ ID NO: 33371 - DNA, 203 bp, Glycine max
  Clone ID: 700892692H1
ctggaagccagggatggatatttttgtttctcatgttcgtcgaaagcaactccctgcatttgtttttcctgatggttacaaacgcactcgaatgccaaggcatataagccatcaagctgaaataacaggtgatgatgccacaaactgctactctgggcctggattgtctgaaagatgcatcaagaggaaaaattactctgaaa

SEQ ID NO: 33372 - DNA, 207 bp, Glycine max
  Clone ID: 700892693H1
ctgagaaacaggcaccaatgtgtactgttcattcatttccacataacattgaccacggcttgacatgggctcggtcagagtttgagggtttgcttgagaaaactccagctgaagtaaatgcatatttatctaatccaaatgaatatactaatgcaatgaggaatgctggtgatgctcaagcgagggataacttagagcgtgttcttg

SEQ ID NO: 33373 - DNA, 209 bp, Glycine max
  Clone ID: 700892694H1
tctcgagccgaatcggctcgagggatgctggtttgagaacttgggtagaccaaatgggaaatgtacatggtcgtgttgatgacgctaaagctttattgattggatctcacatggtacatgcataggctaaaatcaaaagatctctcaatatgccacaatatgatcctactgggatcttgtataatgaagccgaatgctacaaactgaaa

SEQ ID NO: 33374 - DNA, 212 bp, Glycine max
  Clone ID: 700892695H1
gtgatgtttatgaaggagttccaaaggattacaccggcgaagatgttactgttggtaacttttttgctgctttacttggaaacaagtcggcacttactggtggcagtgggaaggttgtggacagtggacctgatgatcatatatttgtatactatactgaccatggaggtccaggggtgctcgggatgcctgctggtccttacttatatgcg

SEQ ID NO: 33375 - DNA, 216 bp, Glycine max
  Clone ID: 700892696H1
ttttactttaagcctgctttgaatgacaagtccaaggccaagattgtcagggacagcaacggtgtctcagggttcgataagtctgatctgaagctggatgttttcatggtttagcacgacatggctaacatgtacatgtggggtttcaaggagaagctggagaacgcgctgggttagatgcagctgaggagttacatgaatgggcattctcgccaa

SEQ ID NO: 33376 - DNA, 86 bp, Glycine max
  Clone ID: 700892702H1
tagaattcaactcttctctttctctttctcttctcttctgtcgaagaagaagaagcagaagtacctacagaaacatgctggagaat

SEQ ID NO: 33377 - DNA, 242 bp, Glycine max
  Clone ID: 700892705H1
cgaaagggataatattgttactccaatgagaaataagcctgctatattaagcactgcagataaaaagagatctactcctagatcagttaattttacacccattagagaacttaatagattgactgcttcagtcatgaggaaatttgaaagtacaagagctggtgctggttcttccaaggcttcaaaggatagcttgactcctctaagaactccaactatggcttccaaggagatgcaaaagc

SEQ ID NO: 33378 - DNA, 256 bp, Glycine max
  Clone ID: 700892706H1
cattcaaaggagcttcataatttcaacagctcaataaggaactcttctagttagattttgtgggatttggattcttaattgctcaaggtttttgcctcccccccgggcacaccgaagccgtagcagctggttcacaattcaaagcatcatctgcgggtgtgattgctaaattctgtgcacttggaaatatgagcgtcgatggatgggtaataaaatagacggttcaacttatttgaatgggctaatttgatcattc

SEQ ID NO: 33379 - DNA, 84 bp, Glycine max
  Clone ID: 700892707H1
tgcatggcaaaaataaaggagataatttggtcgccgattggttcactaggtataagatcgccttgggcgtggctcagggaatct

SEQ ID NO: 33380 - DNA, 100 bp, Glycine max
  Clone ID: 700892709H1
caaaaaaggaaaggaacttgagccacattctgtccctggtggactcaagaagagtctttcataggacagttaaaatgatagcttgcaaaaagggttcact

SEQ ID NO: 33381 - DNA, 259 bp, Glycine max
  Clone ID: 700892710H1
ctagggttttgtaaaagagggtttgacgatggtgggtggttgctggtttgagtttgatagtggtgggtggctactttttcgagtttggcggttgtgtgtgggtgctgattcaagttcgatggtggcgtgtgggtcgccccttcaccgtcggcgctgacgtggaccactacaagaccaccctgaccaccgccctcgccgtgttgcctgtcgcctcctcgctaaacaacgaggaagagaaggtgtggtgcatcgcgacggg

SEQ ID NO: 33382 - DNA, 260 bp, Glycine max
  Clone ID: 700892711H1
cttcaccttcagtcttcactcacgcgcgccatcttctcagtcaccaccactccacgcccacgctgagacaaggaatatgggtgatcggcaagtagttgaccaacaacacatgggtgatccacaactgccatcttctcctccctcaaaggatgatatggtttcatgtgttatggctttagaggctgctttgcttccctgtttgccagccagagaacttcaagcaatagaccgttctccccacccctcacatcaaattgatg

SEQ ID NO: 33383 - DNA, 97 bp, Glycine max
  Clone ID: 700892713H1
ccggaggatgaggggcggtgaggagcgatcgacagggattcgaaagacgggaagcggagtgagacaatggctggtcctggacggcagaggagagacg

SEQ ID NO: 33384 - DNA, 259 bp, Glycine max
  Clone ID: 700892715H1
atggcaccgtaaatttgatggtctggcattgcactattcctggcaagaccgggactgattgggagggtggatatttcccactgacaatgcacttcagtgaagattaccctagcaagcctcccaagtgcaaattccctcaaggtttctttcaccctaatgtgtatccatctggaactgtttgcttgtctatacttaatgaagatagtgggtggagaccgctataacagtgaagcaaattcttgtgggcatccaagacctg

SEQ ID NO: 33385 - DNA, 97 bp, Glycine max
  Clone ID: 700892716H1
gttgtgtttgggggatgggatatcagtaacttgaacctggcagatgccatggccagggccaaggtgtttgatatcgacctgcagaaacagttgaggc

SEQ ID NO: 33386 - DNA, 100 bp, Glycine max
  Clone ID: 700892717H1
cataaagcctcgctccccaaccctcaccctcatcatcgaagagtccaccggcatagcccgtgaccaagtctacgacgctgcagaagcgtacctctccacc

SEQ ID NO: 33387 - DNA, 98 bp, Glycine max
  Clone ID: 700892718H1
gattatcccctggagttggatgtttatgatttttgttcagatgatcttcgtaaaaaattggatgctcctagacagatcctaagaaatgaggaaggcaa

SEQ ID NO: 33388 - DNA, 99 bp, Glycine max
  Clone ID: 700892719H1
taaacctgaagctaacgaaccagtcataaaccctaacccaacccccgccctatggccaccctcgaccaaatccaaaacggcgtttcttccgacaatccc

SEQ ID NO: 33389 - DNA, 261 bp, Glycine max
  Clone ID: 700892720H1
actcgagcgattcggctcgagggataacttcagatttgcatcagccactattgcccttaactggtgttatcttcctgggagcaaatttcatacctagcatttgggatgctttccagtttactggagcaactgccgcagtctgtataggattcatttttccagctgccatcactcttagggaccgctacaacattgcaactaaatcagacaagattttgtgtgtcattatgatagtcctcgcagtcttctcaaacgttgtgg

SEQ ID NO: 33390 - DNA, 257 bp, Glycine max
  Clone ID: 700892721H1
ctccataacacaaggcagaaagcaagctcatcctagagttttaaaaatggcagcagcctcctccatggctctctcttccccatccttggctggcaaggccgtgaagctgggcccatcagcccccgaagtcgggagggtcagcatgaggaagaccgtcaccaagcaggcctcctccggaagcccatggtacggcccagaccgcgtcaagtacttgggcccattctctggcgagcccccgtctaactcactggcgagtt

SEQ ID NO: 33391 - DNA, 99 bp, Glycine max
  Clone ID: 700892722H1
gagtcatgcatttgaaacttatgacaaatttatcaaggttcaaggagatgaattgaaaaaaatgccagctcctgaggttgctgtgaattattatacagg

SEQ ID NO: 33392 - DNA, 96 bp, Glycine max
  Clone ID: 700892723H1
ccttgtcaccaaacacgttgttcccggttcaatgctgtacgtggaggggaacctcgagaccaaatgcttcaccgatccgataaccggcattgcccg

SEQ ID NO: 33393 - DNA, 99 bp, Glycine max
  Clone ID: 700892724H1
caactttacccaacatgaataagcaaaggaatgcgacattattcttcccttgctctttaatggctcgatcctatctcccaagcaaggtctcagagatag

SEQ ID NO: 33394 - DNA, 96 bp, Glycine max
  Clone ID: 700892725H1
caccctcgccgactacaacatccagaaggaatcaacccttcacctcgtcctccgtctccgtggtggcatgcagatcttcgttaagaccctcaccgg

SEQ ID NO: 33395 - DNA, 94 bp, Glycine max
  Clone ID: 700892726H1
aaaagtagtagatcttttagctccttatcgtcgtggaggaaaaataggacttttcggtggagctggagtgggtaaaacggtactgattatggaa

SEQ ID NO: 33396 - DNA, 206 bp, Glycine max
  Clone ID: 700892687H1
aaactcttaagctcccgtagttaaatctgcgagccattagttaaagaaaaaaaaaaccctaaaaagtttaagatgggttccaaaactcgctctttccttgctcttttcctcacgatcaacattcccttctttgcccttgcctctgcctgcgggacatgccctagccctaagccaaggcataataggctcaagcctgttaagccaag

SEQ ID NO: 33397 - DNA, 252 bp, Glycine max
  Clone ID: 700892727H1
gtttcaggcccaaaaccaggaactgaagtcagccttgttaatgctgtgccttgtagaattgctttcgaaaggggcaaagagcgccatttttgctttctagcaatctctgcaggaacatctgggtggcttgtgctagcagaagagttgccaatgaagaagctctatggagttattcgggttgctgcaccgttggctgggtgcaatcccaggattgatgataaacacccaagatggttacatctgcggatccga

SEQ ID NO: 33398 - DNA, 259 bp, Glycine max
  Clone ID: 700892732H1
aatccaaccacatcaatagccatgaaaaccacactctcactctctcctttacttctcttcctactcttctccctagtccaaggactcacccccaaatgtgacacccaagaccatggctcaacccttgaagttttccatgtgttcagcccatgttccccatttaggccatcaaagccactctcatgggcagagagtgtcctccagctgcaggccaaggaccaagccaggctacagttcctggctagcatggtggctggga

SEQ ID NO: 33399 - DNA, 90 bp, Glycine max
  Clone ID: 700892733H1
cagatggcgagttacgaggctattaagaactttgatgatgatgatgatgatgatgatgatgtggagatggcactcccccatagccagatc

SEQ ID NO: 33400 - DNA, 95 bp, Glycine max
  Clone ID: 700892734H1
gttgataaggaagactggaaactagagacattatgtgacctttatgagactttggctatcacccagagtgtcatctttgtgaacacaaggcgtaa

SEQ ID NO: 33401 - DNA, 97 bp, Glycine max
  Clone ID: 700892735H1
gttcctccgctcaacaactataataacatctttctctctccgaacagatcacactatggccacctcaagcgccaaatcagtccatgatttcaccgtt

SEQ ID NO: 33402 - DNA, 95 bp, Glycine max
  Clone ID: 700892736H1
ccagtgcccatttataagccaattcccatttttaagccagtaccgaaaccggttcccatttataagccaattccaattttgaagccagtaccaac

SEQ ID NO: 33403 - DNA, 93 bp, Glycine max
  Clone ID: 700892739H1
cgagatcaggcggcggaaggtggtgtctccggtgaccggaaaatctaccggcggtggcgttaacatctcggcgtcccactccggcggcgacga

SEQ ID NO: 33404 - DNA, 94 bp, Glycine max
  Clone ID: 700892740H1
ccttgagtgtgagacatgctacaagaaggttaagaaacttctcggcaagtaccctcaaattcgggaccagaagttcgatgagaaggaaaacatt

SEQ ID NO: 33405 - DNA, 90 bp, Glycine max
  Clone ID: 700892741H1
cgaaaaaccagaatgacggcgtgtatatttgtataacatatagttgtttttaatatgttggaaagagtgcaatccgtatgaatttattgg

SEQ ID NO: 33406 - DNA, 253 bp, Glycine max
  Clone ID: 700892744H1
aaaagtgaaaaccagaagtacgaacgaaagagaagagcgatttagaagtgagagaagatggggttgtcgttcacgaagctgttcagcaggttgtttgcgaagaaggaaatgaggattctgatggtaggtctcgatgctgctggtaagacaaccatcttgtacaagctcaagcttggagaaatcgtcaccactatccccaccatcggatttaatgttgagactgtggagtacaagaacatcagcttcactgtgt

SEQ ID NO: 33407 - DNA, 231 bp, Glycine max
  Clone ID: 700892647H1
attcggctcgagctcagaacacctttgtcccacgtttattattacacattatgcaaaaaatagctaacgttacaaaatttaaaaatatatgggtgaatttgtacttgtgttttcatcaggactcattgatctggccatcaaaaggaatagtttgattggaggagatgactttaagagtggtcagaccaaaatgaaatcggtgttggtggatttcctagtaagggccggcat

SEQ ID NO: 33408 - DNA, 214 bp, Glycine max
  Clone ID: 700892649H1
gtgcttttgatcttggagcaagacttcaattcatatacaccaaagacacatactatcttcataagcaaaggactcaaagtaatagttttctacaaaaaaattgaagtttggggggggatctacatctctatgggattatcactttccttactctcatcagcctgggaagaaatcgttagacattcactatttggtctgtctttgaacttcactt

SEQ ID NO: 33409 - DNA, 214 bp, Glycine max
  Clone ID: 700892652H1
gtaattgataattgctcagatcaccactttattcaagaggggaaaggattgacatcatctcagtttaaaaagggttgggtgaagaaggtacaacaagaatggagcatcctggagaaaaatcttcctgaaactatttatgtccgtgtttttgaagaaagaatggatctcatgcgagcagccattgttggtgcatcagggacaccttatcacgatg

SEQ ID NO: 33410 - DNA, 198 bp, Glycine max
  Clone ID: 700892654H1
ggctcgagccgattgctagaatggaatttagatgctcagtcatctcttttaccattctcttctctcatgctcttgcaggagagagccatgtccatgcatcgctacctgaggaagattattgggaagctgtttggccaaacactcccattcccactgcactgcgagagcttctaaagcctctccctgcaggtgttgaaa

SEQ ID NO: 33411 - DNA, 211 bp, Glycine max
  Clone ID: 700892655H1
caaacatccttagaataaagcaaccatgagcttaacacacccatcacaagtccaaaacacttgaacttgctgaaaggcaagacatgaccactttattctaaggatgtttgtttaacacaaaacaccagagtgcacgaaaaccatcacagacataatacataagtttttagctacagcttaatagtttatcattattcctaattaagggcta

SEQ ID NO: 33412 - DNA, 211 bp, Glycine max
  Clone ID: 700892656H1
tgtgcacccttcatggtcatggcaaaactagaacacccttcatcttttgtcacattggtggcacttcttctagcagtgtctcttttcgttgctccaacatcctcaacatccagaaaaactattctcaagcaccacccttacccaacaaaagggttccgagtcatgcttcgccacgttgattcgggtaaaaatttaaccaaactagagcgtg

SEQ ID NO: 33413 - DNA, 208 bp, Glycine max
  Clone ID: 700892659H1
ctgatgttgaagaatcagcggatgagttgtggttaggggtgaaatgccactcgaacccagagctagctggttctccccgaaatgcgttgaggcgcagagttgactagacatctaggggtaaagcactgtttcggtgcgggccgcgagagcggtaccaaatcgaggcaaactctgaatactagatatgacctcaaaataacaagggtca

SEQ ID NO: 33414 - DNA, 223 bp, Glycine max
  Clone ID: 700892660H1
atctggttcaaggcggaggttgcaagacaaagtcttggaaccaagatcactccaatctccatttggcttctccagaaaagcctcctttcttgttaaggcagctgctaccccccctgtcaagcaaggatcagacagacctttgtggtttgcatcaaagcaaagtctttcttacttggatggcagccttccgggtgactatggatttgaccccacaggcttttca

SEQ ID NO: 33415 - DNA, 212 bp, Glycine max
  Clone ID: 700892661H1
gaacaacatatgtgtatgactccttcttcagaccatatgttgcgaaacatgagacagaaattgatcgcaacttattggaactaaggacaagggcaggggatattgcagttttgtattggcaaagagctttcagttatggtcagactagaatatatgacattttgcaatttgttgctgcacaatcgactccagctcctcgacctgctcaggta

SEQ ID NO: 33416 - DNA, 213 bp, Glycine max
  Clone ID: 700892662H1
cgcgtcgctccgcaccagtttcaccgcacgaatatcttactgtttggagcgatccgagaaaaactctgtaaacatgttggtttaccaggacctccttacaggtgatgagcttctctctgactccttccgttacaaggaaattgagaatggaatgctgtgggaagttgaggggaagtgggttgttaaaggagcagttgatgtagacattggtgc

SEQ ID NO: 33417 - DNA, 216 bp, Glycine max
  Clone ID: 700892663H1
ctgctttctttggccatgttggcagcaagacctcttgtggttatggggtggctacagggggacccttagcctggggcttatgctacagcaaggaattgagtcctgataaattctactgcgatgactactataaattaacctacccttgcactcctggcgcagatactatggccgtggtgccatcccactttactggaactacaactatggaaaagc

SEQ ID NO: 33418 - DNA, 223 bp, Glycine max
  Clone ID: 700892664H1
ctctagatctcactcagcattcaccaacctgcttctctgttctcttctttgccttcccaagaagaagaagaagaagatgccttcttcagaatcatcaacaggcttctccgaaaccatttgagtgaccggtgctggtggcttcaactcacttagatggtcaaactcctcctggagaaaggctacactgtccgaggacacctcagaaacccagatgatcccaaga

SEQ ID NO: 33419 - DNA, 235 bp, Glycine max
  Clone ID: 700892665H1
ttcggctcgagcctaagcctgagacataccatagactatatggtgtttctccacaattcccatggagcctaagacacaaccccaagcgaatagtcctccaccaaaaccttgggaacaaacaggttcctcttcgggtccagcgcctttcaaacccccgtcagctggcaacacaagtgatgtagttgaggcttcagggactgcaaaacctggggaaattgtttctagttctgatagg

SEQ ID NO: 33420 - DNA, 221 bp, Glycine max
  Clone ID: 700892666H1
caaagactgagtcctatgaatattttcgtccccaagtttcttctcctagtgcggtgtcttcattttccaactcttctagcatcaagagggaaagagatcaggtcttgggaggagaagaatttgaggtagtggtagagaaagttccaacaagggttgttggtgatgttgatgaggatggtaaccccagaaagaaacttagactcacaaaagaacaagcagca

SEQ ID NO: 33421 - DNA, 218 bp, Glycine max
  Clone ID: 700892667H1
ctctttacaaggcataccttgaagacttctatagattttgtcagaaacttggtggtgccacagctgagataatgtctgaccttctagcttttgaggctgatagaagggctgtgaatattaccataaatagcattggtactgagcttaccagagatgaccgtagaaaattgtactctaattttggtttgctatacccatatggtcatgaggaacttgct

SEQ ID NO: 33422 - DNA, 212 bp, Glycine max
  Clone ID: 700892668H1
tggaagagtggataaagtggaagccttgaagcactacaaatttagcttagcatttgaaaattctaatgaggaagattatgtaactgaaaaattcttccaatcccttgttgctggaactatccctgtggttgttggtgctccaaatattcaggattttgctccttctcctggttcaattttacatattaaagagatagaggatgttgagtctg

SEQ ID NO: 33423 - DNA, 210 bp, Glycine max
  Clone ID: 700892670H1
ctggtggatgcagtttgggaatgaccatgttatgggatactggacggctcctctattctcgtacctctctgacagcgcgtcaatgattgagtgggggggagaggttgtgaactctgagtccgacggccaacacacctcgactcaaatggggagtggccatttccctgaggagggttttggcaaggctagttacttcaagaacattcagat

SEQ ID NO: 33424 - DNA, 208 bp, Glycine max
  Clone ID: 700892672H1
gtttaatcagtctgctgctgctgcgcaggccgcactgaatccggcaatggcgcaggcgttgaccgcgctgctggcatcgcaggggacgttggggctgacgaatttgttggggagtattggaacgagtgctgcagttaaccctggtgtgccttctgcaggggctgcggtgcagggtggttacagtgctcaaccgaatataagtcccggt

SEQ ID NO: 33425 - DNA, 204 bp, Glycine max
  Clone ID: 700892673H1
caaaaatcatatttttaccgttctgattggtttttcagcttgtgggtcgatgtcaactgtgtcgaaagatgacaacttggtgctgtcttcggaggactcttcgtgcccagaagagtctgagcttgaattgggtcttggcttgagcctctcttctggcccttcatcaaagtctcatcaccaccatgttcatgctcctacaactct

SEQ ID NO: 33426 - DNA, 205 bp, Glycine max
  Clone ID: 700892674H1
ttgatggatggataatttatcaacacaaagaaacatttatatgtttatctttacgtggttagttcgctagtctagtttgtggagctgttattattgtattaaaattgaaactcattcagtgttcacatgatatatttgctttaccttgttgctttctgaaagcgagagtcaattgatttgttgtaagttgaattgatatatagac

SEQ ID NO: 33427 - DNA, 206 bp, Glycine max
  Clone ID: 700892675H1
tacactttcagccccacacacttgcaaataataattcttttttttttcttcgtccttccatgatccatcatcgtattttctcactatccgttacggtgttaccttacactgctgtatacattttcccggacagttcataattttcctggaaaaaaaattctgatttaattcgggcccagttttccttccccttataccagaatact

SEQ ID NO: 33428 - DNA, 206 bp, Glycine max
  Clone ID: 700892676H1
gaagaacattcttgtttttgaccttgggggtggaacttttgatgttagtatcttgacaattgataatggtgtttttgaggttcttgctacaaatggagatactcatcttggaggtgaggactttgatcagagaataatggagtacttcattaaattgatcaagaaaaagcatggaaaggatattagcaaggacagtagagcacttg

SEQ ID NO: 33429 - DNA, 212 bp, Glycine max
  Clone ID: 700892678H1
taaatgctaaacgaaagaaatcaattgtaaagtggattctagttcatgtactcttgcccccaatagggaaccctgcatcacagagtccttatcagttagtgggaatggtactactacttcatctatgagtgtaaaatccacccctgaaattgaaaagaagtttgttcatcatgtatatgatgctattgcgccgcatttcagtgccacccggt

SEQ ID NO: 33430 - DNA, 215 bp, Glycine max
  Clone ID: 700892679H1
gtatctatgttgttttaatcataaaaaaactaataatactgataacatgcatacatgaacttgaagcctctcaatgaagaaagaggttgtcccgaaatctgagggtaaatccttccttaatacatctatgcttattggtatgcttccctctttcaatatatatggatttactggtaatgcaaatgttttattttattgtcagccattcggatcat

SEQ ID NO: 33431 - DNA, 226 bp, Glycine max
  Clone ID: 700892646H1
ggctcgagctccggaagcccatggtacggcccagaccgcgtcacagtacttgggcccatatctctggcgagcccccgtcctacctcactggcgagttcccaggtgactacggctgggacactgctgggctttcggccgacgcagataccttcgccagaaaccgtgagctcgaagtgatccactccaggtgggccatgctcggggccttgggctgcgtcttccccga

SEQ ID NO: 33432 - DNA, 217 bp, Glycine max
  Clone ID: 700892680H1
gagcggttctgtgtcgtggcaaagaacccatggcgctatctgttgatcataaaccaaatcgagatgatgaatatgcaagaattgaggccgctggaggcaaggtgatacaatggaatggtcaccgagtatttggtgttctagcaatgtcaaggtctattggtgataggtatttgaagccatggattattccagaccccgaggtgacgtttcttcctcg

SEQ ID NO: 33433 - DNA, 213 bp, Glycine max
  Clone ID: 700892683H1
ttcattttgttcctcacccagtcaccaaccccgttgtccggagccaccattttgcgctccggcaatgttcttcccggtggccatcgtcccttaaacccaccacacttcaaagtcatgggtattccatgggacgacgtcgttgtgatccagcaagggaaggatcacaatgagccctgcatcgtcaccgtcaattgccccgacaaggctggtctc

SEQ ID NO: 33434 - DNA, 208 bp, Glycine max
  Clone ID: 700892685H1
atagaatgtgtggtttttcttttctttcaggttatgagtaagtatggtcgagtgaagaacttccgcttggttagggacattgtgaccggagcttctcgtggttatgcttttgttgaatatgaaactgaaagggagatgcgacgagcatatatggatgctcatcatttgattgttgatgattctgaaatcatagttgattacaacaggc

SEQ ID NO: 33435 - DNA, 208 bp, Glycine max
  Clone ID: 700892686H1
ctcaaatctggtgtggtgaataacatcacccctcacactcactcaacctaaacaaaatgcagagtcagagaaccacgccgctaaggaaccctcacacctccacctccgatctcctaacgtggtccgaacaacctccgccggaatcctccgcctccggctaccgctctcgccagccttctgataaaatcggtgaggttctccgcggaag

SEQ ID NO: 33436 - DNA, 223 bp, Glycine max
  Clone ID: 700892604H1
taaatggaatgtcatttgtggaaggatgggaacaaaacttttatatttccaaatggagcatgcaccagttgctgattgaatgcccatcaatatatgaacttatgggttgtcctaattctcattggaaacatattcctgctctggaattgtggcgtgagagacatgattctgatgggaaatcacatattgttctggagtcatatccaccatgtgatagcatcaa

SEQ ID NO: 33437 - DNA, 212 bp, Glycine max
  Clone ID: 700892605H1
tctctcctctgtcttcatcaatcctcgttgctttatttgaggccacattatacgcatctctccctctctctccttaccacccactatgcgtcttcctcgccagctctatttacgtgattcagattcgcttcttcctctcccttttctacaattctcagatttgtaagtgggtcggttttcctgcttagaaagtctcttacggtctgaaattt

SEQ ID NO: 33438 - DNA, 220 bp, Glycine max
  Clone ID: 700892606H1
ctattatcatccgcagctgcttttattcgcaccgcaaacagtgagccatggccgtcggaaagaacaagcgcatctccaaggggaagaagggtggcaagaagaaggcagctgatccctttgccaagaaggattggtatgacattaaggctccttctgtttttcaagtgaaaaatgttggcaaaaccctcgtctctcgtactcagggtaccaagattgcttc

SEQ ID NO: 33439 - DNA, 220 bp, Glycine max
  Clone ID: 700892607H1
ctcgagccgttcgcctctcaactatccatccaagaaggaactcaatctcgctctctcggatcgccctatcatcatcgatcagggtatcaagagctttcaattggagagaaagagtgggaagaagtgttacatgcttgctgctagagctctcagcattatttggggtgacactgcgcaatactggaactggacaaccgataccaattccaggttcccggaa

SEQ ID NO: 33440 - DNA, 220 bp, Glycine max
  Clone ID: 700892608H1
cttctccctttttctctctgtctctctctctcggtctcgctcatcttctcatcaagcacagagttacagactcaccgatcttccgattctctttcgtcttggtttatgagctcgaaggagagacccactcttggtggcacgcggattaagacccgcaaacgaaatattgctgcgccgctggaccctgcagcattctcggatgcagtggtccagatttatt

SEQ ID NO: 33441 - DNA, 219 bp, Glycine max
  Clone ID: 700892609H1
cttttgtgttagtgagagaaagttctctctgcttgtctctctacgactcaaaaccctattgcgtgctttgcaatcgaccccgattatggccaacagtaacctccctcgaagaatcatcaaggaaacgcagcgtttgctcagtgagccagcacctggaattagtgcgtccccttcggaagacaatatgcggtatttcaatgtgatgatccttggcccaac

SEQ ID NO: 33442 - DNA, 219 bp, Glycine max
  Clone ID: 700892611H1
tggaatggtgctggtgctcacacaaactacagcaccaagtccatgagagaagatggtggctatgaagtgatcaaagcagcaattgacaagttggggaagaagcacaaggagcacattgctgcttatggagaaggcaacgaacgtcgtttgacaggacgccacgaaaccgctgacatcaacaccttcttatggggagttgcaaaccgtggagcttctgtt

SEQ ID NO: 33443 - DNA, 220 bp, Glycine max
  Clone ID: 700892612H1
tcgggactttcactagccgcagcagcctcaggaggagaataaggatgtctcacaggaagttcgagcacccaaggcacgggtcactgggatttctccccaggaagcgtgctgctcgtcacaggggaaaagtgaaggcattccccaaggatgacccatccaaggcacccaagctcactgcattcttgggttacaaggctggtatgactcacattgttagaga

SEQ ID NO: 33444 - DNA, 219 bp, Glycine max
  Clone ID: 700892613H1
tggctattgagcatgctgattttgatggtattgagcgtctggctttggtaactggtggtgaaattgcatcaacctttgacaatcctgagtctgttaagcttgggcattgcgaccttattgaggagattatgattggcgaggataaactgattcatttttctggtgttgctatggggcaggcatgtacaatagttttgagaggtgctagccaccatgttc

SEQ ID NO: 33445 - DNA, 239 bp, Glycine max
  Clone ID: 700892615H1
attcggctcgagattgtttgttcgttgtaactcgttcttcttcttttgttgttctgtgtttgtgtttgttttttctctcacctgaaaatgtcttgctgcggtggtaactgtggttgcggaagctcctgcaagtgcggcaacggctgcggaggctgcaagatgtacccagacttgagctacactgagtcaaccaccaccgagaccttggtcatgggagtggcacctgttaaggctcaatt

SEQ ID NO: 33446 - DNA, 223 bp, Glycine max
  Clone ID: 700892617H1
tcccttggcacagttcatagggtatcatagtgtgaagttccatgcatgggaaacggttcaagtggggtttgcgctacgcccttgtgagcatcttagcgtggcgaatgacgctggttcgatggtgattgaagaaggatcttatttgttgcttgttggggaccaagagtacccaattgaaatcactgtttgatcatgcaacaattggagtgttcaatcaatcaag

SEQ ID NO: 33447 - DNA, 223 bp, Glycine max
  Clone ID: 700892619H1
tgataagtgaatttctatactctgggtttttggtggatgattatgttcatcaaggtttgttttttcccacttgctttccataaatgtgaaattgggaacttgctgatcattttataagctataattcctgtagagtttttttttttcctgtgaaagcattaacgataatgctcggagatcacagttataaccttgattttgtcactgaaaagttttggctttg

SEQ ID NO: 33448 - DNA, 223 bp, Glycine max
  Clone ID: 700892620H1
cggaattcgggtcgagaaaccatttctgatgggtttgatgaagttgggttcctagaggctgggagtcccaaggcctatatagatcgcttgtagcaagttggatcagaagcctttcatgagcttctcgagaaacttggcaaatctataaaccatattgagtgtgttatttatgattcattcttcccttgggcagtagatgttaccaatagattggggatacttg

SEQ ID NO: 33449 - DNA, 219 bp, Glycine max
  Clone ID: 700892621H1
cggaaagagacctcgtcctccaatgaagagaacaacaagcatgtccgaaatgaccttggatctgaacacagccgccgatgccgccgccgccgccgaccaacagagatcaggtgttggtccctcggcagcagcagatcagactacgaggatgttggcatcacccaaaatcctcagaagacattcttcgtatttcggcgacgcgcgtcacttccttcgtgc

SEQ ID NO: 33450 - DNA, 209 bp, Glycine max
  Clone ID: 700892622H1
ctcgggccgattcggctcagatctaacaaccacttatcccctagctccttctaacgaatgatgaaaaatggcgcgtaacaagatcagagagtatgactcaaagaggttgttgaaggagcattttaagagactctctggcaaggagttgccgatcaagtctgcacagattaccgcatcaactggtgtcactgagctacaagtctaggaac

SEQ ID NO: 33451 - DNA, 214 bp, Glycine max
  Clone ID: 700892623H1
gcagtttcttgtcttctctccattgaccatgtctgctactttcaaataccaacctacgggacttcacggttggggcgcgccgagatcttcttctagaaatctcgcaaggttcttctcaatgcgattcgcgtgcaactctcgccaccataaaatattgcatgcttccgtttctcacccttcatcactctccatttctcacgactcatctaccgag

SEQ ID NO: 33452 - DNA, 216 bp, Glycine max
  Clone ID: 700892624H1
catacaccttccaacattattttttttctcctctagcttccacactatgtctaaaagcaatgtgagaagacatgctcttgagaagtgcaggagtgtgaaagagacacagaaaatattgaaccacagttttttcaccagaaacctcaagaaagtgtaccctatagggcttcagaaaagcacttcatctttgtctctgtcttcaatttcattgtcttt

SEQ ID NO: 33453 - DNA, 211 bp, Glycine max
  Clone ID: 700892626H1
ctcaatttagttttaacaataatattactagtttcattgatagttgcattgtatttgtcaatatcacctaaattgacaaatacaatgatatttatttttatagttacatttttttgaagggcagaaattgtagtgaaagcgataattctagtactagtataataactagtacgaatgatacaaatgatagtgattccactataggagaaag

SEQ ID NO: 33454 - DNA, 211 bp, Glycine max
  Clone ID: 700892628H1
ataaacgccgcccaaaaccatttatagggttttcttttctttgccaagaaaatgagagagtgcatttcaatccacattggtcaggccggtatccaggtcggaaacgcctgctgggaactctattgccttgaacacggcatacagcccgatgggcagatgccgagtgacaagaccgttggaggaggagacgacgccttcaacacattcttca

SEQ ID NO: 33455 - DNA, 215 bp, Glycine max
  Clone ID: 700892629H1
gtttgttcttcttccttattttcttccctagtcaaggagattcatctctgcaggttgttttagacaagaaaaaatggtgaagatttgctgcattggtgctggatatgtggggggtccaacaatggcagtcattgctctgaagtgcccctccattgaagtggctgttgttgacatctccaaatcccggattgcagcatggaacagtgaccagcttc

SEQ ID NO: 33456 - DNA, 219 bp, Glycine max
  Clone ID: 700892630H1
catatatcattttagcataatacatggcagatcttcaacaaaaactggatgctctgaagggtcttgttggtgtgctaaatagcatggatgagggtgaaactcacaacaatgcaacttcacccaataacccccataatcctactcctatgcctggaaggaatcactcaattggaaaatagaacaacagtggcactcagaagatcaaaggtctgagtaacc

SEQ ID NO: 33457 - DNA, 223 bp, Glycine max
  Clone ID: 700892635H1
caacaatggcttctgtgcctcaaccaaaaatctcccttctaaccttattcttcttctcgtccttcaccatcattgcgcatgcaattgttcctcaaaacgaaaccttcaaatttgagaactcaggtgaacttggaccctacatcgttgagtacggtgcagattacagaatgataagcatcttcaactctccattccaagttggtttctacaacaccaccccaaa

SEQ ID NO: 33458 - DNA, 216 bp, Glycine max
  Clone ID: 700892637H1
ctcgagccgaatcggctcgagccaccgatgaaacccccgagtaactgcccctcagccatacccttgcaaccaaacttggagctcgcctcacagaggttaggaagaatggcacctgtgcttggttgaggccagatggtaagacacaagtaaccgtcgagtactacaatgacaatggtgccatggttccagttcgtgtccacactgtcctaatttcca

SEQ ID NO: 33459 - DNA, 209 bp, Glycine max
  Clone ID: 700892641H1
gcaagatcttggtgaatgcatggtggctggccaacaaccctgcacactggaagaagccagaggagttccggcctgagaggttcttcgaggaggagtcgcttgttgaagccaatggcaatgactttaggtaccttccctttggtgttggcagaagaagctgccctggaatcattcttgcattgccaattcttggcatcactttgggacgt

SEQ ID NO: 33460 - DNA, 208 bp, Glycine max
  Clone ID: 700892642H1
ggtgccttctcgctgtggttttcatcgtcttccttctcttatattgcttttttgttttgtcttcgccgcacgccgaaacaatggccggaaaaggatagggtcctgctatcggaatcgatctcggaaccacctactcttgtgtcggtgtttggcaacatgaccgagttgaaatcatcgccaatgaccaagggaacagaacgacgccttc

SEQ ID NO: 33461 - DNA, 230 bp, Glycine max
  Clone ID: 700892603H1
accgattaccgatttcccttatctctctccatcttaactccaagcacaagaatcatcttcccatttcgtttctgaccaatggcttccctcactgtcccaaaccattgtgttcccactttgcttcgcactcactctctcaactacccatcttcccaatacctcccacttccttccgcgccatcaaattctcaattttttggcctcaaggtatctcattcttccttttccac

SEQ ID NO: 33462 - DNA, 211 bp, Glycine max
  Clone ID: 700892643H1
attgaatgtatctccaggaaaagtggagaataatcatagagacactcaagaagactacctagagaaagatgagttcagctttggtaatagagaaatggacagggagatgaatcagcttgaaggtgagaaggttggagatgggaaaccaaaaaccatgcctccagcaagtgtgatgacaaggcttatattgattatggtgtggagaaaactc

SEQ ID NO: 33463 - DNA, 212 bp, Glycine max
  Clone ID: 700892644H1
atcccgagaagtttaaagagctggcgcaagctctatgaggttctgagtgaccctgagaagcgtgagatatatgatcagtatggtgaagatgcgcttaaggaaggaatgggtggtggcggtggccatgatccatttgatatcttttcatctttctttggcggtgggagtccctttggatcaggtggaagtagtcgaggtaggaggcagaggcg

SEQ ID NO: 33464 - DNA, 214 bp, Glycine max
  Clone ID: 700892645H1
tttgtcgtcgccttcttcttcgtcgatgaacaactgtttccagttccagaaacagtaccagacgacgacgcagtacgtgaagatggaggagcacaattttctcagcgccgacgaggcctgcaatttcttctcggacgaacaagcaccaactctgcagtggtactgttcagaggaatggagttaagagggaagaagaagaagcttaattaattga

SEQ ID NO: 33465 - DNA, 270 bp, Glycine max
  Clone ID: 700892564H1
caacagatatctcaaggcatacaatcctcttctgctgatcaatttctatgagatgcatctccggtatactcctacaccgtgactgaacagggtaatgaaggggcttcctgtgtttgctgttggtgataacaatgtagttttgtagacgcagcggatcgtgaagggtaatacttttttggttagtgtatgacgatataaccattagaccaattgtttcaaatgcctgcctgcatgacttcatactaagacaaccaagaattagagccatga

SEQ ID NO: 33466 - DNA, 93 bp, Glycine max
  Clone ID: 700892565H1
ttgttgtgagtaagagctaaggcttcctgcaccgagcacaccaacttgatacctctgattctttctttgcttagaattccacagaatatgggg

SEQ ID NO: 33467 - DNA, 251 bp, Glycine max
  Clone ID: 700892566H1
gccaagtgatcatcacattatggccacaaaaacctaaatggagaaatgttgattaaaaggagacgacaaaaaaaggggtaggaggaaggccaagggtttgggtggtataacagtgatgtagtagtccttgacctttcttcttcctacatttttatttgatggtttttgaatcccaccttaaaatgtcaattactggcaagtcctgctactaggctgtagtggaactgggacttcttagtgtgtcttctaaa

SEQ ID NO: 33468 - DNA, 247 bp, Glycine max
  Clone ID: 700892567H1
ccgcccggagctcgtatgagagttggtttaactgccctgactatggcggaatattttcgagatgtcaatgaacaagatgtacttctatttatcgacaatatctttcgcttcgtccaagcaggatctgaagtatctgccttattgggtcgaatgccttctgctgtgggttatcaacccactcttagtactgaaatggggtgcttacgagagagaatcacttctaccaaagaggggtccataacttcta

SEQ ID NO: 33469 - DNA, 246 bp, Glycine max
  Clone ID: 700892568H1
attgccatttcaatccccagtttcttcttcaacgtcctcttacgagcagatcccaattctccttcccagtttcaaaccctaattccctcattcccatggcctcagaagagcccactgtcgcggtggaacccgctcccgaacctgccaccgctgagcctcccccggaggagaaggaggatcccaaacctgaagccaaggctaagaaaaccaaggaacccaaacctaaaaaggtttccagaccacgca

SEQ ID NO: 33470 - DNA, 245 bp, Glycine max
  Clone ID: 700892569H1
atcttttcaagccttaaatgagtaaaaaagagtgaagaaaggaaagaaaggagcaccatttttggtttcagaaacataattagcaagagagttcaaaatggggaagagagagtttaatggggtggtcttgatgatgctgtgtttgtgggtttgtggtgtcacagcctctgtgacttatgaccacaaagccattgtggttgatggcaagagaagaattttgatctctggctccattcattatccta

SEQ ID NO: 33471 - DNA, 245 bp, Glycine max
  Clone ID: 700892570H1
cacttgtgcaatttggccactatgaacacagggcttgctgcaggtgcagccttgcttgcactcttggctatcaccttctccttgttgagccctcaaaccctgttttctccgcctgagattccgggctcgaaggaccaccttcacgctgctcggttactccatgtcaccggagccgtcgggccggagagtcttgtcttcgacgctgacggcggagggccctacaccggcgtcgccgatggccggat

SEQ ID NO: 33472 - DNA, 245 bp, Glycine max
  Clone ID: 700892571H1
ttcagattctgtgaagaacaatgttaatggcaactcttggcttgcaagcagttcgtcctcctccattaacgtccacttccgacccaccacctctttttgatggcaccaccaggttgtacatcagttattcctgtccctatgcacaacgagtatggataactaggaactacaaggggcttcaagacaagatcaaattggtccctattgatcttcaagacaggccagcttggtataaggagaaagtc

SEQ ID NO: 33473 - DNA, 248 bp, Glycine max
  Clone ID: 700892573H1
ggcaaggttccgggactagcagttgtgatagtagggaacagaaaggattcacaaagctacgtgggaatgaagagaaaggcatgcgccgaattgggaatcaaatccttcgatgtggaccttcccgaacaagtcccaagctgaactaataaaacaagttcacgagttgaatgttaaccctgatgtacatggtatattggttcagcttccgttgcctaagcacataaatgaagagaaagttctgactgaaa

SEQ ID NO: 33474 - DNA, 252 bp, Glycine max
  Clone ID: 700892575H1
gaaaggacttgatggcattcaaggacctatgtatgtgggaactggatgtgttttcaatagacaagcactttatggctacagtccaccatctatgcccaaattaccaaaatcatcatcctgctgttgctgcccctcaaagaagcaaaccaaagacgtctcagagctttatagagatgcaaagagggaagaacttgatgccgccatttttaatctcagggagattgacaactatgatgaatacgagaggtcaat

SEQ ID NO: 33475 - DNA, 255 bp, Glycine max
  Clone ID: 700892576H1
ttcgcttcactccctctcttgtctcgttcctctcccaagtttctaactttttcacacattctcaatctcgctctccaattcctaagtgggtcccaacccaattcggatttcgtttctgggtttccccaattcgaagctctgcactttcccctttgaagtggaattttttttcgttcctgtgaagttccattccatattctgggaatgggtctataaaacaagcttccaaattggagagaaagtcccaaacttttc

SEQ ID NO: 33476 - DNA, 256 bp, Glycine max
  Clone ID: 700892577H1
aatttgtgaggcggaacctggagtggaagtgcgatcccagtgttagtgtgtatttcctctcttctcactccgggatcgatattttcaagaacagatcgaaaagccgttcatcgatttgttggatctgtgagtgagaagatggttactaagacagaggagactcaattgaacaggctcgaaaaccaggtcgataacggcggcggcggcgcgtgggagtacctctgcctcgtgcggaagctcaaagttcggcggtcgg

SEQ ID NO: 33477 - DNA, 249 bp, Glycine max
  Clone ID: 700892578H1
ctccattagattaccaagctctgcaactttgcttctcaacatggagtatcgtctcctacccatttttactttactcaatattgcactggtggcaacccatgctgctttaccccctgaagtttactggaagtcggtgcttcctactacgccaatgccaaaagccatcactgatatcctttactctgattgggtggaagagaaaagcagctcagtgcatgttggaggtggaggcgtgaacgtgcatacagg

SEQ ID NO: 33478 - DNA, 261 bp, Glycine max
  Clone ID: 700892579H1
gttgattcaagtgacgttgataggcttgtgatagctaaggaggagttccatgcaattttggaggaggaagaactaaaaggtgcagttgttctcattttcgcaaacaagcaggaccttcctggtgcacttgatgatgctgcagtgaccgaggctctagagttacacaagatcaaaaatcgccaatgggctatttttaaaacttctgccataaaaggagaaggactttttgagggccttgactggttgagcaatacactcaaa

SEQ ID NO: 33479 - DNA, 265 bp, Glycine max
  Clone ID: 700892580H1
ggctgagaaaatagcgacgcggaagcacgctcgtcttcacgatccggcgcggcgtgtcctgcgattccgctctccgacgagtcggcgcagggtaaagaatcgcgcgattcgtctggaaatcgagattctagcacgattcatcccagatatagagattcaaccacgattctggaacaaaaacgaaacaacctccgattcgtatcggtagcagctggaatcgtatcgaatcgtgcgatacgtatcgtgaatcgtacgatactaacta

SEQ ID NO: 33480 - DNA, 255 bp, Glycine max
  Clone ID: 700892583H1
gtctgcactctgatctgtgggtatatattccttggttttgtcagaaacaaccccctagagctgcaaagggttctgatttgcagaaccaattgaatcttgctcaagaagacctaaagaaagcaaaggagctgcttattcaggctgagaaggagaagctaaaagcaattgatgacttgaaagaagcacaaagagtggctgaggaagcaaatgagaaactccgggaagcattggttgctcaaaaactcgctgaggaga

SEQ ID NO: 33481 - DNA, 229 bp, Glycine max
  Clone ID: 700892587H1
atcagattcaagctttagcgggacacaagcggtgaattgtgtcacacacccttttaaatttattttattttaatatcatggccatgatattaatgaagttcatatagtgtacacggaccctttaagtcttattcttttctttttcctacaaatgatgtagcattgtactcgtaataccatttttaatcttttttttatgtgcacataaattacaatcatggttggagtc

SEQ ID NO: 33482 - DNA, 243 bp, Glycine max
  Clone ID: 700892588H1
ccgtaagctcccaagcagtgggaggaggctcgggactctgaccgcgtgcctgttgaagaatgagccggcgactcataggcagtggcttggttcagggaaaccaccggagccgtagcgaaagcgagtcttcacagggcaattgtcactgcttatggacccgaacctgggtgatctatccatgaccaggatgaagcttgggtgaaactaagtggaggtccgaaccgactgatgttgaagaatcag

SEQ ID NO: 33483 - DNA, 248 bp, Glycine max
  Clone ID: 700892589H1
tgtttttcattggcatgaaaaactccatccctagaagggtacccaagattgctccaaagacaaaaacctattagtttttgcagcaattgacccctttcattgggggctgttgtttcctggttcttcatcatatcctctccaatctgccaggatttgggttgagtactctctggttcagaatcaatcttcctccctttgagcttggtagttttggcttcacttggattaaattattggctattattatt

SEQ ID NO: 33484 - DNA, 284 bp, Glycine max
  Clone ID: 700892591H1
ttcggttttcggctcgaggtcgcagtcatggtttatgtgggtgtagtagtttaatagtttttccaggtatggaaataaaattgttgcaatcaaagttctgcatcgtgggagcacttccgaataaagggcttccctagaaaatcgttttgctcgagaagttaatatgatgtctcgcgtccaccatgacaatcttgttaagtttattggagcatgtaaggatcctcttatggtaatagttacagagctattaccagggatgtcactgcgtaaatatttaacgagta

SEQ ID NO: 33485 - DNA, 251 bp, Glycine max
  Clone ID: 700892592H1
actgtacataagtgtcaaatcaggacgtaaagaaggatgctaacttactgggtgttcgccgaacatgtatcatgctgatggaatgtctatgtgatttcctgagcaactcaggttgtgtttctaatgtaatttcagaagatatcaaggaccgggctaaggcagttgctgaagaatggaaacccagattggatgctcttgacatcgatgctagcaatgtgaattccttggaggctcatgcatttttgcaactt

SEQ ID NO: 33486 - DNA, 74 bp, Glycine max
  Clone ID: 700892593H1
caacgatagatatcatttgcccccagccgccgccctaatgacaacccctctctgtctcttccttctgatcatgg

SEQ ID NO: 33487 - DNA, 262 bp, Glycine max
  Clone ID: 700892595H1
atcaagggtgagggccttccatggcttccgcttgtgcttcctctgcaattacagctgttgccatctctacgccgagttccgggcagaagaatggatcaggaggttgttttcttagtggaaggaaattgagggtgaaaaaggagagagcagcaattggaggacgatcgatgggcactacagtgtgcgcagttgctgagcctgacagacctctatggttcccaggcagcacccctcctccatggcttgatggcactctacctgg

SEQ ID NO: 33488 - DNA, 267 bp, Glycine max
  Clone ID: 700892596H1
gggagaagaaaaggaaagaaaactctcaaaaaactattatagcaatggcagaacaaaaccaaaaccaaacaactgaagctggaaggcaccaagaggttggtcacaagagccttctccagagtgatgctctttaccagtatattctggagacaagtgtctacccaagagaacctgaatccatgaaagaactgagagagttgacagcaaaacacccatggaacatcatgacaacctctgcagacgaagggcagttcttgaacatgctcc

SEQ ID NO: 33489 - DNA, 239 bp, Glycine max
  Clone ID: 700892601H1
ctagttctagatcgcgagcggctgcccttctttgtttactttattttttcttttgtcttttcccccccaattgattataagattgtaactggcattccgacaaccattatttatgttattggccatggattgatggtgagaagagcgtttaaggaatcggtatgcgcctgacagactttgtatttcctgcttagagagagatcggctaagaagccaggcaaaggaagaaaattaacttg

SEQ ID NO: 33490 - DNA, 259 bp, Glycine max
  Clone ID: 700892562H1
ctcagttctcccaacccacacatccaaataatttcagctcaaggcctctcgcactctctaaacataatggccaattcgaagcttgggttcaacttcatggtcagtgctatttttctttccttaatgacttttcatggaaccttttcagttcagggaaggccactgaaaatggagatcaaggagcaagtcacaacccacgaaaacattatcgatgaaatagctaaagcggcagaatatactgccacgtggcaccgtcaca

SEQ ID NO: 33491 - DNA, 217 bp, Glycine max
  Clone ID: 700892602H1
aagattaatagtaccatagcatacaagtgccagggttcagccgcttagtccgcaaacgcagccgagtgcattgcacttgacggtgaaccatagtatgacattccattccgtcacctcaagctaaccaccccaagctttggtgacttgaaccatctgatctcagctacaatgtctggtgtcacttgttgtttgaggttccctggtcaacttaactctg

SEQ ID NO: 33492 - DNA, 260 bp, Glycine max
  Clone ID: 700892533H1
ataatctttgtcgattccagaaatgtgtagcactagcattagcatagcttcctcacaccaaagctttctcaccaacgcccttattccaccaaagttcaggacctccaggattagtattgtttcttgcagttccccacaacaatctccaaggaagaagaataatgagaacaagttggcaaagttagcaatggttgcagttgctgttggggtgctaacacttgggtcagttcatgatgcatcagctgccaagactggtggta

SEQ ID NO: 33493 - DNA, 246 bp, Glycine max
  Clone ID: 700892534H1
cgattgctagaatggaatttcgatgctcagtcatctcgtttaccattctcttctctcttgctcttgcaggagagagccatgtccatgcatcgctacctgcggaagattattgggaagctgtttggccaaacactcccattcccactgcactgcgagatcttctaaagcctctccctgcaggtgttgaaatcgatcgaatccctagccaattgatgatacacagtacccaaaaacattcttctataa

SEQ ID NO: 33494 - DNA, 252 bp, Glycine max
  Clone ID: 700892535H1
gtgttgtgttcggtgaagtgagtagtgaaggtgctgaatcgaatcgaatctccgaagatggccgcgagcgatcgcacagtgttgcaattctcttcatcatcttcttcttcgcagagcttgtccgcgaaggtccaccctctggtcatcttcaacatctgcgattgctacgttcgacgccctgaccaagccgatcgcgtcatcggaaccctactcggctccgtccttcccgatggaaccgtcgatatccgcaat

SEQ ID NO: 33495 - DNA, 248 bp, Glycine max
  Clone ID: 700892536H1
ctgataatgagtggttgtgtgttgggcttgtgcgtgggcataggaggttgtgtatgtgtggtggagaacgagaatggaagaatcatcattgatattagtcactcgtaccatcctgatatgcctgcctgggaatccaaggatagccttgggcagtttttgtggcttacaagaagcatggccaatggttctctggctaacttctcccaattcaagctccccgctcacagcggcacccatgtcgatgctcc

SEQ ID NO: 33496 - DNA, 246 bp, Glycine max
  Clone ID: 700892537H1
tcagttttatatttgagctggttattactttgttttttctttgtaaagggttgaatggttctcatgtgccaagagatcatttgctgctgtcaatgatctttctccatcgagattccccatgtggtgtggtctactatgtggatttatccgtcagttgccttgtcaaggagactcatgagatgagactattttccctttgtagtgttggggttggtcttagtatttgtatggcgcatttatgggtat

SEQ ID NO: 33497 - DNA, 250 bp, Glycine max
  Clone ID: 700892539H1
gtgaagcccaatgatgaaaacagtgagcagctctcaatgagatttggggttgatagacaagactctcttgtttgatattgagctgttgaagattattccaaactgattgatcaaattttgaattgactgtcaaatatcaccgtcggaatgttgaggtctacttatttacagaggatgagaggatacatgcaaacaactgtcctgtagaaattttgttaatattgatattagatgcttgtgtcaaatgacc

SEQ ID NO: 33498 - DNA, 242 bp, Glycine max
  Clone ID: 700892540H1
cgatgacaagcttggtgctctttgcatgcagtggttacaggataaggttcattcaattcgtgaagcagctgctaacaacttgaaacgccttgctgaagaatttggtcctgagtgggctatgcagcacataattcctcaggttttggagatgaacaacaacccacactatttgtatcggatgactattcttcgtgctatctctctgcttgctcctgtgatgggccctgaaatcacttgttcaa

SEQ ID NO: 33499 - DNA, 255 bp, Glycine max
  Clone ID: 700892541H1
agagaatcaaatcaaaacagagtggaagaggcatggagtcagtgactacaaggctttccccaaaggtagttggaggggcaaactcccaacatggcatggagtggtgtaggcactttcagatgccactgcactatccaaggtacacccaagctgactatgaggcaatgccagagtggaggcttgactgtttgctcaaagagtatggcttaccaatctttggggatgttgaaaacaagagaaactttgccatgggtg

SEQ ID NO: 33500 - DNA, 255 bp, Glycine max
  Clone ID: 700892542H1
ctgatgttataataattaaattctcacatcaggtacctacctcgatttcctcagtgatatttattgaagattttaattagtcctggtttgtttgacctgcaccttaggtaatgccaataatattctgttttagatgtcttattgattgtttaactcatggctgtgcaaccccaaaaaatgcctcatgagtatgcctcagttttctatagtgtaatcatggcaaggtttttgtcaattttagtaccattaaaatca

SEQ ID NO: 33501 - DNA, 257 bp, Glycine max
  Clone ID: 700892543H1
ctctcctccaatggccgaccagctcaccgacgaccagatcgccgagttcaaggaggccttcagcctcttcgacaaggacggcgatggttgcattactaccaaggaacttgggactgttatgaggtcacttggtcaaaacccaactgaggcagaactgcaggatatgataaacgaggttgatgctgatggcaacggaaccatcgatttcccagagttcctcaacctgatggctcgcaagatgaaagacaccgactcag

SEQ ID NO: 33502 - DNA, 259 bp, Glycine max
  Clone ID: 700892545H1
cttcgcttactgttgcaccttcctcctaaatgattactcccgctcggcgtgcatcgccgccgattgagctcaacaacaacaacaaaaaacaccataaaactcaccgtagcgcaccacagccaaacgcgatctcaacgatgaccagcttctgaaattccaacttcgcccttcatcttcgtatacttttttatttccggtgaggtgagttccatgcctagtcccaagagcagccgcagcggccagatcgagagtcaccgga

SEQ ID NO: 33503 - DNA, 262 bp, Glycine max
  Clone ID: 700892546H1
atttttcgctgactccggcgtcactttccgttgagtctccgtccaccggcgtggcgatggactcggaatcttcaaactccgattctcaaccgcaccctctctcgaacccaatcgacgacgcgtgccacgacatgagctccctggaagagctcgcgaaccgcggcgcgtggcgttccatcattgacaaggtctcacgcgcccgcgccctctctctcctccacaagccccacgaccacctcacctgccttggccttcaacgccc

SEQ ID NO: 33504 - DNA, 265 bp, Glycine max
  Clone ID: 700892547H1
aattgagactgcttgccagcatcaaagctatcaattcagcatcatggatctcacctatggtcttgtttagtgatagtaagtaccatgtttacatcccaggattttcatattatttttttgttctaggccagagaccatgagtgtcttccaacccattgagtcaaagactaatcccgctcacgatacatgactgtcgctgacttatgggaattttgcatacggatattgattttgagttcaagatattatcacttattgcaggaca

SEQ ID NO: 33505 - DNA, 275 bp, Glycine max
  Clone ID: 700892548H1
aatctgatgaaattagccatcaacttgtcctctgcctcccccacctagtgatttttatgacaagacagcttcaatgaacctagcaagaagtgtcaggcaaaatacatctgctagtggtgctcgtcctaatcctcaagggtcctttcattatggctccatcaatataactgatacttatgtgtttaaggttacatccctggtgccaatcaatggtacaaatcgagctactattaatgggatctcatttctcaagcctgaggttccattccggcttg

SEQ ID NO: 33506 - DNA, 253 bp, Glycine max
  Clone ID: 700892549H1
aacaatttcttcaaaagtacgtcttcccttcaagcttctagttttactcgaattttaacgtgaccacacatttgtagtcaatacgtatccattgattcacatgatatattaaattttatggatgacaaggacttgtcatcaatgcaattgttgtactccttagaatgtctttatagcaaataagagattcaatgatataacacacgggtagagtgcctggtacggttaggctggaattgcacaagcccgtgaa

SEQ ID NO: 33507 - DNA, 251 bp, Glycine max
  Clone ID: 700892550H1
aacatatacaaattctctgtgttgtgttgtgtacttgtgttaattgtgttgttgttgtaggaaatttaagtgaagagagaatgatgatgaagtctgctatgtgtgcattggtgcttgtggcactggttgtggttgaagtggggcccatggctgaggctgcggtgacttgcaacccaacacagttgactccttgtcttccggcaattaattcaggttctgcaccttcgagtgcttgttgccagaagctgaag

SEQ ID NO: 33508 - DNA, 249 bp, Glycine max
  Clone ID: 700892551H1
gagaattccaactgataaaaagaatattcagagaattccaaagacagagatgactgtcattaaggaagagcaacaaccaaaccaaatagctggccacaaagaacttggtcacaaaagtctccttcagagcgatgcactctatcagtatatacttgaaaccagtgtgtacccaagagagcatgagagcttgaaggcgctacgagagttgccggaagaacacccttggaacctgatggctacaccaactga

SEQ ID NO: 33509 - DNA, 243 bp, Glycine max
  Clone ID: 700892552H1
agactggatgctcaacaaaagaagctcaaccttccaatccttccaaccaacactattggatccttccctcagactgtagaactgaggagggtacgccgtgagttcaaggctaacaagatctccgaggaagagtatgttaagtcaattaaggaggcaattcgcaaagttgttgaacttcaagaagagcttgatattgatgttcttgttcatggagaaccagagagaaatgatatggttgagtac

SEQ ID NO: 33510 - DNA, 247 bp, Glycine max
  Clone ID: 700892553H1
gctgctttaaatagtcaatgtgggtactcctcagacacccttgaaccaaaacaagacaaggctttgagctctgtggaatcacattcaccaagctcatcgtttggggaatactttcagaaaagctgcgatgacagaaattttgataaccaaaggtggagcagatttcagaaagataattttggtttctggccacaaaatcaatgggtggctttctccacagaatcatcctctcatagcagagtggatg

SEQ ID NO: 33511 - DNA, 246 bp, Glycine max
  Clone ID: 700892555H1
ctcgagccgaatcggctcgaggagaaccagaggaggctaaacaacaagaggaggaggaagcaccggcggttgattatgccatcacggatttcaatgcaggtgctattgctgctgatggccagtggcctggtacaattgatcaatcatggagtgatgcagttcctcaacctattccagcagtacctggtgtcaactggggggcacctgcagaagcacctgctgctgcaggaggagattggggggaag

SEQ ID NO: 33512 - DNA, 253 bp, Glycine max
  Clone ID: 700892557H1
atcactgaggccctgttctttcatttgatgaatgattccaggacttccacggttacttcaacatggacacagttttattgaggatcaagaatcaataaaactgtgtccatgttgaagtttccgtggaagtcctggaatcattcatgatatgtataaataggaaaagcaagatagtgagtatgagtatttgaaaaatcactgaggccctgttctttcatttgattttaacttgagaataatgatattatcatgg

SEQ ID NO: 33513 - DNA, 253 bp, Glycine max
  Clone ID: 700892558H1
gtgagcaatgaccaaattgctgctgaccttaaagagcatgttattaagcctgtcattcctgagaagtacctggatgagaagaccatcttccaccttaacccttctggccgttttgtcattggtggccctcatggtgatgctggtctcactggaagaaagatcatcattgatacctatggtgggtggggtgctcatggtggaggtgccttttcagggaaggaccctaccaaggttgacagaagtggtgcctata

SEQ ID NO: 33514 - DNA, 256 bp, Glycine max
  Clone ID: 700892559H1
ctgcaaacaaggaatcagttacggtgtacgaggagaagattctcgtcattatggccggagatgagaaacccacattcttggccaccccgaaagcctcctcctttgtccctcatggtgtccccaaccattttgaggaaaacctcgaaaaccatgtgacttctgagaaatcagagaaaaaccatgttcaacaacctacgtctccgcaacaacagagccagccacgacaataagatgtcatttggtttgtaattctatg

SEQ ID NO: 33515 - DNA, 259 bp, Glycine max
  Clone ID: 700892561H1
tttctcccaagattctgccgaggtcttaagggaatatattattatctccatgtgcggtgtttccaaggggaaaccttctcaatttggtttggtcatggaggagtatgcaaaagaagggatgcatcatataatttcagctttgcttgagttttctgcagcagatgatctggttagtttcaaagatgcggttgaaaaggagggtcatgatattgatggggtagggttttggtatggaaggtgtgttgcctcgaagaaaata

SEQ ID NO: 33516 - DNA, 231 bp, Glycine max
  Clone ID: 700892532H1
gtgggactagtattgattgaatgattgatagaggagtgagtctcggggcatcaaagaagaaagatgggagacgtagcagataaattggcgtatttccaagcgataaccggtttagaagatccggagctctgcacagaaatcctggctgcccacaattgggacctggaactcgctatctctactttcacctcttcctcaaaccctaacaaccctccaccgcctcccgctctg

SEQ ID NO: 33517 - DNA, 233 bp, Glycine max
  Clone ID: 700892494H1
cagagatcggaacgtggaactgcggaaaccggaatatctcacttctcagatcagatcaatccgacgtcgttgcagttataatggctccattcagcggcgatgagacggcaccgtttttcggcttccttggagccgcagctgccctcgtcttctcctgtatgggagctgcctatggcacagcgaagagtggcgtgggcgtggcctcgatgggtgtgatgagaccggagcttgtg

SEQ ID NO: 33518 - DNA, 237 bp, Glycine max
  Clone ID: 700892495H1
cggccacaagaaatggattactggtatctcttgggaacctgtccacctgaatgctccatgccgtcgctttgtaagtgccagcaaagatggggatgctcgtatatgggatgtttctttaaagaaatgtgttatgtgtctcagtggccacacacttgcaataacatgtgtaaaatggggtggagacggcgtgatttatactggctcgcaggattgtacaattaaagtctgggaaaccac

SEQ ID NO: 33519 - DNA, 262 bp, Glycine max
  Clone ID: 700892502H1
atttctccgagaacaaaaaaaaaaacgtgattcgctcttctcttagaataaaccacaaaaccaacaaacgagaagaggagtgagagaagatggggttgtcgttcacgaagctgttcagcaggttgtttgcgaagaaggaaatgaggattctgatggtaggtctcgatgctgctggtaagacaaccatcttgtacaagctcaagcttggagaaatcgtcaccaccatccccaccatcggatttaatgttgagactgtggagta

SEQ ID NO: 33520 - DNA, 89 bp, Glycine max
  Clone ID: 700892503H1
catgactttcaagcgcaggaatggaggtcgcaacaaacacggccgcggccacgtccagttcattcgctgctccaactgcggcaaatgca

SEQ ID NO: 33521 - DNA, 272 bp, Glycine max
  Clone ID: 700892506H1
ggagttcggctcgagcttatccttttcccttccgttggtgccattcgtgcagcagcggatcctctcatttctccggcgataactgctcccgtttccggcgaattcaccgcttcctcgatatgaatcccgagtatgactatctgttcaagctccttctgattggagactctggtgttggtaaatcatgccttcttctaagatttgctgatgattcatacattgagagctacataagcaccatcggagttgattttaaaattcgcactgttgag

SEQ ID NO: 33522 - DNA, 259 bp, Glycine max
  Clone ID: 700892509H1
ctaacccagaggaagtggtttcaatggttgagatgagcatccagaacagcacagagataaggaagttgggatatttctcttgtggaacaggcaacccaattgatgattgctggcgttgtgaccccaactggcaacgcaaccggaagcgtctggcggattgtggcattggttttggccggaatgctatcggtggtcgtgatggaaaattttatgtggtgactgaccccagggatgatgaccctgtgaacccgaaacctgg

SEQ ID NO: 33523 - DNA, 259 bp, Glycine max
  Clone ID: 700892510H1
gtcaaagatgcaaatgttttccttcacgtggacatggctcaagatactgagctgggcttgcttgatcgtttctattatctcagctgctggttccatccaaggcctcgctcaagatctcaagaaatatcagcccttcaaagcccagcaataataataatttgttccaaagttctaaattgctttcttttctaagtaactttttctagtaagtttcagcatgttcatggataatttattgttatcaagtgcttatgaaaga

SEQ ID NO: 33524 - DNA, 262 bp, Glycine max
  Clone ID: 700892511H1
ttttcacttttgttcatcgtttgcgagacacacaggagagaagagctggcgacgagggtggtggcggaacagaagccgaagacgaagattgtgtgcacgctggggcccgcatcgcgctctgtcccaatgatcgagaagcttctgcgggcgggcatgaacgtggctcgcttcaacttctcccatgggtcccacgagtaccaccaggaaaccctcgacaacctccgcgccgccatggagaacaccggtattctctgcgccgtca

SEQ ID NO: 33525 - DNA, 267 bp, Glycine max
  Clone ID: 700892512H1
aggtcgcagtcatggtttatgtgggtgtagtagtttaatagtttttccaggtatggaaataaaattgttgcaatcaaagttctgcatcgtgggagcacttccgaataaagggcttccctagaaaatcgttttgctcgagaagttaatatgatgtctcgcgtccaccatgacaatcttgttaagtttattggagcatgtaaggatcctcttatggtaatagttacagagctattaccagggatgtcactgcgtaaatatttaacgagt

SEQ ID NO: 33526 - DNA, 265 bp, Glycine max
  Clone ID: 700892513H1
ttccaaatcacctacaactccatactccagaatgcatgaatctgagctttggaagttttggatctgcaaaccccctttctggatctgggtcatttacatctaggtctttgaaaggtaacttggaggatacatctggtgcagtggatgcttcaacaattgaaaactcagacactagaaatcctgactattatggggatgagcatcttactactactacctcagatggaaatttagttcaaggaactggtgtgagtgctgggaccta

SEQ ID NO: 33527 - DNA, 266 bp, Glycine max
  Clone ID: 700892514H1
cccacctccacctcctcctcattcgaaccgaagctggaagccgttatagacctgactctcctaaccgctttccaatctaaacttgggcggttcctatcttccggcagagacgcttaccacaaacgcaggctcgtcgtttcgtgccgcccttccaccttgcatttcctcggaacttcagcggctttgaccttcctagccgtttctgtattcacggttttggctcaattgatttctaagttttcgtcttggcgtcgcaacgcttctag

SEQ ID NO: 33528 - DNA, 221 bp, Glycine max
  Clone ID: 700892515H1
caaatgcccacttttattcttccaacgctcctcctccttctcatagccttcgccacctctgtctccggccgacgtgacctcgtcggagactttctccggctgccctccgaaactgataacgacgacaacttcaagggcacccggtgggccgtcctcctcgccggttccaatggttactggaattacagacatcaagctgatgactgtccaggctatcaaat

SEQ ID NO: 33529 - DNA, 275 bp, Glycine max
  Clone ID: 700892516H1
gatctgaggaaatcggccgtgaatctcattcccttccctcgtctgcacttcttcatggttggatttgcgcctctcacctctcgcggctctcagcaataccgcgcattgacagtgccagagctgacacagcaaatgtgggatgccaagaacatgatgtgtgctgcagatccaaggcacgggcgttacctcacggcatcagccatgttccgtggcaagatgagcaccaaggaggtggacgagcagatgataaacgtgcagaacaagaactcttcata

SEQ ID NO: 33530 - DNA, 241 bp, Glycine max
  Clone ID: 700892517H1
aacaatttcttcaaaagtacgtcttcccttcaacttctatttttactcgaattttaacgtgaccacacatttgtagtcaatacgtatccattgattcacatgatatattaaattttatggatgacaaggacttgtcatcaatgcaattgttgtactccttagaatgtctttatagcaaataagagattcaatgatataacacacgggtagagtgcctggtacggttaggctggaagtgcac

SEQ ID NO: 33531 - DNA, 254 bp, Glycine max
  Clone ID: 700892519H1
gattatacgaaccgataaaacatctgcacaagtgattcttgatctgataacagttggtaaaatcataaagaagacacctgttgtggtgggtaattgtactggctttgcagtgaataaaacattcttcccatattcacaaggtgcccatttgttggtcaacttgggcgtggatgttttcagaattgacacattgatacgcaactttggctttccgattggtcctttccagcttcaagacttggctggctatggag

SEQ ID NO: 33532 - DNA, 252 bp, Glycine max
  Clone ID: 700892521H1
atcaataacaatattattctcctcattccttcatttttaaacctagctccatctccctccacacaacatacgactctatcagatgcacatgctgacaacaccaacttctgtgtaaatgttagcaacaatggctacattagtgctaatgaccccttgaactggggtgcgacggcggaggctatggctgggagccacctcgactaggtcaagcgcatgctagaggagtaccggaggcccgtcgtcaagctcggt

SEQ ID NO: 33533 - DNA, 241 bp, Glycine max
  Clone ID: 700892522H1
gctttgttttgaatgtttgtccaatgccagcccaacaaagcccaatccaggaggtggaggggaaacatgtgcagaaactgggatcaacattttttttggcaagatcatcaagttgggagcagtcagaataagtggcatggttgaaaggctacaattatctcagcaaataagggagaatgtatactctcttttccagcggatccttaatcagtggacatctctctttttcaaccgtcatatt

SEQ ID NO: 33534 - DNA, 254 bp, Glycine max
  Clone ID: 700892524H1
aaggaagggatcccacctgaccagcagagacttatctttgcgggtaaacagcttgaggatggtcgaacccttgccgactacaacatccaaaaggaatccactctccacctcgtgcttcgcctcaggggtggcatgcaaatctttgtcaagactttgactggcaagaccatcaccctcgaggtcgaatcctcggacaccattgataatgtcaaggccaagatccaggacaaggagggtatccctccagatcagca

SEQ ID NO: 33535 - DNA, 257 bp, Glycine max
  Clone ID: 700892525H1
ggaattttgggaggaaaatcaagtatgcttgcaggaaggctcttgctgacagtcagccaagaatccgtgggagatttgcaaggactgaagagtctgatgtcaagagggaatgaatgacttataactgatttagtaggaagaaagtagagttgagtagctatatctgatcaagctatatggaaaaactcagcagtaatatgtgattagaacttatgtggggattctctgtatgcttgagcagatatttgctgaataaa

SEQ ID NO: 33536 - DNA, 258 bp, Glycine max
  Clone ID: 700892526H1
cagtgtatcaacctggtggagctccaccattttcgtccaccagcaagcccataccggcgaggtggaggattctgcttcccgatgggtcctatggtgtgtacccagagcctcgtgcacttagcacttctgagatacctgaaatagtgcagcattatcgccaagcagcaattaatgcaattcgagcaggttttgatggaatcgagattcatggggcacatgggtatctcattgatcaattcttaaaggatggaatcaatg

SEQ ID NO: 33537 - DNA, 261 bp, Glycine max
  Clone ID: 700892527H1
atgaaagtttgtgccacacgaacctttttgatgaagagttcctaagagatattctgcaacggccacaagagggtgctccaaatcttaacaactcatccatcatgtcgtctctttgtgctcaagacattaagccaactaccttatttccaaccacttacatactctctttcgacaattccgctgcattgttaccaacagaaactgatcgtgatttttcttcttccaaattgccctcatcaaattcaagggccaaccatggaa

SEQ ID NO: 33538 - DNA, 261 bp, Glycine max
  Clone ID: 700892528H1
gcagaaagcaagctcatcctagagttttaaaaatggcagcagcctcctccatggctctctcttccccatccttggttggcaaggccgtgaagctgggcccatcagcccccgaagtcgggagggtcagcatgaggaagaccgtcaccaagcaggcctcctccggaagcccatggtacggcccagaccgcgtcaagtacttgggcccattctctggcgagcccccgtcctacctcactggcgagttcccaggtgactacggct

SEQ ID NO: 33539 - DNA, 264 bp, Glycine max
  Clone ID: 700892529H1
gggatgttggaggtcaggacaagatccgtcctttgtggagacattacttccaaaatacacaaggacttatttttgtggttgatagcaatgacagggaccgagttgttgaagctagagatgagttgcatagaatgttgaatgaggatgagttgagagatgctgtgcttctagtttttgccaacaagcaagatcttccaaatgctatgaatgctgctgagataactgataagcttggtcttcattccctccggcagcgtcactggt

SEQ ID NO: 33540 - DNA, 124 bp, Glycine max
  Clone ID: 700892530H1
gccaaaaaaaccttattctatgtttgtatataaatatagattaaagacagtgattccaattatacaaagaaacgggagagaatgagacataaggttattgtggtgccaaaaaaaaaaacaaaaa

SEQ ID NO: 33541 - DNA, 268 bp, Glycine max
  Clone ID: 700892531H1
gggtaaggtcgcgttgtgttgcgtcgtgtcgtgcgctgttcctctgtctgtcgtttttgttttcagaccaaaccctagctccgcatcgcaaccatgtcgaccaagcaaggtggaaaagctaagcctttgaagaaacccaagtctgataagaaggattacgacgaggttgacatggctaacattcagaagaaaaaggaagaggagaaggcgctaaaggagttgaaagccaaggcgcaacagaagggaagctttggaggttctgggctca

SEQ ID NO: 33542 - DNA, 234 bp, Glycine max
  Clone ID: 700892493H1
cggacccctccacctccgaagcccccatcaaacccgccaaacctgttggccgcaacaccacctccaaggctgctccgcctcgagccctgactgtggtccctcgcatagtggctcgctcactctcctgcgacggcgaggtcgagatctcgctccgctacctccgcaacgcgaccccctcctctcccctctgatcgacattcaccaacccccaaccttcgacaatttccacactcc

SEQ ID NO: 33543 - DNA, 256 bp, Glycine max
  Clone ID: 700892448H1
aagacggctcgagcaaccacgagttatccgaggtacctacaactaaccctcccaaagatgaaaaacccgaacacaaggaagaacagaaacccgtggaggaagaaaagaaggaacatgctgctgacgtggcagaagagacagaaaaagaagctgcagaagttacggtaaccgaaactgaggttgttgaagagaaagtggcggtttctgcttctgctgacgaggatggagcgaaaaccggtgaagccatcgaagaaag

SEQ ID NO: 33544 - DNA, 245 bp, Glycine max
  Clone ID: 700892449H1
attagttggaatgaccatttcttcatcctcaaagttgaagctgatgcttactgcatcattgacactttgggggagaggctctatgaaggatgcaatcaggcgtatatcttgaaatttgacagcgacacagtaatatacaaaatgcaagatgttgctcgaggttctggcaaaaaaacagccagtgatcttcaaactgttgcagaagtattagagcagaatgaaaggcagatccagccaatcaatgg

SEQ ID NO: 33545 - DNA, 239 bp, Glycine max
  Clone ID: 700892452H1
atctttcgcaaatattttctttcgacgaaaatggatactatcattgtggtgcttcagttcatgtggtgataaggtgaagatcttgatcttgccacttcaattttcttcttcttttttaaacatgatatggagttaaaaatgggagtgcaaacaagcatcagccttaacgcaatatgttaaatgctagttcttgtagatgagcaatgaggggcacctaactttaatatgctttgaaagtt

SEQ ID NO: 33546 - DNA, 242 bp, Glycine max
  Clone ID: 700892454H1
cagtgatttttaataaggccagggatgagaaaaagacaggtggtaacccagattcaccaggaaagactgccactgatcctcatagcaaacctgctgtagagcctggcaaaactcaaactaaaaaatggttttgctgcatgcaaaacccttctgccgaatcatagcatagcaatggttgctcctgtgaaaagcctgaacagaagaacaatgtttgtgtaactagtgtcacagtattttctcta

SEQ ID NO: 33547 - DNA, 240 bp, Glycine max
  Clone ID: 700892457H1
tgttaatgttgtgtctaaggaagatgcactggaatttattgagcatgaccagacgcacaatgctgaataaggtgcttcttactcacatggactgaactgaaatatttcaattctgggcactcttcgaagattgtaacatagagattgcagattcaagttcattcaaattcttcaacctactatttgtctgttgtgtagtgactgtgtgatgccaacctaggtcctggagtaaccaaaaag

SEQ ID NO: 33548 - DNA, 242 bp, Glycine max
  Clone ID: 700892458H1
caaatcttttttgtctctctctactttttttgctttctttcttcttctgtttatcgcatcgcgtattggttggtcgaaaaacaaagagtgtgtgttgtgtggtttggtttggtttttcacttttcttcatctttttgcgagaagacacacacacagagagagatggctacgacgaggattgaggcagagaagaagccgaagacgaagatcgtgtgcactctgggccccgcatcacggtcggt

SEQ ID NO: 33549 - DNA, 238 bp, Glycine max
  Clone ID: 700892459H1
tgggtcgccaaaaccgcacacccaccatagttgttatatggtcagttttattggcttccattttctccttgctttgggtaagaattgacccgtttgtattaaaaactaagggacctgataccaagctatgtggaatcaactgttgaaagactggttttccaatagtatccatttgtgagcatcttttaaagatgcaagtaaatgtaaattcttgattgtgctgtatgatgcgtgagct

SEQ ID NO: 33550 - DNA, 115 bp, Glycine max
  Clone ID: 700892460H1
gcagtaagtaaaacgcttagtgattaagatgatcatttgtttgttaagtagtaaacatctgacaaaacgatgtcaagttgattgagaatccagccgttgcactttgataacagtc

SEQ ID NO: 33551 - DNA, 239 bp, Glycine max
  Clone ID: 700892461H1
gaaagttcttgtttaaaatttgcacaactttggagaattctaagtaattagctctagttttatgtgaacaagggttgtgcattggtcgggtacgggttgcaaatccttcatcaagctaaaatgacgggtgttgtcatccacattgtctctggctgtttcccatatgcgagtttcagtctaagtgggttgcatgttagttgggaacaatcaaatataattgatagggatggtgagcagat

SEQ ID NO: 33552 - DNA, 241 bp, Glycine max
  Clone ID: 700892463H1
cttatgttgtgcccctggtttatggggcaagtttttactgaagggcaaaatatggtatacatgacctatatgggttgggccatagagacttctaatggaaaggggaaggttgagtatgttgggtctccagatattatggtggtggttcttccccatctattatttgtggttttgcctgcaattttggtcactggtgctctgacggctgaaagagcaatttaccgggaacacatgttagcat

SEQ ID NO: 33553 - DNA, 59 bp, Glycine max
  Clone ID: 700892466H1
ctcgagccgttggatatggttataacgaaaatctaaccattacaataacacagaccaac

SEQ ID NO: 33554 - DNA, 236 bp, Glycine max
  Clone ID: 700892468H1
gacaaccccttgattcctcttctagttccatgatcaaaatcaaggtctctcatggttcttaccaccatgaggtcactgttcctgcacaatccacttttgggcatctaaaaatggtgcttacatccgagactggtcttgagcctaaagagcaaaggttactatttagagggaaagagcaagaggatgaggaatgcttgcatatggtgggagtgaaagacatgtctaaggttatattg

SEQ ID NO: 33555 - DNA, 124 bp, Glycine max
  Clone ID: 700892469H1
gttgattcagagccaacattgcaagataaaacaattgagattttatctcgattgtgtaaggatcagcctgttgttttaggcgatactatcgtgtcagcacctggatgtatatcttcaatagcta

SEQ ID NO: 33556 - DNA, 235 bp, Glycine max
  Clone ID: 700892471H1
atcacttgctgatgtctcagaaggccttactttgcaggaccacactgaaccaattgatcgaaaatacgagttattgatcacaagaggctgagaatttggctgccatggatgaagctttcccaactttggaggcatagaagacggaatgccaaatggcaatggtgctttattctctgttatatatgattgcttttgctcgtttctctctttagtggtagttaaaaagaatagaatg

SEQ ID NO: 33557 - DNA, 239 bp, Glycine max
  Clone ID: 700892473H1
aaagacctcacactcacacacagatctatctgtccatcgttcgttcattgtcgttttgatctcaaacgccatggcgttttggagatccctcgcgttctctgccctccttctctcgctcttcgtccatggcgctctctgcttctacctccccggcgtcgctccacaggacttccagaagggagatccgttgcaagtaaaagtaaacaaattgacttcaacaaagacccagcttccttata

SEQ ID NO: 33558 - DNA, 238 bp, Glycine max
  Clone ID: 700892474H1
caaagatgtgaaatccattctcaacaacgacgatttgtacaaggaagccgcttccgaggcttttctcttttacaacaaatcgcacttgatttcccttccaatgtccaaccgaagcggagacgtactggttacttcttttggtgagcttgagggtaatgcatttcttgaacctaggactgcgcaagtagcaattgttgatcatgttaaacaagtttgtacagaggtgagacctgccaca

SEQ ID NO: 33559 - DNA, 238 bp, Glycine max
  Clone ID: 700892475H1
taacaaccacttatcccctttctccttctaacgagtgaggtaatatggcgcgtaagaagatcagagagtatgactcaaagaggttgttgaaggagcactttaagagactctctggcaaggagttgccgatcaagtctgcacaaattaccgcatcaactgatttcactgagctacaagagaaggaaccctggctttcatcttctaaattggttgttaaacctgacatgttatttggaaa

SEQ ID NO: 33560 - DNA, 241 bp, Glycine max
  Clone ID: 700892480H1
atcacttgctgatgtctcagaagggcttagttcgcaggagaacactgttagctatgaagactctctacacaggagtcaatggagaacgttacccatcaaggttttatgagtagggcttgctcaaggttggagatatagagtacgcattggcatacgttgatggcgcctgaagcggaacataccctgagatgcaaaagctaaggcacgcgctagtggactatgcattggccagtggagagta

SEQ ID NO: 33561 - DNA, 140 bp, Glycine max
  Clone ID: 700892481H1
tcggaatcggctgcggtcgtttttagcttgaatgacgatattttcattctcacagtagaaggtgcacggccatctacctatatgtatttcagtacctctggtactcttttatctatatataaatacatatctttgctgat

SEQ ID NO: 33562 - DNA, 235 bp, Glycine max
  Clone ID: 700892482H1
cgcatacgcaccgacgaagactcttccaaagacgaagctgtttccgtatgcccctcccggaccaggggtcgtcccggcctggcccgatttcggacaaatttggagttttgtcgccgccgctgctgctcccgaaatggtgtcggtgccgcagcagcagcagcagcaggcttcgttgttcgctcatcaccaccgtcagcagcagcagctggcgatcggagaagctttggcggcgagg

SEQ ID NO: 33563 - DNA, 233 bp, Glycine max
  Clone ID: 700892483H1
atcccaaccaaggtccttgttgaagatgatatcagcgccaagacgacggcaaggactaccaggagccggcgccggcgccactggttgacccgacggagtttacgtcatggtccttttacagagcagggatagcagagtttgtggccacttttctgtttctatacatcactgtcttaaccgtcatgggagtcgccggggctaagtctatgtgcagtaccgttgggattcaagga

SEQ ID NO: 33564 - DNA, 234 bp, Glycine max
  Clone ID: 700892486H1
tttagaagatgcactgtcaccgacctgggaaaatcttattagtggtcaagtgaacttgaaggatgctgtggatgggacaataagcttccatgacaaagtaagaaacagggtttacaagctcaatgatcagacagcaaagctttttgtgagaccaagaggttggcatctacctgaagcacatattctgattgatggtgaacctgcaactggttgccttgttgattttggcctcta

SEQ ID NO: 33565 - DNA, 233 bp, Glycine max
  Clone ID: 700892487H1
cttccggcacctggatttcggagagcgcaacggctacctgaagggtgtcgtcactgacgtcatccacgatcctggccgtggcgcgcctctcgctaaggtcgccttccgccacccgttccgctacaagaagcagaacgagctcttcatcgccgccgagggtctctacaccggccagttcatctactgcggcaagaaggccaccctcgttgtcggcaatgtgttgcctcttcgat

SEQ ID NO: 33566 - DNA, 240 bp, Glycine max
  Clone ID: 700892488H1
tgctcgagccgctcgagccgctcgagccgctcgagccgtgattttttgcagagtagatgcctaggtggagactggtgaaaacaacagtactagtagtagtaaccaaagttgtgcagtgatgatggattctaaatggtacactcaattcagaaatgtatccaatccttggatggcaagatatgtgtatggcttgattttcctagtggccaatctgttggcatgggctgcccgtgacgaact

SEQ ID NO: 33567 - DNA, 233 bp, Glycine max
  Clone ID: 700892489H1
caaatccagaaaaagagagaagaggaaagacactgagtaagcaatgaaatttccaaattctcaattgtttcttccattcttgttgttgttgttcttcgcgataactccctttcgaggttcagggcagcaaacggattggaacagcgaagagattcaacatggaaatggggtttgccgcagagttcttctgaggttcaaagagaagccctcaagaagtaacgttacctttgaat

SEQ ID NO: 33568 - DNA, 237 bp, Glycine max
  Clone ID: 700892490H1
caatatattccattctctctgtgtatttccctacctctcccttcaagatgcagatcttcgtcaagaccctcaccggcaagaccatcacccttgaggtggaaagctctgacaccatcgacaacgtcaaggccaagatccaggacaaggaaggaatccccccggaccagcaacgtctcattttcgccggaaagcaacttgaggacggccgtacccttgctgactacaacattcagaagg

SEQ ID NO: 33569 - DNA, 120 bp, Glycine max
  Clone ID: 700892491H1
accaatatcaggacattggcaatacatctcctgaaacatatcaagtgctaggccacctcaagacatgccttgtactaggatttggctacacattactgcatgaccctttcaccggaaggt

SEQ ID NO: 33570 - DNA, 232 bp, Glycine max
  Clone ID: 700892492H1
ctttgacgttgtgtgccgtacaaagtgatgacgggtaaggctatacacttgagccattccaaaacggtggttttgatctggctcatctccgctttctgcttcttcaccttgttccaaatggccctctacaactcatcacaaactccttcatcaacttctttagattctccaaattcaaacacggggcaaagatcaaagttgtatgacaagatggggagagatctggatgagc

SEQ ID NO: 33571 - DNA, 239 bp, Glycine max
  Clone ID: 700892443H1
cccaaacctcttacggaggacatatgttctcttcgttctgatgtggaaaggcttgcattctctgtcatatgggaaatgacacccgaagcagatattattgccacctcatacacaaaaagtgtcataaaatcttctgcggcattgtcttatgttgaagcacaggcaaggatggacgatagtcgattgatggatccgattactgcagatttgaggaatatgaatagtttagctaagaaaat

SEQ ID NO: 33572 - DNA, 255 bp, Glycine max
  Clone ID: 700892401H1
aatttcttttaataaaaaaaacttagaatcgaaacgaaaaatcgccatgaatcccaaaatcctcttcgtgtttgctctgcttctgaatctcgtatccaattcgttccaaaaccctaaccctaaaacccccaaatcaacgtcatcgcaggctcacgtggagctcatcaaccacggcttacccgccggtcttctccccgccaccaccgtcttgggctacgccgtgaaccgtacctccggtgactttaccgtcaagct

SEQ ID NO: 33573 - DNA, 254 bp, Glycine max
  Clone ID: 700892402H1
gctcagcttcgccctccatagacgctactcactctgctccggaaccatgtgcacggccacgtagcaaaagatctccgcagtacaagcgaggacttcagcctcttcgacaaggacggcgatggttgtattactactaaggaacttgggactgtgatgcggtcactagggcaaaacccaactgaggcagaactgcaggatatgattaatgaggttgatgctgatggcaatggaaccatcgacttcccagagttcct

SEQ ID NO: 33574 - DNA, 244 bp, Glycine max
  Clone ID: 700892404H1
cagctgaatgggctaaatatttaggaagatcattcaggtgcttactgaagcgaacaagggatttgaagttgcggatgcagttggctacagtggcaactggatttggggatgtcattgatgcatgtacagaagaaatggataaggtcgctgacaatgcagcaccactagttctgaggaagggtcatggtggagcttacctccctttaatgtgaaagtttctactgtagatcatcataatgattgg

SEQ ID NO: 33575 - DNA, 247 bp, Glycine max
  Clone ID: 700892405H1
catagactatagactaaagtgtgtcaaactcactatgatactgacactactgcctcctccaaaatcaccattcttgaatacccttttgctcctctgcactactctcctcctcccaccttgctacctggctctccctgaccctgatgctgatgcggttcagccaatcctcccaaacccctcatcttcaacaggaacaatccctgcattcccagaacaagctgatgctgcagggtgccctctcagcctc

SEQ ID NO: 33576 - DNA, 244 bp, Glycine max
  Clone ID: 700892406H1
agcttggctagtgccaaattccctgccaaggtacctcaaaaagtggacagaaaatttttcttcactgtggggctagggactagtccttgccccaaaaacacaacatgccaagggccaagtaataacaccaagttcgcagcctcggttaacaacatttcttttgcacttccatcatctgtttccatcatgcaggcctactattcaggccaggccaatggggttttcaagactgattttcctgcca

SEQ ID NO: 33577 - DNA, 246 bp, Glycine max
  Clone ID: 700892407H1
ggtggtagtgatggtggtatgtactcatcaagttatggtggcgattatgtatcccgtggaagtgatgttggtggccgttcatattcatctatgtattctggtagaggggtgggtgatagcagcaattatatgggtggtggtggatctgggtcatattattgaggtaagtcttctaactctttgccattgcattttgtgaagtacatgcggaggcactagtatatgtaaatctcattttctctagaa

SEQ ID NO: 33578 - DNA, 248 bp, Glycine max
  Clone ID: 700892408H1
ctactactactactgcacacactctctctctctctctcattgtatggccgccaattcgagtagccgagggatcaccgccttggggaagcgagtcgccaaccagatctggacttccaaccccccctcagctcctctcacttccaggaggggagcaatagcagctgcatacagtagcagcggcgggtcagtgtatgacaagaaccctgatgatcagatccactctggggcggtcccagacgatgtgatcc

SEQ ID NO: 33579 - DNA, 247 bp, Glycine max
  Clone ID: 700892410H1
gttgttctgcatgtgagatggctgttatttggatgcagaaccagctgaggcagaatcagacagaagataggataatagactatgccaatgagctttgtgaaaaattgcctaacccaatgggaccatcatccgttgactgtggaaagctctcttcaatgcctattgtttcctttactattggtggaaaagtttttgacctttcccctgaggagtatatactgaaggtgggtgaaggtcctgaagccca

SEQ ID NO: 33580 - DNA, 246 bp, Glycine max
  Clone ID: 700892411H1
taagggtactgttttcgattcgatcaactcactcacgcgcacgcctttcattccattccattccgatgcgatgacgacgacgaattccctcttcttctcccttgactggcacaatgaattctatcctacctatcatgatttctaccttctcccccttttcgctctcttcttcccttcccttcgcttctttctcgaccgattcatattcgagaaagtggcgagacggttgattttcggaaaggggca

SEQ ID NO: 33581 - DNA, 93 bp, Glycine max
  Clone ID: 700892412H1
cggctcgagtcaaaatcactctttcttatgattatgaatttactaatttgtccattattgagattttgtgtgaataaaaaatatctcccaatt

SEQ ID NO: 33582 - DNA, 247 bp, Glycine max
  Clone ID: 700892413H1
cggctcgagcggctcgagcggctcgagagttaaaagaagagcatcactgaactaacaaagcaaccctatgtcgaaggtggcttgtgtcaccggagccagcggcgccatcggatcatgggtggtcctactcctcctccagcgtggttacaccgtccatgccaccgtccaagatatcaaggatgaaaatgagacgaaacatttggaggaaatggaaggagcaaagagtcatctccatttttttgaaatg

SEQ ID NO: 33583 - DNA, 245 bp, Glycine max
  Clone ID: 700892414H1
tactgatggtagatggcgagcagctaaatgattcatcagttataattgataagctgggacataagattctttcaaagataattgtagattcaacttctgaggatgaagagacaaaatggcggcggtgggttgataatcatttggtacatgttctgtcaccaaatatatatcgaaatacatctgaagcacttgaatcctttgagtatattacgagcaatggcaatttcagctatcttgaaaaattt

SEQ ID NO: 33584 - DNA, 248 bp, Glycine max
  Clone ID: 700892416H1
cgtcgtcgtcgatggaggttggagtcgtgccggacgggaacacaatgtcggagacatcgaactgcagctacagcaaggtgcctccggtgacggtgacggtgacggcgcagttctcggcggcggatagggaggcgagagtgttgaggtacagggagaagaggaagaaccgtaagttcgagaagacgattcgttacgcatcgagaaaagcatatgcggaggcgaggccaaggatcaaagggaggtttgcg

SEQ ID NO: 33585 - DNA, 232 bp, Glycine max
  Clone ID: 700892417H1
ctgggactcactcactctctcctgttatagctgtaccacgtttttcttctccatctcagcctcagtcccaacaccattcccatggctgctctagctctagcactgcttcttctggctttcagtggcacttcaacttctctcctagctacatggtgcgtttgcaaggatagaagctaggcgatcctgcagaaaaccttggactatgcttgtggagctggtgctgattataacc

SEQ ID NO: 33586 - DNA, 243 bp, Glycine max
  Clone ID: 700892418H1
ttcggctcgatgtagaaaaaggacattcattcatctatggctacccttattgctcccagcaaccactctccccaagaagatgctgaagctctcagaggcgttttgaaggatggggaactgatgagaacactgtcatagtaattttgggtcatagaactgtgtatcagaggcagcaaatcagaagagtttatgaggaaatttaccaggaggatcttgtgaagcgcctagagtctgagatcaaag

SEQ ID NO: 33587 - DNA, 244 bp, Glycine max
  Clone ID: 700892419H1
cgcacactgtcacaggtgtagcggcgaaactgaggtcgtagaaagaatggcgaaaacgacgtcgttgttgctctttacactgctcctcttcggaaccttagctctcatccaggcgaagaaatcgaaggaggatttgaaggaagtgacccacaaggtttactttgatgttgagattaatggaaaagaagcaggtcgtattgtgatgggtctttttggaaaggctgtaccacaaactgcagagaac

SEQ ID NO: 33588 - DNA, 241 bp, Glycine max
  Clone ID: 700892420H1
ctcgagcgcaatggagctggtgagaagcgtaccttggaagttgacgctgtcattggcgccgatggggccaattctagagtcgccaagtctatcgatgccggtgattatgagtatgccatcgcttttcaggagagggtaagaattccggatgataagatggtgtattacgagaatcttgcggagatgtacgtgggggatgatgtttctccggatttctatggatgggtgtttccgaaatgtg

SEQ ID NO: 33589 - DNA, 245 bp, Glycine max
  Clone ID: 700892421H1
tctctctctcccttgattttggtacaaggcacaaaacaaagtactctttcaccaatcaatgaaaatcaacttaaggctccaagaaacagaaaccccaccttccatgaacaactccccaagaagcaatctgagcaacaacaactgcaccaataataatagcattggcctccaaatccccaccacaccaaaaaccattcccagatctgactccaccaccaatccttaccccaccacctttgttcaag

SEQ ID NO: 33590 - DNA, 244 bp, Glycine max
  Clone ID: 700892422H1
cgattcccgaagtgccttcctcctcctcctccttcttcccctctaatcggatccaaatccaaatccaaatccagttcaaagaagatgcaatacaagaacctggggcgatctggcctgaaggtgagccagctctcctacggcgcgtgggtgagcttcgggaaccagctggacgtgaaggaggcgaaggccctcctacagtgctgccgcgaccacggcgtcaacttcttcgacaacgccgaggtct

SEQ ID NO: 33591 - DNA, 246 bp, Glycine max
  Clone ID: 700892423H1
aaacctgtaccaaagccatttccagtgtataaacctataccaaagccagttccagttccagtgtacaagcctattccaaagccagtgtataagcctattccaaagccagttccagtgtacaagcctataccaaagccagttccagttccagtgtataagcctattccaaagccagtgtataagcctattccgaagccagtgtataagcctattccaaagccagttccagtgtataagcctatgcca

SEQ ID NO: 33592 - DNA, 247 bp, Glycine max
  Clone ID: 700892424H1
ctcgagccgctcgagccgattcggctcgagtttctctttctttaactcctctctcttgggcatcccagacctccaaaccagtgttcaagccccaccttcatatggtccgtaagagatctcaactttcgacccatcatctaaaatttcttcctttcttcttctttttcttgtctatgtctttttgaattctcttcctttcttcttgggatccaaggttctagatggcaaaaccaagttcagctgatgg

SEQ ID NO: 33593 - DNA, 244 bp, Glycine max
  Clone ID: 700892429H1
ccactttactctctcgttcactctgcatctgactcctatagtttcctctgctaattccatatccccgttttccttcactcttgaaccccgattcatttccaccagcacaagaagcatggctgcaatatcaataccttctcacatgaaagcttggacatactctgagtatggaaaatccaaggaagttctcaagtttaatcagagtgtggctttgcctgaggtgaaggaagaccaggtcctcatc

SEQ ID NO: 33594 - DNA, 245 bp, Glycine max
  Clone ID: 700892431H1
tgaacacttctccactcgaagatggggttcaagactaggatctgggtcgttgacgccagacggtgcatggcaaggttcaagactaggctcgggatcgttgactcctgatggtattgggcttgcttcacgattaggctctgggtgtgtgacacctgatggtctggggctggaatccaggttaggttctggctgtttgacacctgacagtgctgggccaatcaatcaaaacaacatctctgtgcaaa

SEQ ID NO: 33595 - DNA, 239 bp, Glycine max
  Clone ID: 700892435H1
acagattcacttctacgaaacttgtccttaccttaagttcgcgcacttcaccgcaaaccaggcgattctcgaagcgtttcaagggaaaaatcgcgttcacgtgattgatttcggaatcaaccaggggatgcagtggccggcactgatgcaagcccttgcgcttcgcaacgacggccctccggttttccggctaaccggaatcggaccgccggcggggatcaactccgaccacctccagg

SEQ ID NO: 33596 - DNA, 235 bp, Glycine max
  Clone ID: 700892436H1
ctcgagccgctcgagccgagaaaggttgcaagcttgtgtgcatagtttgaggattttgatcgctgattacggtgatcatttgttaaaatcttcgggaaaaaattatattagttgcaccgatcgatgacagatgcagttagcaatatttgaatatattgtcactatttgtttgaatgtaatgattcttacttacaagtgccaaaaaagaagaaaaaaaaaaacatctaaagaaata

SEQ ID NO: 33597 - DNA, 255 bp, Glycine max
  Clone ID: 700892395H1
caacgttctttctatttcatcatttccactcactcaccattcactaaccaacttttactatggcttctcgctacgaactcgagctgaagctcgcatcagcgcgcggcctcaagaacgtgaactggcgccacggccctaaccgcccatacgccgtcgtttgggtggaccccaggaacaagtgttccacgcgtgtagacgaagacggcgataccgaagccacctgggaccaaaccctacttattcctctccccccgg

SEQ ID NO: 33598 - DNA, 236 bp, Glycine max
  Clone ID: 700892439H1
tgatcgtgatgttactgtgctgaatgattttaagtatagaagcattgatggtgaccttgttggtgttgttggagattcatgggtgttggaaaccaatcctattcctgtgacatggaattctaacaaaggtgtggagaaagagtcttatggcgagattgtcacggcgcttgttaaggatgttcaagcgctgaattcttcagcaataggaacaaattcatcttatttctatgggaagc

SEQ ID NO: 33599 - DNA, 252 bp, Glycine max
  Clone ID: 700892365H1
agagaatggctcaagcaatggcatcaatggctggcttgcgtggttcctctcaggctgtgttggaaggtagccttcaggtgagtggctccacacgcttgaatgtggggagtggaagcagggtggcctcagtcacacgtgcagggttcacagttagatcacaacaacaacaagtgagtggtgaggtacaaagcagccgtagggcagtgctttcacttgttgctgctggtttggccactggctctattgttcaag

SEQ ID NO: 33600 - DNA, 254 bp, Glycine max
  Clone ID: 700892366H1
aacaaagttagaagtaaagaagatcatggcttctctagcaaccttggctgctgttcaaccagctacgatcaatggccttgctggaagttccctctctggaactaagctctctttcaagccctctcgccacagtgtcaaatccaagaacttcagtgtaactaagcattacaggagtggtgccgtggtagcaaagtatggtgacaagagtgtgtactttgatttggaggatctgggcaacactacagggcagtggg

SEQ ID NO: 33601 - DNA, 232 bp, Glycine max
  Clone ID: 700892367H1
gattgttggtggttgtgttgtgggttggggttgggagtagctgtttgcattgtggcgctgggaaccatgctcgaggaatggtggtgtgatatatttgtacaaatgatttcggaaaccaaattaatcatcaaaacaatttggcggccagaaaggagagtgaaatgtgatgaaatcctaggatagactcgttaaagatttgggaatagaatgcagggaattagtgtgttttgag

SEQ ID NO: 33602 - DNA, 195 bp, Glycine max
  Clone ID: 700892368H1
ttttccctcactttctcgctcgccaaacgcccctctctctcctccaatggccgaccagctcaccgacgaccagatcgccgagttcaaggaggccttcagcctcttcgacaaggacggcgatggttgtattactactaaggaacttgggactgtgatgcggtcactagggcaaaacccaactgaggcagaactgca

SEQ ID NO: 33603 - DNA, 87 bp, Glycine max
  Clone ID: 700892369H1
tgcaagagtcctccaaccttccctgcaaaataatcttctcacgcaattttgtaagcaaaggttgacgattgtgcttccccatggtgt

SEQ ID NO: 33604 - DNA, 249 bp, Glycine max
  Clone ID: 700892370H1
ctcattctccatacctcaacgaagaggttaaagagacggcaacactttgctgtccgccttgaccgagcagagcttcgtcttggccctcgattttgccctaaagtactctcagtcacaacagacaccgtcgtcgtcgtcgtcgtcatcaatggcaccgaagcagaccaaggctgagaagaagatcgcttacgatgcgaactgtgcgacctaatggaggagtacggccagatcctcgttgtgaactccgat

SEQ ID NO: 33605 - DNA, 248 bp, Glycine max
  Clone ID: 700892372H1
ggaattactactgaagaagcaactaaaatccttgtcaattcttataaatcttctgaatttagcaatcatgttcagagtgaaatcgcaaaaagtgataccgacttcggtgcatgtgggaagaagaagaaaatccacgctgcattcattactcagtgcctaatccttataagaagagcttcactgcaaatctatcgtgacacaaacaattattgggcacgtttagttgtctttatcttcatatctttaag

SEQ ID NO: 33606 - DNA, 239 bp, Glycine max
  Clone ID: 700892373H1
gaccatccaaccctgccaaacacggtggaatgattccggctgcttttgttcttgggttgcaagcatttgagataatggcaatagcggtagtgggaaacaatctgataacttatgtggccaatgacatgcacttccctttgtccaaggctgccaacctagtcactaactttgttgggaccatctttctcctctctctcctcggcggctatctatcagactcttaccttggcagcttctgg

SEQ ID NO: 33607 - DNA, 247 bp, Glycine max
  Clone ID: 700892374H1
gagaaaaaaaaaaaaaacagaacaacacagaaactcaaaaccaaattaaaattattatggatcacattcataggttacgtttttttgggacaatacccaaaattccttttctattgctactttccctgcttctcttcagtttcgttaacgcatccttcgacctcgctactatacccttcaacgacggctattctccgctcttcggagctagcaacgttgttcgctccgaggatggatacggcgtaca

SEQ ID NO: 33608 - DNA, 249 bp, Glycine max
  Clone ID: 700892375H1
caaagtagttgaaatatcttgtgtgttggcacaggagagaacttcattaggccctgcctcttctctgccaacacccaagagatcaagataataaagatagtgtgaaatgatgttggagtggacactactcattgttaatttgtgtatagattatattacttggccatatatcttggcttttgatgtttcctttctcttctataattcgaatatattttggtatataatgtatgtatacaattgagtatt

SEQ ID NO: 33609 - DNA, 245 bp, Glycine max
  Clone ID: 700892376H1
gttgatagccctgaaactttattgggacctttaaaaagtttaatattggcttttaactgccagatagttactgggttcagtttgggtttctgttgattacctttgcagatttattttgtcagtacatgtttttagtattgtagttttataattgaatggtttagggataacatacctttttatgaaacatattccttgcctatgctattatcctaaaaaaaaaaaaaaaaaagggcggccgccga

SEQ ID NO: 33610 - DNA, 252 bp, Glycine max
  Clone ID: 700892377H1
agtatctggtgctttggttgggaataacgaaacgatgggagctgaaactgaatcatcacaggaaaaacccgaacaagagaggccgaagcctactctctcacaggaacagtttctctcatggaagcgccacaaggacgctgcagtatcagccagaaaagccgaagtatccagtaagcgtgcagaagatattgctgcaggaactgtccaaatgaatggccgggagctatttttacatgagccatgggtgtttga

SEQ ID NO: 33611 - DNA, 253 bp, Glycine max
  Clone ID: 700892378H1
cgcaacaaaaagaaagaatcccaggcgaggagaaagatggaggggaaggagcaggatgtgtcgttgggagcgaacaagttccccgagagacagccgattgggacggcggcgcagagccaagacgacggcaaggactaccaggagccggcgccggcgccgctggttgacccgacggagtttacgtcatggtcgttttacagagcagggatagcagagtttgtggccacttttctgtttctctacatcaccgtct

SEQ ID NO: 33612 - DNA, 84 bp, Glycine max
  Clone ID: 700892379H1
tgatggctttttatgcttgaattatctggtgcagcatagccatcacgaaatatatttttaacttcaacatagtaaattctcttt

SEQ ID NO: 33613 - DNA, 256 bp, Glycine max
  Clone ID: 700892380H1
gcgagacatcttgcatcaagtgtagacatcagctcttgccctgatggaattatctgtgttggtggtgatgggataatcaatgaggtacttaatggtctccttagtagagacaatcaaaaggaaggaatatctataccaattggaattataccggctggttctgataactcgttggtatggactgttcttggagttagagatccagtttctgcagcaatggctattgtaaagggtggtcttactgctacagatgtct

SEQ ID NO: 33614 - DNA, 252 bp, Glycine max
  Clone ID: 700892381H1
cgttagtgctttgtttaggtgaactaattcggagaccttgcaagacttcatcaatggctgtcaaagtttatattgtgtactactccatgtatgggcatgttgagaaactagcagaagaaataaagaaaggggcttcctctgtggaaggtgttgaggccaagttatggcaggtacctgagacactgctggatgaggtgcttggtaagatgagtgcaccacccaagagtgacgtaccagtcattacccccaatg

SEQ ID NO: 33615 - DNA, 250 bp, Glycine max
  Clone ID: 700892382H1
gaggaagtgtagaagatcgatgtcagggaagtttttagcagccatgttgaggaatctgcacactttcgattcacagccatgttaatatactttgatacgggcctatacagttgcagctgctgctgtgtgctgtaatcatgtaatgatagctttttttattatttgtagttattgtggcttctaactggttgtgcatatcagtgttgtccagtgcataccggctataattatctcaagaggcaatttggtt

SEQ ID NO: 33616 - DNA, 247 bp, Glycine max
  Clone ID: 700892383H1
ggttctcagacttatcttagtttcctaatcggcaaggcacgtccaaagagcttttctacttcaccggcttccattttaagcccatcaagaatctccatttcttcttttgataaccctcttaagaaattttcctcgtcttcttgaaacattttgaacccttctgccaacttctgaaataaggtcgcctccgttttccccaccttctccacctcttcttctatctgtgcaacttcccttacaatggtct

SEQ ID NO: 33617 - DNA, 242 bp, Glycine max
  Clone ID: 700892384H1
ctctcttctgtatttgtcttgattccgatgcgaatgggtatcctattttatctggagacctgacatggtaaaacagtaacataactatgttttaagctgatttatagcctttgccctctggttccattgaattctgaaccatatttatgatgggctaagggcggcggtaatttaagtcagatgcaaattcagaacatttttgtgggccaagaggcagaagttattactaatggctttgaggg

SEQ ID NO: 33618 - DNA, 249 bp, Glycine max
  Clone ID: 700892385H1
cgtggagtttgccatcgggatatcaagcctcaaaatctattggtcaatccacacactcaccaggttaaattatatgactttggaagtgcaaaggttttggtaaaaggcgaaccaaatatatcatacatatgttctagatactatagagcacctgagctcatatttggcgccactgaatatacttcagccattgacatctggtctgttggatgtattctagctgagctgctacttggacagcctctgttc

SEQ ID NO: 33619 - DNA, 244 bp, Glycine max
  Clone ID: 700892387H1
ttcacaagcaaagtaaagcgaagattgtttatggagatcagcctagaaacaggttggatctgtatctacctgccaatattggtgaacctaagccagttttgatatttgtaactgggggagcatggattattgggtataaagcatggggctcccttttaggactacagttggcagaaagaggcattatggtggcatgcattgattacagaaattttcctcaagggaccatcagcgacatggtaaa

SEQ ID NO: 33620 - DNA, 116 bp, Glycine max
  Clone ID: 700892388H1
agcagggttaatgttcaaagcattgaaagatgtcaagagaaacccaatgttgccttggttgtttttgaggttgtgtatgcttcacctgtaattgactgttcttccacacaacagac

SEQ ID NO: 33621 - DNA, 247 bp, Glycine max
  Clone ID: 700892389H1
aaatcacgtggcatagcacgagcaatgcttggtcaatgggaagaagctgcaaaggatcttcatgtggcttcaaagttagactatgacgaggaaataaatgctgtactaaaaaaggtggaaccaaatgctcacaagatagaggaacaccgtcggaaatatgaaaggctgcacaaagaaagagaggataaaaaacaggagcgtgagaggcagcggcgccgtgctgaagctcaggctgcctatgagaagg

SEQ ID NO: 33622 - DNA, 245 bp, Glycine max
  Clone ID: 700892390H1
aaaacagacctttctttctcttgtttagattttttttgtggtgtcaccaggcctctctgtcttcttgtttctcgtaaaaggggaaaaagggggaaattttctttaagtaaagaaccctaatctttctctttccatctcaaatcgattcgattggaggttttcagggcatcgatggagtgaaacagaagagagtgtgtggcgcgattccgtgttagatcagaaagaagagagactcagagacggca

SEQ ID NO: 33623 - DNA, 248 bp, Glycine max
  Clone ID: 700892391H1
agtaaatgtacccaaagttactactgaaggctgtaccagcaccttgtcccgaaccgatgctggccataagtcagatgtatcaatggcttcttccatggagaggaaacaagaacagctgcaagtatcaccaaaggatactcagagcaagcaaatttgtagaagtcgaaccaaggttcaaatgcagggagttgcagtgggtcgtgctgtggatttgaccatgttggatgggtacggtcaacttataaatg

SEQ ID NO: 33624 - DNA, 249 bp, Glycine max
  Clone ID: 700892392H1
gggtcttccccgagaccaatgtcggcatcattgtcttggccgagggtcgtttgatgaacttgggatgcgccacaggacaccctagttttgtgatgtcctgccccttcaccaaccaggtcattgctcagcttgagttgtggaaggagaagagtaccggcaagtacgagaagaaagtttacgttttgcccaagcaccttgatgagaaggtggctgcacttcaccttggcaaacttggagctaagctcacca

SEQ ID NO: 33625 - DNA, 93 bp, Glycine max
  Clone ID: 700892364H1
taaaaaggtacaaaacatgaagcacgacatcaatcaattcagattcaactcaaggttgaagatttagcacaacactggcagccgtgaagctga

SEQ ID NO: 33626 - DNA, 250 bp, Glycine max
  Clone ID: 700892393H1
ttccaatatattccattctctctgtgtatttccctacctctcccttcaagatgcagatcttcgtcaagaccctcaccggcaagaccatcacccttgaggtggaaagctctgacaccatcgacaacgtcaaggccaagatccaggacaaggaaggaatccccccagaccagcaacgtctcattttcgccggaaagcaacttgaggacggccgtacccttgctgactacaacattcagaaggagagtactct

SEQ ID NO: 33627 - DNA, 258 bp, Glycine max
  Clone ID: 700892330H1
attgtttgttgttgtaactcgttcttcttcttttgttgttctgtgtttgtgcttgtgttttctctcacctgaaaatgtcttgctgcggtggtaactgtggttgcggaagctcctgcaagtgcggcaacggctgcggaggctgcaagatgtacccagacttgagctacactgagtcaaccaccaccgagaccttggtcatgggagtggcacctgttaaggctcaatttgagggtgctgaaatgggtgtgcccgctgaga

SEQ ID NO: 33628 - DNA, 260 bp, Glycine max
  Clone ID: 700892331H1
gattgtttgttgttgtaactcgttcttcttcttttgttgttctgtgtttgtgtttgttttttctctcacctgaaaatgtcttgctgcggtggtaactgtggttgcggaagctcctgcaagtgcggcaacggctgcggaggctgcaagatgtacccagacttgagctacactgagtcaaccaccaccgagaccttggtcatgggagtggcacctgttaaggctcaatttgagggtgctgaaatgggtgtgcccgctgagaa

SEQ ID NO: 33629 - DNA, 257 bp, Glycine max
  Clone ID: 700892333H1
aagaaaatcctcaattttctgagcagccaaacactctctctctgtctctcgaaaattctcagtttgcagagaaaatctgaatcatgtcgtggcaagcgtatgtcgacgatcaccttctgtgtgacatcgaaggtaaccacctcactcacgctgctatcatcggccaagacggcagcgtttgggctcagagtaccgacttccctcagttcaaacctgaggagataactgccatcatgactgactttaatgagcctgga

SEQ ID NO: 33630 - DNA, 256 bp, Glycine max
  Clone ID: 700892334H1
caggctcctttcttcggtgagtcacccgaatttagtgcgcctcttaggttgctgcatagaagggggagagcagctacttgtttatgagtacatgccacatggaacactatctcaacatttgcacagagcgaggggtggagtacttccatggacaataagactcaccattgctactgaaaccgctaatgctatagcatatctccattccgcaaatgatcatccaatttatcatagagacatacaatccagcgacata

SEQ ID NO: 33631 - DNA, 250 bp, Glycine max
  Clone ID: 700892336H1
tgccaagacaacaaagcatgattttgtattttactctgatcgattgattcgattggttgtggaacatggtttggggcatctgccatttacagaaaagcaagtaatcactcctactggttctgtatacactggtgttgatttttgtaaaaggttgtgtggtgtctctgttatcagaagtggggagagtatggagaatgctttgagagcatgctgtaaaggtatcaagattgggaaaattttaattcacaga

SEQ ID NO: 33632 - DNA, 251 bp, Glycine max
  Clone ID: 700892337H1
cagcgatgtcgcagcaaggtcaaattccgataaaccccatggtccctccgcagaacccgatggccaccatgcaggtccctatgcccatgcacatgcagatgcagatgcagatgcagatgcccatgcccatgcacatgcctttacccatgcagatgcagatgcagatgcccctccccatgccgctccagattcccttctccgtccaggacaccgccccctcctccgggaagcgccgccgcgacgacgagaat

SEQ ID NO: 33633 - DNA, 254 bp, Glycine max
  Clone ID: 700892338H1
tttgaagccagccacccttgacgttccagtacccagtggtgtgcagaagaattcaaggggcaatgtaagggttatgaatcttgagagtcctgtgaagactgaagtggaggaagcttatgaaggggaagatgagcatgaagaatcaccttccatcaagagggagctctctgattttgatctccaagtcctcgaagttgctgcaagcaaaggaggatatgatccatcaagtgaagagataaaataccctagtttat

SEQ ID NO: 33634 - DNA, 249 bp, Glycine max
  Clone ID: 700892339H1
gggtttgcagtcactgctttgtttagatcagaaccagatcgtgttctcttcttccattggcaaacatggcaactcaaatgagcaagaagagaaagtttgtggcggatggagtgttcttcgccgaactgaacgaggttctgacacgtgagttggcggaggacggttactccggcgtggaggttagggttacgccgatgcgcaccgagattatcatcagagccaccagaacccaagccgttctcggtgaga

SEQ ID NO: 33635 - DNA, 153 bp, Glycine max
  Clone ID: 700892340H1
gggtttgcaatcactgcgttgttgagatcagaatcagagcgtgttctcttcgtccattggcatacatggccattcacatgagcaagaagcgaaagtttatggcggctggagtgtgcttcgccggactgaacgatgttctgacacgtgagttgg

SEQ ID NO: 33636 - DNA, 180 bp, Glycine max
  Clone ID: 700892342H1
attgcttttcttagtcatttgcttttctttaatcttcttcttattgcttttcttagtcatttgcttttcttagtcatttgcttttcttcagcttcttcttattgtttttgttagacatttgcttttgctcattcgcctcactcattatctcccaaaatctcatttccacgatcatcgttt

SEQ ID NO: 33637 - DNA, 251 bp, Glycine max
  Clone ID: 700892344H1
cataaacgccgcccaaaaccatttatagggttttcttttctttgccaagaaaatgagagagtgcatttcaatccacattggtcaggccggtatccaggtcggaaacgcctgctgggaactctattgccttgaacacggcattcagcccgatgggcagatgccgagtgacaagaccgttggaggaggagacgacgccttcaacacattcttcagcgagaccggcgccggaaagcacgtgcctcgcgccgtct

SEQ ID NO: 33638 - DNA, 256 bp, Glycine max
  Clone ID: 700892345H1
catatcaggaggcacagcagaaacctggcggcacccctgtttttctctttttctcagttaataccagtgggcaatttgtggggcttgctgagatgattggtcctgttgattttaacaagagtgttgagtattggcagcaagacaagtggaatggttgctttcctcttaagtggcacattgttaaggatgttcctaacaatttgttgaggcacattaccttggacaacaatgagaacaaacctgtcactaacagtag

SEQ ID NO: 33639 - DNA, 237 bp, Glycine max
  Clone ID: 700892346H1
tatcatttcacttgtgctttttttctccctttttctatcagatgagtatgaataacagaacctgaacaattatggtttcgtattgatggacatgtatgttcatctattgtaggaactccttatatttctagtatgaatgtcatgtagtgcttaatgtagcttgactgttgaatggggatttgagcaggctttatttagtattcagatagttatgaaatcaaaattgacttcagtgta

SEQ ID NO: 33640 - DNA, 257 bp, Glycine max
  Clone ID: 700892348H1
ctgagatttccccttccaccttgtatgccattgcttgtgttatggaaaatgttcctttcatcaatggaagccctcagaacacctttgtcccaggactcattgatctggccatcaaaaggaatagtttgattggaggagatgactttaagagtggtcagaccaaaatgaaatcggtgttggtggatttcctagtaggggccggcatcaagccaacatctatagtgagtcacaaccatttgggacacaatgatggcatg

SEQ ID NO: 33641 - DNA, 257 bp, Glycine max
  Clone ID: 700892349H1
catccaggtgaagagaatccatgaatataagcgacaattattgaacatatttggaattgtttaccgatacaagaagatgaaagaaatgagtgctgcagaaaggatagcaaattttgttcctagagtttgtatatttgggggaaaagcatttgctacatatgtgcaagccaagagaattgtgaaatttattacagatgttggggcaacagtaaatcatgatcctgaaataggagatctacttaaggttgtttttgtcc

SEQ ID NO: 33642 - DNA, 253 bp, Glycine max
  Clone ID: 700892350H1
tctcgagccgattcggctcgagtggcattgctccgttctttttcacaacttggtgatgctataggagctgaacgaatttcacacactatgcaatttgcaggaatccagcagggtatggatatggagacatccaccctgcttattgaggcaagtgcacttgctgttccttgtaaccctgatcaggcaagaagccattttgactacatgataaaattggggcataagcctgatgataggtgcaccgctagcatga

SEQ ID NO: 33643 - DNA, 250 bp, Glycine max
  Clone ID: 700892352H1
gtggagaagcttggtgagcctgcccagggctatgaagatttcactgccagccttcctgctgacgagtgccgttatgctgtttatgattttgagtatctgactgaagggaatgtccctaaaagcagaatttttttcattgcgtggtcccctgacacatcaagggtgaggagcaagatgatttatgcaagctccaaagacagattcaagagggagctggatggaattcaagtagagttgcaagcaactgatc

SEQ ID NO: 33644 - DNA, 131 bp, Glycine max
  Clone ID: 700892353H1
ccgatgggttagcatttcattaatttatgattttggtcgtgctagattcccggaagtttcttttgaagaatttttgggtgtgtactagaaatattttcatttggcttcatggttttattgataaggatttg

SEQ ID NO: 33645 - DNA, 251 bp, Glycine max
  Clone ID: 700892354H1
tttaagacctaatgcatattactctaaactttcactactaggtcgatgccagtggtcaccagattctgtattatgtgtagtgtttttagtagttcagattttgtacatccacattatattgtcattatcgtaaatggtaatgtgggcccaatgttgttgcataatttttaaaagtacaatttacatgcatgggcagtctatattttagtatatgcacattgatcccttacccaagtatattataatttaat

SEQ ID NO: 33646 - DNA, 249 bp, Glycine max
  Clone ID: 700892355H1
gccggctaggattggcatgcctcgtgttagtgtcttggttctgattctgctattgtatgttgtttgattcagttcattatgttttagtatttgtgatttgttgtatggatgaacacaccctatgaggaaagaactcccaaaaattgataggaagtgccgtatgacactctaaacacagcgccaattttaagaacgctctcatccaccgatgtcatcggtcgagagcgttctttgtggtgctgtgtgtgt

SEQ ID NO: 33647 - DNA, 105 bp, Glycine max
  Clone ID: 700892356H1
cgagagaagaagaaacttaatcgatcatcacttcacttcactaatacatcatggcagacgagacccagaacaagtatgagagctctgaggttgaggtccaggatc

SEQ ID NO: 33648 - DNA, 248 bp, Glycine max
  Clone ID: 700892357H1
caacattgtttgttgtaggaagaggaatcttgagaaatggcaggggacagcaagagcaagattctgttcatcggagggactggttacatcggaaaattcatcgtggaagccagcgccaaagctggccacccaactttccttttggtgagggagtccactctctccaaccccgcaaaatcacccctcatcgacaatttcaaaggcctcggtgtcaatcttgttttaggagatctatacgatcaccaaag

SEQ ID NO: 33649 - DNA, 252 bp, Glycine max
  Clone ID: 700892359H1
ctccgttcctctttacgccaacaaagtcggtccctttcacaaccccagtgaaacggatcggtactttgacctgccattctgtgtaacaggtcatgagaaagataagactgatgccctcggtgaggtgttaaatggcgatcgccttgttagtgctccttatgaacttagtttcaagaaggagaaagactctaaggttgtatgcaagaggaagctcacaaaggagcaagttgctcagttccgagaagcagttaa

SEQ ID NO: 33650 - DNA, 252 bp, Glycine max
  Clone ID: 700892360H1
gcgagatcagccggcgcatcttagccacgaccaagtacatcagctacggtgcgctgcagaggaacactgtcccctgctctcgccgcggagcctcctactacaattgccagcctggcgctcaggccaacccttacagccgtggctgcagtgccatcaccaggtgcaggagctaaattatatatttattattattctcctttttttttaaaaaaaaatttcatattcgggtttcgttgtatacatgaccaagat

SEQ ID NO: 33651 - DNA, 256 bp, Glycine max
  Clone ID: 700892362H1
actggagaggtgttaaaaactccagtatcattggacatgcttggccgcatattcaatggttctggaaaaccaattgataatggtccacccattttacctgaggcttacttggacatatcaggaagttccatcaaccctagtgagagaacctatccagaggagatgatacagacaggaatatctaccattgatgtcatgaattctattgctagaggtcaaaagatccctctattctcagctgctggtctcccccata

SEQ ID NO: 33652 - DNA, 258 bp, Glycine max
  Clone ID: 700892329H1
agaggattcccttgccgtgggagattctgcagccttcgctcagaatcctggggcactgtctattgggaccgttgaactctcaggatgtgaaggacgccgcttccttcgcggtgcggtgcttgtacgcccgcgcttcgcacgatttggtgccgcaggcgatactcgcgacgaggagtctcattcagcttgatgtgaggactcgagaggctgccaagacgaatgccgccactaactcgaacgccaacacccccaccaagg

SEQ ID NO: 33653 - DNA, 254 bp, Glycine max
  Clone ID: 700892363H1
gttgcgactaagagttgctgcttcttccgccactcagcacttcgctccctctgtgcttcaccaaccatggccgaaatcgaagctaccgttccagatccctctcaaatcgacgtcaaacttttcaaccgctggagcttcgacgacgttgaggttactgatatgtctctggctgattacattggagtgtccccgtcaaagcatgctacatatgttccgcacactgctggtaggtactcagtgaagaggttcaggaa

SEQ ID NO: 33654 - DNA, 251 bp, Glycine max
  Clone ID: 700892295H1
ttatggacattgccctgtctacaccaagagtatttaaagaagccagaggattatttagctcatctccttgggcatgagggcagaggaagcttgctctcctttctcaagtccagaggatgggctacatctctatctgcaggagttggggaagaaggaatttatcggtcatctatagcttatgtctttgtcatgtccatacacctcacagactctggtatagataagatctttgatatcattggctttgtcta

SEQ ID NO: 33655 - DNA, 251 bp, Glycine max
  Clone ID: 700892296H1
cacgcttttaaaacttgttcttttcttccttccttctctgttcctcacatcagattctttttcttttcttttatttctctctgcaaatcagattgtgcaatgtcgatgagcttcttggtctgtgatcagggatatcattcttaataaaaacaacaaccacactttctccgtttctcgtggttcatgctatggcggcagaggcggctttgttcttttctgtggcatcagtggtggaggacgtgcttcagcag

SEQ ID NO: 33656 - DNA, 255 bp, Glycine max
  Clone ID: 700892301H1
gcaattagcaagctcaatcgttgttgagtatactttcaatctcacgctaactctcagcaaaacggctgcgttagcggtcatctgaaacttttcgcggccaacgtatgacgaccatcagttcctgaatgatatcaaaggttaccaaccttatcgatgctgtcaacatcggccaactcggcatcgttctcgtatacagtaccgcttttccctcagtcccaaacttaatgcgatacttgccgtcataactgaccttaa

SEQ ID NO: 33657 - DNA, 251 bp, Glycine max
  Clone ID: 700892304H1
ggtacaataacttcttgcaaggttatgcgagacccgactggaatcagcagaggatcaggatttgttgcattttcaactcctgaggaagcaactcgagctcttggtgagatgaatggtaaaatgtttgctggaaaacctctgtatgttgcccttgcacagagaaaagccgagagaagagcacggttacaggcacaattttcacagatgaggcctgttgcaataacgccttctgttgcgccccgtatgcctct

SEQ ID NO: 33658 - DNA, 256 bp, Glycine max
  Clone ID: 700892305H1
gtgctgaaagttaagaattctatgcctagtagcaatggagaccatgccccagtgcagcctcaacagaagcattcaaatgggcaacaacaaaagtattcaaatggacatcatagattagccttagtaccaattcaggagcagcaacaagaacaaccaaggaactcaaatgagaattctctggaactataccaagagcaacaacaccaaccctcaaggaattccacctcaggagttgtagttaccacaaattgggagt

SEQ ID NO: 33659 - DNA, 248 bp, Glycine max
  Clone ID: 700892306H1
cgtggagtctgccatcgggatatcaagcctcaaaatctattggtcaatccacacactcaccaggttaaattatatgactttggaagtgcaaaggttttggtaaaaggcgcaccaaatatagcatacatatgtactagatacgatagagcacctgagctcatatttggcgcaactgaatatacttcagccattgacatctggtctgttggatgtattccagctgagctgctgcttggacagcctctgtt

SEQ ID NO: 33660 - DNA, 258 bp, Glycine max
  Clone ID: 700892307H1
gtgaatagaacttcgaaagattctagaggcagaggaattcacctatttttcagaatcttcctcccagctctttgattcgtttcaaacgattgtgatacaaatacaagtctctcccatgttgcaaatattttaattgtaattaactccaactgtgtatatataaatcatgaaacatgtaagtagcatgcaaaaaaaggtggtcgaatctttatttgagacctttatattttcgttgtacaaaaaatttctctgtaaaaa

SEQ ID NO: 33661 - DNA, 257 bp, Glycine max
  Clone ID: 700892308H1
tgcgggtgagaaaatctctctacaccgtaatcgctatttggcatcgctgcaacaatctgcgatactctttcctctctccgcttcgaatttcttctcacactctctgcttcgccgcaaacagtgactcactgaacaactttccgaagcattgagtagtagtgattgggtggtaacaaagagagagagagagagaaaaggatgaaccagaacccgcaatcgagtgaaggccggaacgatgacgattctgccctttctga

SEQ ID NO: 33662 - DNA, 257 bp, Glycine max
  Clone ID: 700892310H1
ctcgagcgcaagatccatcagatggaatgtatcagcaagtggtgctcgtcctaacccacaagggtctttcagatatggttccatcaatgtgactgatatttatgtattgaaaaataagccactggagaaaatcaatgggaagcggcgagcaacactcagtggaaactcttttgtcaatccttctactccaatcaggcttgctgaccagtacaaattaaagggagtatacaagcttgatttccctaccaagcctctta

SEQ ID NO: 33663 - DNA, 254 bp, Glycine max
  Clone ID: 700892311H1
gtgtaagaagagaaagaggacgcagcaaggccgaagcagagtttcaattcaattcaatagcgatttagagtttccagaaaagaaattgattttcagtcagtatcagatggatcattttgcagcacatgaagagcaacttgcttcacagagaatgaggcagaaacttgaagaagtaaatgtggctgctcaaactaatcttgcccctgtccaagactatgtcaattatacactccagaaagcatattttaagtgtg

SEQ ID NO: 33664 - DNA, 253 bp, Glycine max
  Clone ID: 700892312H1
aggggctggtatcagtcgccttcaaagctgtgatatgaattgctgttctaaaatctggcatgaataagttgtgggggccattaatttgtgatgatgatcttaattcgagaaaataatgtgcatatgtataacactgaaattgttccatggccttgttaatgacgggctgagttgattttatcttttgtgatgatgatcttcacgttagaactttttttgtacaatgtttacatgtgatttcttaaatgttttt

SEQ ID NO: 33665 - DNA, 258 bp, Glycine max
  Clone ID: 700892313H1
gggaagagcatttggctgttaagcacttttctgttgagggtcagctggagtttaaggctgtcctctttatccccaagagggcaccttttgatctctttgacaccaggaagaagcctaacaacatcaaactgtatgtccgccgtgtcttcatcatggacaactgtgaggagttgatgcctgaatatcttagctttgttaagggtattgtggattctgaggatcttcctctcaacatttctagagaaatgctgcagcaga

SEQ ID NO: 33666 - DNA, 264 bp, Glycine max
  Clone ID: 700892314H1
cctatgaataaccaagggattcccatacccccaccaccgggatctcagttcactcatgttccagttccgcgaccttttgttcctctttctgttcctccatcagttatgcctatgatgcatccaccacctttgcctcaaggacttccaccaccaccgccaccagaggaggctcctcccccactcccagaagaaccagaaccaaagaggcagaaacttgatgattctgctctgatccccgaagatcaatttctggctcaacatcct

SEQ ID NO: 33667 - DNA, 157 bp, Glycine max
  Clone ID: 700892315H1
cttggacctactgcccatgctatctatggtgcaattggtgctatgattttctctggctatattgtatacgacactgacaacctgatcaagcgcttcacttatgatgagtacattggagcctccgtcactctttatcttgacatactcaacctcttcc

SEQ ID NO: 33668 - DNA, 97 bp, Glycine max
  Clone ID: 700892316H1
aaaaaaaatgtctatggcatgttcaatcccatgcatcaaaatcccaacacgttcctcttccccatcttgcacttcatccagttcatcctattctttg

SEQ ID NO: 33669 - DNA, 261 bp, Glycine max
  Clone ID: 700892317H1
gcacccacgactatcatcaggaaaccctcaacaatctcaagactgctatgcacaacactggtatactctgtgccgtcatgcttgacactaagggacctgagattcggactggttttctgaaagatggaaaacctattcaacttaaggaaggacaagaaatcaccataactactgattatgacattaaaggggatcaggagatgatatccataagttaccagaagctgcctgtccacttgcagcctggaaacaccatattgt

SEQ ID NO: 33670 - DNA, 211 bp, Glycine max
  Clone ID: 700892318H1
tcgagcgaatcggctcgaggggttgccaaagaagcattttgactacttcaggagagaactactccacagctatggatattgagcacatagcaatgctaaacaatttagagaaagctcggactttttaaaaagcaggagtcacaaagcaattggcttactagaaaacgtgctctacagcttgtggttgaagacagtgatacggccaacccca

SEQ ID NO: 33671 - DNA, 256 bp, Glycine max
  Clone ID: 700892319H1
atcgaagcaagttattgtggagaagctgggtgaccctgcaaatggctatgatgaattcgctgccagtcttcctgctgatgagtgtcgatatgctgtttatgattttgattttgtcactgaagagaattgccaaaagagcagaattttcttcattgcttggtcccctgatacatctagggttaggagcaagatgctttatgccagctccaaagatagattcaagagggagcttgatggaattcagcttgagctgcaa

SEQ ID NO: 33672 - DNA, 249 bp, Glycine max
  Clone ID: 700892320H1
ctctagtcccacctcctgcttcatcggcagacaatcaatcccagagcattggaaatgtgcctagggccgcaaatccatcagtgcctcctcctgcttcatcagctgattcagagtatgaaaagttcatggcagagatgaaatgattgtgttcaattttggttcagtgttccaaaaggcctgatgtttcttggagctcttgtgaacctgatttctaacctcttgccatgtctgtcttcgaagtttgggact

SEQ ID NO: 33673 - DNA, 158 bp, Glycine max
  Clone ID: 700892321H1
ctaaattccaataaattcctagtggccttagagatagtgctttccattaatgtgtcttgtaattctggtttttgtcatcgttgtatttgttgcgtggcgaactattaggcatgcataacttccaggagggatatgctgcaagttacaccaatgggaag

SEQ ID NO: 33674 - DNA, 251 bp, Glycine max
  Clone ID: 700892322H1
gtggattcttggcgatgttttcatgagggcatatcacaccgtctttgactacggaaatctacaagttggttttgccgaagctgtctaattaggctttctggaggattttctttgacaaattgttaagcgtgttgtaaataagctgttataacaattgtagctgggattcactttatggaatcacgaatggatttatccatttaagacgtagaagtatccacttggaacttggaagtgttgtgttgtgtgct

SEQ ID NO: 33675 - DNA, 252 bp, Glycine max
  Clone ID: 700892323H1
gaagacagtactcaaccatggccctatttgaatgaagctctggcaaaattccaggatcctgcagaggcagacaagttgatgaaaatccagagagagttggatgaaaccaaaatcatccttcataaaactattgatagtgtgctagctagaggggagaagctggatagtttagttgagaagagttctgatctgagtgccgcttcgcagatgttctacaaacaggccaagaaaaccaatcagtgttgtaccata

SEQ ID NO: 33676 - DNA, 253 bp, Glycine max
  Clone ID: 700892324H1
ctttacttcactttcatacacatacacatggtctttaggctagctaggaggttttctgatttatgtctatggaagcaatagagaaattggacttgtctttttttagccaagccaacactaacatgaacacatcatcctttagaaaaccacttttacttatgaaaaataaaatcacattaaataattactgctgcagttgcacaatctgccatggataccatcataaccaaaggcaaatcttcgaataaaccac

SEQ ID NO: 33677 - DNA, 255 bp, Glycine max
  Clone ID: 700892325H1
actccctctctttcttaatacaccaccttcccaaccctcttccattctccttctccaactccaacccctgcttccctttttttcattttctcactccccatcttctgagagtgatgggtgtttgctaccgctgttcccacacctcccacatcaccgccatcatcatcaccagcttcttccgccacaagccttagaattatactattcccaccctccctctttcttcaacaacaaccgttgacttcactacagtca

SEQ ID NO: 33678 - DNA, 253 bp, Glycine max
  Clone ID: 700892326H1
caaactgcctctccgaagattgccccaggagagaatactacaagatctacatctgcatctccagggtctacgaaatcagtgccttcacctgcacccgcaaccgcaaacttgaaagatggacagccccatgctgcagctgttagtggttcatctgatcttcctgtggcaaatgcaagggatgagaaaagtagcagttctagtccatctcataacagtcaatcttattcaagtgaccatgccaaagctgggggtt

SEQ ID NO: 33679 - DNA, 248 bp, Glycine max
  Clone ID: 700892294H1
aagaaaccctagcaagtggagcaatggcagacgttgaagtcgatgtggcggcagcagcagcagcagggctgccgaagaagagaacgttcaagaagttcagttttcgaggcgtggatctcgatgcacttctcgacatgtccaccgatgaactcgtcaagatgttcagtgcccgcgctcgtagaaggttccagagaggcctcaccagaaagcccatggccttgatcaagaagctccgtaaagcgaaaagg

SEQ ID NO: 33680 - DNA, 179 bp, Glycine max
  Clone ID: 700892328H1
caagaagatccatcttgtggccctcttttggatgccattgctatcagagagttctacccgccaatgcctacaagagttaacttggtaaaaaatcctggctttgaggagggtccattccccattttcaactcaaccaacggtgttctgctcccacctcaacaacaagatggcttctcccc

SEQ ID NO: 33681 - DNA, 255 bp, Glycine max
  Clone ID: 700892261H1
tcttgattcacataacaaatgagcccttgaattattttgttttgttttcttttagtagtggttcctatttaatgattgtagaatgcttcatctatacttgaatgtgtgtattttgaattctgatatatggaggatgctaaagttagctgattttttgttgtttattttcctgtttgaacagaagtagcagttactgtgcctttggttcttctggtgaacagaagtgccttgattttcatgaatggtaaaatggga

SEQ ID NO: 33682 - DNA, 254 bp, Glycine max
  Clone ID: 700892262H1
gcggctagggttttagcgcacttcttctagatttaaggaagatgggtaaggaaaaggttcacatcagtattgtggttattggccatgttgacttttgcaccaactggactgacaaccgaagttaagtctgtggaaatgcaccatgaagctctcacagaggctcttcccggtgataatgttggattcaatgttaagaatgttgctgttaaggatctcaagcgtggttatgttgcctcgaactcaaaggatgatcc

SEQ ID NO: 33683 - DNA, 196 bp, Glycine max
  Clone ID: 700892263H1
atcctacgaagaattgagcgaccggcgagagagtaaatgagatgaagaataacgcttgaaaggttctaaatgaactacaggaacatagaacaaacatacatggggactgccgctactatcttctgcattatgggatccttctcataactgtgagtcctccagtgtggagtatatcaggcaccttctatcagcttct

SEQ ID NO: 33684 - DNA, 256 bp, Glycine max
  Clone ID: 700892264H1
tatcccttcctcgtttacctgtttatccactctcacccccgtcttccacacatcttctattacacatcgcattagtcttctgttcgatccactgaggaaatgcaaacataggaacccccgaagccaagctttccattgtcgaattccaaccacagtgcgtcacaaaacaccccacagaacgatgtgaaagaacttccacttgagaacaccaatttactatcttccccttctgttccaactcctccctgcagcttag

SEQ ID NO: 33685 - DNA, 194 bp, Glycine max
  Clone ID: 700892265H1
aaccttatctctttagttatcctcagccatggcgtctctactgctagcatcacctcctccactctccgttcaattgcacagttccacctctcacctttccttctctcactcccaaactctctcttcaccactctccacttccttcgcttctctctcagcctctgcaacctccactctttccccaaccccttctg

SEQ ID NO: 33686 - DNA, 213 bp, Glycine max
  Clone ID: 700892266H1
tccaacctctcaagtccaacctacccctttttcttctcccaccaacttcaccgtcttcttcctcgatcatgtctcacttcaagggcaagtaccatgatgagcttattgccaatgctgcttacattggcactcctggaaagggtattcttgctgctgatgagtcaacagggacaattggcaagcgtttggccagcatcagtgtagaagatgttg

SEQ ID NO: 33687 - DNA, 258 bp, Glycine max
  Clone ID: 700892267H1
ctcgagccgattcggctcgagggagggtatccccccggaccagcaacgtctcatcttcgccggaaagcagctcgaggacgggcgcaccctcgccgactacaacatccagaaggaatcaacccttcacctcgtcctccgtctccgtggtggcatgcagatcttcgttaagaccctcaccggcaagactattaccctagaagtcgaaagctccgacaccatcgacaacgtcaaggctaagattcaggacaaggagggaat

SEQ ID NO: 33688 - DNA, 257 bp, Glycine max
  Clone ID: 700892269H1
acttttccaactgttgtggggtttcattgtggtgctgaaaagaaaaaggaagatactgacaattgcagcagcaaatcacctagtgaatacatcaatctcaactcccgtgtacctgttggcatgcaaatgatgcctacatcacaatcaagtagtccttttcctgcagttttcatggcaaagcaggagaaatataattcaaaacttgctgagatgttccagaaagtggaagatcacgagtcaggtgaccaaagatcatg

SEQ ID NO: 33689 - DNA, 258 bp, Glycine max
  Clone ID: 700892270H1
aaaagatcttggattctttatcacccttcagctctgaacacctttgaacagatagtatatagtgccaaaggaaagcaaattgtagtttttcttgactacgatggaactctctctccaattgttgcagatccgaataaggctttcatgactagaaagatgagagcaacactaaagggtatagcaagacattttcccacagcaatcgtgactggaaggtgcagagacaaggtatataactttgtaaaattggcagaactt

SEQ ID NO: 33690 - DNA, 255 bp, Glycine max
  Clone ID: 700892271H1
gtgccaaagatgtaaacgctgctgttgccaccatcaagaccaagaggaccattcagtttgtggattggtgccctactggtttcaagtgtggtattaactaccagccacctaccgttgttcctggaggcgaccttgccaaggtgcagagggcagtttgcatgatttcaaactccaccagtgtggctgaagtgtttggccgcattgatcacaagtttgatctcatgtatgccaagcgtgcttttgtccactggtacg

SEQ ID NO: 33691 - DNA, 225 bp, Glycine max
  Clone ID: 700892272H1
gaacttcaaagaatatgacatctggctggcagcagagaatgggatgtttttaaacccttcaaagggagaatggatgacaacaatgccagagcaactgaatatggaatgggttgacagtgtgaagcatgtttttgattacttcacggacagaacacctcgatcatattttgaagaaagggaagcctcacttgtatggagttacagacatgcagatgctgaatttgg

SEQ ID NO: 33692 - DNA, 158 bp, Glycine max
  Clone ID: 700892273H1
ttggtttgcaaaacatataaaatcagttaaatgtataaaactgaataacgaaaagttatatttatccatatttttttatttattttatttcgttctttcttaatttgtattgtgatctttgctcaaaaatattaatgatacgagtttttgaattgttg

SEQ ID NO: 33693 - DNA, 255 bp, Glycine max
  Clone ID: 700892275H1
tgcgactccgcgtgggtttggcgaaaccttctagaattttcttccatggaggttatcagagttctaacggcggcgatcacggtggcggttctcgcggcggcgcttccggcggacgccggcgacgacaaccgagtattcgcgccgtgttcggacacgcgagtgcagagatccgacggattcacgttcggaatcgcgttcgctccgaaggacaagttcttctacaacaacaacaacagcgttcagttgtcgccgtgc

SEQ ID NO: 33694 - DNA, 255 bp, Glycine max
  Clone ID: 700892276H1
gtcacgagacccatagtgctgccaaattatagtaactctctttctctatctgaagaagaagaagttctgaagaagcatgtgtggaggtgctatcatctcagacttcattggtgtgaagcgtggccgcaacctcgccgcgcaggaactgtggtccgagcttgaccctttctctgacctccttggcttcgataccaccaccaccaccaccaaccaaccaccccttccagacaaaaaagtggtgtcatcatgtgagaa

SEQ ID NO: 33695 - DNA, 254 bp, Glycine max
  Clone ID: 700892277H1
gcttacagaagtgctccgtgactcctttgttggaaattcgaaaactgttatgatctcttgtatatccccaaatgctgggtcatgtgaacacacacttaataccttgagatatgcagaccgagttaaaagtctatccaagagtggaaatcctagaaaggaccaggccacaaatccagtaccaccagcaattaaagaggtttcatccacatcttcacttccagctagtgttggtgcagatgattttaatggtcaat

SEQ ID NO: 33696 - DNA, 254 bp, Glycine max
  Clone ID: 700892280H1
acttgcatcatcagcgtcttctctttttctcagtttctcctttttttttttaaaggtgctgcaagcatacgtgtgattttctggcacaagaaggaaaaagaaaaaaaaaaacaacgtggaatcgcaacgagataaggtgaaacaccaacgttgtgaggggaaattgaaactttttagtggggtttattggtctgaagctttttggatttgggagtagttgaagatgagaaacgtgcttcgttctctgcgacatt

SEQ ID NO: 33697 - DNA, 255 bp, Glycine max
  Clone ID: 700892281H1
cttgtcttctacagacccccaagctctgagattctaatcctctgtggttttccaacctcagaatttcctcgaaacttgacagcacattatgtcaaatctgtggcttataacctcccagaagagagaaccttgacaactcaggactatatctgttttgttgccatgagtatcaattagcagctttctctaggccactgttgtccattgttctgcttctacatataatctgctggaagagatcacttgaactactat

SEQ ID NO: 33698 - DNA, 255 bp, Glycine max
  Clone ID: 700892282H1
gggccgaggtagcattaaggatccagctagggaggaaatgatgagagggaaacctgggtatgaacatctgaatgaacctctccacattctagttgaggcagaattacctgttgaaatagtagatgctcgtttgatgcaagcacgtgacatacttgaagatttgctcaaaccggtggatgaatctcaggatttctacaagaagcagcaacttcgggagttagcaatgctgaatggcactcttcgcgaggagggttc

SEQ ID NO: 33699 - DNA, 252 bp, Glycine max
  Clone ID: 700892284H1
gacgatgctgccgtacagaagagcggaggttggttcggcttcatctccgaagctatggagttcgttctcaaggtgttgaaggatggtctttctgccgtgcatgtcccttatgcatatggatttgctatcatattgctcactgttatagttaaggcagcgacgcttcccctgacaaagcaacaggttgaatctacattggctatgcaaaatcttcaaccaaaaattaaggccattcaagatagatatgctggc

SEQ ID NO: 33700 - DNA, 70 bp, Glycine max
  Clone ID: 700892285H1
atgttctgggctttggctttggtaagcctctgtggccagctaccttccaatgcccaagcacctgcaactg

SEQ ID NO: 33701 - DNA, 255 bp, Glycine max
  Clone ID: 700892286H1
gcgtcttaataaacgctcttctctgaaaaacctgatttcttctcttcttctcttctctttcgtttcgatcttcgatctctgaaaatgagagagtgcatttcaatccacatcggtcaggccggtattcaggtcggaaacgcctgctgggagctctactgcctcgaacacggcattcagcctgatgggcagatgccaagtgataagactgttggtggaggtgatgatgctttcaacaccttcttcagtgaaactggg

SEQ ID NO: 33702 - DNA, 254 bp, Glycine max
  Clone ID: 700892287H1
actctccctctttttccacatcttgtttcctcttccagcttctctttctctctgtgtcgtccactctcttcatctgcagctgctacattgatggaggtggtcaaagcaattgccaagcacgaacctgcagctcctgaaagtgttgctatcagagctgatcagaagagttatagttacaagcaactcatcacatcggcacagaagatatctaatctcttgtgtggcagtgatgcacagacaggaaatctcggtgg

SEQ ID NO: 33703 - DNA, 254 bp, Glycine max
  Clone ID: 700892289H1
atccctctctctatctctcacacacactttctctctctctctctctcacccagatcttgtagcaatggcgagcgctcccactccacgcgaagagttcgtgtacatggcgaagctggcggagcaggccgagcgctacgaggagatggtggagttcatggagaaggtctccgcctccgccgagagcgatgagctgaccgtggaggagcgtaacctcctctccgtcgcctacaagaacgtgatcggcgctcgccgcg

SEQ ID NO: 33704 - DNA, 254 bp, Glycine max
  Clone ID: 700892290H1
aacagagagtggtttcagtgagtgatcggtgttcacttgatccttcataagtcgtcatcatcatcatcatcatcaccgttgattgaagaagatgccgatcagaaacatcgccatcggaaggcctgaagaggctactcaccccgacacgttgaaggcggggttggctgagttcatctccaccttgatcttcgtgttcgccggttcaggttccggcatcgcctacaacaagctcaccgacaacggcgccgccactc

SEQ ID NO: 33705 - DNA, 251 bp, Glycine max
  Clone ID: 700892292H1
ctcaagattgaagaatggcaattttgttgagttgcatggttactgtgttgaaggaaatcttcgtgtacttgcatatgagtttgctactatacgctctcttcatgacatattgcacggtagaaagggagttcaaggtgctcaaccaggaccaactcttgattggatacagcgagttagaattgcagttgatgctgctcggggattggaatatttacatgagaaagttcaaccaccgattatacacagggata

SEQ ID NO: 33706 - DNA, 257 bp, Glycine max
  Clone ID: 700892260H1
atttttcttcctcagtagtgtcatttacgcttctcttctctgcagcaactatgcctaaccctaaggtcttcttcgacatgaccatcggcggtcaatctgctggccgcatcgtgatggagctctacgccgacgtcactccccgcaccgccgagaacttccgcgcgctttgcaccggcgagaagggcgtagggcggagcggcaagcccctccactacaagggctcgtccttccaccgcgtgatcccgagtttcatgtgt

SEQ ID NO: 33707 - DNA, 250 bp, Glycine max
  Clone ID: 700892293H1
ctcaagattgaagaatggcaattttgttgagttgcatggttactgtgttgaaggaaatcttcgtgtacttgcatatgagtttgctactatgggctctcttcatgacatattgcacggtagaaagggagttcaaggtgctcaaccaggaccaactcttgattggatacagcgagttagaattgcagttgatgctgctcggggattggaatatttacatgagaaagttcaaccaccgattatacacagggat

SEQ ID NO: 33708 - DNA, 262 bp, Glycine max
  Clone ID: 700892225H1
caccgttgcagtggtaatattgtggttctgggaaagcgtagattacatagtgatagtagcggcgggcgaaggtttgatactgagtgtttgagaatggcatcatcgaaggtaatgtgtaggttgtcgtgtcggatacagagtgttgttgctcataatcataacaagttcaccaaaccctcaccactctctcctctttctctctctctctctgcgcgacgcctttctcgcacttcccggttaccagtggaattgggaagcttgg

SEQ ID NO: 33709 - DNA, 135 bp, Glycine max
  Clone ID: 700892226H1
catctttccaccttctttaaaaaatggtgttagagagtggcatactttggggtgtcctcttttagcttctaaaagaggaaacaaaaaagtatgccaatttctaacacgatctttccaccttctttaaaaaatgca

SEQ ID NO: 33710 - DNA, 259 bp, Glycine max
  Clone ID: 700892227H1
tggatgctctagtgtggtctgcaactatgagcaaggattatctaatcatactttctctccttctttccacggtgcttgcaacttcaagttcttcttcttcttcttcctccctctatcttgggaagggcttctcccatcgcaaattgtctcccagttatcacattcacaaaaccattgacgaatcctatgcagttatcttcgatgctggtagcacgggaagccgtgtacatgtctatcgttttaaccaacaattagatct

SEQ ID NO: 33711 - DNA, 262 bp, Glycine max
  Clone ID: 700892228H1
accggtattaatccaaaggccaaatcttattacctctttgatggttatgcacatctctcctctggtcttgcctgtggcttggctggcctttctgctggcatggctattggtattgtcggtgatgctggtgttagagccaatgcacagcagccaaaactttttgttggaatgattctcatcctcatttttgctgaagctcttgccctttatggcctaatcgttggaattatcctgccttctcgtgctggccagtctagagctg

SEQ ID NO: 33712 - DNA, 260 bp, Glycine max
  Clone ID: 700892229H1
gaagcttgcagggagtcaaacaggcaatagtggcaaatataagttcactgtggacatccctgtcacactagtggccggaaagaacacaattgatctcttgagtttaaccgtgggacttcagaactatggagccttttttgacacatggggagcggggatcactggtccagtgatattgaaaggtttggcaaatggcaacacacttgatctctcctaccagaagtggacttatcaggttggcctcaaaggggaagacttag

SEQ ID NO: 33713 - DNA, 260 bp, Glycine max
  Clone ID: 700892230H1
agtgttgggtgtggaagaattaattcgatctattggctgcccctcgactgcaagaccaacctattttgaaatatcttcacctccttaagagaacgtagtgttgttcaggttcttcaaaaaagttttggtgtaaattgtgcatattatggtaaacaaaacatggagctagatatattttatcttgcttgtcacataaagctgtgagaaaatggtattttgccgtggacttggttatatggtgcttgactctattggctcca

SEQ ID NO: 33714 - DNA, 262 bp, Glycine max
  Clone ID: 700892231H1
ataccacgaaggattggcgaccggcgagagagttaatgagaggaagaataacgcttgaaaggttctaagtgagctacaggaacatagaacaaacatacatggggactgccgctactttcttctgcattatgggatccttctcataactgtgattcctccagtgtggagtttatcaggcacctatctatcagcttctaagtcatcttctcttggtttgaagtttaactgccaacaattttgcaagggaagatcaaaattgcca

SEQ ID NO: 33715 - DNA, 226 bp, Glycine max
  Clone ID: 700892233H1
gtgagagagtcttttggtccttgaacataatttggaccaaaaccataagatgatggaatccggggctcacttctgtaactcttgtggtgaacaaattggacttgatgctaatggggaggtgtttgtggcttgtcatgagtgttattttccaatttgcaaggcttgttttgaatatgaaatcaatgaggggcgtaaagtctgcttgagatgtgccactccctatgct

SEQ ID NO: 33716 - DNA, 259 bp, Glycine max
  Clone ID: 700892234H1
atgaaaatgtacgaagggaaattataaatcacagatcactgaggcatcccaatattgtcaggttcaaggaggtaatattgacccctacacatttggctattgtgatggaatacgcttctggaggagagttatttgagcggatatgcaatgcaggacggtttagtgaggatgaggcacgcttcttcttccaacaacttatatcaggggttagctactgtcatgcaatgcaagtatgccatcgtgacttgaagttggagaa

SEQ ID NO: 33717 - DNA, 262 bp, Glycine max
  Clone ID: 700892236H1
caaaagttgtccttggttcaatagcctttgcaatcttctgggtactagcggttttcccagctgtgccttttctacccattgggagaactgcagggtccctgctaggtgcaatgcttatggtaatattcaaagttcttagtccagaccaagcttatgctgcaattgatcttccaattcttggtcttctttttgggactatggctgtcactacttttcttgaaagagcaaacatgttcaagtacttggggaaattgctttcttg

SEQ ID NO: 33718 - DNA, 260 bp, Glycine max
  Clone ID: 700892237H1
cgacattgagttgggaaactcttgttacccaatggttcttgttcaagtccccatgtacaacgaaagagaggtttatcagttgtctattggagcagcatgtgggctttcttggccttcagataggatcatcatacaagtccttgatgactccactgacccaacaatcaaggagttggtgcagcttgaatgccaaagatgggcaagcaaaggggtgaacataaagtatgaggttagggacaataggaatgggtacaaagcag

SEQ ID NO: 33719 - DNA, 262 bp, Glycine max
  Clone ID: 700892238H1
ctcttggcatcttgtgttgtgtccctcttttaagctatttccttctcttaacacaattggttgtgccaattgccatagtcaccaaccaattaacaaaggtatatatatcatcatatcatcaccaaatgaaaaatattgggttgttttttcttgtggtggtggctacttttgtggtggcagccacagctggtagcttttaccaagactttgaaataacgtggggtggtgagcgtgccaaaatctatgagaatggaaaccttct

SEQ ID NO: 33720 - DNA, 192 bp, Glycine max
  Clone ID: 700892239H1
ggcccacaaacaggctattcctttccgacgcttttgtggtggtgttgggaggacggcccaggctaagaacagacactccaatgggcaaggacgctggcccgtcaaatcagctaagttcattctagatttgctgaagaatgctgagagtaatgctgaagtgaaaggtttggatgtcgatgctctgtacatttc

SEQ ID NO: 33721 - DNA, 261 bp, Glycine max
  Clone ID: 700892241H1
gttaatttgcttcccttttttcacactcactctcactacatggcttcctctgttgctttagttttgggtctatgtctagcactcaacatggttctgccgacacgtgcagctacccacacagtgggagacacctcaggttgggcactcggtgctgattacagtacatgggccagtggcttgaaattgaaagtcggagatagtcttgttttcaattatggggctggtcacacagtggacgaagtgaaagaaagtgattacaag

SEQ ID NO: 33722 - DNA, 258 bp, Glycine max
  Clone ID: 700892243H1
gaaattgttggcatagctggcaaactttctgatgctgagtccatgattgcactaaaagatttcataaataggatggggtcaaatgatgtatggggtgaaggcattggtgtaaatactaatgctgatttcagatcaggatatattatgaatactagcattgctggtcttgaaaaagcggatgcgttcctgttggttggcacccagccacgggtggaagctgccatggttaatgccagaatacgcaaaactgtcagagca

SEQ ID NO: 33723 - DNA, 258 bp, Glycine max
  Clone ID: 700892244H1
ctcgagccgcaggaattggatttgtgagttagaacaggaaataagagagagacatttgattgtgaatggatttggaatttaaattgtgtgaatattttttaattgtttgttgagaagcattgaattggattttacttgaggagtagtatattatggagaacgtgtgtgatgttaatcacttggatgcggatgttcttttgccccctcggaagcgtcttcttgctgggttgaaaaaacagagttcagatggtgatgctg

SEQ ID NO: 33724 - DNA, 258 bp, Glycine max
  Clone ID: 700892245H1
ggcttcaagtcaggaagaggtgactcttttgggagtaattggaagcccatttgcttgcagggtgaagattgcccttaagttgaagggagttgaatacaaatatgtggaagaaaatttggccaacaagagtgatttgcttctcaaatccaacccagttcacaagaaagttccagtttttattcacaatgagaagcccatagcagagtctcttgtgattgttgagtacattgatgagacatggaagaacaaccccatctt

SEQ ID NO: 33725 - DNA, 241 bp, Glycine max
  Clone ID: 700892247H1
ggctcgaggtctctctctacgctttctcgttcgagatccctcaagggctccactaactgaaggagaaatggggttgacattcaccaagcttttcagccggcttttcgccaagaaggaaatgcgaattctgatggtgggtctcgatgcagctggtaagaccaccatcctgtacaagctcaaacttggagagatcgttaccacaattcccaccattgggttcaatgtggagactgtggaatac

SEQ ID NO: 33726 - DNA, 261 bp, Glycine max
  Clone ID: 700892250H1
caaacattctcaaaccaaagccatgaccaatatggaatccaccacacctatactcactcctctagtgctcctcctcctcttctctctagccaaagggcttcacaaccccaaatgtgatgctgcctatcaacatgaccatgatggctcaaccctccaagtgttccatgtgttcagcccttgttccccattcaggccctcaaaaccaatgtcatgggaagagagtgtcctacagctacaagccaaggaccaagccaggatgca

SEQ ID NO: 33727 - DNA, 260 bp, Glycine max
  Clone ID: 700892251H1
ggctcctttgggcctcaaccagtgtaaagaaccctgcctattctgacaccttatatgttgctcctcttattggacccgacactgtatcaaccatgccagaccaagcccttcaagcatttattgatcatggtaccgtatccaggacaatagactcaatgcatctgaagctgaaggaatatacaatgctctccagaaattgggtattgactggagctttgttggttcccagcttgaacttgaaggagtggactcgtttaaga

SEQ ID NO: 33728 - DNA, 182 bp, Glycine max
  Clone ID: 700892252H1
cttggagctcgaagagttcttgtgacaggcacaggacccttgggatgtgttccatcagaattggcccaacgtggtagaaatggacaatgtgctcctgaactgcaacaagctgcagcattgtttaacccacaactggaacaaatgttgctacaactcaccaggaaaattggaagtgacgtttt

SEQ ID NO: 33729 - DNA, 258 bp, Glycine max
  Clone ID: 700892253H1
ggcaagatggtctgtactggagctaagagcgagcaacagtctaaattggcggcaaggaagtatgctagaattatccaaaagcttggtttcccagctaaatttaaggattttaagattcagaatattgttggctcttgtgatgtaaagttccccattcgactggagggtcttgcctattcccatggtgctttctcaagttatgaaccagagttgtttcctggactaatctatcgcatgaagcaacccaagatagtcttg

SEQ ID NO: 33730 - DNA, 259 bp, Glycine max
  Clone ID: 700892256H1
agagagaagaagagacttaatcgatcatcacttcacttcactaatacatcatggcagacgagacccagaacaagtatgagagctctgaggtttaggtccaggatcgtggtgtttttgactttctcggtaagaaaaaggatgaagaagacaagcctcatcctcaggaggaggtcatcgccaccgagtttcaaaaagtcactgtctcagaccaaggagagaacaagcacagcctcttagaaaagcttcaccgatctgacag

SEQ ID NO: 33731 - DNA, 258 bp, Glycine max
  Clone ID: 700892257H1
caccatactgtgttttattcttctctccctccttcattttcatttacttctctggaggtatataactattattctttttttttttttaaacataaaaattgttaatcttttgccatgggaacccagattttgcggcctcaggactgtttcgtagaacgaatcatgtctcctcccgctgacttttcccggcggaggagttccggtaactactgtaattattattaccacagcaaccatgttgccacttccaggtcgtgc

SEQ ID NO: 33732 - DNA, 252 bp, Glycine max
  Clone ID: 700892259H1
ggcgagggtaatgagaaagtgcaggatcttcttttgttggatgttactcctctatccactggtttggagactgcaggaggagtcatgactgtgttgattcccagaaacacaaccattcccaccaagaaggagcaggtgttctcaacctactctgacaaccagcccggtgtgttgattcaggtctatgaaggtgaacgaacgaggactcgtgacaacaatttgcttggcaaatttgagttatctggaattcct

SEQ ID NO: 33733 - DNA, 265 bp, Glycine max
  Clone ID: 700892224H1
ctcgagccgaatcggctcgagttcaactcttaactcatcagtttacaagtcgcagaaatgaacggtggcgcctttgattttatcgaagaaaacggaaacgggagcgactcggactcgaattctgatgacgcgccggagtactaccagccgatctccgccgtggaagacagtgggagttcggacgacgagcacgacggtgaattcggacacctcccgaacggttttgccgcgcacggcgtggtggagaacgggatctcgtctctgg

SEQ ID NO: 33734 - DNA, 241 bp, Glycine max
  Clone ID: 700892186H1
gcactcacttgtttcattgaaggccctccattcacgttgcaaaggctttgtgagatcctattggatgcaaaaggcatttatccaaatctttcaaagcttgctttagctcttgaaaagaacttgttagttacttctacattgacaatctgcactgatccatacccacaagctacagaaaaagagccagatgaccaagagaaggcaagtgaaaagcagcagcagcagcaacaatctgatagtg

SEQ ID NO: 33735 - DNA, 238 bp, Glycine max
  Clone ID: 700892187H1
gtacaatgtagcaatcaagtgtgcaactatcactccagatgaagctcgtgtgaaggagtttggcctgaagtcaatgtggaagagtccaaatgggactattaggaacattttgaatggaactgtcttcagagaaccaattctttgcaaaaacattccccgccttgttcctggttggaaaaggcaatatgtattggaaggcatgcgtttggtgatcaatatcgggctactgacactgtaa

SEQ ID NO: 33736 - DNA, 240 bp, Glycine max
  Clone ID: 700892188H1
caaagcttccgagcttgctctctttggcatcatgtctaacaagggagaaatttgtgtggcaggttctcgtgtgtttgtccaggaagagatctatgatgaatttgagaagaagttggtggagaaggcaaaatcttgggtcgttggggatccttttgatcccaaatcgctgcaagggcctcaggctgacaggaaccaattggagaaaatactttcatatattgagcacggaaagagagaagg

SEQ ID NO: 33737 - DNA, 238 bp, Glycine max
  Clone ID: 700892189H1
gtttctagttctgataggagtgcagctgtcaacaggaatactcttgggaggcctgttcccacaaggccatgggagcagaattatggaaacagcacctatggaggatatgggtctacaatgaattataattctgggtatggatctggaatgtatggatcttcttatggtggactaggaggaggaatgtatggatcatcttatggtggggggatgtatggtaacagtatgtacaggggag

SEQ ID NO: 33738 - DNA, 236 bp, Glycine max
  Clone ID: 700892190H1
gtttgagtgtttagagaatgaaaatgtctcaattgtaactgaaaaagaggttcagacactatccagtactgatgcatctgaactattggaagctgtggttaaaattgtgaatgaatgtctagctgaagtgcctcgatttggatttgaagaaccaaaatcagctcttggaacttcgaggttctcgaaatcattagtcgctgcaacggaggtccttccgggagattttggacacttag

SEQ ID NO: 33739 - DNA, 241 bp, Glycine max
  Clone ID: 700892192H1
attttattttgtataataaaagacagataatatagagaataatcatattaaatattaaatagagaaaatggcccgatcatttatcaaaggccaatcttcggtagaagagaaggttcctttggaacacttatatctatttcagtataccgggtctcttacatacatgtcaaaaaatttatagaatttcgattttgacatgaaagaaaagtgtggggataaatatatatgacaatgagatatt

SEQ ID NO: 33740 - DNA, 241 bp, Glycine max
  Clone ID: 700892194H1
cggagaggaagaagatggtggataagtggtggagttttgtttgtccttcggataaagggaacgatgaccctttgattaacccctttgtggaggaggctccgggtattgaaggggttgcttgcgatagggttcttgttactgttgcggagaaagacatactgagggaaagggggaagctttatcacaaaatgttgagcaacagtgactggagaggaactgctgagttccacgagactccagg

SEQ ID NO: 33741 - DNA, 186 bp, Glycine max
  Clone ID: 700892195H1
aaaggatacgcgctgtagaaactgggggttgcccacatgctgctattcgggaggacatcagtatttatcttggaacgctagaggagttttctaaaatcttcaaatcagaaatacttctttgtgaatctgggggtaataatctgagttctcatttcattagggactcggctgtttagttatttacat

SEQ ID NO: 33742 - DNA, 242 bp, Glycine max
  Clone ID: 700892196H1
cgtttcgtgatttctgtctcactggaaaaggaatatcaagaagaagaattgtttatctacatctgattcaagtccatgaagccacaatcatcgtctttgaatccatatgcaacgtcatatgttcctctctctaaaaggggggtagatggtagaacaccttcgactgaaaaagattccaagacttataatgggacagtatggtttcagactcatcagggtgccacaaatgatccacaacttat

SEQ ID NO: 33743 - DNA, 190 bp, Glycine max
  Clone ID: 700892201H1
caaaaaaccattccaacgaagaagagagttagttagttctgagtgagtggttcctctcaagaagcgtccagcgtagtaacgctgaggaccttcactctcaagttttcaaccgtttgttttctatataatatccctaaccgccgtggatgggacaatctgtttcctccgccgccgtcgcaagccgtcgtga

SEQ ID NO: 33744 - DNA, 266 bp, Glycine max
  Clone ID: 700892202H1
cttcaacataaaatggaagaatccaagggttttgttggtggtgagtctcaaaaaccacatccagaaatgccctctatttcttttcaaattcctatgccagggaggaatcgatctggtggtctctacccttggggatggaggcaaagagcaataataccacagcacaccgtgcgaaactctaacggggcaagtgagaacacaaatttgaaggtgtaagtcactcatggagtaataatactatgtatgaaaatgtgaaacgtttgaac

SEQ ID NO: 33745 - DNA, 264 bp, Glycine max
  Clone ID: 700892203H1
atagcttcgggaccgtgcttcttgaattggtgacaggtgaaagacctacccatgtggctaaagctccagaaacttttaaaggaaatttggtagagtggattcaacagcaatctagcaatgcaaaactccatgaagtcattgatgaatcactagttgggaagggtgtagaccaggagcttttccaatttctgaaggttgcaagcaactgtgttacagcaatgccaaaggagaggcctaccatgtttgaagtataccagtttctaa

SEQ ID NO: 33746 - DNA, 267 bp, Glycine max
  Clone ID: 700892204H1
cttcagatagagtcagttcagtggcaaaagcatctgttgttagaggttctcgaggttctgtgcctaagcccacactaccatccaaatcaccttctggtccgacagtatcaaccaggactaaatcagtgacttccacatcttctggtaacaatttatctgacaatattggtaaatcttcttttagttacttaaaaagaagttataagccaacctcatgttgcccagttgtcaaaacaccttcaagggttgcttcaagacataaagctg

SEQ ID NO: 33747 - DNA, 264 bp, Glycine max
  Clone ID: 700892205H1
ctagccatgtcaagtcctcagtgttttgagaatccaccaaaccttaactcggacatccatggagcaggaactgtccaagaacttggaggacttaattcctacgtcactggatcttccgattccaaattggcactcatcctggtttctgatgtttttgggtatgaagcaccaaaactaaggaaacttgcggacaaagtagcagcagctggattcttggttgttgttcctgatcttctgtatggtgattacattgttgaccttaat

SEQ ID NO: 33748 - DNA, 265 bp, Glycine max
  Clone ID: 700892206H1
cacccagaaagccatcaagtagcactcgattccaggagtcagagtatgtgtgggtggcctaatgtcgttcgtgctgttctggacatttgcctatgacattgttcatatattttgatggacggaatgtgcaaatgtttcaagtgaaggttattttgacatccgttgcttctgttgatccttgccagaatgcagttacatccaccagttaccagatagctttcataatgttcccgtttttaaactattgagatttactatcagaatt

SEQ ID NO: 33749 - DNA, 267 bp, Glycine max
  Clone ID: 700892207H1
accaggcgtgcattaaaaggatacatggtgatgattctgggcagaaacactgcactggacaatattttgattattggtcttgtattgacaaatgtgttgcaccgaagctattcaccaaactgaagtaatggagaaggatttgatggcttattatcgttgcattctgttctgttttcattcccagataacttcgtctaaacattcaatgttataataaccaaactatatgtcctgtatggataatattgtgtttactgtgaagttttg

SEQ ID NO: 33750 - DNA, 140 bp, Glycine max
  Clone ID: 700892208H1
tgcgaatgaaaatagcactaggggctgcaaagggtcttgcttttattcatagtacagaacataaagtcatataccgtgactttaaaacgtcaaatatcctactcgatacaaactataatgccaaactttctgattttggg

SEQ ID NO: 33751 - DNA, 263 bp, Glycine max
  Clone ID: 700892210H1
atgggctccaactaccttcaagaggtcactggtgcaggtgctaggaaaaatgcagggaaatttgttgttctacacctccgatttgataaggatatggcagcccattcggcctgcgattttggtggaggaaaagctgaaaaattggcccttgcaaagtatagacaggttatttggcaagggagggttcttaattcccaattcactgatgaagagttgaggagtcaaggccgttgccctatgacaccggaagaggttggattgtt

SEQ ID NO: 33752 - DNA, 264 bp, Glycine max
  Clone ID: 700892211H1
gtttagggtttttcacaaattgagctttcactccattttcgttcccaaatactatctccaaattttgattttaccatcgatatacgacacaacatcgcaatttctcgcgggtcgttttgataactggcgaaatcgcacgataccgacagcgtcgtgcggtaatacgacacatttgttgtttgatcatgttagccaagagattaagctctttcttcaaactctccccaaaacctcagatttccacttccatgaagaaagtggatg

SEQ ID NO: 33753 - DNA, 261 bp, Glycine max
  Clone ID: 700892213H1
gttatgttatcaatgttatggtgaaagtgaaaccacaagcaaagctgaaagagaagctattcagtgattttgattcagatcgtgtctgtgtctacaaccatgtacagcggctccagcgacggcgaaagccatgacgctcctcaaaatcagaggaaaattccgcctgcatcctccatgctatgggtccgcaatcttcgccgtttcatcggatccggcgccggtctcggatccgaagccctgatggagcttgaaactaagaga

SEQ ID NO: 33754 - DNA, 263 bp, Glycine max
  Clone ID: 700892214H1
aatgcaacagtccaggccaagatgggaacaaattttgtggcatgtacggttcaagctcagtactcacaacaagtcatcatgggagtgaggcagagaataataataataattattcaggtgatttgtcacaaataccccctacaaaaagacggcacgtacagaatgaggagagtgcatggggacaaactagggactttcttggtgttggtggtgccaaccatttgccacccttcatcaaccaacggatggatttgatttgatat

SEQ ID NO: 33755 - DNA, 195 bp, Glycine max
  Clone ID: 700892217H1
gttgtaactcgttcttcttcttttgttgttctgtgtttgtgtttgttttttctctcacctgaaaatgtcttgctgcggtggtaactgtggttgcggaagctcctgcaagtgcggcaacggctgcggaggctgaaagatgtacccagacttgagctacactgagtcaaccacacaccgagactttggtcatgggcg

SEQ ID NO: 33756 - DNA, 114 bp, Glycine max
  Clone ID: 700892218H1
ccactttgtcacctttattctctttcagtagaagaacagcaacctctctgccttccaaacccacattctggaatttggttccaatgaaacaatcttcttctccggggcacttgg

SEQ ID NO: 33757 - DNA, 89 bp, Glycine max
  Clone ID: 700892219H1
caaacaggccccaagttcttgttcaattagggcttatcatataagcatttagcataagttatttttacaattaaggaggaaatagggtt

SEQ ID NO: 33758 - DNA, 270 bp, Glycine max
  Clone ID: 700892220H1
ttctaaaaaagattgtcaacccacccgccggattgaaccatggtcgtcatacgagagaccttccaagaggatgaagaggagggtcacagcagaaaattgtgattttcttacttttccggagcctggcgtctctgcctccaccgaacccttccggaactgtgtacagcgcttcctctctcaccatgcgcgcatcactttccctccctcgctctttccttcactcatgacgtctcagatcttgttccgtgtcggagacctccttgacgctcc

SEQ ID NO: 33759 - DNA, 257 bp, Glycine max
  Clone ID: 700892222H1
ccaccacagaaaatgcatacccacctaattcctgacaagactcccaggtccatttttgtatacttccgaggactcttttatgatgttggcaatgaccctgaaggtggttactatgcaagaggcgcaagagcagcagtgtgggagaactttaaggacaatctgctgtttgacatctccactgagcatccaaccacttactacgaggacatgcaaagagccgtgttttgtctgtgcccacttggatgggccccttggag

SEQ ID NO: 33760 - DNA, 158 bp, Glycine max
  Clone ID: 700892223H1
tctttacataaaagtttgatgatgatgttaccgataaagagctacgagagtgtttttagccgtcgctgcaaattttctcaactccagaattgcttctctttgatctgaacctttccaatttcagaatcatcgttttctgaactccaattgataccaag

SEQ ID NO: 33761 - DNA, 240 bp, Glycine max
  Clone ID: 700892185H1
caattgtttccctccttgtacattttctctttgtcgtttctaccctttttcctgttcattcttcacaatttggtgaccaccaccctgttgcaaatcaaacttttcggccgaaggaagagctgcgcaagttgaacgccatcagaaatcggcttcagctaatcaacaagcctcctgttaagacaattcagagttcttatggtgatataatagactgtgttgcgtctcatatgcaacatgctt

SEQ ID NO: 33762 - DNA, 244 bp, Glycine max
  Clone ID: 700892146H1
attccatttaacaaagcatatggaatgacagcctttgaataccatggaacagatcacaggtttaacaaggttttcaacaaggggatggctgatcactccacaatcacaatgaagaaaattcttgagacctacactggctttgagggtcttaaatctctggttgatgttggtggaggaactggagccgtagtcaacatgattgtctcaaagtatcccactatcaagggcattaattttgatttgc

SEQ ID NO: 33763 - DNA, 246 bp, Glycine max
  Clone ID: 700892147H1
cagctacctcctccattcttcatttccattaccaaaaagaaaacaccaaactctctataaccataaccatgtcaatggcaacaacatcccctcacaccggcctcttccaaaaccgcaccaaaccttcttttcctttctcttcttcctccttcaagttcaaacccacatccatcaaatgcgccaccaactccacacccaagctccgcccctcacccactcccaagatcgcgtcttcaacttcgccgc

SEQ ID NO: 33764 - DNA, 249 bp, Glycine max
  Clone ID: 700892148H1
tagattatggctcaagggttgcttctgaaagacgaacatcttacagggattatcctgctcgtggtcctggctacaccgagctccctagaagcacatctcgtgctgcaccaaggagaggctatgtggatgatgggtatggccagagatttgagagggctcctcctcctcctcctcctccccatctaagttaccgtgaaggacgtccccgagattatgatgctctgtctggctcaaaacgttcttatgctg

SEQ ID NO: 33765 - DNA, 246 bp, Glycine max
  Clone ID: 700892150H1
cttcttttttagctatccctctcttgaaaaatctagatctcgtacttccttgatctacgttacgcttctagtgaccggatctgtatggatctgaaccagatctacacgccgatggtggttttggcctggtctttcatagatctgatgcatggaggctcagatctactgtacagaggtgtgcgattcatgttcgtctctcttttggaatctgtttcgtagaaagtcgtttggtcttccatgtcgcat

SEQ ID NO: 33766 - DNA, 243 bp, Glycine max
  Clone ID: 700892151H1
gaattgttgtaactttttgattcctaaattctctaaaattcgaaattctaatttcgttaggggaaagagattgtttgtgtgtgagtgagtatggctggaaaaggcgagggtcctgctatcggaatcgatttgggaacgacgtactcttgcgtcggcgtgtggcaacacgatcgtgttgaaatcatagccaacgatcagggtaacagaactaccccatcctacgtggctttcaccgacacagaa

SEQ ID NO: 33767 - DNA, 241 bp, Glycine max
  Clone ID: 700892152H1
gtggatggcttctctacactgctgcttcggctggggatgtagactttgttcttgagttgttggggagagaccctcttttggtgtttggtgagggagagtatggtgtcactgacatgttttatgctgcagccaggggcaagaactgtgaggtctttaagctcctgcttcattctgctctttcaagaaaggagtgccttggtggcagtgaagcagaattggaagagaagttggatgaaggttc

SEQ ID NO: 33768 - DNA, 243 bp, Glycine max
  Clone ID: 700892153H1
caaatcctgatgatccacttgttccggaaatcgctcacatgtacaaaactgaccgggccaagtatgaggccactgcacgcagctggacccagaagtatgccatgggctgatttgtgtttggataatgtatattgaaatggattgcatctatgaaaacttttgtgggtttgcttttcactgcctgttttctgggtaagattatgtttctgttatgaggggctagggaagggaggtgtcttaatt

SEQ ID NO: 33769 - DNA, 244 bp, Glycine max
  Clone ID: 700892155H1
tagcctctgtggttcttccctaggttgggattatcacaaccttggagttctcaacgtggacaaaatgtctttaatgccagctatggatggaagtactacaccatcactctcatcacctcaacactctgatttctcaactgggtatctcgaagatgctttgattgaatcatgtgagcgttcaaaacgtagacgtgtgttgccatgtgctactgatgaacatagcaagagtttcattgatgacctt

SEQ ID NO: 33770 - DNA, 245 bp, Glycine max
  Clone ID: 700892156H1
caacattctcttcctcccttcactcgcttaaccactgaatctcgaagaagaagcgagagagacactgcgattcaaaaccctaacaaaaatggcgtgcgagatgccattggatctgataaagcacctacgaatacttctccgcagagaggccaatctctcgtggtacgaccccgagaaggaggaaatctcgcgctcccaaagctcccttcggtggccgaaaccatagcgaactcgatccctcgccg

SEQ ID NO: 33771 - DNA, 227 bp, Glycine max
  Clone ID: 700892158H1
gaaaaagaaattttatttcttttttagacgggtctttgtgaacctatgatcttgtgaaaacccagatagcgatctttgatgcactcataggattggccgattcagttgcgtgttcggtggccgttgatttcgtgacaaatgaacggtggcgatgaggtcgtggcagctccggcgggtcgccgcaccctctggagtggaaattttcgcaggtcttcggagaacgcacg

SEQ ID NO: 33772 - DNA, 242 bp, Glycine max
  Clone ID: 700892159H1
tcccattctgggttttgcatcttttgtggttttcatttacatgtcttttgggggcattaagttcagttgtttggaggaagggccagaattgagctttgtggagagaaatggaacacagtttgtgttggatggaaaagcgttttatgtgaatgggtggaactcttactggctaatggttcagtcggtggatgtttattcgagatccaaggttcgagaaatgatgaaaaccggtgctaagatgg

SEQ ID NO: 33773 - DNA, 224 bp, Glycine max
  Clone ID: 700892162H1
ctgtgaggaagaagatggaggacaaattggagagatttgtttggccatcggataaagggaacgatgaccctttgattaacccccttgtggaagaggctcaaggtatttaaggggttgcttgcgataaggatactgttactgatgcggagaaagacatactgaaggaataggggaactttatcacaaaatgttggagctacagtgactggagaggaaatgctgat

SEQ ID NO: 33774 - DNA, 233 bp, Glycine max
  Clone ID: 700892163H1
aaaaaaactcggtaaggattttgtgtgaatgtggatctattaagcttttttatttttttatttgcggaagaaactgaggttatgaagaaagctgaactagaaacaggaaaagagagcggcgtgtgctattgtcataagttttcagttaattactaactcaaaagtttggtttgtttgtgtgtttggagtatgatgtcgccgccggcggtggtaacggaggaggaggggcggac

SEQ ID NO: 33775 - DNA, 242 bp, Glycine max
  Clone ID: 700892165H1
cattgacacactctttgtgaaggttgttttgccagagggttctaaagatatttcagtatctgttccatttcctgtgaaacaatcgcaggagacaaagctttcccacttggatattgttggtagacctgttgttgtgctggagaagaacaatgttgtacctgagcataatgagcattttcaggtctactataagttcaacagtctttctatgctcagggagcctttgatgttgatttctggct

SEQ ID NO: 33776 - DNA, 243 bp, Glycine max
  Clone ID: 700892166H1
gcaaagactgtggaggttgaggagttgacggtggaggagaggaatctcctctctgtggcttacaagaacgtgattggtgcgaggagggcttcgtggaggatcatatcctccattgagcagaaggaggagagcaggggcaatgaggaccacgtggccattataaaggagtacaggggcaaattgaggctgaactcagcaagatctgtgatgggattttgaacctccttgagtccaacctcattc

SEQ ID NO: 33777 - DNA, 239 bp, Glycine max
  Clone ID: 700892168H1
gaagaaagacacagccattgtttgtttactttccattgattgagcgaaactcttgttttttctgcgatcattttccattgggtggaagaaagtctcaacctttagtcgaaagagcaaggatctgagtgagtgagcgatcatgtgtggtggtgcgattatctccgacttcattccagcgggtcccgccggcggggcgcacgcgtgaccgccgacatcctgtggccgaatttgaggaagcg

SEQ ID NO: 33778 - DNA, 243 bp, Glycine max
  Clone ID: 700892171H1
ctctttctctctctctctgattcgatcgatttcgattgttgaattcatcccatcgtggagccttcaaatttgtagttgaacaacgttgttgctgccgctatttgcttctttcattctcttttttgcttttattccgaatggattgttagcagttccttccaccgtccccgcattcctttggtcatcacattatgaactggcctctgaaaatggattgaaggaatctgtaaattaccaagtcat

SEQ ID NO: 33779 - DNA, 74 bp, Glycine max
  Clone ID: 700892172H1
ctcggataacgtctatcatcagggtcgcagctacgcaggtactatgactcactcatacgcgtctcgatcggctc

SEQ ID NO: 33780 - DNA, 236 bp, Glycine max
  Clone ID: 700892173H1
ctcgcattagctcctttttgtatttattatatagtttttaatataaaaaagataacctaatgcgagaaaaaaaaattatggacatatttttgtttatttgtattcaaaagttgtaaaccttctacactaaaatttatttttattgatctaatttttacaactgtgttttagaaaccgaaaaaagaagagagaaataactggcccggtattctattattttgcatacctgctctttc

SEQ ID NO: 33781 - DNA, 62 bp, Glycine max
  Clone ID: 700892175H1
attccggtttcactcttctaaaatggcgaatctagcacgcttctccaagagagccgcaagaa

SEQ ID NO: 33782 - DNA, 239 bp, Glycine max
  Clone ID: 700892176H1
cagagacattaccgcgcgctgctgagcgcgcggaggaggcggtggcgcgacagctcagagagaaggaagcggaagtggaaatggccacgcgcaagaacgcggagttggaagcacgcgcggccaagctgagcgtggaggcccaggtgtggcaggctaaggcccgggcccaagaggctacggcagtctccctccagaccaaactgcagcagacgatactgtcccacggcggcgaagatcct

SEQ ID NO: 33783 - DNA, 234 bp, Glycine max
  Clone ID: 700892177H1
agtaaccaatcatctttagttcttcagtaatttattgtgggattctattctaatattttgagaatgtctagctgtgggtgtggaagcagctgcaactgtggcagcaactgcggttgcaacaagtactctgttgacttgagttacgttgagaagacaatcatagagactctagtgttgggtgtatggcctgtttaggccacattggtaggtgctgatatgggtgttgcatctgat

SEQ ID NO: 33784 - DNA, 243 bp, Glycine max
  Clone ID: 700892179H1
attaaaaacacacacacacacacaacaacactctgaaactaacaacaacaataaaagaccatgtcggtgaaggagtgcgagcaccacaaggggaagaagaggaagatcttccggcaagtgttctggtgcttagtggtgttccttttcatcgtgctggtcacaattcttttgatatgggaatccttagacccaccaaacccaccttcacgctccaagacgtcaccgtctacgccttcaacgcca

SEQ ID NO: 33785 - DNA, 242 bp, Glycine max
  Clone ID: 700892180H1
cttttgtgttagtgagagaaagttctctctgcttgtctctcttagactcaaaaccctattgcgtgctttgcaatcgaccccgattatggccaacagtaacctccctcgaagaatcatcaaggaaacgcagcgtttgctcagtgagccagcacctggaattagtgcgtccccttcggaagaaatatgcggtatttcaatgtgatgatccttggcccaactcagtcgccttatgaagggggagt

SEQ ID NO: 33786 - DNA, 244 bp, Glycine max
  Clone ID: 700892142H1
catgattgatagcgttcctggaatgaaggctttggatatgaatgctgcagaggatgctattgtgaggctcacgagggagattgtgcccggcatgattgtcaccggcatggaggtggcagaaattgatggctccccaaggatgggtccgacgtttggggcgatgatgatatcagggcagaagcggctcatttggcgttgaaggcgttggggaggaacaatgcaattgatggaacgtgtggagttg

SEQ ID NO: 33787 - DNA, 86 bp, Glycine max
  Clone ID: 700892181H1
caccaacaacacaacacaaaagcaaccaattttgtttttctctctctttccctcattttctatatcggtgtcctcaccttctcagt

SEQ ID NO: 33788 - DNA, 131 bp, Glycine max
  Clone ID: 700892182H1
aacaaacacccttagaataaagtggtcatttcttgcccttgagcaagttcaagtgttttggacttgtgatgggtgtgttaaggtcatggttgccttttttttatatatatatatatatataaatgtttggt

SEQ ID NO: 33789 - DNA, 240 bp, Glycine max
  Clone ID: 700892183H1
catttccccaaaacctcaagagaataataataataataataatattccgaagcccatgacgagatcagaacccgcgaactcgtacccaacaacgttcgtccaagcggacacaacctcgttcaagcaagtagtccaaatgctaaccggttcctcggagacagcaaagcaagccgccgcgccgccgccgcctcctcctcctcctcgaaacctgcgaacccgatcccacccatgaaatccata

SEQ ID NO: 33790 - DNA, 239 bp, Glycine max
  Clone ID: 700892184H1
ggaaattgatctttctccccagttggccaagaaggtgtatgaaagcaatggtgggtcttaccatgcatggtccccttctgagcttcccatgttgcctgaagggaacattggtgctgccaaactagctcttcaaaaaaatggttttgcccttccttgttactctgactcttccaaggttgcatatgttctccaaggaagtggagttgcaggaattgtgctccctgaatcagaagagaagg

SEQ ID NO: 33791 - DNA, 171 bp, Glycine max
  Clone ID: 700892094H1
attaatccatgtcagaaaagattaaacttaattttaatttggctgtggatggtctaatatctttccccctcttttatttggatttggaacctctaatgtaaattttggcaaaaaaagcatgacacgggcaagattatctcaaaagcttctatagattaaaaaaaagattgg

SEQ ID NO: 33792 - DNA, 67 bp, Glycine max
  Clone ID: 700892096H1
ggagaagcgataggtgctgcactccaagctgaaacagcatcagatgctcgacaatcgagcaaaggcc

SEQ ID NO: 33793 - DNA, 256 bp, Glycine max
  Clone ID: 700892101H1
cctctctctctctcagaaagatgaaggtggtcgccgcgtatttgctcgccgtcctcggtggcaacaacagcccctccgccgatgtcatcaaggaaatccttggctccgttggagtagaagcagatgaagataggattgaatcgtttttgtctgaagttaagggtaaggatatagttgagcttattgctgccgtagggaaaagttggccacggttccttctggtggtggtggtgccgttgccgtcgccgcagctcct

SEQ ID NO: 33794 - DNA, 267 bp, Glycine max
  Clone ID: 700892102H1
cattcggctcgaggttcccagtgtgctagaaacatggactctgctttgcaaagactaattttgagagttctcagtttttggactatactttcctagattttcagggtgccatcatgtgtcaaaagctattgacgaataatccatctccagatccaatcttgttagtagagtcacaaccaaaaatgcgatgtttcttctcgaattgctgtgtaagtttagtccaccaagtagaagagattgacgaaggagggatgatggatcaacaaa

SEQ ID NO: 33795 - DNA, 251 bp, Glycine max
  Clone ID: 700892103H1
gctgcatgcacatgggcaacttcgacgaagctgagacccttttggttgaagctcttaacaaggatgccagggatccagaaactctagccaatctagttgtatgctgtcttcatctcggcaaaccatctaacaaatcattcagccagctgaaactttctcacccagagcatgtattggtcaaacgggtacatcagctgaagaaagttttgatagagcgctacaatcattttcctcatgagtgtcgatgattg

SEQ ID NO: 33796 - DNA, 224 bp, Glycine max
  unsure (1)..(224): unsure at all n locations
  Clone ID: 700892105H1
aatttgacaaagaacaatgatgacgatgagggaaaatcaggatttggttgtctctatgtaaaagtcagtatggatggtgccccttatcctagaaaggttgatctcaaaacatataacaactatatggaactttcctcagcccttgagaagatgttcagctgctttaccattggtncaatgcaattgctcctggacttgcctgggggaaaggatggacttaagtg

SEQ ID NO: 33797 - DNA, 249 bp, Glycine max
  Clone ID: 700892107H1
cagctgaatgggctaaatatttaggaagatcattcaggtgcttactgaagcgaacaagggatttgaagttgcggatgcagttggctacagtggcaacaggatttggggatgtcattgatgcatgtacagaagaaatggataaggtcgctgacaatgcagcaccactagttctgaggaagggtcatggtggagcttacctccctttaatgtgaaagtttctactgtagatcatcataatgattggataat

SEQ ID NO: 33798 - DNA, 71 bp, Glycine max
  Clone ID: 700892108H1
tcgaacccgctcgtaggccattgtatcagtccagtctgctaccatcattccagattcagctcgtgtgaagg

SEQ ID NO: 33799 - DNA, 251 bp, Glycine max
  Clone ID: 700892111H1
gcttgctcgtttggttatggacaaatccccgcattcctacctcgccttctccggcgccgaagaatttgctaggcaacagggtgtggaggttgtggacaacgagtactttatcacacctgacaacgttggcatgctcaagctggcaaaggaagcaaacacaatcctgtttgattaccgaatcccaacatcggggtacgagacgtgcggatccggtgtggagagtccactgcaaatgaatggactcccaataa

SEQ ID NO: 33800 - DNA, 104 bp, Glycine max
  Clone ID: 700892114H1
ctgctcgaggttctagatcgcgggcggccgctcgcgatctagaaccggctcgagccacaatacctaagtctatatctatcggtgtagtgtggggagaaaggtag

SEQ ID NO: 33801 - DNA, 132 bp, Glycine max
  Clone ID: 700892115H1
atgcatctcgagccgaatcagctcgacaaagttttcttctgatgtcagtcactcatggttctacacgagtgatggggacttttaggtatttggctccagactatgcttctagtggacaactgacagacaaat

SEQ ID NO: 33802 - DNA, 51 bp, Glycine max
  Clone ID: 700892116H1
cagaccctggaacagtgcttgtctccaaaagtgttgatcgatgaaggcttt

SEQ ID NO: 33803 - DNA, 249 bp, Glycine max
  Clone ID: 700892118H1
tggctgggcagtggtatacagcatcctcagggctgccctccctttttgaggattctaaaatcaaaagtgctcttcggaaggtttatgatttcaatgtaatgaaagttaaaggaggcagaatgggtgctgtaaatggcatgcatcccaatggtaaggtggatgagacctgtatgcagtctcgagaatatggacaggtgtgacctatggtcttgctgctacaatgatacacgcgggaatggaagaagaggc

SEQ ID NO: 33804 - DNA, 246 bp, Glycine max
  Clone ID: 700892119H1
gcaagaatggcacttcgttgcttggtgatgtccctttctgttctcttcactcttggtcttgcgagagaaagccatgccagagacgaagatttttggcatgctgtttggccaaacactcccattccaagttcattgcgagatcttctaaagcctggccctgcaagtgttgaaatcgatgatcacctatgcaaattgaagaaacacagtacccgaaaaccttcttctataaagaagaccttcatccag

SEQ ID NO: 33805 - DNA, 246 bp, Glycine max
  Clone ID: 700892120H1
aaaaaacctggagatccacacgagtttgagcattgagatttgggtgcgcggtttttggtgtgatatataagttgatagttggaacattagtcttggtatgataaagaccttgccaataatttgagttctgattcacagagctaggacagttatgtcttaagactttgaaaggtgtttaatgatatttagctttaatacttgaagcctacttacagtttatttccaattttatgggctatccccaaa

SEQ ID NO: 33806 - DNA, 246 bp, Glycine max
  Clone ID: 700892121H1
gttgggacgtggattatatcaattgtggggagctggtgcaatttcttgaccttgttctacattgtctttgttttgttgcatacggttcctgtcatctatgacaagtatgaggataagatagaccctctggcagagaaggcactcatcgagttcaagaagcagtatgctgtgtttgacgaaaagtcttgaataagatcccgaaaggcccattgaaagggaagaagttagcttagtgtttaagcattt

SEQ ID NO: 33807 - DNA, 248 bp, Glycine max
  Clone ID: 700892122H1
ctcgagccgctgccagtcttaggatccaacatgtctcaaacactaagctgcagaacactacacccaatggactcaactttgatgaagtcaatgtcccacaatccaaaaaagtcctattctaccgcattcacaaggcactttgccaaaaaatctggttttttgatcaagatcatggcttctgctacacctacagcagctgctatcacctttggattcaagaatttgttggaaacattcactgttgatgt

SEQ ID NO: 33808 - DNA, 250 bp, Glycine max
  Clone ID: 700892124H1
gtactggcctataacaaatagtcctaaggaggttatgttcctgagtgagttggaagaagtcttagaagcaactcaacccccagaattccagcgctgtatggtgccattatttcgtcgcattgcacgttgtttgaatagccctcattttcaggtggcagaaagagccttgttcttgtggaacaatgatcacatcatgaacttgatcaaacaaaaccgaaaagtgataatgcccatcatcttccctgcattg

SEQ ID NO: 33809 - DNA, 247 bp, Glycine max
  Clone ID: 700892126H1
aaaaaaatgggttcttcttcttccatatggaccgtgtgtttgattttggcatcactggcctctgcagcactctgtgccaaccctcgtagaccagtggatgtacaatttggccgaaactacgtgcccacatgggcctttgatcacatcaaatacttcaatggaggttctgacattcagcttcatcttgacaagtacactggtactggcttccagtccaaagggtcatacttgtttggtcacttcagca

SEQ ID NO: 33810 - DNA, 246 bp, Glycine max
  Clone ID: 700892128H1
gcgcaggctgcggagatcatcgcgggaaaatggttgaaaatatggattgattttggcgcggttttatctgcaattgggcttttcgaggcccaattgagcagcagcgcgtatcagatcctcggcatggcggagatcgggatattaccgaagcttttcggtgttcggtctaagtggttccacacgcgtggttggggattttggtttctaccataataccgattggtgtgtcgtacatggacttcaccg

SEQ ID NO: 33811 - DNA, 164 bp, Glycine max
  Clone ID: 700892129H1
atcaataccttagagaaaacaaaagcacagaatcgagagaagagttcttttttgagagagattgggatggcttcgacgaataagatcacactgaagagttcggacggcgaggccttcgagagtggaagaggacggtggcgagtggagatcccagcacgagtcaa

SEQ ID NO: 33812 - DNA, 205 bp, Glycine max
  Clone ID: 700892130H1
ttataccaaggatgcaatatcaggattctatcgattcatatggaatctgttctatgctgagtatggaatatttcctttcatatagcaagccttgctacaattttcttgggaaaaggtgcatacgtgcatagttaggagagatcttctttgttgtctccagtatcaaatagtaaactagctactcttttaatgagtatattgtata

SEQ ID NO: 33813 - DNA, 267 bp, Glycine max
  unsure (1)..(267): unsure at all n locations
  Clone ID: 700892131H1
acgtaagtcggaatttggttcnagctcgagcgtttctaaagcttcacttgaggtgcttgcttttgctgctatttctttggggtagatctatggtgggttcttgcaatgaagaaattgctcaagcaattatatatacactaatggaccggagtgagtcagagttgggagagccccttacacgacttttacctctcggtcttggtcttctatatcttggaaagcaggacattgttgaggcaacttccgaagtttcaaagattttcaatg

SEQ ID NO: 33814 - DNA, 248 bp, Glycine max
  Clone ID: 700892132H1
cgcgtgttggtgagaagaatgtgttgatttttgaccttggtggtcggacatttgatgtgtctttactcaccattgaggagggtatctttgaggtgaaagccactgctggtgacacccatcttggaggtgaagattttgataacaggatggtgaaccactttgttcaagagttcaagatgaagaacagaaggacattagtggaaaccccagagcacttagaaggttgaggactgcttgtgagagggcca

SEQ ID NO: 33815 - DNA, 234 bp, Glycine max
  Clone ID: 700892093H1
ggatcgagccgaatcggctcgagcagattcgtggggtttgtctgtgagctttctcagcataatacttgctaccaatagttggaaatgcagctgaacatgcaggagcaatcatatttgctttcaagaacaagctggacatttcattgggtgttgcattgggttcagcaactcagattgccatgtttgtggtcccattatgtgaaaccgttccttggataatgggtatcgatatgg

SEQ ID NO: 33816 - DNA, 249 bp, Glycine max
  Clone ID: 700892134H1
gcagaacgtctggcagagcttgctgctgatctaggctttgatgggtggctaataaatatggagagtaaatttggatctcggtcaaatttctaatttgaaagagtttgtagagcacttatcgttgagaatgcattcttctgtgcctggatcattagtgatatggtatgacagtgttacacttgatggtaaattgaattggcaagatcaactaaatgagcataataagcccttctgtgatatatgtgatgg

SEQ ID NO: 33817 - DNA, 247 bp, Glycine max
  Clone ID: 700892135H1
ggcggcataaccatccttgcaccagatgattctgccttttccaacctcaaagcaggcttcctcaactccctaaacgaaggccagaaaatcgaacttgtgcagttccacatattgcccgagtttgtgtccagctcaaactttgattctctaagcaaccctgtgcagacagtggccggtaaagatccgcaaggcttccattgaacgtgaatgcattaggaaacagtgtcaacatttcaaccggggtcgt

SEQ ID NO: 33818 - DNA, 247 bp, Glycine max
  Clone ID: 700892136H1
agtttcagctttgagttctttgaagaaacataatgactcatcaacattttctcgaaaaaatatactttaccttaaccgacatcaaacagaggagtggaaaggatggatgcaggtcctctttttaatgtatcattattttgctgcaacggagatatacaatgcaatacgtgttttcattgctgcatatgtttggatgactggatttggaaacttctcctattattatatcagaaaagattttagcctt

SEQ ID NO: 33819 - DNA, 244 bp, Glycine max
  Clone ID: 700892137H1
gattgtttgttgttgtaactcgttcttcttcttttgttgttctgtgtttgtgtttgttttttctctcacctgaaaatgtcttgctgcggtggtaactgtggttgcggaagctcctgcaagtgcggcaacggctgcggaggctgcaagatgtacccagacttgagctacactgagtcaaccccaccgagaccttggtcatgggagtggcacctgttaaggctcaatttgagggtgctgaaatggg

SEQ ID NO: 33820 - DNA, 237 bp, Glycine max
  Clone ID: 700892057H1
aaccaggaatcggcaatcgaacctgccaaggagtgccttaagatgacaaggaggatgggtccttcaccaaccaagaatgctgctaacttatcaattacattatcaaagtttgtgccttataggaccgaaatagaatggtacaaagcttggtgtcaccagcaagttgatcaaatgggatactacgacttattcaagaggagaaggagcacttcaaaaatgggctatgaagtcaacatg

SEQ ID NO: 33821 - DNA, 170 bp, Glycine max
  Clone ID: 700892058H1
gcttcaaacttcacaagccctgaagctgaaattttaagcttccatgaaagagcatgttgtaaagagaattgcagacgcgacatgtcatgcaagtgcttagtttcaatttcagcttggaattcagtgagcttcaagttcaatgagcaagtgcgtaatacttcaatgcactc

SEQ ID NO: 33822 - DNA, 178 bp, Glycine max
  Clone ID: 700892059H1
gtttgtctgattggaactacaaagaccccacgcgtctcttaaccctaattcagtacttgagggatcaatatgtgctttatcagaggaagcgcgtcggagaagttgacgacgaccggttgacattcgaaatcagtactatcttgtccagggagggaatagaaatgcatatgagttctgg

SEQ ID NO: 33823 - DNA, 164 bp, Glycine max
  Clone ID: 700892060H1
gtgtcttagaagcccttctacaaagttgcagttcattgactggttctcatccatatgaacctgggtcattggagaatggaattggtggaactgaagaaaagttgcttgctccacaaacctcattcaaggcccgcagtggccctctgcggtatggttttggatcg

SEQ ID NO: 33824 - DNA, 69 bp, Glycine max
  Clone ID: 700892061H1
ctcgagccgcgataaacaattgttatacaaaaggttatctagtgagaaatttctaacaaatgtataatt

SEQ ID NO: 33825 - DNA, 174 bp, Glycine max
  Clone ID: 700892062H1
taaaccctagcccctcttctcttcattcttcactcaggaaacaagcataatggccttctgtaataaggttggaaatgtcttgaggcagggtgctgctcgcagcacacaagcacctgtttcatccatgcttaattacattcgctgcatgtcttcaagcaagcttttaattggagg

SEQ ID NO: 33826 - DNA, 182 bp, Glycine max
  Clone ID: 700892063H1
caagttgaaaaagaaagtagaagagtctccaccatgggtgaagaacttgctaagctttgttgaacttccaccgactgaagttatccttagaagattgtttctctttggcttcatgggtggctggagtattatgaattctgctgaaactggacctgcttttcaggtggaaatctcttgggctg

SEQ ID NO: 33827 - DNA, 161 bp, Glycine max
  Clone ID: 700892065H1
aacttaaggtttcaaacctaggaagttggaagtcatggcagcaacattgatggcagcaacaagttctggcactcttaaagcaactcctttcctaggccaaggcaagggtgccaatgccaatgctcttagggatgttgtttccatgggaactgggaagtaca

SEQ ID NO: 33828 - DNA, 139 bp, Glycine max
  Clone ID: 700892066H1
ttggtgaggatcgagaaagtgaattgtcaaacgaagatccaaccagggcatctctagtttctgacttgacttctcaaatggcaaggtcccagttcttgcaagagctaaacacaaagccacctgggcttactcaagaggc

SEQ ID NO: 33829 - DNA, 243 bp, Glycine max
  Clone ID: 700892067H1
atacccgaacaactcgtatcgggtttgcgcaacattgtacaaatcgaactctacgaaaactctctctccggcgcgttgccacgcgccgcgtttacaaacctcgccaacttagaaagattcgatgcctccacgaacgagttgactgggacgattccagaagagttgtgtgggttgaagaaactcgggtcgttgaatttgtacgaaaataagctcgagggttctttgcgggcagactatagtgaa

SEQ ID NO: 33830 - DNA, 231 bp, Glycine max
  Clone ID: 700892068H1
gttaaaaatgagttgccaagtactttcaaggcctaccgctaccaacagcaccgttggtcttgtggtccagccaatctttttaggaaaatggtcatggagatcataattaccaagaaagtgtcattgtggaagaagatacaatgtgatttacagcttcttctttgttcggaaggtcctaacccccataaacacgtttgtgttttattgcattgtattacctgcaacattttt

SEQ ID NO: 33831 - DNA, 221 bp, Glycine max
  Clone ID: 700892069H1
ggaatgagaagtttgatgcttcaataacaaaagactacgattttcaccttcttaatggcagttcagtcaaggttcccttcatgacgagcaagaagaagcagtttattatggcttttgatagtttcaaagtccttggtcttccctacaagcaaggcgaagataagcgccaattcaccatgtactttttccttccagaaacaaaagatgggctgttagctttg

SEQ ID NO: 33832 - DNA, 157 bp, Glycine max
  Clone ID: 700892070H1
gtggcaagacctatcttctacgcataataaacgacactttgaacgatgaactgttcttcaaaattgcggggcacaagttaacagtggttgaagcagatgcatcttacgttaagccttttgaaacagacacaattttcatgagcccaggccaaaccac

SEQ ID NO: 33833 - DNA, 110 bp, Glycine max
  Clone ID: 700892071H1
aagaaacgaagatagaatgtgcacagccctaaagacgaattaccagcttagcgacgagatcggtcgcggtcgtttcggcaccatcttccgctgcttccacccactctcca

SEQ ID NO: 33834 - DNA, 174 bp, Glycine max
  Clone ID: 700892072H1
ataaattgcagtttgacctagagaggccgagcgagagagcgagggagcatggaggagggaaaattgagagagctgaagcaattcatagagatatgcaagtccaatccctcacttctccacaatccatctctttcattcttcaagacttatcttctcagcctcggtgctcgcatc

SEQ ID NO: 33835 - DNA, 212 bp, Glycine max
  Clone ID: 700892073H1
cattttcataatcgaaattggaagcgaggaaggaaaacccaaatcgaaaatggcagtgatggagaggttgaagatgttcgtcgttcaagagccagttgttgccgcttcctgtctcatcgctggcttcggtctttttcttccagcttttgtgaggcccatgttggattcatatcaggcaaccaagcaacctccccagcctgctttaggtgacg

SEQ ID NO: 33836 - DNA, 221 bp, Glycine max
  Clone ID: 700892075H1
aaatgagttggtggaaggtggcgttggaaatagacaactgagatgaaaatacaaagtttgttgaggggtggtgtggtgggatgaaaaatgagtgggctgaaagagcaccttaaactggcaagagaatacgcggtggaagggctctacgacacctccgtgatcttcttcgacaacgccgttgcacggatcaacaagcaccttaacagcaacagcgtggagga

SEQ ID NO: 33837 - DNA, 209 bp, Glycine max
  Clone ID: 700892076H1
ataaccaatgatacgtcgtcgttttgccccccagaacctctgaagaagaagaaatggcgagtagcagcagcaacactccgaaggaaagcgttgttgtcgactgcggaaggcgtcgaacctcttgcggctattgcagatcctctcgtcacaatagcatctctcatgcaatgtggccatatagccttactgtggatgactacaaggtcttc

SEQ ID NO: 33838 - DNA, 240 bp, Glycine max
  Clone ID: 700892077H1
ctaaaaaccttcccttctcttctcacccccacactcccatctcacacacccctcgcatccaacaatgtctctcaccattccctccaacctctccaagcccgccgccctccgccccaaactaagcccaaagctaaggtccgccgccacaaccaccatcgtctgcagcaccaccaacaacaacaacaacaacaacgtgtcctccgacctgaaggcgttctccgccgcgctggccctctcctc

SEQ ID NO: 33839 - DNA, 125 bp, Glycine max
  Clone ID: 700892078H1
ctctctgagccccaatctcttgagcagcagaatcttcaggccaagccaggtaagcaagcacaacacaaccccgaaatggcttctgcttctgttcccatggctttctcgctgacctctgtaatcac

SEQ ID NO: 33840 - DNA, 238 bp, Glycine max
  Clone ID: 700892079H1
cttaatccaaatacgatggcagccatggcaaccacaaccctctcatcaaaccccaaactctcattcttcaacggaaagcccgtcacatattcttcccgcgtcgcgcccaccaccaaattatcctcatccaaacaaggcacaatttccatgtccctaaccccacccccctacgacctccagtccttcaaattccagcccatcaaagaatccatcgtgtcacgggaaatgacgcgccgct

SEQ ID NO: 33841 - DNA, 152 bp, Glycine max
  Clone ID: 700892080H1
aaagaaactccatagcgaaaaagacaattcacgttatattgttagtttattcgtcatttctttctttgagtagtaatggcaagcctcaaggttgcatttgtggttgctgtgctatacatggttgtggtgagtgaaccttggaactgctagga

SEQ ID NO: 33842 - DNA, 219 bp, Glycine max
  Clone ID: 700892082H1
gtagcagtgtcccaagaattgaatttgccacctgatgttgtgagcagcagtggcagtggagcattctgcaagtgtggtgaagggtggagttgtgtcattttcaggactgaaggccctgatgcaggctctggccagggcttgctgaatgcgctggacagtgttcttgtactattgatgacaaatccacctaagataaacgatgagtgcatctatgatata

SEQ ID NO: 33843 - DNA, 174 bp, Glycine max
  Clone ID: 700892083H1
ggaaaaaataatttcttttaataaaagaaaactcaaaattgaatcgataaatcgccatgaatcccaaaatcctcttcgtgtttgctcttcttctgaatctcgatatcaattcgttccaaaaccctaaccctaaaacccctaaatcaacgccgtcgcaggctcacgtggacctcg

SEQ ID NO: 33844 - DNA, 199 bp, Glycine max
  Clone ID: 700892056H1
aatcacttactggaagccttgttgtgagtaagagaaaaggcttcctgcaccgagcacaccaacttgatacctctgattctttctttgcttagaattccacagaatatggaatgtaatcttttcaatcactccccacctttggaattcaagggtttgagcaaggaggaggaagactcattgctagggcaagtggaaatat

SEQ ID NO: 33845 - DNA, 174 bp, Glycine max
  Clone ID: 700892085H1
ggagagaggagatgtcggtggagcagaaagcagcagggaaggaggaggagggaaaactgcagaagggaattgcagagttctacgacgagtcgtctggcatatgggagaacatttggggcgatcacatgcaccacggcttttatgacccggattccaccgtttctgtttctgatc

SEQ ID NO: 33846 - DNA, 230 bp, Glycine max
  Clone ID: 700892086H1
gaaaatgcaattggggcatgtgctcaacttgtgtttgcacctattgatgagtcctttgctgatgatgctctgttgcttccatctggttttcgtgtcattccgttggatcctaaatcagatggtccagctgcaactaggacattagatttggcatcaacaatggaagtaggttctggtaatgctcgtccagctggggaagctgacttgaacggctacaaccttaggtcggt

SEQ ID NO: 33847 - DNA, 217 bp, Glycine max
  Clone ID: 700892087H1
gcaaaaagaaagaatcccaggcgaggagaaagatggaggggaaggagcaggatgtgtcgttgggagcgaacaagttccccgagagacagccgattgggacggcggcgcagagccaagacgacggcaaggactaccaggagccggcgccggcgccgctggttgacccgacggagtttacgtcatggtcgttttacagagcagggataccagagtttgt

SEQ ID NO: 33848 - DNA, 191 bp, Glycine max
  Clone ID: 700892088H1
gcctagtgattcagctagctaagcaagtttttggagcttcaagagttgctgccacttcgagtactagaaatttggacctattgaaaagcttgggagctgatttggctaatgactacacaaaagagaactttgaagatttgccagaaaaatttgatgtagtttatgatcgccattgggcaatgtgacggggc

SEQ ID NO: 33849 - DNA, 159 bp, Glycine max
  Clone ID: 700892089H1
gatggaagtgtggctaacttggatggaagtgccttccatttaatcggagctccacactcttctgatcagaattcccagcagcacaagagaaagtgttctgccagaggtgatgagggaagcttgaaatgtgggagcagtgctagatgccattgctctaag

SEQ ID NO: 33850 - DNA, 142 bp, Glycine max
  Clone ID: 700892090H1
gtcacgttaataaagctgctcatgtttggagcacataagtaccaacactaactttaagccgagaatttttctagttcttttggcttttgatgctaaatccaaacatggttgaagtataagcatcaagaggactatataaaaa

SEQ ID NO: 33851 - DNA, 234 bp, Glycine max
  Clone ID: 700892091H1
aaacgaataaaagaaagcgatagaaaaggaagaagaagcgcttcgcgatgcacgaaagagaagaattggaagcaaagtttcggcgttttgtcttttataaaaaaaatgttaaatcattataattttctatgatagggattggtttcttgtcttttttcttttgtttatgaatatcggtgtattttaacagttgtaaagcactgcgccctcgctgcatgatcatgtagttttcaa

SEQ ID NO: 33852 - DNA, 173 bp, Glycine max
  Clone ID: 700892092H1
ctgctaattccatatccccgtattccttcactcttgaacgccgcttgctttccgccagcgcaggatgcgtggctgcgtttccgcgacctgcccacaagaaagctttgacataatctgagtatggacaatccaagggggttcgcaagtttactcagagcgtggctttgcctgag

SEQ ID NO: 33853 - DNA, 244 bp, Glycine max
  Clone ID: 700892023H1
cacttaactagtaatatttattagaatttgctagagaattagaagaataaacataataccccagatggcttcaaaaacttgttcctcccttgcccttttcctcacactcaacctcgtttacttctcacttgtctctgcatgcggttatacaccatgccctggtccaaacccaaagccaaggcccaaccccaaccctaaccctaaccccagcccaagtggctcgtgcccccgtgacgcactcaaa

SEQ ID NO: 33854 - DNA, 235 bp, Glycine max
  Clone ID: 700892024H1
cgagttgaatgactcgccagaggtgatgaagcaaatgccacctcttcctgtgaaggtgaatgaagagctagccagttccatacttccaagaacaaatctcccaccacaatcatgataaatattcatacttaaccaggcttgcctcttgaatatttctgcctgcactgggacgcaaatcatcatattccacctctgagcaggagaataactgccaaatgccaatcaagttgacccc

SEQ ID NO: 33855 - DNA, 190 bp, Glycine max
  Clone ID: 700892025H1
gccgtcgaaggcgtcgccactctcatccaagaagacgatggcccgacgacagtttctgttcgcatcactggccttactccggggcttcatggttttcacctacatgagtatggtgatacgacaaatgggtgtatttctacgggagcacattttaatcctaataaattgacacatggtgctcctgaggatg

SEQ ID NO: 33856 - DNA, 158 bp, Glycine max
  Clone ID: 700892027H1
ctcctattcctgccagttacaatagtcaactagtttctttttctcaagactttgaaaattcaacttttattttggcaaattcaaatcaatcacttgcaatgcaaaaattgcctctatctggcactgatttggctcttcaggcaacctttaggcttgtt

SEQ ID NO: 33857 - DNA, 152 bp, Glycine max
  Clone ID: 700892028H1
aagaagtataacattgagccaagggctcctgagttttacttttctcagaaaattgattacttgaaggataaggtgcagcctacatttgtgaaggaaagaagggccatgaagagagaatatgaagaatttaaggtgaaaattaattctttagt

SEQ ID NO: 33858 - DNA, 248 bp, Glycine max
  Clone ID: 700892029H1
aaaccatggacgtgggtcagatgcagagacagtggatcgactacaccaaatccctcttccttgagggcttcctggatggtcagtttctgcaacttcagcagcttcaagatgagaacaaccctgactttgtggtcgaagttgtctctctcttctttgaagattctgaaaggcttctcaaggatctaacctttgccctagatcagaatggtgttgacttcaaaaaagttgatgctcatgtgcaccagtta

SEQ ID NO: 33859 - DNA, 178 bp, Glycine max
  Clone ID: 700892030H1
ccagacttccacacgagagaaggagtctctcaatctcagggaagtcccagaagcagataaaaccttgggcttggacatggccaagggcagcgcattctgcaagatgggtgaaggttggacatgcatcataactaaaactgaggggcctgatgctggcaaagttttcgtaaaatgtggt

SEQ ID NO: 33860 - DNA, 189 bp, Glycine max
  Clone ID: 700892031H1
gcctcgccgactcggttgctatcagcgagtgagagtgagtgagtggttctcttgcagcaacaaggtttagtgacaccaaacagacgggaaatgggtcgtggggtcagtgctggtggtggacagagttccttggattatctctttggcagtggggtacctgccagcagtgcaaatggtgctcgcactcaa

SEQ ID NO: 33861 - DNA, 211 bp, Glycine max
  Clone ID: 700892032H1
gtcaaggtgacgaaggtttgcacgctcgagcttttcacgccgaagcgcctcgagtccctcaggcccattagggaggacgaggtcaccaccattggtgagtccgtttacaatcactgcaccaccactggaaatttagggaaagcaatattggtgaggaagcacttggggtctgtggcattcaacaacatcaccaggttggcatttggaaaaa

SEQ ID NO: 33862 - DNA, 209 bp, Glycine max
  Clone ID: 700892033H1
actaaccaactttctgctggtggcagtagtatagtgactggagcaggtggtgcagggcagtctgtaattacagatgatgttccatctcgctccacctcaccttctacaaataactgtaccaatgcacttccacaattgataaattcacgattcccgagaagcacaatggtaggggatgacatggcgcactctgctgccacaatcttgag

SEQ ID NO: 33863 - DNA, 126 bp, Glycine max
  Clone ID: 700892034H1
ggataacatgttccatatgatctcaaaatgaggttaggccactgaattgtttggtttaaagtggcagtatggaatttatactgtctagcaattgaccatgggcaacattggcaaaacccccatttc

SEQ ID NO: 33864 - DNA, 167 bp, Glycine max
  Clone ID: 700892035H1
ctcttctgcggcgtacaagtgggacactccaacgtttggaattctcacccaaaaaactacggtcctggttctcgcacttgccgagtgtgtgggaatccacatggattgatcaggaagtatggccttatgtgctgcaggcagtgcttccgtagcaatgccaaggaaat

SEQ ID NO: 33865 - DNA, 175 bp, Glycine max
  Clone ID: 700892036H1
caccggtgcttttgaggctaggcaatctcttattgtgaggggtctttttcctatgctggcagatccacgacacccggctgagtctaaaagtggaccaaatgatccaattttgaaggttgctttagatcatggcaaggcttttggcatcataaagccacatgaccgatttgttgtc

SEQ ID NO: 33866 - DNA, 175 bp, Glycine max
  Clone ID: 700892037H1
gaagcttggagtccatatcttcttgcacgtaattcaatatccagcttgtacttaggaactgattgttgcttgtacaaccgtgaatcactctcttcttagggattgtttttctgatgtctcgatgagaatgtgtaatgttagaagaacaactttatgttttggagggagttattct

SEQ ID NO: 33867 - DNA, 200 bp, Glycine max
  Clone ID: 700892038H1
agggtatggggacgcgaaccagaggatagactacgtgttcaaggtggtgctgataggggactcggcggtggggaagtcgcagatactagctcggtttgcgaggaacgagttcagcttggactccaagtccaccatcggtgttgaatttcagacaaggaccttggtcatagatcacaagaccgttaaggctcagatctggg

SEQ ID NO: 33868 - DNA, 242 bp, Glycine max
  Clone ID: 700892039H1
ctcttcctcagtagtgcgattttcgattctcttctctgcaactatgcctaaccctaaggtcttcttcgacatgaccatcggcggtcaacctgccggccgcatcgtgatggagctctacgccgacgtgactccgagcaccgccgagaacttccgcgcgctctgcaccggcgagaagggcgccgggcggagcggcaagcccctccactacaaaggctcgtccttccaccgcgtgatcccgaact

SEQ ID NO: 33869 - DNA, 161 bp, Glycine max
  Clone ID: 700892040H1
aaaatctcttcatttttctctctttgttacattttcattatggtgaccaagatatgatctgttatcaatatatattcaatgacatacacagtcccgagtgctaaacctgagtttaaagcttcagatcacaacagatccaccattcacctcaccactttctc

SEQ ID NO: 33870 - DNA, 205 bp, Glycine max
  Clone ID: 700892041H1
gcgagcctttgacggaggatgatctggaagccatcgaagcctctctttccaataacaaagaacgtccattcaacgatcacactcacactcctcgtcgtcgcttgcccaaatcgcttatcgctcttcaacacccaaacgcttcttctttctcgccccatccccgtccatgcgattcaagaatgacattgcctgtaatgaagtttag

SEQ ID NO: 33871 - DNA, 242 bp, Glycine max
  Clone ID: 700892042H1
caaatgacgaaattacaagccaaactcttgtctctatgcttaatttactggaagggcgtatagcttttaataatgccttcctccggcattacttgttctgcatattacaaatacttgcaagaagacacccaactcttcatgggattcccagagaaaatagaatgctgcatatgagtcttacagaagctagtaactatcaaaagaacatgcttgctcttgattcagaaagcaaacctttggat

SEQ ID NO: 33872 - DNA, 205 bp, Glycine max
  unsure (1)..(205): unsure at all n locations
  Clone ID: 700892043H1
aagcgcaggnagtagaaagggaaaagaagataatatggtggtagtttaagataatggtaatctatggcccaagtttatcggtgtactgtgggtcgtgggtacgagatggtgagagcaattggcaagataggtgcagccctcagaaattgagtgggtctgggagaagaagcatcacctgcaaattcgagagtgtgagactcagtag

SEQ ID NO: 33873 - DNA, 235 bp, Glycine max
  Clone ID: 700892044H1
ggacagtatctcgaacaagattgtctagaaaagaggatagtcgtggatgaaatccttcactcacaaccaaagttcgaatccccgtccgaagaggtgcctatatttagtgcccggcagagcttcgaaaaagattgcccccacaggaagatactagtggagaaccaaataaactgggatgaaaacccagttgaggaggttgaaaaaggtggaagcccctatctccattgtagaagtc

SEQ ID NO: 33874 - DNA, 223 bp, Glycine max
  Clone ID: 700892045H1
tgctgttatagatatgtggattaaggcaaaagagctagaggcaaatactgagtattacattgagctgttggcaaaagggacagggaaatcaaaggaagaaattgctaaagatgtccagaggcctaagtatcttcaagcacaggatgctatagactatggaattgccgacaaaataattgattcaagttcaagggatgttgcatttgagaagaggaattatgat

SEQ ID NO: 33875 - DNA, 222 bp, Glycine max
  Clone ID: 700892046H1
ctgtaattggcctattattcttttgccagtgtgaaattaaattcatcgaatctgcatcataaatctctaggcagggatgtttagtctgtactcgataatgaacatggattattgttaatgtagcttagtttctcagaatcttatttgtgcttatgttctgaatttcgaactagctttatatttttatgcttgatattgtgcttaaaaaagaatcgacacttg

SEQ ID NO: 33876 - DNA, 239 bp, Glycine max
  Clone ID: 700892022H1
cattcccgtactcgttggccctgttacatacttgttgctctccaagcctgccaagggagtcgagaaatccttttctctcctctctctccttcccaaggttcttgctgtctacaaggaagttattgctgaccttaaggcagctggtgcttcatggattcaatttgatgagcctacccttgtcttggaccttgaatctcacaagttgcaagctttcactgacgcatatgcagaacttgcac

SEQ ID NO: 33877 - DNA, 173 bp, Glycine max
  Clone ID: 700892047H1
gtgctctctcgctccttcaccttctactccccaaactcgataccctacttactgaactttgttaaagttcataaatttcacaaaatttttcgactttctttgcttcaaaatctacttccttcaaaatctacttcctctcctatcactaaccgtttcaattttgatttttgggc

SEQ ID NO: 33878 - DNA, 125 bp, Glycine max
  Clone ID: 700892048H1
attttcacaaaaaggggtttaaccagccaaccaattaacaatcttccctttgggtaaggggaggcaatatctaactactgtttttttatcctgtaaattcaaagaggctaaactatgggagttta

SEQ ID NO: 33879 - DNA, 146 bp, Glycine max
  Clone ID: 700892049H1
gtttgaagaccaactcatttcaacttaacccatcaaaaccatcgctctctattttcgtcctttctacctttctccgatcccaatccctaatctttctctcttcaagctctagttttttaatgtggggagatcggctgacgaatggg

SEQ ID NO: 33880 - DNA, 164 bp, Glycine max
  Clone ID: 700892050H1
ctcaaagaaatatggtcctttattttcccttcaatttggattaaggccagccatagttgtttcctctccaaaattggccaaagaggtaatgaaagacaatgaccttgagtgctgtggacgacctaaattattgggccaacagaaactaacctataatgggttaa

SEQ ID NO: 33881 - DNA, 191 bp, Glycine max
  Clone ID: 700892051H1
gccaggtatgatgaaattgtgaaggaagtttcttcctatttgaagaaagtaggatacaaccctgacaagattccttttgttcctatatctggttttgagggagacaacatgattgagaggtccacaaaccttgactggtacaagggccctactctgctagatgcacttgaccagatctctgagccaaagag

SEQ ID NO: 33882 - DNA, 164 bp, Glycine max
  Clone ID: 700892053H1
cggtgcgcggcagcaacatccacgggagggctgatgaacaaaatgaccgggcgcatcggtgattcgccgctgataggcgccgggacctacgcgtgcgacgtgtgcggcgtatcgtgcacgggtgaaggcgaggcaatcatacgtggaacgctggcgcgtgaggt

SEQ ID NO: 33883 - DNA, 231 bp, Glycine max
  Clone ID: 700892054H1
gtgagagatggatcagtttttgtggagggtgttgcctttgcttacaatccttgtttcctttggagtgttcttctacttgcaggattcttacacagcacagttatttcctctcataaagttaccgcgggataagtgcagccttcttccccatcgccacttctggatatccagcaaacgtattgtgaccccacaagggatcatttctggttcagtggagataaatgatgggaa

SEQ ID NO: 33884 - DNA, 152 bp, Glycine max
  Clone ID: 700892055H1
accaatttaggttctcttaaaacaaaggcccctcaaaccactttccccacactcttttagtgtgtcgtattttttcctctctttctccacaattaggtcttggaccgacccttttgtgtaagtgcaatggccatggctaagcttgtatgtgt

SEQ ID NO: 33885 - DNA, 243 bp, Glycine max
  Clone ID: 700891982H1
attcattcaagattcagcaagtgcgttttggaagcagagaccgaaatacttcgagatggcccgtacaaacaaactgctcgtaagtcaactggaggaaaagctcccaggaagcagcttgcaaccaaggctgcacgtaagtctgcaccaacaactggtggtgtgaagaagcctcatcgttatcgccctggaactgttgctcttcgtgagattaggaaataccagaagagcactgagctcctaatc

SEQ ID NO: 33886 - DNA, 241 bp, Glycine max
  Clone ID: 700891983H1
tgctgaaacctcatccaagagcaacaacaaactactccaccccaacttggatcttcaactctccaccccaccaccaccaacaacacatcaaatgttgcaaaccgtattgatgctgcaatatcacctaagagggatcatcatcatcatcatgagaaccattcaacccatttgcaactctcaattgggtcatcagatatgagtgagaagaacgaatcaaacaggaactcatcagagaagagca

SEQ ID NO: 33887 - DNA, 239 bp, Glycine max
  Clone ID: 700891984H1
gccaaacccttctggccactgctattggaggcaaagttggtgctgctgctgttactgttagtcctagagactcattgtggtagctgctgctgcaccaaagaagtcatggctccctggtgtcagaggtggtggcaacctcgtcgacccagaatggcttgatggatcgctaccaggtgactatggctttgacccactaggccttgggaaggacccagcattcctcaaatggtacagagaag

SEQ ID NO: 33888 - DNA, 225 bp, Glycine max
  Clone ID: 700891985H1
ggctcgaggaacatggggtttgaggaaactaggctaaggcttggacagccctggaacgtaggaggcactggcactgaagaagtgctcatcaggaagagaggtttctctgagactgaaactgaaactgaggaggatgagtctgctaccactgtggatttgatgcttaatctttcttctaaggaagctgctgctgctgcagatccaactgataagcacaagactttg

SEQ ID NO: 33889 - DNA, 236 bp, Glycine max
  Clone ID: 700891988H1
ctcttccacctcgccttcttctcccaatgccttccctccgcctgggcccactcggcgatcctcctccgggtcaactcgcccgtgactcaccgcagagctgccccgcccctgaccccaacctctactacaagccagtcatcggaatcgtcagccatcccggcgacggcgcctccggccgcctcagcaacgccaccggcgcctcctacatcgccgcctcctatgtcaaattcgttgag

SEQ ID NO: 33890 - DNA, 230 bp, Glycine max
  Clone ID: 700891989H1
ggttgcttctcttttattgtctcgtggagaacaaacttgcctcatcttttctagtttcttatgattactaatagcatttacattttatgcgaattttatttgtttgctgaatactatttggtgaacgttatcacatttgattgttatgtataatttgcagtgccctcgaccttgagggggtgtaaaaaaaaaaaaaaaaaaaaaaaaaaaaaaaaaaaaaaaaaaagaat

SEQ ID NO: 33891 - DNA, 96 bp, Glycine max
  Clone ID: 700891990H1
actaactacactggccttttgttctcgtgtcaatttctaaatccaccaccacaccctctcttctactctctattcattatctatctcctacaccct

SEQ ID NO: 33892 - DNA, 232 bp, Glycine max
  Clone ID: 700891992H1
acagaacaagatcttgaaggtcatcagaaagaacttggttaagaagtgccttgagctcttctttgaattgcagagaacaaggaggattacaacaagttctatgaggctttctccaagaacttgaagctaggtatccatgaggattcacagaacaagggaaagattgctgaattgctcaggtaccactccaccaagagtggtgatgaaatgacaagcctcaaggattatgtga

SEQ ID NO: 33893 - DNA, 234 bp, Glycine max
  Clone ID: 700891993H1
cccgtaaggcgcaaggaagctgattggtgggatccccctgtgggttgcaccgccgaccgaccctgacttctgtgaagggttcgagtgagagcatacctgtcgggacccgaaagatggtgaactatgcctgagcggggcgaagcagcaggaaactctggtggaggcccgcagcgatactgacgtgcaaatcgttcgtctgacttgggtataggggcgaaagactaatcgaaccgt

SEQ ID NO: 33894 - DNA, 239 bp, Glycine max
  Clone ID: 700891994H1
catgaacttaatcttaatctgttagctagcttcaaatgcgttattgggtctcacaaaaaggagctagtaggaagtgaatactactattatttacctgccacacacacagaaacatacatagatctagaagcaaaggcaaagaaggatttcaagctcaattgtttagcttaattaatttccttcaagcaaatgatgattcagaagatgtttgactccacccgttctggtatgacaagaag

SEQ ID NO: 33895 - DNA, 238 bp, Glycine max
  Clone ID: 700891995H1
cccaattcctaattgtttaaacctaattctcatttcttcatcgttcgattcttctcctcctaaagatgagatcttcgtgaaaactttgaccggtaagaccatcacccttgaggtggagtcctccgacaccatcgataacgtgaaagctaagattcaagacaaggaagggatcccacctgaccagcagagacttatctttgcgggtaaacagcttgaggatggtcgaaccctgccgact

SEQ ID NO: 33896 - DNA, 252 bp, Glycine max
  Clone ID: 700892001H1
gagagagacgcttcgcaaatctcaatcgaatctcagaaaaatgagagaaatcatcagcattcacataggtcaggccgggatccaggtcggaaactcctgctgggaactctactgcctcgaacatggcatccagcccgacggcatgatgccttctgactccaccttcggtgtagcccacgacgccttcaacaccttcttcagcgaaaccggatctggcaagcacgtcccccgtgctgtcttcgtcgacctcga

SEQ ID NO: 33897 - DNA, 147 bp, Glycine max
  Clone ID: 700892002H1
ctcgcgtacgcgggttcggggctgctgtagtttcatactttggtgctcaggtcctgcatccacagtctatgagacctgctagagaaagtgatattcctgttagggttaaaaattcctacaaccctaaagctccgggtactctcattg

SEQ ID NO: 33898 - DNA, 109 bp, Glycine max
  Clone ID: 700892003H1
cgcttccatttctgcgatcactagattatatcttaaccgcatttcgtacagcgacaaggagctacgtcttaggagatccgagctcgagagttctcgtcgagttcgacca

SEQ ID NO: 33899 - DNA, 241 bp, Glycine max
  Clone ID: 700892004H1
tctgcgccgttcttcctcccctgtttcgttccactgagcaacacgctatcagttgcatgacataatacagagtgttcaattagagcataatgggatccaaaaatgcaaatgggaagaaccacaaggacaaaaggaacaaatttaaggataatttgagttcctagttgatcgtcacccagtgatgccaaggttatcctcatcagtgatcctcgatattcaaaggctcacacggatcctcggt

SEQ ID NO: 33900 - DNA, 185 bp, Glycine max
  Clone ID: 700892005H1
caggaagagatgtattgagtcaaggtcaactaaggttaatggcttttgaccgagaagagttgtggaaaagtgctagtgaacgcatttcttggcatgaaaaattagaaggtgaagaggatatacagaaacgtattcataagctggagtcagttggaaacctagaggctgcagttagtttatggctt

SEQ ID NO: 33901 - DNA, 211 bp, Glycine max
  Clone ID: 700892006H1
caaagttccagccaagcccaagcccgcccctaaaccaaaggctgctgctgctgctgcttccaagcccaagcctgctgccgccaagcccaaagggactaagccagctgccaagcccaagcccaagcccgctgctaaaacaaaggctgctgctgccaagcccgcggcaaagcccaaagcgaagcccgccaaggcttcaaggacgtcggaacgg

SEQ ID NO: 33902 - DNA, 180 bp, Glycine max
  Clone ID: 700892007H1
caaatattctcactcgtcgtcttcgtctgcgccctaaccaaattcaattcaaactcttctcatcaaaatccaaggctcgttcttgaaaccctaattcgatatcctcctcctcagaagaagaaggatcgatgtgggcagcttcttgcctggcgtcatgctgcgcggcctgcgcatgcgacg

SEQ ID NO: 33903 - DNA, 181 bp, Glycine max
  Clone ID: 700892008H1
ccttcagcttgttcgacaaggacggcgatggttgcatcacaaccaaggagcttggaactgttatgcgttcattggggcaaaacccaactgaggcagagctccaggacatgatcaatgaagtggatgctgatgggaatggtaccattgacttccctgagttcctaaatctcatggcaaggaa

SEQ ID NO: 33904 - DNA, 151 bp, Glycine max
  Clone ID: 700892009H1
cttcattagatcctcagtgggatcgaccctcatttctgtgaactgagatggctggaggtgttattcggcagttatttaggaggaaactccaatgtcattgtcctaattcttcttttaagtcatccattatcacaaagaaagatggtgctga

SEQ ID NO: 33905 - DNA, 207 bp, Glycine max
  Clone ID: 700892010H1
ctttcgaaagattttatccaattgaaattttttaaaaatgactgggataaacttaagaattcaattattgaaattgaataagtaaacaatttaattggattggtcgaatggtatcaaaaaaatggagtactaactcccatttcttatttattattgaattaaccgatcaacttgctttgttatcgaacatttcttttgatttcaaaa

SEQ ID NO: 33906 - DNA, 145 bp, Glycine max
  Clone ID: 700892011H1
tttcgaaatcgaactgtggctgtgtggaacttccgtggagagctggtaacttcttttgaggatcacctcttgtggcatcctgactgcaacaccaacaatatgtatatacccagtgtccaggatctattcctatcctactgtaaag

SEQ ID NO: 33907 - DNA, 80 bp, Glycine max
  Clone ID: 700892012H1
catctatcattgtcaccaaatcacgcacaactttacacttgtaacctgatttcaatcaaagcaaatttcaattcttgaac

SEQ ID NO: 33908 - DNA, 245 bp, Glycine max
  Clone ID: 700891981H1
cttaatttccagcaaaatcgttctctgtcttttgaagcagctgttgcccattgtgaagtatttgttctccgcatctcgcgtcgttagttcattgaactcactgcattgagtggatttggtccaagttgagtttagaaatggatggccatcatcagaagcaaaaaaacaagtacagtataattgttcctacatataatgagcgtctcaacattggtctcattgtttacctcatcttcaagcacctt

SEQ ID NO: 33909 - DNA, 209 bp, Glycine max
  Clone ID: 700892014H1
aaagcccaaaactgtcaaatatgaatttaaaaccaacacccatgtccctaaactaggggtaatgcttgtggggtgggggggaaacaatggctcaaccctcactggtggtgttattgctaaccgagagggtatttcatgggcaacaaaggacaagattcaacaagccaattactttgggtcgctgacccaggcatcggctatcagattgg

SEQ ID NO: 33910 - DNA, 245 bp, Glycine max
  Clone ID: 700892015H1
actccatcgtgacataaagggctcaaatcttctcattgacaataatggagtcttaaagatcgctgattttggtttggcaagtttttatgaccctcagcgcaatgttccattgacaagccgagtagtaactctatggtatagaccaccagaacttttacttggagcgaatcattatggggttgcagtggatttgtggagcactggttgcatactggggggactatatactggaggccttttttccc

SEQ ID NO: 33911 - DNA, 242 bp, Glycine max
  Clone ID: 700892016H1
gaaggagtcaaatccgtttattcatggtgctggacatgttgatcccaatagggctattaaccctggcttggtttatgatttggacactggtgactatgtggcgatcttgtgttctgttgggtatgatgctaatcagattgcggttttcactagagagcctgctgctgaaagtgtttgtgaagggaaagtggggaggactgggaagttggcgagtcccaatgacttgaataacccaacatacg

SEQ ID NO: 33912 - DNA, 179 bp, Glycine max
  Clone ID: 700892017H1
tgctcatgacccactacgatatgttggtgatatgctaggctggttgcatcaggccttggcatctgaacgtgaacttgtagctgtattacttgatccagatacaattaccgattctggtcggaggaaattctccaataactctgagaatggctctgggaagacagaatcggacttgatgt

SEQ ID NO: 33913 - DNA, 102 bp, Glycine max
  Clone ID: 700892018H1
accaaatgtgtgtacttatgcttttcaacagcgctgagcggttgacttgtaaggagatagagcaagctacagcaatacccatgtcagatttgaggaggtgcc

SEQ ID NO: 33914 - DNA, 228 bp, Glycine max
  Clone ID: 700892020H1
agccatttctttcgtcttaatttgttctcttcagccatggcgatggtgcaagatgaacgatgcgttcagaaaagctactggattgaacatacgacggacttgtccgtagagtcaatgatgctcgattccaacgcctctgatctcgacaaggaggagagacccgaagttttgtccctactaccaccatatgaaggaaaatcagttgtagaacttggagcaggtattgga

SEQ ID NO: 33915 - DNA, 149 bp, Glycine max
  Clone ID: 700892021H1
acgccacgctacgacgcgtcgtttcattattattcatagtcttcctttgcatgcgccaccatcatcaattcaattccaatgggtaatatctgcgctcgtttgaagtcgaagccgccgccgcaatcctcagccaagaagcgttcctcttc

SEQ ID NO: 33916 - DNA, 247 bp, Glycine max
  Clone ID: 700891950H1
ggaacaaatggctggagtgacaaaggaggaagagaggggtagtcctagttggggtgcttcattttttacgcagcaacagaggatgtggctagagctgttgccactgctatgaattctcagaggccatctgtggtatattcattgaaaaatgatcatggtggcagccaacttcaaaggctgcagtatcaagttacgaaaatgataaaaggattttctagccctccagaagttaaatatacaaattaca

SEQ ID NO: 33917 - DNA, 245 bp, Glycine max
  Clone ID: 700891951H1
gttcatacttgtttcttcaatttcatttcttttattacttttcctctttgcattccaaatggccactgttgagttgcacaacaaacaccaacaactgtgacagaaaatgaagcaaccgaggtaaccaagattgaggaaactaccccagaacaaccagcttcccaggttactaccaccgaagaaccaaaggaagaaaccaccaaagaagcaaaagaggaagaagaagccccagttgagactaatga

SEQ ID NO: 33918 - DNA, 244 bp, Glycine max
  Clone ID: 700891952H1
cattgatatcccctcctccttaagaggagaaaaggaagtaacagaagggagaagaacaaacggagcatggtttgacgagacgcagtggatctgtctctgccaaaagatcttcctcctcggaagataaacctccttcgccgaagcgccaaaaggtcgacaatggcggttcgtcggagaaaccggtgccgacgccggcggaaaattccaaggacttatctacttcggagcccgtgcttgatcccgg

SEQ ID NO: 33919 - DNA, 243 bp, Glycine max
  Clone ID: 700891953H1
ctccctttctctctccccaacccaaaaatggcatcaaaattgaccctcattgcgttggttctcgcggtggcctgtgcgccgttgatctaacccatagcgcatcagcatcctcccctcacgcgccagcgccctccgtggactgcaccaacctcgtcctcaccatggccgactgcttgtccttcgtcaccaacggtagcaccgtcaccaagccagagggcacatgctgctccggtttgaaatctg

SEQ ID NO: 33920 - DNA, 238 bp, Glycine max
  Clone ID: 700891954H1
ataagatgaaaggagattattatcgttatcttgctgaatttaagtcaggcaatgagaagaaggaagctgctgtcagtctatgaaagcatatgagtctgctaccgctgcagcagaggctgatttacctcccacacatcccatccgattgggtctagctttaaatttctctgttttctattatgagatcttgaactcccctgaaagagcctgtcatcttgcgaacaagcttttgatgaag

SEQ ID NO: 33921 - DNA, 242 bp, Glycine max
  Clone ID: 700891956H1
tgggaacttaacaaaggaagaaacgcgaattgatgatggaggtcaccaaagacgaagctgcaaccccaggacaggaggtgctcaacctcgcaatccaaatccaaatccaaatccaactccaaatccaaaccctaaccctaaccctcctcacaccaccagaggatctaaaggaaaatcgtgtaagggatgcacctactactcatcgcttcataaagccaagtccaaaaaccccacatgcgttg

SEQ ID NO: 33922 - DNA, 237 bp, Glycine max
  Clone ID: 700891957H1
gcctcgccgaaggagagtccgttgagttcgccattgaatctgaatctgacggacgcgcgaaggctgttgattcactggccccgacggcgccacgtccagggaaccagacgaggcggtgatggtggccgaagctatggcgggggacgaggaggtggtggaggtggctacggtggaggcggtggctacggtggtggtggtggctacggtggaggcggtggttacggtggtggtggaaga

SEQ ID NO: 33923 - DNA, 234 bp, Glycine max
  Clone ID: 700891958H1
gtcttggtgctgagattgttggcactttcatccttgtttacaccgttttctccgccaccgatgccaaactagcgccagagactcccacgtccccattttggcacccttgccaattgggttcgctgtgttcttggttcacttggcaaccatccccatcaccggaactggtatcaaccctgctcgtagtcttggtgctgctatcatcttcaacaaggaccttggttgggatgaaca

SEQ ID NO: 33924 - DNA, 237 bp, Glycine max
  unsure (1)..(237): unsure at all n locations
  Clone ID: 700891959H1
ctattacagaatgtgcaccctgccattctccttaggttcctgcgggagcatagatcagaatgggcagncacaatatggatgcttacacagctgctgctattaaagttggcccttgcagcttttcaggatctcgtgttggaaactatggaggtcaagttatactccccctagcacacacaattgagcatgaagagtttttggaagtcattaaattggaaggagttgctcattctcctg

SEQ ID NO: 33925 - DNA, 235 bp, Glycine max
  Clone ID: 700891960H1
gaagattgtgcgcgatacgtgccgttctataggatttgtgtctggtgatgttggccttgatgctgacaatgcaaggtattggtgtaccttgagcagcaaagtcctgacatagcacaaggagtccatggccacctcaccaagcgaccagaagacataggagctggcgatcagggtcacatgtttggctacgccacagatgaaacacctgagcttatgcctctcagccatgtccttg

SEQ ID NO: 33926 - DNA, 239 bp, Glycine max
  Clone ID: 700891961H1
catcgatgcttcaagttattacaggaataggttccttcgccatagcatatgcaactggaatgtgcttctgttgactcgaaagaggtaggtggaagaaaagaaaagttaatatataacttcctaaaagcctgtaagagtttgaaacactgcagttttcgcctaagatttttctccattgtccatatggataattagaatttaatggataagaacttgggaccatgattgtgaaggatcat

SEQ ID NO: 33927 - DNA, 244 bp, Glycine max
  Clone ID: 700891963H1
gattgacaggcgatctggcaaagagcttgagaaggaacccaagtttttgaagaatggtgatgctggttttgtaagatgattccgaccaaacccatggtggttgaaactttctctgagtaccccccacttggtcgctttgctgtcagggatatgcgtcaaactgttgctgtgggagtcatcaagaacgtggagaagaaggatcctactggagccaaggtcaccaaggctgcccagaagaagaagt

SEQ ID NO: 33928 - DNA, 247 bp, Glycine max
  Clone ID: 700891964H1
tagcaaacctcttcgttccttcgattcattccatttcttccaaaatggccaaagacccagttcgcgttctcgtcactgagccgcaggcaaattggatatgctcttgtccctatgattgctaggggagtgatgctgggtcctgaccagcccgtgatcctccacatgcttgacattcctccagcagcagagtcgttgaatggggttaaaatggaattggtggatgctgcattccctcttcttaaaggtg

SEQ ID NO: 33929 - DNA, 249 bp, Glycine max
  Clone ID: 700891965H1
gcagacttaacaacagcacaaagcgggttactgtctgttcaagctaccatctctctctctctttcttagtgcctccttgccagaagttaaaatggcccaagaaactttcctattcacatctgaatcagtgaacgaggggcaccctgacaagctctgtgaccagatctccgatgctgtgctcgatgcatgcttggagcaggaccctgacagcaaggttgcctgtgaaacctgcaccaagaccaacatggt

SEQ ID NO: 33930 - DNA, 247 bp, Glycine max
  Clone ID: 700891966H1
aatggcttccctggcctgtgtcaaccacctccctccctggctctcccctcgccccggatccgaccccgaaccgacttcgagttccccttagaccctcccaccaccatgctccccgccgaccagctcttctccgacggcaaactcctccctctccacctcaaacctctttccaccaccactcctcagaaccccaaatcaccttcctccgcttccgttaacaccgtcagggcccccaccactacctcct

SEQ ID NO: 33931 - DNA, 245 bp, Glycine max
  Clone ID: 700891967H1
ctcgagccgaatcggctcgagcgaaggaaagagcgcttaaaagtactacagagggaagcaactggtgcaggacagaaggacaaaggaaaggaagagaagagaagagaaggagaaggagaagggtttggtagttggttacttagtttgtttgattaacgacggcgcactacacgatccccacaatccagaggcttgttattatctccatccatttaatttaattcccacaaccacgctcacctaag

SEQ ID NO: 33932 - DNA, 242 bp, Glycine max
  Clone ID: 700891968H1
cttgaaggcgaggctgatgaactcaagagggtattcttggaagggaatccttacctcctggcaattaccaggttgtttctcttcttcattcagtctttgacttcttggctttcaagaatgacatccaattttggaacaaaaataaatctatggaaggactctctgcaaagaccgttgttgtgagctttgcttgtcagcttatcatcttcctttatctacttgacaatgacacctcttggatg

SEQ ID NO: 33933 - DNA, 240 bp, Glycine max
  Clone ID: 700891970H1
tacaaatcaggagttcatgaaggtttcatagctggagctggtctaggcacagttatgttagttattttctgtggttatgctttggctgtatggtttggcgcaaagatgataatggaaaaaggatataatgggggcacagtgattaatgtgattattgccgtgctaactgcttcaatgtctcttggagaagcatcccctagcttgagtgcttttgctgcaggtcaggctgcagcttacaaa

SEQ ID NO: 33934 - DNA, 237 bp, Glycine max
  Clone ID: 700891971H1
tgcagtttttgacaaagctattgtattatactccaacagctattcttgcttctgtgatcctctctgccccccaggactcattgacgttagtgaagcttacaaaatttggaaggttgataagatagactttcttgcttgcgctggggcattctttggagtactgtttgcttctgtggagattggtctacttgttgcggtgttaatatcattttcaaagatcattctgatctcaattcg

SEQ ID NO: 33935 - DNA, 235 bp, Glycine max
  Clone ID: 700891973H1
aatgcatggtggctggccaacaaccctgcacactggaagaagccagaggagttccggcctgagaggttttcgaggaggagtcgcttgttgaagccaatggcaatgactttaggtaccttccctttggtgttggcagaagaagctgccctggaatcattcttgcattgccaattcttggcatcactttgggacgtttggtccaaaactttgagctcttgcctccccctggccagtc

SEQ ID NO: 33936 - DNA, 236 bp, Glycine max
  Clone ID: 700891976H1
cagctttcttcttagtatcgagcttcatatttcacagccatgttgccaagaagtagaacccttcctacagaatccaccaaggaattatagaagagaggcacgatgtcaggccctacgtacaagtagaagtgcgacccaataatatccaaacggagacccaagcgatgaatatccagtctaactattccaagtgcttcgatgatgatggtcgcttgaagagaacaggaacattttgg

SEQ ID NO: 33937 - DNA, 237 bp, Glycine max
  Clone ID: 700891977H1
aaattagttcattctctttgcgcagttccctacctctcctttcaagatgcagatcttcgtcaagaccccaccggaaagaccatcacccttgaggtggaaagctctgacaccatcgacaacgtcaaggccaagatccaggacaaggaaggaattcccccggatcagcaacgtctcatcttcgccggaaagcagctcgaggacggccgtaccctcgccgactacaacatccagaaggag

SEQ ID NO: 33938 - DNA, 238 bp, Glycine max
  Clone ID: 700891978H1
caagccggaagctgccgtgtggaaaacttctccttccgagcctggactggactctgtctttctcttcatctcaaaaggtctccacttttggaggcaaatggcttatgttgttgtgagggggctcttcagaatcttgtcctaaagggaacttccaacatcgtaatcttattagatcaaaagttttcttttgcaccagaggtagaatttggctgataaggctgctttggaaggttttttg

SEQ ID NO: 33939 - DNA, 242 bp, Glycine max
  Clone ID: 700891979H1
gaagacaggttcaaaccggagcaaaaaaacttgttacgatggtttcttccgacaaggatccacgagaggagtccttcaagcatggtacatggatgatagtgatgaagatcaaagactcccccaccacaaagaacccaaggagtttgtctcgttggaccaacttgctgaacttggagtccttagctggaaattagatgctgataaccatgaaaatgatccagagctgaaaaagattcgtgaag

SEQ ID NO: 33940 - DNA, 250 bp, Glycine max
  Clone ID: 700891949H1
aacaaattttatctaactggagaggaagtagcctattggtattgttgtacctttttttcgtgtcaccacttcaaggtcgaactcgtgaattgggtagttatttaattagtgtaaatattagagtgtaggtttggctttgaagaaatattagtttgtttcgaaggaaccttatttttgtacaagggttggtctaatttctctggagaaaatttactatatgtaaaccgacataagacctgatcctttaaaa

SEQ ID NO: 33941 - DNA, 244 bp, Glycine max
  Clone ID: 700891980H1
ggtcaagcttgttctcttaggtgattctggtgttggtaaaagctgtattgttctacgatttgttcgtggtagtttgatccaacatctaaggtaactgttggagcttcttttttgtcgcaaacaatagctctgcaagactctacaacagtcaagtttgaaatatgggatactgctggtcaagagaggtatgctgcgttagaccgctatattaccgtggtgcagcagttgcagttatgtgtttatg

SEQ ID NO: 33942 - DNA, 247 bp, Glycine max
  Clone ID: 700891922H1
cttaatttattccaccaagaatggccacgacattttctgccaaatctcccaatattgcagcaaacaagttaatagaggagatagcagcaacagagaagaatcagtaatcatgaagagaagtagcagagcgggtgaaaagaaaacaggaggagccaaagttgcaagactcttgctagtgaatcaagcactagctactctagccttctttggagttggagtgaacttggtcctgttcctaaccagagtt

SEQ ID NO: 33943 - DNA, 245 bp, Glycine max
  Clone ID: 700891923H1
ctttctttcggctttgatttctctctcctcgactcgatcccaattccactagggattcaattccgatgcgattccggcttgttagatccacgacaaggtttcgtttcccagattcttttgtaaaaaaaaattcttcctctgcccaacaggtaagttgtaaaaaaatggaccatgacaagactgggtgccaagctcctcctgaaggtcctatattgtgcatcaacaactgtgggttttttggaagt

SEQ ID NO: 33944 - DNA, 246 bp, Glycine max
  Clone ID: 700891924H1
aagaaggcgtcttcataaacgcctttcttctccgtttccgtttcctcgttcgaattcgctttttgatctgcgaaaagagagagtgcatctcgatccacattggtcaggctggtatccaggtcggaaatgcttgctcgggagctctactgcctcgagcacggcatcgggcccgatgggcaaatgccaagtgacaagacagttggcggtggtgatgatgctttcaatactttcttcagcgagactggt

SEQ ID NO: 33945 - DNA, 242 bp, Glycine max
  Clone ID: 700891925H1
ctctaaaccctaaacaactctttctcttcttccttcgctcgttgttctccctcgcgtagatcgacaatggcggaacagagacgtttgctttccaggctgagatcaaccagctcctcagtctcatcatcaacaccttctactccaacaaggagattttccttcgtgaactcatcagcaacgcctccgatgctttggacaagattcgatttgagagtttgacagataagagcaagctcgatgct

SEQ ID NO: 33946 - DNA, 239 bp, Glycine max
  Clone ID: 700891926H1
tactactataatagtataactaaggaaggagtaagggtgatggtggttctgatctgacttttggcggtgtggggtcacgagagcagcaaggggaagtcacaagagtcacaagaatggagagaggttcgggcaagctgagcaggaagaaaagtggtggtggaaacggacaggttctagacggttctaatattatggagttggttggaaaccagcaagttttcaccaccttcgtggaccat

SEQ ID NO: 33947 - DNA, 243 bp, Glycine max
  Clone ID: 700891927H1
ggattaagaagtagtaaacttttggtgtgagtgttctgcgcgcgccgcatcaacaataatttctcaaacagcgtcgtttaagttaaagaaacccattagactaggcagatcattatggctgtacattccgaatcagcttcatcagagaagaaatcaagcaatggagtgaatgagttgctgacttttaatgctgagaatatgcaaagcaacatgaaaattatctattacagccgaacattttta

SEQ ID NO: 33948 - DNA, 243 bp, Glycine max
  Clone ID: 700891928H1
ctttttctacttaccttttctcttaatccaaatacgatggcagccatggcaaccacaaccctctcttcaaacccaaactctcattcttcaacggaaagcccgtcacatattcttcccgcgtcgcgcccaccaccaaattatcctcatccaaacaaggcacaatttccatgtccctaaccccacccccctacgacctccagtccttcaaattccagcccatcaaagaatccatcgtgtcacggg

SEQ ID NO: 33949 - DNA, 243 bp, Glycine max
  Clone ID: 700891929H1
tcctgttctcaccgcaatgtcagcaggccatgttctccatgttttcattaatgatcaacttgcaggaactgtatgggggggattggcaaatcctaaattaacatttagtgacaatgtgaaactgagggttggcaataacaagctttctttacttagtgttgctgtcggtctcccgaatgttggtgtgcactttgaaacatggaatgcgggggtgttaggcccagtcactctgaagggtctaaa

SEQ ID NO: 33950 - DNA, 244 bp, Glycine max
  Clone ID: 700891930H1
gcttccagaaggacatcttgaaccttgtctacatctgtgaatgtaatggccttccagaggtggctgagtactggaacaagtgatcaaggtcaatgattatcagaagagccggttcgtgaaccgcgtggtttcgtcaatgtttaacactgttgcaaccaaaaagatagcaattcttgggtttgcattcaagaaggacactggtgacacaagggagacaccagccattgatgtgtgcaagggacta

SEQ ID NO: 33951 - DNA, 247 bp, Glycine max
  Clone ID: 700891931H1
ccatgttggaaacacaatcgcatagtgaacttctttcagctgttagattgttggtatcagaggaccattgtgatggagatttgtctttggtcgccaggtcctaccacaatcaaagaaggaaacaaactccaaaactggtggtgtagctgaggagaaaaattataaaaatcaccttcaagcattccttaacagggctggacatgattcaccaacttacaaaacaaaggagctgaaaaacaaccaattt

SEQ ID NO: 33952 - DNA, 236 bp, Glycine max
  Clone ID: 700891933H1
atcgctctgtcctcgctgtctctgtctttgaccgaagccaaagaagaggaagaaaccttagcagctttcggcgctcttctttatctctgatttttttttttttttctctttcccttccaatttattctcatatcatattcatctctgtgcctctatgacagactagtacttgttgttttttgtacccattattactcaaacacccccaaatacaaattatattccaatccattatt

SEQ ID NO: 33953 - DNA, 251 bp, Glycine max
  Clone ID: 700891934H1
ctgccattggattctccgccaaagtggtttgctttggaaacatcgaaggagctgaaaaacatgcttccaccgtttcccttcttcccaatctccaatacccaggcttgtcagcaaagggtgcaagttagttggatgtggctctgctgtgccagctcttcagatttccaatgacgacctttcgaaaatggttgatactaatgatgaatggatatctgttcgcaccggaattcgtagacgacgagttctttcag

SEQ ID NO: 33954 - DNA, 248 bp, Glycine max
  Clone ID: 700891935H1
ataccttcctctttccctctattggaagtagctagctaggcacgcccttatccatttctctcttgtatattcatattatctttctcttttcgaatcatgtttaaattgctcatggcaaacacaaacctccgaattgcctgtgttctcctcttgttttttatcttacaccaccaagatctctatgttgaaggaaagaggcacttgaggcttcggttgaacaatcggtgctcgaaagatggtgaaaaatt

SEQ ID NO: 33955 - DNA, 247 bp, Glycine max
  Clone ID: 700891936H1
attcttccttcactgccctcaagtgcgcgttttcaaaaaaattcatcactggtaaatggtagcagttatttagttgctgaccgaaaccatttatagtttctacggagcacaatgttgttccatgaaacttctgcaatcaatcttcttcgaaaattgcaacaaaaatacatacaacggaactcatccaatttcaatggttgcgagagccaacggaattgagtgtgtttgaagtgattatgggtcctat

SEQ ID NO: 33956 - DNA, 247 bp, Glycine max
  Clone ID: 700891937H1
aaaaaatctaaaactttttctttctagaaaaccagagcaaagcaaagcaaaaacagtcgctggctggaaacaactggccctcctaacgaaacgaagaatctcgcatcggaatctggaagcacgcgatgtcaacctcgaaccagcaccagttccgatacactcaaaccccttccaaggtgctccaccttcgcaaccttccctgggaatgctccgaagaggaactcagagagctctgcaaacccttcgg

SEQ ID NO: 33957 - DNA, 244 bp, Glycine max
  Clone ID: 700891938H1
gaagaggtgcctcttactccgttacgagttcgacccctcctctcgctcttctcttctcttctcttctcttcatacaaagcaataatcctattagaatatggaagagagcttcgttttccagtggagcgttatcagatctctcttgtccatccttcagtggtgggccttcaatgtcactgtcatcatcgtcaacaagtggatctttcagaaattggatttcaagtttcccttatcagtttcctgt

SEQ ID NO: 33958 - DNA, 244 bp, Glycine max
  Clone ID: 700891939H1
atcctctcttctcttctttcaattccgcttccctcgcactagatgactgggtttcctggccctcgccgcgatcagcttcttcttcctcctcctcgcacaattccaacggcagtggtagatacgtatttaatttgcttgcaaggagggagatctcaccccggacaagatatgtggcaaaatggcattggggagatcccggtgaagcttcaaaatcaaagtctattccttattctcgtcctaaaaa

SEQ ID NO: 33959 - DNA, 243 bp, Glycine max
  Clone ID: 700891940H1
tctcgagccgaatcggctcgagcttccataagcgcatgcctccaagggctgttgatttggagtcaagactactaaatacgcccctaacttgcggtgcacagctttagatgccttgacgcatcctttctttgacgaacttcgtgatccaaattctcgcttgccaaatggccgattccttccaccactatttaatttcaaatcccatgaactgaaaggtgtcccagctgagattttggtgaaatt

SEQ ID NO: 33960 - DNA, 238 bp, Glycine max
  Clone ID: 700891942H1
gagagagaaaagcgtgaatcatgtcggacgaagagcatcacttcgattctcaggcggatgcgggagcgtccagacgtatcctcagcaggctggtaccattcgcaagaatggctacatcgtcatcaaatccaggccttgcaaggttgtagaggtctctacgtcaaagacaggcaagcatggacatgcaaagtgtcactttgttgcaattgatatttttaatgggaaaaagcttgaagat

SEQ ID NO: 33961 - DNA, 237 bp, Glycine max
  Clone ID: 700891943H1
ctcagccaatgaaggaaaatctgaacaccgtgaagccgaaaatgaaccagatgttcaattttggtcacaattggagggctactacagcccaatagatcaggtggaacagaaaccactggttaaccagtatgttaaccctgccccgttccctggaaacggagttcaagtctcacctgttactccatctgctgatgttactgcttacttcagctctgagcattcgagcaactcgtttga

SEQ ID NO: 33962 - DNA, 236 bp, Glycine max
  Clone ID: 700891944H1
ctggttaacagagtctctgcttcacgatacggatacatttgccggtggattagcatattgaaagtcatctatgcaggaatcaggctcgtgaggttccactgtcaaaagcatgaaatgatctgcattcctgcaactactatcctaatctgtaaaatttgtgtacatatgtaagaaattcagctgttaatatgtgtatataattggtcctcgctaatcaagtgtagacattcttgtaa

SEQ ID NO: 33963 - DNA, 237 bp, Glycine max
  Clone ID: 700891945H1
agtggtgcctacattgtgaggcaagctgcaaagagcattgttgcaaatggacttgctaggagggcaattgtcaagtttcctatgccattggtgtgcctgagcccttgtctgtgtttgttgacacttatggcactgggaagatccctgacaaggaaatcctcagcattgtgaaggagagttttgacttcaggcctggcatgatctccatcaaccttgatctcaagaggggtggaaatg

SEQ ID NO: 33964 - DNA, 240 bp, Glycine max
  Clone ID: 700891946H1
gttgcagaaactaagtgatttgttggaggcatgtcaagatgatggaagggaagacaaggctggcaaagaaaacagcatagaagatggtggctcaggcagtggatacagcagttggaagcctgaagcaaaaccaaggttttcaaatgagggtttggaggagagaataggtgtgtactcagatgatcaaaatgagaatagcatcataaggggtggtgagaaatctgaagacaaaggacacca

SEQ ID NO: 33965 - DNA, 262 bp, Glycine max
  Clone ID: 700891947H1
tcagctctcaattcgggtcgaggaagacaggttcaaaccggagcaaaaaaacttgttacgatggtttcttccgacaaggatccacgagaggagtccttcaagcatggtacatggatgatagtgatgaagatcaaagactcccccaccacaaagaacccaaggagtttgtctcgttggaccaacttgctgaacttggagtccttagctggaaattagatgctgataaccatgaaaatgatccagagctgaaaaaggatcgtga

SEQ ID NO: 33966 - DNA, 246 bp, Glycine max
  Clone ID: 700891948H1
gtaattttggtcattgattaattctgcaattgagcagaggagccatggccaaaatcgcacttggaagcacccgaaggccactcagccagactgcattcaggccctcatcgttgaattcatagccaccttcctctttgtctttgttggcgttggttcttccatggtcgttgacaagcttggtggggatgcactagtgggattgtttgctgtggccgtggcacatgcacttgtggtggctgtaatgat

SEQ ID NO: 33967 - DNA, 246 bp, Glycine max
  Clone ID: 700891921H1
cgccgccgacacagcttcgaatcgctgccaagtgctaacaaacgcctctgagtctctgacaccaacgcaactctctctgctcacatttttgaaggagatggtgaacgtgatggagtggcagaagcagcgttggcaaccgaatgggaacgcggaaatgatgtacgtgaaagtgatgaccgacgaacagctcgagactctgcgcaaacagattgcagtttacgcaaccatctgtgaacaactcatcga

SEQ ID NO: 33968 - DNA, 258 bp, Glycine max
  Clone ID: 700891887H1
cgagccaatctgagggtaaattgacatctctggatcagtacatatctagaatgaaaactgggcagaaggatatcttttacataactggaaccagcaaagaacaactggaaaactctcccttccttgagcggcttaagaagaaaaattttgaggttattttcttcacggatccagttgatgagtacttgatgcaatacctgatggattatgaagacaagaagttccaaaatgtgtccaaggagggtttgaaacttggga

SEQ ID NO: 33969 - DNA, 257 bp, Glycine max
  Clone ID: 700891888H1
cgaggaatttgcaagcacacagatgagaagagaaagatgacgtcatcgcgtccccctccgtcgaaatccgtggatctggacctaacaatcgtgtcggcgaacacctgaagaacgtgaactggaagaacggcaatctgaaaccctacgtggttttctgggtggacccggagcggcgcctcgccacgaaatccgacgactccggcaacacctcccccgtctggaacgagcgtttcgccctacctctccctgttcccctc

SEQ ID NO: 33970 - DNA, 257 bp, Glycine max
  Clone ID: 700891890H1
cgagatttctttctttcgttctcttccgtggaacgagtagtagaaacttgaaatcaaaaggcagcgggggaaaaagaaaagagagaagtagggttcgaaaatggcagcagaatcatcagagggcgaagaagaaaccaagttaagcggaggtaaccaattgctcatagttgacgatgacttaacggaaatgggaaagaaagccgcttggagcgtgagttcctgcaaacccggtaacggcgtttcctctctccgtgacg

SEQ ID NO: 33971 - DNA, 244 bp, Glycine max
  Clone ID: 700891891H1
attgtttttggacatatgtatgtgttagaatgcttctgttttagtttttacctgcgggatgttgcagccactttagaaactgtattggacaacattcagttgccatctaatctcgtttaagttagtttgttggcttgcctcgttcttactaaaaaaaaaaaaaaaaaaaaaaaaaaaaaaaaaaaaaaaaaaaaaaaaaaaaaaaaaagggggggcccccccaaaaaaagcccccccacccggg

SEQ ID NO: 33972 - DNA, 259 bp, Glycine max
  Clone ID: 700891892H1
gaggcaatgttgatcgggctgctctatggcaccagttatgtgccagtgaagatgaaattgtgcgtgttcgtgaagaaagcaaaaatgagatttctaatatggctaaggaaaaagttatgatatcgcaaaagctgagtgaatctgaggccacaaacaatcgcttgaagtctgaaatgaggactgagatggatcggttttctcgggaaaagaaggaactagcagaacaaattcaagaagttgagagtcagcttgaatggat

SEQ ID NO: 33973 - DNA, 261 bp, Glycine max
  Clone ID: 700891893H1
gagttcacctctaatttagggttcactttgtatttgcagtagcacttcctcgcgcgccactatttcccgccgcctccgtcgtcgtcaacagcaatggcagactcatcttctccgccgacgaaccaactcgctgccaccaccctcgacgaggttcccaaagccaatttctccgaccgcgtccccattcgatccatcatctcccgccccgacggcggctcgggcctcgccggcagcaaggcgcgcgtcggcggctgggtgaag

SEQ ID NO: 33974 - DNA, 260 bp, Glycine max
  Clone ID: 700891894H1
agctcacctcttcttcttcttcaaaaccaagttacttattatagaatccttaattttcctaaagttagaattcaatcaatcaggtggagatggtttgggtgaatgagaaactgaaggggttcgtggggcacagatgggtggtgtttgtgtgcgcgatgtgggacatgtcgtttgcggggacatcttacatgttcgggagcatatcgccggtgataaagagcagcatgggtttcaaccagaagcaggtggcgttcttgagc

SEQ ID NO: 33975 - DNA, 255 bp, Glycine max
  Clone ID: 700891895H1
atggaaagcaatgtgttatgaagtattttgatggattacctggacgtgtgtgtctcacactggacgtttggaactcaagccaatctgtggggtatgtgtttattactggacattttgtcgatagtgattggaagttgcagaggagaattctgaatgttgtgatggaaccataccctaattctgactctgctctcagccatgctgtagctgtttgcatttctgattggaatttggagggcaagctgttttctatca

SEQ ID NO: 33976 - DNA, 261 bp, Glycine max
  Clone ID: 700891896H1
attgttgtagccttagatccagtctatgaatggcaaagccaagatcttggactcagatatggtcttctattgtcggagtgtgtgttctgaattttgttctgaacttcaagatcgtggcagtagcagatgacactggaagcaacagtattgtatcagaaggtgactgcaagaacacaaattatcagattttcctccctccaccttatcagaatatatcctctaccatatgcaaacctgtttggcattcatacgaattgaggt

SEQ ID NO: 33977 - DNA, 258 bp, Glycine max
  Clone ID: 700891901H1
gttgaaggcttacttcagttgcttgaacatacttcaatattttagagggttgtggattgtgaggatcatccatattcttatttctttttctcgtaagttgcaataaacaaagcaaaatgattccccttgtttatcaaagctcgtgtgcttttgtactccgatggttgtgagtactgatgttgaaacaagaagaagagtctaatgactaatggtgtctcgaattatttttgctgtctgtacaacgtggctcgttttcat

SEQ ID NO: 33978 - DNA, 256 bp, Glycine max
  Clone ID: 700891902H1
tgcaaagtgcaaaaaccaaacctcgtcaaaggttttagtttgagtttgattcatcgtagtatctaagcatgactctctcccatcttgccggaaaacaagccttcgaaaacggtgctatctggttgcaaagcagcagaagacgcgcttctacatcttcggacgctgcatagccatgctcctctgctggcacgaccacactgtttccgattagatccttcactcgcgtttcagctatgaaaacattgaaatttcgatt

SEQ ID NO: 33979 - DNA, 252 bp, Glycine max
  Clone ID: 700891903H1
gctccatcacctaatcacttccccacttcccctgtaaatcacgtttagttcgcacaaggttttaaaaaatggctgatgctaggacattcaacctcttgttgttgataatggaactggaatggtcaaggcgggttttgcaggtgatgacgctcctagggccgtgttccccagtattattgggcgaccacgccataccggtgtaatggttgggatgggtcagaaggatgcttacgtgggtgatgaagctcaatc

SEQ ID NO: 33980 - DNA, 249 bp, Glycine max
  Clone ID: 700891905H1
ttcatcgattctctcccttctctttctctctgcgacaccagatgatggagacgacggcgaacgataacgctgtcgttgcccaatcgcggcgttgttgttggtggtgctactcgcggcgagtgtggtggtggaggctcaggagaactcggacgtgaagacgctggtgaagcacatgcacgggaagaagtactgcgacaaaggatgggaatgtaagggctggtcaatttactgttgtaacctcactattac

SEQ ID NO: 33981 - DNA, 248 bp, Glycine max
  Clone ID: 700891906H1
ctgaagccgagcttaggttgcttgaagttttctatcacaagatatacaaggtctgccctcccaatgaaaagatcgaaacattaatgatcaatactggacattacgtgcagaggagataccagaagaagagaaaaatctgggtcctcatgatcgtctaatccatgtgtatcattttactaaagacacagctcagaatcaaatgcaaattcagaactttggggaacctttttcttggtcatacatgaagg

SEQ ID NO: 33982 - DNA, 245 bp, Glycine max
  Clone ID: 700891907H1
aagaacaggttcactccatttccatggaagggtcaagcttggaggctgagttagaatcctttcagcaacacgtcactgccggttccttgaactcacttcggttgttcatgatgatttgctttctctctcgtgggttgggaagctccttcattgcttcctgtgttgccaagaggaattcaaggccattctccacagccacagggctcaggtgttgagacccccattggatcgcatggtgtctgaat

SEQ ID NO: 33983 - DNA, 247 bp, Glycine max
  Clone ID: 700891908H1
caaaaagtcctctctctctctctctttcacactctcactttttatgtgcttctcttctctctcctttcaccctcttggataatagagtagggagaaaaaaaagggtctcaaagatgagaccaaaagacgggtttttcattaaaggtccctataagggagggttttttctcatgcatgtggctagcagcagcagcaagtgcaaggtggccatgagcatgaccatggtcaacgaccctttgaggagaat

SEQ ID NO: 33984 - DNA, 250 bp, Glycine max
  Clone ID: 700891909H1
tctcgagcccgaatcggctcgaggagcgtggagagggtccgaagaagcacaacgttggagaaagtgattctcgttctgtcttctactcacaagagcaacaacaacaacatcagaatcagaaacagcaatggccaacactaacttggacgatgttccctctctggatctcatgactgagctccttcgtcgcttcaagtgctcttccaaacctgacaagcgtcttattctcattggcccacctggatctggg

SEQ ID NO: 33985 - DNA, 242 bp, Glycine max
  Clone ID: 700891910H1
caacagcaaattggtgaagttaatgagatcttcaaagatcttgctgtgcttgtccatgagcaaggagccatgattgtgatattggctccaacattgagaactcccatgcagcaactgcacaagcaaaatctcaacttgcaaaagcttcaaaaacccaaagatcaaattcctctttgacatgcttgcttttggtgatttttgggattgtgcttctcatcgtgatcatagttcttgctgcttag

SEQ ID NO: 33986 - DNA, 241 bp, Glycine max
  Clone ID: 700891912H1
cacctcactcttcagcttcggagattccctcactgataccggcaacttgtacttcatttcccctcgtcagagccccattgcttgctccctccctacggacaaacccattttcatcgccccaatggacgatgctccgatggacgccttatcctcgatttcctcgccgagtctctggggcttccgtatgtgaaaccgtatctgggtttcaagaacggcgcggtgaaacgcgggaatattgagc

SEQ ID NO: 33987 - DNA, 248 bp, Glycine max
  Clone ID: 700891915H1
gcttgctcgtttggttatggacaaatccccgcattcctacctcgccttctccggcgccgaagaatttgctaggcaacaggtgtggaggttgtggacaacgagtactttatcacacctgacaacgttggcatgctcaagctggcaaaggaagcaaacacaatcctgtttgattaccgaatcccaacatcggggtacgagacgtgcggatccggtgtggagagtccactgcaaatgaatggactcccaat

SEQ ID NO: 33988 - DNA, 250 bp, Glycine max
  Clone ID: 700891916H1
ctttgttagtatttgttactacaattttacattcttttcatctctacatatttcattagtcatggcacctcaagcagttccttcaagtccttcgccgttgctcttattgtggcgcttttcttctccgcctccgctctggacttagtttcggggcagtcgccggtgccggcgccggcgccggcaccatgatgccggagcagctggatccgtgtcgagctcggtcgccatgattggagcttccgttgtgatt

SEQ ID NO: 33989 - DNA, 251 bp, Glycine max
  Clone ID: 700891918H1
gtgagaagacacccatggtggactggacagatatttgatccctcagattcatctgagaaggcaatgaagcattataaaaggactgccatttggtagcatattttggggatagaacatttgtctggaatgaagaatcccagctaaaaccttttaggacacatttctcctccattgaaaagcagagcacttcagaatcatttcagaatgctgtagattgtgctgtggatgaagtcacaagacgagccgaatat

SEQ ID NO: 33990 - DNA, 249 bp, Glycine max
  Clone ID: 700891919H1
aacctatccagttttacagtggagaagagacgtgcatgaatttgattgtatttgttattaaattattgaactaaattatgaagagagagaggtaggtcggagattgcgaattgcgatttgcgatgcgaaaaggaaaggaaaaaaagggtttcctttcttgaattgctgcttgcttcttcttcttcttgttcacgactgacagataaggtgagttgaattactgtgaaggagtgattgagtgagtggtca

SEQ ID NO: 33991 - DNA, 248 bp, Glycine max
  Clone ID: 700891920H1
ctcgagccgaggagatttgagagtcttctatgatggaagaaaaataaaggatgcctgccatgaagtggtctacagatttactggctttgctatcacattagtacctataagaaaacccaggttgcgcttgttcatggaatttcaatgggtggaggtgcagctttgatggtcccattgaagttctcagttgtaacagaaaaaactgtttttgccactcctgaagcaagttttggatttcatactgattg

SEQ ID NO: 33992 - DNA, 259 bp, Glycine max
  Clone ID: 700891886H1
cgagcgatatgaagggaaagggaaccgaagacgatcgtccatggcaatcttaccacactgtttacacaaccgccaaagcaggaatggaattggttgacaaggagaaagttcaaagggtagtttatgaaatgagcaaaggatccaaatattttcaaaacgaggaacgcaaggtagcttttattaagcagaaaattgataacctgcgaattcagtgtgcaaacctcacacaagaagacttggcccattatcaaaaggttgc

SEQ ID NO: 33993 - DNA, 256 bp, Glycine max
  Clone ID: 700891859H1
caggattttattatcgttttatctgagaattttgcttcttcctggtattgcttagttgaagttgttatgattcttgatgagttcgctaaggggaagggtagatggattgtgccgattttcttctacgtggatccctctgttctggttcgtacttatgaacaagcattggctgaccagaggaagtggtctagtgatgacaaaattgaagaatggaggactgctttgactaaattatctaaatttcctggcttctgtg

SEQ ID NO: 33994 - DNA, 262 bp, Glycine max
  Clone ID: 700891861H1
ctcgatcgcactctctttttcttccaaaagggaaaacgaatctcaaacttcacaagtgtttgaggcgccatggcggatcggttgacgcgtattgccatcgtcagcaacgacaggtgcaagcccaaaaagtgccgccaggagtgcaagaagagttgccccgtcgtcacgaaccgggaggttgtgtattgaggttacttcctcgtccaagattgctttcatttcggaggcattgtgtattggatgcggtatttgtgttaagaaa

SEQ ID NO: 33995 - DNA, 265 bp, Glycine max
  Clone ID: 700891862H1
ctaccactaacaaaccaaacctctcaagtctcaatggcttctcagctacacgacgccgttttccgcgaagaagacatggacgacgacgacgacgagtctcaggaggacggagactacgcagaagaagacgacgacgttttggccgacgacgaagaaaacgagccctctccctaccacggctacttgccgtcaccgtcgccgtccccggttcctccgtctccaacggcggtgccgctccaatttcgacgcccaccgccaccaccat

SEQ ID NO: 33996 - DNA, 263 bp, Glycine max
  Clone ID: 700891863H1
ctggtcctcgtattaaggtcttccaatgttgtgcatgttggttctgtcaacgaccataaccttgttgttttcaagaaacgagttgaaaacgctactttgttttaccaacatggtttacccgctgattgtcccagtgtcaccttcaccaaaccccttatagagttaatggagcctctcgtgagtgagaaacaacaacaaccaccgattgagtttcgcaagaggaatattccctatttgcctaagtttgtggatgtttccactag

SEQ ID NO: 33997 - DNA, 265 bp, Glycine max
  Clone ID: 700891864H1
tgacagcttgatactgttcaaatctgaagaatctcattccttcaaaatcatctcctaacttcaagtttgtgaagggggatattggaagtgctgatcttgtcaactaccttctcatccttgagtccattgacacaataatgcactttgctgctcaaacccatgttgacaactcctttggcaacagctttgagttcaccaagaacaacatttatggtactcatgtcctattagaagcctgcaaggtaactggccagatcaagaggtt

SEQ ID NO: 33998 - DNA, 263 bp, Glycine max
  Clone ID: 700891865H1
cttactcactgtgtctgtttgcaatatataactctcacctttctaccattgctgtgcacctctttctccttttgtcaaattcttctgttcaacaggtctttgccaatggatactaagtcggctgtagaattaatggagtcttccgcagaggttcatttttctggatttcacatggatggttttgagcaaatcaaggctagcatagaacaaccaacaacctcagaaactgacatgtataaacaaccttttgtcataggtgttgc

SEQ ID NO: 33999 - DNA, 120 bp, Glycine max
  Clone ID: 700891866H1
ctctgaataggccactttggacgtttcttatttaatattctctgttgtagtagtatggccatgtaaattatctccctttttttccttacattatcaaattaattagtaaatgatttaatt

SEQ ID NO: 34000 - DNA, 258 bp, Glycine max
  Clone ID: 700891867H1
acatcatcatcgtcatctacaactagtaacaaagatccaacaagcagatcaatctctctctctgtctcccaatcaaaacagacatgggtttgaaggaggattttgagcagtatgctgagaaagcaaagactttgccaccgactcagtcaaacgaagacttgcttatcctttatggattgtacaagcaggccaccgttggacctgtcaacaccagccgtccgggaatgttcaacatgagggacagagctaaatgggatg

SEQ ID NO: 34001 - DNA, 258 bp, Glycine max
  Clone ID: 700891868H1
tgatcatgaaccatggcatttgaatcagaggatgcgtgactaaaccacgtgggtgtgatggatgtgaagcattacccaaataagggcagcgatgtctcaccagatcggagacgacagatgctaattcgcctccgtgttttgaccgagttcgtgccactgagtcggtctccgccgagttactcacttcacaagaagatgttaagtctgcagacaggatctcagatgctgctcttgaatctgcggttctgcagtctatcc

SEQ ID NO: 34002 - DNA, 260 bp, Glycine max
  Clone ID: 700891869H1
gttccaattattccattctctctgtgtatttccctacctctcccttcaagatgcagatcttcgtcaagaccctcaccggcaagaccatcacccttgaggtggaaagctctgacaccatcgacaacgtcaaggccaagatccaggacaaggaaggaatccccccggaccagcaacgtctcattttcgccggaaagcaacttgaggacggccgtacccttgctgactacaacattcagaaggagagtactcttcacctcgtc

SEQ ID NO: 34003 - DNA, 258 bp, Glycine max
  Clone ID: 700891870H1
gcgagtcattcgatattatgttcgagcacttgccatgaatccaaaagcagagaatgcatggcaatatttgagaatttcattgagctgtgcttctaggaatgacatgttggaagcttgtgatagtcgtaatttggaccttctccagaaggagtttccactacagtaagggagggtcagttccactgtggaggtggttgcttgaacatgaatcctaattttccttaaaacttttggatgagtaaatggcacattttctgc

SEQ ID NO: 34004 - DNA, 252 bp, Glycine max
  Clone ID: 700891871H1
gatcaacgcttcatcaacgttgctctcggagctgatggtggcgatcgggaagaacaacaacacgggagagacgaccgtagtagaagctcctgggctgaagtcgtctcccaggatcaacaagatcaccctcttcctcatcaccaacacaaggaacaatatcgtcctcagtacgaggagccccaatctcaaagttcctacaaaccccagaaggtggatgaaggtgaagatggatggcagactgttggtagaaag

SEQ ID NO: 34005 - DNA, 258 bp, Glycine max
  Clone ID: 700891872H1
gaaaatcctccatggctcttaaagaagcttggaggattttgtgtgagagggttctcacccttcacactccacctcctacagtttgcttatgctttagccataggtttctctaatcaatcaccacaaaagggtatacatggaggaacataattctctgagtggcatgaagcagagaagctatggccacatcttagcaaaccggcaagtcacaaaaaggcaatggactctctctcattaaagggtccttatggctatgta

SEQ ID NO: 34006 - DNA, 256 bp, Glycine max
  Clone ID: 700891874H1
aggacaatatgatgttaccatggtctacccggagccttggtgtatgccacgactttttacggctggtatagctgaattctatgaggagtattacaaaaataagggtgtcaatatcattaaaggaactgttgctgttggattcacttctaattctgatggagaggtaaaagaagtcaaactaaaggatggcagggtcctggaagctgatattgttgtcgttggtgttggaggaaggcctcaaacagccttagtcaaa

SEQ ID NO: 34007 - DNA, 255 bp, Glycine max
  Clone ID: 700891875H1
gggccagcaagccccactcaaccaccacacctctcctcgttcacgctacccctttctgctcttcttctacctttcaagttttaaaagtataaagatggcagagacattcctatttacctcagagtcggtgaacgagggacaccctgacaagctctgcgaccaaatctccgatgctgtcctcgacgcttgcctcgagcaggacccagacagcaaagttgcctgcgaaacatgcaccagcaccaacttggtcatggt

SEQ ID NO: 34008 - DNA, 256 bp, Glycine max
  Clone ID: 700891876H1
acatacttgctgatgtccctgggaaagacaaagagagagatggagaactttcccgtgatcaacttggagaatctcaacggtgaggcgaggtaagctaccctgcaccagattgaagatgcttgccagaactggggattttttgagttggtgaatcatggaataccccttgaacttttggatacggtggaaaggttaacaaaagagcattataggagatgcatggcgacgaggttcacggcggcagtgtcaagcaaag

SEQ ID NO: 34009 - DNA, 260 bp, Glycine max
  Clone ID: 700891877H1
catctcagcttcattggtgtgaagcgtggccgcaacctcgccgcgcaggaactgtggtccgagcttgaccctttctctgacctccttggcttcgataccaccaccaccaccaccaaccaaccaccccttccagacaaaaaagtggtgtcatcatgtgagaagaagaagaagaaaagtgtgagtgcagaaaagaagagtggtgggcgagctcggaagaacgtgtacagaggaatcaggcaaaggccgtggggcaagtgggc

SEQ ID NO: 34010 - DNA, 260 bp, Glycine max
  Clone ID: 700891878H1
atccaaaatggtggttggaaagcttgctcctttgttgttgtatatgaggtattcgaaagaatggcttattatgggatatcatcaaatttgattctgtatcttacaacaaagcttcaccaaggcacagtttcctctgcaaacaatgtcaccaattgggttggtaccatttggatgacacccatattaggcgcctacattgctgacgctttccttggccgctattggacttttgtcatagcctccaccgtttatctctcggg

SEQ ID NO: 34011 - DNA, 263 bp, Glycine max
  Clone ID: 700891879H1
ttgggaggggatgatttttggtggcacagcaattcaaacgctgatactgatcatagtaacgatacgatgtgattgggaaaaggaggaggagaaagcttgctttcgtgtaagtaagtggtcaaaatctaactccaatggcaatctggaagcctaccaattaacatttgatttagccaatggatcgtgtttgttattcaccaatctggattctatgagttttgccgttgtattggatgctgcatatatatatatttctttcaata

SEQ ID NO: 34012 - DNA, 260 bp, Glycine max
  Clone ID: 700891880H1
gagtctgcaattgcagttgaaatttggaacgtgcaagatccggtgctgtagtctctacattctgtgatggcaccaaaaccgataacgagtcccgaccccgattcgtggtaccccatcctctccgtcttcactctcgccatcggcctcgtcttaaccgcctctttcttcatttatgaagcaacatcttctaggaaaagtcgttcacttgttcaggagctgacaactggagcagtggcttcagtcttcttgggttttgggtc

SEQ ID NO: 34013 - DNA, 264 bp, Glycine max
  Clone ID: 700891881H1
agcaccaacatcacctgtcccctcaccactaagtaacacaccgacaccagcaccaacgccagcgattgaaatgccaacaccagcaccagcacctgaagatgacacgccacccccccctccccacaggcacaggagaagaagacacaagcacaagcacaagcacgagagacaccatgcactttctctggctccagcacctacaactattattcggagaagtcccccagcaccacttgctgacgatattgctacaaccgattcaga

SEQ ID NO: 34014 - DNA, 260 bp, Glycine max
  Clone ID: 700891882H1
gaggtcgggaaactcttccgaagttggatgacttaaataacaagtctactgatgttgaatcagaaacaaaaatggacagattggtgaaaatagatcctttcagaggaagttggggactgcgattccttgaacttgagttatctaatccaactgatgtcgtgtttgaaatcaatgtctctgtcaaactggagaactctagcaacgaggacaatcattttgctgatcagggtgctacagaatatgtctatcctaaaacaaga

SEQ ID NO: 34015 - DNA, 259 bp, Glycine max
  Clone ID: 700891883H1
gagcttcttcttccaacctttttctcttctctctctctcaactcaactagtttcaccacttattacagaaagttctcttttttttatcttcttctttctgcctccgaattaccactctcttgctttgctatcttacaggaagaggatcaaaataccccaccataagacaaatccaaaggaacagcaacatcaattatgggaggtttcaatggagaagaaggtgttgtgagagaaaaagaagaagaaaacaagtggcctt

SEQ ID NO: 34016 - DNA, 259 bp, Glycine max
  Clone ID: 700891884H1
cgagattgttgttgttgtaactcgttcttcttcttttgttgttctgtgtttgtgtttgttttttctctcacctgaaaatgtcttgctgcggtggtaactgtggttgcggaagctcctgcaagtgcggcaacggctgcggaggctgcaagatgtacccagacttgagctacactgagtcaaccaccaccgagaccttggtcatgggagtggcacctgttaaggctcaatttgagggtgctgaaatgggtgtgcccgctga

SEQ ID NO: 34017 - DNA, 256 bp, Glycine max
  Clone ID: 700891858H1
ctggtgcatatcatcactaaaaccagagctaggatgtgagagagtaagaagctcaacattaagacagtcgatgaggcaatcctctactgctccttttacccttatgcatgaaattcgaaaacttgagcacctaccaagagcagctgggtgaagaagccaatagagctttggaagtattacaaaaggaagtggcatgtcatagactaggtaaccaagatgcagctgagacaattgcaaagctgcaagcagaaataag

SEQ ID NO: 34018 - DNA, 266 bp, Glycine max
  Clone ID: 700891829H1
gtgcctcacattgctaattggctcagagatcttctccattggtggacaatgggaagaagcagctccctagagtctcaagtagtccatcactcaaagtgcttggatctcaaatgggtactcaggagaacaagaattctccattgcaagacctaatggaagtggccaattctcaagaggagtccgcaatctctgaacaaacaccaaatggagacactggggagaaaccttccccttatgtgcattctaggaaaagaaaaggtccatcc

SEQ ID NO: 34019 - DNA, 266 bp, Glycine max
  Clone ID: 700891830H1
cttcaacctaacgcagatcgctatactcttcattccatggctttgcccaatcagcaaaccgtggattaccctagtttcaaactcgttatcgtcggtgatggtggcacaggaaagacaacctttgtgaaaaggcatctcaccggagaattcgagaagaaatatgagccaaccatcggtgtggaggttcacccattggattttttcacaaactgtggaaagattcgattctactgctgggatactgctggacaggagaagtttggtgg

SEQ ID NO: 34020 - DNA, 268 bp, Glycine max
  Clone ID: 700891831H1
caagcttctataatgaaaatctaatggccataagggtttgacagtgggggctgtcataggcattgttttaggttcagtactggtggctgctattgtgttccttgctcttgttttctgtatccgaaagccaaaggggaagaaaaagggtgcaagaaattttagtgggagccttcctcgtggagttattaatgtaactcctcagatgcaagagcagagggtaaaaagtgctgctgttgttacagatctcaagcctcgtccagcagaaaat

SEQ ID NO: 34021 - DNA, 263 bp, Glycine max
  Clone ID: 700891834H1
tcttccaaccacactactcactcactgcagatctcaattgcatcgctgtccatggctaccatcgttagcatcaaggcccgccagatcttcgacagtcgtggcaatccaactgtcgaggtggatttgacttgctccgatggtacttttgccagagctgctgttccaagtggtgcatccactgggatttatgaggcccttgaattgagagatggaggatctgactaccttggaaagggtgtatcaaaggctgttgacactgtgaa

SEQ ID NO: 34022 - DNA, 260 bp, Glycine max
  Clone ID: 700891835H1
cttctcaccgatgctagaatggaatttcgatgctcagtcatctcttttaccattctcttctctcttgctcttgcaggagagagccatgtccatgcatcgctacctgaggaagattattgggaagctgtttggccaaacactcccattcccactgcactgcgagagcttctaaagcctctccctgcaggtgttgaaatcgatgaactccctaagcaaattgatgatacacagtacccaaaaacattcttctataaagaaga

SEQ ID NO: 34023 - DNA, 261 bp, Glycine max
  Clone ID: 700891836H1
attgagcatgaaacatggcatctgaagcagaggttgcgtgtcaacaaaacgtgggagtgttggatgtgaagcattttccacataagggaagcgatgttcaccagatcggagacgcagatgctaattcgcctccgtgttttgaccgagttcgtgccactgagtcggtctccgccgagttactcacttcacaagaagatgttaagtctgcagacaggatctcagatgctgctcttgaatctgcggttctgcagtctatccctt

SEQ ID NO: 34024 - DNA, 229 bp, Glycine max
  Clone ID: 700891837H1
cgactcttcaagacgttggcatcgcattcgacatgatgcttctcgctcacaacgccggtggcaaagagaggaccgaagagaactggaagtggctgttcaaggaaaccggtttcgcgcgttacaacatcatcaagatcaacgctctcccttccatcattgaggcgtttccaatctgaagaagatgccactaccacaactgcatgtggtttttatgttgcatgtgttgttg

SEQ ID NO: 34025 - DNA, 260 bp, Glycine max
  Clone ID: 700891839H1
ctaaataacatgaagacgggggaagtgctatgagcgtaacaccttatttccggcccatgcacgagattaccttttcaacagttgacaagcctaaactccttagtcagttaactgcaatacttggtgagatgggactgaatattcaagaagctcatgcattttccaccactgatggattttctctggatgtctttgttgttgagggatggcctaatgaggaaactgaggagctgaaaggtgtgttggaaaaggaaattttc

SEQ ID NO: 34026 - DNA, 262 bp, Glycine max
  Clone ID: 700891840H1
cagccaagccagtaagcacaaccaaagcaacaccccaaatggcttcagcttctgttcccatggcgttgtcactgagctctgttaccaacaacaacaagccttcatccgaagccttcttcaggccactacccctacgccaaccaaagaggaccctcttcaccacgaaggcagtgtcaaactccaagcctcaaatcaatgcatctttgaaggagaaggcagttgccggactcacagcagcttctgtgacagcatctatggtggt

SEQ ID NO: 34027 - DNA, 109 bp, Glycine max
  Clone ID: 700891841H1
cataacgccgggtcgcttatactgtgcttctcaaagaacaccaagagactcccaaattcgtagattgttcgatcgaaacttctcaaaaccctagttccacacaacatac

SEQ ID NO: 34028 - DNA, 258 bp, Glycine max
  Clone ID: 700891842H1
ttcttgccgcattgaaagggcaatattggacaacgtgaatgttctttctttatctctcggtggtggcatttctgattattacagagacagtgtcgctattggagctttttcagcgatggagaaagggattttggtttcatgctccgctgggaactcgggtccgggtccctacagtctctccaatgtggctccatggatcactaccgtaggcgctggtacactggatcgtgacttccccgcatacgtggcgctcggaaa

SEQ ID NO: 34029 - DNA, 257 bp, Glycine max
  Clone ID: 700891843H1
cagaacatcgcttcgtctcaaatgatgtgggactggatgccgacaactgcaaggtcctcgtcaacattgagcagcagagccctgatattgctcagggtgtacacggccaccttaccaaaaaacctgaagaaattggtgctggtgaccagggtcacatgtttggctatgccactgatgaaacccctgaattgatgccattgagccatgttcttgcaacaaaactcggtgctcgtctcaccgaggttcgcaagaacggt

SEQ ID NO: 34030 - DNA, 260 bp, Glycine max
  Clone ID: 700891844H1
ggggttgagggactgagttaaggcttggactgcctggaaacggaggcactgaagaagtgctcatcaggaagaggggtttctctgagactgaaactggtcatgaagatgagtctgccaccactgtggatttgatgcttaatctttcttctaaggaggccgcaaccactgctgctgctgctgcagatccaactgataagcacaagactttgcctaaggagaagacccttctgccagcagatcctgctaagcctccagccaag

SEQ ID NO: 34031 - DNA, 261 bp, Glycine max
  Clone ID: 700891845H1
tagtgttgatgagctgataagcttagctcaatccttggatttggcataaacgagccatggatacagtacttgtcaaacaccaaattttaccgagctgatagggaaaaacttagaaccttgtttgtgttcctgggagaatgtttgaagttggttgtggctgataatgaagtgggaagtttaaaacaagccttggaaggtaaatatgtggagccagggcctggtggtgacccaataagaaatccaaaagtcttgccaacagga

SEQ ID NO: 34032 - DNA, 263 bp, Glycine max
  Clone ID: 700891846H1
tgggaggatgtattgttccactgagagagcttgatgatgtcattattcccccatccccagtaacgtttcctgaagatcatgagacctggaatgttcagttgtttagatccattgatggtggggctgcttttgggttcccggagactcctgaagatgctgccagagctggtcttattagtgggaaggataatatcattgatcgtagcattcaagatgcttatattaatgctattcgacgtgcaaagaacttcatctatattgaa

SEQ ID NO: 34033 - DNA, 266 bp, Glycine max
  Clone ID: 700891847H1
cttttgtagattatatagtttgatttctttgaagacaattgcaatttgcattatggggacaaaaatcatcccttctaaatacatcatgaaaacagatgatgatgcctttgttaggattgatgaagtgctttccagccttaaaggaaagccatcggaaggcctcttgtacggtctcatatcttctaaatcatctcctcagagggacgaaggcagcaagtggtacatcagtgaggaggaatggccccatgatacatacccaccatggg

SEQ ID NO: 34034 - DNA, 264 bp, Glycine max
  Clone ID: 700891850H1
caaaactccaattggttgttccaggaaagcaaggtagcaagatggactgcagaagagaacaaactgtttgaaaatgccttggcttactatgataaggacaccccagatagatggatgagggtggcagccatgattccagggaaaactgttggtgatgtgatcaaacagtacagagagcttgaggaagatgtgagtgtcattgaagcaggtttgatcccagttacctggctatactactgccagttctttcacattggagtgggt

SEQ ID NO: 34035 - DNA, 258 bp, Glycine max
  Clone ID: 700891851H1
gggttttctcttggtgggagtgggactagtctagcttctatggagttcttgtccatgcctcaggttcaggaggttgttctctctgcagacatgcaatgtgagaagtgccagaagagggttactgacattattgcaaaaatgaatgtagagacagagtctgtggtgattaacgttttggaaaagaaagtaacacttactttcagattaccatcaatagggaaagttaccactcggaaaattactcacatcaacaacagg

SEQ ID NO: 34036 - DNA, 258 bp, Glycine max
  Clone ID: 700891852H1
tgaaagggcaaagactgggtggatgagcatgagccgcaactggggtcagaactggcagtcaaacgctgttctggttggtcagtcactctccttcagggtcacagccagtgaccgacgcacctccacctcctggaacattgtacccgccaattggcaatttggtcaaacattcaccgccaaaaatttcagagtctaataattactgtgtttgatggtttttttgttaaattgtttatttaatttttataattttttttt

SEQ ID NO: 34037 - DNA, 257 bp, Glycine max
  Clone ID: 700891853H1
gtgcctggtcttacttatgctatgtgatgcgtaagtgtgtttgctctgctctccaacgtgaagaagattgtaattactaatagtgtatgtacggtttgcgggataaaacagtgatgagcttggtgtggagaatggaaaaaatagggggttagtgggagtggagtttgggaacaatgttatgcggcacctatctgtttgtacttatattggcttgcttttatgttgttatattgagtcatgtttccgtaatatttgtt

SEQ ID NO: 34038 - DNA, 257 bp, Glycine max
  Clone ID: 700891854H1
attagcgacggtggtaggttctagaaagtcctgggggcttacggaaaggtaaaatatattaggacttaccctccaaagatttgtcttccttgttgcagaagaaccgtgctttctaatcttgtaattttctgcgttgcttcgtggttaattcttcgtgttcttgtgatctttctgttggagtatttacaacactcctttgtaagtttaactaaagaggctaattaattttcaattggaccacagcagatggctgaggg

SEQ ID NO: 34039 - DNA, 257 bp, Glycine max
  Clone ID: 700891855H1
gaaaacaagtatagagtgaaagaatgggtgagaaaagcaagattttgatcataggaggcaccggctacatcggcaaacatatagtggaagcaagcgcaaaggctggaaatcccacttttgctttggtgagggaatccacactctctgacccctccaaggcacaactcatccacaattttgaggctttgggcgttaatttggtccgcggggatctgtacgatcatgagaagttggtgaaagctatcaagcaagtagat

SEQ ID NO: 34040 - DNA, 258 bp, Glycine max
  Clone ID: 700891856H1
agtaaggtcacctgccatgctaacttaaggaaggtagctcttgtaaacatttagatctatcttccttaagtaaggtgcacctgccatgctaacttaaggaagatagacctaaatgttaccaagagctacccagaacttctcaaggccttgggaaatatgttcaagtgcacatttggtgaatattcagaaagggaagggtacaatggatctgaatatgctccaccttatgctgacaaggatggggattggatgctggtt

SEQ ID NO: 34041 - DNA, 257 bp, Glycine max
  Clone ID: 700891857H1
actcatcaatgccagctcgcaagtattgctcaaatacttgcagaatcttttctaaagggtgtgttggctgcacatcgtggaggatatatggattcacagaaggaggaagggcctgctccattgctgtggagattttcggacttcttgaagtgggcagagctttgtccctctgaaccagaaattggacatgctttaatgcgtttggtgattactggacaagaaataccacatgcgtgtgaggttgagcttcttattct

SEQ ID NO: 34042 - DNA, 261 bp, Glycine max
  Clone ID: 700891828H1
gaggatctggtactattgtggtgtgggttgctttccttctagttcaagtcatcaagaatgatgtagaggcatgcagtccatggtattgggtgctttttggcttgcagtttccaattgcacttttggtgtttgggtatgaagcagtgaagttgtacaaggagcacaaaaggagaatgagcacaaggaacctagaatgcatctgtgaggcttctatagaatggactgctatgagccttgcattttgttcattgtgtggcattg

SEQ ID NO: 34043 - DNA, 268 bp, Glycine max
  Clone ID: 700891803H1
gcattttatagcctccctttcctgaactagttttaacatacaatctttcaagtacacctccccagcttccatttaagaatggagatcactagaataggccaatggttaagtcttctgatatgtgtactactattactgcagacagaaggggttcctgtgggaatcacttttgttgaaaatgcagtggcaaaaggggctgtttgtttggatgggagtcctccagcttaccacttccacaagggatctggagcagggattaacaactgga

SEQ ID NO: 34044 - DNA, 269 bp, Glycine max
  Clone ID: 700891804H1
ccaatatatccattctcctgtgtatttccctacctctcccttcaagatgcagatcttcgtcaagaccctcaccggcaagaccatcacccttgaggtggaaagctctgacaccatcgacaacgtcaaggccaagatccaggacaaggaaggaatccccccggaccagcaacgtctcattttcgccggaaagcaacttgaggacggccgtacccttgctgactacaacattcagaaggagagtactcttcacctcgtcctccgtctccgtg

SEQ ID NO: 34045 - DNA, 265 bp, Glycine max
  Clone ID: 700891806H1
caagcattaattcaaaacttaagttcattccttgtgttttgctttcttcctcaaaaccaaacatgtcgaacacatgcggcaactgcgactgcgctgacaagactagctgcaccaagggaaacagctatggtgttattgtagagactgagaagagttacatcgagactgttgtcatggatgttccagcagctgagcatgatgggaagtgcaagtgtggcactaactgcacttgcacggactgcacctgtggccattaaggaatatg

SEQ ID NO: 34046 - DNA, 264 bp, Glycine max
  Clone ID: 700891807H1
tctgttttgtctctgcgtttgcggctgaggattccgaacgagcgaccttcttcgtttctcgcaaagtttaagtcattatgggtaaggaaaagactcacatcaacattgtcgtcattggacatgtcgactctgggaagtcaactaccactggtcatttgatctacaagcttggaggtattgacaagcgtgtgattgagaggttcgagaaggaggctgctgagatgaacaagaggtcattcaagtatgcctgggtgcttgacaagc

SEQ ID NO: 34047 - DNA, 265 bp, Glycine max
  Clone ID: 700891808H1
cgaccctcaccgcctatgaaggcacttatctttgttttggagccaattacaccactagtgatgttctaccaaccttggaagaacaaggggtgcgccagctctattctaagggccctaatgttggtaagctttaacctttcaatgcttctgctgatccttgcttcctaatgttggtaagctttgtctgctctttgttgccataggttcggtattttatattatcattattatgttgcaaaatactcggtcacattttcatcctttt

SEQ ID NO: 34048 - DNA, 262 bp, Glycine max
  Clone ID: 700891809H1
ggcctccaatccagaccaagccctcggtgacaccgatccccgcgtcggtgaaacttgccgatacttggcggaggcaaatgtgcaagcaatgcagtttgataaagcagaggagctgtgtaagaagacactggagattcatcgggcacatagtgaaccggcttcgcttgaggaagctgcagataggaggctcatggcgctgatttgcgaggcgaagggagattacgaatcagcgttggagcatcttgtgcttgctagcatggct

SEQ ID NO: 34049 - DNA, 263 bp, Glycine max
  Clone ID: 700891811H1
cactaattagcaacaacacttcaatttatcagcatggcctccgttcagtgccacaaaacctgcaaagtgagctgccaacaggaaaaccagcacgcctcgtttgggcagaaagtttctgacttgttcaaagggcatcaacataatgaccacagctccaattatgccacccaaaccaaagtgctttcccagtcagggtcagggttaggccccttcaccaccaaaactcaaacacaatgcggttgcccccaaacacatctcagtac

SEQ ID NO: 34050 - DNA, 263 bp, Glycine max
  Clone ID: 700891812H1
cgagaagatatgagagtctataacaagaaacaggcggaaggtcctactggtggggatgaagaagaatctgagaagtctgtatctgaggtgaatgatgaagatgatgatgaggaaggcagtggcgaggaagaggatgacgattagagaatggactgataattgcatttatgtaggttctgatgattttgatcatctgttgtaggtggtctggtcatttcctgataaacatatttcttgcttccaaaaaatatttccctgctccc

SEQ ID NO: 34051 - DNA, 267 bp, Glycine max
  Clone ID: 700891813H1
ctagttttgttttggacatatcgcattacattacattagattggtggcaaagcaatggcatcgtcactacaagcagcagctactttcatgcaacccaccaagtttttgcagctaaagtctactcaggccatatctaaggcttttggtttggaacctgctggagttaataaggtcacatgctcccttcaggctgatcttaaggacttggctcacaagtgtgttgatgctaccaaaattgcaggctttgcccttgccacctctgctctc

SEQ ID NO: 34052 - DNA, 259 bp, Glycine max
  Clone ID: 700891814H1
gctcgcctcatttttgtattaagcataccatctgcagcatataatttttcattttgcatgccagcttcactgttccccttgttcttgccaacatcatcttcttccattgattcatcaacctcatccaggtttccaggaccttcaccttgttcagctggttaaatttgtgtctcgtcctctaacatcatctcatcaagagtgaggatgattatgaacaagtcaactccgaggtgcctatgaatgagtgatgggggaaatg

SEQ ID NO: 34053 - DNA, 272 bp, Glycine max
  Clone ID: 700891815H1
tgagtgagagacagaaaagatgagtgaagaaggtcctccaaagctatataccaacaagcccggaaaagcgcaactgaagcagtttcgggggcaacagaaatcgaacgggttctcctcgccggcggcgatggatacacacgcggctgctccgccaccgccgccaaaggaaccctttattcggcgctacaagttcgtttggcctgtgcttttggctgtgaatctcggtgtcggagcttatttgtttatgggcgacaagaagaaagatactggtg

SEQ ID NO: 34054 - DNA, 270 bp, Glycine max
  Clone ID: 700891816H1
ccgtgagagtgctaacatttgaagcgcctagctgaagaatttggtcctgagtgggctatgcaacacataattccacaggttttggagatgattagcaatcctcactatttgtatcgaatgaccatactccatgctatctctctacttgctcctgtgatgggctctgaaatcactcgttcagaattattgcctattgttattactgcatctaaagacagagtacccaacattaagttcaatgtggcaaaggtcttggagtcaatcttcccc

SEQ ID NO: 34055 - DNA, 261 bp, Glycine max
  Clone ID: 700891817H1
ctacttgatcctacctgaatgagaagtttgagttgattgcagaagacaaggagacccaatcactaattcttgaggttcttgataaagacattggacaagataagcgattgggaatagcacagttaccccttattgatctagaaatacaaactgaaaaggagattgaattgaggctgctgccctcacttgatacactgaaggtgaaagataagaaggatcgagggaacttaaacagtaaaggtcatgtattatcagtttaac

SEQ ID NO: 34056 - DNA, 269 bp, Glycine max
  Clone ID: 700891818H1
caccaatgaacaccatctgcagcattgaacaccaattcaacgccaatgggtcaggaagaggaaaaatcccaagaaaacaaagtggaggagaaaaaagtagaagaagaagaaaagaaagaagaagagaaaaaatcagatgagaagaaattcaaggagaaatctgcgccgccagaaatcgtgcttaaagtgttcatgcattgtgaaggttgtgctcgcaaggttcgtcgctccctacaaaggattcccaggggtcgaagatatactcacag

SEQ ID NO: 34057 - DNA, 268 bp, Glycine max
  Clone ID: 700891819H1
gttttcattacagtaacttctaaaaggaaaaaacattaaaaaagaaattattcaaacaaaaggacatttgctgaactgttatccaaactataagtatagtaattctttatctcaattaaccttcatctctctcacacactcctctcactagctctggtcactgtcttaggaaccctagaacagcaacccagataaactattccaagacacacaccacagaaagagagaatcaaaacaattaagccttggatctgcatagcaaaggcaa

SEQ ID NO: 34058 - DNA, 265 bp, Glycine max
  Clone ID: 700891820H1
tccacatcaattataagttttacacatatgaaagcttgaagcaagtgatgccatctagtattcaacccaactcgtttaagactgtagtgtgtggaggattagctggatctacggctgctttattcacgactccttttgatgtgatcaagactagattacagacacagattcctgggtctgcaaatcaatatgatagtgtgctccatgccctttacaaaattagtaagagtgaaggattgaagggcctgtacagggggttgattcc

SEQ ID NO: 34059 - DNA, 264 bp, Glycine max
  Clone ID: 700891821H1
gttagtgatccatcgaaccaatcaaaggttaccccatgccccagagttggatttaaatctagttttcattgttatggtctccgtagttaacaaattttatcagcatgttacattattactccattctacgttaggttgttgacgaattgagttattctgtcatcagttgaaattgagttgagagaatatccaaatcgtttggcaatctggtggtggagggggtatcaaggtaggaaaattgtactttgattaggtagttggtga

SEQ ID NO: 34060 - DNA, 262 bp, Glycine max
  Clone ID: 700891822H1
gtatggcatatgcaacacttcaattttttatattctacaactttgtgatgaattgagtttcttctactttgtgagaaacttttagtttcaacttcagagaaggtgagaatggtctaagaagaagccttgcatggcgagccaaagaataggagaaacgggtttgtctgagtcaggaccttcaagtcaccatatcccttatggagttcttcatgggattaatacttcatcatcagccctaatcaatcaagggtcagcttttgat

SEQ ID NO: 34061 - DNA, 263 bp, Glycine max
  Clone ID: 700891823H1
accctctgagtagtatggccaaggacatcaacctaagctctctgctcttgctgttatgcttcaccactcttaccgaggctctatggttaaccatccccagcaagggaaccaagtgcatgtccgaggaaatccagacacacgtcgtcgttttagcagattactatgttgtagccgatgatgtccagggtcaccaacttcaaactatttctgccaaggtgacatccccttatggaaataatcttcaccagaatgaaaatgttact

SEQ ID NO: 34062 - DNA, 261 bp, Glycine max
  Clone ID: 700891824H1
cgttctcttcgtcttatcttcttcttttgttgtttgtgtgtttgttttttctctcacctgtaaatgtcttgctgcggtggtaactgtggttgcggaagcgcctgcaagtgcggcaacggctgcggaggctgcaagatgtacccagacttgagctacaccgagtcaaccaccaccgagaccttggtcatgggagtggcaccagttaaggctcaattcgagagtgctgacatgggtgttcccgctgagaacgatggctgcaaa

SEQ ID NO: 34063 - DNA, 263 bp, Glycine max
  Clone ID: 700891825H1
gattctacaacgagtcaaggggaagatggtgagcgaggtccctgagcacgtgaagccgatgctgtccctgagctacatcaagaaagcgattcagagaggcttcgacaattaccatgccaagtacattgaaaccagttcccctgatcccatcttccatgtctgctacggcggcatgatcttctcctacctcgtcgctctcccccacgagcgccgccacctcctccacgcccaggagcacgctcagcagcatcactgattccatc

SEQ ID NO: 34064 - DNA, 259 bp, Glycine max
  Clone ID: 700891826H1
tcgggccgatgctgcgggtaagaccaccattctgtacaagctcaagcttggagagattgtcaccaccattcccaccattgggtttaatgtggaaactgtggaatataagaacatcagcttcactgtctgggatgttggaggtcaggacaagatccgtcctttgtggagacattacttccaaaatacacaaggacttatttttgtggttgatagcaatgacagggaccgagttgttgaagctagagatgagttgcataga

SEQ ID NO: 34065 - DNA, 261 bp, Glycine max
  Clone ID: 700891827H1
tgcaatgttgctccgtgaaaagcctgaacagaagaacaatgtttatgtgtaactagcgtcacagtattttctcaaagataagagctgtagagccataagcgaattctacggaatttatattttgtgatgtaaaagtgagctgcaatgggggaaagaaaagaagacagactattatttatgtgtgtgtatcaatgttgtggtttattattaggagccagggttgcttcctgttttgccttgtcttgcgctatgagctagagc

SEQ ID NO: 34066 - DNA, 272 bp, Glycine max
  Clone ID: 700891802H1
gaggttgcataactgaacaacaaagcaaccctatgtcgaaggtggtttgtgtcaccggagccagtggcgccattggatcataggtggccctcctccaccaccagcgtggttatacggaccatgccaccgtccaagacatcaaggatgaaaatgagacgaaacatttggaggaaatggaaggagcaaagagtcgtctccatttttttgaaatggatcttcttgacatcgactccattgccgctgccataaaaggttgctccggcgtaatccac

SEQ ID NO: 34067 - DNA, 229 bp, Glycine max
  Clone ID: 700891761H1
ctcgagccgtccggaccatgtggttgtcattaagtatgtaccttacgttggggacagcaaacgggccatggatgagtactcttctgagatattcatgggcggaaagaacacaattgtgttgcacaacacttgtgaggattcactgttagctgctcctattatcttggacttggtccttcttgctgagcttagcactcgaatcgagtttaaagctgaaaatgagggaaag

SEQ ID NO: 34068 - DNA, 235 bp, Glycine max
  Clone ID: 700891762H1
aaggcgttgccattctcatcctcttctttctctctctaccattgccatggatccctacaagcaccggccttccagcgccttcaattctcccttctggactacaaattctgttgctcctatttggaacaacaactcctctttaaccgttggagctagaggtccaattctgctggaggattatcatcttgtggagaagcttgcaaattttgatagggaacgtatcccagaacgtgtt

SEQ ID NO: 34069 - DNA, 233 bp, Glycine max
  Clone ID: 700891763H1
cattgccttatatcgacgacgactacgcagaccccagagtcaaactggaggttgaccgtctcgtggaggatgagatgcgtcgcagcaccaagaagcccaccgatttcctcaatgatttccctcctcttcccaactccattttccagaactacccaatgattgccagagagtacgaacgtgtgagagctggaaggcctcccgttgctcttgatagatcgcgctacgatttggaa

SEQ ID NO: 34070 - DNA, 236 bp, Glycine max
  Clone ID: 700891766H1
aatcaacaaagctgagatccttttcccaggagttggttgctttctgattgcagtttttctaggttctgctgttcattcatctaatgctgctgataataaagcaaagctcaacaatttcaccggtgattataaaaatggagacacctctttgaaggatggagatatagttaaatcaaaagacctcgagggtggaagtagttctgcagacaatgttgaagcaggaactgcagttttcc

SEQ ID NO: 34071 - DNA, 232 bp, Glycine max
  Clone ID: 700891767H1
ggccagatagatttcgacctttgtacttcatttatttaaattttgaatattgtgtattacttttgatgaatttagttaatttttagttcgcgtaatgattttacatgaacgatttatttagttaatttagtttgcgtaaggattttacatgaacgatttatttagttaatttagtttgcgtaaggattttacatgaacgatttagtgagttaatttttagtttgcgtaagta

SEQ ID NO: 34072 - DNA, 228 bp, Glycine max
  Clone ID: 700891768H1
ctaattcttcaccaccatcacaacaacttcaccaacactaactcaacccgacacacacccacacaaaaaaaaatgtccctcctttcctccggtggcttcttcggccgcagaagaaacgacccgccaccccaccaacccacgtgggaccactaccaggcccaggaccatcaccaccctctgggagtttcccagccccaccacccaccccccttcatgtccttccccagt

SEQ ID NO: 34073 - DNA, 229 bp, Glycine max
  Clone ID: 700891769H1
gaccgatgaagaggttgatgagatgattcgcgaggccgatgttgatggcgatggccaaataaactacgaggagttcgttaaggtgacgatggccaagtgatcatcacattatggccacaaaaacctaaatgaagaaatgttgattaaaaggaaacgacaaaaaaaggggtaggaggaaggccaagggtttgggtggtataacagtgatgtagtagtccttgacctttct

SEQ ID NO: 34074 - DNA, 224 bp, Glycine max
  Clone ID: 700891771H1
ggagctcatggaggtggatacggtggcggcgcgggtgccggtggaggaggagggtatggggctggtggagcacatggtggtggttttggaggaggtggtggaagtggtggtggccatggtggctatgttccctaagaactactcttcaatgcacaatagatgtgcaagtgtcccctttcgcgtatcaagaataataagtatgctattaataacaggatcataat

SEQ ID NO: 34075 - DNA, 228 bp, Glycine max
  Clone ID: 700891772H1
ggcatcagagatagcgaagaagttgaatctgcaacctcacccagaaggtgggttttacgtggagacattccgagaccattccgtccagctttcgacctctcagctcccccccgaatacaaagtggatcgccctgtatcgacctccatctattttctcgttccttctgggagtgtgtctcgcctccatcgcataccctgcgccgaaacctggcatcattacatcggcga

SEQ ID NO: 34076 - DNA, 228 bp, Glycine max
  Clone ID: 700891777H1
ggaataattctaaaggtttaacataactggaaaacatgtagtagcagttgactcaagtacaaaacccttcttgtctcggtcgttgaattacccttaatttctttgtgttccttccaatcacatggcatagaatttgaggttttccacagaagaagatctagctaggaagaagagacgaagcaaaagactagttagtgagtgaaaattcaagttggaaccatccaaaag

SEQ ID NO: 34077 - DNA, 228 bp, Glycine max
  Clone ID: 700891778H1
gcagaagagcgtcgcagttgtaaccctaatcagaagaagcgcagttcaagcgagtgacagccaccagccatgggtcgtatgcacagccgcggtaagggtatatcctcttctgctttgccctacaaaaggacacctcctagctggctcaagatctcttcgcaagatgtcgaagaaaatatctgcaagtttgcgaagaaaggtttgaccccgtctcagattggtgtcatt

SEQ ID NO: 34078 - DNA, 225 bp, Glycine max
  Clone ID: 700891779H1
gaatattagaagttgctatagctatagacacataaaatttggggataaggaaagatgagaaaccgtatggaaagattagtagttccatgctctttcagctgtgcttcccattcaagtgtggaattaggtgcacccaaaggaccaaaagaagattcaaaaggcactattgtttcaagaagacaagaaggacaagatagatcaatcatcaaggctaaaatgaagaga

SEQ ID NO: 34079 - DNA, 201 bp, Glycine max
  Clone ID: 700891781H1
tgcatagatcacctttcctttattcccacagaaaaaaacaccacctttctttttccgactaaaggttcgccggaaaatgcctctatcctccacttcctcctccgccgtaaactccgccgtctccggcgagatcatgctctttggcgttagaatcgtggtgaactccatgcggaagaatgtgcgtctgaataacctctcgcc

SEQ ID NO: 34080 - DNA, 232 bp, Glycine max
  Clone ID: 700891782H1
caaatcatcagtttcagcgaccatggcttccaactccgtccgagttgccgccgctcagatgacatccatcagcgacctcgctgccaatttggccacttgctctcgtctcatcaaagaagcagcatcagctggagccaaattgctttgctttccggaggccttttcttacgtgggtactaaggatggcgacagtgttcgtgttgctgaaccattggatggaccaattatgagc

SEQ ID NO: 34081 - DNA, 214 bp, Glycine max
  Clone ID: 700891784H1
cttggctacaatccctgtcactggcaccggcattaaccctgcaaggagtttcggaccagctgtcgatcttcaacaacgacaaagcctgggacgaccaatggatttactgggttggaccgtttgttggagctgcggtggctgcaatctaccatcaatacattcttagaggttctgcaatcaaagctcttggatccttcaggagcaacgcttaatt

SEQ ID NO: 34082 - DNA, 226 bp, Glycine max
  Clone ID: 700891786H1
gcgttcctgcggaagcgaggaacgctcgcttcacgtttggtgattgttgatcaatcatgactaagaatttggaatctcttcccttactgtgaatatgccaaaccttatttatttttgtgtaaatactaaatactaaatactgtaacacatgacattagttttttttttttttgtcacgttttagatttgggaaattagctctgtgcttgtttttatcgccggctag

SEQ ID NO: 34083 - DNA, 217 bp, Glycine max
  Clone ID: 700891787H1
ggcattgtgatgcccagactcttccctgtcacgactgatgtggcatcattcttcagactattcactgtagttcctgtgtttgtgactgcgtatatctgccactacaatgttcacagcatagacaatgaacttgaggactcctcacagatgcaaggggttgtacaaaccgcccttgttctatgctcttcagtgtatgtaatgataagcttctttgggt

SEQ ID NO: 34084 - DNA, 226 bp, Glycine max
  Clone ID: 700891788H1
ttaacattattcattccacactatggcctcttcctggaaccaactctcattctttttgctcttggtgcttgttatctcttcccaaattcaagccagagaaggcaagctcttcagcttattctcccatttcagaaccatctataatgtcaaagaccctcttgacaaaacaaatgctgaatctccagcactaccaccaggaccaacaccaaaaccagcctcagcacca

SEQ ID NO: 34085 - DNA, 222 bp, Glycine max
  Clone ID: 700891789H1
attggctgaaaaggagacagacaagatattgggagtgcacattatggcgcccaatgcaggagagcttattcatgaagctgcaatagcactacagtatgatgcatcaagtgaggacattgcacgtgtgtgccatgcacatccaacaatgagcgaggctgtgaaagaagccgcaatggccacttatgacaagcccattcacatctaaagagacggttgctactt

SEQ ID NO: 34086 - DNA, 218 bp, Glycine max
  Clone ID: 700891790H1
ctgattggttctgtcagaattgggactttggattgagaggttttagcccttccttttgcagcatattttgggttttgatgaatccattgacattccttcgttattggggaaggaatgtgagctactgtttcaatgattgcagggatattgagggtttcatagaatcctgtgttatgtttatgataggttgtggttttttactttacttgctgctcttg

SEQ ID NO: 34087 - DNA, 227 bp, Glycine max
  Clone ID: 700891791H1
tgatgtctgaggcattggaagaggttgttccttcaatgaaaggagggtgtgaagaagaagggttgaacctggaggctactgagctgaggcttgggttgccagggtgtgagtcaccagagagggagggtgtgtttacagaatgtggtggtgtctggggccaaaaggggtttctctgatgccattgatggaaactggaatggtggaggatctgaaaaagatgccgctgc

SEQ ID NO: 34088 - DNA, 226 bp, Glycine max
  Clone ID: 700891792H1
gctgctttaaatagtcaatgtgggtactcctcagacacccttgaaccaaaacaagacaaggctttgagccatgtggaatcacattcaccaagctcatcgtttggggaatactttcagaaaagctgcgatgacagaaattttgataaccaaaggtggagcagatttcagaaagataattttggtttctggccacaaaatcaatgggtggctttctccacagaatcat

SEQ ID NO: 34089 - DNA, 226 bp, Glycine max
  Clone ID: 700891793H1
tgtcaagattgatgccttcaagcgcgacttcctctctgcatgcaactcctcaccaacgctgtggaggcttcaaggcagcaactacaagccttcagatcaaaccaaggaacgaggccagttctggaagaattcatgccaatattaaagcatccaaactctcaagaaagcgctgaaaaaacatcaaacatatctgacaaggcgaattggatgacatcagctcaactat

SEQ ID NO: 34090 - DNA, 242 bp, Glycine max
  Clone ID: 700891794H1
ctttagcaaattcgaattcccaattcccaattcgaaacccttattcctttcaaagaaccaaattgagtgatcgtgatggcaccaaaggcagagaagaagccagcggagaagaagcccgcggaggagaagaagtcgacggtgggagacaaggctccggcggagaagaagccaaaggccggaaagaagcttccgaaggagggaggcgccggcggagaagggaagaagaagaagagaaacaagaa

SEQ ID NO: 34091 - DNA, 217 bp, Glycine max
  Clone ID: 700891795H1
gttggcttcaccaaactgtatcttcgaacagggcagattggggcactggaggacaggagacaacatcttttgcagggaatacttggaattcaaaaaagctttcgtggttatcaagctcgttgtcattatcatgaacttaagaatggagtgactattttacaatcatttgttcgcggagaaattgcaagaaggaaatatggtgttatggtgaagtctc

SEQ ID NO: 34092 - DNA, 232 bp, Glycine max
  Clone ID: 700891796H1
gaaaatagaggaggtgccaaaattgtgcattgtagctgaatgagcaagtagtggaaaagctaaaaagcacattctgagaaagaaagatatgggtgcatactgcaacggcaacgtttcgttgtcaccatcctacgacgtcgcttcagcccaagatcccaggttctgcaagcacgttcacgacaacgtccatggcaatatttatctcgattcccttagtttgaagttcattgac

SEQ ID NO: 34093 - DNA, 232 bp, Glycine max
  Clone ID: 700891760H1
ctcctgcctcctataaaagccatttggctctcttccgtttgaagtaaaaagccacccaaccaaaagcccatcaactacattgctatattctgctactcctgagttcaacacacacacatatacatccatggcatcatctcaagcagacctcagaaagattgctgtagaaagcttcgatttgatagacaagctctacggtcgaaggggccccgccagcaatgatgcattcccc

SEQ ID NO: 34094 - DNA, 274 bp, Glycine max
  Clone ID: 700891801H1
gtcaatcattattcctaaccttctttctcttccaattccaaatcacaacccttcgttttccctctctagaatcttcttctccattcaattcctactccttttttcctctctgtccctctctctctccctctctcatggcttccgatctcgaagcaaaagccaaagaggccttcgtcgaagaccacttcgaactcgccgttgaccttctctctcaggccattcatctcgaacccaacaaagccgaattctacgccgaccgcgcccaagccaacat

SEQ ID NO: 34095 - DNA, 232 bp, Glycine max
  Clone ID: 700891724H1
ctcttttctctggtggttatggaatatcagaagttaaattggacaggagggtattattaggaaggctcagaagtcacaatggatgaagaggcagacctattattagtatttacattgaattatttgtttaaaatgctgatttttattgttctttcatgtggctgtgttatgacccctctagtttttggaaagtactctagggaaatttccatgtattttgagaggaatgtta

SEQ ID NO: 34096 - DNA, 235 bp, Glycine max
  Clone ID: 700891725H1
ctctgatgatgaggatgaggaagagaagaaggatgaggagggtaaggtggaggatgttgacgaagagaaggagaaggaagaaaaaaagaaaaagaagattaaggaagtgtcacatgaatggtccttggtgaacaagcagaagcccatttggatgagaaagcctgaggagatcacaaaggaggagtattctgctttctacaagagtctcaccaatgactgggaagagcatttggct

SEQ ID NO: 34097 - DNA, 232 bp, Glycine max
  Clone ID: 700891726H1
ggtaaaagaaagtaaagagaaagagagagagagagagagagagagagtcataatcataagtcatacctgatttccattctctctgagagacagtgcgagattggcataatggcgaaaaaagccgttttgatcggaataaactacccgggaacaaaggcggagctgaaaggatgcataaacgacgtgtggaggatgcaccgctgcctcatcgatcgatacggtttctccgaag

SEQ ID NO: 34098 - DNA, 237 bp, Glycine max
  Clone ID: 700891728H1
cacccacaagtcacacccacttggttccttcctccaccccattatttttttctctttttttgatccaaacatgtcctccacacacccaaaaaacccagcaacgacaacaacatccactactctcatcgtgctctcaattatactcctttgttttccgacaaccgcaaaaaccgacaaccctccatgcccttatccgtgttacccaccacccattggaacggttactcccaccactcc

SEQ ID NO: 34099 - DNA, 232 bp, Glycine max
  Clone ID: 700891729H1
gggctgcaatgtccaatttgtcaacgtctcacatgcttattgctgctgccactgaggatgtccaagttcgcctttgtgatattgcttccggggcttttgctcacactttgtccggtcaccgtgatggagttatgactgttgaatggtctaattcaagtgaatgggtcttggttactgggggatgtgatggtgcaatacgattttgggacatcagacgcgctggctgtttcca

SEQ ID NO: 34100 - DNA, 238 bp, Glycine max
  Clone ID: 700891731H1
atcctatattctcttcttggatcatcttggttaagctgcagatcagaatagaataataataaataaagataagatggagactcatttggttttcttgcttggtttgatcttcactctagttgccggcgttggagcccaagcccaaggcccatccacctctcctgcgcctcccacaccccaagcatctcgacctcccgtccagtcttctccgccacctgttccctcttcacctccaccc

SEQ ID NO: 34101 - DNA, 242 bp, Glycine max
  Clone ID: 700891732H1
ttccaccccacgacgaacctgcgcatctctctctctctcgcgcgcgccgcttttctctcagccagccctgcagggttttgcataatttagctctttttctccgcccacaatgggtaaagctaaaaagggaccaaagtttgctgttatgaagaagattgtcacttccaaagcaatcaaaagctacaaagaagaggttcggaacccagaaaagaagaatcttatgaaggaaaagttacccagaa

SEQ ID NO: 34102 - DNA, 243 bp, Glycine max
  Clone ID: 700891733H1
tgtcgaaccgattcgggtcgagcctgatgaatgtgtgtttggggctgggatatcagtaacttgaacctggcagatgccatggccagggccaaggtgtttgatatcgacctgcagaaacagttgaggccttacatggaatctatggttccactccccggaatctatgaccccgatttcattgctgccaaccaaggagaccgtgccaacaacgtgatcaagggcacaaagacagaacaagttcaa

SEQ ID NO: 34103 - DNA, 238 bp, Glycine max
  Clone ID: 700891734H1
cagacatgcaagatgccgggtcaagcaagaatccatttatagatcatgatgattcttctggtagcaacctttctactaccaaacctcaaataggtagccctaatcctagtcctccttcgaatggggaatctgttccttcaaccaggtcgccaactaaagattcgattgatgggggtgttgatttgaatcaaagagcagtagcagtaccatcactctttgaagaagatgttgaatttgt

SEQ ID NO: 34104 - DNA, 110 bp, Glycine max
  Clone ID: 700891735H1
ctcctgaaccctaaaatgaagacacaacaacaatctctcttctcagcctcaattttactagttatagcacttataacccttttccacaccacttcagcccccgtcacacc

SEQ ID NO: 34105 - DNA, 211 bp, Glycine max
  Clone ID: 700891736H1
tggatttaggacatggaataatttaagaggaaaattttggatttcttttattttttggtgaaatttgacattttagttggtgaggttggagcaaaagaatgttgaaaatggtttatttaattcaacttgtgaagattttgagtgaaaaaggagaatttgagagttttaagtaaaaggaaagtgacatagggacttaattgacataattaaa

SEQ ID NO: 34106 - DNA, 109 bp, Glycine max
  Clone ID: 700891737H1
cccatacccctcaaaagaaaaagctggcgattctccaattctcctcttgtttcgtgtcctttactactccgaatcctcacaacactctctgccgtacacactactaacc

SEQ ID NO: 34107 - DNA, 234 bp, Glycine max
  Clone ID: 700891738H1
agatgaagtgctacatcttatagatgaacgaactcaagctaggattaataaggatttcgccaaaagtgataagatgagggctgatttggctacaaagggcattgcacttatggatgtgggcaacgaaataacatggagaccatgcatcccgagtgagccacttgttgcagaagttgttcagagacctatagttgaggaaaagcagtctactccagtgaatcaaaaagtggaaga

SEQ ID NO: 34108 - DNA, 230 bp, Glycine max
  Clone ID: 700891742H1
gatgactgtcattaaggaagagcaacaaccaaaccaaatagctggccacaaagaacttggtcacaaaagtctccttcagagcgatgcactctatcagtatatacttgaaaccagtgtgtacccaagagagcatgagagcttgaaggagctacgagagttgacggaaaaacacccttggaacctgatggctacaccacctgacgaaggacaacttctaggcatgctcctta

SEQ ID NO: 34109 - DNA, 227 bp, Glycine max
  Clone ID: 700891743H1
caattgaccaattagcattggatttgaaacctggatcagagaccttgtccttgacatggtttggaaggtgttttgacctcttgcccttaatcaacaaggcttttgcaaaacttgttgcggatattgactacccaatgagtaaatgggagattttttccattgaagggtactacttgagctacaccttgagtttgctagagcttctgaattccatttcttcttgtttt

SEQ ID NO: 34110 - DNA, 233 bp, Glycine max
  Clone ID: 700891744H1
cttaaagcctaactcaaccccacaaaatcagtttgtaaggtgagacgtgttcaagtcttatagggactacattggtcatatctctagtcaatgtgggatctcaacatcagcatacatatccttttttgcttaaatgcatgcaatacaactcccttgcattacagtgcaaaatacttcaaagaatccctctagggactgctatgtaatgacaagctactgattttttttttcct

SEQ ID NO: 34111 - DNA, 233 bp, Glycine max
  Clone ID: 700891745H1
tacttggtggaattcttcctgcgttacgacacgtttacgttcgattttaaaccagttgttctgggtcccgatgttaccatcaagtcactcgccaaggcttcttccttctgatcctcctcatcacctactctacctcaaacttaaaatcaatcttctttttaatgtgtattagttaattaataattaaataaaacaaagtaaatatatatattaaaagtaggatgtgcactgga

SEQ ID NO: 34112 - DNA, 234 bp, Glycine max
  Clone ID: 700891746H1
cacaatacccataaaccaaagccccaacccgactctcttctcatttatcctccctaaagcttcaacctttgggacgcccctcccactttgttttcttctctttcttcattttccttttcggtggggattaggataaccctcctctatttttcaactctaattttgatcatcatcaccttcacccacttcactcttacaaggaagaacaaccctttctctctctctctctctgtt

SEQ ID NO: 34113 - DNA, 238 bp, Glycine max
  Clone ID: 700891748H1
ctagccgcagcagcctcaggaggagaataaggatgtctcacaggacgttcgagcacccaaggcacgggtcactgggatttctccccaggaagcgtgctgctcgtcacaggggaaaagtgaaggcattccccaaggatgacccatccaaggcacccaagctcactgcattcttgggttacaaggctggtatgacggccattgttagagaggtcgagaagccaggatcaaagcttcacaa

SEQ ID NO: 34114 - DNA, 215 bp, Glycine max
  Clone ID: 700891750H1
aattaaccttttttaattattttattttttgtgatgatttggtttctttttaattttactggtgctatggaattaattaactaattgtcagtttgatgatgtgtatttattatttatgtatgtatgtatgttgtggaaggagagtttatgaatgtgaatggtgactgtttttgtgttgattctacgttaagaaagaaactttggtttagcagaac

SEQ ID NO: 34115 - DNA, 233 bp, Glycine max
  Clone ID: 700891751H1
cttcgaatgctttgctttctccaaagggtgtgaactttgaagtgcaagctttaatgggcataaaagcttctcttgtggatcctcatggtattctagataattgggatggggatgcagttgatccatgcagctggaacatggtcacatgttcccctgagaatcttgttattagcctgggcattcccagtcaaaatttgtctggcactctatctccaagcataggaaacctaaca

SEQ ID NO: 34116 - DNA, 232 bp, Glycine max
  Clone ID: 700891753H1
gaaaaagaaaaaagcgatcatagtttcacttcggccttatccagtttagggtttcggttctctaccctatctttcacgtatcgaaaccttaaatttacgatcaggtctgagcaatctggttggtagaacctttggtcttagtgagtcaagttttatgtctgaattagacgatcaaattcctactgccttcgatccttttgctgatgcaaatgctgatgactcgggtgctggg

SEQ ID NO: 34117 - DNA, 232 bp, Glycine max
  Clone ID: 700891754H1
aatcgatctggtggtctctacccttggggatggaggcaaagagcaataataccacagcacaccgtgcgaaactctaacggggcaagtgagaacacaaatttgaaggtgtaagtcactcatggagtaataatactatgtatgaaaatgtgaaacgtttgaacagttgttgcggttgttatgttgtcttcttcattatcgtatattatcgtgcatgggtgtacgtagctcagta

SEQ ID NO: 34118 - DNA, 230 bp, Glycine max
  Clone ID: 700891723H1
ctgactctcacacatcgttttatccgaaagcaagcattatcagaagcagaaagaaagaataagaggttgcagcaacaatggcagccatggctgcgcttcagagctcaatggtcggtctctccctctcctccaactctttcttaggccaacgcctttctcccatcaccctcccctctcttcttccgggtaagtcaacagagaagcaatgtcctattgtaatgaggcttaaa

SEQ ID NO: 34119 - DNA, 230 bp, Glycine max
  Clone ID: 700891756H1
attaattgcaagaatggcacttcgttgcttggtgatgtccctttctgttctcttcactcttggtcttgcgagagaaagccatgccagagacgaagatttttggcatgctgtttggccaaacactcccattccaagttcattgcgagatcttctaaagcctggccctgcaagtgttgaaatcgatgatcaccctatgcaaattgaagaaacacagtacccgaaaaccttct

SEQ ID NO: 34120 - DNA, 228 bp, Glycine max
  Clone ID: 700891757H1
gcaaaggcacatcaaatagtgctagggagcaattgggggatcagaaacatttttcagtctcttgtggccatcttaaccactattctagttgtcgctgccatttatctaacacaggagggagaacaatggtctaatgaaaggaacaagttacattcattatcaaaatgtaacttgttttctggcaagtgggtttttgataatgaatcatatccactctacaaggagcat

SEQ ID NO: 34121 - DNA, 226 bp, Glycine max
  Clone ID: 700891758H1
ctgagtttaacatcctctctgggacttcaatggcttgtcctcatgtttctggtttggctgctttgttgaaagcagcacatcctgattggagtcctgctgccattaggtctgctttgatgaccactgcttacactgtggacaacaagggtgatcccatgttggatgagtccactgggaatgtttcatcagtgtttgattatggtgctggccatgttcatccagtgaa

SEQ ID NO: 34122 - DNA, 228 bp, Glycine max
  Clone ID: 700891759H1
gttgattgctcacccaaacatttctgatgctgccgttgtaggtatgaaagatgaagctgcaggagaaattccagttgcatttgttgtaaggtcaaatggttctgagattaccgaggatgaaataaagacatacatttcacaacaggtggtattttacaagagaataggtagagttttcttcacggactctattcctaaagcaccctccggcaaaattctgcgaaaggt

SEQ ID NO: 34123 - DNA, 225 bp, Glycine max
  Clone ID: 700891683H1
ggaagtacgtcggaaactcagatctgcaactcgagcgcgtgaacgtctactacaatgaagcctcgtgcgggcgcttcgtgccacgcgcggtgctgatggacctggagcccggaaccatggacagcgtgcggaccgggccgtacgggcagatcttccgccccgacaacttcgtgttcgggcagtccggcgccggcaacaactgggctaaggggcactacaccgagg

SEQ ID NO: 34124 - DNA, 223 bp, Glycine max
  Clone ID: 700891684H1
ggacaatgaaaattgctcgagtaagagtgacaataccaccaaccctgttcgccttacccgcatcaagcttctcaaaccaactgatacccttatgcttggccaagtttatagactaatctcagctcaagaggttatgaagggtctttgggaaaagaaacaagcaaagatgaagagaaacttgtcggaatcagcacaaaagccaaatctgatgaaggaaaggaca

SEQ ID NO: 34125 - DNA, 220 bp, Glycine max
  Clone ID: 700891686H1
ttccattctctctgtgtatttccctacctctcccttcaagatgcagatcttcgtcaagaccctcaccggcaagaccatcacccttgaggtggaaagctctgacaccatcgacaacgtcaaggccaagatccaggacaaggaaggaatccccccggaccagcaacgtctcattttcgccggaaagcaacttgaggacggccgtacccttgctgactacaac

SEQ ID NO: 34126 - DNA, 220 bp, Glycine max
  Clone ID: 700891687H1
ctcgagccgctcgagccgattggttttggttgtggggaggacaatgaaggtgatggatttgaacaagctacagggctggttggtcttggacgtggtcctttgtctttggtttctcaactcaaggaacaaagattttcttattgtttgaccccaattgatgacacaaaagaaagtgttttgttgttggggtctttgggtaaagtgaaagatgcaaaagaag

SEQ ID NO: 34127 - DNA, 217 bp, Glycine max
  Clone ID: 700891691H1
gaagttattgctaatgggataagtgtgaatgtgacgctgatattctctcttgcaagatatgaagctgtaattgatgcatacttggatggtcttgaggcatctgagttaaatgacctctctagagttacaagtgttgcctctttcttcgtcagtagagtggacaccctcattgacaaggcccttgagaaaattggcaccccagtggcccttaatctac

SEQ ID NO: 34128 - DNA, 222 bp, Glycine max
  Clone ID: 700891692H1
gagagcccgatatttatttctcctctcccaatcttgctatctaaatccagagttgttgagagaaaggtttttggtaagtttgatgagagtaccttgcttggtaccactcgattgcatctccattttcttctctctggctttgacagtgttttgataattgtcattgccatatacttcctgttccggccttgcatgcttgtccttagtactcctctgggaacg

SEQ ID NO: 34129 - DNA, 223 bp, Glycine max
  Clone ID: 700891693H1
gttagctcgacattttctctcagatctcaccgcaccttccaagtcctgcccattcttcctctccacctcttcgcctagcaactcagcgctgcccctctactccaaatcttttgcgagatcaacccttaagtgacaagaacgtcattattggcgtcttcgtcttccttgtccatggccctcttcatcgtccttgtcgacggcaaaggagagagaatgggagaat

SEQ ID NO: 34130 - DNA, 225 bp, Glycine max
  Clone ID: 700891696H1
cttttccgtttcttgcgattcgacgatggccgatcaaaagctttcagaaccggcgcttaaacgtgagcagcttgatgaattcgtgagtagtctatattttgaacaacgaattcttgaactccgacttcttcaagacctcgagaacaatgatgaatgtaggaaaaatgggagcctgaaaaggttaaatgaccagagtgatgtctgtggatttagaagttgcttcaa

SEQ ID NO: 34131 - DNA, 248 bp, Glycine max
  Clone ID: 700891701H1
gattgtttgttgttgtaactcgttcttcttcttttgttgttctgtgtttgtgtttgttttttctctcacctgaaaatgtcttgctgcggtggtaactgtggttgcggaagctcctgcaagtgcggcaacggctgcggaggctgcaagatgtacccagacttgagctacactgagtcaaccaccaccgagaccttggtcatgggagtggcacctgttaaggctcaatttgagggtgctgaaatgggtgt

SEQ ID NO: 34132 - DNA, 243 bp, Glycine max
  Clone ID: 700891703H1
ccgcggttgcaagcagagcacaccatcgaaatgggcgaacgaaggcgttggttccggaatcggtggtgaagaaggagaagaggaacgaggagtgggctttggaaaagaagcaggaactcgatgccgcaaagaaaaagaggttcgaaacgcggaagctgatttttaacagagccaaacagtactcaaaggaatacgacgagcagcaaaaggagttgattaggttgaagcgtgaagccaagctta

SEQ ID NO: 34133 - DNA, 240 bp, Glycine max
  Clone ID: 700891704H1
tattttttgtgtttgacagcctggcattgttcatctctctggcagttgtggtggttcaaacctctgtcgttgtgattgagcaaaaggcaaagaagcagctcgtttttgtcattaacaagctcatgtggatggcttgccttttcatttgcattgggtgcatttgtcttgacatacgtggtggtgggatgacactccagatggcttgcaatatatgctactgtgagtggaagcttgatcatg

SEQ ID NO: 34134 - DNA, 236 bp, Glycine max
  Clone ID: 700891705H1
ctcgagccgaatcggctcgagatcaatcaatcatattgtaaagagtttaagacgtacaggaagcatactggagtatggcatcagactttctgaagcagatggaatcgattacactgatcctgaagagcttgagttgttggtcagaactcttatagatctggatgcaatggatggtaaacaaagtgtttctttattggcagagtgttctagttcccctgatgtcagcactagacgag

SEQ ID NO: 34135 - DNA, 240 bp, Glycine max
  Clone ID: 700891706H1
cagatctccgcgaccgcatgtatgttaccccgacatgtggagagacggattgcagctcgccttctaattagtcgtgtagcctcttgttccaatctctgggaccttattatggatgctggaactggcttttcaagtcaactttataagttgtcaccatttttcttacacaaggcatggatcatggcacagtgggaccagaactattacattacttctattgcaggggctaataatgggagc

SEQ ID NO: 34136 - DNA, 235 bp, Glycine max
  Clone ID: 700891707H1
gcgcttcagcacaatgggtgcctacaagtatgtttcggagctatggcgcaagaagcagtctgatgttatgagattcttgcagcgggtgaggtgctgggagtatcgccagcaaccttctattgtccgtttgacaaggtctactcgcccagataaggctcgtcgcttgggtttcaaggctaagcagggttacgtgatttaccgtgttcgcgtacgaaggggtggccgtaagagacca

SEQ ID NO: 34137 - DNA, 237 bp, Glycine max
  Clone ID: 700891708H1
gctgtctggtctcccaccagaaactgtgttccaaccacttcttaaagataaccttgtggccaaagggctagttctgtcatttatgactgacttctttaaggagtatctgattgacaacagtcttgatgatcttatttcaattctaaaacggggtaaagtagaggagaatcttttggacattttcccccctacaaaaagatctaatgaagccttctctgagcatttcaccaaggaagg

SEQ ID NO: 34138 - DNA, 237 bp, Glycine max
  Clone ID: 700891709H1
atggggtttgaggaaactgagctaaggcttggactgcctggaaacgtaggaggcactggcactgaagaagtgctcatcaggaagagaggtttctctgagactgaaactgaaactgaggaggatgagtctgctaccactgtggatttgatgcttaatctttcttctaaggaagctgctgctgctgcagatccaactgataagcacaagactttgcctaaggagaagactcttctgcct

SEQ ID NO: 34139 - DNA, 235 bp, Glycine max
  Clone ID: 700891710H1
aacttatcagtgagaaggtgttctctttttggcttaatggggatccaaatgcgaaaaaaggtggcgaattagtttttggtggtgttgacccaaagcacttcaaaggaaaccacacttatgttccaattactgaaaaaggttactggcagattgaaataggagattttttcattggaggtgtttcaactggtgtttgtgagggtggctgtgctgctattgtggattcaggaacatc

SEQ ID NO: 34140 - DNA, 233 bp, Glycine max
  Clone ID: 700891711H1
ctttcaaggagagagagaaaatatagcacgccgaaaaacacgctcccacttgtaacttagtataacgacctccaacaactgatacatacaatctcctttccttcgtgttggacaacaacaatggcggcgaaatctagttcgagttcgacaacaaacgtggtgactctgaaggcggcgtgggttctcccgcagcgcacgcagaacatccgtgaggtgtacgaggtggggcggaa

SEQ ID NO: 34141 - DNA, 237 bp, Glycine max
  Clone ID: 700891713H1
cttcttcgtcgttatcttcttcttttgttgtttgtgtgtttgtgttttctctcacctgaaaatgtcttgctgcggtggtaactgtggttgcggaagcgcctgcaagtgcggcaacggctgcggaggctgcaagatgtacccagacttgagctacaccgagtcaaccaccaccgagaccttggtcatgggagtggcaccagttaaggctcaattcgagagtgctgaaatgggtgttcc

SEQ ID NO: 34142 - DNA, 237 bp, Glycine max
  Clone ID: 700891714H1
ttctgaactatgaagtacagagcgtttgtttctggtttttggatactgccactctttcacggtgaaattcaagctcgttttcctttcaactcaaaatccctaatcatcaacacgaagggtttgtggaccaaaacgctgcgtttccatttcactcacaatctcaagctaacccagctctatcttatggcgtatcaggtagagataatgcaggaaatttccatcattgcttcaaaagga

SEQ ID NO: 34143 - DNA, 237 bp, Glycine max
  Clone ID: 700891715H1
aacacaacataaattaaataaataaataaaattaaactaagctaaattcctttctctctctttctttctcttcgagggtttgggtttctcttcctccctggaagaaaaagaagagtcaccgctacgacgccgttcgtgcttttttgaggtgccacagtcatgtttgggcgtggtggaccaaggaggagtgacaactccaaatattatgatattctcggggtttccaaaaatgccagt

SEQ ID NO: 34144 - DNA, 241 bp, Glycine max
  Clone ID: 700891716H1
tgcagtgcaggctgcgattctcagtggcgagggtaatgagaaagtgcaggatcttcttttgttggatgttactcctctatccactggtttggagactgcaggaggagtcatgactgtgttgattcccagaaacacaaccattcccaccaagaaggagcaggtgttctcaacctactctgacaaccagcccggtgtgttgattcaggtctatgaaggtgaacgaacgaggactcgtgacaac

SEQ ID NO: 34145 - DNA, 237 bp, Glycine max
  Clone ID: 700891718H1
atattagaggccattggtgagagactaaaacaaaactttacttcctttgatgtacgtcttttgttttagtctctcacaaatggcatctaagataggctcatccatcaaaggaagtaaagttttgagtcagggtggtcttgtagagaagatgacctttgctgtacgtgggaaattggagagctttggagatgatggaactatagttcccttatctgaaggggatgcttgtggtgaaga

SEQ ID NO: 34146 - DNA, 227 bp, Glycine max
  Clone ID: 700891682H1
ctcgagccgattcggctcgagtgcgtgctataattgagaatgctagtcaaatatcaaaggtcatagatgagtttgggtccattgacaagtatatttggagttttgtgaaccacaagcctatagttagcagattcaggtatccaagacaggttcctgtgaaaacaccaaaggctgatgttattagcaaagacctggtgaggagaggtttccgaggcgttggccccaca

SEQ ID NO: 34147 - DNA, 236 bp, Glycine max
  Clone ID: 700891720H1
gaaaaggaaacatggaactcgagacaaacaaggtgtatgtctacgaggatgcacgaggggacgttgaagtcccagataccgctcatcagataagcactgattcatggtttcaagtggcttttatcctcacaaccggaatcaacagtgcctttgttcttggatatccagggaccgtcatggttcccctgggttggatcgggggtgtgattggtctaattcttgctaccatggtgtca

SEQ ID NO: 34148 - DNA, 237 bp, Glycine max
  Clone ID: 700891721H1
tttctctctgtctcgtttacacatctctccaacctttcactttcgtttctcagttttattcgaatccctctctcaatctcctttccaaatggccagcgttgaggttgcacagcaaacaccaacaacagttccagaaaatgaaacaaccgaggtaagcaagacccaggaaacaaccccagtcactgaggctcctgcaacagaacaaccagcagctgaggttcctgcaacagaacaacc

SEQ ID NO: 34149 - DNA, 236 bp, Glycine max
  Clone ID: 700891722H1
cagaaattctgaaaagtccggattttttttattattaagaaagtaccttatcataaaaagggaatgtattgaggaaaagaaaagataccctttattttcataattcatgattgggttgggttctgtaaatctcaagctttcaatattttttctccatttttacttgtgaatctggcataagacagacattcgcgtactttcaaactttgttattaattgcatagtttgattctaac

SEQ ID NO: 34150 - DNA, 229 bp, Glycine max
  Clone ID: 700891643H1
caaggcagaaagcaagctcatcctagagttttaaaaatggcagcagcctcctccatggctctctcttccccatccttggctggcaaggccgtgaagctgggcccatcagcccccgaagtcgggagggtcagcatgaggaagaccgtcaccaagcaggcctcctccggaagcccatggtacggcccagaccgcgtcaagtacttgggcccattctctggcgagcccccgt

SEQ ID NO: 34151 - DNA, 226 bp, Glycine max
  Clone ID: 700891644H1
atcctagttgggagagaggtctttccagatgggattttgtatgcttcacgggagtcacattattctgtgtttaaagctgctcgaatgtacagaatggaatgtgagaaggttgatactctttggtctggggaaattgattgtgatgatttcaaggccaagcttcttagtcaccaggataagccagcaattataaatgtgaacataggtacaactgtgaaaggggctg

SEQ ID NO: 34152 - DNA, 232 bp, Glycine max
  Clone ID: 700891646H1
ataaatcttttttatgggtttcagggtcactactactctgtctctgctctccctgttttggctcttgtccctgcaccaagcaagagctgcaaagttccacaatgtgagtggcttgagagggaaaaagccagttgtagcaaatgggtgcaatttgttcctgggaagttgggtggttgacacgtcttatcctctctatgactcttcaacatgccccttcattgatcccgagttt

SEQ ID NO: 34153 - DNA, 235 bp, Glycine max
  Clone ID: 700891647H1
ttctcgagccgaatcggctcgagctctcatctcacatctcattctacgctaacatcccctttacttcttctcacttctctccacgtttttttttcacatttctctgtctgtctttgatctgcacacacaacatccctctaaaacattgagggataaaataaaaaacatgaagaaatttgtactcaggttagatttgccagatgacaaggcaaagcagaaggccctgaaaacagtt

SEQ ID NO: 34154 - DNA, 233 bp, Glycine max
  Clone ID: 700891648H1
caagaaaataaaggcaatggtgaggtgatgggtggccatgcagccacaacttactcggcggccaagatttcggtgtggtgggacattgacaactgtcgtgttcccaaaggccacaacgccaattccatcgctcagaacataacctccgccctcgtcggcatcaactacgccggccccctctccatctccgcctatggtgacaccaaccgcatccctccccccgtccaacacgc

SEQ ID NO: 34155 - DNA, 232 bp, Glycine max
  Clone ID: 700891649H1
ataccatagtcttctctttgtctgagaaaatagttccccccaaaaataaaatgaacaagggtctctcctttgtgctgctgattcttctgatccactacaacaacgttgtcaacgccaacaacaaaaactgtgtcacagaggattgcctcatcggcaacaatgatttggaatcagaattctacttcggttcccatgtggccagaatgctctacgatgtgagccaatctgtgtc

SEQ ID NO: 34156 - DNA, 231 bp, Glycine max
  Clone ID: 700891650H1
gcgtgtgattgagaggttcgagaaggaggctgccgagatgaacaagaggtcattcaagtatgcctgggtgctcgacaagctcaaagctgagcgtgaaagaggaattaccattgatattgctttgtggaagtttgaaaccaccaagtactactgcacggtcattgatgctcctggacatcgtgactttatcaagaacatgattactggtacctcccaggccgactgtgctgt

SEQ ID NO: 34157 - DNA, 230 bp, Glycine max
  Clone ID: 700891651H1
ggcagaaagaaggcggagacttggattgcctccagaggaaccctcagcagccaaaccttcacctgcgcctattgtggaggagaaaaagagttttgtgcctgttaggcctgccacaaaagctgagcaaatgagggagtgcctccgttctctcaagcagaaccacaaggaggatgacgctagagtgaagagagcattccaaactcttctaacttatgtagggaatgttgcca

SEQ ID NO: 34158 - DNA, 226 bp, Glycine max
  Clone ID: 700891653H1
gcttatcatactcttcttctttttctgccctcaaaactattcaattcaattcaattcccttctaattcttccactaccccttttcgttattcttcttcaattctcccaaaaatcatatttttacactctgagtggtttttcagcttgtgggtcgatgtcaactgtgtcaaaagatgacaacttggcgctttcttcggaggactcttcatgcccagaagagtctgag

SEQ ID NO: 34159 - DNA, 226 bp, Glycine max
  Clone ID: 700891655H1
ctcgagccgctcgagccgctcgagccgactcgagccgattcggctcgagcttttttcacactgccctccgctaaatctaggtcgcccatcatcttgcagatctaaagaagccctatcacaaatctctttttccacatattggaccttgattgaaacagatttgagtagactcccccgtcccacagtcgatcttgcgcgcctccttcacttttggctttggtggttg

SEQ ID NO: 34160 - DNA, 225 bp, Glycine max
  Clone ID: 700891656H1
ggcagaacagaacaccaactcttattgtcatatggtctgtgctcttggcttctatcttttccttggtttgggtcagagttgacccttttgtgttgaaaacaaaggggcctgatgtcaagcaatgtggaatcagctgctgaatctacatctcatttctttactactatgaagcgtgaaacaaaaacctaggtgcagagatgaaaatggcagaaaaaaaaaaaaaca

SEQ ID NO: 34161 - DNA, 226 bp, Glycine max
  Clone ID: 700891657H1
caagtagccaatggaaaaattgggattctaatttaataggcaacatttgggggagtgggtccttttttctttccccccctatctgtttgaaaaataaattatttcataacctgttgtcatttccaaattcttgcatccatagctccttaatgatgtcaaacctattttgttgtctgtttactatcatatgtcataagtaacctgaatttgatagaaatatgaagca

SEQ ID NO: 34162 - DNA, 223 bp, Glycine max
  Clone ID: 700891659H1
ggtgaatttacaatgactgaacttgctgagacagttaaagagcttattaatccaggtgtggagatcaagatggtggagaacactcctgatgacccacgacaaagaaaaccagacatcacaaaagcaaaggaattgttgggctgggagccaaaggtcaagttgcgtgatggtcttcctcgtatggaagaggatttccgtctgaggcttggagttggcaaaaaga

SEQ ID NO: 34163 - DNA, 228 bp, Glycine max
  Clone ID: 700891662H1
gccttatatagttgggtccttggtaggaatggtgccggaaatatttgttgcaatctatactggaattttgattcggacattagctgatgcttcatatgaaaagcattctctatctgccccacaaattattctcaatgtggcaggcttctgtataacggtggcgacaaccatctttttcacagcttatgctaggagacggcttgatgagttacaaagggaggaggatcc

SEQ ID NO: 34164 - DNA, 230 bp, Glycine max
  Clone ID: 700891663H1
aaactcctgaatttctcaagatcaatcctattggcaaggttcctgtgctggaaacccccgatggtccaatattcgagagcaatgccattgctcgctatgttacccggctgaaaggtgataacactttgtatggatcttccttgattgaatatgcccacattgaacagtggattgatttttcatcattggagattgatgctaatattatcaagtggtatgccccaagagtt

SEQ ID NO: 34165 - DNA, 221 bp, Glycine max
  Clone ID: 700891665H1
atttacgaacagaaactctgcatcaacaatataaattggttaaagagaggactatatctggagattcatactatggctctcacgtgatgcagtatggtgatgtacggcttagcagtgatgttctcttccattatttgggtacagatcctgctaatgataatttcacttttgtggacgaaaactccttatggtcaccttcaaaaccagtcaaccaacgtgat

SEQ ID NO: 34166 - DNA, 228 bp, Glycine max
  Clone ID: 700891666H1
ctcgagcgtgttgttgtaactcgttcttcttctattgtcgttctgtgtctgtggttgttatttctctcacctgataatgtcttgctgcggtggtaactgtggttgcggaagctcctgcaagtgcggcaacggctgcggatgctgccagatgtacccagacttgagctacactgagtcaaccaacaccgagaccttggtcatgggagttgcacctgttaatgctcaatt

SEQ ID NO: 34167 - DNA, 228 bp, Glycine max
  Clone ID: 700891667H1
cttcgatcatcacctctccacaatgccgccgaagttcgacccctcccagatagtcgacgtcttcgtccgcgttaccggcggcgaagtcggcgcggcgagttccctggccccgaagatcggtcccctcggtctctcccccaagaagatcggagaagacatcgccaaagaaaccgccaaggactggaagggcctccgcgtcaccgtcaagctcaccgttcagaatcgtca

SEQ ID NO: 34168 - DNA, 227 bp, Glycine max
  Clone ID: 700891668H1
cgagttcgactcttactcgcacctttcctccaaacccaaccctaaccctaaccctaacccttattccaatcctaatccttattacgatgctaaccctcatccgtaatcccgaaacgtcgtcggtgtgctcccctcctatcgcctccgttcctaccgacgtcgacgccgctgcatcctctactccgccgtgctcttcctagtcctcctcatcggcggcgccgctttcc

SEQ ID NO: 34169 - DNA, 222 bp, Glycine max
  Clone ID: 700891669H1
cagccatgctcatgtgggatctgcatctgtgttggttggtgatattgatgatgcattggactctgaaaaaaggtacttgaaaaggggtgtgaatgatcgggggagggttgctaatgatgttgagacagagcagattgtccttgatgaagaatcaggctcttgcaagggaaagatgagttcagttgtgcaaatgcgtggatcaataccacttttctggtcaca

SEQ ID NO: 34170 - DNA, 220 bp, Glycine max
  Clone ID: 700891671H1
gtcttatcagaagacttttggtactgaggagaagcgcagtgagttcttgagatgtaggtgccagttgatggagaagggtattcagaggcttaatttgaagccaggtggtgtgtcttcattgcttcagatcaatgaccttaagaagtcccctggtccttcagagcgtacggttgccacggaacagactctggtaatgtttcaggacaattatccagaaatg

SEQ ID NO: 34171 - DNA, 220 bp, Glycine max
  Clone ID: 700891672H1
ctactactactcatcattgtctcaaaaaccttctctctcaacaaaacctacaacaacaacaaaaaaagagaaattttttagaacaatggaggcatcaaagatgaagtttttcttggttttggtgattgccatgttggcgatggtagcaactggggtttcagctgctgaggcacctgccccaggtccttcatccgatgccaccaccttctttgtacccact

SEQ ID NO: 34172 - DNA, 229 bp, Glycine max
  Clone ID: 700891642H1
gggggagtttaaaggaagaagaaagaacagaacgccgaaaaaaagaagtcctatagaacaaaggttgaaaaagaggtaaccttttgtggaatggttaaggaagaagggtttaaaatcctattatgtttctgaagcaaaaaatgcattagaaaatcgtggagaaatcacaatgttatttctggggtaaaaatgggtgtttgaagcctatatcatagtagtcctgctataa

SEQ ID NO: 34173 - DNA, 223 bp, Glycine max
  Clone ID: 700891674H1
gaacctagagaccttggatatcagaaacacgttggttcatgagttaccaagtgaaataaacatgctcaaaaagttaagatatcttcttgctttccatcgaaactatgaagcagattattctcttttgggatctacaactggtgtgctaatgaaaaaaggtattcaaaatttgacttccttacaaaacctttgttatgtggaggcagatcatgggggcatagat

SEQ ID NO: 34174 - DNA, 222 bp, Glycine max
  Clone ID: 700891675H1
acactttccaatacaataatcactaactgaatattcgatcggagatgtctgccgccgccgaagaagctaacgctcccgccgtcgaaaagccggttgaggaggtgaaggcgccgaaccccgcgaaggagaagaaacctaaggctccgaaggaaaagaagccaaaacaggccaaaacagcttcacatcctccatattttcagatgattaaggaggctttgatcg

SEQ ID NO: 34175 - DNA, 221 bp, Glycine max
  Clone ID: 700891676H1
agccggagaacgcggtttatgatttcgaggacaagattaacttcgcggtgttcccttcgctgcagggtgggccccacaaccaccagatcggtgctctcgccgtggcgctgaagcaggccgcgtcgcccgggtttaaggcctacgcgaagaggttaaggcgaacgccttgcgcttggaaaatacttgatggggaaagggtacagccttgtcactggcggaac

SEQ ID NO: 34176 - DNA, 227 bp, Glycine max
  Clone ID: 700891678H1
ttcgaatttcgatactttgatcagatccacaacactccttcatccatgacgcttggctcttcaggatccagtgtcgtggttccaaggaacttcagattgctggaggagcttgagaagggagaaaaaggaatcggagatggaacagttagctatggaatggatgatggtgacgacatttacatgcgctcttggactggaaccattattggcccctataatactgtaca

SEQ ID NO: 34177 - DNA, 226 bp, Glycine max
  Clone ID: 700891679H1
cctccacctggccaatatcatcatcagtattatcctccatatggttatatgccaccagtttccccttatcaacagtacgcatctccatacaatgctgcagtggctccatcccagacaccagctgcaaatcatccttatcagcattctatgcagccagggtctggacaggctgcacatgccccagctgaatctggaacatcaacatcaggatcgcagcagcattaaa

SEQ ID NO: 34178 - DNA, 221 bp, Glycine max
  Clone ID: 700891595H1
gactcaaagaagatcactcacaagtccgatgtctacagcttcggggtgctgctgctagaaatgctgacagggaagacccctctgaggtatcctggctatgaggatgtggttgatcttccaaggtgggtgaggtctgttgtcagagaggaatggactgcagaagtgtttgatgaggagcttctgagagggcaatatgttgaagaggagatggttcagatgct

SEQ ID NO: 34179 - DNA, 208 bp, Glycine max
  Clone ID: 700891602H1
gaaagatcggcgatgactgcctccaaggatcgcgagaacttcgtctacatcgccaaactcgccgagcaggccgagcgttacgaagagatggtggaatcaatgaagaacgttgcgaatctcgacgttgaactgacggtggaggagcggaatttgctttctgttgggtacacagcatgcgattggtgctcgcagaggtccctggaggatc

SEQ ID NO: 34180 - DNA, 233 bp, Glycine max
  Clone ID: 700891604H1
ggcctttcgtacgttgttgcagctttggccatttatgatgaatacagcaatgatattcttgacatgccagaaggatcctgcttccctaggcctcagtttcgaaaagaggttgatacatcacaaagaacttctaattcaaattccgtattaagacccagctccttccgaaaggctccttctcgcacatcttcaatgaagaacaacaacattgctgagttgaaatcatttgagct

SEQ ID NO: 34181 - DNA, 234 bp, Glycine max
  Clone ID: 700891605H1
taactaacgtgggagctccgggaacgtataaagcttcggtggtgtcgttaggggatttgaatgtgaaaattgtggtggaaccggagacgctgagtttcaccgagttgtacgagaagaagggttatatggtgtcgtttaggtacacttcgatgccgtctgggacgaccagcttcgcacgtttggaatggacagatggaaagcatagggttggaagtccaattgcgttcagctgga

SEQ ID NO: 34182 - DNA, 234 bp, Glycine max
  Clone ID: 700891606H1
cccatttccataatcactttttcctactttcttctccatccatcccttgactaattaattatccctcacaactaccaatggccgaagagaaacaccacaagcaccgcctcttccaccaccacaaggacgaggataataagccagtagaaaccgatactggttacgacaacacatcatattccaagccttctgatgactatgactctggtttcaacaagccatcgtatgagtctt

SEQ ID NO: 34183 - DNA, 231 bp, Glycine max
  Clone ID: 700891607H1
ctttgaaaccagccaagagggttatttttgatccctcaaagctagtttctctctctctttttttatttccgggactgaagaggttgtctatttgaaatctccttcatcctttcctttcttgtagaaaactttttaaatttttttgtcagtgggtgttttaattaaccacctgttcttcaagttttagaaagacgcaggttgaattaattagtatcatggcagctttgatgg

SEQ ID NO: 34184 - DNA, 230 bp, Glycine max
  Clone ID: 700891608H1
ggcgtcttgggatcaaatgggggaacttgcaaatgtggcacagttgactggtgtagacgctgtgcggttgattgggatgattgtgagagctgcaagcactgcacggatgcataagaaaaactgtaggcagtttgcacagcatctgaagttgattgggaacttgctggagcagctcaagatctcggagctgaagaagtaccccgaaactagggaacctctggagcagctcg

SEQ ID NO: 34185 - DNA, 232 bp, Glycine max
  Clone ID: 700891610H1
ccctctctctatctctcacacacactttctctctctctctctctcacccagatcttgtagcaatggcgagcgctcccactccacgcgaagagttcgtgtacatggcgaactggcggagaggccgagcgctacgaggagatggtggagttcatggagaaggtctccgcctccgccgagagcgaggagctgaccgtggaggagcgtaacctcctctccgtcgcctacaagaacg

SEQ ID NO: 34186 - DNA, 231 bp, Glycine max
  Clone ID: 700891611H1
gttgagatgcaccatgaggctctcacagaggctcttccaggtgacaatgttggatttaatgtgaagaatgttgcagtcaaggatctcaagcgtggttttgttgcatccaactccaaggacgaccctgccaaggaagctgccaacttcacatcccaagtcattatcatgaaccatcctggccagattggtaatggatacgcaccagtccttgactgccacacttctcacatt

SEQ ID NO: 34187 - DNA, 236 bp, Glycine max
  Clone ID: 700891614H1
catctgacgagcctggtgggaaagaaatcacttttaagcgagtactcttgaatatctgccaggaggcttttgaaggtgcagataaactgagggaagaactgagacagatgactgcccctgaccaggagatggagctacgggacaaggaaagacttgtcaagattcgaacccttggaaatatccgtttaattggtgagctgttgaagcaaaaaatgggtcccgaaaagattgttcat

SEQ ID NO: 34188 - DNA, 235 bp, Glycine max
  Clone ID: 700891617H1
gaggttatctctggtggatctcatttccctttaacatctgatgctttaaagaaagttcttactggccaagcttcacgtgaagtcttattaagtgttgcccatgcgttattagggtggctggttgcatcaccatttattttgggaactctatacatagttcttttaccatgcttcaaaattctagttcataaattctcaagtgttcctttaagtccaaagaagccgctcaatccac

SEQ ID NO: 34189 - DNA, 231 bp, Glycine max
  Clone ID: 700891620H1
ttacattttcagttatgttaagaccttccaggctcacccagatcgcctcctaccagacagggttcaggttggcatgactcaacacttcatgaaaagctactctgatctcctcatcaggacgtgccacaggcgcggtgtgcatgctatgggaggaatggcagcacagattccaatcaaagatgacccagtggcaaatgaggcagcactggaactggtaaggaaggacaagct

SEQ ID NO: 34190 - DNA, 232 bp, Glycine max
  Clone ID: 700891621H1
ctgttttcattgaatctacactaatggagaatggagggcttccagaatctgctgatccctcaatgctgatcaaagaggccattcatgttattagctgtggatatgaagagaaaactgcatggggaaaagagattggttggatctatggttcagttactgaggatatcttaacggggttcaagatgcaatgccggggatggagatcagtttactgcatgcccttaaggcctgc

SEQ ID NO: 34191 - DNA, 228 bp, Glycine max
  Clone ID: 700891623H1
gcaaggttttcaagtttgccactctcttggaggaggcacaggttctggcatgggaacactgttgatatcaaaaattagggaggaatacccagacagaatgatgctcactttctctgttttcccatctccaaaagtttctgacacagttgtggagccatacaatgccactttgtctgtacaccaactggttgaaaatgcagatgaatgcatggttcttgacaatgaagc

SEQ ID NO: 34192 - DNA, 229 bp, Glycine max
  Clone ID: 700891624H1
ctccgcagtgtcggtggaggtcggagagcatgtccagctcgcttatacccaccagaacgagtcgccgtttcagcccagatcctttgctgtgaaggatgaggtattctgcttgtttgagggagcccttgacaatttgggcaacttgagacaacaatatggattggccaagtcaaccaatgaagtattgttggtcattgaggcttacaaagcattgcgtgacagagcaccc

SEQ ID NO: 34193 - DNA, 230 bp, Glycine max
  Clone ID: 700891625H1
agaaatgtatcttgcaaagggacttggtgtagagtgctgtggtgatggcataggtggttgtagaggtggtggtggaggtggtggtgatcataatcccttgggttctggaggaaatgatggagaaaggcatggagtggaagaatattacaagaaaatggttagggaaaatcctggggatcctttgtttctgaggaattatgccaattttttgtatcagtgcaaacaagacc

SEQ ID NO: 34194 - DNA, 227 bp, Glycine max
  Clone ID: 700891626H1
tggggtgctggtttgtgctgctgggcaggagtttaggggggacgtggcgctttgtaccgtgccattgggggtgctaaagaagggggatattgagtttgtgcctgagcttcctcagaggaagaaggatgctattcataggttggggtttgggttgttgaacaaggttgcaatattgtttccttataatttctggggtggggacattgacacgtttggtcatttgactg

SEQ ID NO: 34195 - DNA, 231 bp, Glycine max
  Clone ID: 700891627H1
aaccattcacattcttccagaatcatcaaagccatcaacgggcttgacttggcaactagctggaagatgaagcaagcaactcttttcttcttctcactcttcctactcctttcctccaccaccatggccatttcaccagcacctgcagcagcaccaaaagccacagcaaaaactcctcctaccccaaaggcaacagcaccatcaccaaaaccattagttcccacaatacct

SEQ ID NO: 34196 - DNA, 231 bp, Glycine max
  Clone ID: 700891628H1
ctcgagccgtcttgctcttcttctccttcatttgcagcaagttacggcactattacccatccacgcgcggccccactgagtcgaatttcatgcggtggtccgagaccccctaagagcaagagaagcaacctcaattcagaagcgcaagagcttgttcgcttactcacgagcaagataagaagcaacgacaaagaggttctgctgaagaccttgaacaagtatgtgaagcag

SEQ ID NO: 34197 - DNA, 233 bp, Glycine max
  Clone ID: 700891629H1
agaatcatgggaaaagttacttccttcttcagtccttgctaccatattagacaatatagtcatgccaaaactatcaagtgctgaagatacttgggaacctcaccgtgataccattcctattcacacttcagtgcatccatggctacctttgctggggcacaagttggacggcatataccacgtgatacgtttaaaattgagtactgtacttggtgcctgacacccacgtgatg

SEQ ID NO: 34198 - DNA, 234 bp, Glycine max
  Clone ID: 700891630H1
aacttggcaatataatgaaagagcatttcatgtagattttcttcaccactatctgctgtatgcacttcttgtgctttctgcagttctgaattattcaagtaactggttcagtttaacatatgatttagtataaaagaaattgacacacagtcatgaagtttatgaaacttggatctcgttcggacaccttttacactgcagagtctggaaggacaatctcttctgaagtttcaa

SEQ ID NO: 34199 - DNA, 233 bp, Glycine max
  Clone ID: 700891631H1
ggcggagattaccacttggaaacacctttggccattggaagtcttggaatagtaagcactggcactggatcggatcaaattctctacaacttagcatgatttcaatatagaagctttgtttcagcaactgaagcattgactggttctgcattatacaacctgaagtggactttcagatatttaggccaacccgattttttcctgtcctttgtcacatttttttatgtggtttt

SEQ ID NO: 34200 - DNA, 235 bp, Glycine max
  Clone ID: 700891632H1
cttcttttctcggcagagtcctcttcgcctccgttttcatcctctccgcttaccaagaatttaattcttatggagttgatgggggacccgcagcaaaagcactcagaccgaagtttgatgcctttgcacatcaagtacattctaaagttggctttcaacttccagatattgatatgaaatttttagtggctggggctattgctctcaagggccttggagggattcttttcatact

SEQ ID NO: 34201 - DNA, 235 bp, Glycine max
  Clone ID: 700891633H1
gcagtttcaaaggtgtttgactttattgttcagaaactttatgcactgagaaagcccaaaacaaatatccaaatacttcaacaaagtgtccttttaaaatacaagtatgttgtttccttcctcaaggaacatggcaaggaaatatataatgaagttcatgcagcatacattgatacgatgaacaaggttcttagtgctcatttccgtgcttatatacaagcatgggagaaactac

SEQ ID NO: 34202 - DNA, 231 bp, Glycine max
  Clone ID: 700891634H1
catgattgtggaagcctttgcaggaaaagacaccatcaaggtgccctatgagtccaaaggcaaaggagggttcaaacgtgcagcactcaagtttgtggctgttacccctagaacaagaatcatgttccttagcacattctacaccatgagaagtgatgacttttcttcactctgtgggcctgtgattgatgatgtcaagttggtgagcctgcgtaaaccatgatgagggaa

SEQ ID NO: 34203 - DNA, 224 bp, Glycine max
  Clone ID: 700891640H1
gggaaatatgtttcggtgcatcttcgtttcgaggaggatatggttgcattttcatgctgtgagtatgatggtgggaaggaggagaaacttgaaatggatattgctcgtgaaaggagttggcgaggtaaattcagaagaaagcataggataataaagcctggtgcaaatcgcgtggatggaagatgcccattgactccattagaggtgggaatgatgcttagagg

SEQ ID NO: 34204 - DNA, 99 bp, Glycine max
  Clone ID: 700891593H1
ccaaaaaccaccaaatcgcgggtaaaaataaacctcctctctttgatccgtcataactctcaccttttctcattccgatttcacttgcattcatttcac

SEQ ID NO: 34205 - DNA, 229 bp, Glycine max
  Clone ID: 700891641H1
tgaaggtgaaaggatcaattgattacgtccctgaactgtttgatgagcagaaggaccaagtagcagtggagcagattttgcgagttgtttttctagatccagagcgtccttgtcctgctttggaaaaactgaaccgacagctggctgatgctgatgctgcccttgaggcacgtaagatacctgcggaagatgcaggtcctaaaattatcggggaagggctcgtcataga

SEQ ID NO: 34206 - DNA, 157 bp, Glycine max
  Clone ID: 700891539H1
gcccaaatacacggtctcggaaccccttcctcccgaaccctatttttaggtcagaggctaaataccaaggccgcctttatcaagctcaagtccacacctagaagactccgccctctcagagtggttaatgagaaagtcgtcggtatcgatttgggaa

SEQ ID NO: 34207 - DNA, 219 bp, Glycine max
  Clone ID: 700891541H1
atggccttctattgttggagtgtgtcttctgaattttgttctgaacttcaagatcgtggcagtagcagatgacactggaagcaacagtattgtatcagaaggtgactgcaagaacacaaattatcagatttttctccctccaccttatcagaatatatcctctaccatatgcaaacctgtttggcattcatacgaattgaggtacccaagacgggtgac

SEQ ID NO: 34208 - DNA, 217 bp, Glycine max
  Clone ID: 700891542H1
gcaaactaaaggtgaagtttgccagaaacaagatgggaaggaaccattttcagcagcaacactgtgctgatgggagcatggggatggagagtcagggtcagcaacagagctatgccttccaagaagagtcttggagccctgataacaactatggccacaaccacaagcaattcccaggcatgcacatgaacatgaacaacaacaacaacaacaaaag

SEQ ID NO: 34209 - DNA, 220 bp, Glycine max
  Clone ID: 700891543H1
gggaaatggctcccaaaccgcctagtacgggtctgtttgttggactgaacaagggacatgtcgtcaccaagaaggaattgcccccacgcccctcggatcgtaaggggaaaacaagcaagagggtgcactttgtgaggaacctcataagagaggttgctggttttgcaccctatgaaaagcgtataactgagttgctgaaggttgggaaggataagagggc

SEQ ID NO: 34210 - DNA, 90 bp, Glycine max
  Clone ID: 700891545H1
attgaaaggcaaagattgaataaaattaacttgatggtttttcctgggacagtgttacttgtgaaatccttacatgggaaggagaaaatt

SEQ ID NO: 34211 - DNA, 223 bp, Glycine max
  Clone ID: 700891546H1
gtgaagatggggtcagaggtgtctaaacagatggagcgaagaaagacaatccagacagagaagaagagtctgtccgatctgaaaagcagcggagaagactaccctggctccgactaccgtccccaagacagaaaaaactggatgtcccatctcgaccctcagaaactccgcatcaaccaaatcgtctggcccggcacccacgactccgcaaccaacaaaattg

SEQ ID NO: 34212 - DNA, 226 bp, Glycine max
  Clone ID: 700891548H1
ctcttgcagcaatcacctttagcccttgcaaaagctttaaagaactcggtggagttggatgggttaaaaaaggcacatattcgggatggtgcagcagttgtgcaatatcttgtctggctggataagaagatgcaggatatttatggagcttctggttactttttggagaaggattctgtgaaaaaggagaaacatttgcaatctttgaaattgactgaggtgactg

SEQ ID NO: 34213 - DNA, 162 bp, Glycine max
  Clone ID: 700891550H1
cacgatcctactaaaaccaaacaactactcgttgattgagagagacagtgtgtgttgtgttgtgttgtgtcgctggcatttttgttggttcgagtgagcgagggaagatgtactctagagattcatggggtggtccgttggagataaacgcgacggactcgg

SEQ ID NO: 34214 - DNA, 157 bp, Glycine max
  Clone ID: 700891551H1
gagagaacaaagcacttagtgctattcaataattacgaaaaaccaacagcgagtgttgtttttgtttggtccaggctggaccagggaatgaatagagatgagaggctttcggttgaagagaactgatgttaagcggcgaaccaaacgcagaatcggc

SEQ ID NO: 34215 - DNA, 226 bp, Glycine max
  Clone ID: 700891553H1
tttggcattcgcagatcgaatacgagtaatttcactgaatcttattgaagatgtttctcacaagaactgagtatgaccgaggagtcaacacctttgctcctgaaggccgtttatttcaggttgaatatgcaatcgaagccatcaagctgggatcaactgcgattggattgaagacgacagagggtgttgtccttgcagttgaaaagcgcatcacttcaccactgct

SEQ ID NO: 34216 - DNA, 221 bp, Glycine max
  Clone ID: 700891556H1
gacggaccttgaatactgcaagcaaaaggggttgtattatcccattgcaaagactctagcagagaaagcgggttgggactttgcgaaggagacaggttttgatgttgtcatgataaaccctggtacagcattgggccctctgcttcctccaagaatcaattcaagcatggctgtgcttgttagtgttctcaaagggggcaaagagacctacgaggattttt

SEQ ID NO: 34217 - DNA, 97 bp, Glycine max
  Clone ID: 700891557H1
cactctcatgtctcgattcatctcagtgctctgcattgcaacactcacacaccaatggcactcagacccatcgacaacgctcttccgacaacaaccc

SEQ ID NO: 34218 - DNA, 217 bp, Glycine max
  Clone ID: 700891558H1
attgcgggagccccttttgttcttcctcttgctcacaaacataacataaaaattcttcccgctgattcggaacattctgcaatttttcagtctatccaggggttgccaaagggtgcacttaggaaaatccttttaactggatcaggaggtgctttcagagaatggcctgctgaaaagatgaaagatattaagcttgctgatgcattaaagcatccca

SEQ ID NO: 34219 - DNA, 216 bp, Glycine max
  Clone ID: 700891559H1
cgatgaggctgttgcatatggtgcggctgttcaggctgcaatcttaagtggtgagggcaatgagaaggttcaggatcttctcctcctggatgtcacccctctgtctcttggtttggagactgccggtggtgtgatgactgtcctgatccctaggaacactacaattccaacaaagaaggaacaagttttctcaacatactctgacaaccagcctgg

SEQ ID NO: 34220 - DNA, 216 bp, Glycine max
  Clone ID: 700891560H1
catttctcactcgattcgaatctgcaactgcaagattcaatttctctccgtcaacacgttctcactctcacttgaagcggctctcctcaatttgttgccagcatgcaaatccatctcctttttcctcttccactccctttctcgcttgctccaaccaccccattaattttccatccttttcctcttcttcagatccctccacactcgaatcccatt

SEQ ID NO: 34221 - DNA, 222 bp, Glycine max
  Clone ID: 700891562H1
gagagagggagagggcatgggaatccgatcggtattcgatggcggcgagctgagaagggaagtggagaaaagtggaattgacccaaaattcattccaaagatatggaagcatatcctcatctctgccaaagatgaagattgggattgggagaaacaagttccctccttgccctcttcggcctactctctccttcgttccaacttcaaaacccctctctcttc

SEQ ID NO: 34222 - DNA, 238 bp, Glycine max
  Clone ID: 700891565H1
agaagatggaactagaattcctctatctgaaggggattcttgtggtgaagaacttctgacatggtatcttgagcattcttcagtcagcacagatggtagaaaagtaaggcttccaggacagagattggttagcaacaggacagtaaggtgcttaacaaatgtggagtcattttcactctctgcttcggacattgaagaagtcacaatccttttcacaagattcgtgcggagtccatgc

SEQ ID NO: 34223 - DNA, 162 bp, Glycine max
  Clone ID: 700891566H1
ctgtgcggaggccatggcagcaaccagtgttggaacacctcaggttgttccgctgctaatgaaagccatagggtggcaaggtggaagcattttagctcttgagactctaacacgtgttgtggttgccggaaaccgagccagggatgctcttgttgcacaggg

SEQ ID NO: 34224 - DNA, 226 bp, Glycine max
  Clone ID: 700891569H1
cgaacgtggcggcgaatgtgaacctgggagcgttttatctggtggggattcccgtggcagttgggcttgcgttctggctcgaggttgggttctgtgggctctggctgggcctattgtcggcccaggtttgttgtgcgggcctcatgttgtatatgattgggaccaccgattgggagtaccaggcctgtcgggcccagttacttacggcccttgatgaaggatccga

SEQ ID NO: 34225 - DNA, 216 bp, Glycine max
  Clone ID: 700891573H1
atttcaaatcaagcttgctgcgaggagggactatacgtgtgacccgaagaaggattacagagtggaggattttaattatccttcttttgcggttcctatggatacagcttcggggattgggggaggttccgatactctgaagaccgtgaagtactctagggttttgactaacgtgggagctccgggaacgtacaaagcttcggtgatgtcgttggg

SEQ ID NO: 34226 - DNA, 213 bp, Glycine max
  Clone ID: 700891575H1
gggcattgttccaaggaatccacatcccccagaagaagagtttcgttatgattcttcagtttctgttgatgctgggggagctggacgacaaacgccaagtcttcagttccctcgaacaaaagaagttgtagtcaatggcattgctgtaaaggtgaaatattgtgagacttgtatgttgtatcgtcctcctcgttgctcgcattgctccatttg

SEQ ID NO: 34227 - DNA, 213 bp, Glycine max
  Clone ID: 700891576H1
gttgtattaatgggtgatggtttgatgatacaagagggaagttcagtaaaagcaacaggaagaattgctcagatacctgtaagtgaggcttatttgggtcgtgttataaatgccctggctaaaccaattgatggtcgaggagaaatttcagcttcggaatctcgattaatcgaatctcctgctcccggtattatttcgagacgttccgtatat

SEQ ID NO: 34228 - DNA, 215 bp, Glycine max
  Clone ID: 700891577H1
ctgtccccaaaactacaagaccacaaggaagatacgcgagaagagagagggggaagcttgtctcgcaatattccttgaaggatctggaaggaattcttgttaaaaagggtgacgtatctgggagtactgataattctgatggtgaactggacatgttaaagacatctgaaattcaaaaatttgaagatgaaggaagcaaatatcctgctatacct

SEQ ID NO: 34229 - DNA, 218 bp, Glycine max
  Clone ID: 700891578H1
taaaccctaaacaactctttctcttcttccttcgctcgttgttctccctcgcgtagatcgacaatggcggagacagagacgtttgctttccaggctgagatcaaccagctcctcagtctcatcatcaacaccttctactccaacaaggagattttccttcgtgaactcatcagcaacgcctccgatgctttggacaagattcgatttgagagtttgac

SEQ ID NO: 34230 - DNA, 157 bp, Glycine max
  Clone ID: 700891538H1
ctttggcattctcattgagcattatgctggtgattttccattatggctttctccaatacaagctcgagttttacctgttactgatgcccagcttgaatattgcaatgttgtgaccaacaaacttaaaatgtatggcatccgagctgaagtttgccat

SEQ ID NO: 34231 - DNA, 221 bp, Glycine max
  Clone ID: 700891581H1
cactcttgggaagcacaaaagcttcttttcttagtgggaggaaactgaaggtgaacagttttacagcaccagttggagcacgatccagcactacagtgtgtgcagttgctgagcctgataggcctctgtggttcccaggcagcacccctcctccatggctagatggcagtttgccaggagattttggctttgatccctaggtcttggatctgatcctgaga

SEQ ID NO: 34232 - DNA, 176 bp, Glycine max
  Clone ID: 700891583H1
aaagaagccagtgctaggatttgttagtgaagcaatggctcaaaccatgttgctcatgtctagtgtctctagcagttattccgtggatttggttttactaagcagaacgagctctttgtgggtcgtgttgctatgcttggttttgcagcatcactgttgggtgaaggaataactgg

SEQ ID NO: 34233 - DNA, 108 bp, Glycine max
  Clone ID: 700891585H1
aagtattcagagtccacaactgaaggaccaataaaggctatagttttttcccagtggactagcatgttggacttagttgagacatcattgagacaatttagtatacag

SEQ ID NO: 34234 - DNA, 222 bp, Glycine max
  Clone ID: 700891586H1
gggatctggtgggtttgccttccatgaacatcatgagaaaaagacccagagcatgctcacaggcacaagatagaagaggaggttgcagcagcagctgcagtcgggatctggtgggtttgccttccatgaacatcatgagaaaaaggaagcaaaggagcaagatgaggaagctcatggaaagaagcaccaccatctctttggctgaagcataagcaaccaatt

SEQ ID NO: 34235 - DNA, 115 bp, Glycine max
  Clone ID: 700891587H1
tgttgatctcgttttctctctcaaacaaacactactctctctctctctctaacgataaccctcgcagtcgcaggtttcaattcaccatgaccgtgatgatgcccgctcccattga

SEQ ID NO: 34236 - DNA, 70 bp, Glycine max
  Clone ID: 700891588H1
ctgacattggaggatgtgatatccagaaacaggaaatccgcgaggccgtggagctaccccttacgcatca

SEQ ID NO: 34237 - DNA, 216 bp, Glycine max
  Clone ID: 700891589H1
aaagaaagagaaaataaaaagcaatgggtagccttgaagcggaaagaacaacagtaggattggcagcaagagacccttcagggattctctccccatacacctacaatctaagaaacacaggccctgatgatgtttacataaaagttcactactgtggaatttgccattctgatctccaccagattaaaaatgatcttggcatgtccaactatccca

SEQ ID NO: 34238 - DNA, 210 bp, Glycine max
  Clone ID: 700891592H1
tttgatttaactaatatgcttgagattttttaactactaatgtttgatatggggtcaaatgcaggaggagactgcaaaactttaatgtttgtgcaagtaagtccaagttcggcagacttgggagagacactttgctcgttgaattttgccacccgtgtccgtgggatcgagagtggcccagctcgcaagcaagtagaccacactgagctg

SEQ ID NO: 34239 - DNA, 239 bp, Glycine max
  Clone ID: 700891493H1
atgcgaaggtagactccaacgccttagtgtcaactacattgatctctattatcagtaacgtgtagacacaactgtacccattgaagacactatgggagagcttaaaaggctggtccaattctgaaaataaggtacataggattgtcggaagctagccctgacacaattaggagggcacatgctgttcatcccattactgctgtgcaactaggagtggtccctttggactcgtgaaattg

SEQ ID NO: 34240 - DNA, 236 bp, Glycine max
  Clone ID: 700891494H1
cagtttttggcaggaaaaaaaaattgcatttgagtaaaaataacagagtgtagtgtagggtcttgttcttgatactgtgctaaatttgttggatggcggagaaatcatgcatcaagcgccttcagaaggaatatagagccctttgtaaagagccagtttctcatgttgtggctcgtccttcaccgagtgatattcttgagtggcattatgtgttggagggaagtgaaggaacacct

SEQ ID NO: 34241 - DNA, 239 bp, Glycine max
  Clone ID: 700891495H1
agcaacaacattccttttctccacttcgaagcaacgcaacattctctctttgcgaggttgaagtcgtcgtctttcgatatccgccctaactctttagatgacttggcaacgttgtgtgggatataaaagttgagaactcaacacaacaattaccagaaccaaaattgagcggggcaggaaaggttcaggactgtaaccagttcttacttactataggggagcacaaggaatcattctag

SEQ ID NO: 34242 - DNA, 242 bp, Glycine max
  Clone ID: 700891496H1
gaactattgggatgttcactggcaccggtggaccgattggcatttagtttcaagagttcaggaagtgaaagatgactaaacaatgctggacagatttgtaaagaatcaccaccgccgccactatgaccaccatcaccatcaccatcaatcaccaatactatactatttactaccatacaaaatgcatacggtaaaagcagttgtgtcaaggaagtggggtaggcattctcccttcttttgtt

SEQ ID NO: 34243 - DNA, 250 bp, Glycine max
  Clone ID: 700891501H1
aaccactcttaatttctctctgccttgctcatttacacacctctccaacctttcactttcagctttatttgaatccctctctctcctttccaaatggccagcgttgaggttgcacatcaaacaccaacaacagttccagaaaatgaaacaaccgaggtaatcaagacccaggaaacaaccccggaaccagtaccagccactgaggctcctgcaacagaacaagcagcagctgaggttcctgctcaagaag

SEQ ID NO: 34244 - DNA, 167 bp, Glycine max
  Clone ID: 700891502H1
gtaacgtccccggcgtcgaggtcgccaacgtcgagaggctgaaccttctgaagctggcccccggtgggcacctcgggaggtttgtaatttggaccaagagcgctttcgagaagttggagccaatttacgggtcttttgataagccctcggagaagaagaagggatac

SEQ ID NO: 34245 - DNA, 166 bp, Glycine max
  Clone ID: 700891503H1
cgagagaagcatataattcctgagtcaatatagaatttgtgaagtcagtccaaacttcagtttcaaagatgcctcgtggaccgcttgaagttgttctgatcagcgccaaaggaatcgatgacaatgattttctctccagcattgatccttatgtgattctcacata

SEQ ID NO: 34246 - DNA, 165 bp, Glycine max
  Clone ID: 700891505H1
ccacccctgacagtactccaactgttgacattgttggaatcctgagaaaggcaaagtcattcaacatcctaatccgcctcatgaaaaccacccaattgatcaaccaactcaatgcacagctcctcactactaaatccggaggcatcaccattcttgccccagatg

SEQ ID NO: 34247 - DNA, 231 bp, Glycine max
  Clone ID: 700891506H1
ttctcctcctacaccaacaaaaatggcaccttctccacaagaaatcatcttccgatccccactccccgatattcccatccccacacatctcccattgtactcttactgcttccaaaacttgtcaaagttccatgaccgtccatgcctcatcgacggcgacaccggcgagaccctcacctacgccgacgtcgacctcgctgctcgccgcatcgcctccggcctccacaaaat

SEQ ID NO: 34248 - DNA, 231 bp, Glycine max
  Clone ID: 700891507H1
gccagcacaaagggcgtaggagaagagggtttcgttccgtttcaatggggagcgaagagcagaacggcgaattctacctgcgttactacgtcggtcacaagggcaagtttggtcacgagttcctggagttcgagttccgcccagacggcaagctccgctacgccaacaactccaactacaaaaacgacaccatcatccgcaaggaggtttacctaacccccgccgttctcc

SEQ ID NO: 34249 - DNA, 158 bp, Glycine max
  Clone ID: 700891508H1
cttggacgagtgaattagattcatcatcaagatgtcgtctctgatagcagaagatgtgaagagcagatcagaggtgtaccacggggacgaaatgtgccaagtgaagtccaaggagcttctcaaggaaatcgccctccccaacggccttcttcccctca

SEQ ID NO: 34250 - DNA, 154 bp, Glycine max
  Clone ID: 700891509H1
tgctgctgacctcaaagagcatgtgatcaagcctgtgatcccagagaagtaccttgatgagaagaccattttccacttgaacccttcaggccgttttgtcattggtggccctcatggcgatgctggtctcaccggccgcaagatcattatcgat

SEQ ID NO: 34251 - DNA, 221 bp, Glycine max
  Clone ID: 700891510H1
ctcgagcgattcggctcaggaagtggggcccatggctgaagctgcggtgacttgcaccccaacacagttgactccgtgtcttccggcaattaattcaggttctgcaccttcgagtgcttgttgccagaagctgaaggagcaaaagccatgcttctgtggctacctcaaaaaccctagcttgaagcagtatgttaactctcctaatgccaaaaaaaccgttc

SEQ ID NO: 34252 - DNA, 224 bp, Glycine max
  Clone ID: 700891511H1
gtgagggaagaaggggtagaaagaatcaggagaaggaaataatcatcaaccatggcagggagattgacgaacgcagcatcgaggatcttaggcggaaacggcgtcgtttaccgatccgtagcttcctctcttcgcctccgctccggcatgggcctccccgtcggcaaacactatgttcccgacaaaccccttcccatgaatgaggaactcctgtgggacaacgg

SEQ ID NO: 34253 - DNA, 222 bp, Glycine max
  Clone ID: 700891512H1
gtttcggtgaaggaagagatgatagccactctgcaggatagtaacccgctctgtgaatccgccattcctggatcggactcgaaggagttgagttacgagtgtttcaacaagagtgatgaggtgggagggggttctgtgttccctgtggatttcaaagatgggtcttctgatagcgactcaagtgcgatcttgaacgaggagaacaacaaccacagccccaac

SEQ ID NO: 34254 - DNA, 221 bp, Glycine max
  Clone ID: 700891513H1
gccaagaccaccgccgaccgccagacggcgtgcaactgcctcaagtcggccgccagccaaatctccggcttcaaagccaacaacgccgcctcgctccccggcaaatgcggagtctccatcccctacaagatcagcacctccaccaactgcgctaccatcaaggtttgaagagaaagtcatggacgcaggaaaccggaaactactcactagtatatgagtag

SEQ ID NO: 34255 - DNA, 221 bp, Glycine max
  Clone ID: 700891515H1
catgtgcaggcaatcaactacaataatttcactatccgagtggttgatccaggagtcgatcaacaaacaaattgctcctcccttcctcgctatttcttgtctcgctccaatttcactgatacttacagtgatatttacaacatggatccataccaagctggtcaatattcaggtcatcggaatttatttatttgttatcggtaaagattagttgttagttt

SEQ ID NO: 34256 - DNA, 231 bp, Glycine max
  Clone ID: 700891516H1
ggaacgcttgctcattccctttgctacccaagtataattccctagcagaagctcgagggttgatatatttaatagccaaagatcagcatggctgtagattcctgcaaagaatatttgacgagggtacaccggaggatgttcaagtgatatttaatgagataattgatcatgttgcggaacttatgatgaatccttttggcaattacctaatgcagaagttgttggatgtct

SEQ ID NO: 34257 - DNA, 120 bp, Glycine max
  Clone ID: 700891517H1
cacctttattgggaactcgacatcaattcaagagatgtttaggagggtcagtgagcagttcactgctatgtaccggcgcaaagccttcttgcattggtacactggggagggtatggacga

SEQ ID NO: 34258 - DNA, 197 bp, Glycine max
  Clone ID: 700891519H1
gtagctggttccctccgaagtttccctcaggatagctggagcccgcgggcgagttctatcgggtaaagccaatgattagaggcatcgggggcgcaacgccctcgacctattctcaaactttaaataggtaggacggtgcggctgctctgttgagccgcgccatggaatcgagagctccaagtgggccatttttggta

SEQ ID NO: 34259 - DNA, 129 bp, Glycine max
  Clone ID: 700891521H1
tctaaatggtctctcaacttctggttcaatgataacacaaatcccttgctttgttcaattaaagtcattgaaattgaaaatgaaatcttcttcaaacatatctgatgagggagttagcaggatagtaga

SEQ ID NO: 34260 - DNA, 159 bp, Glycine max
  Clone ID: 700891523H1
cgatcctcgtccgggggctgctccgaataccaccaccaccacgcgccgatggccacgataggaggcttacgcgactcccaaggctctcagaacagcgtccaaaccgaggccctcgctcggttcgccgtcgatgaacacaacaagaagcagaattcactt

SEQ ID NO: 34261 - DNA, 222 bp, Glycine max
  Clone ID: 700891525H1
atttggaaggcaaggagggcattgagagcgctaaaagcattggtgaagttgcaagcattggttaggggccacattgtgagaaagcaaagtgctgatatgctgaggcgcatgcaaacattggtgcgacttcaggcccaggcacgtgcaagccgtgcgcacttgtcggatccttctttcaacttcaactcttccctttctcactatcctgtccctgaagaatat

SEQ ID NO: 34262 - DNA, 219 bp, Glycine max
  Clone ID: 700891528H1
gttttgctccatggtcttgaccaaggacagaaagatttgacgtggaacaagtggtcatataaggttggcctaagaggagaggctatgaatttggtatctcccaatggagtctcgtctgttgactgggtccaagagtcacaagctactcaaagccggtcacaattaaaatggtacaaggcatattttgatgcacccgggggaaaggaaccactggctttg

SEQ ID NO: 34263 - DNA, 222 bp, Glycine max
  Clone ID: 700891529H1
ggatgggcattcacggtcaccctcttgagatccaggcattattttactcggctttacgctgctctcgtgagatgctaatagtcaatgatgcaaccaagagtctggtggctgctgttagtaatcgcctgagtgcactctgctttcacatgagagagtattattgggttgatatgaagaagattaatgaaatttaccggtacaagacagaagagtattctactg

SEQ ID NO: 34264 - DNA, 154 bp, Glycine max
  Clone ID: 700891530H1
ctgaggcactgaaagtgtgatatggcaagagtcatttcctcttcctgcgcacgcctcgcaatgcgcctcttctccaccaccaccacagccaccgcgttcgccgtcactttacccaaaccctcatcactctccctctcatcgcgtcgattcctct

SEQ ID NO: 34265 - DNA, 229 bp, Glycine max
  Clone ID: 700891531H1
gtgagagtggaagaggaagaaacatcttcagaccttcgaaactcggctgcagacagcagagccgaagtgcctataaatgtaaccacacaacaaaatgcaagagagacagtgaatcaaggggtgttactgaatacaaatagaaacactcgagtacagaataatcctacaacgtggctgagaaatgcagctgaagattccacagcagaatcttcaagtagtactaggagag

SEQ ID NO: 34266 - DNA, 277 bp, Glycine max
  Clone ID: 700891492H1
cacgcgtacgtgatctcgggaatcgagctcaagctcctatagagcttatcagatgcttgaggtcacgtaaagttcatgcctttgaggcatcagagtctccagttgtggtagccctagaagaccttcttgcacctgatcttcatgctaccagtggctgaaatggttgatcacacatttgattcctgtacccaaatgctcctagagtctgaaagtcgtggatgaataccgatcatgctgaatcggcttccgccgaagattcctaattcagcctacccag

SEQ ID NO: 34267 - DNA, 248 bp, Glycine max
  Clone ID: 700891533H1
ggacaagaagatggtgtggtgttggtctgatgtgggggctccttttgccgtggatgagaaacgggtcagggatgctattgccatggaggataataactccatttgtgtggtcaatgagtttgaggatttggggttcatggatttgagaagttctgctgccaatagcattaggtggagctccaggagtaggttgatgaaggggaagatgcctgaggaaccttggtatcctaaactggcattgcatgggg

SEQ ID NO: 34268 - DNA, 96 bp, Glycine max
  Clone ID: 700891534H1
gtccatcgcacgatccgcgttcacattaaaccctctcatcacacactaatcctctcacaccgtgctttgttccttcattcacaaaacttcatcccc

SEQ ID NO: 34269 - DNA, 161 bp, Glycine max
  Clone ID: 700891537H1
ccactgtgtgctctctgtgtggtgtggtcgctcactgcaacaacaacaacaacaacaacgaacgccaacgcaaacgcaaacgcgaataagagcgagaacattctcttcagctcaacccttttctttttcgatggctaatcggcacacgattattctaatgc

SEQ ID NO: 34270 - DNA, 251 bp, Glycine max
  Clone ID: 700891455H1
ctcctcaccacgtcctcgactccctcctctcgctccactccttcttcctccctctcctccccaagcttccttcctcctccgctccctcctccgccgacgaccaatccgagttcatctacctcgcctggctccgttccaagtttgacgagttcctcaagtccctcctcgacgccctcgcctcgccgcagggagatgagacgctcaaggaactcgtgctggacacgctcatggagtttgtcaaggtcgccaat

SEQ ID NO: 34271 - DNA, 251 bp, Glycine max
  Clone ID: 700891456H1
gtttctttttcttctatagagacacacggagagagtctcagagcaataaacacccttcaatggctaccactaaagtttacattgtttactattctacgtacggacatgttgagaagttagctgaagagattaaaaagggagctggttccgttgaaggtgtggaagcaaagctatggcaggtacctgaaacactttctgaagaggtccttgggaagatgggtgcacctccaaagagtgatgtaccgattatt

SEQ ID NO: 34272 - DNA, 246 bp, Glycine max
  Clone ID: 700891457H1
atcaaaccacacacctcacctattagaagtaacaaaagaccctccctctcaaaagaataaacaagtataaaaaagaaggcacttccctcaaacagaaactaccctctatctctctcttttcaagccttaaatgagtagaaaagagtgaagaaaggaaagaaaggagcaccatttttggtttgagaaacataattagcaagagagttcaaaatggggaagagagagtttaatggggtggtgttgatg

SEQ ID NO: 34273 - DNA, 243 bp, Glycine max
  Clone ID: 700891458H1
ataaatatatattgctgattagaattgagtttgttgatccttagaaatgtagtaaattagtaattctgaaaggatcaagttgttacctaggtttattctaacaagttttgttttcaaccttttgattgtcttccatagttccattttttctctctctttttttttttatttgaaatgtaattgccattactcatttgtatagactcacgtgcctctctttgtcatattgttctctatataatt

SEQ ID NO: 34274 - DNA, 242 bp, Glycine max
  Clone ID: 700891460H1
ctttttgaacagacgaaggaaaaaaacgcagtgatcacgagcagacatgtatcatccaacaagaggtggcgttcgtggtggtcgagatcaattcacttgggaggatgtgaaagctgataagcatagggagaactatcttggtcacagtatcaaggctcctgttggaagatggcagaaagggaaagatcttttctggtataccagggataaaaagtcccaaaatgcagaaatggaggctgcaa

SEQ ID NO: 34275 - DNA, 159 bp, Glycine max
  Clone ID: 700891463H1
cagagaataaaatataacttcgcgtagagacgcgctttaagggtgcgctcatagtcaaaataagcttgcagttctgtaatatatatgttttatgggtacttcgtcggtgtaaatcaaacctttgtcttataataataaatatcaaattgttttggcttc

SEQ ID NO: 34276 - DNA, 177 bp, Glycine max
  Clone ID: 700891464H1
tgaagagatgagagtcaaaaggagggatgcagaactgtggatgtcccaccgtatgctaccagatttgctgaaggaaagaattagaaggtatgagcaatacaaatggcaagaaaataggggtgctgaagaggagacattgattcgcaacctccctaaaagatactacagaaggggata

SEQ ID NO: 34277 - DNA, 250 bp, Glycine max
  Clone ID: 700891465H1
gagcaggcttcagaagcttaatgcaatggtgttggcagcatcatcaacacctgattctgaagatcagttagaagcccctattcacgcaggaaatggagagtacttaatagagttagccattggatcaccaccagtgtcttaccctgcggttttggacactggcagtgaccttatatggacacagtgcaagccttgcacacggtgttacaaacgaacaacacccatttttgatcccaagaagtcctcttct

SEQ ID NO: 34278 - DNA, 252 bp, Glycine max
  Clone ID: 700891466H1
gcttccccgccgccgatctcctcctcttactatccctccgcgccgcacatgctcctcgccctctccgccgggctagcggctccgccggagagcaccgcagcgccttccgccgcgctcagcagaaagcgtttccgaacgaagttcagtcaggagcagaaggagaagatgcacaagttcgcggagaaagtggggtggaagattcagacgcgggacgaggatttgattcacgagttctgcaacgaggttggggtc

SEQ ID NO: 34279 - DNA, 245 bp, Glycine max
  Clone ID: 700891467H1
cggctcgagaggggtgctcgggatgcctgctggtccttacttatatgcggatgatctgattgacgtcttgaagaaaaaacatgcttctggaacgtataaaaacctagtattttatctggaggcatgtgaatctgggagtatctttgaaggtcttcttcccgaagatatcaatatttatgcaaccacagcttccaatgcagaagaaagtagttggggaacatattgccctggggagtatcctagtc

SEQ ID NO: 34280 - DNA, 247 bp, Glycine max
  Clone ID: 700891468H1
agtggtttcagtgagtgatcggtgttcacttgatccttcataagtcgtcatcatcatcatcatcatcaccgttgatttaagaagatgccgatcagaaacatcgccatcggtaggcctgaagaggctactcaccccgacacgtttaaggcggggttggctgagttcatctccaccttgatcttcgtgttcgccggttcaggttccggcatcgcctacaacaagctcaccgacaacggcgccgccactc

SEQ ID NO: 34281 - DNA, 244 bp, Glycine max
  Clone ID: 700891469H1
gatatctaaaactgaatgccgtgttcatcatagattagatgcaactgtggatgccattttggcaggaaaacctccattatttgaaatccgtcaatgggatgattctgacaacgagttgccaaaatatgctccattgcccgaagaaaatcttggagaaacttctgacttaactaacaataatatcacgagttctgacaatgaacctagtgaggatgataaagatcacccacgtacttggtccacg

SEQ ID NO: 34282 - DNA, 249 bp, Glycine max
  Clone ID: 700891472H1
ctgagtgagtcccgacatcaacttataataattcctaatcagtgacaagtgttatggaggcagagccagacaagtacaagatgatcaactttgaagaaaccgagttgcgactcggcctgccactcagtggaaacgagacgacgctcaaaaacacttgcagtactgggaagagggttttttcggatactcgcgtggatttgaagcttaacctttcctcaacctcaaataacgcccctcctcctgcaaagc

SEQ ID NO: 34283 - DNA, 239 bp, Glycine max
  Clone ID: 700891474H1
caaccctattgaattgaattgggggaagaagaacattagaagaagaagaagaaaaatcggcacaattgttgtaattgaacgatgtctgctgcggtgtgcggaagcaagagatctttgttcgaagagcttcccccttctccgccagtatccaagaggctccgctgttcctcctcccctattcgcctctctctcccttccctcatcgaccaccttcgctctctcttccctcatatggatga

SEQ ID NO: 34284 - DNA, 241 bp, Glycine max
  Clone ID: 700891475H1
ctcaaagggtagtttcactccacacaacgctcccatctctgaacgcatccccatccacagccacgcctacaccatatgccccgccaccgcctccgtccgcttcctctcccggcggcgtttcgaaggcggcggagttcgtgatctcgaaggtggacgatctgatgaactgggcccgccgcggctccatctggcccatgaccttcggcctcgcctgctgcgccgtcgaaatgatgcacaccgg

SEQ ID NO: 34285 - DNA, 239 bp, Glycine max
  Clone ID: 700891476H1
ggttgcccatgtacaatacattcaacaaacataattctagtgatccaagatatacttctgagttgaactacctgcgtttctacctgccagatatcttccctactctaaataagattctgctctttgatcacgatgtggtggtgcaacaagatctcagtggactatggaatgccaatttgaaaggaaaagtaattgcagcagtgggcacctgtcaggaaggtggaacctcatttcatagg

SEQ ID NO: 34286 - DNA, 237 bp, Glycine max
  Clone ID: 700891477H1
cttcattttccccggctctattgttttaagggatgttaaaggtatctcaacgagaagagacaaaattattgcactgataatgattatactagctgtggttacaagtgtgcttgccatttccatcaacatatataatgcttttagtagcaagtcataaatacaagctggttctctcatttctccccttctattgttttttttatatgtatagaaaattttatttggggagagagggta

SEQ ID NO: 34287 - DNA, 242 bp, Glycine max
  Clone ID: 700891478H1
tctcttcttctgtctgtcgtcttcttccctctcaccctttcaactttcaagtaacaccacactcttcttttcttactcttactcttatgcttttcaccttcttcacttcactaccctctacccttttctgagacacaaacactctcttcctgttccacgcttccaatggcttcatgtagtatagggaccccaaatattaaagcattgaacttgcactttggtggaaaaaaagttggcctttc

SEQ ID NO: 34288 - DNA, 241 bp, Glycine max
  Clone ID: 700891479H1
tctgcttcaacttgctccctcagaagcgaagaagaagccacagagaactagtctcctactctcacccgcaagaaagaaatggcatctcacatcgttggatacccccgtatgggtcccaagagagagctcaagttcgctctcgagtctttctgggatggcaagagcagcgccgaggatttgcagaaggtgtcttctgatctcagggcatccatctggaagcagatggctgatgctgggatca

SEQ ID NO: 34289 - DNA, 240 bp, Glycine max
  Clone ID: 700891480H1
gcctgataacccataaccgaccgcaccaccgttttcctttgctttgcgttctacaatgtcgaaaacctcagagattattacatgcaaagctgctatttgctggggaataggaaaacctgtgactgtggaagagatacaagtagaccctcccaaagccaccgaagttcgagttaagatgctttgtgccagtatatgctccacagacatctctagcacaaaaggattcccacatgttagaat

SEQ ID NO: 34290 - DNA, 245 bp, Glycine max
  Clone ID: 700891482H1
gcgggttgggaatttgcaaaggagacaggttttgatgttgtcatgataaaccctggtacagctttgggccctctgcttccaccaagaatcaattcaagcatggaaatgcttgttagtgttctcaaagggggcaaagagacgtacgaggacttctttatgggaatggctcacttcaaagacatagcattggcacatattttggcacttgagaacaagaaagcagcaggaaggcacttgtgtgtgga

SEQ ID NO: 34291 - DNA, 246 bp, Glycine max
  Clone ID: 700891484H1
acagctagctataaacatccttagtcctattaactatcaagatatgagtcaacatagtgtgatcaaaatttcggccgactcttcatatgttgccaagtgcctattgtatcctgcatgattacaatctcttgggagctcttcatagcacattggaagacctgacgatcagccacgacatgggtcgacgttgtcctccacagtgtgggcggaattggacaactacaaaggctttccgagaccattggc

SEQ ID NO: 34292 - DNA, 142 bp, Glycine max
  unsure (1)..(142): unsure at all n locations
  Clone ID: 700891487H1
cagaaaaataaaaaaagagtagctagcactagctagctaaacacagtacgagtagtgatcataggcaagcaaaagcatattacgtaatgatggcaaccatnggaagacattgaacaacatgacgtggtcgaaagttacaact

SEQ ID NO: 34293 - DNA, 237 bp, Glycine max
  Clone ID: 700891489H1
cacctgaaaatgtcttgctgcggtggtaactgtggttgcggaagcacctgcaagtgcggcaacggctgcggaggctgcaagatgtacccagacttgagctacactgagtcaaccaccaccgagaccttggtcatgggagtggcacctgttaaggctcaatttgagggtgctgaaatgggtgtgcccgctgagaacgatggctgcaaatgtggaccaaactgctcctgcaacccctgc

SEQ ID NO: 34294 - DNA, 181 bp, Glycine max
  Clone ID: 700891490H1
tctctctctgtttcgctttcaccgaagaataacttgactttcccgaactccacctgagaaaaagatacccttaattcgcaggcgcgtcttgtgttggacaacaaccacaagatgattaacttcgaagaaaccgagttgcgactcggcctccctggcaacgactcagcactccaaggaagtg

SEQ ID NO: 34295 - DNA, 238 bp, Glycine max
  Clone ID: 700891491H1
gaggatgatctaccttcacctccccccaggacttttatcaaccagttacctgattggagcatgcttcttgctgccattacaacaattttcttggcagctgaaaagcagtggatgatgcttgattggtagccaaggcgacctgacatgcttattgacccctttgggataggaaaaattgtacaggatggtctcgtgttccgtgaaaacttttctattagatcatactgagatggtgctg

SEQ ID NO: 34296 - DNA, 243 bp, Glycine max
  Clone ID: 700891453H1
actagttctagatcgcgagcggcgccctttttttttttttttttaaaacaaaacttctgaatcattttcctatacagatatctccgttgaaacttaaacacaaatttcccgaaagtaatacacaagatatgaagtttttcctaatagggggatcgaaggaaactagtagaacgaagaaagccttcaaaaatcaaatagaatttccaccacataaaacctgaaacttgattcattatagagaga

SEQ ID NO: 34297 - DNA, 252 bp, Glycine max
  Clone ID: 700891416H1
gcattgaagccgaaggatcccctatacgtacgtttccagcaactacttcgctggctattttcttcccacattagcacaaccaggtgcttttgctccacctccacccaaagacaaagtcattatcttgggcgatggaaatcctaaagcaattttcaacaaggaagaggacattggaacctacaccatcagggctgtggatgaccctaggacattgaacaagattctctacctcaggccccctaagaacattta

SEQ ID NO: 34298 - DNA, 247 bp, Glycine max
  Clone ID: 700891417H1
caatctcaaacacacacacacagaacagagtgtgatggaagaacaagaagagtgccaagttggggagaccaaggaaactccaactcctcctgttcgagtctatgctgatgggatttatgatctctttcacttcggccatgcccgttctctcgagcaagccaaaaaactgtttccgaacacttatcttcttgttggatgctgcaatgatgagatcacccataagtataagggccaaactgtcatgact

SEQ ID NO: 34299 - DNA, 241 bp, Glycine max
  Clone ID: 700891418H1
cttgctgttgttatcgaacatttcatggtgatttcaaaaattttccggaaaaaatttgaatctatttttatatgcgaatcaatcctactacttctggtcctgaggtttctgcgcttgagaaaaaaaatctgggacgtatcgtccaaataattggtccggtactagatgtatcttatcccccaggtaggatgcctattattaacaacgcgctgatagtaaagggtcgagatactgttggtca

SEQ ID NO: 34300 - DNA, 241 bp, Glycine max
  Clone ID: 700891419H1
tgcttccatgatcaacaccatagcttcccttaccttcatcattgcagtggcactcaggtttgaggttcttgatcttcgaaatcctcggggtatagcaaaagttattgggaccattatctccttagctggtgttttgatcatgacactgtacaaaggacccgttatgagaaatttatggcatccactaatccatattccagggaaaagtgctgctataaatgaagactggttaaagggttca

SEQ ID NO: 34301 - DNA, 242 bp, Glycine max
  Clone ID: 700891420H1
tgctgaagcaaagccaaaaaagatctgctcacaaattggattgtgtacctttgatgggactcatggtgttagcatgggtatcgagagtgtggtggataagaatgaaaaaaaatcatctggtggcattcgggatgctggttgttctgcatgtgagatggctgttatttggatgcagaaccagctgaggcagaatcagacagaagataggataatagactatgccaatgagctttgtgaaaaat

SEQ ID NO: 34302 - DNA, 237 bp, Glycine max
  Clone ID: 700891421H1
atctcatttcttgctattcatttcttcattccaccatcaccatggtccaggagaagaagaacgtggtggtcaagaacaagaagccaaacaacaatgccgacgagcttcacttccgcggcgtccggaagcgaccatggggccgctacgccgccgagatccgtgaccccggcaagaagacccgcgtctggctcggcaccttcgacaccgccgaggacgccgcccgcgcctatgacgccg

SEQ ID NO: 34303 - DNA, 249 bp, Glycine max
  Clone ID: 700891425H1
aagatggagtattcggagccggttttgtacttggatgtcgggttttggcaccctctggctccttgtatgtatgatgatgtgaaggagtatttgaattggtatggaaccagaagggatgcaaatgagaagctgaagagtccgagtgcgcctgtcattggtttggttttgcagaggagtcacattgtgactggtgatgatggacactatgtggctgtgattatggagctggaggctagaggggctaaggtc

SEQ ID NO: 34304 - DNA, 249 bp, Glycine max
  Clone ID: 700891426H1
gcgcgtggtggcgacttcgtcgatctcatccattatgccaagccctaactggccagctgataagattaaggcagaagagtgttggacagaccttgaatactgcaaacagaaggggttgtactatcccattgcaaagactctagcagagaaagcgggttgggaatttgcaaaggagacaggttttgatgttgtcatgataaaccctggtacagctttgggccctctgcttccaccaagaatcaattcaag

SEQ ID NO: 34305 - DNA, 245 bp, Glycine max
  Clone ID: 700891428H1
cgtttacaagtcctcctttctcacagctaggtggtggtgattagtgtacatatatatatggttgaagtgggtatgtatcagatccctacgatcactttcgacccatttgcggaggcaaaagaaacagatgctcccggggcaaaagagtatgtgcatatgcgcatacaacagaggaatgggaagaagagtctgaccacagtgcaagggctgaagaaagagttcagctacgagaagatcctcgaaga

SEQ ID NO: 34306 - DNA, 247 bp, Glycine max
  Clone ID: 700891429H1
cttggaaacaggcagtatgagcattttaacaaggtggcgaaggtcgtggatgacatgctcgttgagcaagggcgggaagcgccttgtgccagtgggtctaggtgatgatgatcaatgcattgaggacgcccgtactgcatggaaagaagaactgtggccagcattggatgaattgcttagagatgaggacgatgcaactgtgtctacaccttatactctcagttttaggagtaccgggttgttattc

SEQ ID NO: 34307 - DNA, 239 bp, Glycine max
  Clone ID: 700891432H1
ctggtatggacatagtagttgttaacatgtgcaggattaggacatatttggtaccgatgtctccttattatatatagaaggatggtgatggatgggttgtactcacatgatatctgtgatagggtcattctgctgaaacgttagggccactgctggcgtgcaaatttcactgagacataggttgaccagctggcattctgatattcaagggaacactgttgaagaatgagttatgtaga

SEQ ID NO: 34308 - DNA, 262 bp, Glycine max
  Clone ID: 700891433H1
caccaaaaacccttcttgtgtttgagcttccgacaagtgctgatctacgctcatggcttctccgcgagctgcagcaaacacagaagatagcttggagatagatcaagcgccagtactcttccgcttccggtagaaacctgttgcagggaccgcttctcaagagatctgaaaccctgagaaaatggaacgagcgttgggggatcttggacccgacaacggggagaatcgaatacaagataagaagaaacgaaccttctgttaa

SEQ ID NO: 34309 - DNA, 256 bp, Glycine max
  Clone ID: 700891434H1
aatttcctgacgcaacggcaattggatttggagtgtcctagattcgtgtcctggtttggtttggtttggttcgtactgttgtacgagttttgactttttctggatttggagttttcaatcagataatgttcaacggagccgcttggtgggttcagattcagaagcagagggagagggtgtttgtgattgcaagtgttggtgaattcaaaagagagagtaagaagagtgtgcatgaacatcatgagtagtagtagaa

SEQ ID NO: 34310 - DNA, 254 bp, Glycine max
  Clone ID: 700891435H1
cggtacttttccaatgtagccgtgagggatgagcactttaagaccaaacgacacaagaagcggtatgcttcttttaattttgcttctgttttttaatcccctttgttttgaatcctatcctacattctccccatattttggtgaagattgattattagatttatagaattgcttttgaactttgaggctactcatgtttttaatgtatgagctttcagatgtgtgaaaacataaagcagttgggcactatgaaa

SEQ ID NO: 34311 - DNA, 250 bp, Glycine max
  Clone ID: 700891436H1
gtgagaatcaacccattcttggccaaaagtgatgtggtgttggaaatttgtggattgaattgtgactaaaggtaacaaaaaatggaagggcatgccatggtttgacgttttacactgataagatctgcaacatgcataagtttttggtcaaagacacatgacacatccctggatctgttggtgagaactgccactgcaaaaaaaaatgttatttgtgggtggtgtttgtagatacaacatatgttttgag

SEQ ID NO: 34312 - DNA, 252 bp, Glycine max
  Clone ID: 700891437H1
gtcgtgttactgttagctaacactttctgcaataatggcacgtactagcatccaaacaagctcttcatcacgggcaaaaaaatttgatgtgttttcatcgttgtcttctcaaaggactatgcatcatccacatggtgcatgacagagctgacaaagatcgttgattgggttcaagaaacaggtccaagtgtgctccctgttttctatgatgtcactccttcggaggttcgaaaacagagtggacagtttgga

SEQ ID NO: 34313 - DNA, 254 bp, Glycine max
  Clone ID: 700891439H1
ctcgagccgattcggctcgagcctccactctgcaacctctcgccgatcgcaaccagaagtgcctcccatcacattcgtgcatcacccttggaggagtgggaagggagaatgaatgttggcatgtctaattctgtgacgacagcaattcgcagcagtgttcgagacttggccattgggaagactaaaactactgagaaagcagaccgggctactgttgagcaggcaattgatcctagaacgcgcatggtcttatt

SEQ ID NO: 34314 - DNA, 245 bp, Glycine max
  Clone ID: 700891442H1
tatagtaaaacaggacattcattcatctatggctacccttattgctcccagcaaccactctccccaagaagatgctgaagctctcagagaggcttttgaaggatggggaactgatgagaacactgtcatagtaatcccgggtcatagaactgtgtatcagatgcagtatatcagaagagcttatgaggtaatttaccatgaggatcttgtgaagcgtctatattctgagatcaaaggagactttg

SEQ ID NO: 34315 - DNA, 243 bp, Glycine max
  Clone ID: 700891443H1
cttagttatcatcctctctttcaaattatgtgctgtcttgagattgattcttataaacaaagatgaatagatatgtttagcttcgtttcgtgttcattccactttgattggagcataatcattatagttattgtctgttatctacccgatttcagaggatgaccatataactggtaactccatgtcaaaactcagatattcttgtttagttgggatgatattcatatttagtatgacggcaat

SEQ ID NO: 34316 - DNA, 248 bp, Glycine max
  Clone ID: 700891444H1
ttctcgagccgaatcggctcgagccagcctggtgtgcttatccaggacctttgagggtgaaagacgcaaggaccagagataacagtttgttgggcaaatttgagctatctggcattcctcctgcacccaggggtgttcctcagattacagtgtgctttgacattgatgccaatggtatcttgaatgtctctgccgaagataaaaccacttgccagacaaataagatcactatcaccaatgacaagggt

SEQ ID NO: 34317 - DNA, 241 bp, Glycine max
  Clone ID: 700891445H1
aagagacatcacgttcgagaactatgcgggaccagcgaactatcaagcagtggcgctccgtgtcggagccgaccatgcggtggtgtaccggtgcaacattgtggggtatcaagactcatgctatgtgcattctaaccgtcaatttttccgtgaatgcaacatttacggcactgtagacttcatatttggcaatgctgccgtggttttccaaaagtgcaacatttatgctcgtaagcctatg

SEQ ID NO: 34318 - DNA, 242 bp, Glycine max
  Clone ID: 700891447H1
attccacaacagtgggagggcgatccaaaaagagagagtggaaaagatggcgcggttgatcacagtggtgtggtgcgcggtggcggtgctattatgcgccgcggccggtgcgtcgtgggtggaggaggcggcgaacccgatacgaatggtgtctggcgtggaggcggaggtggttcgggtgatcggggagtgccggcgtgcgttgaagtttgctaggttcgtgagcaggttcgggaagagtt

SEQ ID NO: 34319 - DNA, 253 bp, Glycine max
  Clone ID: 700891450H1
cgttccttctgccacaaattaactggaaaggatggtgctgcccaagttctctccgttctcacggcttctcctttcttcccttgtgattctcttaataagctatccagttaaatgtgacgatgatgaggaagacaatctttatcagggtatcaacaagtatcgagcatcgttaaacttgaaagctctaacaaggaatgacaatgcagattgccttgctgaaaaaatagctgaccaattcaagaaacaaccctgc

SEQ ID NO: 34320 - DNA, 251 bp, Glycine max
  Clone ID: 700891451H1
caagtctctcgaagcctctttctctctcttctagaagctatctgtgtttggtgttactaagtctccaacaagcaaagtacatggttgatttggaaatccaggtccccaccccattcgacccgtttgccgaggcgagagaatcggatgcccccggagcaaaggagtatgtgcatattcgaattcagcagaggaatgggaagaagagtctgaccacagtgcaagggctgaagaaggagttcagctacgagaag

SEQ ID NO: 34321 - DNA, 250 bp, Glycine max
  Clone ID: 700891452H1
gttctagatcacgcgcgatctctaaactaggcgcatctctatgctgtcttccaaggcctgctcaaagtgcttgctggaattgacaccaactttactgacacctccaaagcctcggacgaagatggagactttgccgagctctacatgttcaaatggaccaacctactcaactgccgcacaaaccttctcataataaacatgattggggtagttgccggcaactcctatgccatcaatagtggctaccaat

SEQ ID NO: 34322 - DNA, 250 bp, Glycine max
  Clone ID: 700891415H1
gccacaaggatgaggccttcttctctggtaatgctgctgctctggcttcaaggaagtcttctccaagagtgaccaacgaggctgttcagaaggctgctgctgcattgaagggttcagatcatcgccgtgcaacaaatgtcagtgccagactggattctcaacaaaagaagctcaaccttccaatcctgccaaccaccactattggatccttccctcagactgtagaactgaggagggtacgccgtgaatt

SEQ ID NO: 34323 - DNA, 236 bp, Glycine max
  Clone ID: 700891363H1
gattgatacaaggcttttttgttggttggagatgcatgattgtggtgtgctttgttttcatttcatcatatgacagccttgtgggtttctttggtgtttcttgatgcatacttaatttactttattattgtgtatttatctcttccatttacaaaaaaaaaaagtttgtgtaggtttccttctttgaagtaaaaagaaattaaatatgtactgaaaatggaataatagtgtgtttt

SEQ ID NO: 34324 - DNA, 241 bp, Glycine max
  Clone ID: 700891365H1
tacgtgatcttgatccagaaagcattactactttcccatctaccctgtctcaactgactgagcggttgaaacactggaaaaatgttctacaaagcaatgttgaggataggtttccagcagtattaaagtttgaagaagaaagcaaggtgtagcgggactttcacgttattgatgtcgaagttccagggcaatatttcactgaccacgaaattgcaccagatcataccgtgaagttggatag

SEQ ID NO: 34325 - DNA, 238 bp, Glycine max
  Clone ID: 700891366H1
gtatgtaggtttttcacttgatctctcaaatgaatccacatttgtgtccttcccaattatttaattttccgagtgagttggaatcggagtggatgtggattgggtggtgaaccggtgaaagatgcgacgacgggctgccgagtatcggcgcccggcacgacggaggttttcatattggatctggcttctccttgctttctccaccatcctcgctttgctccttttcctgctccaacac

SEQ ID NO: 34326 - DNA, 237 bp, Glycine max
  Clone ID: 700891369H1
tgaagagtgagagagatagagagagagaggcacttggaatccatgaatgagacaaatcatcagcattcacataggtcaggccgggatccatgctggcaactcctgctgggaactctactgcctggaacatggcatccagcccgatggcatgatgccaagtgactcctccttcggtgtagcccacgacgccttcaacaccttcttcagcgaaaccggatccggcaagcacgtccctcg

SEQ ID NO: 34327 - DNA, 228 bp, Glycine max
  Clone ID: 700891374H1
attattgtcctcatagtgagtagaaggcagagagactagagcggagatagcaatctcatctcattcatttcaatggcaactcaaggtcaagtcattacctgcaaagctgcggtggcctgggaacccaacaagcccttaactgtccaagacgttcaggtggctccgcctcaggccggcgaggtccgtgtccaaatcctcttcaccgctctctgccacaccgatgcttac

SEQ ID NO: 34328 - DNA, 235 bp, Glycine max
  Clone ID: 700891382H1
tcgatctgctaactggaatctcttctcagttacgattagctcccttaacccaatctttgttttgcagaattatgtctaatgcaaatgatcaatcgagagagagaggccataaggtgaattttccattacagtggtcaaatgcaaatgcaattatgtaacttttttaaaaaagaccctgcgtattaaatcactgaacaggatttaatttagatgtttcgcaacatagaactggtgt

SEQ ID NO: 34329 - DNA, 233 bp, Glycine max
  Clone ID: 700891384H1
ttttgctcgacttaggatggaaaagcggcacaactatgttaggaaaactgcagaacttgctactcagtttttcatcaatcctgccaccagtcaacctaatgtttctggacttatacttgctggttctgctgacttcaagactgagttgagtcagtcagatatgtttgaccctcgattgcaagcaaaaatattgaatgtggtagatgtttcttatggtggggaaaatggattca

SEQ ID NO: 34330 - DNA, 233 bp, Glycine max
  Clone ID: 700891385H1
gtttgttttttctctcacctgaaaatgtcttgctgcggtggtaactgtggttgcggaagcgcctgcaagtgcggcaacggctgcggagggtaagatttttgttgtgtcactgttgcttcacacttcgaaaaattgagtttttccgggaaaattttcttcttgggttttttatgggcttttttgggtacccttttggttgaattgcatgaaaaaattatgctttgtttattctt

SEQ ID NO: 34331 - DNA, 233 bp, Glycine max
  Clone ID: 700891386H1
aacaaaaacaaagaaaaaaaaaaacccttagccaacacaaccatcatggccacctctgctattcagcaatcagcattcactggtcaaactgctctgaagcagctcaatgagttcgtccgcaagaccggtggcgccggcaaaggtcgcactaacatgcgccgcaccgtcaagagtgctcctcagagcatttggtatggccctgaccgtcccaagtacttgggtccattctcggg

SEQ ID NO: 34332 - DNA, 229 bp, Glycine max
  Clone ID: 700891387H1
ctgtgaaactgaaaccgaatccaaaagtttgcctacatctactgagaattttatctcaagtgggaataggttggtggttgacagttgtccatgcacttttgtatctcaaatttgctctttggcaattggacttcaagactgtggcctcgctaccgggcagacaaaaggggatcaagcaaaaatttgcaggagcaaaagccttcagttgagtacttacgatacagacaag

SEQ ID NO: 34333 - DNA, 229 bp, Glycine max
  Clone ID: 700891389H1
ctatgttgagagactcagggatgagcccttgtttctggttcttgcccagaatgttcaggaatatcttgaaagagttggaaatttcaaagctgcatctaaggtggccttgaggagggttgagctcatttactacaaaccacaagaggtttatgttgcaatgaaaaaattgactgagctgacagaggatggagataatggagtggaggcaagtgaggagaaaggatttgag

SEQ ID NO: 34334 - DNA, 228 bp, Glycine max
  Clone ID: 700891390H1
tttggattaaggccagccatagttgtttcctctccaaaattggccaaagaggtaatgaaagacaatgaccttgagtgctgtggacgacctaaattactaggccaacagaaactaacctataatgggttagacatgggattttcctcatacgatagttattggagagaaatcagaaaaatttgtgttgtccatgtccttagctccaaacgtgtccaaagctttacctca

SEQ ID NO: 34335 - DNA, 227 bp, Glycine max
  Clone ID: 700891392H1
ggggctacccgctgagtttaagcatatcaataagcggaggagaaagaaaatgtgagaatcactggagaccaagtcaaagataagactcaatccaaaagattaagtgaacaagatcaagtcaatgtaaaatatctctcttgataagcaataagttaatcaattaattaaaggtatataccttttgaaatatcaatacaataaaatctctgttgctcttttctagcatt

SEQ ID NO: 34336 - DNA, 227 bp, Glycine max
  Clone ID: 700891393H1
gcaaggaatcatcacggaagagatgctttactgtgccactcgtgagaaccttgacccagagtttgtgaggtcagaagttgctcgtggacgtgctatcattccttccaacaagaaacacttggagttagagcccatgatagttggaagaaactttttggtaaaagtaaatgccaacattggaaattctgcgagttgcaagttccatagaagagggagtttacaaggtt

SEQ ID NO: 34337 - DNA, 230 bp, Glycine max
  Clone ID: 700891396H1
accatactgaggaaagcataatcaaatcaaccatggctaccctcattgctcccatcaccttttcgcctggtttagatgcagaagctcttagaaaagctttccaaggatgggggactgatgagaagaccgttatagcaatattgggtcacagaaatgttcatcagaggcaacaaatcagaaagatttatgaggacatttaccaagaggacctcatcaaacgcctagagtct

SEQ ID NO: 34338 - DNA, 242 bp, Glycine max
  Clone ID: 700891402H1
gttccatatgaccacatttccaagttccaccagcatcgctccaaggcctagttggagtcacaatactctttgctgtgccattctatgaccgtgtctttgtgccactagcaaggaatatcacagggaaacccactgggataacagtgttacaaagcattggggtaggacttttcttgtcaatccttaacatggttgtgtcagcacttgtggaggccaaaagggttggtgctgcaaaagagagt

SEQ ID NO: 34339 - DNA, 237 bp, Glycine max
  Clone ID: 700891403H1
cagcaaataagcagtttagaatggatttcggcagcccttggactggggcatattacggggcccctatgtatgatggttatgggtatgcattgccccctcgtcatgatcccagcatatatgctgctgcttatggtgcttaccccctttatggaggccaccaacaacaagtaagctgaatgaagtgcagtgcaggagtagcattcacaacaagttagacagcatcaagcttgaatgtgc

SEQ ID NO: 34340 - DNA, 239 bp, Glycine max
  Clone ID: 700891404H1
aaaaaccgaaaaccctcgcaatttcccaattcacgcgtttctttcctttcaagactctctctctcgctctagttttttcgttccgcgactcagcctttccaatcctctcacccagagttagggtttttaactctattcgatcggcgatttcgaatactcggaggctcgaatcgtgttgggggttttccgttttgattaaaaaagtttccgttgtctgtgttgggtgatcaagggttgtt

SEQ ID NO: 34341 - DNA, 240 bp, Glycine max
  Clone ID: 700891405H1
aaagctacaaacttccttttgctagtaacatatcaagatatgagtcaacagagggtgatcaaaagttcggccgactttcatatgttgccatgtgctattgtatcttgcatgatgacaatgtcttgggagctctttttagcatatgggaagaactgagatcagcaaagtcatgggaagaagttgaactaacagtgtggggggaattgaacaattacaaaggctttccgtgaccattggctg

SEQ ID NO: 34342 - DNA, 239 bp, Glycine max
  Clone ID: 700891406H1
caaatggagggaatttcaaatgaagcatgctcacttgccggtcactggggtctagggaagcttattgctttatatgatgacaaccacatttccattgatggggacactgagattgcattcactgagaatgttgatcaacgttttgaggcacttgggtggcatgtaatttgggtgaagaatggaaatactggatatgatgaaattcgtgcagccattaaggaagctaaggctgtcaaaga

SEQ ID NO: 34343 - DNA, 240 bp, Glycine max
  Clone ID: 700891408H1
gctattagagacccttcctcttccaaatattaaatggatatgtccgactgctcctactcagccaatatctatatttggtggctttccgtctactgcttggtttgatgttggagatatttcagaagatgctcctgatgatctagaaggtttggatgcttcatctgcacatgttgcgaatttgctgtctacagaacctgcagacattaagcttggtgttggagggttcagtatgggtgcagc

SEQ ID NO: 34344 - DNA, 257 bp, Glycine max
  Clone ID: 700891409H1
tgagcggtggaggtatcagtagtaggatgaatcaaacagcggaagaaaagaaaacgcaaaggttgttgtgagcggtttcacgccaaaaacagaaacaatgcgcggaagaatgaggattgaagaacaaagagacagagacagggacaaagaaagaggcattgttgttcttcaatccaaaaatcatagcggcatggttgcattctcctttttcatcctctgttccttaatcctcctcgtacaaccttcttcttcttcca

SEQ ID NO: 34345 - DNA, 243 bp, Glycine max
  Clone ID: 700891411H1
atgcttacggtgatggaagcttaatcgcgcgtctctatcgtgacacgctttctctctcttctttgtttctcagaaatttcacgttcggttgcgctcacactaccctcgccgaacctactggagtcgccggattcggtcgtggtttgctctctctcccggcgcagtggccacgttatctcctcaactcggaaaccggttttcgtattgtttggtttctcactcgttcgattcggagcgagtgag

SEQ ID NO: 34346 - DNA, 248 bp, Glycine max
  Clone ID: 700891412H1
tatatttcaaattttgaagataagtttgtctgtgtcaattgcttaacttgtgaatatcaggcagaggcaattgctggaaatttttgggttttggggtttaagaaagtcatattctgatgaaatctcaaatctgaaattaatatattttgaagctatggttgtatattttaatgttattgatgtatattttaatgtttgatagctgtttctgaattgggatttttatttctgagatcattaaaggttat

SEQ ID NO: 34347 - DNA, 247 bp, Glycine max
  Clone ID: 700891413H1
gagattccggaagcatgtatacagattgggatattcttcctccacgaaaaatcaaagatgtcaaggccaaaaagcctaaagactgggaagaaagagaatacattgaagaccctaatgatgtcaaacctgagggatatgattcgatcccaagagaaattcctgacccaaatgctaaagagcctgaaaactgggatgaagaggaagatgggaaatggaaaccaccaaagataccaaatccagcatacaa

SEQ ID NO: 34348 - DNA, 249 bp, Glycine max
  Clone ID: 700891414H1
tgatgatcggtttgtgttgctatcgcggtgacaccgatgctgcaaggaggatgctccatgagatggtttaccaaggggcttttcctgatgtggtgacttataacttgttgtttaagttcttgctcaagggtcggaaactgagggaggcaaataattagtcatatcgaggttgagtaataccaaacaaattcaaaaagactatgttgcttctttatttttattttttgtgactatgttgcttctttatag

SEQ ID NO: 34349 - DNA, 233 bp, Glycine max
  Clone ID: 700891362H1
tctcgagccgaatcggctcgagaggccattcaaaccttcaacataacatggaagaatccaaaggttttgttggtggtgagtctcaaaaaccacatccagaaatgccctctatttcttttcaaattcctatgccagggaggaatcgatctggtggtctctacccttggggatggaggcaaagagcaataataccacagcacaccgtgcgaaactctaacggggcaagtgagaac

SEQ ID NO: 34350 - DNA, 241 bp, Glycine max
  Clone ID: 700891314H1
ctcttttttctctctcttgcaaaacctaattttcatttcttccctcaaatttcaaaatgcgtgagatccttcacatccagggtggccaatgcggcaaccagatcggcgccaagttctgggaggtggtttgcgcggagcacgggatcgaccctaccggaaggtacggtggggactcggagttgcagctcgagaggatcaatgtctactacaacgaggccagttgcggtctgttcgtgccgcg

SEQ ID NO: 34351 - DNA, 234 bp, Glycine max
  Clone ID: 700891315H1
aacctacacatcctattcgtttgggtctggctctaaatttctctgtgttttattatgagataatgaattcacctgaaagggcctgccatcttgcaaagcaagcctttgatgatgctgtctcagacctggataccctgaatgaggattcttacaaggacagtaccttgattatgcagctgttgagggataaccttactttatggacttctgatatccccgaagagggtgaggacc

SEQ ID NO: 34352 - DNA, 238 bp, Glycine max
  Clone ID: 700891316H1
caccttcacaattagaaaaaaagagaaacaaaaaatgggcgtttctcgttctcaaaagcctcatgttgtttgtgggccattcccagcacaaggccacgtgaacccttttatgcaactaagcaaactccttctttgcaccggtttccacataacctttgtgaacaccgagttcaaccacaagcgtttggggaaatcccctgggcaaaaatttgtccaggggcaaccttcttttcgattt

SEQ ID NO: 34353 - DNA, 250 bp, Glycine max
  Clone ID: 700891317H1
gggaaaagcgatgaggatgaggatttgggtattggagatcgtgttcgccatatttctctgtgggaccctctcatgcaccgcccaacctcatcataatagggtttctctctcaaccaccacaagtatctgtcccgccggctcccttctcgatttcgtcttagggtttccagattccacttgtccccttctcaattctcttggatccattgccgtcatcgagggagatgaagtttctttgcagaaggctctg

SEQ ID NO: 34354 - DNA, 249 bp, Glycine max
  Clone ID: 700891318H1
ccaaaattgcagaaacgggaactttcaagggtagcctcactggaataagcattggaactgtgacggaggcccaaaaagtttggggtgttttccaagctcttggtaacatagccttcgcctattcatattctttcgttctcctagaaattcaggataccatcaaatctccaccatctgaagtaaaaacaatgaagaaggctgcaaagttaagtattgcagtgaccacaacattttatatgctttgtggct

SEQ ID NO: 34355 - DNA, 242 bp, Glycine max
  Clone ID: 700891319H1
gaactttctgaattcttcactttgatcatcatcttcttcaattccagcaaggatgtcacagcaaggcgaatcatcggacccgaaatcggggaagaaggacttctcgaccgcgattctggaacgtaaaaagtcgccgaaccggcttgttgtggatgaggctgtcaacgacgacaactccgtagtgaccatgcacccccaaaccatggaaaagcttcagcttttccgaggggacactatcctta

SEQ ID NO: 34356 - DNA, 244 bp, Glycine max
  Clone ID: 700891321H1
aacaatattattcaatagaaaagaaagaaagatgagtccaacatgggtttttgtgttaggtattattgcagcaatgttggtggttgtgaatggacaatcatcagtgaagccattggtgaagacagtgaaggggaagaaggtgtgtgacaaagggtgggagtgcaagggttggtctgcttattgctgcaatgagactatctccgattactttcagacataccagtttgagaacctcttcgcgaag

SEQ ID NO: 34357 - DNA, 242 bp, Glycine max
  Clone ID: 700891323H1
gattcgttttgaatctcttatttctttcaggtgaaagaaagactttaagtatgggaaatgaagaatcaacacatgattctcatgatgattttttccggcaaccccgttcccatgatggaagttcaccgaatactagccatcaatatcatcaacccccttcctatgatggaagttcagcgaatactagccatcaatatcatcaaccctcatcatatgctgggagttcggtgaataccagacat

SEQ ID NO: 34358 - DNA, 242 bp, Glycine max
  Clone ID: 700891324H1
attctacttaccttttctcttaatccaaatatcatcatctgaaacgatggctgccatggcaaccacaaccctctcttcaaacccgaaactctcatttttccacggaaagcccgttacatattcttcccgcgtcgcacccaccaccaagttattctcatccaaacaaggcacaatctccatgtccctaacccaacccccatacgacctccaatccttcaaattccaacccatcaaagaatcca

SEQ ID NO: 34359 - DNA, 243 bp, Glycine max
  Clone ID: 700891325H1
gattttcgccaaagcaacaggttgcaggaaacaatggatcggttggctgcaaagttagaatcaatttataatgctgcaggagggaagaaaataaacattataactcattctatgggcggtcttttggtgaaatgtttcatgtgcctgcaaagcgatatttttgagaaatatgttaagaattgggttgcaatttgtgcgccattccagggtgcaccaggaaccatcaattctacctttttaaat

SEQ ID NO: 34360 - DNA, 242 bp, Glycine max
  Clone ID: 700891326H1
gccctttgaaaatcgttcaaaaccaatctatctatctatttggtataagcatggagctttgttggcaaaaatccatccatggctcttaaagaagcttggaggattttgtgtgagagggttctcacccttcacactccacctcctacagtttgcttatgctttagccattggtttctctaatcaatcaccacaaaagggtatacatggaggaaccataattctctgagtggcatgaagcagag

SEQ ID NO: 34361 - DNA, 239 bp, Glycine max
  Clone ID: 700891327H1
cgcgcgtctcactcactcactcactctgtggaccttagacattgccctctcttgcctcactccaaacggcgcacatcaccggcgcggcggcgatctccttcaccggcggcttttttttttttttacaactcaaattttgcgttcgcttcacttcctctggaaatctctttctattcgctgatttcattgttgttgtttaaccaccacagcgatggcaacgattttgaggagcaccggag

SEQ ID NO: 34362 - DNA, 238 bp, Glycine max
  Clone ID: 700891328H1
ttgccatccaagtttttctggaaatgagagctgtgggatgcaagcccaatatttgcaccttcaatgcccttattaagatgcatggcaaccgaggaaagtttgccgagatgatgaaagtttttgatgatatcaagctctgcaattgctcccctgatattgttacttggaatacccttttggctgtctttggacagaatggaatggactctcaggtctctggaatatttaaggaaatgaa

SEQ ID NO: 34363 - DNA, 239 bp, Glycine max
  Clone ID: 700891329H1
caccaactaccactttattgtccctgaattgggccctgatgtgaacttcacctatggttctcacaaggctgttgatgaatacaaggaggccaaggcgcttggagtggataccattcccgtactcgttggccctgttacatacttgttgctctccaagcctgccaagggagtcgagaaatccttttctctcctctctctccttcccaaggttcttgctgtctacaaggaagttattgctg

SEQ ID NO: 34364 - DNA, 246 bp, Glycine max
  Clone ID: 700891335H1
tgataatcaaagactcaaggatccagaagttgtttgtcgttcttattttccaaagtcaaccagattactgcaagcatcaaaccattctagcccttgtcttctgcagcatggtgaaccttgtactgccataaatgcaggttctgtatctgctgatgatagagttcgagatgaatctatgttacatgcatccaatatattatgtaatggtcatcctgaaaaattggtcagcagcagctcctatggtct

SEQ ID NO: 34365 - DNA, 241 bp, Glycine max
  Clone ID: 700891336H1
cgcttactggaaatctggcaagcatcaagaacgtgctgtgttcgatttgtattttcggaggaatccgtttggtggggactataccgtcttcgctggcttggaagagtgcataaggttcatagctaatttcacgctcgctgaagagtagatcgattttgttagggaatgtttatcttcctcttgtgaggatggattctttgactacctcagaggacttgactgctctgatgttgaggtgtat

SEQ ID NO: 34366 - DNA, 243 bp, Glycine max
  Clone ID: 700891337H1
atttttcttcctcagtagtgtcatttacgcttctcttctctgcagcaactatgcctaaccctaaggtcttcttcgacatgaccatcggcggtcaatctgctggccgcatcgtgatggagctctacgccgacgtcactccccgcaccgccgagaacttccgcgcgctttgcaccggcgagaagggcgtagggcggagcggcaagcccctccactacaagggctcgtccttccaccgcgtgatcc

SEQ ID NO: 34367 - DNA, 241 bp, Glycine max
  Clone ID: 700891339H1
gggacatgagaacaaggagaggagcgtgttactctggagtagtctcaaggatgtgttccgatgcgagggtttcctagaaaaaaaacaagcctctgcacatgcacatgcatatgcatatgcatgtccccgtcggagactccattatttacagccggaaaaggcagaagaaaacgccggagaaaaccgccggcgctgattacgaatttttcgagtctttgccggacgacctcgtaatctccat

SEQ ID NO: 34368 - DNA, 242 bp, Glycine max
  Clone ID: 700891340H1
caatatattccattctctctgtgtatttccctacctctcccttcaagatgcagatcttcgtcaagaccctcaccggcaagaccatcacccttgaggtggaaagctctgacaccatcgacaacgtcaaggccaagatccaggacaaggaaggaatccccccggaccagcaacgtctcattttcgccggaaagcaacttgaggacggccgtacccttgctgactacaacattcagaaggagagt

SEQ ID NO: 34369 - DNA, 237 bp, Glycine max
  Clone ID: 700891343H1
cttttggatgacaatcttagcaaggggaaacgtcctgttgctgctggccaggcctactttatatctgatggctccccagtcaattcttttgaattcctgcaccctctacttaggagtttggattatgaactgccaaagacttccctaccggtcgaccgtgctcttgttctcagcaggatttgctgggctgtttatacaatcctatatccatggctcaatcggtggtggcttccacag

SEQ ID NO: 34370 - DNA, 236 bp, Glycine max
  Clone ID: 700891345H1
gcaaagggttgctgagaggagcttcgttaactgcaaacgcagtgtggcatagaagcagtttcttcccaaaggtaacggttagcgtccaccgcaagttggtgaaatttcgaagcttctcattaaccaccacttgctcctctcttctacctccggatttgccgcgtttggcaaaaacggctcaaatttcacttaccccaaacgaggttgaagaaattgctcccaaaattcaacaagtt

SEQ ID NO: 34371 - DNA, 245 bp, Glycine max
  Clone ID: 700891349H1
tccgaaccctcgatcactctcacgcgctcctatattcgctcctccaccgtcgctctctcgaacaaccacaacaccatcttcatcacatggcaaacgcagcatctggtatggcagtccatgatgactgcaagttgaggtttttggagctgaaggcaaaaaggacacaccgtttcatagtttttaagattgaggagcagcagaagcaggtcattgtggagaagcttggtgagcctgcccagggctat

SEQ ID NO: 34372 - DNA, 240 bp, Glycine max
  Clone ID: 700891353H1
aaaaggttttagatcgtaaaaactaatcactacgaaaacaagagatatcgaagatggctctgcccaaagctaaggagatcgtgtcgtccaattccgtcgtcgttttcagcaaaacctattgccctttctgcgtcgatgtgaagaagctcttcggtgacctcggtgccaattacaaggccatcgaactcgacactgaatccgatggaaaagagctccaagcagcattagttgagtggacgg

SEQ ID NO: 34373 - DNA, 239 bp, Glycine max
  Clone ID: 700891354H1
aaaaaaaaaataaaaaaggagaagcatactcagcgcggcggtggaagatggtggcgacggcgatcgaggaagtgcgaaccctctggattggcgatttacagtactgggtggacgagtcctatctctctcagtgcttcgcccacaacggcgaagtggtttccattaaaatcatccgcaacaagctaacgggccagcccgagggctacggcttcgtcgagttcgtctcgcacgcctcggcc

SEQ ID NO: 34374 - DNA, 236 bp, Glycine max
  Clone ID: 700891359H1
ctcgagccgaatcggctcgagagagaggagatgtcggtggagcagacaagcagcagggaaggacggaggagggaaaactgcagcagggaattgcagagttctacgacgagtcgtctggcatatgggagaacatttggggcgatcacatgcaccacggcttttatgacccggattccaccgtttctgtttctgatcatcgcgctgctcagatccgaatgatccaagaatctcttcgt

SEQ ID NO: 34375 - DNA, 241 bp, Glycine max
  Clone ID: 700891311H1
gccctttgaaaatcgttcaaaaccaatctatctatctatttggtataagcatggagctttgttggcaaaaatccatccatggctcttaaagaagcttggaggattttgtgtgagagggttctcacccttcacactccacctcctacagtttgcttatgctttagccattggtttctctaatcaatcaccacaaaagggtatacatggaggaacataattctctgagtggcaagaagcagag

SEQ ID NO: 34376 - DNA, 255 bp, Glycine max
  Clone ID: 700891273H1
gaaattggggtttgatctagagagagagaaaggcataaaatttaaggaagaacagagattgattttccataggaaccctaattttctttttcttgttcttttggggttctgcgatttgtggggttttgtgaagcggtgattggaaagtctcgatctttgatcggttttcgtcgatggagggcgaggttgttcagagggagagaataatcggaaaaggggtggctctgatgatgatagcaatgagaataacaacaa

SEQ ID NO: 34377 - DNA, 254 bp, Glycine max
  Clone ID: 700891276H1
cattagcaccttctctagttaacttcgttttctctctctctcactctttcgaggtaatttgcaatggctgaaccttccaaggtcattcacgttcgaaatgtggggcatgagatatctgaaaatgatttgcttcaactatttcagccttttggagtaataacaaagcttgtgatgttgcgtgcaaaaatcaggctcttcttcaaatgcaagatattccttctgcagttaatgctttacaattttatgcaaatgtc

SEQ ID NO: 34378 - DNA, 253 bp, Glycine max
  Clone ID: 700891278H1
tggaaacctcagagtatctaaaaaatgattgccttgtcatgcattgcactgttggtgttgttaaaactcgttttgagggatctaaacagggtgttattgtgccacagtcagacatgggccgggattttaaggacttgttggaatctgaggtcggttgtgacatacttttcaaggtcaaaagtgaaagcttcaaagctcataagttgatacttgcagcccgatctcctgtgtttagagcccagttttttgggct

SEQ ID NO: 34379 - DNA, 251 bp, Glycine max
  Clone ID: 700891279H1
ctctagtcccacctcctgcttcatcggcagacaatcaatcccagagcattggaaatgtgcctagggccgcaaatccatcagtgcctcctcctgcttcatcagctgattcagagtatgaaaagttcatggcagagatgaaatgattttgttcaattttggttcagtgttccaaaaggcctgatgttcttggagctcttgtgaacctgatttctaacctcttgccatgtctttcttcgaagtttgggactcac

SEQ ID NO: 34380 - DNA, 253 bp, Glycine max
  Clone ID: 700891280H1
atcatattgaaatgctagttaacatgattttagggaaatgttcacttgtttggtctctcacattgatgaactgattctgggtgtagaattgattttaacttttaggttgaagcaactttaggtagtgtttgcattggatcagaaattttataatgagatttgctattaacttgcattttagataagaacacttaaacatgattcatttcacttaaagatcaattctaattagaatcaatttttccgtttttga

SEQ ID NO: 34381 - DNA, 264 bp, Glycine max
  Clone ID: 700891281H1
cattatctctctctctctgtttcgctttcaccgaagaataacttgactttcccgaactccacctgagaaaaagatacccttaattcgcaggcgcgtcttgtgttggacaacaaccacaagatgattaacttcgaagaaaccgagttgcgactcggcctccctggcaacgactcagcactcaagggaagtgtgccaagagaggcttctctgaaactgcttctgttgatttgaagcttaatctttcttcttgcattaacgactctg

SEQ ID NO: 34382 - DNA, 262 bp, Glycine max
  Clone ID: 700891282H1
ctggttattaagggcctaaggctaaagctgatgtggggcaggcctcagacatcaaaaccggagtcagatggctctgatcaagcaaagcagcaggcttctgtggctcatagtggattgttgcctcgggcagtgatatcacagcagcagaaccaggaccaaacacaaggaatgctttattataacaatccacacctcttcagcaggaaagaagctactacccgtcaatggatcctcaaagaatgggtgctcttgttgcatctga

SEQ ID NO: 34383 - DNA, 260 bp, Glycine max
  Clone ID: 700891284H1
gcataattgacatttttatgcaagactctattacatctttaaaatattaatttattattcactgataatttactatttagtcatagcattgcgacttgaaacttatggtaaagtattgataacgtatattttgtgtttgcaggatacgagtttcatatccatttcaatggggagcacctacatttgatgcaggtgaagcctttgttatgatgatgacatcctttgttgctcttgtagaggttctctgaaaggcaagagta

SEQ ID NO: 34384 - DNA, 257 bp, Glycine max
  Clone ID: 700891285H1
tctagtcctgttatttctcagcgcgtaaagcatggctttgttggtggagaaaaccacgagtggtcgcgagtacaaggtcaaggacctttcccaggccgacttcggccgcctcgagatcgagctggccgaggttgagatgcccggcctcatggcctgtcggaccgagttcggcccctcccagcccttcaagggggcccgcatcaccggctccctccacatgaccatccagtccgccgttctcattgagaccctcaccg

SEQ ID NO: 34385 - DNA, 256 bp, Glycine max
  Clone ID: 700891286H1
ggcagtggaaatgggaaagttggaaaagaagtctatttggaaaaacatcttccgaccttgccaacgttgggagcaaggcaggatgcgttcagtattttctttgaatgggatgctagttttggaattccaggagcattttacatcaaaaactgtatgactgatgagtttttcctcgtcagtgttaactcgaggacattccaaaccatggaaccattgaatttgtttgcaactcatgggtttacaacttcaggagtta

SEQ ID NO: 34386 - DNA, 256 bp, Glycine max
  Clone ID: 700891287H1
gtatttcgctcgtgactacgaacattgcaggaagaaagaaagaaaggcgatggacctcggaacctatgacgtgccagaaggagtggacattctgggaagatacgatgcagagtttgcaaaaatcctcgcaaaagatgctttgaaattcgttgctgaactgcaacgtgagttccggaacgatatcaacatgcattagagcgcagaagagaggcaaagaagaagtacaatgaagggtctcttccggggtttgatcctg

SEQ ID NO: 34387 - DNA, 258 bp, Glycine max
  Clone ID: 700891288H1
aaaaatccactaacagcagcaagcttatctctgcagcattgaacaccaattgaacaccaatctgcagcattgaacaccaattcaacgccaatgggtcaggaagaggaaaaatcccaagaaaacaaagtggaggagaaaaaagtagaagaagaagaaaagaaagaagaagagaaaaaatcagatgagaagaaattcaaggagaaatctgcgccgccagaaatcgtgcttaaagtgttcatgcattgtgaaggttgtgct

SEQ ID NO: 34388 - DNA, 255 bp, Glycine max
  Clone ID: 700891289H1
atggatggttttgctacatggaaggaatctgatactccaccactttcttcttggaaagctgcatgatgaagtgcattgcttaatgcttatactagtgatccttaagtgtttgctgctgctactttaagaaacatatcagtatgagtggcaagccttcacagttgaaaggaataagccattctagtttctagtaattgatgtgtctttttaagtggtttgaactctgtggcagatggttccatatatgtgtttatg

SEQ ID NO: 34389 - DNA, 254 bp, Glycine max
  Clone ID: 700891290H1
ctaaatatggctgacttgttggaatggtcaaagcaagataagaaacgaatgcttcatgtcgtctaccgtgttggtgaccttgatcgcaccatcaaattttacacagaatgtttaggaatgaagcttttgaggcaaagagatatcccagaggagaaatatgctaatgcttttcttggatttggcctgaagaatcccattttgttgttgaattaacatataattatggggttacctcgtatgacattggcgatggc

SEQ ID NO: 34390 - DNA, 251 bp, Glycine max
  Clone ID: 700891291H1
gtttttgttgtcaatgttctaggttacatagcatacaactttgtaataggtgcttactcatattggggccctaaagctggttatagtatatataacatgactaatgcagatatgatgtttggaggaattactgttgtatgtggaatattgggcaccgtagcaggaggctttgttcttgattcatgactaacacaatatcaaatgcatttaagcttctctcaatagcaacatttattggtggtgcatgctgt

SEQ ID NO: 34391 - DNA, 251 bp, Glycine max
  Clone ID: 700891292H1
cagagttcaaaatctttgattgctgatgagatggacattggtgtagatggggatgatggagttgttgaacgtaaccaccctacttcctcaagcttgacagactcatctaatggctctggctcaatgatgcatagcagttcatcaggctctcggagctttgagaaccaggatcagtccaaagtcaaatcaaccatcattgattgtgggtcgaaactaattgtcaaagctacctatagagaagacaccattcg

SEQ ID NO: 34392 - DNA, 253 bp, Glycine max
  Clone ID: 700891293H1
agcctaagagaattggattctaagctctagagagagagagagagagagagagagagagagaagagagaatcatgtggtgctggaaaggagacggaggctagaagaagaagaaaaaaagaagagctagagagagggtaccctcttgttaatttgcactgtttttgtgtctgttgctgcacttataggagttcttctattctaacaacctctgccaaccaacacaagcctgaaaataaaataaagatgctgcctc

SEQ ID NO: 34393 - DNA, 231 bp, Glycine max
  Clone ID: 700891294H1
actgtgcaaaagaaaaagagagaacagagatcaatggctgcatggcgtggggtcggagatggaaggttgattattactactctcgaccgtgcggcagggggtaatattaataattattcaatcgtaaagcaaaccatgctgtaaaaacaaatttccattcaagtatggaataacggtgtatacttttttaataaataaaaaaaacaacaacaacggtgtactacttttagg

SEQ ID NO: 34394 - DNA, 189 bp, Glycine max
  Clone ID: 700891295H1
agaaagtaggaatgatgaagagaagaggtgactgatatcattcactgcagcagagagcatagcaaagaaaagagaaaagaaaacctttggatcccaaaaaaagccatattttttcccacccactttctctcttcccaaacaccgccgtatttcgctttctcctttcttttatcccttccaccaacatac

SEQ ID NO: 34395 - DNA, 250 bp, Glycine max
  Clone ID: 700891303H1
tacacggcacatacacatagtagctaacaccatttgcatattaaagagagtcacaagccaattctgaaccacacactcacttatttgtttctttcaactcactcacagagtaatggcatccatggcggctataggttctctgaatgttccttgttctgcttcttcgcgttcatcgaatgtgggaagaaaaagctttccacgcagcctttcattctctgcatcacaactttgtggagacaagattcacaca

SEQ ID NO: 34396 - DNA, 247 bp, Glycine max
  Clone ID: 700891305H1
ccgccattatgctcaaattggatagtgggtggaattggttcatcaccttgagtgcacgggattatcctctcataactcaggatgatctgtcccatgttttctcttctgttagtagagacctcaatttcattgatcacactggtgaccttggatggaaagagagtgataggttccagccaattgtagttgacccgggactatatttagcaaggaaaagtcaaatttttcaagctacagaaaagaggcc

SEQ ID NO: 34397 - DNA, 245 bp, Glycine max
  Clone ID: 700891307H1
ctcgagccgctcgtcttcaatcctttcgttattctcttattcatccttctcttctgaataatccagatctctttctgcccttttctccgtcacgcttttcgtgaccggatctgtatggatttgatccagatctacacgccgatggtggttttggccgggtctttcatagatctggtgcgtagaggctcagatctacggtaccgaggtacaacagagaatcgatgacaagaacgcagatccgacgg

SEQ ID NO: 34398 - DNA, 245 bp, Glycine max
  Clone ID: 700891308H1
ccactcttcatttggtactccgtctacgtggtggaatgcaaatctttgttaagactctgaccggaaagaccatcacccttgaggtggagagctctgacaccattgacaatgttaaggccaagattcaggacaaagagggtatcccaccagatcaacagaggctcatctttgctggaaagcagcttgaggatggccgtacccttgctgattacaacatccagaaggagtccactcttcacttggta

SEQ ID NO: 34399 - DNA, 243 bp, Glycine max
  Clone ID: 700891309H1
aagcgatttagtcgaaaagaagagcagcgaaaagctggagcatgcggattgggaggatgttatcactctccttgatgataacgaatggccagaaaaaacaccaggcttcagggaaaccatggcgaaatatcgggccgagctaaagaaattggcagagaaagtgatggaggtgatggatgagaatcttggcttaaccaaagggtacatcaagaaggcactgaatggtggagatggagacaatgc

SEQ ID NO: 34400 - DNA, 255 bp, Glycine max
  Clone ID: 700891272H1
gctgctggtggttacccccctgctggttaccctccacatggttatcctggatcatctgctccacatggatctcatgcgcctgggcacggcggtatgggggcattgcttgctggtggtgctgctgcggcacactgcgtatggggctcaccatgtttcccatggccatcatggatatggtgcatatggaggatatggacacatgccccatgggaaattcaaacatcatggcaagttcaagcatggaaagttcggcaa

SEQ ID NO: 34401 - DNA, 264 bp, Glycine max
  Clone ID: 700891240H1
gaaaaagttagggtttgtaactttgtcttttgcttgcgaatctgaatcgaataataatcaatcaatcatcatgtcgtcggcgaagaagatcacactgaagagttcggacggcgaggctttcgaggtggacgaggcggtggcgctggagtctcagacgataaagcacatgatcgaggacgactgcgccgacacggcatccctctgccgaacgtgacgagcaagatcctggcgaaggtgatcgagtactgcaagaagcacgtcgag

SEQ ID NO: 34402 - DNA, 261 bp, Glycine max
  Clone ID: 700891242H1
ctgattcagaaactcttaggcattccacattctcaaccccgaaccctaagagcagagcgaaaatgacaaccaccttcgcgaccgtcgcaggactcggtggcgcattactgtcatccacctcatctcgtctcacctcagggtttgtgaaatccccagtgattgctaggaatcccttgaggcaagctgtggcaatgggaaatgggaggattacatgctttgagaggaattggctgcgggcagattacagtgtgattgggtttg

SEQ ID NO: 34403 - DNA, 257 bp, Glycine max
  Clone ID: 700891244H1
cccagggaaccaagattgcttctgaaggactcaaacatagagtgtttgaggtctcattggctgatctccaaggagatgaagaccatgccttcaagaagattcgtttgagagctgaggatgttcaagggaaaaatgttctgacaaacttttggggaatggatttcacaactgataagttgaggtcctggtgcggaaatggcaaactttaattgaagctcatgtggatgtcaagaccactgataattatactttgagga

SEQ ID NO: 34404 - DNA, 258 bp, Glycine max
  Clone ID: 700891245H1
cacactagaactagttattctgtgaacctcaccttcaggcatggaatttgaaagtggtacacagaagcaaaagggcacatttgcatgcttgaagatggttgccttaatagctctatgtctcattctaatttctccagcagaatcatttgatccgttggatccaaccgggaacgtgacaataagatgggatatcatgtcctggacatcagatggttatttggccactgtgacattgtttaactttcaactgtaccgcaa

SEQ ID NO: 34405 - DNA, 257 bp, Glycine max
  Clone ID: 700891248H1
caatgcaggccgagctgcgtacctagctgcaaggaaagagcagtctgcactcagggctgtgattaaatgcattgaagaatacaaacttgaggatgagttcccaccagagaatctgaagaagcgacttgaccagttggagaaggtgaagacggtgaagaccgagaaaaggaaaccggttgctgttcctgccaataagagaactcgagcaagcaacagcaatggaggtccaatgccaccagccaaagctgggcgtttga

SEQ ID NO: 34406 - DNA, 129 bp, Glycine max
  Clone ID: 700891249H1
aatacttccgagtcacagaacaaatactgcttttttctgagaaaaccgtttcttactaatcacaatcagttacagaggtgtgctgctgaaataagttagctttaaaaaaaaatgtattacttatttttc

SEQ ID NO: 34407 - DNA, 264 bp, Glycine max
  Clone ID: 700891250H1
ctccttctcgcactgccatttgaaacccctgacccgaatcgtttcctttctcctcatcctctgcctcagtctcccaggatccaatataaatggaaatggaagcttcaaaatttatggctacaacgaactgaagcctctatcagacttagcttgcccgggttagtggaagaatttggggtgaagtaaagtgaaaattgccttacgttagaaacgtgatcaagttccatggaagaagagcatcaatgttctggaagtggtgaagaa

SEQ ID NO: 34408 - DNA, 265 bp, Glycine max
  Clone ID: 700891251H1
tatctctgcctttagagaatgtttgtctctatcatggaaaaatccttatgttcttcgccttgctttctccgctggaattggaggctttctctttggctatgacacaggagtcatatctggagtacttttgtacatcagagatgatttcaaagaggtggatagaaagacgtggctgcaggaagctatagtgatatggcacttgctggagcaatcataggagcttcagttggtggatggatcaacgatcgatttgggagaaagaaag

SEQ ID NO: 34409 - DNA, 165 bp, Glycine max
  unsure (1)..(165): unsure at all n locations
  Clone ID: 700891252H1
tcttagtgttgtaatgtaattattattatgaacataagtgacaacaccacgattgttggattctgtgtgtttgttgcacacaatatatgagagagatnnnnntgaanntgtngtnattaaggttaatggtggtgttgtgaaatggggattgggagttgatggtaa

SEQ ID NO: 34410 - DNA, 263 bp, Glycine max
  Clone ID: 700891253H1
cggctcgagtgcatgaaaatcgaaaaattccccaaacttcacaccgtacaaaaccctagcccaattttactcttccccaaattcaattccttcaaatcccttccctataatctcgattttgcttcgtgcaatctctcttcgatcccaatggacgacatggaagacgacgcaaggtaccctcccaagtcctctccctcaaccggcagaacccttcccaccgccacaaacaccccatacgcgccgccccctaccaccgcccaatg

SEQ ID NO: 34411 - DNA, 260 bp, Glycine max
  Clone ID: 700891254H1
cagatacctcagaatcttctcaaactaatcccacaaccgagaactctggcacagtgaaaatcaatgtgcatggaaagtgggtatcccttgtttttggaatcattctcatgactgtattctcatcataaaccattgcataccatgtagttaatattcaagagtgttatgattgtgagaaaggagtgagtatgagtgctttagtggtgagtttatcagagtggattagggatatgagattgttgtatccctctatgaattta

SEQ ID NO: 34412 - DNA, 261 bp, Glycine max
  Clone ID: 700891255H1
gagcttttagtcctttttttttttccttcttctttcaaaaataagaaaagaaaaattactatgacaaggtttttgaaggacaccatgggctacttaattaatttggcaatcatggaagattaagtgcttaaatttgggtgggaattaagtatgaaattgaagccactgcttcttcaactagtttgatgctgtatgatgtatctattattaggttgtcgatcttctgggaaatatgtgtatttatatctagtactatatata

SEQ ID NO: 34413 - DNA, 262 bp, Glycine max
  Clone ID: 700891256H1
ggaaaaataataaaaagaaagagaaaaacacaggagaagagaagagagtagaagatacgaagatttgaggcatttatataatcgaaattggaagcgaggaaggaaaatcgaaatcgaaaatggcagtaatggagaggttgaagatgttcgtcgttcaagagccagttgtcgccgcttcctgtctcatcgtggcttcggtctttttcttcctgcttttgtgaggcccatgttggattcatatcaggcaaccaagcaacctcct

SEQ ID NO: 34414 - DNA, 261 bp, Glycine max
  Clone ID: 700891257H1
tctagagagagagagagagagagagagagagagagaagaaagaatcatgtggtgctggaaaggagacggaggctagaagaagaagaaaaaaagaagagctagagagagggtaccctcttgttaatttgcactgtttgtgtgtctgttgctgcacttttaggagttcttctattctaacaacctctgccaaccaacacaaggaagaaacagtaatgctactgacatgggaaagaaggggagttggttttctgcaatcaagag

SEQ ID NO: 34415 - DNA, 257 bp, Glycine max
  Clone ID: 700891258H1
ccgaggttctaaggcactctcttccttccaaagtgtttagaaatgatgaagccacctccttttccttctctgcctccaaatgggtccttcattccgaccccaaaacccaatcttccgtatcccctgatgctctcaatcctctgcgtgcttacctttccctgccccaagtcacctttggccccaaaaggtggcaactgcctgaagcagcaaacacggtttcagcctcaacagctaatgaatcgcgtctagacagatat

SEQ ID NO: 34416 - DNA, 255 bp, Glycine max
  Clone ID: 700891259H1
ctcttttttctctctcttgcaaaacctaattttcatttcttccctcaaatttcaaaatgcgtgagatccttcacatccagggtggccaatgcggcaaccagatcggcgccaagttctgggaggtggtttgcgcggagacgggatcgaccctaccggaaggtacggtggggactcggagttgcactcgagaggatcaatgtctactacaacgaggccagttgcggtcggttcgtgccgcgcgcggttctcatggac

SEQ ID NO: 34417 - DNA, 257 bp, Glycine max
  Clone ID: 700891260H1
tcaagctcatcgacgacccccagaccgtcgttaataaccgcaacaaggccctcatgatgatcgaagcctggggtgagtccaccggcgagttgcgctatctccctgtctatgaggaaacttacaagagtctgagatcgaggggtattcggttccctggccgtgacaatgaaagcttggctccaattttcactcctcctcgttcagtgtcttctgctccggaggctgatgtcaaccttcaacagcagtttgagcatgat

SEQ ID NO: 34418 - DNA, 253 bp, Glycine max
  Clone ID: 700891261H1
tttccaactccgatttcgtttctcctccgaaaaaccctaatttccccttcgctcttccccatgaccacggcgtactcatttcccccactccgaaaatgtcgctccagggcagcgccagcgtaaacggcaccgtggcggcggcgtcgacggcgagcctgaggctgcggctgaaccctaacaaggagcacaagcccgatggctacgaggacatgcaattggatttcagccctaacattttcagctcgctggagag

SEQ ID NO: 34419 - DNA, 256 bp, Glycine max
  Clone ID: 700891262H1
tgcaaattgcgcacacgattctttgctttccttcgaaactctcccaaatcccactctctctctctctctctctcataaattcgccaccttttattttgcgtaactgctctgcaccttagtcttctctctccattctccaactccatttcttcgatctggagctctccgctttcaaagctgtcaaatttccgattcgggatggacaaatacgagctcgtcaaggatataggatctgggaatttcggtgtggccaggc

SEQ ID NO: 34420 - DNA, 257 bp, Glycine max
  Clone ID: 700891264H1
cacaattctctcttatcatctttgttattacctctttccaaagtccaaattttctagttccaccaaaccaaaccaaaccaaaatggcagcagcctcagcctcatccatgatatcaacaccagccttatctccaaccatccaaaagcaccatcatttgaagccatccaacgtgtgcttccaaggtcttagacccctcgcaaggttcaccaaagcctcatcaaccaaagtgagcaccaccaccaaaagggttattccaa

SEQ ID NO: 34421 - DNA, 161 bp, Glycine max
  Clone ID: 700891267H1
cgagatagataaacatctgttagtaattgaacaagttaaaatagtgacaaagtaaaagcctgataaggctaacgaacaattttaacttgttcaattactaaccgatgttttccttcttgtaaatgtttagattaaagaagtataccgcttgacgagtaaga

SEQ ID NO: 34422 - DNA, 260 bp, Glycine max
  Clone ID: 700891268H1
gtgactggttcatcatcacctgaaagtacatcgaatcaatcaagaagagctgctcctggtgttgtccatgggcaggagcagggtcttagcgacccaggtcagttgatgagaatgttcgcagaaagggctcaaaagcaacacacttccaatcattcgcatgttgatactccgccagtgacactatcaggtccatctggacagtgaaatgactcgggcaatgcttcagcaacagctgcccatgcatggatgtctgttggggc

SEQ ID NO: 34423 - DNA, 261 bp, Glycine max
  Clone ID: 700891269H1
tgcggaataacgaagcctcctcgttcttcttcttccgccctttctctctctagaaccgtacggtcgtttctttctctctcctcaaccggagacagcgtcgccttcttttctgaatctcgcggtgttgttagttctgcggcggttgtagttccggcggcgatgggacagcaatcgttgatctacagcttcgtcgctcgcggcaccgtgatcctagcggagtacaccgagttcaccggaaacttcaccagcgtggcggcgcag

SEQ ID NO: 34424 - DNA, 257 bp, Glycine max
  Clone ID: 700891270H1
gtttggtgtttagtgggtacccttgccttcataggaagtgagaaactaggctagttagtcccattggaattttttttttttgtggctgaagaaggtgaaaagggggcaagtttcactcttcaaggagtttgaagggtgtcaacttgtgttttgagactctgaggttgaagctgcattttttttaagggtggggatgggttctagttgtggttgtggtgtgacacttgttcttgttttctgcttatggggtgtgttga

SEQ ID NO: 34425 - DNA, 260 bp, Glycine max
  Clone ID: 700891271H1
agaaagaggagcacataataaccctcaaactccatttcactcacagaaaaatagagatatagagagagaaagtgctgcagaatacacacatacacaccacttcttcaagagagagaggtgtgtgaaggaaaataagaactgaaagacaaattttgcaaaggaagatatgaaactttgcaaatttaacactgagaaagaagatctgtgatttctctctctctttttgttgttgttgttgtttgcagagaaaatcacacaaa

SEQ ID NO: 34426 - DNA, 263 bp, Glycine max
  Clone ID: 700891239H1
cgacaaacaaatattattattcaatagaaaagaaagatgagtccaacatgggtttttgtgttaggtgttgcagcaatgttggtggttgtgagtggacaatcatcagtgaagcctttggtgaagacagtgaaggggaagaaggtgtgtgacaaagggtgggagtgcaaaggttggtctgcatattgctgcaatgagactatctccgactacttccagacataccagtttgagaacctcttcgcgaacgcaattcgccggtggca

SEQ ID NO: 34427 - DNA, 270 bp, Glycine max
  Clone ID: 700891208H1
atcgctacagagaaaccttgatgatgcgaaacatgaggcagaaatgctagcaagtgagcttacaactgccaaggaacacttgaaggaagcacaagcagagctgcaaggtgtgtcaaaagaattgacagctgctcttgaaaagaatgatagcctacaaaaagaattagttgaagtctacaaaaaggctgaaagcacagcagaggatttgaaggaacaaaaacagttagttgcttctctgaacaaagatttacaagcattagagcagcaagt

SEQ ID NO: 34428 - DNA, 266 bp, Glycine max
  Clone ID: 700891209H1
gtgggatgattgcactagctcatttctcccaaaatctaagacagataaatttgtcatatagctcagttacagatgtggggcttctgtcacttgctaatatcagctgccttcaaagttttactgtgcttcacctgcaaggcttggttccaggaggactggctgcagccttattagcatgtggagggctaacaaaatgaagcttcatctttcactaagacctctgttacctcagctacttatcagacatgtagaatcacgtggctgtg

SEQ ID NO: 34429 - DNA, 266 bp, Glycine max
  unsure (1)..(266): unsure at all n locations
  Clone ID: 700891211H1
aagaagagcatcactgaactaacaaagcaaccctatgtcgaaggtggtttgtgtcaccggagccagcggcgccntcggatcatgggtggtcctactcctcctccagcgtggttacaccgtccatgccaccgtccaagatatcaaggatgaaaatgagacgaaacatttggaggaaatggaaggagcaaagagtcatctccatttttttgaaatggatcttcttgacatcgactccattgccgctgccataaagggttgttccggcg

SEQ ID NO: 34430 - DNA, 262 bp, Glycine max
  Clone ID: 700891212H1
ctggggtgacaagtagtgttcatgagttggctttgatgatgaataataatgataataataagaataagtcaattgggatagtgaacaggaatccaaagtggtcggataagttcaatgagatgaccaacttcgatgatgttaatgtggcagcacaatcatcactgcctccaaggccaagggtggcaaggttattccatcagcacctgctgcagcttctttcaatttcaatgcttatgagtactattggaggaccaagtctgca

SEQ ID NO: 34431 - DNA, 263 bp, Glycine max
  Clone ID: 700891213H1
tgaaatatcgtttctctctcaaaggtaacaatgtcggaagctaagacccaaattgaatccataaggaagtgggtcgtcgagcacaagctccgtactgttgggtgtctatggctcagtggtattacgggttcgatcgcttacaattggtctcgacccaacatgaaaactagtgttaagatcattcacgctaggttgcatgcacaggctcttacactgggagcattagccggagctgcactagtagaatattatgatcgtaagac

SEQ ID NO: 34432 - DNA, 261 bp, Glycine max
  Clone ID: 700891214H1
caaagtttgaaatttctttgtctttgatttcatgtttttgttaccctgattgatcatatttttttcatattaacaattgaaataaaaaaaaaaaaaaaaaaaaaaaaaaaaaaaaaaaaaaaaaaaaaaaaaaaaaaaaaaaaggggggccccccccctttttgtccctccccccccgggttttttttccggccggctcctggggggtccccccttttccccttggggggttttttttagccttggggtaaattgggttcc

SEQ ID NO: 34433 - DNA, 262 bp, Glycine max
  unsure (1)..(262): unsure at all n locations
  Clone ID: 700891215H1
atggcttccgaagaatcccagaacaagccccccagcgagcagtccactaccgaactcatcacgagcgcgaactggtggcggaggcggcgcagtcggctctgaagagcgacagcgncaaagtggacaaggccaaggtggctgacgctgccggcgatcttctcgacgcggcggggaagtatggaaaacttgatgacaaacaaggcatagggcaatatgttgacaaggctgctgattatctgcataattaccagggtgataatac

SEQ ID NO: 34434 - DNA, 262 bp, Glycine max
  Clone ID: 700891216H1
acagatgcgaggggtagtacaaaccgcccttgttctatgctcttcagtgtacgtaatgataagcttctttgggttcctcctatttggcgaaggaactcttgatgatgtgctggccaatttcgataccaatcttggaattcctttcggttctgtgctcaatgatgctgttcgtataagctacgccgcacactgatgcttgtacttccagttgtcttctttccattgcgtctcaacatagatggcctcctcttctctaaatcaa

SEQ ID NO: 34435 - DNA, 272 bp, Glycine max
  Clone ID: 700891218H1
cacggacgagaccccagaattgatgccattgagtcatgttcttgcaactaaactcggtgctcgtctcaccgaggttcgcaagaacggaacctgcccatggttgaggcctgatgggaagacccaagtgactgttgagtattacaatgacaacggtgccatggttccagttcgtagaccacactgtgcttatctccaccaacatgatgagactgtgaccaacgacgaaattgcagctgacctcaaggagcatgtgatcaagccggtgatcccgg

SEQ ID NO: 34436 - DNA, 268 bp, Glycine max
  Clone ID: 700891222H1
ctttctctctctcccttgcttattcctcccaaaagaaaaagacggtttccgttggaaggaagaaagaaagaaattgagtttgagatctgattgtgcggcgacgatggagaacaacgacagcatcatatcgcgggagaagatcgaccaggcagcggtgtggctcggctccgccgtctcttccgctttcttttcctcattggaacgcttttcctgcgtcaacgtcgccacctctgaccccgacaacgacgatgacgacgacgattattac

SEQ ID NO: 34437 - DNA, 265 bp, Glycine max
  Clone ID: 700891223H1
gtcaaaactttcatctttgtcatccacttaacccaggtgtaaaaatgtcagcagtgaacatgtccactatgagacttccaagagcttccttgtctggaacaacaccagctaggagatcatgtgctcttacaaagagtccatcatctttgaggtctgtgaagaatgtgtctaaagtgtttggattgaaatcatctcctttagagtgtcagcaatggcggtatataaagtgaagctgattggaccggacggtgaagagaatgaattt

SEQ ID NO: 34438 - DNA, 261 bp, Glycine max
  Clone ID: 700891224H1
tgttaccaatgtaaactgtaaagcataatgtccttctaaagatgagtgtgcaaatgaatcatgaaaacatgttgttagtcctttactggagattcatcgtgcagtcgggtctgtactccccaataaaattcatcatgcagtcagatgtttattccccaatgaaattgattgctgtaaaaaaaaaaaaaaaaaaaaaaaaaaaaaaaaaaaaaaaaaaaaaaaaaaacaaacatcatagaaaaaataaacagtggaaggttc

SEQ ID NO: 34439 - DNA, 263 bp, Glycine max
  Clone ID: 700891225H1
aaaccctaaacgctacgattttaattttctggttttctctttttcaatcggtgcttcctccggcggcgcgtgggagtgtctttggcgcgtgattcctagttccccgcttacctatgcttcgctcgacccgcattgtagagttcacgccggagagacggcggaatctcaccggacgatcgtgatttcgcatctcatggcttccgcctaccggaacgaacctaattggccacggcatagaagcggtggagctggattcatgggaa

SEQ ID NO: 34440 - DNA, 264 bp, Glycine max
  Clone ID: 700891226H1
aggtgttatccctgtggtcaagacatccattggcggtactcgtattattggtcgtctttgtgctggtaacaagaatgggcttctcttgccccataccaccacagaccaagaacttcaacatttgagaaacagtctacctgatcaagttgttgttcagcgaatagacgaaaggttatctgctctgggaaattgtatagcatgtaatgaccatgtggccctcacacacactgatcttgacagggagactgaagagatgattgcaga

SEQ ID NO: 34441 - DNA, 259 bp, Glycine max
  Clone ID: 700891227H1
ccccaatcgtagccgtcgcactttgcgttttctgcgtcatctccgattccccgacaatggccacccaaatgagcaagaagagaaagttcgtagctgatggagtgttcttcgctgaactgaacgaggttctgacaagggagttagccgaggacggatactccggcgtggaagttagggttacgccgatgcgaccgaaatcatcatcagagccaccagaacccaagccgttctcggtgagaagggaaggagaatcagggaa

SEQ ID NO: 34442 - DNA, 263 bp, Glycine max
  Clone ID: 700891228H1
ctctctcaaaggaaagaaaaggaaagaaaagaaaagaaaaagaagagagtgtaggtaaacagaagcacacactacacagttaccaaaatcaggttcaaacgcacagatctgggagaagagaagaagaagaagaagaagatgggacaggatcagaaccagagatcgctgatctacgcgttcgtgtctcgcggcacggtgattctcgccgagtacactgaattcagtggcaacttcaacacaatcgcgttccagtgcctccagaa

SEQ ID NO: 34443 - DNA, 257 bp, Glycine max
  Clone ID: 700891230H1
agaaaaggaaagaaaactctcaaaaaactattatagcaatggcagaacaaaaccaaaaccaaacaactgaagctggaaggcaccaagaggttggtcacaagagccttctccagagtgatgctctttaccagtatattctggagacaagtgtctacccaagagaacctgaatccatgaaagaactgagagagttgacagcaaaacacccatggaacatcatgacaacctctgcagacgaagggcagttcttgaacatg

SEQ ID NO: 34444 - DNA, 271 bp, Glycine max
  Clone ID: 700891233H1
tgttcttgcaactaaactcggtgctcgtctcaccgaggttcgcaagaacggaacctgcccatggttgaggcctgatgggaagacccaagtgactgttgagtattacaatgacaacggtgccatggttccagttcgtgtccacactgtgcttatctccacccaacatgatgagactgtgaccaacgacgaaattgcagtgacctcaaggagcatgtgatcaagccggtgatcccggagaagtaccttgatgagaagaccattttccacttga

SEQ ID NO: 34445 - DNA, 269 bp, Glycine max
  Clone ID: 700891234H1
gtgaaaagtgaaaagtgaaaatggacttggaagcagtgaagaggtacttagagaaaggaggagaaacagcatcggcggtggatgggttgcctccgaggtttctggaaccgttaataatgaacgctcttaaggtcgatctcatcgaaactggtcgcgttgtctgctccatgaagatacctccgcgtttactcaatgtgggaattcgttacacggtggcgccatcgctgctctggtcgacgtggtggggtccgctgcgattcccaccgttg

SEQ ID NO: 34446 - DNA, 269 bp, Glycine max
  Clone ID: 700891235H1
ctaacctaatcaaatcctctcctctcaaaccaattcccacttatcctctcttcgcctcccctcaggaaccaatgtccataatcaccccacgccgtcatcctcaaacgacacccttccgctagcaaaacgactgcggtttggtcgtcgtcttccccgaggcatgctcttgggatattattattcatcatcgtaatcacaccctacagagacgttgactttgtgctttttctgggaggggaacaaatggaccaagctcttctggacgacat

SEQ ID NO: 34447 - DNA, 264 bp, Glycine max
  Clone ID: 700891236H1
gaatcacacatcaatcagtccagaccggaagcttatgactgttgttggagataacctggatggactgctagtggatcctcaaaatggaaaggtacatggttcctctgatcatgcattttattggaaatttcttttcaagtacattttttcctccttttcccagtgaatattttgttgctgtctttcatttagttcatgcatatgttaaaggatcaaatcgtttaattttttccccctaaatttatgtctatgattctttttgtg

SEQ ID NO: 34448 - DNA, 266 bp, Glycine max
  Clone ID: 700891237H1
gttcctttcagtcagatactccttcacgctcttcttcattctcctcctcttatcaccttcacacattgcttcaaccacaccaacactacctcacacactaacacaatcagccacccaaatagccatcacaaaccgcaacatccatagcctcaacaatgctggaagaggcaccaaaatcaccggcatatcgcattcaaacgatacctgcatcgttttgggtacttacaaaacaacaacattagtttcagtgatgaatttgatgccgt

SEQ ID NO: 34449 - DNA, 265 bp, Glycine max
  Clone ID: 700891238H1
ccccgagcgaattcggctcgagcatttaaccaactttttcacactctgaaacccgctttaccttgtttcagtggaaatggccgaactcgagacgccgccgccgatggggtgcccggaactcccgccataagggaaatgagacccgagaccgcgacccatgcgggaatcgggtcgggtgggattcggagggtgatttccgagcggagattgatacgtcaccgccgtttgggtcggtgaaagaggccgtgacccgttttggaggtag

SEQ ID NO: 34450 - DNA, 268 bp, Glycine max
  Clone ID: 700891206H1
cataaacgccgcccaaaaccatttatagggttttcttttctttgccaagaaaatgagagagtgcatttcaatccacattggtcaggccggtatccaggtcggaaacgcctgctgggaactctattgccttgaacacggcattcagcccgatgggcagatgccgagtgacaagaccgttggaggaggagacgacgcctcaacacattcttcagcgagaccggcgccggaaagcacgtgcctcgcgccgtcttcgtggatcttgagccca

SEQ ID NO: 34451 - DNA, 243 bp, Glycine max
  Clone ID: 700891166H1
ctctttctctctctctctgtctgccatggttctctccaaaaccacctccgaatccgacgtctctgtccactcaaccttcgcttctcgatatgtcagaacttcgcttcccaggtttaagatgccggaggagtcgataccaaaggaggcagcgtatcaaataataaacgatgagttgatgttggatgggaacccaaggttgaacttggcatcatttgtgacaacctggatggagccagagtgtga

SEQ ID NO: 34452 - DNA, 240 bp, Glycine max
  Clone ID: 700891168H1
aacccatttccataatcactttttcctactttcttctccatccatcccttgactaattaattatccctcacaactaccaatggccgaagagaaacaccacaagcaccgcctcttccaccaccacaaggacgcggataataagccagtagaaaccgatactggttacgacaacacatcatattccaagccttctgatgactatgactctggtttcaacaagccatcgtatgagtcttctgg

SEQ ID NO: 34453 - DNA, 235 bp, Glycine max
  Clone ID: 700891169H1
tggcatttcaaactatgttcctggtaatagtggcaaatgggcttatagcagcactggagtatatctaggaaatgcaaaagctgattatatagcaacaaatcagctatctttggatattaatggccctgattactaccacacagcccgcatagctcctctgtatcttaattactatggcctttgtatgctgaacggcaattataaagtgaaacttcattttgctgagatagcattc

SEQ ID NO: 34454 - DNA, 233 bp, Glycine max
  Clone ID: 700891170H1
caacggtgaagtggttgcagctgagacatgaaatgaaatgaaatgcttgagttatgacaaatgaatattctcttcctcaagttccatatttctgtatcatgtgtttgtgctatatctcctgctttatcattatggagtccataatgctcttgaaaaatatggtaatcccttttttttttgtggtcggggacttggggtgtgtgaaaatccgtcatttggtttcctgttgctgt

SEQ ID NO: 34455 - DNA, 197 bp, Glycine max
  Clone ID: 700891171H1
ggtctttaagatgaaaacaaaaaatgcaaatgtaggttcctttttttgaacacaaaatatttttacttccattttttgactgaaagaataaaaaaatgatatgattcaacctcaaactcatttgaatgtagctgataatagcggacacgcgaactgatgtgtattcgaatcctaggagctagtaatcgacgatatgc

SEQ ID NO: 34456 - DNA, 209 bp, Glycine max
  Clone ID: 700891172H1
aagcattcaaaattcaaaagtttattttaaagtcttttcttagacaattctcttctccagtctctaacgcaatcaatataacaatgggttttcatttacctagtatcagaagggcattatttgctgcaaatcaagtatcttcaaaaacagtggacgtgccaaagggatatcttgcagcctatgttggagataaaatgaagcgctttgtg

SEQ ID NO: 34457 - DNA, 231 bp, Glycine max
  Clone ID: 700891174H1
ggctgatgcctcagttgaagaacatcattttagcccaatctgttgaatcagtttcagagtgggcatcttgcatacgatatgcagttaccggtaaaggaaagtatggaacaagagttcctcttttgagacagaaaattctggattctttgatgacacctttacctccaacagtagctaccacaataacagccaagcgatatacttttctggctgctgcacttatagaaatat

SEQ ID NO: 34458 - DNA, 231 bp, Glycine max
  Clone ID: 700891176H1
attttgtaacaagtcacctgtcatatctttctatttaatggttatcactttctaccttgcatatgttttatgccctaaatgattatcaatgggcatttaagtgaataaaaagtcccaagtagaagggaaacacctttggttctcacatcgcagtatttggtcatgtttttcgataaataaatctgaggatgaggtttttttttttttggtacatgaagatgacgttgtcga

SEQ ID NO: 34459 - DNA, 240 bp, Glycine max
  Clone ID: 700891178H1
ggcacaggtggattgaatatgcagagaagactagatataatgcctcccaggttccagctgaatggcatggttggctccacttcataaccgatcacacaggagatgagcttcttttactgaaaccaaaaaggtatggtgttgaacacaaagaaaatttgtctggggaaggtgaacagtatatctatcattccaaaggacatgcacttaatccagggcagagaaactggaccaggtaccaac

SEQ ID NO: 34460 - DNA, 232 bp, Glycine max
  Clone ID: 700891179H1
atcaaaatgtgagagaccccttttcacttgactgggccaaggccaagaggacattaaaaaatctgaggattaaagcgagcccatctaatcaagaattcaaaataactgggattagtgaactcccttgcaaagatcaaacgtttaccttgaagagaaaaggtggtgatgatgttgctgaggaagaagtgacagtatatgattatttggtaaatatcggcaggatagatcgtcg

SEQ ID NO: 34461 - DNA, 245 bp, Glycine max
  Clone ID: 700891180H1
cacaggtaagtcacatcacatgagagtgtagttggtcagtttttcacgagacaaagttctcccaaacacttcaacatggcttcttcagctatggaaacctgcaaatcagaggatttgcacatgcaggttgacattgagaagaacgcgaaggacataaggtctcagtgggtgcttaacgctcctgagcccccaagtccatggcgtgtggttgcagattctgtgagcaaaactatctcccactataa

SEQ ID NO: 34462 - DNA, 245 bp, Glycine max
  Clone ID: 700891181H1
ccctgaattcatcattctttctcgcaccatctttttctattccgattcgatttgttgttgttgttgttgttgttgtgtttttgtttccttccttgacgaatcatcacgatgttgatgagcaagcagaagaagagccagatccagaacgcgaagaggttgttgataagcatcaatgtgctggggagcgcggggcccattagatttgtggttatttcaggaggagcttgtggcggcggtgatagaca

SEQ ID NO: 34463 - DNA, 237 bp, Glycine max
  Clone ID: 700891182H1
agtgaaagtgagaaaaaataaaaatcaaagagcataatgtcagggatcattcacaagattggggagacccttcatgtgggagggcacaagaaggaggaggagcataagggtgagcaccatgctggagaatacaaaggggagcaccatggtgaacacagtagtgagtacaaaggagagcatcatggtgaacacaaagctggagagtaccatggtgagcacaagccagagcacaaagag

SEQ ID NO: 34464 - DNA, 205 bp, Glycine max
  Clone ID: 700891183H1
ctagattgctagagctagaatttcaacctacctatgtgtactgaacagatctgcttccctacttaaagagagcatcatcctgtgatcagtgtgcttcgtattctctctctctatatatatatggtaaaaagtggttatctcgtgcctcaaaaaaaaataaaaaaaaaaaaaaaaaaaataaaaaaaaaaaaaaaaaaaagaaaaa

SEQ ID NO: 34465 - DNA, 235 bp, Glycine max
  Clone ID: 700891185H1
agcagacttaacaacagcacaaagcgggttactgtctgttcaagctaccatctctctctctctttcttagtgcctccttgccagaagttaaaatggcccaagaaactttcctattcacatctgaatcagtgaacgaggggcaccctgacaagctctgtgaccagatctccgatgctgtgctcgatgcatgcttggagcaggaccctgacagcaaggttgcctgtgaaacctgcac

SEQ ID NO: 34466 - DNA, 235 bp, Glycine max
  Clone ID: 700891186H1
gccatgatggtcatcagattgtagagctatggacaaaaagaaacttcagatgtgattgtgggaattcaaaatttggtgaattctactgcaagattttcccaaataaagatgtagaaaatgttgagaattcatacaatcacaactttaaaggttcttattgctcatgtggtcgcccttatcctgatctagatgctgaagaacaagtagagatgatacagtgctgtctatgtgagga

SEQ ID NO: 34467 - DNA, 227 bp, Glycine max
  unsure (1)..(227): unsure at all n locations
  Clone ID: 700891188H1
cctcttttagcgttcgaacaaaattagggttttctcaaccctagggtttaccttctcttcccctgttcgaaattaggcaaatcaaaacagaaacacgactacaaaaagaagaaaagaagaaaaagaatcaatcattcattgatcgctgaaacgatacgatgacagggaaggcgaacgnnagaagcacacggcgaaggagatcgcggcgaaggtggacgcggcgacca

SEQ ID NO: 34468 - DNA, 233 bp, Glycine max
  Clone ID: 700891189H1
ttaccaaattccatattccaattcaataccctaactccggtcgaagcaccaaatcgtgatggcaccaaaggcagagtagctaccatctcaggagaagcatgtggaggagaagactatcgacggtgggagacaaggctccggcggatctggtgccaaaagccggaacgaagcttgcgaaggatcgactcgccgtcgctgagtgtaagaagtcgacgagttacaagaagatcgtg

SEQ ID NO: 34469 - DNA, 234 bp, Glycine max
  Clone ID: 700891191H1
aagataatgacaacaaagaagtcaaagatattattgatattcttctccagctacttgatgatcgttccttcacctttgatctcactctcgaccacataaaagccgtgctcatgaacatctttatagcaggaacagacccgagttccgcgacaatagtttgggcaatgaatgcactgttgaagaatcccaatgtgatgagcaaggttcaaggagaagtgagacatctattcggtg

SEQ ID NO: 34470 - DNA, 195 bp, Glycine max
  Clone ID: 700891192H1
ctgctgtactatttggacatactttaacaatgaacttcgttattagcatttctattgtgtttatctcaatgcaccaattcttttcgccactttcaaaagttaaagatgaacaaaatggtgtgctggaactgcatgatgttcatgacaaacaaaggtcaaaggaatcctttataaatatggcagctggagcaaatg

SEQ ID NO: 34471 - DNA, 241 bp, Glycine max
  Clone ID: 700891195H1
ctacaaaatcccatttaccaattcaaaaccctaactccgttcgaagcaccatatcgtgatggcaccataggcagagaagaagccagcagagaagaagcctgtggaggagaagaaatcgacggtgggagacaaggctccggcggagaagaagccaaaggccggaaagaagcttccgaaagagggaagcgccggcggagaaggtaagaagaagaagagaaacaagaagagcgtggagacatac

SEQ ID NO: 34472 - DNA, 220 bp, Glycine max
  Clone ID: 700891196H1
ggtgattttgtttatcataggatgatctgatgtactcgctcgtggatctcaactatattcacgatcatgatggcccttgaaaattctgaaaatatgcaaataaactgtgaggcatctttaaaatgcctccagggcaagggatttccttgcaattttcagagtaatgggagttctatggaaggctttacagagcttaaaaatgagcctggtactcatcctt

SEQ ID NO: 34473 - DNA, 275 bp, Glycine max
  Clone ID: 700891202H1
caaaaataagacattgtttggtttggttacttgctcgaatttcctcgaatcgcttaatttgtatttgattagttaaaccgcaacgcggaatctcttttctcgaactggctaactctcaggcaagtggttcggacgctgattccagcaacaagcggctggtgctcgcactgtatgacgccctaaactccggcgactccgacgccgtcgtcaagatcgtcgccgccgacctcgagtggtggttccatggtccgccctcacaccagtttttgatgcgc

SEQ ID NO: 34474 - DNA, 275 bp, Glycine max
  Clone ID: 700891203H1
gtaaaaaaaaaaaaaaaaaccagtggtgcgcgatgccaccgaagttcgatcccttgcaggtggtggacgtgttcgtccgattaaccggcggcgaggtcggcgcggcgagttccctcgctccaaaaatcggtccattgggtctctccccaaagaagatcggagaagacattgcgaaggaaaccgcgaaggactggaagggcctccgcgtaacggtgaagctgacattacagaaccggcaggcgaaggtaacggtggtgccctccgccgccgcgttt

SEQ ID NO: 34475 - DNA, 274 bp, Glycine max
  Clone ID: 700891204H1
gtgatgtcctcctaaaaaactctatccatgtctatgatgtctctcacaaccgtggctgcattcaagtccctcacaatggcggaatcgtgccttctatccctcccttccctcttctacgccaaaaacaataccctttctctctcaattcccaccaagcccctcaacctccatcttccatgctccaactcttcgctctttaccctcaccaccaaaacaacgcgccactcttctctcctcacattcgtggctcagacatcggattgggccaaagaag

SEQ ID NO: 34476 - DNA, 270 bp, Glycine max
  Clone ID: 700891205H1
gaagaagaataagaagaaggttttgatcggatgcgatgagcacacaaggacaagtgattgatgaggcggttctggatgacataatccggcgcctaacggaggtccgattggcccgacccggaaagcaggttcagctctccgagtctgagatcaagcaactttgcgtcgcttccagagacatcttcattaaccagcccatttgcttgaactcgaagcccccatcaagatttgtggtgacattcatgggcagtacagtgatttgttaaggct

SEQ ID NO: 34477 - DNA, 263 bp, Glycine max
  Clone ID: 700891165H1
ttcggcactcggctcgaggcgtttttctcttcttcttcttcttcgcataatagcagccacaatggtgaagcactacagacccccggggaagaaaaaggagggaaatgctgccaaatttgtcattaggtcacaagcaatcaagcagcttcaaatcagtctaccccttttcaggaaactatgtattttgaaaggtgtaactccaagggagcctaagaaaaagttcaagggaactcatcagacttattaccatgtcaaggatgttt

SEQ ID NO: 34478 - DNA, 246 bp, Glycine max
  Clone ID: 700891130H1
cttttctctttagctgcttcttttgtctctccaaactaacatccagattgctctgttactatcaaaaggccttctttcctcatttcggacgcacgctccccatccatgtctacttgtgtaaaatcccgagatgtttgtattgttggtgttgcacggacgccaataggtggtttacttggcaccctatcatctctttctgccacagagttaggctcaattgctattaagactgctctcaagagagca

SEQ ID NO: 34479 - DNA, 248 bp, Glycine max
  Clone ID: 700891131H1
accgcttttacgttggtttattcggtttgtgttgctctgttatgctgctcctccctgtttgatttcaagggtaaaggataaagggatgatctacacagcaattgacacgttctacctcacagatgagcggctagcaaactcaccttctagaaaagatggcatagatgaagccactgagaccacccttagaatctatggttgtgatctcatccaagaaagtggcattttgctcagattgccacaagcag

SEQ ID NO: 34480 - DNA, 249 bp, Glycine max
  Clone ID: 700891132H1
ccaagacatagcaaacgatccaaactcttttttcatttgcagcatcaaaatgagtggtagcaacgatggtagcggcagctggagctctaggtttttgaaggtggctagtgcagctgccgctacagccgccgttgccggcggtttatatgccattctttcatcctcaacctctgctagctctgagatggaagtgccgtttggcagcgcacggcgtgagagcaaagaacgtgacgatggtggctccgggtc

SEQ ID NO: 34481 - DNA, 253 bp, Glycine max
  Clone ID: 700891133H1
ttccattctctctgtgtatttccctacctctcccttcaagatgcagatcttcgtcaagaccctcaccggcaagaccatcacccttgaggtggaaagctctgacaccatcgacaacgtcaaggccaagatccaggacaaggaaggaatccccccggaccagcaacgtctcattttcgccggaaagcaacttgaggacggccgtacccttgctgactacaacattcagaaggagagtactcttcacctcgtcctc

SEQ ID NO: 34482 - DNA, 247 bp, Glycine max
  Clone ID: 700891134H1
gactggttctagatcgcgagcggccgctcgcgatctagaactaaagaaatgtactctcaaggttttctagcatcagtggatgtgaccaaattggctgaagctcgtgcaagtgtattcaaggcaatgaacaacgaggcttctggtagatacatttgctttgaccatgtaattgatacacatagtgaggcagagaagctggcaaaggatattgggatgcctaaggaaaagatatgtggagatgcatcaa

SEQ ID NO: 34483 - DNA, 243 bp, Glycine max
  Clone ID: 700891136H1
ggtttagagaaactcattttagcagatggctctcctgtcaccctttctcttgctgatggtttgaataaactttccatgttgcaatcaattgtattagatggctgccctgttacatctgaaggattacgggccattggaaatttgtgcatttcacttagggagcttagtctaagcaaatgtttgggagtgacagatgaggcactctcatttcttgtgtcaaaacacaaagatttaaggaaactt

SEQ ID NO: 34484 - DNA, 243 bp, Glycine max
  Clone ID: 700891137H1
tggaggaacactctgactcacggtatcataaaggtttcttgtatgagcacatctcgaaagcctctcatcaagagacatgataggacattcaagcttacagatccatcgtcagagcactgccctcctggagagttcgtccgagaaatccctctttcaacccgaattcctgaagacgccaacatagaagcatactacgatgggccaggatctgtgcttgagatcctggtgccaaaacatcgcgtg

SEQ ID NO: 34485 - DNA, 239 bp, Glycine max
  Clone ID: 700891138H1
caagaatttgactgtgaacaagaatggcatctcctggaagagtgatagagagcacaaatttggaaaagatgttttccccaaaaacttccagagtagtgctattagaggtggtgcaactctcaatgtatccataccattgagtaagcaggaggatcttattgtctggatgcgaactgctgctttgccaacttttaggaagttgtatggaaagatagaggtggatctgaatgaaggtgata

SEQ ID NO: 34486 - DNA, 233 bp, Glycine max
  Clone ID: 700891140H1
ctcctattaaacccggttcacgccattgcccgattgggagggtacagggccccggagcaagaacagaacaagaggctatctcagcaggctgatgtgtatagtttcggagtattgttgttagaagttctcacaggaagagctccttcatcgcagtacccttcaccggctcgtccccgaatggaggtagagccggaacaggctgcggtggaccttcccaaatgggttcgctcggt

SEQ ID NO: 34487 - DNA, 236 bp, Glycine max
  Clone ID: 700891141H1
catcgttctcgatgacgtcgcgattactcacctctcctacggcggggaattctcccgcgcagtggagcagaagcaggtggcgcagaggaggcggagagatcgaagtttgtggtgatgaaggccgagcaggagcggagggccgccattattagggctgagggtgagagcgatgcggccaagctgatctcggacgccactgcctcggccgggatggggttgatcgagctaaggaggat

SEQ ID NO: 34488 - DNA, 236 bp, Glycine max
  Clone ID: 700891142H1
accgcagatacacaaacgcttaattgatctcatcagcatgccagctctagatgctcaggcagctgctataggtgcactctataaccttgctgaagttaatatggactgcagattgaagattgctaacgagagatgggctattgatcggttgcttaaagtgataaagatgccacatccagttccagaagtttgccggatatctgccatgatattggagagtcttgtgtctgagccgc

SEQ ID NO: 34489 - DNA, 205 bp, Glycine max
  Clone ID: 700891143H1
cgctctctgggtgttcccaaaatgaagcttcggagatcttcgctgtgcgtctttctagggtttctggcgctgttcctttcgccgccgccgtcaatggcgaaattcgtggtggagaagaacagcttgacggtgacgtcgccggacaacatcaagggcacgcacgatagcgcgattgggaacttcgggataccccaatacgggggca

SEQ ID NO: 34490 - DNA, 244 bp, Glycine max
  Clone ID: 700891147H1
gagaatcggagtttctcaactcgcattccaaacccgagatcgtcgacatgctgcgaaagcacacgtacaatgacgagctggagcagagcaagcgcagcgcggcgtcgtccggcggcgaggctccgccgtcgccggcaccgcaaactcaatttccggcgcgtgctttactaaggcacgtgagcagctattcgagaaggctgttacgccgagcgacgttgggaaattgaaccgtttggtgataccg

SEQ ID NO: 34491 - DNA, 247 bp, Glycine max
  Clone ID: 700891148H1
cgtcgctccgcaccagtttcaccgcacgaatatcttgttgtgtggagcgatccgagaaaaactctgtaaacatgttggtttaccaggacctccttacaggtgatgagcttctctctgactccttccgttacaaggaaattgagaatggaatgctgtgggaagttgaggggaagtgggttgttaaaggagcagttgatgtagacattggtgcaaacccttctgctgagggtggaggagaagatgaggg

SEQ ID NO: 34492 - DNA, 198 bp, Glycine max
  Clone ID: 700891150H1
tggggttgttgtaatgctttgatgatttcatttgatcctcactgtacaagatgttcataaaactatcgagctttgctttgtgacttggttaaacattaaactggcgataccaaagagacatagcaaagctcgatagttttatgaacatcttgtacagtgaggatcataagactttagaactttgcttcctgtcactgg

SEQ ID NO: 34493 - DNA, 239 bp, Glycine max
  Clone ID: 700891151H1
tacaaattctctgtgttgtgttgtgtacttgtgttaattgtgttgttgttgtaggaaatttaagtgaagagagaatgatgatgaagtctgctatgtgtgcattggtgcttgtggcactggttgtggttgaagtggggcccatcgcttatgctgcggtgacttgcaacccaacacagttgactccttgtcttccggcaattaattcaggttctgcaccttcgagtgcttgttgccagaag

SEQ ID NO: 34494 - DNA, 239 bp, Glycine max
  Clone ID: 700891153H1
agatgattgaaaaataaaatgtttttagtcacattttttctctctctataacggtgttgtgcgcggtggcggcaagagaggcgaccaccatgagaaaccaatcgaggtagtcggagcagacgaagaggcgggagataaaaacagcggcaagtgaccccaatgctactccgaccctgactcttgcttcatcgcctgggatccgcaattggtttgactccctctctgcttcgccactgcaa

SEQ ID NO: 34495 - DNA, 237 bp, Glycine max
  Clone ID: 700891154H1
atttggcaacaattctatgccatcctccaagctcgagaaggctctcggcgaccaattccccgaaggagagcgttactttggcctcgagaattttggcaatacttgttactgcaacagcgttttgcaggcactatacttctgtgttccatttcgagaacaattgctagaatattatgcaaataacaaaagcataacagatgcagaggaaaatcttttgacttgcctagccgacttatt

SEQ ID NO: 34496 - DNA, 237 bp, Glycine max
  Clone ID: 700891155H1
cttcgatcgcgagcgatttcattggcatcgaagcgatttctctacaccaatgccgcttcggctcctctcccccctcctccttccgccgcttctcccagccgctggaacttcctcaaatacgccgtcgtcggcgctctcaccggaggcactgcctttgccggttacgcctcttacgcttacagtttggaagaagtagacgagaaaacgaggtcgtttcgtgaatcggccaaatacgct

SEQ ID NO: 34497 - DNA, 221 bp, Glycine max
  Clone ID: 700891156H1
ctaattttctcttccctcaaactcaatccacagtcctcccaaacccttcaacctacttctcctcaaaccttctttcttctccactccccactaactctttctttcaaaactttgttattccaaacgggtctcaagctgagtacattcacccttacctcgtcaaaacctcaaactcttcactctcagcctcataccctcttctcctcttcaccacagcattt

SEQ ID NO: 34498 - DNA, 236 bp, Glycine max
  Clone ID: 700891157H1
gcagaatgcttcctgaatttgagattcttagttccatgtttcctcaagtacaacatgtagcacttgagcaatcatctgctttgcccagcttatattcaaaatatggaatccatagcttacctgcaatcttactggtgaatcagacatctagggtgagatatcatggaccaaaacttcttaacttccttgtagaattttatgagagaaacacaggtaagcatatcccgaatcttgtt

SEQ ID NO: 34499 - DNA, 233 bp, Glycine max
  Clone ID: 700891158H1
gtggtttctacagacgaaaatcaacaccaggggagaatgtgtagccttcaagacataggaggtcatttcatgaaagtaccaattattgtattccaggttcttctttgtatgcatctagagggaacacctgcttgtgctgtacatatacctcttccagttattttctctccccttttcctactgcaaggagctggggtaatgttatctgcatctaaattaggggagaaacttgt

SEQ ID NO: 34500 - DNA, 225 bp, Glycine max
  Clone ID: 700891159H1
cttgaattcataatttatttctccacaacaacaaaaatgacttcatcaacacttttccttatgttattcaccctttccttgatcctcatttctcatgctcctatgtcaaccttaggcataaccttgtatgaatctctatgcgatcaggctgggcaggacaaggcaaggtgccttgaagttctccaagccgaacctcaaattgttggggctaaagataatgtggag

SEQ ID NO: 34501 - DNA, 240 bp, Glycine max
  Clone ID: 700891161H1
aaaagtgtgcaacgaactgtcatttggatgggaaagaggcaagaaactgtagaggatgtcccctgtggtaatacagtggctatggttggtcttgaccagttcatcacaaagaatgcaacattgacaaatgagaaggaagtcgatgcccaccctatccgagctatgaagttttctgtctcacctgttgttcgtgttgctgttcaatgtaaggttgcatcagatcttcccaagcttgttgaa

SEQ ID NO: 34502 - DNA, 241 bp, Glycine max
  Clone ID: 700891162H1
cagattcacagaattgcttaactggcacatttccacgatctattacaaatgttacaacactgtccttgtgtaaaatcaatgaacagtgttgtaacatttgtaacagattcacagaattgcttaactggcacatttccacgatctattttcatttttccaacagaaaatctgttttagttgttttccattgaccaatttagtttagtgtgctgctaagactcgaataatcttttcatcttac

SEQ ID NO: 34503 - DNA, 149 bp, Glycine max
  Clone ID: 700891164H1
ttcggctcgagcacacaaacaactcttccttcaggatcgctgccaacgttactttccatttttacccttcatcctcgagaaaaaaatggcgaacgcagcatctggtatggccgtccatgatgagtgcaagctaaagtttctggagctca

SEQ ID NO: 34504 - DNA, 238 bp, Glycine max
  Clone ID: 700891129H1
cctttgttcactcttcttctcttgcggctagggttttagcgcacttcttctagatttaaggaagatgggtaaggaaaaggttcacatcagtattgtggtcattggccatgtcgactctgggaaatccactaccactggtcacctgatttacaagcttggaggcattgacaagcgtgttattgagaggtttgagaaggaagctgctgagttgagcaagaggtctttcaagtatgcctgg

SEQ ID NO: 34505 - DNA, 264 bp, Glycine max
  Clone ID: 700891094H1
attccactcagtgagttatgaagtgatctgaaatcccgcgcgaaccgttaggttcaggcaaagtgagatacccaaagtggcttccaatggcgactctgcggctcaccttctccgactcgaccaccttgttcaggccttctctaccttccaggcgaatcttctcctgacaccgaagcctcattgtgaaagcctcttctgctgaagacgattactccagaagcagcagaagacgcttcatcgccgaaaccggcgcactctcggtct

SEQ ID NO: 34506 - DNA, 259 bp, Glycine max
  Clone ID: 700891095H1
attccactcagtgaattatccagtgatctgaaatcacccgcgaagccgttaggataaggcaaatagagacaaacaaaccggcttccaatggcgactctgcggctcaccttctccgactcaaccagcttgttcaggccttctctaccttccacgcgaaccttctctctagaccgaagcctcattgtcaaagcctcttcttctgaagacgatttctccagaagcagcagaagacgcttcatcgtcgaaaccgccgcagtct

SEQ ID NO: 34507 - DNA, 153 bp, Glycine max
  Clone ID: 700891096H1
aaaaaaaaaaaaaaaacaaaaagaaaaaaaaaaaaaaaaaaaaaaaaaaaaaaaaaaaaagaaaaagaagaaaaaaaaaaaaaagagaaaaaaagaaaataagaggaagggtagaaactagagagacaagagggaaaagtagtggctgaaaag

SEQ ID NO: 34508 - DNA, 255 bp, Glycine max
  Clone ID: 700891101H1
ggaacagagaaagtgtcccgaagagcctccaacaggctatatccatgtcagagcaagaaggggtcaggcaacggatagccacagccttgctgaaagggtgagaagagagaagataagtgaaaggatgaaggtgttgcaacggcttgtgccaggctgtgacaaggtgactggaaaggcccttatgttggacgaaataatcaattatgttcagtctctacagaatcaagttgagttcttgtcaatgaagcttgcttc

SEQ ID NO: 34509 - DNA, 248 bp, Glycine max
  Clone ID: 700891103H1
gctcgattgactactccacctcctcgtctggctgactttaactattcaactgaaatgtttgaaaagaacatggaatattggcaacaagaagttgctaattactggaaaatgctagacaataaaattaagcctggcacaattcggaatgtgatggacatgaaagcaaatttgggttcatttgcagctgctttgaaggacaaagatgtttgggttatgaatgtggtgccagaccatggaccaaacactct

SEQ ID NO: 34510 - DNA, 245 bp, Glycine max
  Clone ID: 700891104H1
aaaaaatctaagtccctttggtcttcatcttctgttctgatccaggtatggcttctaaacgcatcttgaaggagctcaaggatttgcagaaggatcctcctacctcatgcagtgcaggccctgtggctgaggacatgtttcactggcaagccacaatcatgggacctgctgatagcccatatgcaggtggtgttttcctagtttcaattcattttcctcctgactatcccttcaagccaccaaag

SEQ ID NO: 34511 - DNA, 245 bp, Glycine max
  Clone ID: 700891105H1
tgtggccactctctctttctccgattcattgccgctccaccagcaatggccacgcacgtgagtcacgtgatagtagcggcacatttcttctacttcttctccctttctctttctccttctccatctcccattctcaccgatccgctgcaatcaacctcttcgctgccactcccacaagcttagaagacgcgtacgaggcgcttacagtttttcagattctcggaatcgaagagaagaatactcct

SEQ ID NO: 34512 - DNA, 243 bp, Glycine max
  Clone ID: 700891106H1
aaattaccgtaaggagttgatgagcgtgttgtttggagagaataacaacaacaacaacaaaaagaagggacacgtggcgcttccgcaggtttttataagggggcggcacgtggggggtgctgacgtcatcaagcacatgtgggaggtgggggagctggagaaggttctggaagggttgcccagaacgaagggtgggttcgtttgtgagagttgtggtgatgtgaggtttgtgccgtgtgggaa

SEQ ID NO: 34513 - DNA, 207 bp, Glycine max
  Clone ID: 700891107H1
ggcgttcggctcgagcggctcgagataattagagagtgcgagagagagagaagatctgcgcccgaagaggtaagcgctattgatgtacggagacaattcggacgacatgatgcagaagtggggagacaactatggggcaatcgtgaaggtgctcgaagaactcgggacgaacagggaactttaaaaattcggccacggagagtaccg

SEQ ID NO: 34514 - DNA, 241 bp, Glycine max
  Clone ID: 700891108H1
taaaaaccctggcttgggttggatgatgggtttcatgtttgttgtcagtttccttggactttttagtcttgtgccacttcgtaaggttatggtcttggattataagcttacatatcccagtgggacagctacagcaatgctaatcaacagtttccatacaaaaactggagcagaacttgctgggaaccaagttcggcagcttgggaagtatctaagcataagtttctgctggagttgcttt

SEQ ID NO: 34515 - DNA, 241 bp, Glycine max
  Clone ID: 700891109H1
ctcaaactcaacatagagagagagagagagagagagagagagagagagagagatatgaccgattacgaagagagatgcggggggcacggaggagaagaggaacttcacaattctcagcatcagcctcctggtggttcctctcctttacccacccacggggatctcaccgattcgatatctcgacatggatctcgcgagtatgagagagattcttccagaagcagagatacggagcgggaga

SEQ ID NO: 34516 - DNA, 210 bp, Glycine max
  Clone ID: 700891111H1
gcaacagattctatgtggatatgcatttcaaaatagagacaaatatatctcttagtgtgcggtcaataatatgcagagatatggatcgtgcaagaatgaattgaccagctctgtaggctgttataatttgctttgacttggcggcacaaattgtagatttcttgtacagtattttctgatttttttccctgaataattggaatttgcgat

SEQ ID NO: 34517 - DNA, 244 bp, Glycine max
  Clone ID: 700891112H1
tacagaagaagccaagccagaggagcctaaagaagttgcagttgagaccgaggaggtggtgacaaaggagacagaggaagagaagccagcagcagaagagaaatcagaggagaaaactgaagaagtgaaagaagaagcagaagagcctaaagaaactactgaaacagaaacagaatcagcaccagcagcaaccacagaggaagagaacaaaccagctgagacagtggaagccccagtagaggtt

SEQ ID NO: 34518 - DNA, 244 bp, Glycine max
  Clone ID: 700891114H1
tttattcttttctatttctaaaacagcgtttgcttttgtgtttggtcttagacgcagcacgcccccaccactgtttcaaccctcaaattgtgtcttcttcgcttactggttttgattatgttttgttccatttgaaacaatattcatcgatccatcgccaaacatgccttctagtcacttgcttcttgaggaacctattaggatggtctccatccttgaaccatccaagcctagttttttctct

SEQ ID NO: 34519 - DNA, 246 bp, Glycine max
  Clone ID: 700891115H1
tgttgatgatgttgtccttgttggtggttctaccagaattcccaaggttcaacaactgctgcaggacttctttaatggaaaagagctttgcaagagcattaatcccgatgaggctgttgcatatggtgcggctgttcaggctgcaatcttaagtggtgagggcaatgagaaggttcaggatcttctcctcctggatgtcacccctctgtctcttggtttggagactgccggtggtgtgatgactgt

SEQ ID NO: 34520 - DNA, 247 bp, Glycine max
  Clone ID: 700891116H1
cttaaactgtctattcatactcctgtcagttttgagcatgactttgttgaagaagaaaatgccactgagcctagagactcctccaacaagcttctggtgggacaacttccaaattcagaacatggaaatacagtttggaatgctaaaataatcttgatgaatggacttagtaggtctgcgttggaggagctgtcatctgataaaattgtagatgatcgcattcctcatttttgcaatttccttagat

SEQ ID NO: 34521 - DNA, 253 bp, Glycine max
  Clone ID: 700891117H1
ctttctcttcagctctctttccaatacctcgttcaatagctccacaggttctgagttgcaagctaaacatgggtgagatagctttaccaaatggcattagcaatggcaatattaatggagtcaatggacaaagccattctctgaatggctacaggaagagttgttggtatgaagaagagattgaagaggacttaagatggtgctttgctctcaatagtatattgcatacaggagctagccagtaccaggacat

SEQ ID NO: 34522 - DNA, 236 bp, Glycine max
  Clone ID: 700891118H1
tcgtgattttgtagtttctaataaattttaaactttagtagagtgaattagaaagaatatattagagaaagtgttgttagtattccttgtaaaggtataatagccaatgagaagtgaggacaaattttgccttgtgtatctgtatttttatgggaatcttagtgcatgtgataaataataaataaatcatccaaaaaaaaaaaaaaataaaaaaaaaaaaagaaaaccaaaaaaga

SEQ ID NO: 34523 - DNA, 247 bp, Glycine max
  Clone ID: 700891119H1
ctttgtcaccgccacaaacttctgccctccaaactacgctctccccagcgacaatggcggttggtgcaatcctcccagacctcacttcgacctcgccatgcccatgttcctcaaaatcgctcagtaccgcgccggcatcgtccccgtctcatatcgccgggtgccctgcaggaaagagggagggatgaggttcacgatcaacgggttccgttacttcaacttggttttgatcaccaacgtcgcgggt

SEQ ID NO: 34524 - DNA, 244 bp, Glycine max
  Clone ID: 700891120H1
ttctctctgtctcgtttacacatctctccaacctttcactttcgtttctcagttttattcgaatccctctctcaatctcctttccaaatggccagcgttgaggttgcacagcaaacaccaacaacagttccagaaaatgaaacaaccgaggtaagcaagacccaggaaacaaccccagtcactgaggctcctgcaacagaacaaccagcagctgaggttcctgcaacagaacaaccagccgctg

SEQ ID NO: 34525 - DNA, 242 bp, Glycine max
  Clone ID: 700891122H1
ctttgggattctgctacaaatccttattcatacccaagtaatgacagcttttgtacgcgagtttacgataaaccttttaagcacttcatttccaaacatgactgcttcagaggttactcaatttgttaatggcctttttgagtccaccaatgacctccccacatttgaaacccacatacgagattttcttgtacaatccaaagaattttcagctcaggataacaaagatctttatgctgaag

SEQ ID NO: 34526 - DNA, 242 bp, Glycine max
  Clone ID: 700891123H1
ctagtttttatttttaagggagtggtgctgaaactaccaagagggtagccagaaattaaaatggcacatttgcaagaaatagatcgagtcaagaatgaagttatacgtttagagcgcgaatctgtcattcccattctgaagcctaggctcataatgacactggccaatcttattgaacatagttctgaccgggctgagttcttgaagctctccaagagattagagtacacaattcgagcttg

SEQ ID NO: 34527 - DNA, 234 bp, Glycine max
  Clone ID: 700891124H1
ttcgaccgaatcggctcgagattgtttgttgttgtaactcgttcttcttcttttgttgttctgtgtttgtgtttgttatttctctcacctgaaaatgtcttgctgcggtggtaactgtggttgcggaagctcctgcaagtgcggcaacggctgcggaggctgcaagatgtacccagacttgagctacactgagtcaaccaccaccgagaccttggtcatgggagtggcacctgt

SEQ ID NO: 34528 - DNA, 240 bp, Glycine max
  Clone ID: 700891126H1
tgattgtgaagaaagcattgtttcttctccacttatggagcatttgccgccacaaccgcatcatcatgcgggtccttcttctcagctgcagcaacagttgccagaatcaatgattgagttaatttcacaagataaaccgttgccagaaaagggtaagcttttgcaagcagtgatgaaagctggtcctttgcttcagacactgcttcttgcaggaccacttcctcaatggagacaccctcc

SEQ ID NO: 34529 - DNA, 220 bp, Glycine max
  Clone ID: 700891127H1
cacagccaagtcgtaaaagggtttcaagggatggaaaacatgcagagcttctggcaattgggtgatgaactccgtgggcactcaaaagcatcggaggatcacaagtggttaatggttgcctcgaaactggccgaacagacaagattgaagggggagcgtgtgaacaacctggatctttcaaagggccccattgaaacagggtcaagggataattttgggt

SEQ ID NO: 34530 - DNA, 238 bp, Glycine max
  Clone ID: 700891128H1
gtttctccttcccactgaaccaaaccatgtccattttcatctagcttcgcttttcaatccattgtttctcagataccgcatggctcacaattacatcgccaccgattcacctctctctcgtcgcatagttcgtgctttcctccacttcctcaactccgttgaaccgggtcctggggttgatgctgaggggattgaggttgctagggagtgtttggcagaggcttttaagcttaatcaa

SEQ ID NO: 34531 - DNA, 262 bp, Glycine max
  Clone ID: 700891093H1
cagaggtggaaatttagaggaacctaaaccgtggcgctttgcagacccctcttcactcaatgactttgatacttacagagcttctgagcgatttccacgaccatcgttgtcagatctacctaaaattgcccaagaaacaatgagtgcatatgaaactgtcaaaaagggtgtcaagaagttgatgaggaagtacactgtgaaagcttgcggttattgcactgaggttcatgtgggtccatggggtcacaatgctaagctttgt

SEQ ID NO: 34532 - DNA, 269 bp, Glycine max
  Clone ID: 700891062H1
ctcatttttattagttttgttgctgagtgtgtgtgaaactgtgaaagagagttatggcaggaggtggtggagctccatgcacctaagattgatgagccacaacctcatcccccgaaggatcagttaccgaatgtttcttactgcattacgagtcctcctccatggcctgaggccatacttcttggttttcaacattatcttgtgatgctcggtacaactgtgctaattcccactgctcttgttccccagatgggaggtggcaatgagga

SEQ ID NO: 34533 - DNA, 273 bp, Glycine max
  Clone ID: 700891063H1
gtaagctctctatatctagtgagatgaatcatctaatggaggcctctagtggcaaatattcctatggtcaaggcaatccatctgaacgggaaatatctcagcatttgacacaaaaatctgaaaatcatgaacagactaatcatgcatgggatattcaaagtgaaagaaacttgtcatcctcagcagttcagtgctctgacccaatgaaagcatctcagttgggttatctcacggtcaaaactggtagagaaaagggtagaagaaaaaagagga

SEQ ID NO: 34534 - DNA, 272 bp, Glycine max
  Clone ID: 700891064H1
cgggagaagtgctaaccccaccatcaacagccagggcaacagatacaatgctcctactaaccgttttgccaaggaggtgacaaagagagtggaaacagcagaaagtcagtggaagggttggaattggaggtcagagggagatttgttgctgaatggtgcctatttcacaccatctggtgctggagcctcagcaagctatgcaagagcctctagcttaggagcaaatcttcttcctggttggttcatgacttccatgctggtgcataggttgc

SEQ ID NO: 34535 - DNA, 274 bp, Glycine max
  Clone ID: 700891065H1
gctcgggattctgctcgagcgcttctctccgaccatggccggaatcaccaaaacctctcacttttccgtcgttttgatcgccgtcgtcgccctctgcgtcttcccggcagcgacatccgataacgtggcctcggcggtcctcgggttgccgtcccatgtcgctggcgaaggaaagaacttgtgcagcgcggcagcgccgtcgtcgtgtcccgtgaagtgtttccgaaccgacccggtttgcagcgtggacggcgtgacgtactggtgcgggtgc

SEQ ID NO: 34536 - DNA, 259 bp, Glycine max
  Clone ID: 700891066H1
tcgtaatcttttttaatattttttatgttttagaatattttaatttttaatttaataattccttttatgaacatccacatccacaacaaattaaataatcaagtaattaagtatatttttcccctaaaattgtgctcacttcgtataacccgtctctgttgttgttgttgttgttttttttttggtgaatacccatctctgttgttgcactcaccggctatggaatttgagtctctccaacgacgtcgttcaagcagtg

SEQ ID NO: 34537 - DNA, 71 bp, Glycine max
  Clone ID: 700891067H1
ctggagaagcagaacctgctgaagcttaagcattaccaggaatggctgcactacagccaaatgagcaaggt

SEQ ID NO: 34538 - DNA, 254 bp, Glycine max
  Clone ID: 700891068H1
gcggcaactgcgactgcgctgacaagactagctgcaccaagggaaacagctatggtgttattgtagagactgagaagagttacatcgagactgttgtcatggatgttccagcagctgagcatgatgggaagtgcaagtgtggcactaactgcacttgcacggactgcacctgtggccattaaggaatatgtatgaaaatgtaattgccatgtgtttggcaatacaaatatccaaataatgtaatcttcgtatga

SEQ ID NO: 34539 - DNA, 248 bp, Glycine max
  Clone ID: 700891070H1
aggaagtgagccagcagaggaaggactacgtagaccctccgccagcccccctcatcgacttggccgagattaagctctggtccttctacagagccctcatcgccgagtttatcgccacactcctcttcctctacgtcaccgtcgccaccgtcattggccacaaaatacagaccggaccatgtgacggcgttggccttctcggcatcgcatgggccttcggtggcatgatctttgtcctcgtgtactgc

SEQ ID NO: 34540 - DNA, 255 bp, Glycine max
  Clone ID: 700891071H1
cttgtccatctgcatctgcaagaatgggaaaaggaggatctttgagcgagggcgtgatgaagaagatcgtcctctcctacagctacgtggccatatggattttcttgagcttcagcgtcatcgtctacaacaagtacatcctggacaagaagatgtacaactggcccttccccatctccctcacaatgatccacatgtccttctgcgccaccctcgccatcctcctcgtccgtgtcctccgcatcgtcgagcccg

SEQ ID NO: 34541 - DNA, 260 bp, Glycine max
  Clone ID: 700891072H1
gtggactcgacaagacaacaacaatattcagaacattaacaagaccacaccacatcatgagcgtcatcgacattctcaccagagttgattccatttgcaaaaagtacgacaaatacgacgtccaaagccaaagggactccaatctctcctccgacgatgcattcgccaaactctacgcctccgtcgacgccgacattgaggccttacttcagaaagcagataccgcttccaaggagataagtaaggcatccactgtggcg

SEQ ID NO: 34542 - DNA, 236 bp, Glycine max
  Clone ID: 700891073H1
aaaaaagttttatcggtttaaggagagatcgcacgggagttgcccggggtctctctctcgtgtggtgtgtggtgtatgctgtggtctccttagcgtcatgcacttttattataatctatctgtcgctccactccgtattagcgactctggatacagaaggatacatcagaagattccgctccaagtcctatcgaataaggcattatctgtcaattgacattggccagggttaggat

SEQ ID NO: 34543 - DNA, 259 bp, Glycine max
  Clone ID: 700891074H1
ctgcgactgcctccaggggttccaggtctgccactcgctcggcggatgaaccggctccgggatggggacgcttttgatttccaagatcagagaacagtaccgtgacagaatgatgctcaccttctccgtttttccttcccccaaggtctctgatactgtggttgagccttataacgctactctttctgttcatcagttggtggagaatgctgatgagtgtatggtgcttgataatgaggcgctctacgatatctgcttc

SEQ ID NO: 34544 - DNA, 260 bp, Glycine max
  Clone ID: 700891075H1
gttgatgtagtaattgttaattcgtgagttattcatagtactgctgtagaagggagttaaacttctatccttattgccttagcttttgcagattcaactttatcagaggagacaatggaaaaaatatggtctggtattttcctatctaacggtgcttattatttgttgcaacttgcatgtgttgtctgattgctctgcctgtaccagtaacactcgtgttatgtccatctcatctcagctggtgatggtgagttgatttt

SEQ ID NO: 34545 - DNA, 260 bp, Glycine max
  Clone ID: 700891076H1
taagagagagaagtagtagcagtagcagtaggaagaggatgatcggcgtcggaaagatcaagcagtacagtaacgtcctcgacaagcccctcaccaagggcaagcaagaagttagattgagcgcatacgcgtacttgttctcggagcttgttcagtacaaccaaacgcaggtcgacaatattggcgagcttgaacgaagactggaggatgctggatatgcggttggggctcgagttcttgagctgctttgacacagagat

SEQ ID NO: 34546 - DNA, 227 bp, Glycine max
  Clone ID: 700891077H1
caatgtacactttatggtcttacaacgctcgtcctcctattcatatcgttcggcaactgtgcatcgttccaccgttagtcttgtcatatcactccagctgcccacggatacgtgatacgatgacaactcctacggcattcggtgagtcgtccatctcgaacgttcgaacttgtacctgcattacatctgtcacgttgaagctcggcatgtcgatctggtgcgtacta

SEQ ID NO: 34547 - DNA, 265 bp, Glycine max
  Clone ID: 700891078H1
cttaaatcgcggcgtataaatgacgtttactttagccgattgaaagcattaagctcaaacttacaacttgtaccccgacttaggttcatgattcgggatgttatagagttgcgtgctagtaactgggttcctagacgcgaagatgtcaaagccaaaaccattactgatattcattcagaggcagaaaaaaatcttggattgcggccaggtgcaactgcaagtatgagaaatccccgtggtggtgttcaaggaaatgccagctctg

SEQ ID NO: 34548 - DNA, 269 bp, Glycine max
  Clone ID: 700891080H1
caatagcaagacgctgtctagtgatgcaggagcaagcatttcaaagttgttccgtcacgatgtcggctatgcgatgggattggctttctcgctcgaggatgctcgtgtagggtatgtgcaatgcgcaccccgcgtggctcaatgccatgggtcatgcaccacctgcaacatatcctcgagtcttagcgacagttccgaccattagtcttcccgaggatgtttgtgtgcagaggttttatgagaaatatccggagtccaaatcccatgac

SEQ ID NO: 34549 - DNA, 256 bp, Glycine max
  Clone ID: 700891082H1
ctttttctccaaagtttcggtgctgacggatagaacactacctattcagccgccatgcacactctcctccgatccactctcaggaccaagactgcttcatctttagcatatgctgtggtttccagaagtgctcacgaaaatctccttcaggctcccttattgtctagatcagatagcactgaggcttcattggcaaaggataattcctctaatgatgtaaaaaatggtcaagggtacaaaggtcatagtatgcttg

SEQ ID NO: 34550 - DNA, 77 bp, Glycine max
  Clone ID: 700891083H1
ctttttagttgacgtttaccccaaagttccatttctcatcaaaaacgaaaaaagaaaaagaataccacaaagaaaaa

SEQ ID NO: 34551 - DNA, 255 bp, Glycine max
  Clone ID: 700891084H1
gagaaacaaaacaaaaaaaaaatttctccgaagactgtgtattatcgttatcgttcactgagttaggttttgctgttcttcctagggttttattgtgtccaataacaagaggagggggaagagaaacataacataaaaaaaaaagattaaaaggcaaaatttagggatttttttttgggaaaaaaaagagaaatttatgttaccgtagtggaagttgttgtttggttaagatggctcaggttaaggttccgcctc

SEQ ID NO: 34552 - DNA, 255 bp, Glycine max
  Clone ID: 700891086H1
cactctctattttgattctgtctcgaagtctctctctctctctctctctctctctctctctctgtgtgttgattctctctcgatcaaaacttttgaacagttctacgagtcgagtgtcaggctgtcgctctgatctggagtttgatcaactgtacctaattgaccttgatggatgagtgaacttctttaaaatgatattttcacggtcgagaatgtagaccctgactgcaaagtgtatgacaaggtctctcgggt

SEQ ID NO: 34553 - DNA, 257 bp, Glycine max
  Clone ID: 700891087H1
gagaaaaacaatggatgaaactaaaattctcttagagttgaagtccgtttcgtttttatgtgttcatagcttcatcaaccttctatgcgaagaaactatttcttttctctcagtgttctcttcagatcctctgtttcattgcatcgtggcgttttgcaccttggttttcctctatttgccacactttttcttgaaaataattctatctccagtgcccattctcactgcgattctccttctctctattctccgtctcg

SEQ ID NO: 34554 - DNA, 255 bp, Glycine max
  Clone ID: 700891089H1
cgggactgtaactagccgcagcacgaggagcagcctcaggaggagaaggatgtctcacaggaagttcgagcacccaaggcacggttcactgggatttcttcccaggaagcgtgctgctcgtcacaggggaaaagtgaaggcattccccaaggatgacccatccaaggcacacaagctcactgcattcttgggttacaaggccggtatgactcacattgttagagatgtcgagaagccatgatcaattcttcacaa

SEQ ID NO: 34555 - DNA, 261 bp, Glycine max
  Clone ID: 700891090H1
cttcttcccctcttctctagacaccgacagaaattaacccttctgtctcttgttcctctgtttttttctctttctcagagaggctattataccgaacctgctctttgtttcttgttttcacagatccgacccaaactacagagaatgtcagaaacacctcaaaggaagaaagcgagccttcccccgaaaagaggtcagatcaaggctcaaatttttactagccttgtgaattcagtggcctccaccatctcaaaaacgggg

SEQ ID NO: 34556 - DNA, 257 bp, Glycine max
  Clone ID: 700891091H1
atatactcccgcatgttaaatggcgaggatcaaacctcaagctctgctacagcaaagctaaaggaagaagggtccttctcggataagtgccgtgactgctatattttacttgctgattcttgccttggttgggtttttcctgtttgcttcgtacatacatttgtccagcagatcactattacaatccgtagatcacttgtcagtctccgagggtgataatacttttgtggactccaagagatctgagctgccttgat

SEQ ID NO: 34557 - DNA, 269 bp, Glycine max
  Clone ID: 700891061H1
tatcaatattcgctaaattaataaaatgattttcatcaaaatcattttattaatttacccaatattgataatcatacataattaacaaaaccacttaaaaaaagtgggggaaaattaataaaatgattttgctcaaagaaacaatgagtgaatatgaaactgacaaataaggaataaaaaaagtaaaaagaggaagtacactgtgaaagcttgcggctattgcactgaggttcctgtgggtccattttgtcaccatgctaagctttgtg

SEQ ID NO: 34558 - DNA, 261 bp, Glycine max
  Clone ID: 700891037H1
gattttggatgtacgaattttaaacacagacagacatgcaggaaatcttctggtcaggaagcttgaagggtttggaaagtttgaccaagtggagctttttcccattgatcatggtctttgtctccctgaaactttggaagatccttattttgaatggatccattggcctcaagcatcaattcctttctcagatgatgagctcgactatatatatcatctagacccatttcgtgattcagaaatgcttagaatggagcttcc

SEQ ID NO: 34559 - DNA, 261 bp, Glycine max
  Clone ID: 700891038H1
atcaatagccatgaagatcgttcggagagacctagtacctaatggacctggcagcgttaagatggtggcagtggattcggatgatctctggattgcgtataacttgatagctcccggagactctgtcatggccgttactgtcaggaaggttctaagagaagctgctaatggcggacgggaagcagaacgcgtcaagctcaaattggaaattatagtcgaagagctttctgattatgacaaagaaggttctattttgcgtgt

SEQ ID NO: 34560 - DNA, 261 bp, Glycine max
  Clone ID: 700891039H1
tctcgagccgaatcggctcgaggaaaaggaaagaaaactctcaaaccactattatagcaatggcagaacaaaaccaaaaccaaccaactgaagctggaaggcaccaagaggttggtcacaagagccttctccagagtgatgctctttaccagtatattctggagacaagtgtctacccaagagaacctgaatccatgatagaactgagagagttgacagcaaaacacccatggaacatcatgacaacctctgcagacgaag

SEQ ID NO: 34561 - DNA, 263 bp, Glycine max
  Clone ID: 700891040H1
ctctcatgatattattctctgccaaccaaaataaccaaaccaatcaataatacatcattctcataatcgaagctcccatcgccgtcagattccacgccaccgccgccattcgctccgccgccgcaccttcacctcataataaccgttcaatgtggagcgccgatgacgtgaacggtgtgcgttatgccgcttcgtgcaggctcgcatgcagctgcggtttcgacgcgccttgggtaagaagtaaaataagttcaggcactccg

SEQ ID NO: 34562 - DNA, 265 bp, Glycine max
  Clone ID: 700891041H1
gtttcttcatcggttgttcaagtaaatggcctttgtcaccactgctgaagtgtgtgatgcgaacccacagttaattttgagtggggagcttcgtgcccttcagccagtttttcagatttatggccgtcgacaggttttctctggaactatagttaccttgaaggtgtttgaagacaatgttctggttcgtgagttccttgaagagacaggctatggaagagttctagttgttgatggaggcgcgagtttacgctgcgctatattg

SEQ ID NO: 34563 - DNA, 265 bp, Glycine max
  Clone ID: 700891043H1
ttgatctatggcgagaggacgcttatttctctgcggcggaagaggtgcaggaatcagctgatataatggaatctgcatacagggcatggttgagagagaagagagataggtcaactcctgaggaattaaatgaactatgtagagagctgcaaactgctttaggtaccgcaaaatggcagtaggaagaatttgataaagccgtcaggtaaaggtaccgacctcacagtgatgacaatacatccactaggcataggcagtttatttc

SEQ ID NO: 34564 - DNA, 259 bp, Glycine max
  Clone ID: 700891044H1
gtttcttcgaggcttaagaaacctcgcagaagtcaaagagaactcactctcagacactttggttcacagtaacctttcacttctattttgaatctgtctagttccttctcccatattatagtgccctcttatgcgaagttacttacgtttcaagcctagattactgctcagacttgtgttactgctttgtgaagttgtaagaaaaatggaggctgatggaccagttatagcgaataagctacgggatgtgctgaggctc

SEQ ID NO: 34565 - DNA, 266 bp, Glycine max
  Clone ID: 700891045H1
tttctctcgaagcaagaaaaatgttcatcgagagtatcaaggttgagagtcctaacgtgaagtatacagagactgagattcagtccgtgtacaactatgaaagcactgaacttgttcacgagaacaagaatggcacttatcagtgggttgtcaagccctaaactgtcaaatatgtatttaaaaccaacacccatgtccctaaactatgggtaatgcttatcgggtagggtggaaacgatggctcaaccctcaccggtggtgttatt

SEQ ID NO: 34566 - DNA, 263 bp, Glycine max
  Clone ID: 700891046H1
catacatcgcagcgtattgatgacgtggactttagccgattgaaagactttagctcaaacttacaacttgtaccccgacttaggttcatgattcgggatgttatagagttgcgtgctagtaacttggttcctagacgcgaagatgtcaaagccaaaagcattactgaaattcattcagaggcagaaaaaaatcttggattgcggccaggtgcaactgcaagtatgagaaatccccgtggtggtgttcaaggaaataccagctc

SEQ ID NO: 34567 - DNA, 264 bp, Glycine max
  Clone ID: 700891047H1
cttattctcttcctctctctctactctgagacacaaaggaaaattataagaaattatggctggttattcaaaagcttcagctctttggatcctttttcttctctttggcttctctgtagctaaggaaattttggttggaggtaagactgatgcatggaaggtttcagcctctgaatcagattcactcaaccaatgggcagaaaagtctcgtttccaagttggagactatcttgtttggaaatatgatggtggctaagactcagt

SEQ ID NO: 34568 - DNA, 275 bp, Glycine max
  Clone ID: 700891048H1
caaccttgtagttattctctttcttcttttttagctatccctctcttgaaaaatctagatctcgttcttccttgatctacgttacgcttttagtgaccggatctgtatggatctgaaccagatctacacgccgatggtggttttggcctggtctttcatagatctgattcatggaggctcagatctactgtacagagatacctgtagataatcgatgagaagaacgcagatccagccgcttccgcttgttcgatcgctacagacgcttgtatcgg

SEQ ID NO: 34569 - DNA, 262 bp, Glycine max
  Clone ID: 700891049H1
accatattgtaccatactggcacagcaaaatcttgtaagcgaacaggtgttctctttttggctcaatggtgatccaaaagcgaaagatggtggtgaactaatttttggaggtattgatcctaaacacttcaaaggagatcatatttatgtcccagttactaaaaagggctactggcagattgaaatgggagatttttttattggaggtctctcaacaggtgtttgtgagggtggctgtgctgctatagtggattcacgaaca

SEQ ID NO: 34570 - DNA, 261 bp, Glycine max
  Clone ID: 700891050H1
ggagttgtcacgttgggagttccatatgttcccccaggcccctctcagtatcacaaattccttcctgaaggcttctacattttgagatggcaggaacctggaagggcagaagctgattttggacgctttgatgcaaagactgttgtgcgaaatatttacatcctcttctcaagaagtgaaataccaatagctaatgaaaaccaggagatcatggatttggtggaacctgatactccgcttcccacttggttcacagaggaa

SEQ ID NO: 34571 - DNA, 260 bp, Glycine max
  Clone ID: 700891051H1
tttgtttctgggtttgcttgatcttcccaaagggtccagcccctgcattctgctaaggattgttgataccacaaatcattgctttttagttgtttttgtgtcccttttgtttggttaattgggatgtggagagatccgggagttccagctgattctttctatgaaatccgccccgaatgcaccgatgttcccgttactcgatttaagatcaaggctggtaaaacactaagtgcaagaaaatggcatgctgcatttactcc

SEQ ID NO: 34572 - DNA, 261 bp, Glycine max
  Clone ID: 700891052H1
ggcaggcttcagttcagccatgagaactcacactcacacttacacttatactattttctctctaattcttctctccttatttcttcgaacccattccgaggttataacgttaacctctgatacatttaatgataagatcaaggagaaagacactgcatggtttgtgaaattctgcgttccctggtgcaagcattgtaagaatcttggttcattgtgggatgatttggggaaagcaatggaaggagaagatgaaatagaggt

SEQ ID NO: 34573 - DNA, 260 bp, Glycine max
  Clone ID: 700891053H1
ctcttctctttctctttctcttctcttctgtcgaagaagaagaagcagaagtagttacagaaacatgctggagaatcttcaggctcctccgccaacggaatcggccccagtggtgaagcgctatgctcctcccaaccagaggaaccgttctgccaacaggcgcaaatcatctgatcggcttgatcggacaaacagtatcgggaatgacttagaaaagaatcaagttgcttattcaagaagtgttcacattccagatcacg

SEQ ID NO: 34574 - DNA, 262 bp, Glycine max
  Clone ID: 700891054H1
cattccccttatctttctctcttctctctccccgctcaaaccctaactccctaccctattccgctttctctcatccatcatgaaaggaggaaagtccaagaccgaatctaagagagccgatgccaaacttgctgtgaataagaagggcgccgccaccaagactaggaaacccgccggaaaggggaaggcagcgaaagatcctaacaagccaaagaggcctccaagtgctttcttcgttttcatggaggaattcacgaaggtg

SEQ ID NO: 34575 - DNA, 259 bp, Glycine max
  Clone ID: 700891055H1
atcactgtgttgcgagcagtgatcgattctgcgaactgcgattcgcattgccaatttcaacagcgtgcgttcgtacggagatggagtcgctaccgacgacgaagcgaggaggagcgagatcgaagcccgttcagacctcgaaatcgtccctcgtcatggccttcttctcctgcgtcgcgtggctctacgtcgctggaaggttatggcaagacgcagagaatcggaatttgctcgctagtcttctgaaaaagaattcagc

SEQ ID NO: 34576 - DNA, 261 bp, Glycine max
  Clone ID: 700891056H1
catttcttcattttgtcgcgctccttcttctcttctccgtcgacgacgtttgtttgctcctcctcctcctcgaagccacagatctgctgcggagctaccgtatcctgtatttattcttcttcttctgtaagcttcttcgtcggagaatttggaatttgatacactggatcggatatgccggtggctgcttccgctatatacttcttgaacctccgcggagacgtgctcatcaatcggctctaccgggacgatgtcggggga

SEQ ID NO: 34577 - DNA, 260 bp, Glycine max
  Clone ID: 700891057H1
cccttttattttttttttttggtgaggcattttccgacacaggaggtgctgcctcaggaggagtaggatgtataacgtgtagttgggcacccagcagttggttcaatgcggtttcttcacaggaatcgtgcttctcgttatatgggtgaagtgaatgtgttccccaaggatgaaccgtcctcggcacccgtgctcactgcattcttgggttaccaggccggtatgactgccatgccccgagaggtcgagaagttatgatc

SEQ ID NO: 34578 - DNA, 264 bp, Glycine max
  Clone ID: 700891058H1
aaaattgatgtggataagatcactcacagggagcgatcatcgtatgtgggaaggcgcactgaaaccttcacttttctggacagtactgatcctgacattttcacaccacgctctgcctctgactcttatggaactgcaacatactatcgtcatgttagagatccttcctctgatggttttgctgaggttgcctctaatatacatataatgatgcttcaagggagtctactaatgggtggacaactaaattcacatgatcatttc

SEQ ID NO: 34579 - DNA, 266 bp, Glycine max
  Clone ID: 700891059H1
acaaggttcagagacttttccgattcctggaagaagagaagagaaaacctaaatcacagatccatggcggaagaacaccgatgtgaacctcccgaaggtcaccgactctgcgtcaacaactgcggcttcttcggtagcaccgccacgatgaacctctgctccaaatgctacagcgcgatccgtttgaaggagcaagaagaagcgtcgacgacatccacaatcgaaaccgcgctctcttctgcctcctcggcgaaaccgtcgtcgtc

SEQ ID NO: 34580 - DNA, 264 bp, Glycine max
  Clone ID: 700891060H1
gtttccttcttcaacttgtgctccttctaagtgctactccctccctatatatatatgcttctctcacttcacaaacttaatttgaacctctcaccttgctcatcatctggaatttatttggcagtcatggattattcatcatggattaacacttccttggatctcaacattaatctccatagggttcacgaagtacttcccaaaaagcaggtggaaaacaattttttctcattggatttggaggtgaagaaatcttctgtaaaa

SEQ ID NO: 34581 - DNA, 262 bp, Glycine max
  Clone ID: 700891036H1
gaaagccttagccgaaatcgcctgtggcgcaacggaaccttccctcactccagtgtggtgcagggagctcttgaatgcaagaaacccacctcgaatttcacgcacccatcacgaatacgaggtggaaaacaaagccaaaggaactatgatgatcccattaaacgacgtggtgcaacgttgtttcttcttcggacctagagaggtagcttctctccgtagtttggttcccaaacatcttggtagatgcacaacatttgaggtc

SEQ ID NO: 34582 - DNA, 263 bp, Glycine max
  Clone ID: 700891007H1
ataaaatatgggcatcaaagcgattgctttgtagcaagcgtgttgttgactctctatgccagtgtcggtgaacttgtggatgtggaaaagttgttcagaagaattgatgataaagatattgtagcatggaactcaatgatcttggctcatgctcggttggcacagggatctggtccctctatgaaactattacaagaacttcgtggaacaacctctttgcaaattcaaggtgcctccttggttgctgttttaaagtcttgtga

SEQ ID NO: 34583 - DNA, 169 bp, Glycine max
  Clone ID: 700891009H1
attttttggattgaatccctttgaaaaatagtctgtgagaactatcagatcaatgtttatgtaccccgaaatgatgatctgatagttctcacagactattttttggattgaatccctttgaaaaaccagatcataatcaatggatcaggaactggttttgaataaggag

SEQ ID NO: 34584 - DNA, 231 bp, Glycine max
  Clone ID: 700891012H1
cacgtcctcgtcccaatcaagtgaaagctcgatggctgaaatggaccagaacacgggcggtgagcatgaggcggaagaaacgattgagattgaggcggaagtgcacggtggtgaagaggcggttgtttgcgagaagaagttgccggggtggcccggggagagtgtgtttcggatgttagttcctgcgcagaaggttgggggtatcattggacgcaaaggagattcatcaag

SEQ ID NO: 34585 - DNA, 270 bp, Glycine max
  Clone ID: 700891013H1
ttcgggactgtaactagccgcagcacgaggagcagcctcaggaggagaaggatgtctcacaggaagttcgagcacccaaggcacggttcactgggatttcttcccaggaagcgtgctgctcgtcacaggggaaaagtgaaggcattccccaaggatgacccatccaaggcacccaagctcactgcattcttgggttacaaggccggtatgactcacattgttagagaggtcgagaagccaggatcaaagcttcacaagaaggaaacttgt

SEQ ID NO: 34586 - DNA, 270 bp, Glycine max
  Clone ID: 700891014H1
aattctttctatgcagaagccattgctgattgcttggagttcatcaaacgaacatctatttcttccatggaccaaattcaagacccagtttgtcatattcaagatagaaactcgtgactccttttgttttctttttggtagaggaaatcaatattagatttatctgtttttttttccttttaattttttggaagcattgagaagatatgatatagttactccttaatctgtgtatatatattaatttcttctaaatttttgcatcggtta

SEQ ID NO: 34587 - DNA, 273 bp, Glycine max
  Clone ID: 700891015H1
tgctggcatacatattacgtttgtgcttggaatggataccatgcgctatgcatttctaacatctcttgtcaggattactttcttgcatgcccccaaggaaatgcgcagtaaaaatgtggaagctttgcgtacactgttggttctatgtgactcagacatgaacgctcttcaagatacatggaatgcagttctggaatgtgtttctcgcctcgaatttataacatcaactccttcaattactgtcactggtatgcatgggtcaaaccagatctc

SEQ ID NO: 34588 - DNA, 286 bp, Glycine max
  Clone ID: 700891016H1
cagccgcgcttgcatcaatttgaaggagatccaatccaaatgcatcgaatgccaatcacctgaaattccgccagatctctccctcttacacgctcttgataaaccgaaacgaagcaatagctatagcatcacacacacacaccaccgctagggttagggttagggttgcgggtgttccgtactaacaacaatggcggtctccgacggcgtcgtgaagaatatcgtcctctcctacacctacgtcgcgatatggatcttcctcagcttcaaggtcatcgtgtacaac

SEQ ID NO: 34589 - DNA, 264 bp, Glycine max
  Clone ID: 700891017H1
ctttcagtgtttttttactctctctctcctctgtctccccgccggagcccactttcgtcgccggtgtttcctttctgaagctgctcttccgttgcgagccaccacgacccttttgagagccctgttcaacaagctcgaaagtccggtttttttcccgattcgggaaaactggtttggtctttgacttggaaccgtgagtggagttgaagggattttttttgggttctgcgaagaggtgcggatccaggaaggttctagagagag

SEQ ID NO: 34590 - DNA, 266 bp, Glycine max
  Clone ID: 700891018H1
ctctctctctctcttcttcttcttcttcttcttgcacgtattgttctaatccacaaaaataatggccttaaattacaacattgccctcgccttctctacggttctcacgctgcttctccttcccttaccaacccttggggagctcgtgcaggagcagccactagtcctcaagtaccacaacggccaactcctgaaggggcgcatcaccgtcaatctcatctggtacggcaccttcaccccgatccaacggtccataatcgtggact

SEQ ID NO: 34591 - DNA, 264 bp, Glycine max
  Clone ID: 700891019H1
gctttgtttcactcacactgtgtttggagcagaatcagatcgtgtgttccgtacgttcgttcgttcatttccagtgtcaaacatggcgtctcagatgagcaagaagagaaagtttgttgcggacggagtgttcttcgccgaactgaacgaggttctgacacgtgaattggcggaggacggttactccggcgtggaagttagggttacgccgatgcgcaccgagatcatcatcagagccaccagaacccaggctgttctaggtga

SEQ ID NO: 34592 - DNA, 256 bp, Glycine max
  Clone ID: 700891020H1
ctctctcttgcaaaacctaattttcatttcttccctcaaatttcaaaatgcgtgagatccttcacatccagggtggccaatgcggcaaccagatcggcgccaagttctgggaggtggtttgcgcggagacgggatcgaccctaccggaaggtacggtggggactcggagttgcagctcgagaggatcaatgtctactacaacgaggccagttgcggtcggttcgtgccgcgcgcggttctcatggacctcgaaccg

SEQ ID NO: 34593 - DNA, 263 bp, Glycine max
  Clone ID: 700891022H1
ctctctctctctcttcttcttcttcttcttcttgcacgtattgtcctaatccacaaaaataatggccttaaattacaacattgccctcgccttctctacggttctcacgctgcttctccttcccttaccaacccttggggagctcgtgcaggagcagccactagtcctcaagtaccacaacggccaactcctgaaggggcgcatcaccgtcaatctcatctggtacggcaccttcaccccgatccaacggtccataatcgtgg

SEQ ID NO: 34594 - DNA, 264 bp, Glycine max
  Clone ID: 700891023H1
caccaactccaactcaaactctccaaaacctgccacttcaaccttcctatatattccttccctcactctcttctgcttctatcatctttctgagaggcttgttgacacacaaaaaatgatcaccttaacagacttctaccatgtgatgactgcaatggtgccactctatgtggccatgatactagcctatggctcagtgaagtggtggaagattttctcccctgatcaatgctctggcatcaaccgttttgtggcactctttgc

SEQ ID NO: 34595 - DNA, 267 bp, Glycine max
  Clone ID: 700891024H1
gtcactaaatccgcaatcatgaagctcgataccaccggtctcgaatcgtttcccacactgcttgcgcctcaaaacgacgtcgttggagaactctccgccgctccatccttcgaccttccgaattccaacgatttcgatgggtttgtgaaagaagctattcagatggtgaagcccgcgaagggtactacgactcttgcttttatatttaaggagggtgttatggtagctgctgattctcgagctagcatgggaggatatatatcatcg

SEQ ID NO: 34596 - DNA, 269 bp, Glycine max
  Clone ID: 700891025H1
aaaaagaatattcagagaattccaaagacagagatgactgtcattaaggaagagcaacaaccaaaccaaatagctggccacaaagaacttggtcacaaaagtctccttcagagcgatgcactctatcagtatatacttgaaaccagtgtgtacccaagagagcatgagagcttgaaggagctacgagagttgacggaaaaacacccttggaacctgatggctacaccacctgacgaaggacaacttctaggcatgctccttaagcttat

SEQ ID NO: 34597 - DNA, 269 bp, Glycine max
  Clone ID: 700891027H1
tctcttcaaaagggagaagataaggaaagaaaactctcaaaaaactattatagcaatggcagaacaaaaccaaaaccaaacaactgaagctggaaggcaccaagaggttggtcacaagagccttctccagagtgatgctctttaccagtatattctggagacaagtgtctacccaagagaacctgaatccatgacagaactgagagagttgacagcaaaacacccatggaacatcatgacaacctctgcagacgaagggcagttcttga

SEQ ID NO: 34598 - DNA, 270 bp, Glycine max
  Clone ID: 700891028H1
tcgcaaaaataaaggagataatttggtcgccgattggttcactaggtataagatcgccttgggcgtggctcagggaatctgctatcttcaccacgactgtgatcccgtcatcgtgcatcgcgatctcaaacctagtaacatattattggacgctgagatggaggccagagtcgcagattttggtgtcgccaagttgattcagaccgacgagtccatgtctgtcattgccggttcctatggctacattgctccagaatatgcttacaccct

SEQ ID NO: 34599 - DNA, 270 bp, Glycine max
  Clone ID: 700891029H1
attgctcttcttcttatatactatggtatatgacataagtttggaagtcaaaatggtttagacacagtccaacgttgtaggtttggtgtttgtcatgtcataagacgaagaaaggcatgggtgatagggtggagacgcttgccagattagcccagtggaaaatcgacaactttggaccttgttcctacaaaaaatctgaccccttcaagctcggaatctggaactggtgcgtactaagtgtttgtgtttgtgtatttgaaatgaatgatc

SEQ ID NO: 34600 - DNA, 265 bp, Glycine max
  Clone ID: 700891030H1
acccttctccgtgaggatctccaactactcatctgaggatgaagaaaatgaagaacaagaggaagagccccctcctctcatcatcatcacccttctccgtgaggatctccaactactcatctgaggatgaagaaaatgaagaacaagagggtggaaatggaaatggccatgttgatgatcaggctgaggatttcatcagaaggttctatgaacagctgagaatgcaagccgcatgcagttgctggagtatcaagagatgtgattg

SEQ ID NO: 34601 - DNA, 274 bp, Glycine max
  Clone ID: 700891031H1
taagttacttctagcagagacagaggggtcttacacagtgcaacagaactacactagcttagatattcatgttggacaatcttattcttttctgttaagcacggatcaaaatgcaagtacagattactacattgtagcaagtgccaggtttgtgaatgaatcacgttggcaaatagttacttcagttgctatcttgcgctatacaaattccaaggggaaggcacgtggtcctctcgcacctgctcctgatgatcaatttgacaagacttactca

SEQ ID NO: 34602 - DNA, 265 bp, Glycine max
  Clone ID: 700891033H1
cgcgctcttaaagttgctgaggaagaaatgttaaaggcaaagtttgaggctactgccatagaaaaagagctgagggaggctcatggtgcttggcttcccccttggcttgctgttcactatattcatagtaagtcttttgttgatagtcattggaacaaacatgggaaacctgctttggaaatggttactcaaaaggccctagagaaaaaggcacaagctggaaagtgggctgaacctcatgtggaaaccattaaaactaaatggg

SEQ ID NO: 34603 - DNA, 257 bp, Glycine max
  Clone ID: 700891034H1
tcccggcaacaccaaaaccaccaccgcctctcctacctcccggagccatggccgccaccgactcctccgctgcttcgtcacgccagctttcgcagagggagacggacatccagatgatgctcgctgccgacgttcacctcggcaccatatactgctcgcttcagatggaacgctacgtgctcaagcgccgcaccgatggtatttacatagttaacctcggagagacatgggataagcttcatcttgctgctaggatt

SEQ ID NO: 34604 - DNA, 261 bp, Glycine max
  Clone ID: 700891035H1
aaaagaattttggcctcattggatatgcgacagttgagtcgggacggacggatgaggaacccggatgaaaagccaattctggaagaaccaaaacctgctgaagctgaagcattaccaaaaatggctgcaaaacagccaaaggaggaacctaagccttctccacaagagactttgcctgctcagaaagaatccaaaaccactcagagagattccaaaaacaaggggagggatttgagatccaaactggagagtaaggatgta

SEQ ID NO: 34605 - DNA, 263 bp, Glycine max
  Clone ID: 700891004H1
gaataaagttggtttggtaaggtattctggttgtttattcggggtcagcaaaccgagtgcagtgcagtgcaaccatcggacaataatggcagaggcagattcgtcctcctcctcttcagatggagaaccctcgccatcgctggcgtcgattgcggagaatcttcagcgttccgccattcaatctgctcgaactgtgcaacatagcactataaatcatttccgtgcctttcagaattttttaccagaagcagtaccacagtata

SEQ ID NO: 34606 - DNA, 240 bp, Glycine max
  Clone ID: 700890957H1
tgtgtttttcctttcgggattggtttctatggcttctgaagtaatagagtaccgatgctttgtcggtgggcttgcttgggccaccgacagcgatgctctcgagaaagccttctctcattatggtgagatcgtcgaatcgaaggttatcatcgatcgtgaaactggaagatcgagagggtttggatttgtgaacttcgccactgagcaggcgatgaaagacgcaatcgtaggtatgaacgg

SEQ ID NO: 34607 - DNA, 241 bp, Glycine max
  Clone ID: 700890959H1
cggcccagaccgtgtcaagtacttgggcccattctctggtgagcccccatcctacctcactggtgaattcccaggtgactatggttgggacactgctgggctttctgctgacccagagacctttgccaagaaccgtgaacttgaagttatccactccagatgggccatgttgggagccctgggctgtgttttccctgaactcttggcccgcaacggtgtcaagttcggtgaagccgtgtgg

SEQ ID NO: 34608 - DNA, 245 bp, Glycine max
  Clone ID: 700890961H1
gaaaaaagaaaaatgtaagtggaagaagagaaagtggcatcgcttaggtacagatacagacacaacctggtaaaaatcccgaccccagtgccgcacaattttccttcactcgcagcggaggtttacttttgatctagtacctgctatccctatgtataagcatggacttctagcatactattgtttgattaaccaagttcttccatattggttgaggaagcctcgagtcaatattattttctgca

SEQ ID NO: 34609 - DNA, 100 bp, Glycine max
  Clone ID: 700890963H1
tgtctcacgcaggtctgcttttacttgcaaatgcccagaggaatgctatatatgctgtgcatttagagtatggtcctaatccagactcaacacgcatgga

SEQ ID NO: 34610 - DNA, 208 bp, Glycine max
  Clone ID: 700890965H1
aggctgttctagaagcaacattttgccccatgtatgctcagctctgttctgatctaaatgaaaagttgcctccattcccatctgaagaccctggtgggaaagaaatcacctttaagagagtgctcttgaataattgccaggaggcatttgaaggtgctgaaaatctgagcgaggaataaaaagctgactgcccctgagcaggagatgg

SEQ ID NO: 34611 - DNA, 237 bp, Glycine max
  Clone ID: 700890966H1
catttgtcttgttagcgctttaaggggcatggttcgaggcggactttgtctgtaccctgtttggaacctgctgcctacctcatgggaggtaggtcatgagatgacagctttgaagtctgccaacaaggagttgaagggaatgatgaaaactgtgaagatccaagacattgataacttgcaagatgagatgatggacctcatggatgtaagtcatgagatccaagagactttgggtag

SEQ ID NO: 34612 - DNA, 232 bp, Glycine max
  Clone ID: 700890967H1
cgccactggtatatccagagcacttgtgcaacttctggagagggtctctatgagggtttggactggctttctaacaacattgccagcaaagcatgagacatttgaaaaattttggtcttgtctggtgatttcatgcgagtctggcggttcttggagaaagatgcttatctgttctagcgaatgttgtaatagcagaatgcttgctagaagtattctcttttgtgtaacttgg

SEQ ID NO: 34613 - DNA, 233 bp, Glycine max
  Clone ID: 700890968H1
cacaaatgggtggcaccacctcggagttcaaccatgctgatcacaagcacccactatcactcccacacgagctcatgccaatgcctgcacaaaaacccttcaacaacaacatggctgcaggaacagtgttcacgagaagcctgtcatcaacctcttctccctctcttcaactaagctcaaacatgttcgatgaaaacgggctccaccttgctgcagggtcgccacacatgtca

SEQ ID NO: 34614 - DNA, 227 bp, Glycine max
  Clone ID: 700890969H1
ctctctcgcagattgaagcaccgtggccctgactggagtgggctccatcaacatggtgactgctttttggcacatcaacggttagccatagttgatcctgcttctggggatcaacctctctttaacgaggacaaatccgtcattgttacggtaaatggagagatttacaaccatgaagagctcaggatacagctgcctaatcacaacttccgaactggaagtgattg

SEQ ID NO: 34615 - DNA, 229 bp, Glycine max
  Clone ID: 700890970H1
cgtccttctcagaagagtgtaaaagtaatctgaacctgaaagccactgaactcaggcttgggcttccgggatcacagtctcctgaaagagattctgatctttgcttaagaagctcaactcaattagatgaaaaacctttgtttccgttgcatcctttgactgatgatcaccattcttcagccaaaactgctgtcttgggaaacaaaagagggttctctgatgccatgaa

SEQ ID NO: 34616 - DNA, 64 bp, Glycine max
  Clone ID: 700890972H1
cgacggcgaacgataacgctgtcgttgcgccaatcgcggcgttgtcattggtggtgctactcgc

SEQ ID NO: 34617 - DNA, 235 bp, Glycine max
  Clone ID: 700890974H1
cgtattggtgctgataaattgtattatatatggaatcaagggcactggcttagaggactgcccttcaataactttctatctctgctagctgcctttgtatacaaaatcggtatattctattctatatcatcatatatgcattaatctggagtattatatatcaaaaaaaaaaaaaaaaaaaaaaaaaaaaaaaaaaagggggcccgccctattattaactccggcaaccgggaat

SEQ ID NO: 34618 - DNA, 245 bp, Glycine max
  Clone ID: 700890976H1
gatgagaagtacagcactagggtgaaggatgaagaggggtgccctgctttctctttgatcaacaagggcactggttgaagccttgaagcactccatcggtggcaatcatcctggtcgggtgataccttaaaaggccgactatcttgatgagtctaatctatggactgaaagccgtgacttaggagatggccacagagctataaggatggtcaacaatgttcatcttaatgtggatgcttttcacg

SEQ ID NO: 34619 - DNA, 246 bp, Glycine max
  Clone ID: 700890977H1
tgagaagcgaagatgagcagcgacacaaaagccaacagcaacgttggagggggatccagatcgaggttaaatcactacctctatagcggtgacaagaaacatgtcttcgttggtttaactctcatcaccgctgtctttaccatcccatggttccttatgaacagagggaccaaacaccaatctcatcaagattacttggaaaaagctgataaagcaaggagccaaagactctcatccagtctgctt

SEQ ID NO: 34620 - DNA, 82 bp, Glycine max
  Clone ID: 700890979H1
aaaaccctcttttttctctctcttgcaaaacctaattttcatttcttccctcaaatttcaaaatgcgtgagatccttcacat

SEQ ID NO: 34621 - DNA, 178 bp, Glycine max
  Clone ID: 700890980H1
caaacatcaatttgtatatccaattagaattagatagaaaagaaggggaataaggaaacccttcgcctcggtgcgcatccaatccaatctaatcaacaaaagaagagtagagcgagagtggaatagaacaaagaagatgagcggcgccgcagcactataaggctatcgccgatggtga

SEQ ID NO: 34622 - DNA, 70 bp, Glycine max
  Clone ID: 700890981H1
acttactcaatctcttttctttgtattttttatgcctcttttatttatgaattaattaattaattatttt

SEQ ID NO: 34623 - DNA, 76 bp, Glycine max
  Clone ID: 700890982H1
gttctacaccgccgcggagatcttcaagcagtttaccgtctccaagacgaagctgatcataacgcaggcaatgtac

SEQ ID NO: 34624 - DNA, 231 bp, Glycine max
  Clone ID: 700890984H1
aattgtgttgtgttgcaaacagaaaggaaaaaagaagaaaataagagaaagaagaaaaatatgagttacttgaatcgtgtttggatggcggcaacggtggcggtagcgcaaggccacaccgatcccggccacaagtgcaagacggcgctcaactccatccaccacaaccggagccgcctcttctccggcggagcctgtctgatctccggccgctgtccggcgtcgttggac

SEQ ID NO: 34625 - DNA, 230 bp, Glycine max
  Clone ID: 700890985H1
caatgacactgtacacctccctgagctgcgccgcttctgatttctcccccagtttctgatttattcgttattcctattcctgtttcattcattcattcattcattcattcattactcttcttcatttcaataacacatatccattcacaacaaccaaagacagaaccagaaaagaaaaaagaaataacttttccgattcaaatatcggaaaccctgagaatctccctcgc

SEQ ID NO: 34626 - DNA, 231 bp, Glycine max
  Clone ID: 700890986H1
gtgtagaacagcctgataaagactcatcattgaaggttcagaaggatgtggcaatgaagcacccagccccacctccatgtagttctgtaagtaatctgcccaaagatagcgatttgttcttggccaaaagaaatggagcctatcgtaaatatgagattctactggagttggagaagctacttaccccagtattcaagaagcaacctagcgtaaatcagtgagtgttggaaa

SEQ ID NO: 34627 - DNA, 230 bp, Glycine max
  Clone ID: 700890987H1
gttcttcacttctcttcttcaattcattctagttctggattccgactcgccgcattgactcggtccgggttggggtcgactcagttcggtttttcattctctcgcgaatctaatctataggaaaagctaagggcacatcacaatgaaggcattgattctggttggggggtttggaacaaggctgaggccactgacactcagttttcctaagcctcttgttgattttgcta

SEQ ID NO: 34628 - DNA, 237 bp, Glycine max
  Clone ID: 700890991H1
ccctgggctctgagctggagaggatcatgggctcagttcgcttgctttatgtcattattttggtggctacaagcaatgccatattccatgttctcatagcactgctggtggcgcacaatcctttacttacatatgattacctcatgaatgagtgtgcgataggcttctcaggagttctattttcaatgattgttatagagacaagcctgagtggagttcaatcaaggagtgtgtttg

SEQ ID NO: 34629 - DNA, 76 bp, Glycine max
  Clone ID: 700890992H1
ctcgagccgatgactccatctatgcgattctcaactttatctctctaaaaaacgcatcaacgcatgaggagagaga

SEQ ID NO: 34630 - DNA, 230 bp, Glycine max
  Clone ID: 700890993H1
atctctgcgttgtaagaggaagccacgattctttgaaaccccaatttctggtagttgatttgaaaaggctccagcaatcatatttgggatggtttttaagtaaataaatataaattccggtccaatcctccttgttgtttccctaactgagcacgttgcaactcttggccaaaatggtatccgagttaatcaatgcaaaccctatcatatatgagaagcaagagcgtcga

SEQ ID NO: 34631 - DNA, 238 bp, Glycine max
  Clone ID: 700890956H1
gccaccacttcaatccccgccaccaaatgtcaaccaaacccaccaaaacctttccttaccctcacacccaacccaacctcacgcacccactccaataatattaacaacaaccacaaccctttgtttttgttccttacacaccacacaccttcctcatcaatcaatggcgacccccccaaactacgccgcatcgacaaagaagccccagcccataccatggacccatcaggagaccgtg

SEQ ID NO: 34632 - DNA, 248 bp, Glycine max
  Clone ID: 700890994H1
cgatcacttcgagcggaagcgcaagaaagaggcgcgtcaagttcacaaacgctctgcaattgcccagaaggctctgggtattaagggcaaaatgattgccaagaaaaattatgctgaaaaggcacagatgaagaagactttggctatgcatgaagaatcaacttctaggcgcaagactgatgataatgtacaggatggagctgttcctgcttatctccttgatcgtgataacacgaccagagcaaagg

SEQ ID NO: 34633 - DNA, 97 bp, Glycine max
  Clone ID: 700890995H1
aatcttttaaaattgagtgggcaactgaagagattagagaaattgaatcgtgttgggttggaaatgtaagttgccttttcttcttttattaatccct

SEQ ID NO: 34634 - DNA, 180 bp, Glycine max
  Clone ID: 700890996H1
cttctcctctcattccatacctcaacaaaactaggttcagagacttttccgattcctggaagaagagaagagaaaacctaaatcacagatccatggcggaagaacaccgatgtgaacctcccgaaggtcaccgactctgcgtcaacaactgcggcttcttcggtagcaccgccacgatga

SEQ ID NO: 34635 - DNA, 255 bp, Glycine max
  Clone ID: 700891001H1
aaacaagtagtaaattgctttatgtatttggatcaaatgagttgagttattaaatcttaaaataaagaaatgttttttgatatatttgtttggggttcatcttcttgttgtttaatggaggatccattaggagagagataaacacaaacatggggtatcggagacccaatatttttccatttgtttggtggtgattaactataattatgcagattgtggaggattgtgcaagacaaggtgcagtgcccattcaag

SEQ ID NO: 34636 - DNA, 265 bp, Glycine max
  Clone ID: 700891003H1
ttgaaaccttcaagctagcgagtctcatatatctgttctttgtctctttactctttgttttcaaggattccttctaacgagcaaaatgtcggctaactgtgagaaaatggtagccatccctccaacgaccaaccaatggccacaggtggatgatcacaaggtcttgatgggttccaacggtggaagtagtaacaacaacactaataaggtattggcaaaaccaggtcaagatcagcttgtgcagcagcagcaacaacaacaagaa

SEQ ID NO: 34637 - DNA, 94 bp, Glycine max
  Clone ID: 700890916H1
gagagcaggctatctatgctatgcatgcatgtaaaataatataaaagagggtatgggatactgtagttgaatgagatcaaaacttaactcatat

SEQ ID NO: 34638 - DNA, 85 bp, Glycine max
  Clone ID: 700890917H1
cagtgctagcgcttgccctagcagtagcttctctcctgtgtcacaccttcttccctttgtcgtgcttcgcgctcctcatcccgag

SEQ ID NO: 34639 - DNA, 235 bp, Glycine max
  Clone ID: 700890920H1
ttccattctctctgtgtatttccctacctctcccttcaagatgcagatcttcgtcaagaccctcaccggcaagaccatcacccttgaggtggaaagctctgacaccatcgacaacgtcaaggccaagatccaggacaaggaaggaatccccccggaccagcaacgtctcattttcgccggaaagcaacttgaggacggccgtacccttgctgactacaacattcagaaggagagt

SEQ ID NO: 34640 - DNA, 235 bp, Glycine max
  Clone ID: 700890921H1
ctagggtttacagagaagctaagaggcgcacgacagcaaaagctcgtggaattgctagcaatggcgaggatcaaggtttacgagctgaggcagaagacgaaagctgatctgctgaatcaactgaaggacctgaaggcggacttgccttgcttcgagtagctaaggtcaccggtggtgcccctaacaagctttccaagataaaggtggtgaggttgaacattgcccaggttttgac

SEQ ID NO: 34641 - DNA, 240 bp, Glycine max
  Clone ID: 700890923H1
cgagctaaaacaaaacaaaaagaagaggggggcgaagagaagaagatggaggttagtttatcctcaacatcatgtatacccttaagctcgaagttgaagcataagcatggccttttccactctcaaattcccattcccacagcttcaaccaaaaccagaagaacaaaacctttgtccatagttaacgcctccagacaaaccttgtcctccaactggctcgtttctccacacgatttttct

SEQ ID NO: 34642 - DNA, 237 bp, Glycine max
  Clone ID: 700890924H1
caccatagtccatagagagacaaggctcactccaaagcttgaaagacagagagagagttaccttgtttcagttggttgatgtccatacgatgggacaagtctttgacaagttagagggtaaggagtggaggcaaaggcaaataaggtagataacagatcgagtttttgacaaagtacagaatcaaatggaaactgataagttgaattttgaagatctgtatattgctgttttacttg

SEQ ID NO: 34643 - DNA, 239 bp, Glycine max
  Clone ID: 700890925H1
ggtcgccggagatgggtgggtgcgcgacggactcgtgtggatgcgctctgaactcatcgtggtttggtaggtgcttgacgagattgtccgagttaggtgggggcgtttcggattcgtcggagttcgatagatgcgctacgaactcgttgtgatttagtgggtgtgcgacaatgtgaatgtgaaaaagaataaaaaggaaaaatgaaatgccgccgccaggattcgccttcggccgcggc

SEQ ID NO: 34644 - DNA, 240 bp, Glycine max
  Clone ID: 700890926H1
ctcaggcatttgcaagacgcctggtcggatgaccccgaccatttatggccaaatggaggctgcagtgaatgtaagctatggcatatatcattatggtccattcttggttgatctacaagactgcactttcgtgcggaaaacattcacagacatcagcaatgatcactgccctggtctgcagagaaacagtcaattgatttatattggattggttttggtatcagctgctgtaatgctgtc

SEQ ID NO: 34645 - DNA, 246 bp, Glycine max
  Clone ID: 700890928H1
gaaattctttagttgtaactgacaaagttttctgagaaaataaggattattattgagagagtggctggctcatcggaagagggacaagtcattagcggccacaccgttgaagaatggaacgatcaactccagaagggcaacgaatccaagaaactcattgttgtggattttactgcttcttggtgtggaccatgccgtttcattgcaccattcttggctgagctggctaagaagttcacaagtgtc

SEQ ID NO: 34646 - DNA, 241 bp, Glycine max
  Clone ID: 700890929H1
aaagaaagatgagtccaacatgggtttttgtgttaggtattattgcagcaatgttggtggttgtgaatggacaatcatcagtgaagccattggtgaagacagtgaaggggaagaaggtgtgtgacaaagggtgggagtgcaagggttggtctgcttattgctgcaatgagactatctccgattactttcagacataccagtttgagaacctcttcgcgaagccaattcgccggtggcatgc

SEQ ID NO: 34647 - DNA, 251 bp, Glycine max
  Clone ID: 700890930H1
aaaataaccttatttcttggtctgcaaaacatcatggcagaagcgagtttctttgttggagtcataggtaacatcatctcaattctcatgtttctttctcctgtacctacgttttggaaaataaagaagcacggatccaccgaagatttctcaagccttccttatatttgcacattgcttaattgctccctctggacttactatggaatcataaaagctggagagtaccttgtggccactgttaatggctt

SEQ ID NO: 34648 - DNA, 105 bp, Glycine max
  Clone ID: 700890932H1
atcgcttggatataaccttgaggcacatgtgttctcgacccctggtgcttgtgctgcattcattgcaaattatgacacctaatcttatgcaaaagctacatttgg

SEQ ID NO: 34649 - DNA, 126 bp, Glycine max
  Clone ID: 700890933H1
gtacttaatgattcatgtgagattaaagctaatcggaagaaggtgaaagtaagctgaattatgactattagttcttcttatcatatacacaactatatgatgtaaacctctttccctgagttgcaa

SEQ ID NO: 34650 - DNA, 78 bp, Glycine max
  Clone ID: 700890934H1
ggttcacatcgatgtgatcatgttggctcacaatccaggtgggaaagagagaacagagaaagagtttgaggctctggc

SEQ ID NO: 34651 - DNA, 233 bp, Glycine max
  Clone ID: 700890937H1
ccacatactactatgttcaaagcatggaagagaatcctaatgcttgtgtcgtttgttaaataccaagctgtggaagaaaacatgaggaaaggaagacatatataaaaatatatatcaaactttctctatttgcaatggaatcaatcaggtcaatttctctttcatgaatcctgggagttcataatatcaagatagaaacaaacaaacaaactcctttgtatatattttggtgg

SEQ ID NO: 34652 - DNA, 235 bp, Glycine max
  Clone ID: 700890939H1
ttgagaaataaggggaaaaaatggtgtcgctgaaactgcagaagcggctggccgcaagcgtgctcaagtgtggcagaggaaaggtgtggcttgaccccaatgaagtcaacgaaatctccatggccaattctcggcaaaacatcaggaagttggttaaggatgggtttatcatcaggaagccaaccaagattcactcacgctcgcgtgctcgtaggatgaaggaggcaaagaagaa

SEQ ID NO: 34653 - DNA, 236 bp, Glycine max
  Clone ID: 700890940H1
acttgacattgagcgccctacctacagcaaccttaaccgtctcgtttcccaggtgatttcatccctcaccgcctcgttgatgtttgatggagcactgaacgttgatgtgactgagttccaaaccaacttggttccttaccctaggatccatttcatgctttcctcatacgcccctgttatctctgctgagaaagcataccatgaacagctttccgttgctgagatcaccaacagtg

SEQ ID NO: 34654 - DNA, 228 bp, Glycine max
  Clone ID: 700890941H1
cacacgtcaatctccccgtcttaattgacctttcctcaatctttcactcttttgtgtcaggtcaaatatgcaacctcaatttagccagattaacatctctgttacatggaggggaaagaaatttgttgtcgagatgaatataggagccaatgtgaaggatctagggcaggaattgcaaaagttaacaaatatcaaagaagataccatgcggttcattgttccacagat

SEQ ID NO: 34655 - DNA, 239 bp, Glycine max
  Clone ID: 700890942H1
gaacactgcagagcaagatctcaaacgacaaacgttgttggaacttgttgattttgtttcttctggatctgttaagttcacagaaccagcaatcgccgcattgtgtaaaatgtgtgcaactaatttgttcagggttttcccaccaaagtttcgaacaagtactagtggtggagaaacagaagatgaagaacctatgtttgatcctgcctggtctcacctacaagttgtttatgatctac

SEQ ID NO: 34656 - DNA, 245 bp, Glycine max
  Clone ID: 700890944H1
gttctgtccatatagaatttgtgaagtgagagtccaacctttcattttcaattttcaaagatgcctcgtggaacacttgaagttgttctgatcagcgccaaaggaatcgatgacaatgattttctctccagcatagatccttatgtgattctcacatacagggcacaggagaaaaagagcactgtgcaagaagatgctggatccaagccacaatggaatgagagctttcttttcactgtctctga

SEQ ID NO: 34657 - DNA, 245 bp, Glycine max
  Clone ID: 700890945H1
tgggagctatgacttcatctttgtggacgcagacaaggacaactacctcaactaccacaagaggttgatagagcttgtcaaagttgggggagtgatcgggtacgacaacaccctatggaacggctctgtggtggcacccccagatgctcctctcaggaagtacgttagatactacagggacttcgtgctcgagctcaacaaggcactcgctgtggaccccaggatcgagatttgcatgctcccgg

SEQ ID NO: 34658 - DNA, 252 bp, Glycine max
  Clone ID: 700890946H1
accaaacgaaactctttctcactgacatggctttctgttctccaaaattcctcagcctcctcctcctactctctgccatacccatcggaatcatcgtcactctagagcgagccaaacccgccacccacgtctaccactaccacagtaacggctggttccgagaatgcgccaagtgggattctcataaccgccgcttcattgtttccttcttcgaaggtggtcttggtcaggctttgctgccggagaaagatt

SEQ ID NO: 34659 - DNA, 252 bp, Glycine max
  Clone ID: 700890947H1
gtaagctcccaagcagtgggaggaggctcgggactctgaccgcgtgcctgttgaagaatgagccggcgactcataggcagtggcttggttaagggaaaccaccggagccgtagcgaaagcgagtcttcacagggcaattgtcactgcttatggacccgaacctgggtgatctatccatgaccaggatgaagcttgggtgaaactaagtggaggtccgaaccgactgatgttgaagaatcagcggatgagttg

SEQ ID NO: 34660 - DNA, 105 bp, Glycine max
  Clone ID: 700890948H1
ttcttcggctcgagaacaagggcaatttgggaattattgctcccatcgccattggtttcattgttggcgctaacattttgttgggtggggccttctccggagcag

SEQ ID NO: 34661 - DNA, 246 bp, Glycine max
  Clone ID: 700890949H1
gttctgcagctgcaagatgtacccagacttgagctacactgagtcaaccaccaccgagaccttggtcatgggagtggcacctgttaaggctcaatttgagggtgctgaaatgggtgtgcccgctgagaacgatggctgcaaatgtggaccaaactgctcctgcaacccctgcacttgcaagtgaggtgttgggagagcaagcttcaagcagagatagcccttaattaggaataatgataaactatt

SEQ ID NO: 34662 - DNA, 240 bp, Glycine max
  Clone ID: 700890950H1
gagagcttcacttagggagggaggtaaaagtctcagtagcatttccactttcattcttagaaaagttgaatgcatcacatgaaaacaatattcgtaggattctttcagttataaaggaaatgaaatcctttgtcatggtagaagactacattgatggagaattcagcatcggggatcactttgttcatgctatcatcaaacgagccactcttgctgcttccattcttccttgcaaggatg

SEQ ID NO: 34663 - DNA, 234 bp, Glycine max
  Clone ID: 700890951H1
gttatgtactagtaaatagtaattttattgtaaactatccagtacctgagagagagtagcatctgagtcttgtgtttagcgtaggggattgaaaatgagtatgtacggtagggatccgtggggagggccgttggagatccacgccacagactccgccaccgacgacgagcgcagcggaatctccaggagctggaccgaggcgctttagacgagacacaacagagctggctcttg

SEQ ID NO: 34664 - DNA, 234 bp, Glycine max
  Clone ID: 700890953H1
gaggccatttgccttttcaattttcatattaattcgatatttgtaatggctagcgagagaattctcaagccatcaaagtggttctcaaacaaaactctaagaattagtcttcatcgccgaagatcaagatcctcctccaataactcattatctagtaattctccaagtccaagatcccccatgtcaaacaatggagagatcactgggctaatggaggcttttcgtcactttgat

SEQ ID NO: 34665 - DNA, 254 bp, Glycine max
  Clone ID: 700890915H1
gaattgagaaagattctcaatcctcttcctcaattcaattcaagctgtgtgaacatgaaattgaaacttggacaagaaaaattcaattaaaattccccccaaattaccgtgcatgtgtcgtcgcctggacccaaatcactctctctctctctgagcataatattagggtttaacaaggagttttcttcactctggcaataacactcacaacacagcgatgtcattttcgttgttcgccactccgcagcaacagc

SEQ ID NO: 34666 - DNA, 234 bp, Glycine max
  Clone ID: 700890954H1
ctcgagccgatttgatggagttcttcacattaaggaggcaatgcataaggctgaagctgcaggaaatgatgactgccccgtcaaaattaaacttgttgctcccccactttatgttcttaccacccagacactggacaaggagcaaggaatattggttctcaacaatgccatagcttcttgcactgaagcaatagaacaacacaagggtaaacttgtggttaaggaggcagctag

SEQ ID NO: 34667 - DNA, 233 bp, Glycine max
  Clone ID: 700890880H1
ggaagccccaaagattgaaaacccaaagtgtgaggccgcccctggttgtggtgaatggaagaggccaacgaagaggaatccagcttataagggaaagtggagtgctccttacatcgataaccccagttacaagggcatatggaagcctcgcgagattccaaaccctgaatactttgaactcgcaaaacctgattttgagcctattgctgctattggcattgagatttggacaa

SEQ ID NO: 34668 - DNA, 238 bp, Glycine max
  Clone ID: 700890881H1
gggaacagacaacctcttggatgccgtggtctcaaaagccaaatctattatgaaactggattctgatgacatgtcttgcaggacaacattgacaaggaatagtactgcctctgttccttctcctgcctgcaggccggtaatgtcgggtcatttccaggggggattgtttgattttcctaagaattggggtaaaacaggtgccatagaaactagtttgcttatgtccggatgtaacaag

SEQ ID NO: 34669 - DNA, 232 bp, Glycine max
  Clone ID: 700890882H1
aagcaacacaagaacactctcttgaacattcatggatccagtgagcgtgtggggtaacacgcccttggcgacggtggatcccgagatccatgacctcatcgagaaggagaagcaccgccaatgccgcggcatcgagctcatcgcctccgagaacttcacctccttcgcagtcatcgaggccctcggcagcgccctcaccaacaaatactccgagggcatgcccggcaaccgc

SEQ ID NO: 34670 - DNA, 227 bp, Glycine max
  Clone ID: 700890883H1
tacacatcaaactagacatacactacctagcttgttcttaaattccacacaaacacaacaaaaactattagcatcatctactttctagcttattgttcaagagttgtgatcaagaatgagttcaacaagccgtgcttggacttggaccgtggcggcaagtgttggagtggtggaggccttgaaggaccaaggtatatgcaggtggaacagtgtgatgagatcagcac

SEQ ID NO: 34671 - DNA, 226 bp, Glycine max
  Clone ID: 700890884H1
agtacctcttgtttgtttgttgaagcagaagcctctcgttcagcttggttagttaattagctgagtgagagagttttttttctttcttttttttgctttcccaatttcaaaattttaatggaggaatacactaataacaatcacttgagtgaaaacacaggtcctagtccaagtactccaaggccaaatttcttgtactcttcagctcagtggtggaaaccataat

SEQ ID NO: 34672 - DNA, 224 bp, Glycine max
  Clone ID: 700890885H1
gttaaaagaagagcatcactgaactaacaaagcaaccctatgtcgaaggtggtttgtgtcaccggagccagcggcaccatcggatcatgggtggtcctactcctcctccagcgtggttacaccgtccatgccaccgtccaagatatcaaggatgaaaatgagacgaaacatttggaggaaatggaaggagcaaagagtcatctccatttttttgaaatggatct

SEQ ID NO: 34673 - DNA, 223 bp, Glycine max
  Clone ID: 700890886H1
ctcgagccgaaaagaaaacctctcgttttctttctctctctctacaacacgatttccaaacttctttctctagaaatgggaacagcaatccttcgttcccacgattgcctccaaggccggttcctccacaacgaagccttcgcgatcgccacgtcacgtgttgcatcgcgaagaaaccctaactctaacaacaataaccatcatagcttcgcctcctccgcaa

SEQ ID NO: 34674 - DNA, 221 bp, Glycine max
  Clone ID: 700890887H1
gttacgcgttaacatccactctattaagcaaatgtgctcctagtagtacaataaaaatataaaataaaataaaaataacaaatatttatatacgattgtgttcttgcaagttccaagttccaagttcatgcacaactgatcttttcctctgagaagacgtgtcggtagttgaagcattttataagcctccactttcctgaactagttttaacatacaatct

SEQ ID NO: 34675 - DNA, 220 bp, Glycine max
  Clone ID: 700890888H1
gagagagagagagaaatggcttgcaggcaattgtgggcttcaagagctgcctcttacctgaggatctctgtgtttcacagaggcttttctaatgttattaaagatttcaagtatgttgattctcatgagtgggtgaaagttgatggaaattacgcaaccatcggcataactgatcatgcccaagatcatttgggtgatgttgtatatgttgaattgccag

SEQ ID NO: 34676 - DNA, 221 bp, Glycine max
  Clone ID: 700890889H1
gcggtgacttcaagtgtccgccgtggttctcctccgaggcgcggaggctcatcaccaagctcctcgaccccaacccgaacacgcgaatcacaatttcaaaaatcatggactcgtcgtggttcaagaaacccgtgccgaagaacttgatgggaaagaaaagagaggaattggatctggaggagaagattaaacagcatgagcaggaggtttctactacgatg

SEQ ID NO: 34677 - DNA, 224 bp, Glycine max
  Clone ID: 700890890H1
caacaacaccatcctcaaaatctccaaactcgcgatcctcctcgttttgttcgcttcagtctgcaacgtcgctatgtcggactccaccgccaaacccctcgaccagcacgccaccacgggctctgaccctactgcgccagcggttcacatcgtgtacaccgagagaccacagaacgaggagcctgaggcctaccacatcagaaccctcacttcagtccttggca

SEQ ID NO: 34678 - DNA, 222 bp, Glycine max
  Clone ID: 700890892H1
ggcggcggttgcggctgggaatggtggtagcaaggctgaagggaacgcgaagaagttggtgttttttgggaatgcggcgagggcgtttgatttggaagatttgctcagggcttcggcggaggttttggggaaagggactttcgggacggcgtacaaggcggtgttggaggcggggccggtggtggccgtgaagaggttgaaggatgtgacaatttccgagaa

SEQ ID NO: 34679 - DNA, 226 bp, Glycine max
  Clone ID: 700890893H1
tgaagttgagtgctacttgtttggacctaatggtaaggcgattatcagttccaggaatttacctcccatggagctagattgccctcacctttatattctctacttgtccattgataaataccgtgacatgatttgtgaaggtgttgtcggcagtgaaattgaatttgtattgaaaagttatggttgccaatcattggaaatagtgaggtgcggatgtcgtttggta

SEQ ID NO: 34680 - DNA, 229 bp, Glycine max
  Clone ID: 700890894H1
cagggaattacggaccaacacctgcaactgtttttaatgttgcaccttggatactaacagttggtgcaagcaccttggacagacagtttgatagcgttgttgaactccacaatggacagcgcttcatgggagcacgcctttctaaagctatgccggaagacaagctttacccactcatcaatgctgcagatgcaaaagcggctaataaaccagttgaaaacgctactct

SEQ ID NO: 34681 - DNA, 118 bp, Glycine max
  Clone ID: 700890895H1
ttttttattattattcttaattgagttgtaatctctattggcccaatgtatttcattgtattgtggacacttcattttttttagccatcctaattatggcatttggctctttggtggg

SEQ ID NO: 34682 - DNA, 224 bp, Glycine max
  Clone ID: 700890896H1
gtgaagagcgaagagaatggctcccaagggtttaatctttttggctgtgttatgcttctcagcactgtcactgagtcgttgtcttgcggaggataatggacttgtgatgaacttctacaaggaatcatgccctcaggctgaagacatcatcaaagaacaagtcaagcttctctacaagcgccacaagaacactgctttctcctggctcagaaacatcttccatg

SEQ ID NO: 34683 - DNA, 81 bp, Glycine max
  Clone ID: 700890901H1
gatttttatatcattcgccacatccattattatgtcgtccgcacttaaaaaaaacgatctccaacggtcatgaacggcggc

SEQ ID NO: 34684 - DNA, 85 bp, Glycine max
  Clone ID: 700890902H1
gagaattccaactgataaaaagaatattcagagaattccaaagacagagatgactgtcattaaggaagagcaacaaccaaaccaa

SEQ ID NO: 34685 - DNA, 239 bp, Glycine max
  Clone ID: 700890903H1
attgtgtcttcctcgatccatggctagttgtatggtttatgcgtgttacatttatattgttctgggaatattagtgttgaaaggtgcagaggcacagcgtgcgttctttgtgtttggggattctcttgtggataatgggaacaacaactttttggcaactacagctcgagcagatgctcctccttatggcattgatttcccaaccggaagacccactggccgtttctctaatggctaca

SEQ ID NO: 34686 - DNA, 238 bp, Glycine max
  Clone ID: 700890904H1
agaatgtggagatgacgagattgagatcgatattgatgatctcagtggtgataccctgttcacattacgaaagcttttggatgactttttgcaagagaagcacaagaacatagcaatagtttaagcatgtgtagtagaggtgtcgaatgatcctggaccaagcaattcctcattacaaccatctaaaggtaatgatccagcggatgacgacgtggacattggtggaaatgagccccct

SEQ ID NO: 34687 - DNA, 232 bp, Glycine max
  Clone ID: 700890905H1
gatttcaacaagaatcagctcgtggagaagatccgaaggctgaagaagaagtaccggaacgtcctcaacaagatttgctccggcaaggaattctccttcaagagcgctcacgatcaagccaacttcgaaatctcgcgcaagatctggaccaacgtgactccagtcggcgacaattcattggacgacgacgcaatcaaccctagccgtagcccccaccctaaccttaatttta

SEQ ID NO: 34688 - DNA, 230 bp, Glycine max
  Clone ID: 700890908H1
attatatttacaatggaagatctcttgcagagtgcgaagacaaacatgaatgtggaggaggttatcttttcaatagcaagagatatcaagcaaaggcttgcacacacagattctaaggctgaagtatgttgttgactcttatgcacttcattagtactcttatttcttatatgaaagactaaaattttgccatcatcaaattcaagtagatgtaaaacttgttaaggtca

SEQ ID NO: 34689 - DNA, 236 bp, Glycine max
  Clone ID: 700890909H1
agttggttgtagatctgagccgggttcaaaggaatgggagatgaggccaggtggaatgttggttcagatgagaactgctgattcgggtcggaacccagcacttttgccaacaattagagtaaaggtcaagtttggttcaatttaccatgaagtcaacattagttcccaagctacatttggggagttgaagaaaatgctgtcagggctaactggtttacaccatgaagaccaaaagc

SEQ ID NO: 34690 - DNA, 244 bp, Glycine max
  Clone ID: 700890910H1
gtcgccgcaagcattgcagagtgacagcagcagcagcagcagcttggtctgaggttagagatggttagccaaaggcagcgacttgctcgaaagcgatacaaagcggaacaccctgagctctttccgaagcccgagcccacaccccccaaagaccccgagaagaagaaaaagaagaagaaaaacagcgctttcaagcgcaaaaggcccgagcccaagcccggctccagaaaaagacaccctctca

SEQ ID NO: 34691 - DNA, 244 bp, Glycine max
  Clone ID: 700890911H1
aaaatacacattttctattttgttcatagaactttaatttcagaaccattagatggtgctgacgatgatggcggcgatcggcatcggcatcaagcaagagaagaaaatgccaacggtggtggcggagagcgagctgaagaagcggaacgaggagctggagaaggagctcagagagagcaaggagagggaggagcagatgaagcgcgaactccagagcgcgtgggagaggctgcgcgtggccgag

SEQ ID NO: 34692 - DNA, 248 bp, Glycine max
  Clone ID: 700890912H1
gaacaacatggaagtgagaattgggcaaagggtttctcgcggaatgctccctatcctcgctctccacaccttcagcgagtattaccgctccgaccacaaacctccggtcaccgccgccctcatcgccgccaacaccctcatctacctccgcccctccttcctcgagcccctcattccccccatcgaacaagtctggttcaaccctcacctcatcctcaagaacaaggacttgaaacgcttcttgctgt

SEQ ID NO: 34693 - DNA, 247 bp, Glycine max
  Clone ID: 700890913H1
cacagagaaagagagtgaataaatccagcattgttctgttctctgcaacattctccactctcaaccatggcttcaaagcttttactcatcactgtcttcgtttttgatttgattgcttttggacttgccgtggctgctgagcagagaagaagcaccgctagtgttgtgacggacaatgaaaagaattataattactgtgtctataactctgatatagcaactggctatggtgttggagcatttttgt

SEQ ID NO: 34694 - DNA, 250 bp, Glycine max
  Clone ID: 700890914H1
tcacagtaaaatccaaaccaaaatggcggaaaataaagccattgaagaagctcagagcaagttccgttcagagttccttcaagttctgcgtagtaggcgacccgctcaagttccattaacagtcgaattcgcgaaccagtggtgaatcctttgcatcagaactctcctccatcgatcgaagagatcaagataatggagtcgtgtccgagaactgatatagagaaccttgaagacttgctcgaggaggaga

SEQ ID NO: 34695 - DNA, 231 bp, Glycine max
  Clone ID: 700890879H1
gacccaagtagtaccataataccattctttcaattgcttaccagaacaagcatggaagctacgggggcaacagcatggcattctctgcatgtggttcggaatatggcagcaaattctatgctatttatggcataacaaccaccttgggtcttcattaatccctatgcaaatccaatctagaagattaaccatgtccctatgtaagtaccctgaggctgaaacagtacccct

SEQ ID NO: 34696 - DNA, 216 bp, Glycine max
  Clone ID: 700890844H1
atccttttacggctcatgacattgataactgatctagcaaaaactattctctaactcatacggtacatccagaactcaatcttgctggatctgggaacctgtcacatgaattgaatgcacacatgattaaagatgttcatgctgttagtaagacaagctcagttttggacacagacagcaatggcaccaatacttctgcaattgccaaggaatact

SEQ ID NO: 34697 - DNA, 135 bp, Glycine max
  Clone ID: 700890845H1
ctgaagacgttcatggagattgcatgcaccaattgcacacaaatcaaacagtcctattggattctcatttttggtggcatccatttctttctttcccagcttcccaatttcaattctgttggccggggttgtctc

SEQ ID NO: 34698 - DNA, 79 bp, Glycine max
  Clone ID: 700890846H1
tcttttttcagcaagagattaacgatgtaacccttgagacctgggaacattataatgctactgtctagcttctgtctcc

SEQ ID NO: 34699 - DNA, 233 bp, Glycine max
  Clone ID: 700890847H1
ctatttttcttcctcagtagtgtcatttacgcttctcttctctacagcaactatgcctaaccctaaggtcttcttcgacatgaccatcggcggtcaatctgctggccgcatcgtgatggagctctacgccgacgtcactccccgcaccgccgagaacttccgcgcgctttgcaccggcgagaagggcgtagggcggagcggcaagcccctccactacaagggctcgtccttcc

SEQ ID NO: 34700 - DNA, 234 bp, Glycine max
  Clone ID: 700890848H1
cttgtggatagtgctttggcagctgggcgatcagttgttaccaagcttctagtagcagatactcaagcaggaagcttgatcggaaagcagggatcaaccataaaatccattcaagatggctctggttgtactatacgtgttcttggatcagaaaacctgccagtatttgctttgcgagatgatagtattgttgacatacaaggggaatctgctggtgttcacaaggcagttgaa

SEQ ID NO: 34701 - DNA, 231 bp, Glycine max
  Clone ID: 700890851H1
gagatgaccaaccaagatttgaaacatgttaccagattgctttggctatcaaggatgaggttgaggatcttgagaaagctggtattactgtcatccagattgatgaggctgctctaagagaaggtttacctctgaggaagtctgaggaggctttctatctaaactgggctgttcactcatttaggattaccaactgtggtgtggaggacactactcagattcacactcaca

SEQ ID NO: 34702 - DNA, 227 bp, Glycine max
  Clone ID: 700890852H1
gcgacggccgctccgatctagaactagtggggagtatcctagtcctcccccagaatattcaacctgcttgggtgatctgtacagtgttgcttggatggaagacagtgacagacacaatttacgaacagaaactctgcatcaacaatataaattggttaaagagaggactatatctggagattcatactatggctctcacgtgatgcagtatggtgatgtacggctta

SEQ ID NO: 34703 - DNA, 224 bp, Glycine max
  Clone ID: 700890853H1
cgttttcatttcccaatttatagtaaggaatggctgtgatctagttaaagctctgttaatttatgttgaacaacttattgggttttatagttatgatcgggaaaagtgatgagagcatgataggcgcatgttgactttgttgctgttgatgctgtttctatgtcattgatgattggtcgcgaatttgatgctggttgcaagagtatgctggttttaggactgtg

SEQ ID NO: 34704 - DNA, 224 bp, Glycine max
  Clone ID: 700890854H1
ctcgagccgattcggctcagttagaattacattggttaaacagctcatttggtcctgattggtaacactcatttatgattcagttactgtatgagaaaaattgaagttatagtccatatatgctcttattactaattagtacacattggcccctgcttttactatgtctcttaagctgtagtccttatatgcccttatagccttatagagactaaaacttaagc

SEQ ID NO: 34705 - DNA, 146 bp, Glycine max
  Clone ID: 700890855H1
aaaagatgaaggaagagatcctggtagcaatggttctgtctataatgctccttcctataatgggttcttgctgccccttgctgacaactgtcacaatccactgtgcacgatttgatcactttccacagtcactgggcatactccgg

SEQ ID NO: 34706 - DNA, 208 bp, Glycine max
  Clone ID: 700890857H1
ggaagtatatggtgtaagtgtcattttcacgtaaagaaatttgtcggtgtttttatactttcagaaactgggatagaagtagtattgttatctgttctatccctaaaatgcatgaaaagtaactgtttctatgttattgtttcatattctgttctttattttggttattcatcaatatatggtgaccattatcagacagacatttcct

SEQ ID NO: 34707 - DNA, 226 bp, Glycine max
  Clone ID: 700890858H1
gattgtttaattttcattatgtattttacaatcaccatatttcaatctgctataggctattacaaaattgaaatccaaatgtttgaaaatgtgaagagtttccattagttgctcaagttgtcaagttattagaaagaatattgtggtttactccgtataatttgtgcaattgatccttcagagatggataaacttgttcctatttggttgctgtgttacagtttga

SEQ ID NO: 34708 - DNA, 224 bp, Glycine max
  Clone ID: 700890859H1
acaatccctttcttttcctctctgatctgcaaacacatttcaagagaacgtttttgttgttgcgcccaatcggtgttgcatttgtcttttgcagagaggaggggaagtctttatttgtgagatttttcttaggaagatgaaaaacacggagaggattgcaaatttggccgtagcaggtttaactttagccccgcttattgtgaaagtagattcaaatgtaaatg

SEQ ID NO: 34709 - DNA, 169 bp, Glycine max
  Clone ID: 700890860H1
gccctgataatatcccaaatgtatatcacggctgcgagagatttgggattgatagccaacttctcagtgacttgcccttaagttggctatcaatcccaaatttctggcagccctgataagctcccaaatgtatatcacgataggtttatcaggcaagaccctttcaggt

SEQ ID NO: 34710 - DNA, 228 bp, Glycine max
  Clone ID: 700890861H1
aaaaattctaatcagccggtagaggagtttaatctttctaaaaaaatgtaatctttttccctttgtttttcatattccagggttgttgaaatgcaagagatccttgatcaacagattgcagaagaagcagctgaggctgaaggggatggcgcaatggcatcagttgcaaatcctcgtaacaccggcataaaatcaacaagtgccatggcttcttcaaaaaatttaacg

SEQ ID NO: 34711 - DNA, 231 bp, Glycine max
  Clone ID: 700890862H1
agacactacaattctcactgaaagacagttgctaactcttggcaccagttatcagcttaacatagttgataacaccaaaggcacaacaacattgagggaatgaggcttgtcatatcagctgtatgtgttattgtgctattttcttatgctgctgcgtatgatcctttggatccaaatggaaacataacgatcaaatgggatgttgtgtcatggacaccagatggctatgta

SEQ ID NO: 34712 - DNA, 115 bp, Glycine max
  Clone ID: 700890863H1
caaaattatcagtcttataatgttgctgttgttgctttgcttgacattatacactttgtgtgcatttgtatcatgttatgttgttaatagaatatcctgcagtttttttctttct

SEQ ID NO: 34713 - DNA, 238 bp, Glycine max
  Clone ID: 700890865H1
aaaaaatgatataagaattcacaaaaatgtttgatctgttattttaatagttattgcaatatatttttattctcttacatccacataggatggaactataatacggggacaaaatgaaatttctcatccaaccagtggaacaatggagcttattaagaagcttttcagctccagcacttccttcgaaaataaaacgggtgttctacatgtctagcgagggaaaaaatttgctccatga

SEQ ID NO: 34714 - DNA, 234 bp, Glycine max
  Clone ID: 700890866H1
gtgaaaatgttcagaaaccagtacgacacggacgtgaccacatggagccctgcggggaggctgttccaggtggagtacgctatggaggcggtgaagcagggctcggcggcgatagggctccgatcgaagacccacgtggtcctcgcatgcgtcaacaaggccaactccgaactctcctcgcaccagaagaagatcttcaaggtcgacaatcacatcggcgtcgccatcgctggc

SEQ ID NO: 34715 - DNA, 224 bp, Glycine max
  Clone ID: 700890869H1
caaacccatttccttgatatcttagttatctaattacctcaattaatcccttaattgcaagcatcatggctgaggagaaacaccaccaccacttccaccaccacaagggcgatgatgtgcctggcgaggttgattatcagaaggaggagaagcaccacaagcatcttgagcaccttggggaacttggtgctgcggctgccggtgcttatgccttgcatgagaag

SEQ ID NO: 34716 - DNA, 223 bp, Glycine max
  Clone ID: 700890870H1
atcagaggacataatggataataacccaaggaattccaagtcccctgtatctttagctccccccagcagggaagttaatgaggatatatctcctattagtgcttcaagttcttgttctatgaaatttgatgaatcagaagtcaatagtattggtggacaaaagagcgagaaaccttgtctgaattctccaggggagattccttctggggatagtgggaccaat

SEQ ID NO: 34717 - DNA, 221 bp, Glycine max
  Clone ID: 700890871H1
cctgagcaagtgcccgttcagtatggtggcctcagtgtagatttctgtgactgcaaccccgatttcactatgtctgatcctgtcaccgaaattcctataaagcctaccactaagcaaactgtggaaattgctatttatgagaagtgcattattgtttgggagctgcgcgtggtgggctgggaggttagctacaatgctgaattcaagcctgatgttgaaga

SEQ ID NO: 34718 - DNA, 222 bp, Glycine max
  Clone ID: 700890872H1
ctcttggtagaatgctaacagaaggcattcacacagacatcaccatcaatgcttctgatggaagtataggagctcatagagctgttcttgctgccagatcacctgtcttccgcagcatgttctcacataatcttcaggagcaagagttatcaaccataaacatctcagacatgtcacttgaatcatgccaggcttttctctattatctttatgggataatca

SEQ ID NO: 34719 - DNA, 221 bp, Glycine max
  Clone ID: 700890873H1
ctcacaccaaaacctttgttacaatgcactcaccacctgtgtcatgtccgggtgcactggcatttgaaagacaactataaggactattggcgcgtcaagattgccatcatcaatttcaactatcggttgaatttcaccgattggtctcttgttgtgcagcaccctaatctcaataatgtcacccaagtctatagctttgtatacatgccgcttcttcccta

SEQ ID NO: 34720 - DNA, 220 bp, Glycine max
  unsure (1)..(220): unsure at all n locations
  Clone ID: 700890874H1
ccngcggacgcgcgaatcgacaaccgagtattcgcgccgtgcacggacacgcgagtgcagagatccgacggattcacgttcggaatcgcgttcgctccgaaggacaagttcttctacaacaacaacaacagcgttcagttgtcgccgtgcgacacgaggctctcgctctccagtgcgaactctcagatctccgtgttcagacccaaggtcgacgagatct

SEQ ID NO: 34721 - DNA, 222 bp, Glycine max
  Clone ID: 700890875H1
tatgtgtgtaaatgagaatcagaattcagaaaaaaaagtgtacttgaactgggattcatctgtatccttaacttgtctctctgctgattcataatctctttaaggacgaggttttgccaacctgccacaaatagtattgcatgggttggtttactaagttgcttaagggatccaaccgtaaatcttcaggaggacgatatcatgggaaatatgaagatgaca

SEQ ID NO: 34722 - DNA, 226 bp, Glycine max
  Clone ID: 700890843H1
tagttctagatcccgagccgccgctcgcatatttacctttccttccttccacttccaatcttcaacaactcacgactccctccgagatctctctctcactcccacaatccaaccatgcaccatacggggcatttagacgcggcgatagagcaattgctgaacgtggagaagcagatgacgctcgccggtgacgttgcgggtaccagaaaagcagccaccgatattt

SEQ ID NO: 34723 - DNA, 217 bp, Glycine max
  Clone ID: 700890876H1
cagaacattataatgcagcatgttgatcattcagctggagatcttatacatcttttgcaggggctacttagatatgacccctttgaaagacttacagctagggatgctttgaggcattccttctttactagagatcaacttaggagatgattttgctgtatttgtaaacgattggtctgtttttaagtttaaagagcattcgagggcaaatatggct

SEQ ID NO: 34724 - DNA, 221 bp, Glycine max
  Clone ID: 700890877H1
gataccattaatcttagcagaaatccgatgtttaatcaaatgaaatcaaatagccaagctctaggtgctgatatgcaattaggtgctttaaataagtcaattgcaacatcagatataaacctctctgctgctattgctgggtctcaagcattggtattacaaaaagattcacaaccaactctggcttcaacatctgctggtcgtgagaactagggagacac

SEQ ID NO: 34725 - DNA, 227 bp, Glycine max
  Clone ID: 700890878H1
attttaatcctaattctgcacttcttgatcattcgatttttctcctcaagatgcagatattcgtaaaaactttgaccggcaagaccatcacccttgaggtggaatcctccgacaccattgacaacgtaaaagctaagattcaagacaaggaagggatcccacctgaccagcagagacttatctttgcgggtaaacaacttgaggatggtcgcacccgtgccgattac

SEQ ID NO: 34726 - DNA, 224 bp, Glycine max
  Clone ID: 700890808H1
gcgcaacacgttgtaattaaaacgacaccgaaactaatgggcgtcttcagcgaaaacccgaatccggacccggttgtgatccgccaggtttgggcttcaaatctcgaatccgaattccaactcatccgcgaactcatcgaccactatccttttatctcgatggacacagaattccccggtgttgttttccgaccacacctggaccccacaaaaccctacaacca

SEQ ID NO: 34727 - DNA, 226 bp, Glycine max
  Clone ID: 700890809H1
ctcgagccgatttattaattatgtcaaaaaatgcaacaacaacaacaacatctgaaaatgggaccaaagtgttgtcaccactcccactccctattatggtaacatgctgcaagcaagaagatgccaactcagccaaaagtgatgtccttgattcggatagcccacattgcacttcattcgtggagcctgctgattcctctcatgcctttgaaccagaagaccactc

SEQ ID NO: 34728 - DNA, 226 bp, Glycine max
  Clone ID: 700890811H1
aattaatcattcttttggttatttcatccaaaattgtaattcgcttgtgttcctcctagaaattactttcataactgttggaaaataggagctttttagaaaataaagagcatttttttatcattgcttctctttccttgatattttgtatagctaggttcactgcatcttaggaagtattgataacttaattgctctcttgtaaattgtagttggagattgatta

SEQ ID NO: 34729 - DNA, 226 bp, Glycine max
  Clone ID: 700890813H1
ggctcgagaaagcattgaattcaaaaacttaagttcattccttgtgttttgctttcttcctcaaaaccaaacatgtcgaacacatgcggcaactgcgactgcgctgacaagactagctgcaccacgggaaacagctatggtgttattgtagagactgagaagagttacatcgagactgttgtcatggatgttccagcagctgagcatgatgggacatgcaagtgtg

SEQ ID NO: 34730 - DNA, 232 bp, Glycine max
  Clone ID: 700890814H1
gtgaaaatgttcttgttttgttgcctatgctctccatttataggcttttttttcccatgctatattcaattggctcttcaactgtaaatgagccaacttactattagattgaaaagaataagtttcttacactgattgagtactatgttggcttggaaaagtttcatgcagttatgtttttattttgtgcttggcttattttcttcttgttgcacaggtgtatatgtttttt

SEQ ID NO: 34731 - DNA, 236 bp, Glycine max
  Clone ID: 700890816H1
ccctaaacgactctatctctcttcgttttgttcttccttgcgctcctcctcgttcgttcgttctccctcgcgtagatcggcaatggcggagaccgagacgtttgctttccaggctgagatcaaccagctcctcagtctcatcatcaacaccttctactccaacaaggaaatcttccttcgtgaactcatcagcaacgcctctgatgctttggacaagattagatttgagagtttga

SEQ ID NO: 34732 - DNA, 233 bp, Glycine max
  Clone ID: 700890819H1
cattctggtatagttagatagctagctctctttcactacttctctgcctttaatcttccttcttatggaaccaaactttaacaacaacccaaagatgttacagaaaaagtggctttctactgctttgaatgtgagaagccaaggatcaggcagtgaaaccatagtctttgctcatggctatggaacagaccagtccatctgggagaagatcactccctcctttgctgaaaact

SEQ ID NO: 34733 - DNA, 232 bp, Glycine max
  Clone ID: 700890820H1
gaagcaagcaagcgatttgtgaaagcgttgaccagaaagtgtgaactacaaagtgtaggaatgagcatataccaccagatacctgcgttgattctggattcttgaagccattccttctattttctggtgacagcttcgtcttgtgctatactatataacaactcaccctctctccttacctcttcattcccaacacaaaacactctctcctccttcaacctagccctggtca

SEQ ID NO: 34734 - DNA, 228 bp, Glycine max
  Clone ID: 700890821H1
tacaaaccaaagatgtggacagaagcttggactggctggtttactgagtttggaggtgcagttcctcacagacctgctgacgatttggcattttcaattgcaaggtttatacagaaagggggatcatttgtcaattattatatgtatcatgggggaacaaattttggtcgaactgctggtggtccctttattgctacgagctatgattacgatgcgcctcttgatgaa

SEQ ID NO: 34735 - DNA, 225 bp, Glycine max
  Clone ID: 700890823H1
cataagttataccgacttctgattatatgctgaagaatttctggggggatttattttcccagtatttttagatgccatattctgaagatagaatgtagatgtataaatgacaaaggtccttgcactaagatcctgtagcggcttcttttttcctctacagttgaatgtaaaggaggatgcattggtaaaattcaaaagtgaacttgctgtcatggaacttgaaat

SEQ ID NO: 34736 - DNA, 223 bp, Glycine max
  Clone ID: 700890824H1
cgctcaaagagcattgttttttgatgacagcatccgcaatttattgaccgccaaacgcttgggcctccacacagttgcgattggtacatctgttcgtaccactggagtggctcatgcattagagagtattcataatatcaaggaggcatttcctgagctctgggatgctgcagtgcagcatgcaatttgtgcaatacaatgttggacttgacacatcggtaaa

SEQ ID NO: 34737 - DNA, 224 bp, Glycine max
  Clone ID: 700890825H1
aagtggttgagagtggacttcaaggagccagtgtggttcaaagctggagcccaaatattctcagaaggtgggcttgactatttggggaacccaaaccttgtccatgcacaaagcatcctggcagtgctgggcttccaagttatcctaatgggccttgttgaagggtaccgcatccatgagcttgatggggtcggcgaggtcaatgacctctaccctgggggcca

SEQ ID NO: 34738 - DNA, 224 bp, Glycine max
  Clone ID: 700890826H1
tgataacttggggacagtgacgtattggtggagccatgctatgatctccgaccagacttaccggcaactaatgagtacatgtgattttcgcaggcagaaggaatctgatgagtgtgagtctgtgtatagctatgccatggatcaagagtttggtaatattgatcagtacaacatctatgctcctccatgcaacaactctgatggtagtagtagctctgccaccc

SEQ ID NO: 34739 - DNA, 225 bp, Glycine max
  Clone ID: 700890827H1
gtcacagggaagaaagagcgtcgagaaggttcagttcagatcctccgtctccaccatggcaactcccaaggcatcgtcgaaatggaccgagaacatttcctcaatagcagctcgcatcttcttccttctcatcatctttcagatccctcttttcagggtgacttgcagatctggcatgtgtacaacccctttgcatgtcacgtcgtcacaattaattgcaagtga

SEQ ID NO: 34740 - DNA, 228 bp, Glycine max
  Clone ID: 700890828H1
gtgatatggcttgtaattctatctcccaagcagcttcaatgggcacacaaatatgcacccaaatagcttccatattctcaaagcccacccatccatacccggccccactagaccttttagtcaccgaactcacctccgttgcctctcaaaaaggcaacgtttttctatacggcgtgggccgcgagggcctcatgctcaaggccctctgcatgcgcctcttccacctgg

SEQ ID NO: 34741 - DNA, 232 bp, Glycine max
  Clone ID: 700890830H1
ccttgcttctctctctctctctctataagtttaactttgctagctaactcaaaagcgtgtttcaaacctcaaactccaattataagccaccccatatagatctcttttcatgctaaacacacacacacgccatgaagtccaatccaaaatcaaaaacaccaccccacttattatactaccttctaataatcctctccttactgttcttcttcccgtgtgtatcctctaccca

SEQ ID NO: 34742 - DNA, 232 bp, Glycine max
  Clone ID: 700890831H1
gggaaataagaaggatcttatatgtcttttcctcctatgagctacaataaataacacaaaataccttaggaactccctcatattctgtatatatgtgcaaacaccaaactcacaataaacatcactcggtaaagctgtatatagaaacggatgactcagtgcttgaagatggcaagcatggtgatcacaaccgcagccccgatcatggaggcggacttgccactgttccggc

SEQ ID NO: 34743 - DNA, 217 bp, Glycine max
  Clone ID: 700890832H1
ggaagccccaaagattgaaaacccaaagtgtgaggccgcccctggttgtggtgaatggaagaggccaacgaagaggaatccagcttataagggaaagtggagtgctccttacatcgataaccccagttacaagggcatatggaagcctcgcgagattccaaaccctgaataccttgaactcgaaaaacctgatgttcctggttctactgctattggc

SEQ ID NO: 34744 - DNA, 242 bp, Glycine max
  Clone ID: 700890833H1
attaattgcaagaatggcacttcgttgcttggtgatgtcccgttctgttctcttcactcttggtcttgcgagagaaagccatgccagagacgaagatttttggcatgctgtttggccaaacactcccattccaagttcattgcgagatcttctaaagcctggccctgcaagtgttgaaatcgatgatcaccctatgcaaattgaagatacacagtacccgagaacgtcttctataaagaaga

SEQ ID NO: 34745 - DNA, 230 bp, Glycine max
  Clone ID: 700890835H1
gagaaataagggaaaaatggtgtcgctgaaactgcagaagcgcctctccgcaagcgtgctcaagtgcggcagaggaaaggtttggcttgaccccaatgaagtcaacgaaatctccatggccaattctcggcaaaacatcaggaagttggttaaggatgggtgtatcatcaggtagccaaccaagattcactcccgctcacgtgctcgtaggatgaaggaggcacagagga

SEQ ID NO: 34746 - DNA, 231 bp, Glycine max
  Clone ID: 700890836H1
ccactacacgcaaagcaaaacacacctccacattcacccttagtcctcactcaacaaacaaattagccatgagcaccaaggagtgctgccaccacgacgaggagcggcgtcagctcccccgccgcgtattcgccgcgatcctcggcttcatcctcctcatcctcctggtgatcttcctcatctggatcatcctccgccccaccaaaccccgcttcatcctccaagacgcca

SEQ ID NO: 34747 - DNA, 227 bp, Glycine max
  Clone ID: 700890837H1
gtttttggcctccacacaacaactacattgccacaaatttatgctcctttttctcctgtatcttggtgaacttaggctaatcctataccggtcagagcaatgttcgaccggtgatatcattgttggcgtggaccaaatgtctacagatattgtcattcctaagcggtagtgtctggttgtcactaagtgcctgcttacagacaatgtgtaaattgagacgaatgaac

SEQ ID NO: 34748 - DNA, 92 bp, Glycine max
  Clone ID: 700890838H1
aattgctttatgggtttatgaattatcaataccccacttattgtaacggcaatagtctattaatttttaaaccggtttcgatttttggattc

SEQ ID NO: 34749 - DNA, 225 bp, Glycine max
  Clone ID: 700890839H1
gttcgcaaaattgcagcttcccttcacagttttcgtcccgaaaaatctatagtatcgcgtgacacggtacgctattttatcacttgtctgagagtaattaggagaaaactatttaagcttctgagaaggctgttaatttctgtgcatagcattgaagcacttgaacagatgcagaaattgggagagtttaaattaccacctttcttcaattacccaccttacttc

SEQ ID NO: 34750 - DNA, 227 bp, Glycine max
  Clone ID: 700890807H1
aacgctgaattaattttcgcctaaaaagacaattcggtgggatctaggttagcagcaaccagcgcaatctgggacttttctttctttctccccacacccagattcaaaaactcagctctgctctttcgtttggatctcaaaacctgttcttcttcgattggttctatggcattctagcttccctcggtctctggcagaaagaagccaaaattctcttcctcggtctc

SEQ ID NO: 34751 - DNA, 224 bp, Glycine max
  Clone ID: 700890840H1
tgtaggacaaagtctatcatacatttacctatggattttgtatttatagtgacagtttttgtccgtaggtataggtcatttttcttgtagtgtgagctgataatttttttattagttaactgaatattatatgacagcacttgttcatgagacgtcaagagagtagattctttccttatcttttaaccatgatcccaacctaattgatatggtgactccatagt

SEQ ID NO: 34752 - DNA, 223 bp, Glycine max
  Clone ID: 700890841H1
gccacatagcatcactgcacagcaaattggctcaggttatcacggacttgggattggtgccttcacacttgattgggcagggatttcagcttatcatggcagtccccttgtttcaccatggtcttccattgttaatgtgggaattggatttatcatgttcatctacatcattctacctctctgttactggaagttcaacacttttgatgcacacaagtttcct

SEQ ID NO: 34753 - DNA, 222 bp, Glycine max
  Clone ID: 700890842H1
cttgttgcaacggagtttgggaccgcttctgctgcttctgaaattggttccactctgatcaggtttgggaccaccgccggtgacgtgtcactcacgctagggcttcgccacgccgggaacatgccggagaaaactccgttctccgttagggactttggaggcatttaaaacttaatcaattccccctatattacttcacatgatcataaaagataagaatga

SEQ ID NO: 34754 - DNA, 238 bp, Glycine max
  Clone ID: 700890760H1
gaaaatcaggttatatttaaactgaaaacagagatagaagctctcaaggaagaacttgaaaaggcaaaggattacgatgataagttgtcagagaaagaaacttttattgaacagcttaatgtggagcttgaagcttcaaagatggctgaatcttattcacgtagcctgctagaggagtggcataagaaggttgaggaactagaaatgaggattgaagaagcaaacaagctggagagat

SEQ ID NO: 34755 - DNA, 240 bp, Glycine max
  Clone ID: 700890761H1
ctcgagccgaatcggctcgagacaaaaccagttgatgagtgcttcacaccatgcccaactgccaagaaatgaaaatgggcagactattggtcctccacaatcatccacgcacggctttgagcctgtaagcatttcaaatcctacgtacagaggagttgaagagtacttcccagaggaggaaattcgtattagaagtaatgagatgctagaaaatgaagatatgcagcatctactccgtat

SEQ ID NO: 34756 - DNA, 253 bp, Glycine max
  Clone ID: 700890764H1
tcggctcgaggagaattccaactgataaaaagaatattcagagaattccaaagacagagatgactgtcattaaggaagagcaacaaccaaaccaaatagctggccacaaagaacttggtcacaaaagtctccttcagagcgatgcactctatcagtatatacttgaaaccagtgtgtacccaagagagcatgagaggcttgaaggaactacgatagttgacggaaagacacccttgggagcaacactgggtcc

SEQ ID NO: 34757 - DNA, 239 bp, Glycine max
  Clone ID: 700890765H1
gaggagaaggggtggagcgaggaggatgtggaggtgctgaagaagcagatggtgaagaatccggtggggaagccagggaggtgggaggcgatacggcggcgttcggggggaggcacggagtggacagtgtgataaagaaagcgaaggaattgggggagaagagagtggatgattcggagtcgtatgcgttgtttttgaagaagaggaaagcgttggataagagggttgtggaggagaat

SEQ ID NO: 34758 - DNA, 243 bp, Glycine max
  Clone ID: 700890766H1
tcaatgctggaatcagacccgctattaatgtaggtatttccgtttccagagttggatcggcggctcaaattaaagccatgaaataagtagctggtaaattaaaattggaattagcacaattcgcagaattagaagcttttgcccaattcgcttctgatctcgataaagctactcaaaatcaattagcaagaggtcaacgattgcgcgagttgcttaaacaatcccaatcagctcctcttaccg

SEQ ID NO: 34759 - DNA, 240 bp, Glycine max
  Clone ID: 700890772H1
cttaccgcggttacttgccgcctcaatccattgctgaaatgaatgctcataaataaatatatttgcaggctacgaatctctgctcctagatttttgtttcttaattatcaatctagtctctaaattatattaaaagatttaatttgattccaaatttttaaataatttaatttaatttctatattattttaaaatagattaatttgaccatttttgtccaattgtgattagtataacaaa

SEQ ID NO: 34760 - DNA, 240 bp, Glycine max
  Clone ID: 700890773H1
gacatagcaaacgatccaaactcttttttcatttgcagcatcaaaatgagtggtagcaacgatggtagcggcagctggagctctaggtttttgaaggtggctagtgcagctgccgctacagccgccgttgccggcggtttatatgccattctttcatcctcaacctctgctagctctgagatggaagtgccgtttggcagcgcacggcgtgagagcaaagaacgtgacgatggtggctcc

SEQ ID NO: 34761 - DNA, 237 bp, Glycine max
  Clone ID: 700890775H1
agaagctgaaggagcaaaagccatgcttctgtggctacctcaaaaaccctagcttgaagcagtatgttaactctcctaatgccaaaaaaaccgttagttcttgtggtattgcctatccaacttgttaagcacctcttatatatatatataaaatgtgtgaacaatatatatatattgattaaaaaatatagtttaatttatatacacactttgatcctataaaaacatcttgacaca

SEQ ID NO: 34762 - DNA, 238 bp, Glycine max
  Clone ID: 700890778H1
tattatttcattgatttctccctcttcgctctctctcagtgaccagagacagatgatgatggagatggcgaacgagaacgctgtcgttgcggcactcgcggcgttggtgctactcgcggcgagtgtggcggtggatgctcaggagaactcggacgtgaagacgctggtgaagtacaagcacgggaagaagtactgcgacaaaggatgggaatgtaagggctggtcaatttactgttgt

SEQ ID NO: 34763 - DNA, 237 bp, Glycine max
  Clone ID: 700890779H1
gcgaaactacacctattccgatgttgtcagatccgtcttaggagggaggaaatttcagctgtgtggattagctcagtacataaatcttgtcggtgtaactatcggttacacgataacggcttcaattagtatggtggcggtgaagaggtcgaattgttttcacaaatatggtcatcatgttaagtgctatacgtcaaacaaccctttcatgatcctctttgcctgcattcaaatcgt

SEQ ID NO: 34764 - DNA, 241 bp, Glycine max
  Clone ID: 700890780H1
tttcttcccacccataaccctgccttccaaactctcctctctccgactccccacccgccgccaccccaagccactcagattctcctcctccaccatcaccgccaccatctccgtcggcgacaagctcccggaggccaccttctcctacctggactcgtccggcgaggtgcagacgacgacggtgtcggaactgacgaaggggaagaaggcggtgctgttcgcggtccccggcgctttcacc

SEQ ID NO: 34765 - DNA, 204 bp, Glycine max
  Clone ID: 700890781H1
ctagtgtaatttatgggtgacacattttctggatttactagaggcatttgcatgtctaactcggttgctgattgatttgtttttcccttttgtcagatgctttgtaatataatatcacatcattcttgtccaatagggagttaaacgggatgacatacatgtgaagggttactttatgaaatcatatcgtgacattttttagat

SEQ ID NO: 34766 - DNA, 238 bp, Glycine max
  Clone ID: 700890782H1
acaaaaagttctgttctttttcccacccaattcagttttctcaaatggctcccacgaagcaaacggctcgcaagtccaccggcggcaaggcgccacgtaagcagctggccaccaaggcggctcgtaagtctgctccggctaccggcggcgtgaagacgccgcacagattccgtccgggaaccgtagcgctccgcgagatccggaagtaccagaagagcacggaacttctgatccggaa

SEQ ID NO: 34767 - DNA, 240 bp, Glycine max
  Clone ID: 700890783H1
cctcccctcagcggcatcgttgtattgttcttacacatctttctctctctcactttcggtttctaaaccaaaaccctaatcgagatcacaatcggatcgtaaacaaacagagaccagccatggacggtgattcctcttggagtgctcgactctcttccgcttccaggcgctaccaatccgctcttcaatctcgatcagacatgttcatgggttttgatgaaaatgatggggacgatgata

SEQ ID NO: 34768 - DNA, 240 bp, Glycine max
  Clone ID: 700890786H1
cttagctttgattctctgttctctgttttgttctgtttcgcattgacttcatacaggaacttgaacaatgaagaatgcaaagggcaagggagcagcaagggcctcaaaagaatcactgaagcccgttgatgaccgaaaggttggaaagcggaaggcttccggtaagcctgggagaagtagtgcaccaaagaaggagaagaaggccaagaaagaccccaacaagcctaaaagaccacccag

SEQ ID NO: 34769 - DNA, 238 bp, Glycine max
  Clone ID: 700890788H1
gttgagagtaagagaagaggccaatgccaatgtaatcaaggcaagtttggttggagagtgagaggtgggaatagtccttggctctaacatggtcaacttgttcagtctcagaatactgagtgtacgctttggtgaactcattgaatgattcatgaagcgatggaagagactcatggtttgtgaattgagtgtttgggaatatagaggatgttgttgtgaccgcgaactcgtggcgcca

SEQ ID NO: 34770 - DNA, 238 bp, Glycine max
  Clone ID: 700890789H1
gagggtacagcgtttatcgctcacactcgtcacgacttaagagatatttttccaagaaaaaagcaaaaacactctccatttgtgcttgtgttttgcccgggaaaactgagttcgaaatgatgaagaagaaaccgagcgcgagagagaattcgtcgtcgtcgacgacggcggcgagagaagaagagagcgaatgggaaatgaggcccggaggaatgctggtgcagaaaagaaccacgaa

SEQ ID NO: 34771 - DNA, 235 bp, Glycine max
  Clone ID: 700890792H1
ctaggttctagatcgcgatctagaactagaagtccagaaagagggtacccccaattgtgaaggggtggcccttaattggagggctaatccgtttccttaaaggtccaatctttatgctccgtgaggagtaccctaagcttgggagtgtcttcaccctcaagctcttccacaagaacatcaccttcctcgttggccctgaggtctctgcatacttcttcaaggcctcagagactga

SEQ ID NO: 34772 - DNA, 237 bp, Glycine max
  Clone ID: 700890795H1
aggcaggctaatacagtaatatgacttcatttgtatgacgatttctggtttatgaagcttgttgtaaaaaaattgcggtccatgaagtgaagttcatttgtcctatttttgtgaccatggaagtttaaagcataactatgacttaaatatcattttcttcatctgtgaatctctatcctttttttccccttttctcatgggaggtcaagaagataatattgcggagtactatcagca

SEQ ID NO: 34773 - DNA, 236 bp, Glycine max
  Clone ID: 700890796H1
aagagcatcactgaactaacaaagcaaccctatgtcgaaggtggtttgtgtcaccggagccagcgcgacgtcggatcatgggtggtcctactcctcctccagcgtggttacaccgtccatgccaccgtccaagatatcaaggatgaaaatgagacgaaacatttggaggaaatggaaggagcaaagagtcatctccatttttttgaaatggatcttcttgacatcgactccattgc

SEQ ID NO: 34774 - DNA, 244 bp, Glycine max
  Clone ID: 700890801H1
aagaaggaagccattgagaacataggagctgactcatttgtggttagccgtgaacaagatcagatgcaggctgtaatgggaaccatggatggtatcattgacacagtttctgctgtccatcctcttgtgcctttgattggcctgttgaagcctcatggtaaactagtcatggttggtgcaccagagaagcctttggagttgccagtattttctttacttatggggaggaaaatggttggtggca

SEQ ID NO: 34775 - DNA, 243 bp, Glycine max
  Clone ID: 700890802H1
gttattcatcataattcattttaccatcaaaaatcaaattccattcagattcaattaaagcgaaaagtgtcagaaaaacgaacccttttttatttgatatgacacattaataattgttatagttaggctatagaaatagagaataataataaaagaaaaagaaaagaagagaaagatcatatgatggactcagaaatggtggaagcagaggcatcatcatcgcagcctcagccgcagcatcga

SEQ ID NO: 34776 - DNA, 234 bp, Glycine max
  Clone ID: 700890803H1
gccggaactcattctccgcctccggaagtccaaccattccgagtcttacctcttcgccaggaaattcaccccggattgcttggagcccttgatgcgcattgccaaatcggtcatcttcagggattgacattgaaaacatgcaggtggaaaaggcctgtgaagagcttgctgttgctgtggctgtagcttgatggtggtgtatagtttgaagaggcaggaacagcccacatccta

SEQ ID NO: 34777 - DNA, 224 bp, Glycine max
  Clone ID: 700890804H1
attgatttctccctcttcgctctctctcagtgaccagagacagatgatgctggagatggcgaccgactacgctgtcgttgcggcactcgcggcgttggtgctactcgcggcgagtgtggcggtggatgctcaggcgaactcggccgtgaagacgctggtgaagtacaagcacgggacgaagtactgcgacacaggatgggcatgtaagggctggtcaatttact

SEQ ID NO: 34778 - DNA, 184 bp, Glycine max
  Clone ID: 700890805H1
gcgcgggattcggctcgaggcggtgttagcatagacgactggtggaggaacgaacagttttgggtgatcggagctgtttctgcccatcgatttgccctatttcagggtctactgaaggtcttggctggggtgaatacaaagttcagtgtgacctcaaaagcagccgatgatggagcattctcag

SEQ ID NO: 34779 - DNA, 228 bp, Glycine max
  Clone ID: 700890806H1
aaattagccccttaccagccctcaaggaaatcttccgcactgatggtgaaaatgttcttcaatttccaccacctcatgtagcgaaagttagtaagtctgggtggatgactgatgaggaattttctagagaggtgattgccggtgtaaacccaaatgtgatccgtcgtcttcaagaattcccaccaaagagcacacttgatcccacactctatggtgatcaaaccagta

SEQ ID NO: 34780 - DNA, 237 bp, Glycine max
  Clone ID: 700890759H1
ggcgctgaagcaggccgcgtcgcccgggtttaaggcctacgcgaacaggttaaggcgaacgccgttgcgcttggaaaatacttgatggggaaagggtacagccttgtcactggcggaacggagaaccatcttgttttgtgggatctgagacctcttggattgactgggaataaggtggagaaactctgtgatctctgtaacattactgttaacaagaacgctgtttttggtgatagc

SEQ ID NO: 34781 - DNA, 246 bp, Glycine max
  Clone ID: 700890713H1
ctcttctgtgcctttctcatctttttttcttctctcattattcaccatctcttccaaaaatgaagttccaagattatgagcctccctctagcccaaaacacatgatcccaaaagtgaccttactagcaatcttggtcatactaatatttgccgtaacccctttatggtaccctttgttgagttactcttcacatctgaacatcaataagaatattccatcatcatcttcatcatatgatcaaaggc

SEQ ID NO: 34782 - DNA, 245 bp, Glycine max
  Clone ID: 700890714H1
ctgagcgtgtcagatctcctggagtttattagtcccgacccaaaaggaaacgatgctcggagcaaacagaggcgtgcaaagatactctcaacaagtgatgacaacagtcaagaacatgacgatgcaatagccaatgagagcattctttttgataactcaaaagatgctccaagtatgacagaagtcaagatagaagaaacaaatggcaaacttgattctcaagtacagaaagaaaatggtgattt

SEQ ID NO: 34783 - DNA, 246 bp, Glycine max
  Clone ID: 700890715H1
ctcgagcgcgcgggtggacaacgaaatttctcagccaaagaacaaggatcagaatcgtataatcaagttgaggaagatggcactagtctccggaggaagatcaacactgaaccctaacgcccctctttacattcccgccgcgttccgccaagtggaggatttttctccagaatggtggcagctggtgacgacactgacatggtaccatgactactggctaagccagcagcacgatgatggagcctt

SEQ ID NO: 34784 - DNA, 247 bp, Glycine max
  Clone ID: 700890719H1
gtaatgggaatgctcaggcaccccagagtgccattgctaaagcatccccttgatattttggccacccttcccctccccttctcatagacgatttttattgtgtttcaccgtttatggtactagtgacaccaatgtagcattgcattgtttagatggaagaaatggtgtattgttttttttttttttactttttgaatatcttgtacggttaaattgaaactcattttggaggcgactgaaaaaacta

SEQ ID NO: 34785 - DNA, 244 bp, Glycine max
  Clone ID: 700890721H1
taaaaacaaaaacattctctcccattcctcaatcctcccccttagcccttcattttctttttctttcttttgttggtttgtttattcctttattctctgcttctgcattttgtacatgcggtgttctatttctcttggtttgataacaggatttggcacaagcgttgtggtctccccatttcaggagaatcatcactcattgccataatatagagcttgttaaaagcaaaagaaagaaaagtga

SEQ ID NO: 34786 - DNA, 246 bp, Glycine max
  Clone ID: 700890722H1
caggcttgaaaaccttgctttcaaagagcaagctagttccttctggagacttgcaaaaatgaactctcctgaatggctttatgctttaattggctctatagggtctgtagtttgtggatcccttagtgccttctttgcttatgttctaagtgctgtcctcagtgtgtattacaatccagaccacagatacatgttccgcgaaatagaaaagtactgctacttgttgattggcctttcatcaactgc

SEQ ID NO: 34787 - DNA, 245 bp, Glycine max
  Clone ID: 700890724H1
ctatgtgtaaatcttagaaatgagatccatactgatatccagattcataatcaaaatatactacctagctttgtggacctgccaaatatttctgcttccatatacagcacagagctttgcaatagattacgagccttcctcatatcttgtccaccgacgggcccatcatcaccagtggcagaacttgttattgcaacatcagattttcagagagatcttgtaagctggggtattggtcctatcaa

SEQ ID NO: 34788 - DNA, 244 bp, Glycine max
  Clone ID: 700890726H1
cttctcttgaagattaaagagttaaaggctgagaagaatgaacttcgtgacgagaaacagaggcttaaggcagagaaagagaagttggagatgcaggtaaaatcaatgaatgctcaacctgctttcttgccaccccctcctgcaatccctgctgcatttgctccacaaggccaagcccccggcaacaagttgatgcctttcatcaggtacccgggagttgccatgtggcaatttatgcctccgg

SEQ ID NO: 34789 - DNA, 242 bp, Glycine max
  Clone ID: 700890728H1
ctttcaacctaacccatcatcgttcacacccgtggttctggctcagccctattttcggttcctctcgttatcggaacagaaaccatttgtggtgaacatggatttggaccagtggatctcgaaggtcaaagatggccagcatcttctcgaagacgagcttcaacttctctgcgaatatgtaaaagagatccttattgaggagtccaatgtgcagcctgtcaatagtccagtgactgtttgtg

SEQ ID NO: 34790 - DNA, 243 bp, Glycine max
  Clone ID: 700890729H1
tgcttcccctccaaacccctaatgttcaagatcacactcagcaccaacaaccaccaaggaccaatgccaccccttcaacttcttctgccgttgtttatagccaaaagggtcattctattgctgccgttgacgacaacaacaaggtctccaaattctcatcagaccctctttcttggttgctttggatgcccgaagatgaagatgaaaattgttcggactcttcttgaattgtccttcaattct

SEQ ID NO: 34791 - DNA, 245 bp, Glycine max
  Clone ID: 700890730H1
ataagattcttccctctcccttctctctctctctctagaacttcgtcctccctctgcttctttctttcttagttgcagcgcgattgctgcatcgtcctccaataagagctcgctgctagtgaaccctaacacggcggcaacgagaggtgttcggttgaagctcagatcagcgatggcagcagcaacccgcacttctctgcggttcctcctctcagtctccgtaaccctaactctcgctcacctcg

SEQ ID NO: 34792 - DNA, 247 bp, Glycine max
  Clone ID: 700890731H1
gaagcttcgaggagtggtgcgggactgcgtgagccagcacctctactcctccgccatcttcttcgccgacaaagtggcagccttcaccgccgaccccgcagacatctacatgcaggcccaggccctcttcctcggccgccactaccgccgcgccttccacctcctcaacgcattcaaaatcgtcctcaccgacctccgattccgctacctcgccgccaagtgcctcgaggaactgaaggagtgggat

SEQ ID NO: 34793 - DNA, 245 bp, Glycine max
  Clone ID: 700890734H1
aaatcctcaagcttcaatttgctttgtgctcactcatctatctattataaccaaacactcttcttcatattcttcttcttcttcttgttcttgttctatctgtgacgagcatcatggcctcgagagcagtgctattgttggctatgtgtgtgcttccggccatggttgtggccattcgcccagcaaagaaccctttttgcgtgaagggtcgcgtctactgtgacccttgccgtgctggttttgag

SEQ ID NO: 34794 - DNA, 243 bp, Glycine max
  Clone ID: 700890737H1
gaggattttgagcagtatgctgagaaagcaaagactttgccaccgactcaatcaaacgaagacttgcttatcctttatggattgtacaaacaggccaccgttggacctgtcaacaccagccgtcctggaatgttcaacatgagggacagagctaaatgggatgcatggaaggctgttgaagggaaatccaaggacgaagcaatgggtgattacatcattaaggtgaaacagctgctggaagca

SEQ ID NO: 34795 - DNA, 246 bp, Glycine max
  Clone ID: 700890738H1
atcgagaccgggaaagatacagggatcatgactcggaaagagatcaggatagggacagaatcaggaggaataatgagcgggaaagagagagagagaggatttacgattatgacaagaggtctaagtacacagagagagaaagcagccgggattatgacaatggtagtaggcactatcgtaggagcaggagtcggagcaggagcaggagtagaagtcggagcttgcaagctggcactggttggtatg

SEQ ID NO: 34796 - DNA, 245 bp, Glycine max
  Clone ID: 700890739H1
tggttcggttcagcaacaacgtgatcggactcctgaacttcctgaccttcctcctctccatcccgatcctggtggccggagtgtggctgagcaagcagggcgccaccgagtgcgagcggtggctggagaacccggtgatcgcactcggcgtcttcctcatgctcgtctcactcgccggcctcgtcggcgcgtgctgtcgcgtgtcgtggctcctctggctctacctcctcgtcatgttcgtcctc

SEQ ID NO: 34797 - DNA, 118 bp, Glycine max
  Clone ID: 700890742H1
gttgttgtcattgatcttattgttataaccatctgtttataacaatgaacttcttgtgtctatttggttcacttgagaattagaaaaaaaaaaaaaaaaaaaaaaagggggggccccc

SEQ ID NO: 34798 - DNA, 241 bp, Glycine max
  Clone ID: 700890743H1
cacgcagccgccttgatgaattgtttcatgtgagggggattcccatcttgcattacttgatgaagctggcaatgttgtcactgaagatggagttgatgttatacgcgaatacggtgttgaaggatacccgtttacatcagcaaggatccaagagttgagagatcaagaagaggaagctaggaggaaccagtccgtgagatctctcttggtctctccatctcgggacttcgtaatatcatct

SEQ ID NO: 34799 - DNA, 241 bp, Glycine max
  Clone ID: 700890744H1
gcgtgattctctagtcaaattttgtcagaagcatgggatttgtgtcactgcacacactccactaggaggtgctgcagcaaatgctgaatggtttggaacagtttcatgtttggatgaccaagttctcaaaggtctggctgaaaaatacaaaaagactgccgcccagatcagccttcgctggggaattcaaaggaacactgtggtcattcctaaatcgtcaaaactggagaggttgaaagag

SEQ ID NO: 34800 - DNA, 240 bp, Glycine max
  Clone ID: 700890746H1
caagggtttaacctttctggctgtgttaatatgcgtttcagcactgtcactgagtccttctgttgcgggggaagggcaaaataatggccttgttatgaacttctacaaggaatcatgccctcaggctgaagacatcatcacagaacaagtcaagcttctctacaagcgccacaagaacactgctttctcctggctcaggaacatcttccatgactgtgctgttcagagttgtgatgcttc

SEQ ID NO: 34801 - DNA, 243 bp, Glycine max
  Clone ID: 700890747H1
gtcgagcagagagatgatcatcaacgtgaaggaatcgacggtggtgcggccggcggaggaggtggcgcggcgggtggtgtggaactccaacgtggacctggtggtccccaatttccacacgcccagtgtattcttctataggtccaacggcacctccaactttttcgacggcaaggttctgaaggaggcactgagcaaggtgctggtgccgttctacccaatggctgggcggctccggcgaga

SEQ ID NO: 34802 - DNA, 244 bp, Glycine max
  Clone ID: 700890748H1
cttacaatctcagcgcatagcattcttcttcttccaacgagaatcagtctttgtgttccaaatggctcgtacgaagcaaacagcaagaaagtccaccggaggaaaagctccaaggaagcagctcgccaccaaggcagcacgcaagtccgctccggcgacgggcggcgtgaagaagccccaccgtttcaggccggggacagtggctctgagggagattcggaagtaccagaagagcacggagctt

SEQ ID NO: 34803 - DNA, 245 bp, Glycine max
  Clone ID: 700890749H1
gatgacttccccatggctactattgaccatatcaaggcaggattgtctgtgttggcaaaatatagaaggcctatagttgtgcatgctgagattcaacaagattttgaaaatcatttggagcttaatgaggataaccttgatccacgtgcttacttgacctatctcaataccaggccaccttcatgggaggaggcagccattaaacaacttgtaagtgttacgaaggacacaagaaaaggtggccc

SEQ ID NO: 34804 - DNA, 242 bp, Glycine max
  Clone ID: 700890751H1
gtcccgaatagttccccttattatctaccatttgaagagaaaatatctttgcaagactgaagctgagttgaaagaagcttggcgtccaggagatcttggttatggaactagagttcctggtgacatgctgattgtcacaattgtcttctgttactctgttattgctcctgtgataatcccatttggtgctctatattttggtctaggatggcttgttctgcgaaatcaggcactcaaagtct

SEQ ID NO: 34805 - DNA, 241 bp, Glycine max
  Clone ID: 700890757H1
ctcgagccgatcggctcagcagaaatgcttggaaaccccgtgaacctgagaggcgccaccaggtctgctccatcaccgtctacacctgttactttcaagaccgttgcgcttttctccaagaagaaggcagcaccacctcctccaaagaaaaagcctgctgctgtatcccccgccaatgaggaactcgccaagtggtatggtcctgacagaaggatcttcttgcctgagggtctcttggacc

SEQ ID NO: 34806 - DNA, 241 bp, Glycine max
  Clone ID: 700890758H1
gcttcagttgcaaataatattataataccacatcctgaattccggataccttcctttaaagaacatcacaaaaatgttcctcaactcgcgatgattgtcatggcatgcatggttggcgtcatcatgtttctctgcgccgtgtccgtactcataaggtacttctactcaagaagatatagccgcaataaccaaaacagaagagtcgacgcccccatattgttcgatttgaacggagattctc

SEQ ID NO: 34807 - DNA, 246 bp, Glycine max
  Clone ID: 700890712H1
cttctcttcttcctcaacacacacaaaatatctcttccaatttcaatttctcgtcgtccctcatcatggctcgtctcgcgatcgctgtcgccgccgtgctcctcgtggccctctccgcctccaccgcgacggcgcgtccctgcaggaccttcataatctcctcctactcgttccgcaaccctaactccaacaccttcgccaccatcaccgagatccgatccttcacccctctctacatcaccgaca

SEQ ID NO: 34808 - DNA, 247 bp, Glycine max
  Clone ID: 700890673H1
atggattgaaaatcatccttgatcttcatgctgcacccggttctcaaaatggttttgagcacagctcttcaagagatggttcacaagaatggggaaaaacagatgaaaccattcaacaaacagttcatggtatagacttcctaactgcaaggtacgcaaaatgccaaagcctttatgctgttgagctaataaatgagcctctctcacctggtgtgacactagaggccttgaacaagtactataaggc

SEQ ID NO: 34809 - DNA, 242 bp, Glycine max
  Clone ID: 700890674H1
gtcttctcgcttagatgagtgcttgttggaggtggatgggtacggtgatggcgatggaaaggcgaaacccaaattcctgataaggaatctcagcagagtttcggaggatggggttcccatcctcaaaggcataaatcttgagatcccagagggtgtgttcgtgggagtgataggccccagtggtagcggcaagtcaacgttcttgagggcccttaaccgcctctgggagccaccctccgcct

SEQ ID NO: 34810 - DNA, 244 bp, Glycine max
  Clone ID: 700890675H1
ttttgtcttatttctttatcacagctgcaatcaacaagacttagaatgcgatgagcaaaaatagacctcaattccgaattcagagatagcacgcaccaggagaagccatggctactcaatccccttcacctcagaacctaggtggtgaaattgagccaacagaaaatgtcgatcagcataataggggagaagagcttggtaaacagagttcagacacatcggtgtttgtgaactcagagccatt

SEQ ID NO: 34811 - DNA, 241 bp, Glycine max
  Clone ID: 700890676H1
caaccaacctcaattgtcttcctgtttggaatgctcaaggatacatccttagatattctcagacatctcaaaacatatggagcttcattctctcagcaccaaacccaaattcatacatagcaattgggttctctcccaatggaggcatggtgggttcaagtgccatagtggggtggatctcatcaaatggggcaagtggaggcatgaaacagtactatctaacaggtctcacaccaaacca

SEQ ID NO: 34812 - DNA, 125 bp, Glycine max
  Clone ID: 700890677H1
atctatccttctcttaaaaccgcagtgtctgagacgagcgagccactatgacccgccgcgacttcgatctccggcaatctaactaaaacggcggcgtatagcgggatctgcgagcatggagggtg

SEQ ID NO: 34813 - DNA, 247 bp, Glycine max
  Clone ID: 700890680H1
tatataaccatcaaccgcaaccgtgtaaatttctggaactttccaccatgatcgagatcctccacctgtagaacactaacttcaatacccgaatgatttaaacaccgtattccttcgacaccattatcatcaacaacctcaaattccaagcactagttctctgagttgttttgtgagatagctcatagcatagcaaggaaggagtattacaaccgaaaccctgaagaaaaaaagagtagaggaagaa

SEQ ID NO: 34814 - DNA, 78 bp, Glycine max
  Clone ID: 700890681H1
ggaaatgaaaccttggataacgtttcaggtccatcacgctcgccgatgtattcatacgggatgaatgtgtcagcagtc

SEQ ID NO: 34815 - DNA, 250 bp, Glycine max
  Clone ID: 700890683H1
attgttcttagtggtggctcaactatgttccctggtattgctgaccgtatgagcaaagaaatcactgcacttgctcctagcagcatgaagattaaggttgtggctccaccagagagaaagtatagtgtttggattggaggatcaatccttgcatccctcagcaccttccagcagatgtggatatcgaagggtgaatatgatgagtctggtccatccattgtccacaggaagtgcttctaagtccaaaaga

SEQ ID NO: 34816 - DNA, 171 bp, Glycine max
  Clone ID: 700890684H1
gcaagctgcttgtttgatagggaagagaagaaagagagaaaacaaagggcggtggtgagtgcttctgattcatcatcatcagagaatggcggctactgtgtcttctgcttggtcaaagcccggcgcgtgggccctagattccgaggaacacgaagccgagctccttcaaca

SEQ ID NO: 34817 - DNA, 252 bp, Glycine max
  Clone ID: 700890685H1
ctctcttcttccattttccttctcaatccaccactctaaccctcgcacgcttcgttcaattacaataatggacagatcaactggccgtggtggtggtggaagtgtggacatgtttctccgaaattataagttgggaaaaacactcggcattgggtcctttggcaaggtgaaaattgctgagcatgtacggactggtcataaagttgctataaagatccttaaccgccacaagattaagaacatggaaatgga

SEQ ID NO: 34818 - DNA, 251 bp, Glycine max
  Clone ID: 700890686H1
gaatgatcttaagagagtttctactgagaattggaagtcttctggaaagcctactggtggtttccacaaaaagaatatggttggaacactcatttacatggcacctgaaatattaagaaaagagttacatacagaaaagtcagatgtatacagttttgggatatcaatcaatgaactcctaactggtgttgtgccatacactgatcttcgtacagaagcgcaggctcacacagtgcttgagatgaactata

SEQ ID NO: 34819 - DNA, 129 bp, Glycine max
  Clone ID: 700890687H1
attttggtcttaatgactgaattgggtgttcaatttgaagatagtatcagcatgctggttccatctgcagtcccagaagggtaaggtgtatcatcttctgcatctgtggaggttgctagtatgtatgct

SEQ ID NO: 34820 - DNA, 250 bp, Glycine max
  Clone ID: 700890688H1
attttctccaccaagaaccagcaacagtcgactgataattactttttcgacagcgccgagaggatttctttcttcttcgaggagaaagcatttggtaatgatggtaagttaaagcagccgaagcaattgtcccttaataaagttggccacgctcttcatgagattgagccagcattcaaaaagttttcttcttctgagaaagtttcaagtttgatgcgctccttaggttacaagagacctgcagtcatgc

SEQ ID NO: 34821 - DNA, 244 bp, Glycine max
  Clone ID: 700890689H1
ctgttggtcaggatgccatagctaaagccaaccccataattaaggcagataagctcgacaaaatctaggcatgcactactgaaggttaatgtatgaaccttgaagcttcatcttctatatgtaagtttcatatatgttgtcttcctggatttttaggtgtcctttagtgattaaaatgatccaagtcaagatggcaagggcatcattagggaaaacatttattgttggttgggagatcacttgt

SEQ ID NO: 34822 - DNA, 245 bp, Glycine max
  Clone ID: 700890690H1
acaaaaagttctgttctttttcccacccaattcagttttctcaaatggctcgtacgaagcaaacggctcgcaagtccaccggcggcaaggcgccacgtaagcagctggccaccaaggcggctcgtaagtctgctccggctaccggcggcgtgaagaagccgcacagattccgtccgggaaccgtagcgctccgcgagatccggaagtaccagaagagcacggaacttctgatccggaagctcccg

SEQ ID NO: 34823 - DNA, 243 bp, Glycine max
  Clone ID: 700890691H1
cacaccctctaaaccaatctatcaagtcctgaatctggtgagcaaatatggagctttgttggcaaacatccatccatggttcttgaagaagcatggagataaaggggtgtgagagggtcctcaccactcacactcctccacttaaaacagtttgttttggcttagctttggcttctctaatcaacaagggatgtgttctaacattctctcttgagtggcagaagcagatatgcattctccaaa

SEQ ID NO: 34824 - DNA, 241 bp, Glycine max
  Clone ID: 700890692H1
ctgttctcttctgtcattgcttctcctccacacacgcacagagacacacacttttgcagtcacattgagaatggggcgtgttcgcacgaagacggtgaagaaatcctcgcggcaagtgatagagaggtactactcccgcatgacgctggacttccacacgaacaagaaggttctggaagaggtggccatcattccctccaagaggctccgcaacaagatcgcggggttctccacccatctc

SEQ ID NO: 34825 - DNA, 242 bp, Glycine max
  Clone ID: 700890693H1
ctcacttttttcagcttctctaaattctctgtctacttcaccaagcacttttggttgcagctttggttaatttccaatatggtgtttcctctcctatctatctttgctttactcaatcttgcagtggtggcaacccatgcagaaaccttgccccctgaagtttactggaagtcgaagcttcccaccactccaatgccgaaagccattacagatatccttcacccagatttggcagaagacaa

SEQ ID NO: 34826 - DNA, 241 bp, Glycine max
  Clone ID: 700890694H1
ctcaaggcaaccgagcttagattggggcttccaggaacagaagaaattgttgaaaaaccacttcctgcaagtgctagaattaccaacaaaaggcctttgtctgaaacctctgaggagtgtgcttcaaagggttctagtgctccacatgtggaaactgaagcagcccctcctgccaaggctaagatagtggggtggccaccaatcagatcctacagaaagaacagccttcaggagaatgatg

SEQ ID NO: 34827 - DNA, 245 bp, Glycine max
  Clone ID: 700890695H1
gctgactacaacattcagaaggagagtactcttcacctcgtcctccgtctccgtggtggcatgcagatcttcgttaagacactcaccggcaagaccacaaccctagaggttgaaagctccgacaccatcgataacgtcaaggccaagatccaggacaaggagggtatccccccggaccagcaacgtctcatcttcgccggaaagcagctcgaggacggccgcaccctcgccgactacaacatcca

SEQ ID NO: 34828 - DNA, 252 bp, Glycine max
  Clone ID: 700890701H1
tcttcttctcttgcggctagggttttagcgcacttcttctagatttaaggaagatgggtaaggaaaaggttcacatcagtattgtggtcattggccatgtcgactctgggaaatccactaccactggtcacctgatttacaagcttggaggcattgacaagcgtgttattgagaggtttgagaaggaagctgctgagatgaacaagaggtctttcaagtatgcctgggtgctggacaaacttaaggctgagc

SEQ ID NO: 34829 - DNA, 250 bp, Glycine max
  Clone ID: 700890702H1
tatctttccccatttccacccttctttctctcactctctctctctctctctgttttctctctctcgtctcacttgaaactccacaacccaattttcttttcctatgacccaattccaaatccaaatcaccaattctaattccattcttcaggagttgaattgaattcgtgatgaagagggaccacaaagatagctgcggcggcggcggcgccgcggagggactgtgaagggtgagtgttcctcaatgcag

SEQ ID NO: 34830 - DNA, 251 bp, Glycine max
  Clone ID: 700890703H1
cggctcgagcggctcgagcggctcgagatagcaaacgatccaaactcttttttcatttgcagcatcaaaatgagtggtagcaacgatggtagcggcagctggagctctaggtttttgaaggtggctagtgcagctgccgctacagccgccgttgccggcggtttatatgccattctttcatcctcaacctctgctagctctgagatggaagtgccgtttggcagcgcacggcgtgagagcaaagaacgtga

SEQ ID NO: 34831 - DNA, 248 bp, Glycine max
  Clone ID: 700890705H1
cgctctgtttctgtctctgtgtttgcggctgaggattccgaacgagcgaccttcttcgtttctcgcaaagtttaagtcatcatgggtaaggaaaagactcacatcaacattgtcgtcattggacatgtcgactctgggaagtcaactaccactggtcatttgatctacaagcttggaggtattgacaagcgtgtgattgagaggttcgagaaggaggctgctgagatgaacaagaggtcattcaagta

SEQ ID NO: 34832 - DNA, 251 bp, Glycine max
  Clone ID: 700890706H1
actagttctagatcgcgatctagaactaccatcttaattttctcacaattcctctgttctcgaagggcgtaggagaagagggtttcgttaccgtttcaatggggagcgaagagcagaacggcgaattctacctgcgttactacgtcggtcacaagggcaagtttggtcacgagttcctggagttcgagttccgcccagacggcaagctccgctacgccaacaactccaactacaaaaacgacaccatcatc

SEQ ID NO: 34833 - DNA, 248 bp, Glycine max
  Clone ID: 700890708H1
cttctctctcgtaccaatcaaatcacacttttgtgttgtgttgggaaacccttaaccccgttttcggtgagatcgagatcgatcgaacatggatgaggagtacgatgtgatcgtgttgggcacgggtctcaaggagtgcattctcagcggtcttctctccgtcgatggcctcaaggttctgcatatggataggaacgactattacggaggagaatccacttcgctcaatcttattcagctttggaaga

SEQ ID NO: 34834 - DNA, 246 bp, Glycine max
  Clone ID: 700890710H1
gtggtgttagatctgtacccgcctagccattgatttggaaaagtccaagcttcaaagatgagtaagcttcagagtgatgctcttagagaagctatctcaggaatcatgactgattccaaggaaaagaacaggaaatttgtggagaccattgaactccaaattgggctgaaaaactatgatccccagaaggacaagcgttttagtggctctgttaagttgcctcacattcctcgccccaagatgaag

SEQ ID NO: 34835 - DNA, 252 bp, Glycine max
  Clone ID: 700890672H1
tctcgagccgaatcggctcgaggaaattagtttggaaatggcagtagcaggttgtcagaagctctctggaactgagcaccaagatcgtcgctgttggcagaaactacgctgctcacgccaaggaattaggcaacgccgttcccaaggagccggtgttgtttctgaaaccgacgtcgtcttacttgaaaaacggcggaaccatccaaatcccacacaacgagggctctctgcatcacgaggttgagctcgctg

SEQ ID NO: 34836 - DNA, 247 bp, Glycine max
  Clone ID: 700890634H1
ttaaaggggaaaatgagttacttgggtttgggtgttagtccaggtactgttccagtgtaccatggaacaaaacttaaagtgttggataggagggtgaggataacagagctggtgttaaggtgtgtgagccttggtcttggagttgttgcaattgttcttgtggtgactgattcccaagtcaaagagtttttctcctttcagaagaaagctaaatttacagacatgaaggctttagtgttcttggtag

SEQ ID NO: 34837 - DNA, 257 bp, Glycine max
  Clone ID: 700890635H1
gcctttcttctccgtttccgtttcctcgttcgaattcgctttttgatctgcgaaaatgagagagtgcatctcgatccacattggtcaggctggtatccaggtcggaaatgcttgctgggagctctactgcctcgagcacggcatcgggcccgatgggcaaatgccaagtgacaagacagttggcggtggtgatgatgctttcaatactttcttcagcgagactggtgctggaaagcacgtgccacgtgcagtgtttg

SEQ ID NO: 34838 - DNA, 255 bp, Glycine max
  Clone ID: 700890636H1
agcaaacgctgccgaattcgttatcgctttgcactagcagctttgaaacccggttcatccgaagcccttcaccgaaccatgtcgaggagaaaggttagagagccaaaggaggaaaatgtgactctgggtccagctgttagagatggtgaacacgtttttggcgttgctcgcatctttgcctccttcaacgacaccttcatccatgtcactgatttgtctggcagggaaacccttgtccgaatcactggtggtatg

SEQ ID NO: 34839 - DNA, 254 bp, Glycine max
  Clone ID: 700890637H1
aaattagccccttaccagccctcaaggaaatcttccgcactgatggtgaaaatgttcttcaatttccaccacctcatgtagctaaagttagtaagtctgggtggatgactgatgaggaatttgctagagaggtgattgccggtgtaaacccaaatgtgatccgtcgtcttcaagaattcccaccaaagagcagacttgatcccacactctatggtgatcaaaccagtagcataacataagaacaattggagatt

SEQ ID NO: 34840 - DNA, 256 bp, Glycine max
  Clone ID: 700890638H1
gtgtacttcctccggtggtaagttcccagatccataggagcacaacaataggggatgacatggctcagtctgctgtcacgatctcgggtgcaagtaccctagaaaccatgtcatctaatgcaaacattgtccagccgaagtatgaagtaaaggcttctttaaatatttcaaaaaatcagaatcaagggaatgttgcccctcagacatacttgaatggtgttgttcagacagactatttggattcatcatcttctac

SEQ ID NO: 34841 - DNA, 101 bp, Glycine max
  Clone ID: 700890639H1
ctctccttcgcgcccacgagtagtaaacttgaactaagacgattttccaagcgtggtgtgcaaaagtgcgctcaccccacacgctctgtctctctctagaa

SEQ ID NO: 34842 - DNA, 252 bp, Glycine max
  Clone ID: 700890640H1
cgaaaatgcggtaggtgagtgtgaaccacaacaaccaccacccaaaggtgacaatggagaaagtttgaaactatttggggtttggttgaagggtcaaaatgggaaagagaattcaattggtaaatgccgcaagagagggcgccaagactaccctattgctgccactgccaaggaattgaagaccctagtctagtacaacatatcatattcttgttaattaattacctcttaagaaacaactattgtagccag

SEQ ID NO: 34843 - DNA, 251 bp, Glycine max
  Clone ID: 700890641H1
agtgtgtgattgtttgttgttgtaactcgttcttcttcttttgttgttctgtgtttgtgtttgttttttctctcacctgaaaatgtcttgctgcggtggtaactgtggttgcggaagctcctgcaagtgcggcaacggctgcggaggctgcaagatgtacccagacttgagctacactgagtcaaccaccaccgagaccttggtcatgggagtggcacctgttaaggctcaatttgagggtgctgaaatgg

SEQ ID NO: 34844 - DNA, 249 bp, Glycine max
  Clone ID: 700890642H1
actgtatctgcgtgtgtttgcgaattgtgcaattttcaagatctgaatcagagaatagataataatggctacaccggaccacctgttcaacctccgcaacaacttgtatctcggggcgtaccaagccgccatcaacagcggcgacgtcaccaacctctcccaagaagactccctcgagcgcgacaccctcgtccaccgctgctacatcgccctcggccagcttcagttcgtcatctccgagatccatga

SEQ ID NO: 34845 - DNA, 244 bp, Glycine max
  Clone ID: 700890644H1
cctgggcacagttgttgtctctgttgcaatttatctgcactctgctgggaagatacaaagataactatggcttctgtcttctgtttttcctatactggatttttttattcattgttgtttagccttgagcaaacgaatacatattagttcactgtaatagtgtgtgtatctcaacattcaacaaggatagaaccaggcttaggttcgattgtctacattatgcttcttgatgcgtgagatgtaa

SEQ ID NO: 34846 - DNA, 242 bp, Glycine max
  Clone ID: 700890645H1
gccagatttatacagaggctgactcgatttttcgcgagttgtgatcactcgcgaggatttggttgagaaggcaaaagggtttgccttcaaaggaatggatgtgtctcagcggattttcgccagtagtagaactgtgcttggaagcagtactaagtttatgttctccatcgcgaattccataatctctggagctgcagaggttttcaattttgtgtcccagtcgatggtatttatttgggttt

SEQ ID NO: 34847 - DNA, 244 bp, Glycine max
  Clone ID: 700890646H1
gttttcctcaagtgcaggatgcaggagatggactgtggtgggctgattcgcgtgccttcgccaaaatgtgatccgttgaagaactttggagtggtgtttcctatgttggaggatattttgagctgtgctagagtgatacaaatggtggtgatggaggatgggtttaaggtgatgtgtatggaggatcctttggcgagggaggttgcggggtatcgccagaatgaggggttttggaatgagttgg

SEQ ID NO: 34848 - DNA, 249 bp, Glycine max
  Clone ID: 700890648H1
ggcaaaggagacagaggacgagaagccagcagaagagagatcagaggagaaaactgaagaagcgaaagaagaagcagaggagcctaaagaaactactgaaacagaatcagcagcagcagcaccaccagcaaccacagaggaagagaacaaaccagctgagtcagttgaaaccccagtagaggttcctgttgagaagactgaagcttagacctatggacagtgtgagtgagaaaaacaagtttaaaaatg

SEQ ID NO: 34849 - DNA, 99 bp, Glycine max
  Clone ID: 700890651H1
gccatcgtcgtcgttgtcgtcgtcgcgaagaaaatcgagcacgatggtgaaagcttcaactgatgcgaacacaagcctgagcatgctgaacgaggacct

SEQ ID NO: 34850 - DNA, 254 bp, Glycine max
  Clone ID: 700890652H1
atcttatcttagctaccccatcacaacaaccacgatactatttctcatactctattaggcaaaaacaccaccaaatgggagaggaaaaggagcagcctaagaatgacaccgagaaaaagcccgaggaggtagcccccaagatagacgacggacccatccctgtcgtttacaaactcgacttgcattgcgagggatgcgtcaagaagtagaaacgcacctgtcgccacttcgaaggtgtggaaaccgttaaggcg

SEQ ID NO: 34851 - DNA, 254 bp, Glycine max
  Clone ID: 700890653H1
gattgtttaattttcattatgtattttacaatcaccatatttcaatctgctataggctattacaaaattgaaatccaaatgtttgaaaatgtgaagagtttccattagttgctcaagttgtcaagttattagaaagaatattgtggtttactccgtataatttgtgcaattgatccttagagatggataaacttgttcctatttggttgctgtgttacagtttgaagatgatgacagaaggtgtcacatggaac

SEQ ID NO: 34852 - DNA, 253 bp, Glycine max
  Clone ID: 700890654H1
aacgtggctggggagtggaaccacacctctggtcaatggaatggagacgctaatgacaaaggtattcaaaccagtgaggattacagattctatgctatttcagctgagtaccctgaattcagcaacaagggtaagacactagtctttcaattttctgttaagcacgaacagaagcttgactgtggtggtggctacatgaagttgctcagtggggatgttgatcagaagaaatttggcggggatactccttaca

SEQ ID NO: 34853 - DNA, 132 bp, Glycine max
  Clone ID: 700890655H1
aagaagatggcttctgtgcatatccaatatgcattccttgtgcttgtgcttgctatggtgatcacattgatgaaccctaccagtgcaacgctctctccccattactatgataaagtttgacctcaggcattg

SEQ ID NO: 34854 - DNA, 120 bp, Glycine max
  Clone ID: 700890656H1
caaaagtttttgaaatgttgtcaccccttcttctatttctatgcctaactcttcctgtggatatgttgtccttcttcaaataccgtaaaaccttcaggaatccaccacttctaccaggtc

SEQ ID NO: 34855 - DNA, 245 bp, Glycine max
  Clone ID: 700890657H1
cactaacctgtgtgccattcacgccaagcgtgtaaccattatgcccaaggatattcagctggcaataaggattcgtggtgagcgtgcttgagttggtggttggaaagatgaagatgattggtggctgcggttggtgtttttgtttttcagattctatgtttattcaatagatggggttgttagggagggtaggttttctgctggtagtagcattaattgggatataggcaaatactgctaagtgt

SEQ ID NO: 34856 - DNA, 243 bp, Glycine max
  Clone ID: 700890661H1
aaaatattattaagatgatcaacattattggagcacttgttctactctttgcatttctcttcctcagttgtgtgtatgcacaagacacaacaacccttgtgcctgcaatcataacttttggtgattctgctgtggatgtagggaacaatgactatcttcccacccttttcaaggctgattaccctccttatgggagggactttgttaaccaccaacctactgggaggttttgcaatggcaaat

SEQ ID NO: 34857 - DNA, 243 bp, Glycine max
  Clone ID: 700890662H1
tattctgcgacgatggtggcacattcgagttcttggggaagggcactcgtcgcgatctcgccctacaccttctccgccatcggcatcgccgtcgctatcggcgtctccgtcctcggcgccgcctgggggatctacatcaccggaagcagcttgatcgccgctgcaatcagggctcctcgaatcacttccaaaaatctcattagtgtaatcttctgtgaagctgttgctatatatggtgttatt

SEQ ID NO: 34858 - DNA, 245 bp, Glycine max
  Clone ID: 700890663H1
ctcgcaacttgttccatttttcttccttcctcattcctcacttccgtcccgacaatggcttcaagtggcgttgcgggaacttccacacccgaattctactacaacgtcgtcgtaatgcgtcacggcgatcgcatcgacaacttcgaacccatgtgggtgtccaccgctacccgaccctgggacccaccccttatccaacagggtcgggtccgagcgttcgccacgggtcgcaagttccgcaacaa

SEQ ID NO: 34859 - DNA, 254 bp, Glycine max
  Clone ID: 700890667H1
gtttgttgttgtaactcgttcttcttcttttgttgttctgtgtttgtgcttgttttttctctcacctgaaaatgtcttgctgcggtggtaactgtggttgcggaagctcctgcaagtgcggcaacggctgcggaggctgcaagatgtacccagacttgagctacactgagtcaaccaccaccgagaccttggtcatgggagtggcacctgttaaggctcaatttgagggtgctgaaatgggtgtgcccgctgag

SEQ ID NO: 34860 - DNA, 255 bp, Glycine max
  Clone ID: 700890668H1
acccattgatccctttcgccacatcaacatagttctcaaccctaacggaaccctaaattcgttgccccatattcccagcaccgcaccctcttccgaccccactctcccagttctcaccaaagacatcaccatcaaccaacaaaacaacacatggctccgcttattcctcccccgaatagcactatccccaaaccctaagaagctacctctcatcgttttcttccacggcagcggcttcatcgtaaccagcgccgc

SEQ ID NO: 34861 - DNA, 253 bp, Glycine max
  Clone ID: 700890669H1
gaagaatgtcacctagaatcatgctattattagttgttttttttgtgtcttaaaggaatcccttatcccttaccttttcatattgtgtgcagaggctctttctttcctcattaccaaagcagtgcaaaatcaatccctccatggagttaaaatctgtcccgtagctccaagtatttcccatcttctattcgcggatgacaacatcatttttacgcgttccactcacgaggaggcttgccaaatagaccatctt

SEQ ID NO: 34862 - DNA, 129 bp, Glycine max
  Clone ID: 700890670H1
ggagacgctactggagtcgtctctgctgcctgcggacctgcgtctagactgacccaccgcgctcaagctcggctgtcttatgcaggggagatgctgtcctgccgtctccagtgcgcgctggcctcgctc

SEQ ID NO: 34863 - DNA, 260 bp, Glycine max
  Clone ID: 700890633H1
ctctggccaccgaaatgggaaggctagtttcagaaggttacgttctcaccgttttggctccaaacgacgaagccatggcgaagttaacgacggatcagttgagcgaacctggcgcaccggaacagataatgtattatcacattattcctgagtatcaaaccgaagagagtatgtacaatacggttagaaggttcggtaaggttagctacgatacactgcggttaccgcacaaggttctggctcaagagtctgacggctcc

SEQ ID NO: 34864 - DNA, 258 bp, Glycine max
  Clone ID: 700890604H1
ctttgataatctgcttaataaaggtttgagttaaaggattacgatgatttatgcagattacccaggtgaaactccaattcttattggaacctatggaactatatctaagcgtcacacttgaagttttgtgctatttacaaagaaatctcccaatatttgttgggtgttgttagttattggtacttttaatactcttattggaagctgagaagattgggaagtggaggaattggggaagggggctcgtgcttatatttg

SEQ ID NO: 34865 - DNA, 262 bp, Glycine max
  Clone ID: 700890605H1
gaactcatcacttactggaagccttgttgtgagtaagagaaaaggcttcctgcaccgagcacaccaacttgatacctctgattcttactttgcttagaattccacagagtatggagactgttcatttcaatcactccccacctttggaattcaagggtttgagcacggaggaggaagactcattgctaggggcagtggaaatatggaggtacacgacatgcttcacggactccggggccttgaaagctgtcatagagcttcg

SEQ ID NO: 34866 - DNA, 259 bp, Glycine max
  Clone ID: 700890606H1
ctagtgtggtctgcaactatgagcaaggattatctaatcatactttctctccttctttccacggtgcttgcaactgcaagttcttcttcttcttcttcctccctctatcttgggaagggcttctcccatcgcaaattgtctcccagttatcacattcacaaaaccattgacgaatcctatgcagttatcttcgatgctggtagcacgggaagccgtgtacatgtctatcgttttaaccaacaattagatctccttcgca

SEQ ID NO: 34867 - DNA, 258 bp, Glycine max
  Clone ID: 700890607H1
gagctgaagaagcctgttgtggagaaagaagctccagggcatgccatatgagggcatgcacgtacggcctcggaggggaaccagaaaattatgttaacaaaataatctggaaccctaatgtatcagtgtcatcatcagtgtgtagtttaagctagctttgctatggttacgttctttgagatgagagtcttgatgaacagtaccattctgatgtattgctttccttgaaagttaatgcatgcttcttatcttctgtct

SEQ ID NO: 34868 - DNA, 244 bp, Glycine max
  Clone ID: 700890608H1
ctccagttggattagcagttttagtacgcaatgcagtttcatgtggacagttgtcttcaattcttgattcttcagctggagaatggccctcagctgtggcaatgcaattggttgaactgggactgcaatgctgtcaacaataccatagagacagaccagagttaacacctacacttgtgagagaattggagcagttgcatgcttcagaagagcgacctgtaccatcttttttctcatgtccaat

SEQ ID NO: 34869 - DNA, 255 bp, Glycine max
  Clone ID: 700890609H1
ctcgagcgcgctaaacgacattacctcctcaaccggtgaacggcagaagaaattaacgcgagaaaaccgaaatccgcactttaccgcaccctgcgactccgcgtgggtttggcgaaaccttctagaattttcttccatggaggttatcagagttctaacggcggcgatcacggtggcggttctcgcggcggcgcttccggcggacgccgctgacgacaaccgagtattcgcgccgtgttcggacacgcgagtgca

SEQ ID NO: 34870 - DNA, 254 bp, Glycine max
  Clone ID: 700890610H1
ttggattcaatatgcagctgagttttgtggatcttgctggttcagaaagagtgaaaaagtcaggttctaccgggagtcagcttaaggtagctcaaagcattaacaagtcattatcagcacttggagatgttattagttctttgtcttctggtggtcaacacacaccatacaggaatcacaagttaaccatgttgatgagtgattcacttggtggtaatgccaaaactctcatgtttgtgaatgtttctccggca

SEQ ID NO: 34871 - DNA, 254 bp, Glycine max
  Clone ID: 700890611H1
gacccaacccctctcttttcttttcttcagttcggtggaaggagccgtagcagcagcggaagctctagcttgggcagcgaatcacaatggcgagaggattgaagaagcatttgaagaggcttaatgcgccaaagcattggatgcttgacaaactgggtggtgcatttgctcctaagccctcatctggaccacacaaatccagggaatgcctgccactcatactcattttgcgaaaccggctgaagtatgctctg

SEQ ID NO: 34872 - DNA, 242 bp, Glycine max
  Clone ID: 700890612H1
gtagtgctaggtcttgaacccgctaaagggtcgtcgaggctggagtgagttgaagtgggagcgtggaaaacagaaaaggggtggtcgtcgcattaaatttgtcaaaaagagaggggttttatcttcttattactttgtgtgtttttatgttttttgtggggcttctgtgaacagtggttgctttttggaagcttattttggaagcaatttactcttccccttttgaacgtgattgtatttag

SEQ ID NO: 34873 - DNA, 224 bp, Glycine max
  Clone ID: 700890613H1
tgattgaacaaaatgtacacctcgaggaagaaaattcacaaggataaggatgccgagcccactgaatttgaggagacagttgcacagtacttgtttgacttggagaacaccaatcaggatctgaaaagtgacttgaaagatctctacataaatcaagcaattcaaatggatgtggctggtaatcgcaaggctgtagtcatctatgtgcccttcagattgaggaa

SEQ ID NO: 34874 - DNA, 253 bp, Glycine max
  Clone ID: 700890615H1
ctcgtcgtccaagaaagaagcaccacaaattaattctcgtttcccattcccatccccatgccaactattttgcataggattttccttctttacaacctcgtacactcattcctcctctgtctggtccccaagaaggtgcgtcccttcctccccccttcttggttccaaaccaaaaccatcactgcgccttcttcttcttcttcttcttcttccagtgcccgcatcatcaagagaacaacaatggaccccaacg

SEQ ID NO: 34875 - DNA, 250 bp, Glycine max
  Clone ID: 700890616H1
ctgcagccattcctttgaataaacaattgtacacgctgagctatgtttgtgtaacatctggagcagcagcattacttttttcagccttctatattatggttgatatttggggtttaacattcttgttcttgcctttgaaatggattggcatgaatgccatgcttgtttatgtcatggcagctgagggaatcttcgcaggattcattaatgggtggtattatggtgaccctcataacacgctggtctattg

SEQ ID NO: 34876 - DNA, 259 bp, Glycine max
  Clone ID: 700890617H1
attttctctgctgttcccccaatgtttcctacaccgccaccaccaccagcaccatggaaaccataagcgcatcatgccattggttatttctttctagcaagtatcccagatgatttgagtgcaccggtaaccttcgttgttttgtatcaactgaaagatcaaggtaattttgcagaaaaaaagctttgagaaatagaagaaatggagcttggcctactgaatatagctgcctggggccaatgatcgactcaagatttag

SEQ ID NO: 34877 - DNA, 241 bp, Glycine max
  Clone ID: 700890618H1
aaaaaaaacaagttagaaggagactccacaccagtaggccttatcaggaaaggcttttgaatatggctgaggctcggagggagattgtcactgccttgaaatttcacagagcagctatgaaagaagcaagtgaacagaagcagcaacagcaacaagcccaagaacagcagcaaaggccatcagtatcactccagccatcccagttcccaagttttaaccaagatggaaaatttaggtctag

SEQ ID NO: 34878 - DNA, 102 bp, Glycine max
  Clone ID: 700890619H1
ctcgagccgaatcggctcgagtgccctggtgctttctccactgactagaccgagtctctgactctgcctctgcaagcttattacttggctttgtttgattga

SEQ ID NO: 34879 - DNA, 257 bp, Glycine max
  Clone ID: 700890620H1
gggtgattgccatcaggcagggagagatccgaggcactcgcttcgtgacaccatttcttgaagggcttgttaagattgttgcaagggttacatatgtcttggcagaagagcctgatgccattgcactctgccgtgatcacaatcttgccgctctctttattgatctgcttcagtccaatggacttgataatgtacagatggtttctgctacagctctggagaatttatcccaagaatcgaaaaacttgaccagatta

SEQ ID NO: 34880 - DNA, 259 bp, Glycine max
  Clone ID: 700890621H1
agaaaaaggagctccccagaatcaactcatgatcatggatctgctattaaaattcgacttccgttgaggaagcatagagaacctgaagaattgaaatccaaatcaaaatttcaagcggggtgttcttctggaagtgtgggggcaactgcaaattccttcactaaaactacacttggaagtgatcgtcagtcacaatgtctcaggattacagagctgaatcgggtacttggaaactctgattcaagacatggcaaagcaa

SEQ ID NO: 34881 - DNA, 242 bp, Glycine max
  Clone ID: 700890623H1
ctacaacgcctcgaatccacacagttctactctacgctctaaaacctctctctctctctctctcgatctatcatggctttgcccaatcagcaaaccgtggattaccctagtttcaaactcgtcatcgtcggtgacggcggtacaggagagacaacgttcgtgaaaaggcatcttaccggtgaattcgagaaaatatacgaagcgaccattagagtggaggttcacccattggatttcttcac

SEQ ID NO: 34882 - DNA, 242 bp, Glycine max
  Clone ID: 700890625H1
tgacgtccatggccactttcttcgcacaaacctccttcccctcccactctctctccaaaaccttcgatacccatttcgcccctgccccgaaagtcaacgtctttgtgaacttcagggcgaggaggcacgttggggtgcgagtttcgaacgcgctgatcgcaccagatggacggaagctcgtggagcttgtggtgacggatttttagagggatttgacgaagggtgaggctctttcgttgccg

SEQ ID NO: 34883 - DNA, 92 bp, Glycine max
  Clone ID: 700890626H1
gatgagatagcaaaacttaaggatgaaattaagatcatgtctgctcactggaagctcaagactaaggaattagagtcacagttggagaaaca

SEQ ID NO: 34884 - DNA, 250 bp, Glycine max
  Clone ID: 700890627H1
gatttgtgaaaattttggctggcaactagtagcaaccttctttaaacaaagcagaaggaagaagaatcgcgtttcgattctcacgacggaagaaagcacggcgcagctcaaaaaaccaaatggaagcacaaagctctcagcatacacaagttattgagatcagtggtgattttcctgatggtggaaggaagatttgtggggaagcaccgtgtgggtttgcagatgctggatccatctctaaggattctga

SEQ ID NO: 34885 - DNA, 240 bp, Glycine max
  Clone ID: 700890628H1
ctctctaactcaatctctctctctctctctctctgaattttctcctctctccgattccttttattaattggagtttactcgctccttttcctttccctgaaaacatttcctcgtcgtattgatgtcggaaaagggccggccacttccaaaatttggtgaatgggatgtcaatgatccaacctcagctgaggggttcacagtgatttttaataaggccagggatgagaaaaagacaggtgg

SEQ ID NO: 34886 - DNA, 247 bp, Glycine max
  Clone ID: 700890629H1
attgttcctacccaaagccttcaacgccaaatgatggaacgtgtggagttggaagggaagaaccccagcttattttggcttctgcggacactgaggaaattgttgatgcttaaattaagtttcaaattatataccttttcttttctgttttgtctctgcttatgatttgaattttagaataaatttttaaaaatgtgaatgatgaaggagacaatacctgttgttacttctttgaatttggactcac

SEQ ID NO: 34887 - DNA, 248 bp, Glycine max
  Clone ID: 700890630H1
ctctttgccacactgatgtttacttctgggaagccaagggccaaactccattgtttcctcgtatatttggtcatgaagctggagggattgtggagagcgtatgtgagggtgtgactcatctcaaaccaggggaccatgccctcccagtgtttaccggggagtgtggagaatgccctcattgcaagtcagaggagagcaacatgtgtgatcttctgtcattcaacactgataggggtgtcatgatccat

SEQ ID NO: 34888 - DNA, 250 bp, Glycine max
  Clone ID: 700890631H1
agcacagcgaatcggctgagaaattgcagtttgacctagagaagccgagcgagagagcgagggagcatggaggagggaaaattgagagagctgaagcaattcatagagatatgcaagtccaatccctcacttctccacaatccatctctttcattcttcaagacttatcttctcagcctcggtgctcgcatccctccccaacccaaaacggaaccaggtgattttgatgacaagtcagatcctcctttat

SEQ ID NO: 34889 - DNA, 207 bp, Glycine max
  Clone ID: 700890632H1
aacaaaaatgtgaaattcttttgatgtgttaagggaaaacgaataagttgtgactcttgtcacttggggtttgtaatggtaaaaaacggtttggttaatagtcttaatgttgttgtcatgtttggttggttggtttggaatgagcagtcacgggttttgccgtctgagagaatattcaaagcaatatatagctggtaattaatattt

SEQ ID NO: 34890 - DNA, 270 bp, Glycine max
  Clone ID: 700890601H1
cggctcgagctccatctttcccgaagtttgctatcatggctgggttggcgccagaaggatcacaatttgatgctcgtcaatatgatgctaagatgaatgagttacttggaactgatgggcaagatttttttacttcttatgacgaatttgtgaaagctttgatgctatgggattgcaggagaaccttctgaggggtatttatgcatatggttttgagaagccctctgcaattcaacaaagggggattgttcctttctgcaaggggcttga

SEQ ID NO: 34891 - DNA, 130 bp, Glycine max
  Clone ID: 700890563H1
aagcaatggacgccttcaattccttcttcgattcaagaaaccgatggaattacgatactctcaaaaacttccgtcagatttctccggtcgtgcagaatcacctgaagcaggtttattttactctgtgttt

SEQ ID NO: 34892 - DNA, 130 bp, Glycine max
  Clone ID: 700890564H1
tcggctcgagatttctcagtctctgtgtttgcggctgaggattccgaacgagtgaccttcttcgtttctcgcaaagtttaagtaatcatgggtaaggaaaaggttcacatcaacattgtcgtcattggac

SEQ ID NO: 34893 - DNA, 244 bp, Glycine max
  Clone ID: 700890565H1
ctattcttctcagtctcagatcagaaccttagccatggcagcgttgcagaagatcaaggtcgccaaccccatcgtcgagatggacggagatgaaatgactagggttatctggaagtcaatcaaggacaagctcattttgcccttcttggagttggacatcaagtattatgacttaggccttccttaccgtgatgagaccgatgatacagttacaattgaaagtgcggaacaactctcaagtata

SEQ ID NO: 34894 - DNA, 165 bp, Glycine max
  Clone ID: 700890566H1
gttggcacagggtgtgtattcaggaggcaagctctatatggctacaatcctcccaagggtcccaagcgtccagaaatggtaagctgtgactgctgcccatgtttcggaaagcgcaagaaggttaagtatgaacggaatgatgcaaatggagaggcagcaaacctt

SEQ ID NO: 34895 - DNA, 239 bp, Glycine max
  Clone ID: 700890567H1
tacccctttatttttttcgttttttttttatggaaaaaaatattgtagcaatttcgtcgtagaaacaaaattcccctattttcggcacgccgttgttgaatttccaatctgtgattttttttcttcttctatttatacgtgataattccaaaaagcctaacgcgagagattcatcagcttttcaattattcctcgaattattttgaaggaatcatccaaactgccttaagatatcatca

SEQ ID NO: 34896 - DNA, 242 bp, Glycine max
  Clone ID: 700890568H1
ccaaattccattttccaattcaaaaccctaactccgttcgaagcaccaaatcgtgatggcaccaaaggcagagaagaagccagcagagaagaagcctgtggaggagaagaaatcgacggtgggagacaaggctccggcggagaagaagccaaaggccggaaagaagcttccgaaggagggaggcgccggcggagaaggtaagaagaagaagagaaacaagaagagcgtggagacatacaaga

SEQ ID NO: 34897 - DNA, 180 bp, Glycine max
  Clone ID: 700890569H1
gtcgtttgtggttattgagtcctgagtgatcttgtcatccgacctttgccatgacaggtgcgcttgcatggcaggtcaaaaaatgttaataaaaaaagttttattggtttggggagagatcgcacgggggttgcccggggtctcttcctcttgtgtggtgtggtgtttgctgtgctctcc

SEQ ID NO: 34898 - DNA, 242 bp, Glycine max
  Clone ID: 700890570H1
ctgaaaccatgcctgtcacaaacacaacaacacctacagtggcagaacacatcaaatggagaaggcccagaaaccaattcaaccaccaccatcatcaccatcaccaccccatttcagaaacagatccaaaccctcaaatcccttccataatccaatccactaggtgcaagtccaccatttcctccctgctcctctccactttctccaacaacacctccaataatgccactgcccacagcaag

SEQ ID NO: 34899 - DNA, 240 bp, Glycine max
  Clone ID: 700890571H1
ctgacaccgtggttgaaccctacaatgccactctctctgttcatcaactagttgagaatgcggatgaatgcatggtccttgataacgaggcactctatgatatctgtttccgtacactcaagctcacaaatccaagttttggtgatctgaaccacttgatctcaacaacaatgagcggggtaacgtgctgcctccgcttccccgggcagctgaactccgacctccgcaaacacgccgtaa

SEQ ID NO: 34900 - DNA, 242 bp, Glycine max
  Clone ID: 700890572H1
ggcatcgtctcacctaccgcaagaggcacagctatgctaccaaatccaaccaacacagggtcgtcaaaacccctggtgggaagctcgtttatcagaccaccaagaagagggccagctggcccaaggtgccccgtcactggcaagaggattcaggggattccacacttgaagcctgcagagtacaagagatcaaggttacccagaaaccgtaggactgtcaaccgtgcactatgcggagtttt

SEQ ID NO: 34901 - DNA, 240 bp, Glycine max
  Clone ID: 700890573H1
atttcatgtagccgtaactttcaaaactaggttcttgatcggcggtggtcaattttcattgctgtttgtttttgatgagtactgttttttgttttgatggtaagaagagtctgagatatttcgaatttcacaagcagctatagggttttagtccatttcctttgctgctgagggatgttttaagttgcatttaatttataacgaagttttataaaaaaaaaaaaaaaaaaaaaggggggc

SEQ ID NO: 34902 - DNA, 151 bp, Glycine max
  Clone ID: 700890574H1
attcaccaatggatcgcaacggtgttctctctcttgcattcatctgcattgtagtcgccggcgtcggatgccagtctcccgccgcagcgccctcgaacactccggcaacccccgccgcagcgactcccgcccaagcaccttccacacaaca

SEQ ID NO: 34903 - DNA, 190 bp, Glycine max
  Clone ID: 700890575H1
ctcgctttcttcttttcctttgtcaattgagaattgttcctctcttccattcgtgtacccgcaaaagaatcatgacgagttcctctgctgccgctcgcaagaatctgagtaagattgcctgcaataggctccagaaagagctcgtggagtggcaggctcaatccccaacctgcttcaagcacaaaggtac

SEQ ID NO: 34904 - DNA, 181 bp, Glycine max
  Clone ID: 700890576H1
tctacctctaatctacgaatacgaataagatgggcagcactagtgcgagtgccctcacgctatcgtcgatggtcagcgagtccccgaattgcaattgctcatcgatgacgcttatgaagaagacggcgatggcgatagcgatggctcctttgcacatgcaactaaaagcaaaagcaaaagg

SEQ ID NO: 34905 - DNA, 240 bp, Glycine max
  Clone ID: 700890577H1
ctcaactcttcttctattctgattctgatttgtcacacacacacacgcagaaaggttgaaagtagagggacttgattcagtggaggtggagagagatggctaacaacgcagctgcttgtgctgagagagcaactagtgacatgctcattggtcctgactgggcaatcaacatagagttgtgtgatatcattaatatggaccctgggcaagcaaaggagtgctttaagacactcaagaagc

SEQ ID NO: 34906 - DNA, 191 bp, Glycine max
  unsure (1)..(191): unsure at all n locations
  Clone ID: 700890578H1
atgggaagcgtggtagaaagcagagaatggtacttagctgcatattcccctcacggtgtaccaaattccgataatctgaaactccgcaccgtcgctctctcattatcctctgattcaatccccgacggccacgtgctcctccagagtcgtcttcgcgtcgcagaccccctccattgcaccagacntaccgg

SEQ ID NO: 34907 - DNA, 220 bp, Glycine max
  unsure (1)..(220): unsure at all n locations
  Clone ID: 700890579H1
aaaaaatgatataagaattcacaaaaatgtttgatctgttattttaatagttattgcaatatatttttattctcttacatccacataggatggaactataatacggggacaaaatgaaatttctcatccaaccagtggaacaatggagcttataagaagctttcagctccagcacttcctcgaaaactaacgggagntctacagtctatcgagggaaaaa

SEQ ID NO: 34908 - DNA, 115 bp, Glycine max
  Clone ID: 700890580H1
tttttaatcgtcttcgtatttttgggctttctgagaagtgcgtgtgttgatggggggtcaaaattctaaggaggaaagttggaggcagagttcatctgtcaggtcttcttcttct

SEQ ID NO: 34909 - DNA, 242 bp, Glycine max
  Clone ID: 700890581H1
ccaaaacctggttcttctgttgccatttttggacttggagctgttggccttgctgctgctgaaggggcaaggatttctggtgcatcaagaattattggggttgatttagtttctagcagatttgaagaagctaagaagtttggggtcaatgaatttgtgaacccaaaagaccatgacaagcctgtacaagaggtgattgctgcaatgacgaatgggggtgtggatcgtgctgttgaatgtac

SEQ ID NO: 34910 - DNA, 243 bp, Glycine max
  Clone ID: 700890582H1
ctccatggctctctcttccccatccttggctggcaaggccgtgaagctgggcccatcagcccccgaagtcgggagggtcagcatgaggaagaccgtcaccaagcaggcctcctccggaagcccatggtacggcccagaccgcgtcaagtacttgggcccattctctggcgagcccccgtcctacctcactggcgagttcccaggtgactacggctgggacactgctgggcattcggccgaccc

SEQ ID NO: 34911 - DNA, 241 bp, Glycine max
  Clone ID: 700890583H1
caccaagctctaggactctcaactgtcagtgcagcttggggcataggtttaatcattggcccagcattgggaggctatttagctcagcccgtagagaagtacccacatatatttccaaaggattccttctgggataagtttccttacttcttgcccaactttataatatctgcagttgcatttgtagtagttattggctgtatctggattccggaaacacttcacaaccacaaatgtagaa

SEQ ID NO: 34912 - DNA, 191 bp, Glycine max
  Clone ID: 700890584H1
gagaatccgaggcgaagagaagagaaaaattaagatggaggggaaggagcaggatgtgtcgctgggagcgaacaagttcccggagagacagccgattgggacggcggcgcagagccaagacgacggcaaggactaccaggagccggcgccggcgccactggttgacccgacggagtttacgtcatggtcct

SEQ ID NO: 34913 - DNA, 238 bp, Glycine max
  Clone ID: 700890587H1
cggctcgaggcaacatcttctccacccaggaccatgccgccgccgctattgcccgcgacagtgccgccgtcttcgcctggaagggtgagaccctccaggagtactggtggtgcaccgagcgcgccctcgactggggccccggtggtggacccgacctcatcgtcgacgacggtggtgacgctacccttctcatccacgaaggcgtcaaggccgaggagctctatgagaagaccggcga

SEQ ID NO: 34914 - DNA, 218 bp, Glycine max
  Clone ID: 700890588H1
aagttttcatgttcctagcagcagcagcaatggaggccgtattggaagcgatctttcgttatcaatgtccgatcaacaacaatggcaagccgggcctccacatttgttagcaactgctgcagcatcatcaggattcccacagcaaattagaccctcccaaggttggctgcagaaaaatgggttccactctctcatgagggtctcatgagctacctttt

SEQ ID NO: 34915 - DNA, 143 bp, Glycine max
  Clone ID: 700890589H1
tcagatccaaccaattccatcgtcaccaggaacacaccccttttgcctattcagctttacctctcactcttcaactgtgtctctgataaggttcaaccctttgtttgctctctatgccattccaacagattttgatgattctg

SEQ ID NO: 34916 - DNA, 183 bp, Glycine max
  Clone ID: 700890562H1
cgagtctctcccacagcgacaccatccatcttctttcacattttccactacgttagggttcgtcttcatttcgaattgaaggattcaacaacttagcaaaccacgccatggcaactctgcaatctctgccaccgttcttccggtcagtaactccacccccaaacttccacgtgttctcagcca

SEQ ID NO: 34917 - DNA, 95 bp, Glycine max
  Clone ID: 700890590H1
agaatatcgaagtcttgtgtgttatattttgcttttatttcttttctctgagaaccttgtcatcattggcatttgagaaaaaaaaaatcatgtat

SEQ ID NO: 34918 - DNA, 127 bp, Glycine max
  Clone ID: 700890591H1
cactcatcagctgaaactatgtgattttgggagtgcaaaagtgttggtgaaaggagaacctaatgtttcttacatctgttcaagatactaccgtgctccggaacttatatttggggccaccgaatat

SEQ ID NO: 34919 - DNA, 183 bp, Glycine max
  Clone ID: 700890592H1
aaatttcttaccttacataccggttgcgtgaaagacgcgccactcatccttttccgattgggcgagaggcatcagatcagagcagggtcccctgatatctacatattctcattattctgtccagaaactaactacactgacgtttttgttctcgtgtcaagtttctaaatcaccaccacaccc

SEQ ID NO: 34920 - DNA, 191 bp, Glycine max
  Clone ID: 700890593H1
tacattctttatacagccccaaatattgcagccagggctcaagaagagttagacaattcaatctttcaaggaagattattgcatgtaatgccagccttacaaagacattctgataatcaagagaacaatgttttgaaggaccaaagctcgaaaaccctcaaacaacagagacaggaaaaaaggcaagcaga

SEQ ID NO: 34921 - DNA, 119 bp, Glycine max
  Clone ID: 700890595H1
ctctctattctaagtttccgcagccaccactcagggccagcgagtgatgatcgcttcgccgcagtaatcgccggaaacgaattcgccgtttccctgccgagatctctcaatctccgacg

SEQ ID NO: 34922 - DNA, 241 bp, Glycine max
  Clone ID: 700890596H1
aaacgattacgctttgcgtcaacaactgcggcgtcaccggaaaccctgccacgaataacatgtgccagaagtgcttcactgcctctaccgccaccacttccggcgccggaggtccggacatagctcgtcggcgaccagaatcggcggctctgcgcgacctcagaagagatctgttcctgtagagcccacgtcggtggtggatcctcctcgtcggaccagacgacgccgcggatgtgaacgc

SEQ ID NO: 34923 - DNA, 157 bp, Glycine max
  Clone ID: 700890527H1
cagcaagagagaggaaagcagaatgaagaaggcaagggcgttgagcgtggcagtgaacgtgttgtgtttggccatagtttgcagtgcgatcgagtcaccgcaacacacagtagtacactccgagtccgatttcgagatcaggctctatcgtacctct

SEQ ID NO: 34924 - DNA, 161 bp, Glycine max
  Clone ID: 700890528H1
ctcggcgaatggatagtcattattgctatataatttatggattttggtgtgttttttggtctttgtatgatcctgaattctcatatgaatgtttccagctaattgtctaataagttatcatatcattctaaagtcaactgcactagaagcgcttcgaccaa

SEQ ID NO: 34925 - DNA, 195 bp, Glycine max
  Clone ID: 700890529H1
accttccaactcgccctcgactcacttccttgtccgattccgccaacgaggccagtgaatcagatctatctgcttcttcgtcatggccaccggacaactattctcccgcactacacaggctttgttttacaactataagcaacttcccatacagcggatgcttgagtttgacttccgtttcggcagggaaacacc

SEQ ID NO: 34926 - DNA, 169 bp, Glycine max
  unsure (1)..(169): unsure at all n locations
  Clone ID: 700890530H1
gcaggaatgatccgtccagcaattgcaacctcgactgccatggcgactggtcttgtctgcctggagctgtacaaagttttggatggagggcacaaagttgaagactacagaaacacatttgctaacttggcactgcgctctctttcaantgcctaaccagnttcaccga

SEQ ID NO: 34927 - DNA, 133 bp, Glycine max
  Clone ID: 700890531H1
cactcacaaaccaggtagtatatctgacgaaagcaacggtgatgttgctgttgatcaataccaccggtatctggaggatattgatctgatgggagctataaaagtcaatagctaccggttttcaatatcatgg

SEQ ID NO: 34928 - DNA, 136 bp, Glycine max
  unsure (1)..(136): unsure at all n locations
  Clone ID: 700890532H1
gccagtcttggtcaagcatcttctggtgaaactcgggaacatctgtatcataattttgagactgatcctaacagtggtagtcttggttcaaaaactaaggatcttgcttatgcagtcaagccgantggccaaaaca

SEQ ID NO: 34929 - DNA, 224 bp, Glycine max
  Clone ID: 700890534H1
ctctattgttggttgttgctgacactcttcatagtcgcaaagtatgtgactagcagtagcatgtgagtgaaggagcctgcagtttttttttatcgtactgtactatgtttgttatgtaatggtatcatggtaagctgaccaaagtgacggatttgttccatcactgccttcagggaaagaagttaactcatagcaggtccatacaaacatgatgactccaaact

SEQ ID NO: 34930 - DNA, 229 bp, Glycine max
  Clone ID: 700890535H1
atcacattgcccataaagctgcagtagatctccaatcagatcatgatctcttactgaaaagctcaactcagcaatgtgtatcatcagatgcatttggagggccagcagaaagtaatgctgcaaactatggtgtggatggaaatgcagcggagagtgatcatgggagcaataatggacatgatggaagcaacaccttgacaatcagaatgataaatatggaaatggcaat

SEQ ID NO: 34931 - DNA, 235 bp, Glycine max
  Clone ID: 700890536H1
cggctcgagaatgccatcatcaccgcccacgaggtcctcctcctcgactctcgcgacgcctccgtcacgcccttccttcaggagctccacgccaggatcgtccgcgaccaccaccagactctggccgatgtcaaccccaaccctgacgacgccatcaagattgtccccttcgagttcgtagcccttgaggcctgtctggaggtcgcttgtagcttcttcgaaaacgaggctaaga

SEQ ID NO: 34932 - DNA, 238 bp, Glycine max
  unsure (1)..(238): unsure at all n locations
  Clone ID: 700890537H1
aaactgcaggcgtaacaaaagttgcgtaccatactctgattcattagtgaagaaaaatggcaaccatcatcgccggcatcccaactacatcgatcactcgcgcaggtcttgtgctcaaacgacctgttggagcctcgtcctctaccgttcttggattgccagcaatggctaaggcagggaaagtgaggatgctcatggaggaaaagccgtcaagcagcgcaaactatgggantggggc

SEQ ID NO: 34933 - DNA, 241 bp, Glycine max
  Clone ID: 700890538H1
attgtttgttgttgtaactcgttcttcttcttttgttgttctgtgtttgtgtttgttttttctctcacctgaaaatgtcttgctgcggtggtaactgtggttgcggaagctcctgcaagtgcggcaacggctgcggaggctgcaagatgtacccagacttgagctacactgagtcaaccaccaccgagaccttggtcatgggagtggcacctgttaaggctcaatttgagggtgctgaaat

SEQ ID NO: 34934 - DNA, 243 bp, Glycine max
  Clone ID: 700890539H1
gtcatgctgatgattctgttgttccgcaaatggattgggattggaggaagggttgtgagtcgttgagtaattggcaaagagttgagaagactgaagccttttctgcccagctattggatgaacgagagccgcattgcactggagattcattggtggtgtccactgaccttcaatccaataaacaggaggaggatcaatccgaggattcatcagattctggtagtcagcaatccaatgaacagc

SEQ ID NO: 34935 - DNA, 242 bp, Glycine max
  Clone ID: 700890540H1
tgcttttttctttttgaaccacaaaatggccgacgatagcacagctacctgcatcgacatcctccttgccatcatcctccctcctctcggtgtcttcctcaagtatggatgcaaggtagagttctggatctgtttggtgcttactctttttggttacattcctggaattatctatgctgtctatgctatcaccaagtgatcatattcatcacctcttgtagacaatgaataatttgtcaaag

SEQ ID NO: 34936 - DNA, 121 bp, Glycine max
  Clone ID: 700890541H1
ctagtactagatcgcgggcggccgccctcgtagatccgacacatatagggaaaatgctaaagtcgtttctatggatgactacgaagatgttcctgcctatgatgagttagccttgaaaaag

SEQ ID NO: 34937 - DNA, 154 bp, Glycine max
  Clone ID: 700890542H1
tgattattgtgttattaaggaatgatttctaacattacccagcaaaccccaaacagtttcttctgtgaactcaaaggttaatcaagaaatagatgagagtaatactatcttgcctcaagtgactgagaaacaaatttctactacccctccacct

SEQ ID NO: 34938 - DNA, 129 bp, Glycine max
  Clone ID: 700890543H1
acaatttgggcatgaataatatctgtccacctcaatccacctttggacttgaagtttcccagtcccaaaagtagccatcaagtggattccagttttcacctattggttctagccagcttggtagtgctc

SEQ ID NO: 34939 - DNA, 161 bp, Glycine max
  Clone ID: 700890544H1
caatttgatactaccaaaaatcgatttttggctgctggtgatgatttctccatcaaattctgggatatggataatgttcagcttttgactactgttgatgctgatgggggtctccctgcgagcccacgcattcgcttcaacaaggatggaacacttttagc

SEQ ID NO: 34940 - DNA, 188 bp, Glycine max
  Clone ID: 700890545H1
attcagcactgacgaaagcatttctcctaaaaaacctacctcaatacctgaggtagcaaagcagcgtgaactgagtgggactatgcaaagtgattcggacacaaagagtaagaagcaaatatcaaatgccaagaccaaggagctcagtagaaatgacatatttggccctcctcctgaaatcgtgcccc

SEQ ID NO: 34941 - DNA, 163 bp, Glycine max
  Clone ID: 700890546H1
gcaagttcaaccatgttgcatgaagttaacagtcaaagaagcaaatcaactgagaacttagtgagatacatgtgatcagtctatagacatgaagcatgacaacctggcagaaaacttggaaaaatcggatgttactcaaggcgtcgcagaagcatccatcacc

SEQ ID NO: 34942 - DNA, 182 bp, Glycine max
  Clone ID: 700890547H1
aacgattcaagatatttcaacaggacaacctgggacgccgtttgattacggtgccggacacgtcgatcccgtggccgctcttgatcctggtctcgtctacgatgccaacgtggacgattacttagggtttttctgcgcactaaactactcgtcatttaaaccaagccttgctcgaggaggga

SEQ ID NO: 34943 - DNA, 121 bp, Glycine max
  Clone ID: 700890548H1
caattttgaatctaattggagatttgatttgtcagcttgtgatagaccaagtgccgtcactggatttcaagaggacatttgtctttacttttcttggttttgctttagtgggtccaacact

SEQ ID NO: 34944 - DNA, 243 bp, Glycine max
  Clone ID: 700890549H1
gtttgttgttgtaactcgttcttcttcttttgttgttctgtgtttgtgtttgttttttctctcacctgaaaatgtcttgctgcggtggtaactgtggttgcggaagctcctgcaagtgcggcaacggctgcggaggctgcaagatgtacccagacttgagctacactgagtcaaccaccaccgagaccttggtcatgggagtggcacctgttaaggctcaatttgagggtgctgaaatgggtg

SEQ ID NO: 34945 - DNA, 194 bp, Glycine max
  Clone ID: 700890550H1
aagaactgtcatttggatgggaaaaagacaggaaactgtggaagatgtcccctgtggtaacactgttgctatggttggtttggatcagttcataacaaagaatgctactttgactaatgaaaaggaagttgatgcccatcccattcgagctatgaagttttctgtctcacctgttgttcgtgttgctgttcaat

SEQ ID NO: 34946 - DNA, 193 bp, Glycine max
  Clone ID: 700890551H1
ataacaatagcgcaaacaaccacaccctcccaaccgacatcaccaagtcatcacaatcacacttaccaatcttgaccaagctccatgctggttactttttcatatgcctttcctttggtgcacaagctttgctctggaagagtttgagtaaacacaacaaggactcacaaactctctggcatggattcaattt

SEQ ID NO: 34947 - DNA, 242 bp, Glycine max
  Clone ID: 700890553H1
gggtttcacgcaagaagaagacgaagaagatgacgacgacgatggagagcttgattgggctggtgaaccgaatccagagggcttgcacggtgctcggtgactatggcggcgctgataacaacaccttctcttctctctgggaagctcttccttctgttgctgttgttggtggccagagttcagggaagtcttcacttttggagagcattgttggtcgtgacttttgccaagaggatcaggga

SEQ ID NO: 34948 - DNA, 244 bp, Glycine max
  Clone ID: 700890554H1
gcctttcaagcagcaagaaaggaggacacagaaagcaacaatcttcatcaatatactcatcttgttcacctcagctcactccttccttcatcttcttgcagctcttctaccaaaggtcccacaacagaagcatcattagaagtggtacacaaacatgggccatgctcccaactaaatgatcatgatggcaaagctaagtctacaacaccacacagtgtcactctgaaccaagacaaagaaaggg

SEQ ID NO: 34949 - DNA, 131 bp, Glycine max
  Clone ID: 700890555H1
tttgaatggtgaatggttatggggatttaacttccaaagattaacacttctcaaattatctacagcaagagatagaattcaagagaagtgttaatctttgaatggtgaatggttatggggatttaacttcc

SEQ ID NO: 34950 - DNA, 146 bp, Glycine max
  Clone ID: 700890557H1
gaaaaatccactaacagcagcaagcttatctctgcagcattgaacaccaattgaacaccaatctgcagcattgaacaccaattcaacgccaatgggtcaggaagaggaaaaatcccaagaaaacaaagtggaggagaaaaaagtag

SEQ ID NO: 34951 - DNA, 207 bp, Glycine max
  unsure (1)..(207): unsure at all n locations
  Clone ID: 700890558H1
agaaatttgaaagtgcccttgccatatatgataaggataccccagacagatggctgagggttgcagccatgctccctggaaaaactgtctatgatgtgatcaaacaatacagagaattggaagaagatgtttgtgaaatagaagcagggaggagttccagttcctgantatctacctcttctttaacattgagactgtttacaacca

SEQ ID NO: 34952 - DNA, 164 bp, Glycine max
  Clone ID: 700890559H1
caatgacaatggtgccagggttcctattcgtgtacacaccgtgctaatctccacccaacacgacgagactgtcaccaatgacgaaattgctgctgacctcaaagagcatgtgatcaagcctgtgatcccagagaagtaccttgatgagaagaccagtttccacg

SEQ ID NO: 34953 - DNA, 162 bp, Glycine max
  Clone ID: 700890560H1
gttgttcttgttggtggttctactaggattcccaaggttcaacagttgttgcaggacttcttcaacggaaaggaactttgcaagagtattaacccagatgaagctgttgcttatggtgctgcagtgcaggctgcgattctcagtggcgagggctaatagaaa

SEQ ID NO: 34954 - DNA, 165 bp, Glycine max
  Clone ID: 700890561H1
attgatcgccacgatagatatgctaaccgaaacacagtgttctttgatatcaatatgaaagggcttgatgggattcaaggtccagtatatgttggtactggaactgtgttcaacaggcaggcattgtatggctatgatccaccagtatctgagaaaaggccaaag

SEQ ID NO: 34955 - DNA, 243 bp, Glycine max
  unsure (1)..(243): unsure at all n locations
  Clone ID: 700890525H1
ggcccctctaaattcagtgagcaaattaatagaggacaactggaccttaattgtgaaaatcaatctagcaagctaaggtgcaaaggtttatcactgtctgatgccattactagtacttgtgattctcagatgcatagtggagaatttgaagccctaaataaaaaacccaagtcctcagatattgaaaataaaggtactaataatgatgaagaacttgccatctcttgagctagntttaagagg

SEQ ID NO: 34956 - DNA, 244 bp, Glycine max
  Clone ID: 700890486H1
aacatcttagtcttcttaatttcctcactcgcaagtcacaccaatggcaaagctattcaatttcctccctctcctcttcctcaacatcttcattcaaacaatttcagcccaagtagcaccagcacagcgggccccaccaacatcacccaagttcttgagaaagcaggccaattcacaaccttcatcaaacttctcaaggcctcacaaatagctgatagaatcaattcgcagctcaacaactcaa

SEQ ID NO: 34957 - DNA, 243 bp, Glycine max
  Clone ID: 700890487H1
gggtccgctccctcgacaagaccggcaaacctaacaagcccgatgtgaatctctttaaccattacctacgcgccaacctcatgctcggcgcctccgccgcggagctcctcgatctcgtcgcgcaatggcggagttcgacaacgtcgcccccaacaccgcctccttcaacctcgtcctcaaggccatgtgccaggccaaggaaaccctcgccgccgataaattgctccaacggatgttgcagtc

SEQ ID NO: 34958 - DNA, 242 bp, Glycine max
  Clone ID: 700890488H1
ctctctaactcaatctctctctctctctctctctgaattttctcctctctccgattccttttattaattggagtttactcgctccttttcctttccctgaaaacatttcctcgtcgtattgattcggaaaagggccggccacttccaaaatttggtgaatgggatgtcaatgatccaacctcagctgaggggttcacagtgatttttaataaggccagggatgagaaaaagacaggtggtaa

SEQ ID NO: 34959 - DNA, 240 bp, Glycine max
  Clone ID: 700890489H1
gaagcttgctgctatttcaacacctcctagcaacgtatcagtgccaatgcttgatgaggaagtgcgttcagttatgcagtcatacggtataatgaatgataagcactatgttgacccgctgcggttttggagagtttggtgaccatttttattgaaggcagtgggcgtgggctgtgtaagagaataatagcagttataaaagctgcaaacaccttgggcctctcattttttgaggggttc

SEQ ID NO: 34960 - DNA, 240 bp, Glycine max
  Clone ID: 700890490H1
ggatctcactaagccagtggaggaagagaacattaaggttacaatggatgactttttgaatgcactccacgaagttacttccgcatttggagcttcaactgatgatcttgaaagatgcagatccatggcatggttgagtgtggtgatcgacataagcacatttatcaaagagcaatgctacttgtggagcaagttaaagtgagtaaaggaagcccacttgtcacttgtctcctggaaggt

SEQ ID NO: 34961 - DNA, 240 bp, Glycine max
  Clone ID: 700890492H1
atttttctcactgtcttgtctctccagagaactgtatagagagagatggcagctgcaacatctggtgctgtgttaaatgggttgggatcttccttcttgagtggaggaaacaggagccaaaccttctggccactgctattggaggcaaagttggtgctgctgctgttactgttagtcctagaagactcattgtggtagctgctgctgcaccaaagaagtcatggctccctggtgtcagag

SEQ ID NO: 34962 - DNA, 245 bp, Glycine max
  Clone ID: 700890495H1
gtttggatttgctcagcctttggacccttttgggggtttcaggaagggttttggaaatggttcagtggggtgatggacaatgctctctacccagttctcttcctggattacatgaagcaatcctccctatctttgatcgtttggctgctcgaatccctgctcttctggggatcaccctttcactcacttacttgaattaccgtggccttcacatcgtcggcttttctgctgttttcctcgccctt

SEQ ID NO: 34963 - DNA, 244 bp, Glycine max
  Clone ID: 700890496H1
gatgaagatagcttcaataatgtgaagcaatggctcagtgaaattgaccgctatgccagtgataatgttaacaaacttttggttggaaacaagagtgatctgacagcaaatagagttgtctcatatacacagctaaggaattcgcagatcaaattggcatacctttcatggaaacaagtgcaaaagatgctacaaatgtggaagatgctttcatgggcatgtctgctgccatcaagaatagaat

SEQ ID NO: 34964 - DNA, 237 bp, Glycine max
  Clone ID: 700890501H1
caagggcaggctttctaaggaggagattgagaagatggtgcaggaagctgagaaatacaagtctgaggacgaggagcataagaagaaagtggaggccaaaaatgcattggaaaattatgcctataacatgaggaacacaatcaaggatgacaagattgcttccaaactgtcttctgatgattagaagagaattgaagatcgattgacaggctatccaatggctagatggaaaccaac

SEQ ID NO: 34965 - DNA, 145 bp, Glycine max
  Clone ID: 700890502H1
ggtcggccaagctgggctattctgtaccttttgatgacgacatcaactttcataagacaattgctggggccatcgttattggtgttatacttcatgccggggatcaccttgcttgtgattttccaagacttgtaagtacgtctga

SEQ ID NO: 34966 - DNA, 247 bp, Glycine max
  Clone ID: 700890503H1
aacaaagaaaaaaaaaaacccttagccaacacaaccatcatggccacctctgctattcagcaatcagcattcactggtcaaactgctctgaagcagctcaatgagttcgtccgcaagaccggtggcgccggcaaaggtcgcactaacatgcgccgcaccgtcaagagtgctcctcagagcatttggtatggccctgaccgtcccaagtacttgggtccattctcggagcagagtccatcatacctga

SEQ ID NO: 34967 - DNA, 244 bp, Glycine max
  Clone ID: 700890504H1
gcgagcagcgtttgtttgttccttcctcagtcgttgtgacagtgtgtgtgagtgagtgagtgagagcgacgatgggcgcgacagcgaccccacccaagacggttccgacgagcagcagaagcgttcggagatctacacctacgaggccccctggcacatctacgccatgaactggagcgtccgccgcgacaagaagtatcgcctcgccatcgcctccctcttagagcagtaccctaaccgcgtg

SEQ ID NO: 34968 - DNA, 243 bp, Glycine max
  Clone ID: 700890507H1
ggagaggagagaagagaggaagttttggggtttgaatctatagaataggatcaaaccaaattgaaagaagatcgatcgatcgatcgatggctctggtcggagttgaagtgaagcatgcggcggagggcgcaccggaggagaattgctccgccaagcccaccaagcagggcgagggcctccgccactactattctcacaacatccacgagcatcagctccttctccgtcaaaagacgcataacc

SEQ ID NO: 34969 - DNA, 236 bp, Glycine max
  unsure (1)..(236): unsure at all n locations
  Clone ID: 700890508H1
ctcccaattactttgttgcattccacacaacatactacacaanaagagagaagagagaagagactcttccttccatcctgcaacattaatcatcatgcaagactccagctcaatgaagatctcccctctggatctcatgtccgccatcttcaagggcaagctcgacccctccaacgtctcctcctccaccaacgccgccgccggcgccttcctcctcgagaaccgcgacttcctca

SEQ ID NO: 34970 - DNA, 118 bp, Glycine max
  Clone ID: 700890509H1
taggactagcacgcgggcggccgcccttgtagatgcgacacatatagggaaaatgctaaagtcgtttctatggatgactacgaagatgttcctgcctatgatgagttagccttgaaaa

SEQ ID NO: 34971 - DNA, 244 bp, Glycine max
  Clone ID: 700890510H1
ggggtttaggattggagggattgacgctgcgtctcttcctcttctctttcgatccatccctcattcctaatcctccaatccaaccacctcagcctcacactcacatatacacatatctgaacgcgtatcgtccctcctatggcttcaaagcgcatcctcgaagagctcaaggatcttcagaaagacccaccaacgtcattcagcgcctggtcagcagcctaggacactctccacttgcaagcaa

SEQ ID NO: 34972 - DNA, 178 bp, Glycine max
  Clone ID: 700890511H1
cctgactatggcggaatattttcgagatgtcaatgaacaagatgtacttctatttatcgacaatatctttcgcttcgtccaagcaggatctgaagtatctgccttattgggtcgaatgccttctgctgtgggttatcaacccactcgttagtactaagatggcttcttacaagaaaga

SEQ ID NO: 34973 - DNA, 165 bp, Glycine max
  Clone ID: 700890512H1
aacactcattaattgcaagaatggcacttcgttgcttggtgatgtccctttctgttctcttcactcttggtcttgcgagagaaagccatgccagagacgaagatttttggcatgctgtttggccaaacactcccattccaagttcattgcgagagtctctaaagc

SEQ ID NO: 34974 - DNA, 132 bp, Glycine max
  Clone ID: 700890514H1
tgacaaagttttctgagaaaataaggattattattatcgagagaatggcaggctcctcggaggagggacaagtcattagctgtcacaccgttgacgcatggaacgatcaactccagaagggcaaccaatcca

SEQ ID NO: 34975 - DNA, 154 bp, Glycine max
  Clone ID: 700890515H1
aagacacccacaagtcatcaaacttcgattgagtttcaaagagatcagtggtagtgtggtacattgtgttgatcaaggatggaacaaaagaagtttgtggcactattaatggtggtggtggtgatggcttcttctatgtggaaaggatccaaag

SEQ ID NO: 34976 - DNA, 117 bp, Glycine max
  Clone ID: 700890516H1
gttgtgctattctgtgattgaactcctctttgttattaagtgggattcagtctaaattagattctagagcaaactcattcttgttgacaagtagttgcatcatttgtgagattgttg

SEQ ID NO: 34977 - DNA, 246 bp, Glycine max
  Clone ID: 700890517H1
tggaagccccccgcgacggagcgcgtcggattctgggggactgtggggtcgggtgggcccgggcccgcgggaggggttccgttgaatttgacgcccgacgttacggtgtgtaagaatggaggggatggctgttataagacggtgcaagaggccgttaacgccgcgccggataacggcaaccgaacgaagaggtttgtgatacacattaaagaaggggtttatcaggagaccgttagggttccgtta

SEQ ID NO: 34978 - DNA, 237 bp, Glycine max
  Clone ID: 700890518H1
gttgcacgctctttcaagccatcaattgactggattgcagcttctgaccttgaagatgacagtgaaaaatcaacaccagaagcacatgctgcggcctggaagactttgaagagcgcagattgtgtcttggttcctgggggatttggagatcgtggtgtgagaggtatgatgctagctgccaaatatgcaagagaaaacagtgttccttacctggggagtttcctgggaagtcaaatt

SEQ ID NO: 34979 - DNA, 239 bp, Glycine max
  Clone ID: 700890519H1
ctgttcttggtgtacaagatgctaacagcactgaatttgagccccataccaaaagtccctacatcatgattatgcctcagggatcaaaaacacatatgggaggcaccatgcgccttggatctaggaggacatatttccagaccaaggaatgcaaatctgcaaaattatatggctgcaaaagcttcattgatgagagacatcggcatagatatgaggtgaatccggagttaggtgcacgc

SEQ ID NO: 34980 - DNA, 236 bp, Glycine max
  Clone ID: 700890521H1
tttttattatgatttctcttccttcatcttattataactatgcttttgtcaatagtcccacatgatttcaatgaattcttaacttctttccttgtgcattgtcatggaagaggtgttcaatttcatttgtatgaaacagtgctctgaacctaagggtttaccataatcttttttcatgtaatagtcttggttatgtagtattaaattattgttagagcttattttgctatctattt

SEQ ID NO: 34981 - DNA, 238 bp, Glycine max
  Clone ID: 700890522H1
caagcgctctctttctttgcttttccttccccctttcagtttcttcaacgctgcaactatccatggcaaaccgctggctcagacccgaggtgtatccactgttcgctgcggttggtgccgctgttgggatctgtggattccaattggttcgtaatatctgcatcaaccctgaagtcagggtgaacaaggagggaagaaaggcaggagtgttggagaactttgctgagggagagaagta

SEQ ID NO: 34982 - DNA, 242 bp, Glycine max
  Clone ID: 700890523H1
atggagtatggtcttgatcccaacgtcggagaagcaataatgcaagcagcacaagaagtagccgagggaaaactaaacgaccattttcctctcgttgtatggcaaactgggagtggcactcaaagtaacatgaatgctaacgaggttattgcaaaccgagcagcagagattcttggccataagcgtggtgagaagtttgtgcacccaaatgaccatgtcaatagatcacagtcttctaatga

SEQ ID NO: 34983 - DNA, 241 bp, Glycine max
  Clone ID: 700890524H1
cgtcaccatgacgattaattttatgtcaactatgtgtctttcggcttagtgttagcatgctgtggatgggttattttctgatggatgagtaaattttggctcttctgttacgtctaccattgctaattgaagaatgtttctttttcacatgatggagattttggcattgtagttgactaagtgaccatttcagaaatgtcaaagaggtcaagctacatgcatggcttcaaaatttccatca

SEQ ID NO: 34984 - DNA, 241 bp, Glycine max
  Clone ID: 700890485H1
attccttaaaggtttgatgggtcgccaaaatcgcacacccaccattgttgtgatttggtcagtgctattggcctctattttctccttactttgggtaagaattgatccatttgtcctcaagacaagggacctgataccaagctatgtggaatcaactgctaaaaaagactgctttccctatagtattattctttaaaagatgtatgtagggtacatacattcttggtttcacaaaccaaca

SEQ ID NO: 34985 - DNA, 249 bp, Glycine max
  Clone ID: 700890454H1
catcttcctcctccgcatggggcagcgcaacctcgtcgtggtttcttcccctgagctcgccaaagaggttctccacacgcagggcgtggagttcggctcccgcacccgcaacgtcgtcttcgacatctcaccggaaagggccaagacatggtcttcaccgtctacggcgagcactggcgcaaaatgcgccgcatcatgaccgtccccttcttcaccaacaaggttgtgcaacaataccgccatggatgg

SEQ ID NO: 34986 - DNA, 246 bp, Glycine max
  Clone ID: 700890455H1
ggaatatagaaaagggagatcctgaatttttcccgccccattttccttcgatccaaacaatggcaccaaaatccgatagcgccgaagcgatcgtgttaaacttcgtcaacgagcaaaataggccggtgatgcacagaacgtggcggatgcattgcaaaagttcaatctcaagaaagcggcgattcagaaagcgttggataatctggcagatggaggtcgaatttcgttcaaggagtatgggaagca

SEQ ID NO: 34987 - DNA, 246 bp, Glycine max
  Clone ID: 700890456H1
ctcgagtgaaattttctctatccttaccattaattggtagttttttaagtagagacgttcatgtgtctctcccgtgttggctagacttttagcacttattattttaccaccaaaaaaaatctcctttgaatattgtataattgagatattttcatgcttgaatggcggtatccggatttctacaaaaaaaaaaaaataaaataattataaaaaaaagggggggccccctttttgttacctgttccc

SEQ ID NO: 34988 - DNA, 245 bp, Glycine max
  Clone ID: 700890457H1
gttccattatcgggtctgagttcaatggagagatttcacgaagtttgcaggtactgtcgaggagatgctatgcgtcacctcagatctccccccacaccaggaaattggaatgccttctctctcaccacaatgacagagggtaacattgcaagatggttgaagaaagaaggtgatagaatctctcctggtgaagtgctctgtgaagttgaaactgataaagccactgttgaaatggaatgtatgga

SEQ ID NO: 34989 - DNA, 244 bp, Glycine max
  Clone ID: 700890458H1
catatattggtggcgtctcatgcccatatatctgcggcaagcatttggatcacggggttcttttggtggggtatggttctggtgcttatgctccaattcgttttaaggaaaagccttactggatcaaaagaattcatggggggagagctggggagaagagggatattacaagatctgcagaggtcgcaatgtatgtggggtggactcgatggtctcaactgtcgctgctatacatgtttctaac

SEQ ID NO: 34990 - DNA, 246 bp, Glycine max
  Clone ID: 700890459H1
acttcttcctccgatccaataaatggcggaaccgtcgtccaccgccgccaccgctgccaccgccgccatcgcttccaccgccgccaccgccgccaccgcttccaccgcttccaccgcttccaccgctatcctccggcgccagtgactaaaagctgggccgacgaagcagacgaagaaaccaacaacacctccaccgccgagtcagaaagctcctccattaacctggaagcgttaaccatcgacgat

SEQ ID NO: 34991 - DNA, 245 bp, Glycine max
  Clone ID: 700890460H1
attgaaattgattctctctatgagggaattgatttctactccaccattactcgtgctagatttgaggagctcaatatggatctcttccgcaagtgcatggaaccagttgagaagtgtttaagagatctaagatggacaagaggactgtccatgatgttgtacttgttggtggttccaccagaattcccaaggtgcaacaactcctgcaagatttctttaatgggaaggagctctgcaagagcatc

SEQ ID NO: 34992 - DNA, 247 bp, Glycine max
  Clone ID: 700890461H1
tgaaactccttcacaaacatggcagacctcatcatcatcatcagcagcagcaagaaaaaaactgcctctacagatactacaaatgggttctctggctttctctttccctctatttcttcacctcctactcatcagcaacaacaacaacaacaaccaccactccaaacaaccatctcacttctcgagagccctcatggaatcaaaccacaccacacctcctcaacaacaagctcttaactctctaggg

SEQ ID NO: 34993 - DNA, 248 bp, Glycine max
  Clone ID: 700890462H1
cagatgtgaagttactgaatctggttcacctggccagttgaattttgatagtcaagctgctccagcttttcatccccattcccttccagaatttcatgatggtttagctaacagtgttcatcatattctcccgaggtggcagcaaacatcaatctcaaaacacaggaaagaatagataacatgcagttctgtcaagtaaactccaatgggcgcttcatggaattcaatgaatgtgtttttaaatcctc

SEQ ID NO: 34994 - DNA, 248 bp, Glycine max
  Clone ID: 700890463H1
ccttaaaataaatcgtgtaaaggcaaagtacaaagaaagttggttgggaattgaaagggaaagggtaacgaaaatgagtagtagggtttggtgtgtggtgatggcatcagcgctggcgttgatgttgcatggcacgaagcattcagctcctacgctggctccgcaagtgcgatcatcgacccttccaaggtcaaacaagtttcgtggaaaccgagagctttcgtttacgagggtttcctgacggaatt

SEQ ID NO: 34995 - DNA, 251 bp, Glycine max
  Clone ID: 700890464H1
tcagattccaaaaaggatttccctgctgatgacaaagctggaacagaagagagtaaaacatccaaagatgagacttcatctaaagattctccagcagaacaaagagcgacagctacttttggacctagaccggacctgctgggcatccaggcaacccttttgatctctcagcaatgtctggtctgctcaatgatccaagtatcaaggaattggctgaacagatagcaaaagatccatcgttcaatcagatg

SEQ ID NO: 34996 - DNA, 244 bp, Glycine max
  Clone ID: 700890466H1
tttcctttgtttctatggcttctgcagaagtagagttccgatgctttgttggtgggcttgcttgggccaccgaccacgatgctctcgagaaagccttctctcaatttggcgaaatcgtcgaatcgaaggcatcaacgatcgtgaaactggaagatccagagggtttggatttgtgaccttcgccacagagcacgcgatgagagacgcaattgaaggaatgataggccagaacctcgacggtcgt

SEQ ID NO: 34997 - DNA, 246 bp, Glycine max
  Clone ID: 700890467H1
gttttgcgtttcagatcacagatttgataatgcatattattaaatttaactgaacgcatcttatcacttgaatttccttcgcagagcttcttgtggctgtggaatcatcgtatcttcttacgtccgagcaagcctttgtcttgtgtgtgttcttcccccttccgtcagacttctaggaaaatcagatgcatcgtggtaaattttcccttacacccaagaatgaagtcaaggacttgacaggttcaa

SEQ ID NO: 34998 - DNA, 247 bp, Glycine max
  Clone ID: 700890468H1
agcacatagaagagaaagaaagaaaacaaagaggagaaagaaagtagttgaggaagatacaaacaatttttgcagattgttgagaatgcctttcaagaagcctcatcacacctcagacaagaactactaacaggggacgacggaggcaagttcgagatacaacctagaggactcaacattgtgtggggaaatgattctcgatactggaaaattccagaacaaggtcctgcggagtgatccaagtttc

SEQ ID NO: 34999 - DNA, 243 bp, Glycine max
  Clone ID: 700890469H1
ctcgagccgaatcggctcgaggtccgtatctgggaggttgaaaacggcagatgtcttagacggtgggaggttggtgaatactgttagctgtgttgcttggaatcctctgcctgatattcatctttggccgtttctgtgggccaagatgtacttctacttaacacttgtttgggggatgaagaagagcagaaacggattaaggagcttctctgggttgactcgtctacagcatcagatgactct

SEQ ID NO: 35000 - DNA, 246 bp, Glycine max
  Clone ID: 700890470H1
ctgagcgtggccttggcaagctcagaaaactcaccaccctcaaaactattgatgaaggagaaagtagcaagctgcagaagacgttgtcgatgccgtcgacaccaacaaccccgatgactccgacgctccaacgacaccgggatcggcccgtaaagctgacaacgtttggaggagcgtcttccatcctgggagcaactccgccacaaagaccatcggtgctcagatgtttgacaaaccacttcccaa

SEQ ID NO: 35001 - DNA, 236 bp, Glycine max
  Clone ID: 700890472H1
ggttgcagattcaggaactggtgtgtgagatttcttcaacttggggtgtcattgacataaatgcaaacaatcttgaatttgaaggcagtaagtgattacttaaatccctgaaagacatcagtcagccttcgttctgctgaaatgaagaacttgcagacctcggaggaattacagtcatcgactcaagcttctcatgagcccaagagtgaacaaccaaacaatcacacaactgatgc

SEQ ID NO: 35002 - DNA, 244 bp, Glycine max
  Clone ID: 700890474H1
gcgattctcacccctccccaatgtcttcgcaggagaatggtcgtccattgcctaaattcggtgagtgggatgtgaataatcctgcctcagcggaaggttttactgtcatattccacacggctacgatacaaagatgactaacacagcaactgcaaccccaaccccacgtagatctgatcctgtgttcaagaatgagaattattacaatcctcaatattcggagtagtagcaagtggttttgctg

SEQ ID NO: 35003 - DNA, 242 bp, Glycine max
  Clone ID: 700890475H1
agaatatttctgttcgtgcagatagatagatagatggctcggagctccacaagaatgaaatgggtctccatcttcacacttctattcctctcccactcgcccctcacaaccttcgcagaagatggctagtggcgaatggagattttgaggttagcccatcaagtgggttccctaacgaggcgattgtggagggccccagcgaggtcccaaactggaagtcaaacggcaacgttgagctagtg

SEQ ID NO: 35004 - DNA, 241 bp, Glycine max
  Clone ID: 700890476H1
ctcataggaaaaatgcttctgattcttctcctccccactctacatcaggttctggaacactatctaaaactaaaagcacctcatcaaaggttcatacagttcctattttggctggagttataggggtgctgtgtttcttattttttcaagcattggcatatatctttgtaaaacaaaggtagctaatgtcagaccttgggccatgggactaagtggacagcttcagaaggcatttgtaact

SEQ ID NO: 35005 - DNA, 245 bp, Glycine max
  Clone ID: 700890479H1
ggctacttcgccgccgtcataaggtccaagatcaggtccccggcggtgatgcgcgacttggtgctgggcggcgcgaactaacggcggcggaggcggtgaggatgggaatcgtggattcggcgcacatagcgcggagagcacggtcgaggctgcaatgcgcctgggggagcagttggcacggaggaagtgggtgggtgaagtgtacgcagagataaggaaaagtctttacccagacgcgtgtaagg

SEQ ID NO: 35006 - DNA, 248 bp, Glycine max
  Clone ID: 700890480H1
gccatttctttcgtcttaatttgttctcttcagccatggcgatggtgcaagatgaacgatgcgttcagaaaagctactggattgaacatacgacggacttgtccgtagagtcaatgatgctcgattcaacgcctctgatctcgacaaggaggagagacccgaagttttgtccctactaccaccatatgaaggaaaatcagttgtagaacttggagcaggtattggaagattcacagttgaattggcca

SEQ ID NO: 35007 - DNA, 100 bp, Glycine max
  Clone ID: 700890481H1
tctcgagcgattcggctcgaggtttgaaacatttaatttctgtctaaataaaaaactaggtaagcatttgaaagtgtttacgggaaacttatttgaggtt

SEQ ID NO: 35008 - DNA, 205 bp, Glycine max
  Clone ID: 700890482H1
actcattcactctacaattgtgatcttcacaaatcaacaacgtctctctctgttactctgaaaattgacttcaagttagtataactggctgtcaagttgtaatggcattggtctctggaagaagtctgcactggacccaaatgcacctctattcatacctgctgctcttcggcaagtggaggatttttcacctccatggtgggat

SEQ ID NO: 35009 - DNA, 243 bp, Glycine max
  Clone ID: 700890483H1
cattaattttgtaatttctaaaaattagaaacactccaaataattattatatttttattaagagatttaatttaattagttaaatcgtataggcacgtgaattattataaatctctcttgaattaattaacttcaattccaaaagttagtttaaaaaagttgtctctcacttattgttagtagacatgagacttggatttatttgttagtttacctacaaaggcaatgcttctgtttccattc

SEQ ID NO: 35010 - DNA, 243 bp, Glycine max
  Clone ID: 700890484H1
ggatggtcatggaggaacacgactcggagaaggtggagatcgtcctcaaaaccattggtcctgcacgaccctctcgcctcctcgttccttcttctatcaaggtgtgtgatttgaggagattaatgctaggaatgaaaatttgcaaatttacaacttgagtcttattttacgcggaagtgcactgtatgacacgaaaaatggagatgatgtatacatacaactcaatgatggagattgcttgat

SEQ ID NO: 35011 - DNA, 246 bp, Glycine max
  Clone ID: 700890453H1
ctccgcaccagtttcaccgaacgaatatcttgttgtttggagcgatccgagaaaaactctgtaaacatgttggtttaccaggacctccttacaggtgatgagcttctctctgactccttccgttacaggaaattgagaatggaatgctgtgggaagttgaggggaagtgggttgttaaaggagcagttgatgtagacattggtgcaaacccttctgctgagggtggaggagaagatgagggagttg

SEQ ID NO: 35012 - DNA, 252 bp, Glycine max
  Clone ID: 700890423H1
cccagtgaaccctaccgcaccgaaacaaaaccctcgcaaaccctaaccctaatctcataggaacatggacggcgacgacgagacctcgggtccgatgatcgacgaaatctacgccaacggcggtggcgtcgggacgacggagacaagcggagccgccgcgcaatcatgagcggcgaccagctcgacatcgaggcgtacgcggcgctatactcggggcgcacgaagatcatgaggctcctcttcttcgccgac

SEQ ID NO: 35013 - DNA, 249 bp, Glycine max
  Clone ID: 700890424H1
ggcttaagtgacaagagcatttgcatgtgggaattagatgggaaagaagtggagtcttggaaaggacaaaaaacccttaagatatctgatttggaaataacagatgacggggaagagattctaagtatttgtaagccaatgtggtactgttgttcaatagagaaacaaaggatgagagatttattgaagagtatgaaacaataacctccttttctttatcaaaggataacaaattcttgttggttaatc

SEQ ID NO: 35014 - DNA, 249 bp, Glycine max
  Clone ID: 700890425H1
gcaatggccaaatggatctcatttgctgctctttttgcaatacttttactactcatctctcctgagcttgcaagtgctgcccaacctagtcttattcttcaactcggccgaaaacttttccaatgcggcagcgccgtccctgttcgtggaaataccccatccaatggccgctcctagaggatataccccaccaccaaaacacccactctatggctgaatatttgagatgttagcatccttctttaattt

SEQ ID NO: 35015 - DNA, 247 bp, Glycine max
  Clone ID: 700890426H1
gtgcgtgcttttgtgggggcaaatagtagatagtagatctgtcgcagagcaaagaatcgtcggcgacggcgaggctgcactataaccgcgattaactatgattagccttcgccggagcgtaaacaagatccggcgaaatcgaagcgattcaaatgccgattggtgaagttcgaggagctgccggagtacttaaaggacagcgagttcatattggactattaccgctctgaatggcccgtgaaggaag

SEQ ID NO: 35016 - DNA, 250 bp, Glycine max
  Clone ID: 700890427H1
aaccaaaccctaacacacacccatttgattcagtttccatggctagcctcaaggttgcatttttggctgcagtgctctgcatggttgtggtgagtgcacccatggcacatgcagctatcacgtgcgggcagtgacgaatagcctgatcaattgcatcggttacctccagaacggaggaacgccgccgtcgggatgctgcaacggagtgaagagcctcaatgccgccgccaagaccaccgccgaccgccag

SEQ ID NO: 35017 - DNA, 250 bp, Glycine max
  Clone ID: 700890428H1
tcaaggtgtgcacggccacctcacaaagaggcctgaggagattggtgctggtgaccaaggtcatatgttcggctatgccactgacgagactcccgagctcatgcccttgagccatgtccttgccacgaagccggtgccaagctcaccgaggttcggaagaacgggacatgcccttggctgagacctgatggcaagacccaagtcactgttgagtactacaatgacaagggtgccatggttccaatccgcg

SEQ ID NO: 35018 - DNA, 249 bp, Glycine max
  Clone ID: 700890429H1
ttgatctatggcgaaaggacgcttttttctctgcggcggaagaggtgcaggaatcagctgatataatggaatctgcatacagggcaaggttgagagagaagagagaaaggtcaactcctgacgaattaaataaccatgtagagagctgcaaactgctttaggtaccgcaaaatggcagttggaagaatttgataaagccgtcaggtacagctaccgacctcacagtgatgacaatacatccactaggca

SEQ ID NO: 35019 - DNA, 252 bp, Glycine max
  Clone ID: 700890432H1
aacgaaaatcctcgaaacctgcatgcgcgaaatgttggagctagacgcaacagttcgcgcatgctacggggaggaaatcaagctcaacaggtatgatctggccacaattatggtgtatgacggctgttttctcttgaagtcgccatttcaaaagaaaaagactggagcgcggtgttcccgcaacagtctgtttctgtctcagtgagcgatctagggactaaagtcggggaaatggaagcagtattgactgac

SEQ ID NO: 35020 - DNA, 259 bp, Glycine max
  Clone ID: 700890433H1
ggccaaggaagctaaaatccttgcccagtgttgttcacctccctctttactctcatcctcactggcatgatgcagatgttcttccctcttggacctactgcccatgctatctatggtgcaattggtgctatgatttctctggctatattgtatacgacactgacaacctgatcaagcgcttcacttatgatgagtacattggagcctccgtcactctttatcttgacatactcaacctcttcctttccatcttgaggat

SEQ ID NO: 35021 - DNA, 205 bp, Glycine max
  Clone ID: 700890434H1
cacttttgcttccttaacctattttgttatcctcaattttcaatggctcaatcccattctggaaaaacctcttccatgacttcaatactcctcctgtttatgcttcttatcagtaatacaggcacaacaggtgacaatctggtgtatgctatggaagagttggcaacaatctgccatcgcaacaagaggtagtttccctttttaa

SEQ ID NO: 35022 - DNA, 251 bp, Glycine max
  Clone ID: 700890435H1
gccagcacaaaggagaagagggtttcgttccgtttcaatggggagcgaagagcagaacggcgaattctacctgcgttactacgtcggtcacaagggcaagtttggtcacgagttcctggagttcgagttcccccagacggcaagctccgctacgccaacaactccaactacaaaaacgacaccatcatccgcaaggaggtttacctaacccccgccgttctccgcgagtgccgtcgcatcatcgccgagag

SEQ ID NO: 35023 - DNA, 252 bp, Glycine max
  Clone ID: 700890436H1
caaacatggatgcatccaaactcaatcaattgaagcatttcatcgaacagtgcaagtccaacccttccctcctctccgatccttcactctccttcttccgcgactatctcgaaactctcggggcgaaactcctgaatctgcttattccgaatcgacgggcgtggagagcgatgaggacatagaagatgttacggatgagcaagagaaggtagaagatgaagaagaagatgatgaaataattgaatccgatgt

SEQ ID NO: 35024 - DNA, 212 bp, Glycine max
  Clone ID: 700890437H1
catatttctttttcttttccctttttcctaggcacagcacacgccctctcaaatagaaactgagagatgaattctgatcagtttcagaagaacagcatgttcgtagaaacccctgaagatggtggcaaaacttcgacgatgatggacgagtcagaagaacgggtacatggataactgcgagtgcccatatcataacggcattgatagggcca

SEQ ID NO: 35025 - DNA, 251 bp, Glycine max
  Clone ID: 700890438H1
tgttatcgcatttgtttgtcctttcccgatcgttaaacctcccccactgcaattgcaaatccctgataattaaaccaaagaaccattccgctccaatcttaaaatcacttcccagttcctagttcccacttctcattctcgcattcctctaatcacataaaccctatttttctccacaatggatctccttcatcaatactcagacggcgacgatcccgactccccctctcaaaaccctagctccccgccgc

SEQ ID NO: 35026 - DNA, 249 bp, Glycine max
  Clone ID: 700890439H1
ctcccccaaatcgtagatctacggttaaattggtgtagtgtggtaagatgggaggaggatttagagtgcttcacttagttaggccatttctctcgtttcttcctgaagttcaaactgctgacaggaaagtccatttagagagaaggtcatatacactgtgatctctcttttcattttcctggtttgtagtcagctccctctatatgggatacactcaacaacaggtgctgatccattctattggatgcg

SEQ ID NO: 35027 - DNA, 219 bp, Glycine max
  Clone ID: 700890440H1
atctagatcgcgatctagaacggacgatacttgatgatcgtcccattcgagttgattttgattggggatttcaggaaagtagacaatggggtcgtgggatgagcggtggccaggtgcggatcgagtacccactgattatgatcctggtagaggtggctacgggaagctggttcagaaagagttagaagtgcaaacgcagcttgtagattatcgggatgc

SEQ ID NO: 35028 - DNA, 248 bp, Glycine max
  Clone ID: 700890442H1
gcaacgtggttgaatgtagcaccagtctagtcagttgcaggcttcctgcacgctactgaaaaagaaagaaaatccgtttggatgaatgcgcgaggggaagagagactctctctcctcttccttctacagttttaaagagtaaagtgtgtctcatttttcaatcttgcccgcatctttttgcgatttctcatttttctcctgttcctttcctttccgtttctctgctactattcccaactccttccatt

SEQ ID NO: 35029 - DNA, 246 bp, Glycine max
  Clone ID: 700890443H1
gtttgatatcctgattcctactctcttagtttccactctattgtatggagacatgtgatgaactgatgatatatgcatttgcttttatagtttgcttggccaccaagtaacgacaaagagaaacagttctaactttttcttggctggttgtaaataatctctcttttctctattggatcatagctttctgcaccctcttcctcttaggttcccatatttttctctcttgtcgtggacctcaacttt

SEQ ID NO: 35030 - DNA, 246 bp, Glycine max
  Clone ID: 700890444H1
ccttgggatggacatgggcaaagaaggaagttatatggtccatggtaggagctcaaaccacagaacaaggagacagaatctaagttcaaaggcaatgtacctcactgctgcaagaaaactcccacagttgagacttgctccctggtgtgccttacaaccagcaattcccaaactgttgtaagggtggagtggtggcagcatggggccaagacccttcatcagcagtctcatccttccaagtgagta

SEQ ID NO: 35031 - DNA, 246 bp, Glycine max
  Clone ID: 700890445H1
ctagatccaaccacttccattgctaccaattcctgcttcttgtttattttgctcccataccaacactgtgcgctagatactcagatctcctcccccctcttttctctatgccattcccccagctaggaggctgtactggaatcagagtgtagctgtggggtacggatttattactagttttgtagagaatgggcaagtgcgagggttgtgggaagttaggaagaaggggaacaacaaattggtctg

SEQ ID NO: 35032 - DNA, 249 bp, Glycine max
  Clone ID: 700890446H1
ctcgagccgcaattctctgtgaactttctagaatctcgttcttcctttgccttctccttcttcttcaaccctttttctttctctttctttcgcactttcattctctaaaaaaatctaagtccctttggtttcatcttctgttcttatccatgtatggcttctaaacccatcttgaaggacctcaaggatttgcagaaggatcctcctacctcatgcagtgcaggccctgtggctgaggacatgtttcac

SEQ ID NO: 35033 - DNA, 145 bp, Glycine max
  Clone ID: 700890447H1
gcaagtagcagcagcctcaaagtgccctacaccctcctcacttaagctctcatcctgatccctaaaatgaagatcaaacaacaatctctcttctcagcctcaattttactagttatagcacttattacctcttccacacaacata

SEQ ID NO: 35034 - DNA, 135 bp, Glycine max
  Clone ID: 700890448H1
gccgagctggtagcatgtaaaaactatattatcgggtttgcacatttcagttctattgctaacttttgtccccgattttccttgatttttatttttatgtttttatattatatataatttttttggttctttttc

SEQ ID NO: 35035 - DNA, 75 bp, Glycine max
  Clone ID: 700890449H1
atcgagcgaatcggctcagggctcgaggtgagctgagcctattatcaacacaagcaataatttcagtaaatcaag

SEQ ID NO: 35036 - DNA, 196 bp, Glycine max
  Clone ID: 700890450H1
ggtctatgaaggtgaacgtacgaggactcgtgataacaatttgcttggcaaatttgagttatctggaattcctcctgctccgagaggtgttcctcagatcaccgtttgctttgacattgacgccaacggatattgaacgtgtctctggaggacaaaaccactggacagaggaccaagattacaattaccaacgaca

SEQ ID NO: 35037 - DNA, 247 bp, Glycine max
  Clone ID: 700890451H1
tggttctccgccttcgtggtgggatgcaaatctttgtcaagactctcactggaaagaccatcacccttgaggtggagagctctgacactattgacaatgtcaaagccaagattcaggacaaagaaggttcccaccagaccaacagaggctcatttttgctggcaaacagcttgaagatggccgaaccttggctgattacaacatccaaaaagaatctaccctccacttggtgctccgtctgcgcggt

SEQ ID NO: 35038 - DNA, 240 bp, Glycine max
  Clone ID: 700890452H1
gatattcaggggactgcatctgtcgttcttgctggggtcgtggcagccttgaagctcattggcggtaatctggctgaccacacattcttgttccttggggctggagaggctggaactggaatagcagactaatagctcttgagatgtcaaagcagacaaagacacctatagaggagactcgcaagaagatatggcttgtagactcaaagggtttgattgttggttcaagaaaggcttcac

SEQ ID NO: 35039 - DNA, 250 bp, Glycine max
  Clone ID: 700890422H1
caactttcaagggatgatagcattttgtggcataaggattaaggaggcataaaggaccaattgctttggaatattcactcatgacaaggcacaaggtcatgcgtgtatgccaacacatagtaatgatgtgtgttttattcagtaggcaactggcagatcgggttttcccttgtcacttttgtataattattttggaagaatttatgatgtcaaagttattgtttaatattaatggcgacattgtatttat

SEQ ID NO: 35040 - DNA, 257 bp, Glycine max
  Clone ID: 700890385H1
ggcccacaaacaggctattcctttccgacgcttttgtggtggtgttgggaggacggcccaggctaagaacagacactccaatgggcaaggacgctggcccgtcaaatcagctaagttcattctagatttgctgaagaatgctgagagtaatgctgaagtgaaaggtttggatgtcgatgctctgtacatttctcatatccaggttaatcaagcacagaagcaaagacgccgcacctacagagctcatggaagaatca

SEQ ID NO: 35041 - DNA, 224 bp, Glycine max
  Clone ID: 700890386H1
gaacttcaaagaatatgacatctggctggcagcagagaatgggatgtttttaaacccttcaaagggagaatggatgacaacaatgccagagcaactgaatatggaatgggttgacagtgtgaagcatgtttttgattacttcacggacagaacacctcgatcatattttgaagaaagggaagcttcacttgtatggagttacagacatgcagatgctgaatttg

SEQ ID NO: 35042 - DNA, 259 bp, Glycine max
  Clone ID: 700890387H1
atagagaagaagagacttaatcgatcatcacttcagttcactagtacatcatggcagacgagacccagaacaagtatgagagctctgaggttgaggtccaggatcgtggtgtttttgactttctcggtaagaaaaaggatgaagaagacaagcctcatcctcaggaggaggtcatcgccaccgagtttcaaaaagtcactgtctcagaccaaggagagaacaagcacagcctcttagaaaagcttcaccgatctgacag

SEQ ID NO: 35043 - DNA, 254 bp, Glycine max; identical to SEQ ID NO: 33704
  Clone ID: 700890389H1

SEQ ID NO: 35044 - DNA, 255 bp, Glycine max
  Clone ID: 700890391H1
atttttcttcctcagtagtgtcatttacgcttctcttctctgcagcaactatgcctaaccctaaggtcttcttcgacatgaccatcggcggtcaatctgctggccgcatcgtgatggagctctacgccgacgtcactccccgcaccgccgagaacttccgcgcgctttgcaccggcgagaagggcgtagggcggagcggcaagcccctccactacaagggctcgtccttccaccgcgtgatcccgagttttcatg

SEQ ID NO: 35045 - DNA, 255 bp, Glycine max
  Clone ID: 700890392H1
tcttgattcacataacaaatgagcccttgaattattttgttttgttttcttttagtagtggttcctatttaatgattgtagaatgcttcatctatacttgaatgtgtgtatttttaattctgatatatggaggatgctaaagttagctgattttttgttgtttattttcctgtttgaacagaagtagcagttactgtgcctttggttcttctggtgaacagaagtgccttgattttcatgaatggtaaaatggga

SEQ ID NO: 35046 - DNA, 250 bp, Glycine max
  Clone ID: 700890393H1
gcggctagggttttagcgcacttcttctagatttaaggaagatgggtaaggagaaggttcacatcagtattgtggttattggccatgttgacttttgcaccaactggactgacaaccgaagttaagtctgtggaaatgcaccatggagctctcacagcagcacttccaggtcccgatctcgtagatggttccagagaggcctcaccagaaagcccttggccttgttcaagaagctccgtaaaccgaaaag

SEQ ID NO: 35047 - DNA, 264 bp, Glycine max
  Clone ID: 700890401H1
cgaagctttgttggcggcaaagcaaatctgcatagcgatggcgcctccgaaactcttcgtatttgcgctttcagtaaccctgatttttgccatcgttggggccgaagccgatgtttccgtcgaaggagccactccagagccgatacctccgccatcaagatccaattagatcaactcaattccaagatccaaattctcgagtctcaaatcagtgaaaagttggaagaagtgaagaagaaggacaaaattatagcagaaaaagaa

SEQ ID NO: 35048 - DNA, 262 bp, Glycine max
  Clone ID: 700890402H1
aattttgcagatctggaaatggcgacggcaacgtaccctccaccgccaccttattacagactttacaaagattacttgcaaaaccctaagtctgctcccgaccctccaccgcctattgaaggcacttatctttgttttgagccaattacaccactagtgatgttctaccaaccttggaagaacaaggggtgcgccagtctattctaagggccctaatgttgatttcaagaaggagctgaggtcactcaacggagagttgcaa

SEQ ID NO: 35049 - DNA, 258 bp, Glycine max
  Clone ID: 700890403H1
gtttgataaacccaaaccgccattggtggtttaattaggtttggaggtgggctccttcaactctcccaaggcctttcaaatcccgatctgccgtgacttttgacggtgacacggttgaaggaggagcagtcacttcacgtcgttgttggatttctgccgcatcacaccatacgaatccaaatctggcctgactttcacttgccaccgcggaggacgatagcgtgattgaaggagaagcgctcaccgccgtgccgctgt

SEQ ID NO: 35050 - DNA, 255 bp, Glycine max
  Clone ID: 700890405H1
caggctgctgtttatggtgttggtgtttgtgctgagtttggtggatctgttttcagcccccttgttggagaggcactttcaaggttagatgctgtgataaggcatccaaatgcactacatgctgataacataatgcatatgacaatgccgtctcagctcttggaaaaatatgccaattccatcgtgatagcataaatgcagcacaggttgttcctgcctggctaagttgcttgcctataaaaggtgatttaattg

SEQ ID NO: 35051 - DNA, 256 bp, Glycine max
  Clone ID: 700890406H1
ctcgagccgaatcggctcgaggaaagagtgaccgagagcgatacgagagagagagagagacgagagagcccgatcttccactatcgatctctgctctttcctcccccctttcaagattcgttgcattttctcatttccgcgaattccgaaatcgcgttccgttggctctcgattcccacgctccacgttcacgattttgattgagatgaaacttgaaagggcttgatagtcaacaagggaagagaaagtgccgagg

SEQ ID NO: 35052 - DNA, 253 bp, Glycine max
  Clone ID: 700890409H1
atctaattacctcaattaatcccttaattgcaagcatcatggctgaggagaaacaccaccaccacttccaccaccacaagggcgatgatgtgcctggcgaggttgattataagaaggaggagaagcaccacaagctcttgagcaccttggggaacttggtgctgcggctgccggtgcttatgccttgcatgagaagcatgaggccaagaaagacccagagcatgctcacaggcacaaggtagaagaggagatt

SEQ ID NO: 35053 - DNA, 252 bp, Glycine max
  Clone ID: 700890410H1
tataagcctcaccaacctctcctacatcagaatctccattggatgaggatgatggcatttcttccaaagatggtggtcttgagttgtaagttataagcctcacttcgtcctctatggagaaattttttggtacacaacttcatttctacatttttgagtcttggacaatcatatatcccttggctcaattaataagttgctttatctaaaagaatgacccaaacagcttcagagaagcaaatgcattgcatt

SEQ ID NO: 35054 - DNA, 239 bp, Glycine max
  Clone ID: 700890411H1
gttagcagtgagagtgttgctcccctatactatttgctttgtgattcaaatcaatcttgctttgttctctcgatttatggtgtacgtactgatgtgattaaagaaggagatcagctaacatgcttgacccttattttcgtgatgtttatttgtcctggaaggagaagcattaccagttcaaatctatacgcctggatttctatgaacaagtgcttgtaaatggaaaagctttgactcct

SEQ ID NO: 35055 - DNA, 251 bp, Glycine max
  Clone ID: 700890412H1
aaggttgctttagtctccgcaattttctgcttgcttcttcacttcattttttcctctgtctcctcctcaatcttcattgtcctgttctttcccttggtgacaaaccaagactaacacgcacagatcatagctttgttggtgaggtgagaagataaagaaagaatggcatttgcaggagcaacacagaagtgtatggcctgtgacaaaaccgtttatctggttgataagttgaccgcggataaccgagtttt

SEQ ID NO: 35056 - DNA, 251 bp, Glycine max
  Clone ID: 700890413H1
gaaattttgaatgctatcacggagcagagtaaacttctgcagcatgctacaaccatatatctacaccatacaataagtgactttgctgaggcattggcagcaaaaatgcctggaaaccttaaggttgtttatttgtaaattctggttcagaagcaaatgaattagcaatgatgatggcccgtttatatactggtaatctcggtatgatttctttgagaaatgcatatcatggggggagttctagtacactt

SEQ ID NO: 35057 - DNA, 254 bp, Glycine max
  Clone ID: 700890414H1
ctcgagccgaacaattcgtaggatggagctacttgttctgggtgtcttggattggaggctaagatcagtaaccccactttgcttcctcgttttctttgcgtgcaaagcagattcaactggaacttttacccggtcctcattttccgggctacagagatcatcgtatctaatatccaagaggctagctttcttgcttacaggccatcatgcattgctgctgcaggcatactcactgcagctagatgaaattccta

SEQ ID NO: 35058 - DNA, 255 bp, Glycine max
  Clone ID: 700890415H1
cttcgttttctctctctctcactctttcgaggtaatttgcaatggctgaaccttccaaggtcattcacgttcgaaatgtggggcatgagatatctgaaaatgatttgcttcaactatttcagccttttggagtataacaaagcttgtgatgtcatgcgccaaaaatcaggctcttcttcaaatgcaagatattccttctgcagttaatgctttacaattttatgcaaatgtccagccaagcataaggggagaaat

SEQ ID NO: 35059 - DNA, 255 bp, Glycine max
  Clone ID: 700890416H1
gcgacttgaggctagggttacggattcttgcgttttaatatctgcacttcagaagcatggggcactccaatgtgtggaattctcaccctaagaactacggacctggttctcgcacttggcagtgcttccgaagcatgccaaggaaattggcttcatcaagtatcggtgaaagattagttttccacctgccccacccggtttggattcttgcatcaggctatgatgacgtggggatgattttactgtttgaagaac

SEQ ID NO: 35060 - DNA, 242 bp, Glycine max
  Clone ID: 700890418H1
cgtggacatggcaaggggggagagccgtttggcccaacctatacatccggagacgtagttggtgccggaattaactatgctgcccaggaattttttttcactaagaatggccatgttgtcggctctgtttacaaaacatgaaaggccccctttttccaaccgttgctgttcacagccaaaacgaagaggtgcatgtcaactttgggcagaaaccatttactttgaacctaaaggattttaaa

SEQ ID NO: 35061 - DNA, 253 bp, Glycine max
  Clone ID: 700890419H1
aaagagtttctggggtcagcaaaatagtataaggaaaaaaaatggatttttggaaagtgggtttgcttagtcttctttgtgccgcttctgcttttgcaattggggctgtggagctgggtcgacatcaacctatgagagaatttcaggtagtgctggtgatgtgttagaagatgatccagtgggaaggttgaaggtttttgtttatgaacttccaagcaaatataataagagaattctgcaaaaggaccctaga

SEQ ID NO: 35062 - DNA, 249 bp, Glycine max
  Clone ID: 700890420H1
cgttcagtgagccaactctctttgatagctctagtgatcagcagcaatggcggggaaagtggcaaaggcagcttatgatgcaaagatgctgaagcttctgaaagagtacagtcaggtgctggtggtttcatcgacaatgtgggttccaaccagcttcagggcatacggaggggacttaatgctgattcggtggtggtgatgggaaagaactccatgatgaaacgctctatcatcttggatgctcagaag

SEQ ID NO: 35063 - DNA, 253 bp, Glycine max
  Clone ID: 700890421H1
ctgccctaatcatcataactggaagaacctcttcacgaaagtgcgaaacttgatcagtgttggacgcgcttcctcctcctcctccgccgccgccaacgccatgggtgacgttcagatccacaagaccaaacttgcatcatcggaagcggtccctccgcccacacagccgccgtctacgccgctcgagccgagctgaagccgatcctcttcgagggctggatggccaacgacatcgcccccggcggccagctca

SEQ ID NO: 35064 - DNA, 260 bp, Glycine max
  Clone ID: 700890381H1
caaacattctcaaaccaaagccatgaccaatatggaatccaccacacctatactcactcctctagtgctcctcctcctcttctctctagccaaagggcttcacaaccccaaatgtgatgctgcctatcaacatgaccatgatggctcaaccctccaagtgttccatgtgttcagcccttgttccccattcaggccctcaaaaccaatgtcatgggaagagagtgtcctacagctacaagccaaggaccaagccaggatgc

SEQ ID NO: 35065 - DNA, 264 bp, Glycine max
  Clone ID: 700890343H1
ctcgagctcgagccgcaggaattggatttgtgagttagaacaggaaataagagagagacatttgattgtgaatggatttggaatttaaattgtgtgaatattttttaattgtttgttgagaagcattgaattggattttacttgaggagtagtatattatggagaacgtgtgtgatgttaatcacttggatgcggatgttcttttgccccctcggaagcgtcttcttgctgggttgaaaaaacagagttcagatggtgatgctg

SEQ ID NO: 35066 - DNA, 261 bp, Glycine max; identical to SEQ ID NO: 33753
  Clone ID: 700890344H1

SEQ ID NO: 35067 - DNA, 261 bp, Glycine max
  Clone ID: 700890345H1
aatgcaacagtccaggccaagatgggaacaaattttggtggcatgtacggttcaagctcagtactcacaacaagtcatcatgggagtgaggcagagaataataataataattattcaggtgatttgtcacaaataccccctacaaaaagacggcacgtacagaatgaggagagtgcatggggacaaactagggactttcttggtgttggtggtgccaaccatttgccacccttcatcaaccaacggatggatttgatttga

SEQ ID NO: 35068 - DNA, 91 bp, Glycine max
  Clone ID: 700890346H1
ggccgccctttttttttttggtaatcttgcttctttttttaaatatattcgggatgtgctgctttccgtggttaaaaaaaaaaaaaaaaga

SEQ ID NO: 35069 - DNA, 254 bp, Glycine max
  Clone ID: 700890347H1
acttgcatcatcagcgtcttctctttttctcagtttctcctttttttttttaaaggtgctgcaagcatacgtgtgattttctggcacaagaaggaaaaagaaaaaaaaaaacaacgtggaatcgcaacgagataaggtgaaacaccaacgttgtgaggggaaattgaaactttttagtggggtttattggtctgaagcttgttggagttgggagtagttgaagatgagaaacgtgcttcgttctctgcgacatt

SEQ ID NO: 35070 - DNA, 259 bp, Glycine max
  Clone ID: 700890351H1
cttggagctcgaagagttcttgtgacaggcacaggacccttgggttgtgttccatcagaattggcccaacgtggtagaaatggacaatgtgctcctgaactgcaacaagctgcagcattgtttaacccagaactcgaacaaatgttgcgacaactcaccaggaaaattggaagtgacgttttgattgcgtgaaacacaggaaaagcgcaaaggattttgttactagcccccgacaattggggtttgtaagaaaaggggg

SEQ ID NO: 35071 - DNA, 267 bp, Glycine max; identical to SEQ ID NO: 33749
  Clone ID: 700890353H1

SEQ ID NO: 35072 - DNA, 259 bp, Glycine max
  Clone ID: 700890355H1
atagagaagaagagacttaatcgatcatcacttcacttcactaatacatcatggcagacgagacccagaacaagtatgagagctctgaggtttaggtccaggatcgtggtgtttttgactttctcggtaagaaaaaggatgaagaagacaagcctcatcctcaggaggaggtcatcgccaccgagtttcaaaaagtcactgtctcagaccaaggagagaacaagcacagcctcttagaaaagcttcaccgatctgacag

SEQ ID NO: 35073 - DNA, 255 bp, Glycine max
  Clone ID: 700890357H1
gagcaacagcaaggaaggcatctttgtccataattgctgaaaatgctttattagatgctatccaatccaaaaggtatggggatgcactatatttttgggtgcgcatggatatggattcacgaaacccttcgcaaacggacttttggtcattttgtgatgccgttaatgcgggaaattgcaagtttgctttctcagaagccatgaggggaatgtatggggtaaaaggtgatgcggattctttgcctcccatgccgg

SEQ ID NO: 35074 - DNA, 255 bp, Glycine max
  Clone ID: 700890358H1
ggcgagggtaatgagaaagtgcaggatcttcttttgttggatgttactcctctatccactggtttggagactgcaggaggagtcatgactgtgttgattcccagaaacacaaccattcccaccaagaaggagcaggtgttctcaacctactctgacaaccagcccggtgtgttgattcaggtctatgaaggtgaacgaacgaggactcgtgacaacaatttgcttggcaaatttgagtaatctggaattcctcct

SEQ ID NO: 35075 - DNA, 257 bp, Glycine max; identical to SEQ ID NO: 33706
  Clone ID: 700890359H1

SEQ ID NO: 35076 - DNA, 263 bp, Glycine max
  Clone ID: 700890360H1
gggtcgagtcttgattcacataacagatgagcccttgaattatttggttgtggtttcttttagtagtggtgcctatttaatgattgtagaattcggcgtctatacttgaaccggtgtattttgaattctgatatattgaggatgctaaagttagctgattttttgttgtttattttcctgtttgaacagaagtagcagttactgtgcctttggttcttctggtgaacagaagtgccttgattttcatgaatggtaaaatggga

SEQ ID NO: 35077 - DNA, 244 bp, Glycine max
  Clone ID: 700890361H1
gcggctagggttttagcgcagttcttctagatttaaggaagatgggtaaggaaaaggttcacatcatatacttcaggtcattagagataacgtagtgttgtatcaagttgtactgaaaagcgaagttaagatctgtggaaatgcaccatgaagctctcacagaggctcttcccggtgataatgttggattcaatgttaagaatgttgctgttaaggatctcaagcgtgggtatgttgctcgaac

SEQ ID NO: 35078 - DNA, 251 bp, Glycine max; identical to SEQ ID NO: 33655
  Clone ID: 700890363H1

SEQ ID NO: 35079 - DNA, 255 bp, Glycine max
  Clone ID: 700890365H1
cttgtcttctacagacccccaagctctgagattctaatcctctgtggttttccaacctcagaatttcctcgaaacttgacagcagattatgtcaaatctgtggcttataacctcccagaagagagaaccttgacaactcaggactatatctgttttgttgccatgagtatcaattagcagctttctctaggccactgttgtccattgttctgcttctacatataatctgctggaagagatcacttgaactactat

SEQ ID NO: 35080 - DNA, 259 bp, Glycine max
  Clone ID: 700890366H1
aagattcgaaacgaagaaagaaagcgttgtgaagaatggcggaagagggacaagtgatcggtgtccacagcgtagaggagtggaaggaacatctcaagaagggagaagagtccaagaaattgattgtggtggattttactgcttcttggtgcggtccatgccgtttcattgccccaattcttgcagagtttgctaaaaagttgccgaatgtcaccttcctcaaggtggatgtggatgaattggagactgtttccaagga

SEQ ID NO: 35081 - DNA, 258 bp, Glycine max; identical to SEQ ID NO: 28049
  Clone ID: 700890367H1

SEQ ID NO: 35082 - DNA, 271 bp, Glycine max
  Clone ID: 700890370H1
cagatcaagtaagaatgagcatagcactaagggctgaaaagggtcttgctttaaataatagtacagaacataaagtcatataccgtgactttaaaacgtcaaatatcctactcgatacaaactataatgccaaactttctgattttgggttggccagagatggtcctactggtgataaaagccatgtctctactagggtcatgggaacccgtggatatgcggcaccagagtatttaccgacaggtcatctccctaccaagagtgatttgta

SEQ ID NO: 35083 - DNA, 264 bp, Glycine max
  Clone ID: 700890371H1
ctcgagccgaatcggctcgacttaatcgcttatcacttcacttcactattgcatcatggcacacgagacccagaacaagtatgagagctctgaggttgaggtccaggatcgtggtgtttttgactttctcggtaagaaaaaggatgaagaatacaagcctcatcctcaggaggaggtcatggccacggagtttcaagaagtcactgtctcataccaaggagatttcacgcgcagcctcttagaaaagcttcactgatgtcactg

SEQ ID NO: 35084 - DNA, 254 bp, Glycine max
  Clone ID: 700890374H1
tgcgactccgcgtgggtttggcgaaaccttctagaattttcttccatggaggttatcagagttctaacggcggcgatcacggtggcggttctcgcggcggcgcttccggcggacgcggcgacgacaaccgagtattcgcgccgtgttcggacacgcgagtgcagagatccgacggattcacgttcggaatcgcgttcgctccgaaggacaagttcttctacaacaacaacaacagcgttcagttgtcgccgtgc

SEQ ID NO: 35085 - DNA, 255 bp, Glycine max
  Clone ID: 700890375H1
gtgacgagacccatagtgctgccaaattatagtaactctctttctctatctgaagaagaagaagttctgaagaagcatgtgtggaggtgctatcatctcagacttcattggtgtgaagcgtggccgcaacctcgccgcgcaggaactgtggtccgagcttgaccctttctctgacctccttggcttcgataccaccaccaccaccaccaaccaaccaccccttccagacaaaaaagtggtgtcatcatgtgagaa

SEQ ID NO: 35086 - DNA, 260 bp, Glycine max
  Clone ID: 700890376H1
ggcttcaagtcaggaagaggtgactcttttgggagtaattggaagcccatttgcttgcagggtgaagattgcccttaagttgaagggagttgaatacaaatatgtggaagaaaatttggccaacaagagtgatttgcttctcaaatccaacccagttcacaagaaagttccagtttttattcacaatgagaagcccatagcagagtctcttgtgattgttgagtacattgatgagacatggaagaacaaccccatcttgg

SEQ ID NO: 35087 - DNA, 252 bp, Glycine max
  Clone ID: 700890377H1
tattggcagttaggggcaccttttataggggtgtatgcgatctggggctttgctagaataaagggaatgggatggggttgggctggtgtaatctggctgtacagtgtggtaacctatatccctcttgatttactcaaatttgctatccgctatattctaagtgggaaggcttgggataatcttttggagaacaagactgccttcactacaaagaaagactatggtaaagaagagagggaagctcaatgggcg

SEQ ID NO: 35088 - DNA, 242 bp, Glycine max
  Clone ID: 700890378H1
ggctcgaggtctctctctacgctttctcgttcgagatccctcaagggctccactaactgaaggagaaatggggttgacattcaccaagcttttcagccggcttttcgccaagaaggaaatgcgaattctgatggtgggtctcgatgcagctggtaagaccaccatcctgtacaagctcaaacttggagagatcgttaccacaattcccaccattgggttcaatgtggagactgtggaataca

SEQ ID NO: 35089 - DNA, 265 bp, Glycine max
  Clone ID: 700890342H1
gtttagggtttttcacaaattgagctttcactccattttcgttcccaaatactatctccaaattttgattttaccatcgatatacgacacaacatcgcaatttctcgcgggtcgttttgataactggcgaaatcgcacgataccgacagcgtcgtgcggtaatacgacacatttgttgtttgatcatgttagccaagagattaagctctttcttcaaactctccccaaaacctcagatttccacttccatgaagaaagtggatga

SEQ ID NO: 35090 - DNA, 260 bp, Glycine max; identical to SEQ ID NO: 33718
  Clone ID: 700890304H1

SEQ ID NO: 35091 - DNA, 258 bp, Glycine max; identical to SEQ ID NO: 33689
  Clone ID: 700890305H1

SEQ ID NO: 35092 - DNA, 158 bp, Glycine max; identical to SEQ ID NO: 33760
  Clone ID: 700890306H1

SEQ ID NO: 35093 - DNA, 180 bp, Glycine max
  Clone ID: 700890307H1
aagaaaacggaaacgggagcgactcggactcgaattctgatgacgcgccggagtactaccagccgatctccgccgtggaagacagtgggagttcggacgacgagcacgacggtgaattcggacacctcccgaacggttttgccgcgcacggcgtggtggagaacgggatctcgtctctgg

SEQ ID NO: 35094 - DNA, 263 bp, Glycine max; identical to SEQ ID NO: 33751
  Clone ID: 700890309H1

SEQ ID NO: 35095 - DNA, 254 bp, Glycine max
  Clone ID: 700890310H1
tttcacaaattgagctttcactccattttcgttcccaaatactatctccaaattttgattttaccatcgatatacgacacaacatcgcaatttctcgcgggtcgttttgataactggcgaaatcgcacgataccgacagcgtcgtgcggtaatacgacacatttgttgtttgatcatgttagccaagagattaagctctttcttcaaactctccccaaaacctcagatttccacttccatgaagaaagtggatg

SEQ ID NO: 35096 - DNA, 252 bp, Glycine max
  Clone ID: 700890312H1
ctcaagattgaagaatggcaattttgttgagttgcatggttactgtgttgaaggaaatcttcgtgtacttgcatatgagtttgctactatacgctctcttcatgacatattgcacggtagaaagggagttcaaggtgctcaaccaggaccaactcttgattggatacagcgagttagaattgcagttgatgctgctcggggattggaatatttacatgagaaagttcaaccaccgattatacacagggatat

SEQ ID NO: 35097 - DNA, 250 bp, Glycine max; identical to SEQ ID NO: 33707
  Clone ID: 700890313H1

SEQ ID NO: 35098 - DNA, 244 bp, Glycine max
  Clone ID: 700890314H1
aagaaaccctagcaagtggagcaatggcagacgttgaagtcgatgtggcggcagagcagcagcagggctgccgaagaagagaacgttcaagaagttcagttttcgaggcgtggatctcgatgcacttctcgacatgtccaccgatgaactcgtcaagatgttcagtgcccgcgctcgtagaaggttccagagaggcctcaccagttagcccatggccttgatcaagaagctccgtaagcgaaaa

SEQ ID NO: 35099 - DNA, 259 bp, Glycine max; identical to SEQ ID NO: 28046
  Clone ID: 700890315H1

SEQ ID NO: 35100 - DNA, 259 bp, Glycine max; identical to SEQ ID NO: 33716
  Clone ID: 700890317H1

SEQ ID NO: 35101 - DNA, 258 bp, Glycine max; identical to SEQ ID NO: 33687
  Clone ID: 700890318H1

SEQ ID NO: 35102 - DNA, 255 bp, Glycine max; identical to SEQ ID NO: 33701
  Clone ID: 700890321H1

SEQ ID NO: 35103 - DNA, 260 bp, Glycine max
  Clone ID: 700890323H1
agagagaagaagaaacttaatcgatcatcacttcacttcactaatacatcatggcagacgagacccagaacaagtatgagagctctgaggttgaggtccaggatcgtggtgtttttgactttctcggtaagaaaaaggatgaagaagacaagcctcatcctcaggaggaggtcatcgccaccgagtttcaaaaagtcactgtctcagaccaaggagagaacaagcacagcctcttagaaaagcttcaccgatctgacagc

SEQ ID NO: 35104 - DNA, 185 bp, Glycine max
  Clone ID: 700890325H1
catctttccaccttctttaaaaaatggtgttagagagtggcatactttgtggtttcctcttttagcttctaaaagaggaaacaaaaaagtatgccaatttctaacacgatctttccaccttctttaaaaaatgcatgtgttccattctaaattaaagcctcaccatatttgagaacccactttga

SEQ ID NO: 35105 - DNA, 259 bp, Glycine max
  Clone ID: 700890326H1
tggatgctctagtgtggtctgcaactatgagcaaggattatctaatcatactttctctccttctttccacggtgcttgcaacttcaagttcttcttcttcttcttcctccctctatcttgggaagggcttctcccatcgcaaattgtctcccagttatcacattcacaaaaccattgacgaatcctatgcagttatcttcgatgctggtagcacgggaatccgtgtacatgtctatcgttttaaccaacaattagatct

SEQ ID NO: 35106 - DNA, 156 bp, Glycine max
  Clone ID: 700890327H1
accggtattaatccaaaggccaaatcttattacctctttgatggttatgcacatctctcctctggtcttgcctgtggcttggctggcctttctgctggcatggctattggtattgtcggtgatgctggtgttagagccaatgcacagcagccaaaa

SEQ ID NO: 35107 - DNA, 254 bp, Glycine max; identical to SEQ ID NO: 33695
  Clone ID: 700890328H1

SEQ ID NO: 35108 - DNA, 256 bp, Glycine max
  Clone ID: 700890331H1
tatcccttcctcgtttacctgtttatccactctcacccccgtcttccacacatcttctattgaccctcgcattagtcttctgttcgatccactgaggaaatgcaaacataggaacccccgaagccaagctttccattgtcgaattccaaccacagtgcgtcacaaaacaccccacagaacgatgtgaaagaacttccacttgagaacaccaatttactatcttccccttctgttccaactcctccctgcagcttag

SEQ ID NO: 35109 - DNA, 137 bp, Glycine max
  Clone ID: 700890334H1
atagcttcgggaccgtgcttcttgaattggtgacaggtgaaagacctacccatgtggctaaagctccagaaacttttaaaggaaatttggtagagtggattcaacagcaatctagcaatgcaaaactccatgaagtc

SEQ ID NO: 35110 - DNA, 262 bp, Glycine max; identical to SEQ ID NO: 33717
  Clone ID: 700890335H1

SEQ ID NO: 35111 - DNA, 257 bp, Glycine max; identical to SEQ ID NO: 33688
  Clone ID: 700890336H1

SEQ ID NO: 35112 - DNA, 262 bp, Glycine max
  Clone ID: 700890337H1
ccaccacagaaaatgcatacccagctaattcctgacaagactcccaggtccatttttgtatacttccgaggactcttttatgatgttggcaatgaccctgaaggtggttactatgcaagaggcgcaagagcagcagtgtgggagaactttaaggacaatctgctgtttgacatctccactgagcatccaaccacttactacgaggacatgcaaagagccgtgttttgtctgtgcgcacttggatgggccccttggagcccaa

SEQ ID NO: 35113 - DNA, 261 bp, Glycine max
  unsure (1)..(261): unsure at all n locations
  Clone ID: 700890338H1
acggctctgattgggtggaagagttgagcagctcagtgcgggattggngtngacgcgtgaacgtgcatacaggacaaggaagtggcagtggcaccactgtcaacgttggtggaaaaggaggcggaggcgtaaacgtgcatgcaggccacaagggaaagccagtgcatgtttcagttggctcaaagtctccatttgattacgtctacgccgccacggaaactcaattacacgatgaccccaacgtggcactcttcttcttgg

SEQ ID NO: 35114 - DNA, 265 bp, Glycine max; identical to SEQ ID NO: 33733
  Clone ID: 700890339H1

SEQ ID NO: 35115 - DNA, 266 bp, Glycine max
  Clone ID: 700890303H1
cttcagatagagtcagttcagtggcaaaagcatctgttgtgacaggttctcgaggttctgtgcctaagcccacactaccatccaaatcaccttctggtccgacagtatcaaccaggactaaatcagtgacttccacatcttctggtaacaatttatctgacaatattggtaaatcttcttttagttacttaaaaagaagttataagccaacctcatgttgcccagttgtcaaaacaccttcaagggttgcttcaagaaataaagct

SEQ ID NO: 35116 - DNA, 118 bp, Glycine max
  Clone ID: 700890262H1
cttactttcaaattagctagatatatagcttttcttttcttttcttgctgtttggtccctacttaattatgattttaattttggaataaatgaacaacatgtgaattatgaaggagac

SEQ ID NO: 35117 - DNA, 231 bp, Glycine max
  Clone ID: 700890265H1
cttttcgggtgattgttcttcttcgctcacccacgcacgcgttacggcatgaatgcgttcaaggcatataaggcctgtgtgccaattgcttggagccccaatatctatatgactctagttaggggtattccggggaccaggaggctccataggcgcactttggaagcacttcgcttgcgcaaatgcaatcgaactgtcatgcgatggaacacacctacagttaggggaatg

SEQ ID NO: 35118 - DNA, 232 bp, Glycine max
  Clone ID: 700890266H1
gttaaagccattagtcgggctatccgtcgagctcgggttggactaaaaaatcctaatcgtcccattgccagcttcatcttttctggtccaactggtgtggggaagtctgaattggccaaaccattggctccatactactttggctcctaagaaacctatgttccggcttgacatgagtgatttcgaggaagggcactgtgtctcaaaacttattggttcacctcctggatat

SEQ ID NO: 35119 - DNA, 229 bp, Glycine max
  Clone ID: 700890269H1
gcagtgtaagtatttacaaagcaaagcgaagcaagcattcactgaatgcgctctatctctctctttcgatctgggtactaaccctaacccgcttcgaaccgtggcttcctcaggctcgcagaacctctctcgaagaaaaccttcttcttcttcgtcttcgtcttctcaacaaacacccgggtcgacccggatcgtttaccgagaatctcggatcccatcggaatccgat

SEQ ID NO: 35120 - DNA, 229 bp, Glycine max
  Clone ID: 700890270H1
atccaacaatgtctctcaccattccctccaacctctccaagcccgccgccctccgccccaaactaagcccaaagctaaggtccgccgccacaaccaccatcgtctgcagcaccaccaacaacaacaacaacaacaacgtgtcctccgacctgaaggcgttctccgccgcgctggccctctcctccatcctcctctccgcccctctccccgccggcgccgacatctcggg

SEQ ID NO: 35121 - DNA, 228 bp, Glycine max
  Clone ID: 700890271H1
caaggaggccgtgaactccaagcccaagaagaagaagggaaccaccatcacgctttccgagttcaaccgtggcggtttcgaccagggccttacgcgcgacgagatgctcacccttccgaccgggcccaaggagcgttccgccgaggaaatgcagttcaaccgcctcggcggcggtttctcctcctacgaccgctccggcagtcgctcgcgcgaccggaacggtggcaa

SEQ ID NO: 35122 - DNA, 225 bp, Glycine max
  Clone ID: 700890273H1
cgagggtgttcaccacagtttacactcacgagagtacccattttctcttctcaatttctcaagtgtgccgagaaaatcatggtggacgcagcagaacgtagatacttggaggatgatgattcatctctcatgaaaactatcaagggcgcaacaactggtttagtggctggaactatctggggtactgtagttgccacctggtatgatgtcccccgtgtcgagaga

SEQ ID NO: 35123 - DNA, 223 bp, Glycine max
  Clone ID: 700890274H1
ggttcattgtcaagttagagaggctaagagatcattgctaaaccacggccttgggcatggtattcttaagtgtatcgcaaaccataccgctatgggggtcctatacccggggccgaggttcattgtcaagctagtggcgctaagggatcattgctacaccacttctatggacgtgatgggctccaggacatggagatattgggtgctctgtgggacgaagacc

SEQ ID NO: 35124 - DNA, 228 bp, Glycine max
  Clone ID: 700890275H1
cttgtcttggaccttgaatctcacaagttgcaagctttcactgacgcatatgcagaacttgcacctgctttgtctgatctgaatgttcttgttgagacctactttgctgacatccctgctgaggcgtacaagaccctcacatctctgaatggcgtcactgcatatgggtttgatttggtccgtggaacccatactcttgatttgatcaagggtggatttcccagtgga

SEQ ID NO: 35125 - DNA, 229 bp, Glycine max
  Clone ID: 700890276H1
ccgattcagaaaactgaagaggagtggaaggtcattctctcccccgagcagtttcggatccttcgccagaaaggaactgaattgaagggtacaggagaatataacaagttttatgaagaaggaatttacaactgtgctggctgtgggactcctctttacaagtcttcaaccaagtttgattctggttgtggttggcctgctttctttgagggttttcccggtgccatcg

SEQ ID NO: 35126 - DNA, 230 bp, Glycine max
  Clone ID: 700890277H1
ccaagatggatttatgcagaatacttttgggaccttggatgacataatgggtgtaatggtcaaaagggagcaaaatgagtcgacattgttggatggagaaatgggatttgatgcctaccctgttggatcatgcaactgatttcttcttaaccagaacgaatccaggagcaataaaatcgtgaaacttgctccagtctctgaaaccgattaatgtacacctatttttatgt

SEQ ID NO: 35127 - DNA, 238 bp, Glycine max
  Clone ID: 700890278H1
cgaggatattggagttgacatgtccgttcctagcagcagatctgcaaccccccccagtttgcaatcggtttacaatgatgatactccacaagttagacaggcgacgagtaagatttcagctaccagaaaatcctggtatggatcccgatgttagggcaagagcttttcggactttaattcaagccaaggaagctggggttgcatatataatggggcactcgtatgtgaaagcaagaaa

SEQ ID NO: 35128 - DNA, 77 bp, Glycine max
  Clone ID: 700890279H1
aaaaattagggattttttcttgctccagagagatggatttcaagttgtgtgttggtgttgtcagctgtgtgttttgg

SEQ ID NO: 35129 - DNA, 237 bp, Glycine max
  Clone ID: 700890280H1
gggtatggaagaaggagagttctctgaagctcgtgaggatcttgctgctcttgagaaggactatgaggaggttggggctgaaggagcggaagatgatgaggaaggagaggactattcataaatgaaggttttattatcaatgtaattgtttcgagtaaaaagggtatatgcttcgttacattaccctgaaccagtattgttcgttcctttttgtttttactcctgtgtgatatagtt

SEQ ID NO: 35130 - DNA, 230 bp, Glycine max
  Clone ID: 700890281H1
aataggtggtttggaggctatgaatttcattgctgttgccgcacctcatctaggatcaaggggaaataagcaggttccatttcttttgggggtacctgcttttgagaaggttgctagttgtgttattcatttcatttttagaagaacaggtcggcatcttttccttactgatgatgatgaaggaaaacctccattgcttaaacgcatggttcaagactacggtgatttgt

SEQ ID NO: 35131 - DNA, 228 bp, Glycine max
  Clone ID: 700890282H1
cgaagtttctatgcttagaaatgctacctggacactttcaaacttctgcaggggcaagccacagcctccttttgatcaggttaaacctgcacttcctgctcttgcccgtcttatccattcgaacgatgaagaagttttgactgatgcatgttgggcactgtcatatctttctgatggtacaaatgataaaattcaagctggtaattgaagctggtgtttgtccccgac

SEQ ID NO: 35132 - DNA, 227 bp, Glycine max
  Clone ID: 700890284H1
ctgataccctgagtcttgatcaggtgaaggctttggaggctgttctgccatcaaagccaacatcacagttgtcagacatggagctggatgagtgtgaggagaccacactccatgatgtgaacatggaggaagagacaaggaggaggcaacaagctcagcaggaggcatatgatgaggatgaggatatgcatggtggtgctcagagagtgcagtgcgctcagcagtaa

SEQ ID NO: 35133 - DNA, 196 bp, Glycine max
  Clone ID: 700890286H1
attttgagtctgtattgtgttacaattccattgtattaactgtgattgatgtactctattcatagcgttgagcttagcagtgtaaatgatttgatgctataaaaaaaaaaaaaaaaaaaaaaaaaaaaaaaaaaaaaaaaaaaaaaaaaaaaaaaaaaaaaaaaagggaaagaaaaaaagagaaaaaaaaaaccga

SEQ ID NO: 35134 - DNA, 225 bp, Glycine max
  Clone ID: 700890287H1
gttgataaggaagactggaaactagagacattatgtgacctttatgagactttggctatcacccagagtgtcatctttgtgaacacaaggcgtaaggtggactggctcactgacaagatgcgaagaagtgaccatacagtctcagccacccatggagacatggaccaaaacactcgtgacatcatcatgcgggaatttcgctctggctcttctcgagttctaatt

SEQ ID NO: 35135 - DNA, 225 bp, Glycine max
  Clone ID: 700890288H1
attcttcttcttcttctccctcccgccacctcacttaccctcttcctaaaccctagcctcgccggaccaccaacaccaccgcgtcaatctgacccaaatctccgcgtccttatccaccaacaactccggtgcaccacctagccagcgccgacaacatctgcggcgtaccaccactacgtcgtcaagatcagcacaaccacacctagcaccgaatccagccaacaa

SEQ ID NO: 35136 - DNA, 105 bp, Glycine max
  Clone ID: 700890291H1
taaaccaacactacagcacctctagatttttattttcttcactgttcacactattttctcctttcctttcacattatcccttcccttttttagaacagagccatc

SEQ ID NO: 35137 - DNA, 250 bp, Glycine max
  Clone ID: 700890292H1
cgctttcaatagatagatagagcattcattcatcaccaacatggctcttctaggcttaatgagttttgctgccttgacccttttcttggtcctaacaactgtgcctcgtcaagcacacgctgtcaagcccgtggcaacttcagggcagataacattcaagccctctcgagtgtatcggcatagtgtgtcctcttactagtcagttgtgccataggagtacaagtgctcaagtaacacgcaggttgacaac

SEQ ID NO: 35138 - DNA, 229 bp, Glycine max
  Clone ID: 700890293H1
ctttatgtcactgtgctcaccattattggctacaaaaggcagactgatacaacggtaggtggcaccgactgtgatggggttggcattttgggcatcgcttgggcctttggtggcatgatcttcatccttgtttactgcaccgccggtatttcaggaggacacataaacccggcggtgacattcgggttgttcctaggacgcaaggtgtcgttgataagggcgttgttgt

SEQ ID NO: 35139 - DNA, 231 bp, Glycine max
  Clone ID: 700890294H1
gactagttcaagatcgcgagcggccgcccttttttttttttttttagataaaaccccaagttctcatgatcaatccagaatttgcacaaactgaggctgaaattctccatgatcctgtcaaaaaaaaaaagggtagctatgaagagaccattagggtcttgaccacaaggtgcaggacccaacttgttgcaactttcaaccgctacagagagatccatggcacttccatct

SEQ ID NO: 35140 - DNA, 234 bp, Glycine max
  Clone ID: 700890295H1
gtgatcaaactgcaattgtgtgggatgtgaaggcagaagaatggaaacaacaatttgaatttcattcaggtccaacacttgatgttgattggcgcaacaatgtgtcttttgccacaagttccacagacaatatgatagctgtttgcaaaattggagaaacccgccctataaaaacttttgctgggcaccagggtgaggttaattgtgtcaaatgggatccctcaggttcattgc

SEQ ID NO: 35141 - DNA, 238 bp, Glycine max
  Clone ID: 700890296H1
aaagagggctccaaaagttgaagttgggactaagactactgatgcttcaacagatgaatggctacagggaactgcttatactcagtctctgtcaagcaagtcaaagaagaagaagtagataaacaatttctcacgttcagccactcactagactctaccatggatatggaatacagaatcctgtaactgactagggttgagtatgagagaacacgaggaagtagttgtgaaattttgg

SEQ ID NO: 35142 - DNA, 232 bp, Glycine max
  Clone ID: 700890261H1
ctcaaaaatggttcactctctgctcctacttcttctcctcctcactctcactgcaacctctgctcaacatgacggcccttcgatcacagccaccatggagcaattctccggttacaaaatccacgaacctcactctttccaaccctcttcactctccgttgatgctcaggctcttcagaaccagattgatgagcttgcggcgttttctgactcacctgctccatcagtaacc

SEQ ID NO: 35143 - DNA, 249 bp, Glycine max
  Clone ID: 700890301H1
aaccttatctccttatgtagtcccgtgtttgtgtctgtatttgtctctcacatgaaaatgtctcgctgcggtggtaactgtggccacctctcatctttccttctctgactcccaaactctctcttcacaactctccacttccttcgcttctctctcagcctctgcaacctccactctttcgccaaccccttctgtgtactgtggcagaggggacggaaaatgccagggaaagcgcttcgccattcattt

SEQ ID NO: 35144 - DNA, 255 bp, Glycine max; identical to SEQ ID NO: 33698
  Clone ID: 700890302H1

SEQ ID NO: 35145 - DNA, 234 bp, Glycine max
  Clone ID: 700890222H1
gcactatagtaaaaaaaggacattcattcatctatggctacccttattgctcccagcaaccactctccccaagaagatgctgaagctctcagaaaggcttttgaaggatggggaactgatgagaacactgtcatagtaattttgggtcatagaactgtgtatcagaggcagcaaatcagaagagtttatgaggaaatttaccaggaggatcttgtgaagcgcctagagtctgag

SEQ ID NO: 35146 - DNA, 233 bp, Glycine max
  Clone ID: 700890223H1
gaagatgaccctattactcttggtttcgttgacaaacccaagaatgaatggtctcttcgccgtcaatatttcccaagcaaaactggtggagtcccggcttggcttgaccctctgaatataccatcagggagatcatctgtgtgtgacatttgtggagatcctttacaactcttgcttcaggtttatgcaccaactgacaaggaaaccacatttcaccgaatgttgtttgtttt

SEQ ID NO: 35147 - DNA, 233 bp, Glycine max
  Clone ID: 700890224H1
ggaatcccaccggaccagcagaggcttatttttgctggcaaacagctagaggatggaaggaccctcgctgactacaacatccagaaggagtcaactctgcacttggtgttgcgtcttcgtggggggttttaagctggagctgatttctgtgtgatgttcgatgttggattttcccaaacattttaagaagaaatgtgatgtgtaatgggtctgtaatgacctttgaaaataag

SEQ ID NO: 35148 - DNA, 72 bp, Glycine max
  Clone ID: 700890225H1
ctcgagccgaatcggctcgagactagttctagatcgcgagcggacgcccttttttttttattttaaatgatt

SEQ ID NO: 35149 - DNA, 234 bp, Glycine max
  Clone ID: 700890226H1
ggagattattgagactgagcatggaaaaagtgagataacattttatggaaactccttcatagcaggacctactggagaaattgtttcaattgctgatgataaagaggaagctgttcttattgctcaatttgatttggacaatatcaaatccatgaggcattgctggggtgtattccgtgataggcgtcctgatctatataaggtgcttttaacattagatggcaacaatcccgt

SEQ ID NO: 35150 - DNA, 95 bp, Glycine max
  Clone ID: 700890228H1
accttaagtttaattgcattgggctgaaaaaacttatcttcaaaaaagaaaagaaaaaaaaaaaaaaaagaaaaaaaaaagagaagaagagaaaa

SEQ ID NO: 35151 - DNA, 242 bp, Glycine max
  Clone ID: 700890231H1
ggagggtccttagttctgtttctctttcttctctctgttctctcaaccaagttctcaattcaatcttcttcacccttttgatctgctaattctcaaggtattcaaaattgggaggttttcgtttgaattgtgatgtccaagccactgctaggcataggggaggaggaaggtcaaagcaatgtcactttgttggtttcttcctcagtcatcatggaaagtgtgtgcctgaatagctcaaaatt

SEQ ID NO: 35152 - DNA, 243 bp, Glycine max
  Clone ID: 700890232H1
ggaatcccaccggaccatcagaggcttatttctgctggcaaacagctagaggatcgaaggaccctcgctgactacaacatccagaaggagtcgactctgcacttggtgttgcgtcttcgtggggggttttaagctggagctgatttctgtgtgatgttcgatgttggattttcccaaacattttaagacgcaatgtgatgtgtaatgggtctgtaatgacctctgaaaataagtttggattgt

SEQ ID NO: 35153 - DNA, 183 bp, Glycine max
  Clone ID: 700890233H1
gtgacaccaagtgaaccccagataagagagatagctttgtggttgtctgagtaccatatggattccacaggctttagtacaaatagcttgtttgatgcagggttcccatcggctctttctctgggtgatgttgtgtgtggaatggcatctgttagagtaattccaaaagacaggtatttgggt

SEQ ID NO: 35154 - DNA, 235 bp, Glycine max
  Clone ID: 700890235H1
cggctcgagcgtaaccaggctctggttttgcggttagggtagctctttctactcaaaacaaaacaaaacatcaatttctgtttcagttcgcggagatcaatatttgtcgctgaggtcgatcgtcgataaaaggcaatgtttttgtgggattggttttatgggattctagcgtcgcttggcctgtggcagaaggaggccaagatcttattcttgggcctcgataacgctggcaaaa

SEQ ID NO: 35155 - DNA, 231 bp, Glycine max
  Clone ID: 700890237H1
gcaccagtttcaccgcacgaatatcttgttgtttggagcgatccgagaaaaactctgtaaacatgttggtttaccaggacctccttacaggtgatgagcttctctctgactccttccgttacaaggaaattgagaatggaatgctgtgggaagttgaggggaagtgggttgttaaaggagcagttgatgtagacattggtgcaaacccttctgctgagggtggaggagaag

SEQ ID NO: 35156 - DNA, 212 bp, Glycine max
  Clone ID: 700890238H1
gtgcaatctttgagtattgacagtcttaaactaaaatttgtgtattgcttctagtttggtaggggtaaaaataagaaggcagtttctactgagcatgtctgaagactaagctttgtatttctcataattttgtttttaaacatttcttacaaggactcaaggaggatccgatcatgtttcctttccatatcatattaagcgtttacgccttc

SEQ ID NO: 35157 - DNA, 232 bp, Glycine max
  Clone ID: 700890239H1
caagttcttcgatgggcccttggatcagttgaaattttcttcagcagacattgccccctctggtatggttttgcgggaggtcgcctcaaatggctgcagagacttgcttacataaacaccattgtctacccctttacatcccttcctcttgttgcatattgtactttgcctgcaatttgccttctcacaggaaaattcatcataccaacgctttcaaaccttgcaagtgccc

SEQ ID NO: 35158 - DNA, 109 bp, Glycine max
  Clone ID: 700890242H1
gggccagtacttttcgggtcacacggaagcaatgatcacagccagcataatcgggacaagtagtgcgacagtacaatagacaggagttcatagttgagtcacaagttgg

SEQ ID NO: 35159 - DNA, 233 bp, Glycine max
  Clone ID: 700890243H1
ggcaaaacaacttacagaagaaaagtatggtgtccctggcggaacaaatggtgcttggaaggaagagttagaatctgctgttaaaaggtatgcatctgtcatgacagaacttgatgctgcaaagcaagcactgagcaagactcggcaagagtatgattcatccttggatgaaaaaatgtttgctttcaagcaagcagcagaagctggagatgcattgaaggaaaacacagaaa

SEQ ID NO: 35160 - DNA, 235 bp, Glycine max
  Clone ID: 700890244H1
ctcgagccgaatcggctcgaggcgctgatgctgtgggctcagttagtgcaatcttagataacgtacacaaaaattgagccagatgatgacatagatgggtacaagcctgaaaagctaacagggaaaatagagcttcatgatgtccattttgcatacccagctaggcccaatgtgatgatcttccaaggcttctcaatcaaaattgatgcaggcagatcaacagcattggtcgggc

SEQ ID NO: 35161 - DNA, 235 bp, Glycine max
  Clone ID: 700890245H1
gctagccaacctcaaataacccttgttatctctctttcattctcacttgtactcatctgtttttcacaactttttttgtagcttctgatctaatggcagttccagtgattgatttttcaaagctgaatggtgaagaaagaaccaaaactatggcacagattgctaatgggtgtgaagagtggggattttttcagttgatcaaccatggtattccagaggaactccttgagagggt

SEQ ID NO: 35162 - DNA, 235 bp, Glycine max
  Clone ID: 700890246H1
cgaggatattagagctcgaatgtccgctcctagcagcagatctgcaaccctctagcatttgcaatcggtttacaatgatgatactccacaagttagtaaggcgacgagtaagatttcagctaccagaaaatcctggtatggatcccgatgttagggaagagcttttggatttaattcaagccaaggaagctggggttgcatatataatggggcactcgtatgtgaaagcaagaaa

SEQ ID NO: 35163 - DNA, 239 bp, Glycine max
  Clone ID: 700890248H1
gcaggttgtttgcgaagaaggaaatgaggattctgatggtaggtctcgatgctgctggtaagacaaccatcttgtacaagctcaagcttggagaaatcgtcaccaccatccccaccatcggatttaatgttgagactgtggagtacaagaacatcagcttcactgtgtgggatgttggtggtcaggacaagatccgtcctctgtggaggcattatttccagaacactcagggtctcatt

SEQ ID NO: 35164 - DNA, 238 bp, Glycine max
  Clone ID: 700890249H1
acacaacaccttttccttttcccttccgttggtgccattcgtgcagcaccggatcctctcatttctccggcgataactctcccttttccggcgaattcaccgcttcctcgatatgaatcccgagtatgactatctgttcaagctccttctgattggagactctggtgttggtaaatcatgccttcttctaagatttgctgatgattcatacattgagagctacataagcaccatcggg

SEQ ID NO: 35165 - DNA, 233 bp, Glycine max
  Clone ID: 700890251H1
gtactcgccactggcaggtccacctggcacgtcaagaacatcgctcaagccctaatttacaaggctaagcagaaacagagaggagttgaacgaatgatgctaccgagtgtggaaggtcaagcaggaggaaagtggatcgtcattgactctggtaaagtgatagttcatgcactcgatgaaaaggctagagcttactacaatttagagggtctttggacccctgggggaattca

SEQ ID NO: 35166 - DNA, 231 bp, Glycine max
  Clone ID: 700890252H1
agcatggagagaccaattcattcatccccctcttcagagagccaagcagcattgagaaaatcttcggggacttcgaaagggagcaacaattactggggttaaggcctgccactcctccggagagacctaaaacaccaccttatgtccctccaagagctccttctcctagacctccctctccgagggctccttctccaaggcctccgtctccaagggctgcttctccgaggg

SEQ ID NO: 35167 - DNA, 230 bp, Glycine max
  Clone ID: 700890253H1
agcaacttctttaacaatctttaatcattttgtttatttttctgtccacatgcagttaatttaatcaattgatttatttattcctaggattttgtgttattattatatgatatgattaccaccaatgcattggcatgtaacttgttacttggaagcaagactaatttatggttgttctttttgataatgacccctttgccatggaaataatttctagatgcttttgatgg

SEQ ID NO: 35168 - DNA, 229 bp, Glycine max
  Clone ID: 700890254H1
ttccaccccaattcccattgtctgttcttcttcttcttttctttctttccaccatagaatcttcctcccttcacacccccacccctctgggtttctctcctcaattttgcatctggcggcttctcagttctcaccaccatcatggtttcacttggagctacctgtgctctgtgctgttctatgttcatggtgtttgtcactttgagtttggctggggacatagtacacc

SEQ ID NO: 35169 - DNA, 231 bp, Glycine max
  Clone ID: 700890255H1
acaacctgtcctaactctcaaccctcttcctcttaattaatctattcctctttatcctcctctgaacctcaaacaccaaaacaaagcattacaattctcaatttcacataaacaccagaattgataaaaacacataacaaaaaaaaaaagtgaaaaatggcgagcgcagtggagaaggagggtggcgcgagccaggaaactttgtctttggagcttcctgctccacctggt

SEQ ID NO: 35170 - DNA, 236 bp, Glycine max
  Clone ID: 700890220H1
atataacactcgtaacaatttcacaaagttcataaaactttactataaacagtagtggagagagggagaaaaaccaaagaagattgaccatggcttcttcattgaggatctcaaggctcctctctcagggttttctttctgcttccactactactcctttcgtttctagaggcggaagtggtgctcttggtgcagggctcagtaaattcagcactgctgctgccattgaagaacca

SEQ ID NO: 35171 - DNA, 231 bp, Glycine max
  Clone ID: 700890256H1
ctgtgggttctacgtgatggccgtattgggtttcttgacttcggaatatttggtcgtatatcccctagaacatgggctggctatggaagtcttcttaggatcaattgccattgaagattatgactcaatggcatcttccttaattgaaatgggtgctacaaaccagggtgttgatgctaaggcctttgcaagagattttgagaaagtattctcgtcaattagggaattggc

SEQ ID NO: 35172 - DNA, 229 bp, Glycine max
  Clone ID: 700890258H1
ggaaaaatggttacgttcaggtttcaccagtaccaggtggttgggagggctcttcccacggaagcagatcagcaccccaagatctaccgaatgaagctctgggccaccaacgaggttcgcgccaagtccaagttctggtattttctgaggaaactgaaaaaggtgaagaagagcaatggccaagtgcttgccatcaacgagatttttgagaagaacccaaccaaaatta

SEQ ID NO: 35173 - DNA, 229 bp, Glycine max
  Clone ID: 700890259H1
gagatgagatccttccgactcttatgcctattgttcaggctaagttgtctgctggtggggatgatgcttggaaagatagggaagctgctgtcttggctcttggtgctataggtgaaggttgcatcaatggtctttatccgcatctgttggagattgtggcatttcttgtccctcttcttgatgataagtttcctctgatacgaagtatttcatgctggacactatcacg

SEQ ID NO: 35174 - DNA, 245 bp, Glycine max
  Clone ID: 700890182H1
gtggatccggctgatgtggatgctatatcaaagactgtcaaaagggcccttgcagtctatggaactccagcttttacagaaattatcaagaactgcatggctcaagatctttcatggaaggtgagtaaaggaagaacctgagtaatacaccataagctgtgatgagatttaaatatattttttgaatttaatttctatgcactgattatcagtgtcaatcaataagaaatcatgataaatatgac

SEQ ID NO: 35175 - DNA, 243 bp, Glycine max
  Clone ID: 700890183H1
gacgggtcaaaagcagatatctggtcatgcggcgtcgttttgtacgttcttctcgctggatttcttcctttccaacacgagaatctcatgacaatgtattacaaagttctcagagccgagtttgagtttccaccgtggttttcgcctgagtcaaagaggctaatctccaagattctagtggcggatcccgcgaagagaaccaccatttccgccataactcgcgtgccgtggttccggaagggc

SEQ ID NO: 35176 - DNA, 245 bp, Glycine max
  Clone ID: 700890184H1
gtgagcttcccagtactttgagagccttcagattccagcagcacagatggtcatgtggtcctgctaatttgttccgcaaaatggtgatggagattgtgaggaacaagaaagttaggttttggaagaaagtgtatgttatatacagctttttctttgttcgcaaaatcatcgcccacatggtcaccttcttcttctactgtgttgtgattccccttacaatcttggtcccagaggttcatgttcca

SEQ ID NO: 35177 - DNA, 234 bp, Glycine max
  Clone ID: 700890186H1
gtcatggattcgtcaagagattttgcagatattgtgtgcagaaatggggaaagagagaaagtatactgggctgacaaagttgaaaattatagaaaatcttctaaaaattgtttctgaaaagaaatcaggcgggaatgaaactgcggcagaccctgaaccacaatcttctcctgcacctggtcataaggctgccaaaaggcagaggaagtctgagaatccttcacacatcgctgt

SEQ ID NO: 35178 - DNA, 237 bp, Glycine max
  Clone ID: 700890187H1
caagctatgtgagtttcaaccgcggaagaagaagaaggtgtgtttcgacgcgcctaggcttgcggtgcggtgtgtgaaagcctcggcgcagcgaaccggtgatactatcgacgatggagagactcggactgggttcaccacacctgccatggaagtcaccacattcaatcgaaccactttcaccgatgctgctgacactcccgtttgggaaaagattggtgctgtcgtcagactcag

SEQ ID NO: 35179 - DNA, 247 bp, Glycine max
  Clone ID: 700890189H1
tctcgagccgaatcggctcgagggccagatggggacgggccatataacataaacattcaaaaatactgtgcagtttcagttaacagtcaatattgttgctctgattattaactttgtttctgcatgcatcacaggatctgctcccctcacagctgttcagttgctttgggtcaacttgattatggacactctgggtgcattggctttggccactgaacctcccaatgatggacttatgctaagaccc

SEQ ID NO: 35180 - DNA, 243 bp, Glycine max
  Clone ID: 700890190H1
gacaatgtgcagattttggaaaagatgaggcatttggtgttattcattgagcgaaatttggaagagaaggatgtcattcggctaagctttttctctcaacccgatggcccgctgatgggaaatggttcctttaagtcctcatcactagttccaggtataaaagaaggaatatatctcggtccaccaccaaaagaaaagcttcccaagaattctccacaaggatctgttttgctaggggcaatt

SEQ ID NO: 35181 - DNA, 240 bp, Glycine max
  Clone ID: 700890191H1
gcctcatggtgcaaattgtggtcctccagtgcatcatttggtacaccttgatgctcttcttgtttgagtttagaggtgccagaatgctcatctctgagcagttccctgacactgctgcctccattgtctccatccatgtggactctgatgtcatgtcattggatggaagacaaccacttgagactgaagctgagatcaaggaagatggtaaactccatgtcactgtgaggaaatccaatg

SEQ ID NO: 35182 - DNA, 241 bp, Glycine max
  Clone ID: 700890194H1
gaaagcactaaggttgacaaggtggttgtcctgtggacagccaacacagagaggtacagcaacgtagttgtgcggactaaacgacaccatggaaaacctctttgcttccttggacaggaatgaggctgagatttccccttccaccttgtatgccattgcttgtgttatggaaaatgttcctttcatcaatggaagccctcagaacacctttgtcccaggactcattgatctggccatcaaa

SEQ ID NO: 35183 - DNA, 242 bp, Glycine max
  Clone ID: 700890196H1
ggaaaaaagaaactaaagaaaaaaagtgagccatgtcaggcttgtataatcccaacttctctcctgctagagctgcttctcctcagattaggagcaatccagaagtggacagccagtacctatcagagttgctggcagaacatcagaagcttggacccttcatgcaagtgcttcccatatgcagccgcctcctaaatcaagaaatattaagagtttctggaatgttgtccaatcaaggtttt

SEQ ID NO: 35184 - DNA, 245 bp, Glycine max
  Clone ID: 700890201H1
accttacctgtcccttataacatcaaaggccaacaaaaacaatgcatccttcatggatggtgttagctttgcctctgcaggtgctggaatatttgatggtacagacgaacgttatagacaatcaataccgttgagaaaacaaatggactactactcaattgtgcatgaggaaatgactcgagaagtaagaggagcagctggtctacagaagcatctctcaaaatcaatattcgttgtggtgattg

SEQ ID NO: 35185 - DNA, 241 bp, Glycine max
  Clone ID: 700890202H1
ggcaaccagctttcaccttttgttatttccattttccattcccatcgtaaaaatacaaaaatcataatcagtcatagcttcggcgacttcacgatattcctttcttcttctgattgagccaccgacagagcctgcgattaccgtggcggtttcagaatggcggacaagtacaacctcaagaaccccgccgtgaagcggatcctccaggagctcaaggagatgaactccaacccttccgacg

SEQ ID NO: 35186 - DNA, 240 bp, Glycine max
  Clone ID: 700890203H1
gttaacgttttctgttttctttccgtcgacgttctggctgcgtcccaagaatctctgacgccgttgtcggttttctccggccacggctacttccaacggatggcgacgacgaccacggagttcgatctcgattacgagttccccgatctcgattacgaccttcgctatctcagtctcgccggaatcgatgccctcaccgctttccaaaacctattaccggtcagttctctctctctctct

SEQ ID NO: 35187 - DNA, 240 bp, Glycine max
  Clone ID: 700890204H1
ttcctgttgtgtgaagcaaaaattaaggaaaggcttatggtcccctgaagaagatgagaagctatttaattacataacaagatttggagtcggatgctggagctcggttcccaaactagctggattgcaaagatgtggaaagagttgcaaggtgggaatggataaactatttgaggcctgatttaaagagaggcatgttctcacagcaggaggaggatcttataatcagtcttcatgaag

SEQ ID NO: 35188 - DNA, 232 bp, Glycine max
  Clone ID: 700890205H1
aaagcagcatcctgatagctatcataccttgatcatggattgaactttcagactttgaggtcgtctatggcaaggagttaagggacaagcccttttaggttttgttgccgaactaacatgtaatacaaaccatgtcaatcacaagacatcgatggcttttaaagtgtcatcggaagtacagctatgatcgtcttagagtttaacataagtctatatcctatattttagctct

SEQ ID NO: 35189 - DNA, 235 bp, Glycine max
  Clone ID: 700890206H1
ctgggactgtgtacaagattgagttgaaaagtggtgatattgttgcggtgaagaggctgtggagtcacgcgtccaaggattcggctccggaggatcggttatttgtagacaaggcattgaaagcagaggtggagaccctgggaagcataagacacaagaacattgtgaaactgtactgctgcttctccagttatgactgcagccttttggtttatgagtacatgccaaatggtaa

SEQ ID NO: 35190 - DNA, 237 bp, Glycine max
  Clone ID: 700890207H1
atcaccactagcgaacacttccattgtttttatctcacaggatcgatcgatatcaccagcatcaccatggcagaggtggcgccgccgaagaaggaaaacccgaaccttctcctggggcggttcgagctcgggaagctcctcgggcacggaaccttcgcgaaggtccaccacgcgcgcaacatcaaaaccggagaaggagtcgccatcaagatcatcaacaaggagaaaatcctaaag

SEQ ID NO: 35191 - DNA, 232 bp, Glycine max
  Clone ID: 700890209H1
cttcgccgcggtggccaccgccgcgatggcgtggacgtccggcgccgacgacatcctgatccgtcaggtggtgccagatgttggcgaacgaaggaggacgagcaacctgctgaacgccgagcaccacttcgcgagcttcaaggccaagttcgccaagacctacgccaccaaggaggagcacgatcatcgcttcggcgtcttcaagtccaacctccgcagagccaggctgcac

SEQ ID NO: 35192 - DNA, 234 bp, Glycine max
  Clone ID: 700890211H1
ctcgagccgagatcggctcgagatactgacttcctgctttgtttatcggatctatggcttccacggagttctcgggtctttgctccttggctccttcactatctgagacgattttgtgcactactcggttgaagatgtatatgctggagagcaaaggaggtgccatatcatgcatgttcttgtctcttttcttcttggggacatggcctgctcttttgactatgttagagaggc

SEQ ID NO: 35193 - DNA, 237 bp, Glycine max
  Clone ID: 700890212H1
ttttgatttgcctcatgtcattgaagatgccccatcttatcctggagtggagcatgtaggtggagatatgtttgcgagtgttccgaaagctgatgctatttttatgaagtggatttgccacgattggagtgatgagcactgcttgaagtttttgaagaactgctacgaggcactaccagacaatgggaaggtgattgtggcagaatgcattcttccagtggctccagactctagctt

SEQ ID NO: 35194 - DNA, 242 bp, Glycine max
  Clone ID: 700890214H1
cagttttccaagggtcagttgggagtcaaatttaagccattttcaaagtatcctccttgttacaaggacatgagtttctggatcagtgaatcatttactgaaaacaatctgtgtgaagttgttagaggaatagccggggatcttgtagaggaggtgcaattaatagacaacttcaccaacaagaaaggaatgaccagccactgctataggattgcatataggtctatggaacgttctctcac

SEQ ID NO: 35195 - DNA, 246 bp, Glycine max
  Clone ID: 700890215H1
tggctcgagcggctcgagctcgagccgaagtcggctcgaggttcgttttgttagagtattcctattttcctcgtgtcactttaccaagatttaacatggtggtgattgctttgaattctcatagttgatccataagggagcttgaaagttagtctcttttttattgtatttttttggtctttctatttttgagctgaggatggagtgtaggagaaagaaggagaatcaaaaatcaaactccacttt

SEQ ID NO: 35196 - DNA, 245 bp, Glycine max
  Clone ID: 700890216H1
aacctattattgaagagccaatcatggatatggatcccatgacagccaccatctccatgatatcttgtggggaagatgtctcctcacagggactaaaatccactgatattgatattcttcaaaatgatcagtttctgcatgaggtgttctatgaatgtgaaaaggatctcttagaaaaggcagcaatagagccaccattctctgagattctggaaatcaaggttcctcttctgaacattgatgag

SEQ ID NO: 35197 - DNA, 240 bp, Glycine max
  Clone ID: 700890217H1
catgaagctgaagatgtggaaggaaaacaccacacaaatccatatgtgcgactgctatttaagggagaagagagaaaaaccaagcatgtcaagaaaaatagagatccaagatggggtgagtcgtttcaatttatgcttgaggaaccgccaaccaatgagagactatatgttgaagtgcaaagtgcctcctcaaagctaggcctgctgcatcctaaggaaagtctgggttacgtggatata

SEQ ID NO: 35198 - DNA, 229 bp, Glycine max
  Clone ID: 700890218H1
caatcagagaaattgagcgtgagcggcaaggattgcaaacacaagaaaagaaattgattgcggagataaagaaaagtgccaaacagggccagatgggagctgttagagttatggcaaaagatcttgttagaacaaggcatcaggttgagaagttttataagctaaaatctcagctccaaggtgtatcactcagaattcagactttgaaatctacacaagcaatgggtga

SEQ ID NO: 35199 - DNA, 246 bp, Glycine max
  Clone ID: 700890181H1
cgagatattgtactggtgaggtctcggtcaaaactacttgaggaattgcaaaaactgcttcccccaacagtattgatacctgaaaagagattggaacatctagttgaacaggcccttgtcttgcaacgtgaggcttgcctgtttcacaactcattggataaagagatgtcattatattcagatcatcactgtggaaaaactcagataccttctaggacatcacagatattagaagcacacgatgat

SEQ ID NO: 35200 - DNA, 156 bp, Glycine max
  Clone ID: 700890219H1
gagagttagttagggataatagggcagggaagaataagagggatgtacaaagaacgagagcgagttggtgtttctgttgtccgcttccaaatacggaggagtcggacagcgaattcaagcgagcgttctcgataagacaacttgggaaacgaatcc

SEQ ID NO: 35201 - DNA, 254 bp, Glycine max
  Clone ID: 700890145H1
gtgtgtttgtcacgagacccatagtgctgccaaattatagtaactctctttctctatctgaagaagaagaagttctgaagaagcatgtgtggaggtgctatcatctcagacttcattggtgtgaagcgtggccgcaacctcgccgcgcagggagtgtggtccgagcttgaccctttctctgacctccttggcttcgataccaccaccaccaccaccaaccaaccaccccttccagacaaaaaagtggtgtcatc

SEQ ID NO: 35202 - DNA, 254 bp, Glycine max
  Clone ID: 700890146H1
agactgttttcactattgcaaataggtatggtgattacattcggacagggtggaggaatattcttgattgcatcttaaaatttcacaagttaggtcttcttcctgctcgtatggccagtgatgcggctgaagagtcagagctttctacagaaactgaggatggggggaagcagaatactaattctttatctttatctcgtcttccatctgttaatactccgaagagaccctcaggattgatgagcaggtttagt

SEQ ID NO: 35203 - DNA, 255 bp, Glycine max
  Clone ID: 700890147H1
accggttgttgcctgggtcagtgggacatgtgcacgactattcaaatctgaagtacaatttggtcatgcaggagccaaaagtggtggtgagttggagtctgctcaagcaaagaatcaggcactaagggatgctggagctgttgttcccacatcatatgaagcttttgaagtttcaattaaggaaacatttgataaattggttgaagatgggaagatcacaccaatcaaggaaatcacacctccaccaatccctga

SEQ ID NO: 35204 - DNA, 256 bp, Glycine max
  Clone ID: 700890149H1
gtctttctgttcactatgttattactaaagggttcatgacattcgcttgaaaccttggtttgtatcaattgtagcactagtttgattttggtgccaagttcttgagctgcggtggtgctgaccctgaaaagttctccaagtccgacatgagataaggctgctgctgctgctgcttttcaaagatgttggagctggtttcaattagtagacaaatttggttgctgaatttcgtgttcatgtgtcttcaatagatggt

SEQ ID NO: 35205 - DNA, 249 bp, Glycine max
  Clone ID: 700890151H1
gcctggacaggaggaggctttctctaaggtttgacccgatctctatcagcaggatcaaagttttgttggaaatgacctcttggactggtggcatgcaaaccgagcaggggtgttgtttagtatgatggatgtgacctgattgtcaactataagtttgttggtcactattaaattcatgccccatatgtactggatgaatgataatttggaggccagtgtattgtatacgagtatttatttttcaacatt

SEQ ID NO: 35206 - DNA, 256 bp, Glycine max
  Clone ID: 700890152H1
ctcgagccgctcgagccgcacaagccaagtgaaagtgagaaaaaataaaaatcaaagagcataatgtcaaggatcattcacaagattggggagacccttcatgtgggagggcacaagaaggaggaggagcataagggtgagcaccatgctggagaatacaaaggggagcaccatggtgaacacagtagtgagtacaaaggagagcatcatggtgaacacaaagctggagagtaccatggtgagcacaagccagagc

SEQ ID NO: 35207 - DNA, 254 bp, Glycine max
  Clone ID: 700890153H1
cacgcttcagaagacatggcctcattgggtgggttacaaaatgtgagcggcatcaattttcttatcaaagagggtccaaaagtcaatgcaaagttcgagctgaagccgccaccatatccactgaatggtttggacccggtgatgagccagcagacacttgagtttcactgggggaagcaccacaagacttatgtggaaaatctgaaaaaacaagttgttgggacagagcttgatgggaagtcactagaagagat

SEQ ID NO: 35208 - DNA, 249 bp, Glycine max
  Clone ID: 700890155H1
gctttatccttagttttttttcttcaacggatgaaggaatcatcttgatcgtacggaacttgttctatctttccgtaatcgaacttggtggccactgtatataaataagttcagttcaacaacacaatcattttgtatatgatcaaattaagtgattgtgggcattgttctaggaagagagatgagcatgagcatgttgtggaagatgaattacacagaggagtctcggggatgtattgtaggaattgc

SEQ ID NO: 35209 - DNA, 254 bp, Glycine max
  Clone ID: 700890156H1
gatttctattgtagttacacattatcattcataccagttcatgattacataacaatgtaaaagtcttttacaatcactgcatatactttttactcgacatatttaacattttccaaattgtgctttgaatgccttgcttatgttactgttggaactaaaactaattgtcacatggactacttgccaacttcaattctaacaataggaaacaggggagcaggaagaagcccactagactgggactccagagtgaa

SEQ ID NO: 35210 - DNA, 253 bp, Glycine max
  Clone ID: 700890157H1
gccaaatccctcgaagatctcctccgattcaccgacatgtccaacctcgatgcgtctctctcgtctcttaacctcggccacggctccatcgtcttcttggcctacgagggcgagcggcgcgtggcgggccccgccttcaaccccgccggctccttcggccgcaagatgaccatggacgacctcatcgccaagcagatgcgcgtcacgcccaggagaatccacactgcgagctcgtctccttcgaccgcgactg

SEQ ID NO: 35211 - DNA, 252 bp, Glycine max
  Clone ID: 700890159H1
gtaagaagggagagaagaagttgttaggttgagttggattggatttctaatctaatctatacctttcttttttcctatgcttttaaggcacaaacccttctttcttccctcttctttcttcttcttattgtcattccttgcctttaccctttagggaaggaagaaggaacaactatactactattatccttattattgttattattgtaattaatctttttattatagttattgttgttgttattattcctc

SEQ ID NO: 35212 - DNA, 252 bp, Glycine max
  unsure (1)..(252): unsure at all n locations
  Clone ID: 700890162H1
aatacttttcattcacttgaaatgagcttatgggtgaaattgggtctaactcctggctcagtttctttacaaaaccccttcttcaatagtgatgattatcttcaagtgcaactagcactctttccaccaatggggcaatacattaacaggtcagaagttcaaagaattgggtttgaattgagtaatcaaacttacaagcccccaaaagaatttggaccctattactttatggngggtccttatccttttcca

SEQ ID NO: 35213 - DNA, 255 bp, Glycine max
  Clone ID: 700890164H1
agaagaagcaaagatgatattgcagttcttcgtgctttcacagagaggcgataacatcgtctaccgcgactatcgtggtgaagctcaaaaaggaagcgctgagacatttttccgaaaagtaaagttctggaaagaagatgctgagggagatgctccacctgtttttaatatagacggtgtgaactacttccacgtaaaggttgctgcattgctatttgttgctactactagagtcaatgtctccccttctcttgt

SEQ ID NO: 35214 - DNA, 248 bp, Glycine max
  Clone ID: 700890165H1
actaattcaataacatagaagaatatggaagatggaagcgtcaaccttcctcctgggtttttcttctctcctactgatgaagaacttgttcttcactttctctattgcaaggcttctctcattccatgccatcctaacatcatccccgatctccatccgtctcagcttgctccttgggaattaaatggtaaggcgttgttaagtggaaatcagtactatttctttaccaaagtgaatgaaaacagagc

SEQ ID NO: 35215 - DNA, 246 bp, Glycine max
  Clone ID: 700890166H1
gccagagatggcattgtttcgctaggaggtccccatatccctcttaagactggaagaagggatggtagaaggagcagagctgatgtggttgagcagttcctcccagaccacaatgagtccatttctgcagttcttgacaagtttggtgccatgggaattgacacccctggcgtcgttgcactgcttggagcacacagtgttggtcgaacccattgtgtgaagttggtgcaccgtttgtacccagag

SEQ ID NO: 35216 - DNA, 248 bp, Glycine max
  Clone ID: 700890167H1
ctagttctagatcgctcgcgatctagaactagtcatagagcccaacctctcaagcccaagcccaagcccaagcccaagcccgttcataaaatactcctgcagcagcacccagtacccagccctctgcgtctcatccctctccgtctacgcctccagcatccaacaggaccctcaccaactggttcagacagcactctccctctccctgaaccgcacccaagccaccaaaaccttcgtggctaactgca

SEQ ID NO: 35217 - DNA, 247 bp, Glycine max
  Clone ID: 700890168H1
ctataggcgaaggactttaggttgggatttgggaattagggttattcgcgtggcgaagatgattgaggtggttttgaacgatcgattggggaagaaggtgcgcgtgaagtgcaacgaccgatgataccatcggcgacctgaagaagcttgtggcggctcagactggcacaagagccgacaagatccgcatccagaagtggtacaccatctacaaggatcacatcactctcaaggattacgagatcca

SEQ ID NO: 35218 - DNA, 91 bp, Glycine max
  Clone ID: 700890170H1
caggcagcacactttcactcatctacttacagtatgtccagtgtgacccttctttcacctgcagcataagacgatctctatagatattcat

SEQ ID NO: 35219 - DNA, 131 bp, Glycine max
  Clone ID: 700890171H1
cagagctgcaagggatcaactgaggagagtgagagaaaagagaagagaagatgacaacacgcttcaagaagaacaggaagaagaggggccacgtcagcgctaggccacgggtcgaagtccggaatagcaca

SEQ ID NO: 35220 - DNA, 246 bp, Glycine max
  Clone ID: 700890172H1
ctcgttcttcttcttttgttgttctgtgtttgtgtttgttttttctctcacctgaaaatgtcttgctgcggtggtaactgtggttgcggaagctcctgcaagtgcggcaacggctgcggaggctgcaagatgtacccagacttgagctacactgagtcaaccaccaccgagaccttggtcatgggagtggcacctgttaaggctcaatttgagggtgctgaaatgggtgtgcccgctgagaacgat

SEQ ID NO: 35221 - DNA, 247 bp, Glycine max
  Clone ID: 700890173H1
gaatattatgttactaatttttaaaatatgaataaatgttatcttatttcaatatctttggatttgattatgcatattttctttttaagttattttttggatttgattgcacatattttcttctatcatgtgtactatttttattcttcaaatttaattgaactattgtcttgattgacctttactttgtatttttggttcttcaattcattgttttcttgcaaggatcttttcatagatgtgttga

SEQ ID NO: 35222 - DNA, 242 bp, Glycine max
  Clone ID: 700890174H1
agaatcactacgtcgtcgttggaatatctgtgcagaagccgagcatgtgaacgtgactctcggcaactccggacacagtatatcgatgtcgccatggaatatgcatatggagctcctcatttctgtctagtctcagagattatgctcgtagaattctgaaagtcacagttccagccagatgctagactcgaagatctgcgcgttgaaccatggcacggtgcagcttgggagttgaacatcct

SEQ ID NO: 35223 - DNA, 244 bp, Glycine max
  Clone ID: 700890175H1
ctccggaagcccatggtacggcccagaccgcgtcaagtacttgggcccattctctggcgagcccccgtcctacctcactggcgagttcccaggtgactacggctgggacactgctgggctttcggccgacccagaaaccttcgccagaaaccgtgagctcgaagtgatccactccaggtgggccatgctcggggccttgggctgcgtcttccccgaactgttgtcccgcaacggggtcaagttt

SEQ ID NO: 35224 - DNA, 244 bp, Glycine max
  Clone ID: 700890176H1
tatagcccaagccctatacaaccaaaccctaacacacacccatttgattcagtttccatggctagcctcaaggttgcatttttggctgcagtgctctgcatggttgtggtgagtgcacccatggcacatgcagctatcacgtgcgggcaggtgacgaatagcctgatcaattgcatcggttacctccagaacggaggaacgccgccgtcgggatgctgcaacggagtgaagagcctcaatgccg

SEQ ID NO: 35225 - DNA, 246 bp, Glycine max
  Clone ID: 700890180H1
cacaaacctatgcttaaaacttaaaattatccatcttcaacttcacaatggtgcgtgtcaaagaagctctcgttgtcaccccttccgagcccacaccgaataccgttctctcactctcagctcttgactcccaactcttcttgcgcttcaccatcgagtatctttttatttacaggcccggcccgggcctggacccaacttccaccgcggctcgtttaaaagctgcattagccaaagcgcttgttc

SEQ ID NO: 35226 - DNA, 254 bp, Glycine max
  Clone ID: 700890144H1
ctcatctgcagttgcttgtgctggaccttcctttacaagacatgttgaagatgatttccatccagggcattcacttaggagcaaggcagtggcaagttattgcaccaagggtgtgctgcaatattgacttggaaatcttgatgtatgctggtactgatgctggcataaggtagcagaagagaatgtccacagttgttgtacttgtgtgctttgctctagtgacttggaatattgggagactaaaatattgtaac

SEQ ID NO: 35227 - DNA, 264 bp, Glycine max
  Clone ID: 700890107H1
cagaatcatcaaagccatcaacgggcttgacttggcaactagctggaagatgaagcaagcaactcttttcttcttctcactcttcctactcctttcctccaccaccatggccatttcaccagcacctgcagcagcaccaaaagccacagcaaaaactcctcctaccccaaaggcaacagcaccatcaccaaaaccattagttcccacaatacctcagtctccagactctcctgactcggtccccgacgacatcaccagaatcct

SEQ ID NO: 35228 - DNA, 263 bp, Glycine max
  Clone ID: 700890108H1
ccaaaacaaaatgaagagcctcctcttctctctcttcctcttcctcttcttagcctcctccgccgtcgccaccgtccccgcccacaacatcacccgcatgctggccgcacaccccggcttctccaccttcaaccactacctctccgtcacccacctggccgaagagatcaaccgccgccagaccatcaccgtcctggcccctcgaaatgccggcatgtcctccctcctcgacaagaactctccctccccaccatcaaagacgt

SEQ ID NO: 35229 - DNA, 264 bp, Glycine max
  Clone ID: 700890109H1
acttgatctacagattatagaaagcaaaccaacattactagctagtggagtatttaattatacttcacatgctcccttataatttttggaaattgatatataccaaagccgtaagatttttcccatctttctcgtgatatagttcttctggctcacaagccaataaaggcaaccacaaccttcaacttcaacagcacttgatcacattcactgtctagtgatccaccttcacttcccgtttccaataatttaaatcacactcta

SEQ ID NO: 35230 - DNA, 259 bp, Glycine max
  Clone ID: 700890112H1
cttcctgaaaatgatcagctgaatgttgcatttgttgatgttggacatgctagcatgcaagtatgcattgctggatttaaaaaggggcagctgaaagtgttgtcccaatcatatgataggtccctaggtggtagggactttgacgaggttctgttcaaccattttgctgcaaagtttaaggaggagtacaagattgatgtattccaaaatgccagggcttgtctgaggttgagggctgcctgcgagaagctgaagaagg

SEQ ID NO: 35231 - DNA, 260 bp, Glycine max
  Clone ID: 700890113H1
ctccacgccgctaactctctctcacactcagtctctgtgtctctctctctttcacacccttcactttactctctctctctgacagctaaaatgcaaggaggaatgagatcatttttgtcacatgggaatgtcattagaaatgctgttctacaacgcgtgcgcatggtgaaccccctgctacagacaattgcctcttcgcggtttgaatctgttacgcctgctcgcattgaggagcatggttttgagagcaccacaatttc

SEQ ID NO: 35232 - DNA, 261 bp, Glycine max
  Clone ID: 700890114H1
cactcccactacatcctcctcctcttcaccttccgcgacctctcccctccccccgttgcctccttcaaccgctcctaccccgtcacctcccccaacgaatactccctcttcttcgccaactgcgcccccgaaacctccgtcaccatgtccgtccacactgaagcctacaatctcgacgctgacggttcacgcgactacctctccgccggccaaaccctcctcccttccctctactttctcttctttttaacctacctctcc

SEQ ID NO: 35233 - DNA, 260 bp, Glycine max
  Clone ID: 700890115H1
gtaagggaaaggcttcctgcactgagcaccaagttgaaacctcttgattctttgcttagaattccacagaatatggagactgttcttttcaatgactccccacctttggagttcaagggtatgagcaaggaggaggaagactcattgctagggcaagttgaaatatggaggtacatgacatgcttcacggactccgtggccttgaaatccgtcatagagctgcgcatagccgacataatagaccgttatgggaaaccact

SEQ ID NO: 35234 - DNA, 261 bp, Glycine max
  Clone ID: 700890116H1
cgagactgcccagggcattttcgtcaattttaaggatttgtattattacaatggcaacaagcttcctttcgctgctgcgcagattggccaagcgtttaggaatgagatatctccacgacaggggcttctgagagtgcgggagttcacgttggcggagattgagcactttgttgaccctctagataagtctcatcccaagtaccctgaggtagctgacttggagttcttgatgttcccgagggaggagcaaatgtcgggtca

SEQ ID NO: 35235 - DNA, 263 bp, Glycine max
  Clone ID: 700890117H1
agagattgcaaataaacgacggaaaaccatgtcacaagttgctataaattggtgcatatgcaaaggtacggttccaattcctggagttaaaacaattaaacaagcagaggaaaatttaggtgctcttggttggcgcctctcctcagacgagttgcttcagttggaggatgcagcaaacgaatcacctcgcaggatgatccaaaacattttccaaaccagataaaacctgtggcgagacctcagcactcggttcgaaggaatgc

SEQ ID NO: 35236 - DNA, 118 bp, Glycine max
  Clone ID: 700890118H1
ctctctcaccaaagccttcctagaacgaaaaaaaaaagaagagcaattttccctcaccaaagaagaagaagcaaacaatggccgatcaacttaccgatgagacagatctccgaggttc

SEQ ID NO: 35237 - DNA, 101 bp, Glycine max
  Clone ID: 700890119H1
aatccaaataattttgctgatgtaggaggtggtgtcctaggctgtagaggattccactcaagctttagaatccacacgagagtggcctgtactctgtaaca

SEQ ID NO: 35238 - DNA, 259 bp, Glycine max
  Clone ID: 700890120H1
atttctactttctttagctgccaaacgaaacttcccttgttcctgttcctgtgttctccttgcagctccaaaattctatgtggtggtggagatggtgatgattactgcttggatcactgaccttttcgcttgtatgggtggttgttttggatgctgtgtgaaacccacaccaattattgccgtggatgagccagcaaagggactaagaattcaggggcagacagtaagaaaaccacacatatcagatggtttctggagt

SEQ ID NO: 35239 - DNA, 263 bp, Glycine max
  Clone ID: 700890121H1
cttttgctttaccaaattccattttccaattcaaaaccctaactccgttcgaagcaccaaatcgtgatggcaccaaaggcagagaagaagccagcagagaagaagcctgtggaggagaagaaatcgacggtgggagacaaggctccggcggagaagaagccaaaggccggaaagaagcttccgaaggagggaggcgccggcggagaaggtaagaagaagaagagaaacaagaagagcgtggagacatacaagatctacatctt

SEQ ID NO: 35240 - DNA, 261 bp, Glycine max
  Clone ID: 700890123H1
gcgaagagaatggctcccaagggtttaatctttttggctgtgttatgcttctcagcactgtcactgagtcgttgtcttgcggaggataatggacttgttatgaacttctacaaggaatcatgccctcaggctgaagacatcatcaaagaacaagtcaagcttctctacaagcgccacaagaacactgctttctcctggctcagaaacatcttccatgactgtgctgttcagagttgtgatgcttcactgttgctggactcc

SEQ ID NO: 35241 - DNA, 193 bp, Glycine max
  Clone ID: 700890124H1
aggtccttccaccatgaatccatcccctccaaaacaaaatcaaaatctctttccactcatcgaccacatctcgtcctcatggaatagcctctaccccacaacaacctccacctcttcctcctaatggaacctcaaaaacaaaacctcaacaagtgtcaaattctcttccatcgcattcaccagcaccttcagt

SEQ ID NO: 35242 - DNA, 260 bp, Glycine max
  Clone ID: 700890125H1
gcagtactggatggacgagaactatctctatacctgctttgctcacaccggcgaggttacatcggttaaagtaattcgaaacttgcaaactagtcaatctgaaggttatgggtttattgagtttaatagtcgtgctggagctgagagaattcttcaaacatataatggggcaataatgccaaatggggggcagagtttcaggttgaattgggcaacttttagtgctggtgagaggtcgcgccacgacgattctccagatt

SEQ ID NO: 35243 - DNA, 252 bp, Glycine max
  Clone ID: 700890126H1
gtaatcactacgtcgtcgttggaatatctgtgtacgtctcgaacatgtgaacgtgactctgcgcaactccggacacgagtaagacgattgtgttcatggaagaagcatctggagctcctcatttctgtctagtctcgagattatgctgtatgaatgctgaaagtcacagttccagacagaagctagactcgaagatctgcgagttataccatggccggtgcagttggggagttgaagatcctcgcaagacca

SEQ ID NO: 35244 - DNA, 258 bp, Glycine max
  Clone ID: 700890129H1
gaaacatgagtgagaatagtaaaaccctgcgtttcggcatcttaggctgcgccaacatcgccagaaaagtggctcgagccattgctctcgctccgaacgccactctctgcgccatcgcgagccgttccagagagaaggcggagaagttcgccgccgagaacgggtttccggcgaccgtgagggtttacgggagctacgatcaggtgttggaggatccatgcgtggacgccgtgtacctccccctccccacgagtctga

SEQ ID NO: 35245 - DNA, 257 bp, Glycine max
  Clone ID: 700890130H1
gcagtactggatggacgagaactatctctatacctgctttgctcacaccggcgaggttacatcggttaaagtaattcgaaacaagcaaactagtcaatctgaaggttatgggtttattgagtttaatagtcgtgctggagctgagagaattcttcaaacatataatggggcaataatgccaaatggggggcagagtttcaggttgaattgggcaacttttagtgctggtgagaggtcgcgccacgacgattctccag

SEQ ID NO: 35246 - DNA, 258 bp, Glycine max
  Clone ID: 700890132H1
ccgtggtggcatgcagatcttcgttaagaccctcaccggcaagactattaccctagaagtcgaaagctccgacaccatcgacaacgtcaaggctaagattcaggacaaggagggaatccccccagaccagcagaggctgatcttcgccgggaagcagctcgaggacggacgcacccttgctgactacaacatccagaaggagtcaactctccacttggtgttgcgtcttcgtggtggtatgcagattttcgtgaagac

SEQ ID NO: 35247 - DNA, 259 bp, Glycine max
  Clone ID: 700890133H1
gcgaagagaatggctcccaagggtttaatctttttggctgtgttatgcttctcagcactgtcactgagtcgttgtcttgcggaggataatggacttgttatgaacttctacaaggaatcatgccctcaggctgaagacatcatcaaagaacaagtcaagcttctctacaagcgccacaagaacactgctttctcctggctcagaaacatcttccatgactgtgctgttcagagttgtgatgcttcactgttgctggact

SEQ ID NO: 35248 - DNA, 259 bp, Glycine max
  Clone ID: 700890135H1
agaaaaggaaaaaaaaaaccctaatctctggaatagcgttggattggagcgttttgagggcatcaaatcaatagagtgaagcagatcaagaggaagaggagggcacaaccaatgacaatggggtccaccgataaagaattggaagagcagcttctcgacgccggtaacaagctcctcctagatcctccctcctcagcggaggagctcctcccactcctcgaccaagtagagtgttgcctatcgagggttgagcagtccc

SEQ ID NO: 35249 - DNA, 254 bp, Glycine max
  Clone ID: 700890136H1
cagggatcgtgatcatagggaggataggcaccacagagaccgggataggaacagggacagagaccgagacagggaaagagatagagatcgtgggcgtgatcgagatagaacacgggaccgtgatcgtgagcgagggagggaccgtgatcgggatcgagaatatgatcgacatcgtgagagggatagagattatgaagttggtgaccctgatcgaggacgctcacgtgatagggagtctgattatgatcgtgttg

SEQ ID NO: 35250 - DNA, 256 bp, Glycine max
  Clone ID: 700890137H1
ccaaaaataacccaaactctcttttaaaaaaaaacccgaacacatagaaacagagaaagtgtgagtatcgccgccgtagccctatcctctcttcatattattctattgcctttctttaactccctcactttttcagttttgaagcgcttccagtggcgtatttacggttatacccttcttgttatgatagcttccaatcggcgtcagcacagagccgaagctcttggcttccacacatattttcggtcctgtcgat

SEQ ID NO: 35251 - DNA, 263 bp, Glycine max
  Clone ID: 700890106H1
aaaatccgccataaaagtatggcggatgacgtagcggaaaatggcggacaaaaaaaataataaaaatatacgtatacatataaataaaaacttaaaaaaaaacaatggattgcattcaaataacagaaaaaaaaaacaaaaaacgggtgtcaaaaataaaaaagggtgtcaaatagaaaaaggaaaaaaaaaagctaccctcatcaaaaacgggtgtcaaacagaaaaaagaaaaagccctcagcctaggaaaaaagaaaata

SEQ ID NO: 35252 - DNA, 256 bp, Glycine max
  Clone ID: 700890140H1
ctcttactttttaaccatgtagaatgattcacctaaggaaaaattagtagcttcttgttgtgctttttattttgttttgttttgtgtagagataaatctgtttggtattgttttgtgttttatgaattatttgatgggtgaagagggagaagaagtggtgagaaagcaatgacaaaggggtgttgatggagataaatggtacttgtatagctgcttacaagactgtaaatattggtgctgtaatgtaatacacgag

SEQ ID NO: 35253 - DNA, 230 bp, Glycine max
  Clone ID: 700890071H1
ctcgagcgcaatttgtcgggggagattccggttgagataggcgagttcaaacgcctcgaggctctgtctttgtacaggaacagattgataggtcctattcctcagaaggttggttcctgggcagagtttgcttacatcgacgtgtcggagaatttcttgacggggacgattccgccggatatgtgtaaaaagggagccatgtgggcgcttctcgtgcttcaaaacaagct

SEQ ID NO: 35254 - DNA, 230 bp, Glycine max
  Clone ID: 700890072H1
gagacaacaatatggactggccaagtcagtcaatgaagtattgttggtcattgaggcttacaaagctttgcgtgaccgagcaccctaccctgctaatcatgttgttggccatctcagtgggagctttgcttgtatagtttttgacaaatctacttctaccctctttgtggcatctgatcaatatggtaaggtacctctgtattggggaataactgctgatggctacgtag

SEQ ID NO: 35255 - DNA, 231 bp, Glycine max
  Clone ID: 700890075H1
atctgctccatacactgtggggtgggtgggaattggattttcaagggatgggatgatggctggttccagtgcaatggtgggatggattaacaaacatggccatgcaaaagtcaagcagttttatctaaggggtaggaggcaatcagaagtaattatagacaaaggtgaactgcctctaaatactgtgcctgctgcggtggcaacaaatggggctgaaatttacatagcttt

SEQ ID NO: 35256 - DNA, 232 bp, Glycine max
  Clone ID: 700890076H1
agacagtgctctcagagatgtcaggattcctcctggacctaggcttttgattcttgaccatatccagagggacgcggatttgaaagagaagcgaggacgccgaaagtgactgatatgaagagtttgctgcctttgaactttgaaatccattgaaaaatggatagtaggaagtttgtgttccaaatgaattttgtctttttttgtttgttagctctgttcaattgttgttgca

SEQ ID NO: 35257 - DNA, 231 bp, Glycine max
  Clone ID: 700890077H1
aagagaagtgttcccttagaagaatagtgtaaaatggcatcactcaaagctgagaaacctgttgaaaaatcttgttgctctcaaccatctgcaggacaggtgaagaaagagtcttctgccaaacctagttcaggcacttccaaagccccggtctcgaaaccaaccccaaagaaaattccaagccagactaggaagaaggcaagcagcaataaataagctgaagatgcaaga

SEQ ID NO: 35258 - DNA, 232 bp, Glycine max
  Clone ID: 700890078H1
ctggttgaaagccatgagcatgatggctgcgtatttgcgtgtacccacatccacgcccattactccgcaatctcccacagctacgaggaccaaatgcagaaatctgaaaacctcttgctccgttaatgccgccaaaattccaatgccccctctaaaccctaaagaccccttcctctccaagctcgcttccatcgctgcctcttcccccgacacgctcctcaacactcccaaa

SEQ ID NO: 35259 - DNA, 134 bp, Glycine max
  unsure (1)..(134): unsure at all n locations
  Clone ID: 700890079H1
ctaatgtggagtgatcctgaagatattgaaacatgggcagtcagtccccgtggcagcaggttcggcttttgtggatcgagggggttacttctagagttcaagtcacagtaaatagatctagggnatcttgtttg

SEQ ID NO: 35260 - DNA, 234 bp, Glycine max
  Clone ID: 700890080H1
gaaagagaggaagagtgaaaatgaaaatgagaagggggtcggggggaatattgaacacaacacccactgcacagcttcataactaaaccgccatcgcctccaagactttccgtgcccaaaagatgagaaaacgcagcatttacgcatggctagtagcacttgtttgcttcctcctactcatgatcgtcaccccagccattccccagtcacaagaataccatgatttcgccgacc

SEQ ID NO: 35261 - DNA, 228 bp, Glycine max
  Clone ID: 700890082H1
ctcgagcgattcggctcagtaagtttattatggctaatgccaatttggtgcgagctctcatacatactgatgttactaagtatctctctttcaaagctgtggatgggagctttgtgtttaataaaggaaaggttcataaggtgcccgcaaatgacatggaggccttgaagtctccacttatggggctatttgaaaaacgccgagcacgcaagtttttcatttatgtgc

SEQ ID NO: 35262 - DNA, 232 bp, Glycine max
  Clone ID: 700890083H1
cagctccatttttcgccttatagtttcgtcgtgtcttctttttactttcctgctggaagctgttcatggcagcataaaggcaagcttgttgttgctcatttagctataacagtttctaccatgaaattatgatgttttttttgtttgtgatgttgctgaatttcccagcatttgcattaatgcttggctgcatgtttgcagtgttacattgtatacttgggagctcattctc

SEQ ID NO: 35263 - DNA, 231 bp, Glycine max
  Clone ID: 700890085H1
cttgaagctgatctgctacaagtggccaaggtaatggggcttgaagatgtaatagatgtgactgatgacattggaactgctgaagcaattctagcatccagttctgagatacgacaaaacccatggatccgtggtgtggcaaagctccatcacgtacctgtatttgttatcaagtccaataccatggcacaaatggtcaaggcagtgcgcatgatccttgggctagaatcc

SEQ ID NO: 35264 - DNA, 230 bp, Glycine max
  Clone ID: 700890086H1
gaagagtcttggagccctgataacaactatggccacaaccacaagcaattcccaggcatgcacatgaacatgaacaacaacaacaacaacaaaaggcttggtgcttttgctgctgtggactctgacttctcaatgcaaaaacatcatcatgggcatggcaacggcgtaggagccatgcacatgaacatgaacaggcatggtggcaagttaggaggcatgtttcaagaagg

SEQ ID NO: 35265 - DNA, 230 bp, Glycine max
  Clone ID: 700890087H1
cttagtcccaattttctagggttttattcattttccgatggcttctgcagatgttgagtaccgttgctttgtcggtgggctcgcttgggccactgacgaccatgccctcgagagagccttctctcagtacggcgaaatcgttgaaacgaagattatcaacgatcgtgagactggcagatccaggggttttggatttgtgaccttcgcctcggagcagtccatgaaagatg

SEQ ID NO: 35266 - DNA, 230 bp, Glycine max
  Clone ID: 700890088H1
ctctattgtgtatgctttggtttttagttgaaactcttttactgagggaaaattttaagtttgatcactattgcagattcggattcggggagttcctcagggagtgattctgaagcagacaacgggcaatcataacagtcagggggtttgtgactaatgatcaaacatgatcatgttggtaggcggatgaagaaaatgtttgcttcattggcttcctttgagggcgctgc

SEQ ID NO: 35267 - DNA, 230 bp, Glycine max
  Clone ID: 700890089H1
gttagcttttgtttaagggctatgggggaatggtgtgataagagtgccttaaatggttcagctctttatagctagccagccacactcattcatttcatcccatttaaaaccaacaaaacgacgttgcgcttgcatctccaatctccgatcagcttctcccgtgtttccatctcaatctgaatccaagccgttgctcgatcatgtgttgttgtgaatttgtttgatcgagt

SEQ ID NO: 35268 - DNA, 228 bp, Glycine max
  Clone ID: 700890090H1
gtctgtttttgcgttgcagacatcccacacacaacacattctcaacacaacatttgatttctctcttttgtcatcctcaaaatccacaatctttcctccttaatatctccgaccccaacaaaaagaaacaagcaagccatggattcccagatccatggcttgtcctcgtaaagtcaacccctttaccagtcaaacttaaccccccttctctccccctctgaaaccgca

SEQ ID NO: 35269 - DNA, 230 bp, Glycine max
  Clone ID: 700890092H1
caccattgctgcaagggaaacgatagagcaggttatggcagatgccctttcaaagtgtggttccaaacgatctttagtccaagctgtttgtttggctgtatctggtgttaaccatcacacagatcaacaaagaattctcggttggcttaggttgctaagctttacataaatgtatgctccgttttttttgggataaaaagtatatcatgctatttttactcttttgctat

SEQ ID NO: 35270 - DNA, 230 bp, Glycine max
  Clone ID: 700890093H1
gatttcagctgagaaggctcaccatgagcagttatcagttggtgaaatcacaaacagcgcattcgagccatcatctatgatggccaagtgtgatcctcgccatggaaaatacatggcttgctgtctcatgtaccggggtgatgttgtgcctaaagatgttaatgcagctgtgggaattatcaagaccaagcgcactattcaatttgttgactggtgccccactggtttca

SEQ ID NO: 35271 - DNA, 230 bp, Glycine max
  Clone ID: 700890094H1
ctccctcttcctcttctactctcacccatggtctccgaatccgaactcatcggccgcctccgcgagtttctccggagctccgacctcaacaccaccacaaccgccaccgtccgccgccagttggaggccgatttcggaatcgatttatccgaccgaaaggcattcattagggaacaggtcgacttgttcctccagaccgaacacaaccaaccacaacaagaggaacgcca

SEQ ID NO: 35272 - DNA, 225 bp, Glycine max
  Clone ID: 700890095H1
caccttcccctttgtttctcaacatcattccccaatttccccttctgtattgtttttcttcatttctctttttcaatccccgatttcccccttcttcgttttgtgtcttcataattcagatcctctcttcaatctagggttcctggcttaacgaaatcaaatgtttaaggaagaatttctatgacgattcgcaaccccatgcgacgaatccgtctcctccactcc

SEQ ID NO: 35273 - DNA, 231 bp, Glycine max
  Clone ID: 700890096H1
ctttgcaagactgaggctgagttgaaagaagcttggcgtcctggagatcttggttacggaactagagttcctggtgacatgctgattgtcacaattgtcttctgttactctgttattgctcctgtgataatcccatttggtgctctatattttggcctaggatggcttgttttgcgaaatcaggcactcaaagtctatgtaccaacatttgaaagttatggaagaatgtgg

SEQ ID NO: 35274 - DNA, 262 bp, Glycine max
  Clone ID: 700890101H1
gctgtggataactacattcccatccctcagcgtcaaactgaacttccctttttgctggccattgaggatgttttcaccatcaccggtcgcggaactgtcgccaccggaagggttgagagaggtaccattagggttggagagactgttgatattgttggtgttaaggaaactacgaacaccactgtgactggggtggaaattgttcagaagattttggatgaggctttggctggggacaatgtggggttgttgcttaggggta

SEQ ID NO: 35275 - DNA, 265 bp, Glycine max
  Clone ID: 700890102H1
caaagttgaagtcttcaagcacttagtttcttaaaggtaactcctttaaggtccattcataatcttctcagatagaaagagagtgatctattcattctaatcatttggggtgtcagaaacattcacattcacatctacgtctaaagttgtgaattcattaaccttcacctggtgccactaacaaaagtgaccctttggataagaattcaaaagggtatctgaggatctcacaaatttgttgaatttccctgattctatgttgtat

SEQ ID NO: 35276 - DNA, 262 bp, Glycine max
  Clone ID: 700890103H1
gaacaaagaagaaggttgatatcatatcagctccgccgaaaaaagaagccgccgttgcggaaaaaccgccggagaagaaggcagaagacaagaagcctgaggagaaaaaaccagaagaaaaacctaaagagagtacggtggttttgaagatcaaactacactgtgacggttgcattgcgaaaattcgaagaatcattcttaggttcaaaggtgttcaattggtgagcctcgacggaagcaaggacttggtgacggtgaaggg

SEQ ID NO: 35277 - DNA, 201 bp, Glycine max
  Clone ID: 700890104H1
tacattgcaaaaatggcatcattcaccatgacagcttccatccttggctgcccagccgtcaccaaccggtcggcagcgacgcagaggagatcagtggtagtgaatgcagccagcaaatctgttgaaggggaaaaggtcagttatgacaacaatggtagcaatgcaaggaggaacttgatgttcgccacggcgggggctgct

SEQ ID NO: 35278 - DNA, 264 bp, Glycine max
  Clone ID: 700890105H1
ggctcgtcactccttgctcttagccctcctcctcttcgccgccgtggccaccgccgcgatggggtggcgcgtccgacgccgacgccatcctgatccgtcaggtggtgccagatgttggcgaagccgaagaggaggacaacctgctgaacgccgagcaccacttcgctagcttcaaggccaagttcgccaagacctacgccaccaaggagggagcacgatcatcgcttcggcgtcttcaagtccaacctccgcagagccaggctg

SEQ ID NO: 35279 - DNA, 234 bp, Glycine max
  Clone ID: 700890069H1
attccagccacacgcttcagaagacatggcctcattgggtgggttacaaaatgtgagcggcatcaattttcttatcaaagagggtccaaaagtcaatgcaaagttcgagctgaagccgccaccatatccactgaatggtttggagccggtgatgagccagcagacacttgagtttcactgggggaagcaccacaagacttatgtggaaaatctgaaaaaacaagttgttgggac

SEQ ID NO: 35280 - DNA, 236 bp, Glycine max
  Clone ID: 700890023H1
tcggcacatctctttgctgttttccaaggcttgctcaaagtgcttgctggaattgacaccaacttcactgtcacctccaaggcctcggatgaagacggagactttgccgaactatacatgttcaaatggaccacccttcttattcctccaacaacccttctcataataaacttggtgggggtggttgctggcatctcctatgccatcaacagtggctaccaatcttggggacccct

SEQ ID NO: 35281 - DNA, 238 bp, Glycine max
  Clone ID: 700890025H1
caggaatttgctagagaggtgattgccggtgtaaacccaaatgtgatccgtcgtcttcaagaattcccaccaaagagcacactctgatcccacactctatggtgatcaaaccagtaccataacaaaagaacaattggagattaacatgggaggggtcacagtagaagaggcacttagtactcagagattattcatattagattaccaagatgcattcatcccatatttgacgaggata

SEQ ID NO: 35282 - DNA, 237 bp, Glycine max
  Clone ID: 700890026H1
ttgtaattcttttggctaaaatttcagcttccagaattgaaaaaaaatgatcaaacaagttcttcttcttgttctgctcttcttggcctctggattggccctctcagtctcagagtctgagtctgtttctcttctgcctcacgccgctgattccttcaatgttagctatatccagatgaagaacgctgggacttgctcttactcggtggttataactactagctgttcgtctcctag

SEQ ID NO: 35283 - DNA, 237 bp, Glycine max
  Clone ID: 700890030H1
gcgacaagttcgggaagcacggtttggtgaaggagaagcccgctgttcgaagccttgcggcgccgtttcgtatgaacgaggggatggacgacgtgcaagctcccaagaagaagcccgagcccgtcgacggccctcttctctcggaacgcgaccggttaaagctggagaggcgaaaacgcaaggatgaacgccagcgagaggcacaataccaaatgcacttggcggagatggaggcgg

SEQ ID NO: 35284 - DNA, 238 bp, Glycine max
  Clone ID: 700890031H1
ctcttgtgttgtgtgctactagtaatgaaatgaaattccacgcaaaactccacataagccaccttctttgattcaagaaatcaacaccgagttttcaaaatcccattttgttttcccttccttttttcctatataaaccaaccttttaatttccttctgaattaatactccttgatctggtgtgaagatggacactactgactgggaagtcctttcttatgatggcctttctgatttt

SEQ ID NO: 35285 - DNA, 239 bp, Glycine max
  Clone ID: 700890032H1
ctcttttttgttgttgtggtgtttcatttgtgaaactaacaacaacacaaggccatcatcatggcagctgcttccccaatggcaagccaactcaagtccaccttcactaggactcttgtagctcccaagggcctctctgcctcttcaccacttcacctcgtgccttctagaaggcaatttagcttcactgttaaggccatccaatcagagaagccaacctatcaagtgattcagccaat

SEQ ID NO: 35286 - DNA, 242 bp, Glycine max
  Clone ID: 700890033H1
catacttctcctcagtactcttcaaagttgatcaaggtgggtgggttccacttgccattgctggagcatttcttattattatgtctgtttggcattacggcaccgtgaaacggtatgagtttgaaatgcatagtaaggtctcaatggcatggattcttggtcttggcccaagtttaggacttgttcgtgtccccggaattggactagtctacacagaacttgcaagtggagtgccccacatt

SEQ ID NO: 35287 - DNA, 232 bp, Glycine max
  Clone ID: 700890036H1
tgttgttgtaactcgttcttcttcttttgttgttctgtgtttgtgtttgttttttctctcacctgaaaatgtcttgctgcggtggtaactgtggttgcggaagctcctgcaagtgcggcaacggctgcggaggctgcaagatgtacccagacttgagctacactgagtcaaccaccaccgagaccttggtcatgggagtggcacctgttaaggctcaatttgagggtgctga

SEQ ID NO: 35288 - DNA, 236 bp, Glycine max
  Clone ID: 700890037H1
caaggacccaactgagcagactgctattgacaacttaatggttcaacagcttgatggaactgttaacgaatggggttggtgcaagcaaaagctaggagcaaatgccatattggcagtgtctcttgcagtctgcaaagctggtgctagcgtcctgaaaattcctttacaagcatattgctaatatcgcgggtaacaaaaagttggttttgcctgttcctgctttcaatgtcattaat

SEQ ID NO: 35289 - DNA, 234 bp, Glycine max
  Clone ID: 700890038H1
tgataaactattaatgtgtagctaaaaacttatgtattatgtctgtgatggttttcgtgcactctggtgttttgtgttaaacaaacatccttagaataaagtggtcatgtcttgcctttcagcaagttcaagtgttttggacttgtgatgggtgtgttaagctcatggttgcttctttttttttttttttaatgtttggtaattggtcgcttctgtaaaaagttcggctaatct

SEQ ID NO: 35290 - DNA, 235 bp, Glycine max
  Clone ID: 700890042H1
gctaaacggaaccctctagaacccaaagtttttctctttcaattcttcctcagtcaattcaactccctttcaatttcaaccctatctctgctctcttcttcttcttcttcttcattttttgggtctctctgtttacaagcttttcagttatggcatcgaaacgcatcgtcaaggagctcaaggatttgcagaaggaccctcctacttcctgcagcgcaggtcccgtggcggagga

SEQ ID NO: 35291 - DNA, 233 bp, Glycine max
  Clone ID: 700890043H1
atttcttagcacaccagaatcatgcattgactggaattcacttctggagcgtttcctgcccagacaaatttcaatgacacgagcaaaacgggaatgggagtatgacattctttctcgttatcgttcattggagaatctgacaaaagatgatgcgcgacaacaatttctgcgtatattgagagcacttccttatggaaattctgttttcttcaatgttcgcaagattgatgatc

SEQ ID NO: 35292 - DNA, 235 bp, Glycine max
  Clone ID: 700890044H1
tgggattcgatttgagacaagtggtggcagctgtcctcaccctcacgatgtttgtcatgcttggaaatatgatcaaaagagaccactttgataattcacttcaagaaaagcttccaggaggatcggaggatgccaactttgagactgctaagtttgatgctactcatgtaagaaagaatatagggctttggaagggagatgcggatggcctaaaaccgtgttgggttaagccatc

SEQ ID NO: 35293 - DNA, 234 bp, Glycine max
  Clone ID: 700890047H1
aagtgatcccagagatatgggcaaacgaaatggacggtggtgatccaacgatgacacgttcgaagagtgaattggaggccgtactcgcttgtgctctggttggagcttgaaaattgacgttgtacaaaaatgtacattcccaaccaacccaactatctatgcaattaaaaataatagtacagtagtataaatagtatcagaccaccaatagcgaagacaataacagtaagtaac

SEQ ID NO: 35294 - DNA, 60 bp, Glycine max
  Clone ID: 700890050H1
caagtgagcaagatgatgttgctcagtacttgcttgacactttcaaatgcgtgccaacgt

SEQ ID NO: 35295 - DNA, 235 bp, Glycine max
  Clone ID: 700890051H1
aaacaaggtcagaaatggaaatgttgataaaagggataacaagacgaagaggaagcgtgtccactccagaaacaggacaggggaatggcaaccatgtcccttacatttgcatttgcacttccttcaatcccctctctcagccaatgccatggccgtgctctttacgtcaagcccctccactgcactcccattcaacaacgccacgttggtgcagaggcaggtattgtttgtgagc

SEQ ID NO: 35296 - DNA, 237 bp, Glycine max
  Clone ID: 700890052H1
agacagctgcaaacaagccaacggattccaaatgggaatcttgtacttgtcactgtaccttattgcactaggaactggtggcctcaagtccagtgtttcaggatttggttctgaccaattcgatgagaaagatgagaaggagaaatcgcaaatggcctattttttcaacaggtttttcttcttcatcagttttggaactctggcagctgtcacagtacttgtctatctgcaagatga

SEQ ID NO: 35297 - DNA, 234 bp, Glycine max
  Clone ID: 700890053H1
acgcaaaatctagggtttgttcgttcgctcgttcgcaacaatggcgctgaggagattctacaacgagatcaaggggaagagggtgagcgaggtccctgagcacgtgaagccgatgctgtccctgagctacatcaagaaagcgattcagagaggcttcgacaattaccatgccaagtacattgaaaccagttcccctgatcccatcttccatgtctgctacggcggcatgatctt

SEQ ID NO: 35298 - DNA, 235 bp, Glycine max
  Clone ID: 700890055H1
atcatgccaaccacgtcttaatctcaccgtatccaaaaacaatagcaataatcattcctcatcaaacctctattttgttattattgcagactgcaacattcccatccatctttggacctctaaacctttcaagccaagcagcaccactattactaataaaacccacaataataataagttaatagatgatgaagaaaccatttccaatctctttgttaatttcattcaagccatc

SEQ ID NO: 35299 - DNA, 236 bp, Glycine max
  Clone ID: 700890057H1
cggactatgttgcatcactacttatgcccctgtataaggcaaggaaactagacaaggatggatacaaggctataatgaagaaaagtgcaacaaaggtcatggagcaagccacagatgcagaaaaagccatggctgttcgtgagtttctagattttaagcgaaagaataagattcgctcctttgtggatgtattgattgagagacacatgacaacgaaaccagacatgaaatcttaa

SEQ ID NO: 35300 - DNA, 235 bp, Glycine max
  Clone ID: 700890058H1
agctaagtattcataattaacaatatattcctcacaggtggaagctttagcagttaagttaacccaaaatgaaggagaattgattcaagagaagtttgaagtgaagaagcttgtaaactttctcaaacaggcttctgaagatgctaaaaatttggttaatcaagagaagtcttttgcttgtgccgaaattgaaagtgctagagctgtggtgctgagaattggggaggctcttgaa

SEQ ID NO: 35301 - DNA, 232 bp, Glycine max
  Clone ID: 700890059H1
ccaaatcttatgcaaaagctacatttggaaatgggcaatatgatctaccaccttggtctatcagtattcttcctgactgcaaaactgttgtttacaacacagcaaaggttggtaacagctggctgaaaaagatgactccagtaaacagtgcatttgcttggcagtcatacaatgaagaacctgcctcatccagtcaagctgattccattgcagcatatgctctttgggagca

SEQ ID NO: 35302 - DNA, 234 bp, Glycine max
  Clone ID: 700890062H1
cttttgttgtacgttctcctttgttctcttcttccgcatttcgtacatgataagttctacttctctcttggtttgataacaggatttgacacaagtgttgtggtctcccatttcaggagaatcactcactggcataatatagagcttgttaaaagcaaaaaaaaaaacaaaaagtgaagtgttttgagatctggcatgttatccttttctctctagcttaaatttctttggggg

SEQ ID NO: 35303 - DNA, 233 bp, Glycine max
  Clone ID: 700890063H1
gtccctttattccttccttcctttcttcttcttccttacctctttccctggctgatttagggttttctggcaataatctcctttcggtactttttacctctgaatcctcatcatcgctattgctgattacactcctcacaatgctcactcaacgcctcgttcgaaaaacgtgaaatcttctcttctgcaatttctagggtttcgaattgcggaaccgattcattcaactcaac

SEQ ID NO: 35304 - DNA, 237 bp, Glycine max
  Clone ID: 700890064H1
gcaaagatgtttgggatcttcgacaaggggcaaaagataaaggggacagtggtgttgatgccaaagaatgtgttggacttcaacgccataacctccatcggtaaaggtggtgttattgacacagccaccggcatcttaggccaaggcgtcagcttagttggtggagtaattgatactgccacttccttcttaggccgtaatatctccatgcaattgcatcagtgctactcagactga

SEQ ID NO: 35305 - DNA, 235 bp, Glycine max
  Clone ID: 700890066H1
cgagcttcaacttctctgcgaatatgtaaaagagatccttattgacgagtccaatgtgcagcctgtcaatagtccagtgactgtttgtggtgatattcatggtcaattccatgatctaatgaaacttttccagactgggggtcatgtgcctgaaacaaattatatttttatgggagactttgttgatcgaggttacaatagtcttgaagttttcaccatccttttacttctaaaa

SEQ ID NO: 35306 - DNA, 233 bp, Glycine max
  Clone ID: 700890068H1
tgttgttgtaactcgttctctcttctcttgttgttctgtgtttgtgtttgttttttctctcacctgaaaatgtcttgctgcggtggtaactgtggttccggaagctcctgcaagtgcggcaacggctgcggaggctgcaagatgtacccagacttgagctacactgagtcaaccaccaccgagaccttggtcatgggagtggcacctgttaaggctcaatttgagggtgctga

SEQ ID NO: 35307 - DNA, 238 bp, Glycine max
  Clone ID: 700890020H1
gatggatgtaggtagcctcgagaatggtgtcagccttctcaagatggaggcgttatgatgaagacagacagaagcttgcaaaggcgcagttggagaggatcatgtctactaatggactatcggagaatgtgtttgagatagcttcgaaaagcttagctgcctaaaagtgttaatggcgtatgaaaaactgccatgatgtgttagtggcgaaagaattgcagcaacgatcccaatatct

SEQ ID NO: 35308 - DNA, 226 bp, Glycine max
  Clone ID: 700889967H1
cttccttcaaaccacaaggtggccgattaggggaaaatgatatggattatgatacagatgagaagtcaatggcaacactaaggcgtcatcttcggggagctcgtgaggagtattatagatataaaagtgaatatatgacttatgtattggaggcacttgaattggaagatacaataaagaattatgaacgccgcaactcaactggatgggaatataattcaagcat

SEQ ID NO: 35309 - DNA, 227 bp, Glycine max
  Clone ID: 700889968H1
agacgatgggggagaacgagaaaggagagcgatggagcggacgtgtgacaaatctgacggagatggcctccaatctcgactctctccagaagcttctcctcaccaaagccgtcttcgtcgacgacgacaccttctccaaagcctccctcgccgccgaccaggcccgcaccatcaagctcctccagcaacgagtccagaccttggagagagaggtcgacgccgccatc

SEQ ID NO: 35310 - DNA, 224 bp, Glycine max
  Clone ID: 700889969H1
atagaaagggaaaagaagataatatggtggtagtttaagataatggtaatctatggcccaagtttatcggtgtactgtgggtcgtgggtacgagatggtgagagcaattggcaagataggtgcagccctcagaaattgagtgggtctgggagaagaagcatcacctgcaaattcgagagtgtgagactcagtagagcatgcagtgtggcactgactaccttgct

SEQ ID NO: 35311 - DNA, 229 bp, Glycine max
  Clone ID: 700889970H1
cttaacaacagcacaaagcgggttactgtctgttcaagctaccatctctctctctctttcttagtgcctccttgccaggtgctgccactctctctttctctctcttcatccttctgttgggttggttgtggagtgttgttttctgttgtgcacgtgttgtcattttttgacccttcgccgacagatctgaagtgcttcaagatttggattttagtgtgcatctggaagt

SEQ ID NO: 35312 - DNA, 223 bp, Glycine max
  Clone ID: 700889973H1
cgaagagaatggctcccaagggtttaatctttttggctgtgttatgcttctcagcactgtcactgagtcgttgtcttgcggaggataatggacttgttatgaacttctacaaggaatcatgccctcaggctgaagacatcatcaaagaacaagtcaagcttctctacaagcgccacaagaacactgctttctcctggctcagaaacatcttccatgactgtgc

SEQ ID NO: 35313 - DNA, 223 bp, Glycine max
  Clone ID: 700889975H1
ggcaatgttgggtgctgctggcattttcattccagaattcctaacaaagattggtgtcttgaacactccttcatggtactcagctggagagctggaatacttcacggacactactaccctcttcatagttgagctctttttcattggctgggccgagggtagaagatgggctgacataatcaagccaggctgtgtcaacactgaccccatctttcccaacaac

SEQ ID NO: 35314 - DNA, 223 bp, Glycine max
  Clone ID: 700889976H1
ggactaccaggtatgtgctatcacagtgggtgtggttggtgatgtatgcagagccttggaggagaaagtactgccttattgtgatgggataatgacccaacttcttaaggatttgtccagcaatcagctgcataggtctgttaagcctcctattttttcatgttttggagacatagccttggcaattggagaaaactttgagaagtacttgttatatgcaatg

SEQ ID NO: 35315 - DNA, 228 bp, Glycine max
  Clone ID: 700889977H1
caaaaatcatatcttccactccacaacctcaaacttctctctctctctcttcctattctaaaaatcccacaaacccctttctctattccatctaaagattcattctttctgcaatttcgatacacgggtcttcattaattcactaagattctgcgtaaataatcgttttcactgaattttctgttccgatggagctaatttcaggattaccggaggacgtagcccgag

SEQ ID NO: 35316 - DNA, 229 bp, Glycine max
  Clone ID: 700889981H1
gtgactttgtgcgttgaagttatagagagagaggagtttggagagaagagtgaagaaggcaaatcgcgaagactagatctgatctgagagaatggctcctcggtctagcagcaaggacgcccaagaccttttccgcgctctttggtctgcttatgctgcaacccccactaatctcaagatcattgatctctatgtcatctatgccgtattcaccgctttcatccaggtt

SEQ ID NO: 35317 - DNA, 221 bp, Glycine max
  Clone ID: 700889985H1
gtaacaaggagctttaaaaaacaaatgatgaagaaccgttatccgttgccggagagacggtggttcgtggctatggccgtcgtgggcttgatcgccacggcgatgttcctcaccaacgcgatccgaacctcggaaacctcgtacttgtgcccgggcgcgctcgggatccgaagcaaaacccgaaccgaattcagctacgacgcgtcaccgatccagctccg

SEQ ID NO: 35318 - DNA, 225 bp, Glycine max
  Clone ID: 700889987H1
cacaattctaattcattcaccaaaaagttcttcgccccttctttgtccccattctttctctttaatatactttgtccatattttcctctttctcttcctatcaaacatccatggcttccttgtcttctagtacaaaacagagcaataataaccaagaggttgatgagaaaccaataccacacgatcaaaacgttctgcaaaagcacgttgcgttcttcgacagga

SEQ ID NO: 35319 - DNA, 222 bp, Glycine max
  Clone ID: 700889988H1
cttctcaataacatacttgcaaaggttattgtgatgaatcttcgagtccaaattatttggtgaattacggcgtgttgtagcagttacaagaactataccacgtgtattatcatatactgggggcttccattcagcaagcacaattaatgtacacccataaagattgaaagctggactcatcacaataaccttctcaataacatacttgcaaagattgaaggc

SEQ ID NO: 35320 - DNA, 222 bp, Glycine max
  Clone ID: 700889990H1
ctcattcataatcttccaatccaacaacctcagcctcacactcacacatacacacatctgaacgcgtatcgtccctcccatggcttcaaagcgcatcctcaaggagctcaaggacttgcagaaagacccaccaacttcttgcagcgctggtccagtagctgaggacatgttccattggcaagcaacgattatgggtcctgctgatagtccttatgctggagg

SEQ ID NO: 35321 - DNA, 171 bp, Glycine max
  Clone ID: 700889991H1
gtgttcttttgcgattgaatttgagggaacaataatcgattttcgctttctgggcacccctgaattcccctgcatcgctgtgaaagtagttcagttcgaacaacgaaaacgatgtcggctcgattgatgaagaaggttctgaacgagcagcatcaccttccgcaacacgtg

SEQ ID NO: 35322 - DNA, 223 bp, Glycine max
  Clone ID: 700889993H1
gatggaggttgtggaaatggaaaagctaactgattacactagtaatcctgaatacatgagtgagtataacgagctaatggccaaccaggatgaattcgtggagaaagttaatacaggcaactatcatgaagttgcccttgatggttttgagcaggcgattaaggttggtcatctgagtcagtactcaactttacttccgcaggcatttgacttgaaaatgaga

SEQ ID NO: 35323 - DNA, 225 bp, Glycine max
  Clone ID: 700889994H1
cgtagtcaaaaaggtgttccccaaaccaaggtagctaaatggcatcatcatttgtgggcactttattacccaacaagttcacacaaaacaaacacttatcatctgttcctgcaagtagaggtgctccaacaaggagaagagtacacttagcaacaacaagagcagagagcatgactactgtcatagaaaaacttggcatcaagattgagaggaaccctcctgagt

SEQ ID NO: 35324 - DNA, 228 bp, Glycine max
  Clone ID: 700889995H1
ggcgttgttgccgttgaggtcaccggtggacctgaagttcccttccatcctggaagagaggacaaacctgagccaccaccagagggtcgcttgcccgatgccactaagggttctgaccatttgagagatgtgtttggcaaagctatggggcttagtgaccgagatatcgttgctctgtctgggggtcacactattggagctgcgcacaaggagcgttctggattcgag

SEQ ID NO: 35325 - DNA, 242 bp, Glycine max
  Clone ID: 700890002H1
gagacagaagaaaacaatggctgttgccaacaatgtgctttgcattgctttcattatcactttaacgtgggcagttgaagctcgaattccggggatttactctggtggtgcatggcaaagtgctcacgccaccttctacggaggatccgacgcttccggcaccatggggggagcgtgtgggtatgggaacctgtacagccaggggtacggtgtgaacacggcggcattgagcacggcactct

SEQ ID NO: 35326 - DNA, 241 bp, Glycine max
  Clone ID: 700890003H1
gtttgaaactgcaccaattatatatacaacatgtgtcgtggaacttttgtggttgcaaccactgttggagtggtggaggcgttgaaggatcaagggtattgcaaaatgaacagcacaatgatgaagttggtggctcaacatgccaagaaccacatagggtcagtaactgaggccaagaagctggcttctccttctccttctccttctacttcttcttcttcagtaacttcaaataacctga

SEQ ID NO: 35327 - DNA, 240 bp, Glycine max
  unsure (1)..(240): unsure at all n locations
  Clone ID: 700890006H1
cacacacaaagtgccctttcgaaaccctaaaattcctcctcacactcctagacttcccttccaccaccttcgcatccatccacatctatgatcatgaacctttcagagaacttggcaattcctacctcctcgccggctgcatntaaggcatcgttgcttcccaagccaattccatccacgacgatggtcgttcctacatccggtatacttcaaagctgcagatcctttcaatgagcgcca

SEQ ID NO: 35328 - DNA, 238 bp, Glycine max
  Clone ID: 700890007H1
gttgttccggcttctggcatgccgctggtggcggagacctcggcggcggtgtttaggagaccgagcagtgatgattccagggtggcgaggagcaatggtttggagaaggtgacgattctacggaggggccagtcgctcgattcggctgtgaagagcgacgtgtacgccggatcggcgttcgctgtgtctccgtcgccggaagcgcttcctctgccgtctttttcgacgaagaagcagg

SEQ ID NO: 35329 - DNA, 240 bp, Glycine max
  Clone ID: 700890008H1
gaaagtacttgaagttgttgtggagaagggaatgcagaatggacagaagattacattccctggtgaagctgatgaagcacctgatacagtcactggggatattgtctttgtcctacagcagaaggaacacccaaagttccaaacgaaaggccgatgacctttttgtagaacacacattgtctcttactgaggcactgtgtggcttccagtttgtgctggctcacttggatggccggcagc

SEQ ID NO: 35330 - DNA, 203 bp, Glycine max
  Clone ID: 700890014H1
gcaacaacaacaacaacagcaacaacagcagcaacaacaacaacagcaacaacagcagcagctgcagtcattgttgcaaataccaatgaaccagctccagcagcagaggcaacagcagctgcctgaaccacaaaatctgccattgttgcagcaactgcctcagcatctaggacagcaacctcagaaacaacaacagtcaagtc

SEQ ID NO: 35331 - DNA, 237 bp, Glycine max
  Clone ID: 700890015H1
catctttctcttttttagcttttcttttcctctaaaagtgagtccttccttcttcgatcacttgttaaattcacatatcatagcaatggcagcacgttcctacagccccatcatggttgccctctctttgcttcttttggtcacattctctaatgtagctgaggcttatacacgcatggaacacttcgtccttcagattgtaaaccaaagtgtacttaccgttgctctgcaacttca

SEQ ID NO: 35332 - DNA, 238 bp, Glycine max
  Clone ID: 700890016H1
cacaagtgttcttcctctgtaaacacacaaactctgttcctatttcagagtactgtccctttacctcgtacacatcaaacaatggaaggagatgggtattgtgggagtttctttcagaggtgcaagccttacatagccatgatttctctgcaattcgggtttgcgggtatgaacataatcaccaaggtttccctcaaccgtgggatgagccactatgtgcttgtggtttatagacacg

SEQ ID NO: 35333 - DNA, 232 bp, Glycine max
  Clone ID: 700889966H1
atcaattcagttctctcccactcagataggaatgggaatatatctcagcagtccaaaaactgaaaagttttctgaagatggtgaaaatgactgtcttagatatggtttatcgtccatgcaagggtggcgtgcaacaatggaagatgctcatgctgcatatactgatctggatgagtccacttcattttttggtgtctatgatggtcatggaggtaaggtggttgcaaagttt

SEQ ID NO: 35334 - DNA, 119 bp, Glycine max
  Clone ID: 700890017H1
ggcaagtgcatggctccaaagggccatgcacttgcacaggcaaaagcatggccctttggagccactaaatgtcaagcgaatggagccatcaaaggtagaaagcttgagatggctctgtc

SEQ ID NO: 35335 - DNA, 242 bp, Glycine max
  Clone ID: 700890018H1
ctgcttcttccgattccggcacgcccccatcaccatggtgaacgttccgaaaacaaagaagacatactgcaagagtaaggagtgcaggaagcacaccctgcacaaggttacccaatacaagaagggtaaagatagcattgctgcccaaggaaaacgccgttacgatcgcaaacaatctggttatggcggacaaactaagcccgtcttccacaagaaggctaagaccaccaagaagattgttc

SEQ ID NO: 35336 - DNA, 234 bp, Glycine max
  Clone ID: 700889920H1
ggactcgtaagagtagtaactaagaaaataaaggtttctaatttatttcgttcaattctccggcggcaccgcaaccgattccgccaccgcatatggcaaaaggtcgaaaactaacgaccagccggagcgagcgcttcttgggaacctatgcttacagccaaggctccgccgccgtgaacccgtcggagcttcgggaagaggatgtatggggcgccggagatgacgccggcgaac

SEQ ID NO: 35337 - DNA, 229 bp, Glycine max
  Clone ID: 700889921H1
agtcgagcgaatcggctcacggctcgagactctccccagaagaagaagaagtgtcttataataatgggaatgaagggtgcccccgtctgtctctccgtcgacgacaacgtcgttctcaagtccccaaacgaccgtcgtttgtatcgcctcatccacctccccaacggccttcgcgccttgctcgttcacgatcctgagatttaccctgaggggcctcccaagcatgctc

SEQ ID NO: 35338 - DNA, 210 bp, Glycine max
  Clone ID: 700889922H1
tgtcactctctctctctctctctctcattcacacgaatcacactctccacagtgcgattcattcaccaatggatcgcaacggtgttctctctcttgcattcatctgcattgtagtcgccggcgtcggaggccagtctcccgccgcagcgccctcgaacactccggcaacccccgccgccgcgactcccgcccaagcaccttccacacaac

SEQ ID NO: 35339 - DNA, 227 bp, Glycine max
  Clone ID: 700889924H1
ctgcaatctttgcatgtgtgttatctgcagcaagtttgactttgaagtaaatacatgccgctggattggatgtgatttgtgttctcattggactcacacagactgtgccatacgtgagcaacttatttgtatgggcccttctgcaaagaatggagcagggccaagtgaaatggttttcaggtgtcaagcatgcaacaggacttcagaacttctgggttgggttaaag

SEQ ID NO: 35340 - DNA, 225 bp, Glycine max
  Clone ID: 700889925H1
acttcaggagcagtatttcctcagtggatgccagtttggaccttatgatacaattatgcaaatgccgtccatgcaaaatcaatgaactatatagaatgcagggattaaagttaaggtactaaaatgctaaaccttattcattgatgttggattgatttttagatgcttaagggtggttttatgtaaatatttcaaggattcacgagtttccttatcactcaatct

SEQ ID NO: 35341 - DNA, 116 bp, Glycine max
  Clone ID: 700889928H1
ggctcgagccgaatcggctcgagccgcgaatgttcctcaatttctcagccaatactcccaagtgggttcctctcgcgctagggctgtagtctacagctcattctcacacacaaccc

SEQ ID NO: 35342 - DNA, 231 bp, Glycine max
  Clone ID: 700889929H1
atcatcacacacacatactaagaagcaacaattcttctacaatggatctcctccttctggaaaagaccctcataggtctcttcctcgctgcggtggtcgccatcgccgtctccaccctccgcggccggaaattcaagctcccaccgggcccactccccgtcccaatcttcggcaactggctccaagtcggcgacgaactcaaccaccgcaacctcaccgatttggccaaaa

SEQ ID NO: 35343 - DNA, 232 bp, Glycine max
  Clone ID: 700889930H1
gtctatccattccatttctttccaacacacactttctctctctatctttgggtgtctttctttttgttcattgttgatgatgtcacgcgccgccgtgctattacacgcgccggaggaagatgcggcggcggaggagtgctgtacctcgacttcgtcgtcgtcgatcgggaggaacagcgacgtgtcgtcggagagatcaatggaggaaggagaaaacgaggtggaaagtgct

SEQ ID NO: 35344 - DNA, 151 bp, Glycine max
  Clone ID: 700889932H1
ttcgagccgaatcggctccgcaacagcacaaagcgggttactatctgttcaagctaccaactctctctctctttcttaatgcctccttgccagaagttaaaatggcccaagaaactttcctattcacatctgaatcagtgaacgaggggca

SEQ ID NO: 35345 - DNA, 236 bp, Glycine max
  Clone ID: 700889933H1
aaaaataattatctaactcatcaacactaataaaagtggttagattaattattttattataaattttaatttcattccaagatcgcctaagcattaaatggtttaaaagatggttattttttaaattcaactaatgagtatatattgttttactgatagtttaataaatatactcacttctagaaaaaataaacacaattaattatggacaaaaaagaagatttaataataaatca

SEQ ID NO: 35346 - DNA, 235 bp, Glycine max
  Clone ID: 700889934H1
agagtagttactgcgaactcctctcaaagatccactccaacttttagggcttcttcaagcttgcatttgggacgtgtgataccttctgatgatggattgcatatggtggctgaaagttactcttctagacatccaatgccattgaccactgttgtctatcattgctctgccagccaacagtggtcaatggccttggatgtctagaagagcaatgatagacatggaaggtcaagaa

SEQ ID NO: 35347 - DNA, 230 bp, Glycine max
  Clone ID: 700889936H1
attgtttgttgttgtaactcgttcttcttcttttgttgttctgtgtttgtgcttgttttttctctcacctgaaaatgtcttgctgcggtggtaactgtggttgcggaagctcctgcaagtgcggcaacggctgcggaggctgcaagatgtacccagacttgagctacactgagtcaaccaccaccgagaccttggtcatgggagtggcacctgttaaggctcaatttgag

SEQ ID NO: 35348 - DNA, 228 bp, Glycine max
  Clone ID: 700889938H1
caccggtgaaacaaatgatggccgggaaccctaacaattggtggaacatcaacaccatgcgccctcctcctcctcctccacaagcttctcctcctttcttctccactccttccaactttctaactccttattatacccccacttcttctcttcctcttccttcttggcatgacaacaatcaagagctacctgagtcatggagccaactactcatgagtgggatggtgt

SEQ ID NO: 35349 - DNA, 227 bp, Glycine max
  Clone ID: 700889939H1
ccttttagcaagttaacaacacttttgtcttcgttccattatctagttctcaattctcttcaccctttgcctctgaaagaaatgggtagtcttgaagcggaaagaacaacagtaggattggcagcaagagacccttcagggattctctccccatacacctacaatctaagaaacacaggccctgatgatgtttacattaaagttcactactgtggaatttgccattc

SEQ ID NO: 35350 - DNA, 226 bp, Glycine max
  Clone ID: 700889943H1
gaaagaacctgacccaggatgaggatcgcgtgagactcctcttcagatccgcacaagcattgcatttcaaatcaagcatcctgttccttatctctgtctctgcatttcccttccttcttcttctctctctctctctaaaaccctaattctatacatggaagggaaatctcaaatctaatgactaattaattaatccatcgatcaagcatggagtccgaactcaaag

SEQ ID NO: 35351 - DNA, 229 bp, Glycine max
  Clone ID: 700889945H1
ctaaaatcaaacagaatacaataccctctctctctctctctctctcatagattatttctcttctcttccctttcttaggttaaaagttggaactgagtgattacccaactaatgttatgatcagttggaagcgttggcaagaaagaatacgtaatagtggtgttgtttgttcattttggtcaaagaaatagtatctgggtacccaggatatggtagttgtaagatgggt

SEQ ID NO: 35352 - DNA, 209 bp, Glycine max
  Clone ID: 700889947H1
gtgaagatggggtcagaggtgtctaaacagatggagcgaagaaagacaatccagacagagaagaagagtctgtccgatctgaaaagcagcggagaagactaccctggctccgactaccgtccccaagacagaaaaaactggatgtcccatctcgaccctcagaaactccgcatcaaccaaatcgtctggcccggcacccacgactccgc

SEQ ID NO: 35353 - DNA, 235 bp, Glycine max
  Clone ID: 700889948H1
cccaaagaaacaatatgataatgatgaagtgatggaaaaaacagagacagcatctaattatgttgctattcgtgctcctgtttcaccgttaagcatggatataatagataaagaaacctcagagagacaatcacacctgcaacccatatctactgaggtcaaaattgataatatagagaaagaaacttcaaaatcatccagtctttgtattgctgcggaaacatatcatgcccca

SEQ ID NO: 35354 - DNA, 233 bp, Glycine max
  Clone ID: 700889949H1
aaagagtgccatataagtgatgacaccaggaattcctttgaactttcccttgttggctgtaaatgtattggagcttatgtccgaaataagaagaatcaaaaccagatttgctggttatggaaaaaagttagatcacaggatgatagggggttccagaggttcttagatagtgttgagtataatcataaggatatattactttatgagagtgtgtttggccaaggctttgtgag

SEQ ID NO: 35355 - DNA, 233 bp, Glycine max
  Clone ID: 700889950H1
ggaacaagcttgtcttgatgctgaaaaagagggaatttcttgtgaattgattgatctgaagacactaattccttgggataaggaaacagtagagtcctcagttaacaagacaggaagattgcttgttagtcatgaagctcctataaactgggaggttttggtgctgaaatttcagcttctattgttgagcgttgcttctcaaggttagaggcccctgtagcaagaatttgtgg

SEQ ID NO: 35356 - DNA, 228 bp, Glycine max
  Clone ID: 700889951H1
caaaagggagaagaaaaggaaagaaaactctcaaaaaactattatagcaatggcagaacaaaaccaaaaccaaacaactgaagctggaaggcaccaagaggttggtcacaagagccttctccagagtgatgctctttaccagtatattctggagacaagtgtctacccaagagaacctgaatccatgaaagaactgagagagttgacagcaaaacacccatggaacat

SEQ ID NO: 35357 - DNA, 226 bp, Glycine max
  Clone ID: 700889954H1
aacaaagccactctctcgttttatatggcgtaccaccataacccccaagagcttccacttcaccatttcactgaccaacaacaacaccataaccaacctctcgttgacaactccttgctctccgaccctgcttccaaacctgcctccgatcctcatcaacccgcgccaaattggctcaacaacgcccttctccgcacgcactacactgacaaccacaacaacaaca

SEQ ID NO: 35358 - DNA, 227 bp, Glycine max
  Clone ID: 700889955H1
cgatggtgaaaatctcacttggtggatacgatgatggggaaggacccagcaaccgaacccataagcgacgcagggaagatgatgatgacgacgacgaagaagagcaacaacaacaacgaagctttgagatggtggacccttcaataggaactcaagagaacgaagatcatgctgctccatccaatgatggatcgaattctaacggaaatggggctggaaccagtacc

SEQ ID NO: 35359 - DNA, 224 bp, Glycine max
  Clone ID: 700889956H1
cggcggccctctagtggcgtcgcgttgaagaatttggttccttgccttgtggaggctctggggagtgaggactgggccaccaggaagggcgcggcggaggcgttgaagaagctcgcgagcgtggagaaggacctcttgccggagttcaagggtggatgcttgaaggttttcgagaatcggcgatttgataaggtaaagttggttcgggaggttatgaatgagat

SEQ ID NO: 35360 - DNA, 224 bp, Glycine max
  Clone ID: 700889957H1
aacgattcctcctcttctaaaaccattcatttctcatacccctccgccgctacctccttcatctcctccctcaccggcgacggcgccgccgacaacaaacaaccttcctcgtcgccgcccgcggcggggcgacgacgacgccctttcagatcacgagcctctcgcacgtgtcgtccgcggggaagcctccgctttcgacttcctctttcaagagaaagtgcagc

SEQ ID NO: 35361 - DNA, 228 bp, Glycine max
  Clone ID: 700889962H1
ggtcaggaacgtttccgaacaatcactagcagctattatcgtggggctcatggcattattgttgtttatgatgtcactgaccaagagagctttaataatgttaagcagtggctgaatgaaattgaccgttatgcaagtgaaaatgttaacaagcttctagttggaaacaagtgcgatctcacggcaaataaagttgtgtcctatgagacagcaaaggcttttgcagat

SEQ ID NO: 35362 - DNA, 234 bp, Glycine max
  Clone ID: 700889919H1
agaaaattaatccaacattttctaggtagccaaacactcccaccatgaacaaatccgccctagtcgccgcctccgtcgccgccgcgtcggccaccgccacttccttttcctcctccgcaaagctctctcttcaggatggtggggctcagagaagccacggcggatcctcgccggttgcgaactcggcgtcgacggagaagttcgcgccacggttcgacgggttgcggttcattg

SEQ ID NO: 35363 - DNA, 235 bp, Glycine max
  Clone ID: 700889964H1
gcgtaactttgagatagctaggaaatggcataccaaatgcaaatgcaaaagcaaaacctgagataccgagggtggtgcccctcgaacgattaccaagtccatgaagtaatagggcctgcactactacgcaagggccttgatcgtcctcgacatcagaagggtcgcgtggcgttcaaaaccgatctagaagagtccataacagtagcagaaccaacccctgtgcctgcagaaactg

SEQ ID NO: 35364 - DNA, 240 bp, Glycine max
  Clone ID: 700889865H1
caaaaccgggtgtgaagctggaaatacctgacggagctgtgatcgcagacaaggaaattaatggccctgaggacctgtgagagaaagctgatgatgagttttgaaatccatgtgactgtgcaatcttgagtattgacagtcttaaactaaaatttgtgtattgcttctagtttggtaggggtaaaaataagaaggcagtttctactgagcatgtctgaagactaagctttgtatttctca

SEQ ID NO: 35365 - DNA, 234 bp, Glycine max
  Clone ID: 700889866H1
ctcgagcgctcgagccgcacaaaagcaaaatggtgcaccaacaccaagtgagggcctcactcacaacgctttattcttttcctccttgtcttggccaccacctccttcacatcagttcactcgagaacacactactgatccatgaggatcaagctcatgaactgcacaagacttggccaaggaagacaaggatgaaccatggaagccaccgtggcgccaagaaacacctcgtga

SEQ ID NO: 35366 - DNA, 104 bp, Glycine max
  Clone ID: 700889868H1
tttcttttaaagaaaaagctaatattccacacagctttatacagaacagcgacatacgctagtccctatggtttcgatacataggagctcttcttttccaaaac

SEQ ID NO: 35367 - DNA, 228 bp, Glycine max
  Clone ID: 700889869H1
ctggtgtgtatttgcggcaaggtttggctccaacaagagaaacgagcaatcatatggtatttgatttttagggtggaagaaaaatcagagtgagagaaaaaatcgatggagatggaagtaacatcgagaagaagcaacaagacgtggtgaaagagaaagacttgttcaaagctgcagaagagggcgaggcatcaacgttcgaagctctctcttctgaaatcctctcca

SEQ ID NO: 35368 - DNA, 227 bp, Glycine max
  Clone ID: 700889870H1
gttctttctttctatcgggtttcgaaaaatacgattttgatgccaacccatgtaccctttacagaccccgataagtattcttcattgcccattttgtggctccctaatttgaacattgggtatgctctgccttggttataggggatattgataataataagatagcgagtgagatcaaattcaaaggatctgaaaagttaggatccgaggccatttctttggagggt

SEQ ID NO: 35369 - DNA, 224 bp, Glycine max
  Clone ID: 700889874H1
gtgatttcagtgagtgatcggtgttcacttgatctcatcataatcgtcagcgtcaattgaagaagatgccgatcagaaacatcgccgtcggaaggcctgaagaggcgactcaccccgaccgttgaaggcggctttggctgagttcatctcaaccttcatcttcgtgttcgccggctcaggctccggcatcgcctacaacaagctcaccgacaacggcgctgcca

SEQ ID NO: 35370 - DNA, 224 bp, Glycine max
  Clone ID: 700889875H1
gaacttaattagaatgccggcttggtggaatagaaagtggagcaagagcaaggaggagcaggagcagccggaggaggaggatgaggaggaagagccacgtgccgcttttcagctgaattcatgagcggtgagcgggacaagaacaagggtaggagttgtagtaagaagaagaccaagagcttcgacgacaaggtcaaaggggttccgttaccacttccctcgca

SEQ ID NO: 35371 - DNA, 121 bp, Glycine max
  Clone ID: 700889878H1
cacttactggaagccttgttgtgagtaagagaaaaggcttcctgcaccgagcacaccaacttgatacctctgattctttctttgcttagaattccacagaatatggagactcgttctttca

SEQ ID NO: 35372 - DNA, 227 bp, Glycine max
  Clone ID: 700889879H1
ttcaaatcatgagacaaatctcttggtgtatgagtacatgccaaatggaagtttaggtgaggttcttcatggcaagaaagggggccacttgcattggtacacaaggtataagattgcttggaggcttcaaagggcccttgctatctacaccatgactgttcaccactcattgtccatagagatgttaaatccaacaacatccttcttgattccaattttgaagcaca

SEQ ID NO: 35373 - DNA, 230 bp, Glycine max
  Clone ID: 700889880H1
ctcagttggggacttcaatttagattccaagtggcttgtagatcccaaacaactatttattggtccaaaaattggggagggtgctcatgccaaagtatatgaaggaaaatataaaaataaaatgttgctgttaagattatcaacaagggagaaactctggaagagatttctaggagagaggctcggtttcgcaagagaggttgctaatgttgtcgaggagttccaacaca

SEQ ID NO: 35374 - DNA, 231 bp, Glycine max
  Clone ID: 700889882H1
ctgccccaaaaccacatgctcttccacatccctatatacctacttttcaatcttcataatcatcatcatcaccaccaactccaactcaaactctccaaaacctgccacttcatccttcctaatattccttccctcactctcttctgcttctatcatctttctgagaggcttgttgacacacaaaaaatgatcaccttaacagacttctaccatgtgatgactgcaatggtg

SEQ ID NO: 35375 - DNA, 225 bp, Glycine max
  Clone ID: 700889883H1
aaaaaaacaataaccgtagcccacacctcctctcagcaaacatctctctttctctgtttcttttattatgttgtgttccttgggggtgctgatgtatgtgtgttgaagttctgaatttgatggaaacacgtgctagtggtgatatgaagatggccatagatgatgctttgaatggcttctctcctgtctccacccctaggattttctggaaatcacgaaggagat

SEQ ID NO: 35376 - DNA, 226 bp, Glycine max
  Clone ID: 700889884H1
ccgactgcccaatctccctatcctccaccatccctctgtccatcacaaacaccattgtatcactgatggaaccattgcttttccatggccttcaagaaaacaacaaacaatgaaggaccaacatagaacaaataatccaatacagatatagagctttcaagataatattcaatttttttcagatctgagaaattgatacaaaacccaaaaacagaaattcacaatt

SEQ ID NO: 35377 - DNA, 181 bp, Glycine max
  Clone ID: 700889886H1
ctcgagccgaatcggctcgagacaaaaccagttgatgagtgattcacaccatgcccatcttccaagaaatgaaaatgggcagactattggtcctccacaatcatccacgcacggctttagcctgtaagcatttcaaatcctacgtacagaggagttgaagagtacttcccagaggaggaaa

SEQ ID NO: 35378 - DNA, 223 bp, Glycine max
  Clone ID: 700889887H1
gtttttcataaaaaactagcagccctttctaagaaacaaagcagtgctaaagatggcaatgagcaacaatgtgatcggatgcataaacttcgtggcggtgatcctctcaatcccaatatcggcgccggaatctggcttttaaacggggaaatcgattcctgcgtccagttcctgcaatggcccgtcatcatcctcggagtcctcatcctcgtcgtggccctcg

SEQ ID NO: 35379 - DNA, 212 bp, Glycine max
  Clone ID: 700889888H1
tttacactgtgacttaaatagaaattatgctaagaatgacttttaaagataattattataaacgttaataaaattactgtatatggtaatttctaattggttggtggtataaaacttctaccttattggtacatatattttttaactaataaaacatataggtactaactaataatattaatttagagttcattggctattttgggctttga

SEQ ID NO: 35380 - DNA, 223 bp, Glycine max
  Clone ID: 700889890H1
ggatcagatgctcaccaagcaaaatgtcttcgcctacaaatattctcctgtggtcttggcattcatcatcttgtcttgcttgatagctgtttctgtgaacttcagcacatttctggcataggcaaaacatctcctgtaacatatcaagtgctaggccacctcaagacatgccttgtcctaggatttggctacacattactgcatgaccctttcacgggaggga

SEQ ID NO: 35381 - DNA, 224 bp, Glycine max
  Clone ID: 700889893H1
ccccattgttgaggatacaaatgcaaaggcgcatcgtgatgccatggcattgtgttctaagaatgatatctctgttagcagtgttagagattgtattaagagcgagagtgctgttgtaccgctgctcctcaaaagaggattgaggtctgcatgggtaccaagtgcaaaagatcaggggctgctgcactgatgcaagagtttgagagagtggtgggtgtcgaagg

SEQ ID NO: 35382 - DNA, 223 bp, Glycine max
  Clone ID: 700889894H1
gattgcttgctaacccttccatgaagcaagcaatgcttttcccacagcctgctcaacccggagacgcgttccatcaagttttaaatggacatgcacgtaagctgcctcacgacaacccgtgttcttgaaaccaggggagaagatcttgaattggactgctggacctgtgggagaccttaaaccttggtaacaattatattacttttatgaggccattatagga

SEQ ID NO: 35383 - DNA, 223 bp, Glycine max
  Clone ID: 700889895H1
gtgcctgttccctccatacattgcgactgccaaggagcagtatgaatgattccattgtggaacagattgctgggaggctttctatgatttctttcttggatgtgagctactgtataaaattggtccctatgcgcttgagatgattggcaagaactgcaagcttctagaagggttgtgtcgaaacatgcacccattggatactgcggagaagccgcatcaagac

SEQ ID NO: 35384 - DNA, 139 bp, Glycine max
  Clone ID: 700889902H1
attacacacaccacctcgcactcgcagggacagagagtggggaaggaaaaacacagactaaatggcgccaaatgctctctttctcttctctttcctcgccactgctcctccttctagctccgctgcaaccgctcgccgg

SEQ ID NO: 35385 - DNA, 94 bp, Glycine max
  Clone ID: 700889903H1
gccttaactaataaatagacacggaaggaaactcaaaagaccacccaaaaaaattcagaagacacaaacaacaacctttgacacaacatagtgg

SEQ ID NO: 35386 - DNA, 233 bp, Glycine max
  Clone ID: 700889905H1
ctccattcatttcatcaattcactttccttagtttcttgcagcttcacactgtgccactgctccgttttagggttgcaatggcgctgttcctcctctacgagtcggcgtcgggttacgcgctcttggaggcgcacggcctcgacgaaatcgggcacactacggaggccgttcggaactccgtttccgacctcaacaggttcggcaaggtcgtcaagcttcgctccttcaaccc

SEQ ID NO: 35387 - DNA, 231 bp, Glycine max
  Clone ID: 700889906H1
taattattggcgcactttccaaactttacttgggtatactggacttatgtcgctgttagtaagattgatcaatcctgtagttatatccccaactattgctgcagttggactttcattctacagttatggtttcccattagttggtacatgtattgagatcggtgcagtacaaatattagtggttattgttttttctctttatcttcgtaagatatctgttcttggacatcg

SEQ ID NO: 35388 - DNA, 231 bp, Glycine max
  Clone ID: 700889907H1
caactcccgtgtacctgttggcatgcaaatgatgcctacatcacaatcaagtagtccctttcctgcagttttcatggcaaagccaggggaatattattccaaactttctgaagatgttccagaaagtggaagatcacgatccagtggacaaaagatcatgcaacatgtccaattcaagtgtgtgtgatggtagtcaaaggtttcccaatctgtaacttctgtaaccacaga

SEQ ID NO: 35389 - DNA, 78 bp, Glycine max
  Clone ID: 700889909H1
ctcgtcggaaaattcatggccttcgaccgccacatgaacctcgtcctcggcgactgtgaggagttccgcaggcttcct

SEQ ID NO: 35390 - DNA, 114 bp, Glycine max
  Clone ID: 700889910H1
ctcacaagtgttgtgcaacacaattgtgaggattcactgttagctgctcctaattatcttggacttggtccttcttgctgagcttagcactcgaatcgagtttaaagctgaaaa

SEQ ID NO: 35391 - DNA, 230 bp, Glycine max
  Clone ID: 700889911H1
ggctacctgcctgaaaatcagaaattgttggttggggccaataatcaagtacagttgccttctgaattgcactctagggcaccagaatcaattgaaagacaaggtaatgttgttgagcaacaaactgactctgcctctgggaaacttggtaaagtttttaaagatttggacaatgtgtctggatcatcaaatgaattgaaatctgaaaaagttgaagcagatttgcaacc

SEQ ID NO: 35392 - DNA, 230 bp, Glycine max
  Clone ID: 700889864H1
acggaaagctcagaactaccacatcgtcgccttcctctaaacgataaatttttgggattctgaaactagtgatatgttttcttgcatgaaggctgcatagtgaggaattcagtttgtgtattgaagctctagttcaacatgtcttctgtaagtaagggtgataagaaggcttccattgatgcagcatcatggttgttcaatgtggtcacgtctgtgggaataattcttgt

SEQ ID NO: 35393 - DNA, 166 bp, Glycine max
  Clone ID: 700889917H1
gtcggaatttcgctcgagcaacacaaccacaaagtctcccatctgacaggtttgaggtttgaatccacattgtcttcttggggtgagataaatgtaaatatctatataagtgttcttttagctccaatgtttttcctgccttaggttgagacatcatttcctcctc

SEQ ID NO: 35394 - DNA, 237 bp, Glycine max
  Clone ID: 700889918H1
gttttgtgtatattttacaaacatagaatcaacataatgtttcgtacatctttaaggacgaaaaacaggaagggatagggtcggatccaagcgcgtaaacaggggtcttggccccctcccttgagaccctttatatatatgagcagaaaagaaaaagataaaaaaaacattaatggtggaaaataaataagaaaaaatgaggtgtggagttaaaattggttaaatttcctttgggaa

SEQ ID NO: 35395 - DNA, 231 bp, Glycine max
  Clone ID: 700889827H1
agaagctgaaaaagttaacttaaggcatcaagacatggaagaaagaaaaggcaccgaagaatggatgcttgattatgcacttcgacaggttgtttccaaattaacccctgctaggaaaagaaaatggagctgctagtggaagcttttgaaacagtcatgccaaccataaaaaattgaaactgggcaaactggcaaagagtggaatagctttgtatgcaaaataaattcaag

SEQ ID NO: 35396 - DNA, 229 bp, Glycine max
  Clone ID: 700889828H1
gagaaaaacacagagacagaaacagagggtagtagttgagttgagcgagtggggggaagtagcgaagaatgagtatgttgaaaggaggtgaaatgggtggagaaggagggagagaaggggatgggagtgcagcagttgcaacaacaggaactacgccttcagatcattctgcaacagatgcaagcaaccccgcctcctcgtcgattccaaaacccccgctgattccaag

SEQ ID NO: 35397 - DNA, 230 bp, Glycine max
  Clone ID: 700889830H1
cctgaactcaacaacaacccaaagataaaaagcacaacacaagacactgaactcgcactcactgggttttcaaccatggatgcgatacggaagcagctcgatgtgttgatgggagccaaccgtacggcgacgtccgtgaagtcaatcgcaagtactacgatcgcgacgtctgtcgtctctacctcgtcggtctctgccctcacgaactcttccagttaacgaaaatggat

SEQ ID NO: 35398 - DNA, 231 bp, Glycine max
  Clone ID: 700889833H1
ctggatcagatctctcctttgacgtttagcattggaaacaccatgaaacgtatatctgtcattgtgtcttccattattatcttccacacaccagttcaacccatcaatgctcttggtgccgccattgcttccttggaaccttcttgtattcacaggcgaaactatagagttggggaactaagattcctctagggacttgtttgttacagttcttcatgctcaaccagggac

SEQ ID NO: 35399 - DNA, 233 bp, Glycine max
  Clone ID: 700889834H1
cttcttctttgtcatgtatgtatctctgcacttgatcaacaggtactgcctcgtgtcattggatgtgtgaatttctgaactcatttcacagaggtcatgcattattctgctgcttctctttgcatcaagacctggtgtcgatttagacttggaattcctaattcaggattgttcaagtgtgagctggatcccccttctatcctctggcattggcatgtaccaaatttgggaag

SEQ ID NO: 35400 - DNA, 232 bp, Glycine max
  Clone ID: 700889835H1
ggaggagaatgtggaggtgaagtacttctggggaagcacgttgtatcacgtggacgatttgccttttcaattggaggacatgccttccaattacggagggtttagggatagggttcagaaattgaggtaaggaagacaattgaagctttagatcatcttaagggaatgccttctcgcggtgattttgagcttggggagattccttccttaatggaccttggccttaatccat

SEQ ID NO: 35401 - DNA, 230 bp, Glycine max
  Clone ID: 700889836H1
gtgaagtgtgcgtgagaaaggaacagagagaagaaaaaggacaaagttggaaggagagaaagagaatcccgattgtaacgccactttggtgaactccttctgcgaaatcacttcctcttccaaaaagaagcccttttctttttggagagccacaatttcgacctagacgccgccgtttcgactttcctcgataacgccaacaaccctctcatccctcaaaacgacgacgt

SEQ ID NO: 35402 - DNA, 229 bp, Glycine max
  Clone ID: 700889837H1
atcgagcgaatcggctcacaaaagactagtccaagacatggctccagcactcacaggcagccgcagcagcagcagcctcattttgcctttgataacatggacactcccacaccaaagtccaaaaatcaaccatagtgacatcttcaaaaccggcgcgaacgcctccatttagaactcctcaggcaaacggctcaggctcaggctctagatatccgagacaaaggggtgt

SEQ ID NO: 35403 - DNA, 230 bp, Glycine max
  Clone ID: 700889838H1
caaagattgttcagggaaatcttgaagaagaggcctcttctagtcagagctcttcatggtttggctatggcaatgcacaaaatccatgaaggtcctgctgtatttgaaatgctaaataatgctaagagttagcttctcgcgaaaacagagttaccgaggagagaaatataagaatcttaattgcgcaaatgcatgttgtccagggtaatttggaggagggcttgaaaaga

SEQ ID NO: 35404 - DNA, 229 bp, Glycine max
  Clone ID: 700889839H1
atcatcgtcaaggttcctcaaaatgtctctgtcttttgtgttgctcttcctcatctcaattccaccttctttctcctctccaattcaccccacaagcaacgaccttcgtttttcttcaacagagaaaaactcataagagggcttaacctgttcccgaaagaccccattaacacactcgagaatgaccctctttttgtgtcaggaagcattgtggagaagagcttcactt

SEQ ID NO: 35405 - DNA, 228 bp, Glycine max
  Clone ID: 700889840H1
ggatctgatctgctgaaacacgccacactcttcttaccatgggcctcctcgatcacttgtgggatgacaccgtcgccggtcctcgcccggagaacggccttggcaagctccgaaagcaccacccttcgctttccgatctgcctccggcaaggaatcagacagcggaagcgtgaaatcgtacggtgaagatttgccggaggatgcggtgagagtgacgcgaagtatcat

SEQ ID NO: 35406 - DNA, 226 bp, Glycine max
  Clone ID: 700889841H1
ctcactcacaaacacacactgaactaaaaaacatcaaaagagacatggctgagcaaaccttcatcatgatcaagcctgatggcgtccaaagaggccttattggcgagatcattagcagatttagaagaaaggtttctacttgaaaggtttgaaacttgttactgtggaccgtccttttgctgagaagcactatgctgatttgtctgccaagcctttctttagtggt

SEQ ID NO: 35407 - DNA, 226 bp, Glycine max
  Clone ID: 700889843H1
gtgcgtcggagctgtctgtgcaaatttgcgttgttcttcgcggcacacctcactcactgaacggtaagtatggcggacaaggctgttacaatccgaacccgaaagttcatgaccaacaggctctttccaggaagcagtttgtcgttgatgtccttcatccagggagggcaaatgtttccaaggctgaacttaaggagaagctggctaggatgtatgaagtgaaaga

SEQ ID NO: 35408 - DNA, 228 bp, Glycine max
  Clone ID: 700889846H1
aagcaattgacaaagaaatacgagaatcacttatggtaatcatcaaccgaagattaaaagcaatcaaagcaggggagcctactaacaatgacttgttaggcatactcttggaatcaaattaaaggaatctgaaaaaagtagtggtggaggaatgagtttaagggaagtagtggaagaagtgaagctattttacttggcagggcaggaagcaaatgcagaattgctggt

SEQ ID NO: 35409 - DNA, 228 bp, Glycine max
  Clone ID: 700889847H1
acgctttctcgttcgagatccctcaagggatccactaactgaaggagaaatggggttgacattcacaaagcttttcagccggcttttcgccaagaaggaaatgcgaattctgatggtgggttcgatgcagctggtaagaccaccatcctgtacaagctcaaacttggagagatcgttaccacaattcccaccattgggttcaatgtggagactgtggaatacaagaac

SEQ ID NO: 35410 - DNA, 73 bp, Glycine max
  Clone ID: 700889848H1
tctctttctagatttttgtttatcctgcaaagattactgagtgcgtatcatataatgatgtataaaagttgta

SEQ ID NO: 35411 - DNA, 235 bp, Glycine max
  Clone ID: 700889850H1
catttacgcttctcttctctgcagcaactatgcctaaccctaaggtcttcttcgacatgaccatcggcggtcaatctgctggccgcatcgtgatggagctctacgccgacgtcactccccgcacgccgagaacttccgcgcgctttgcaccggcgagaagggcgtagggcggagcggcaagcccctccactacaagggctcgtccttccaccgcgtgatcccgagtttcatgtgt

SEQ ID NO: 35412 - DNA, 231 bp, Glycine max
  Clone ID: 700889851H1
gaaggaaccaacaatgagaagacatccaatctgactcaaacaaagttggagaagaggtttggacagtctccagtatttgtagcctccacacttttggatgatggtggagttccacatggcgtagtcctgcatcacttttaaaagaagccatccaggtcatcagttgtggttatgaagacaaaacagaatggggaaaagaagttgggtggatatatggttctgtgacagagg

SEQ ID NO: 35413 - DNA, 228 bp, Glycine max
  Clone ID: 700889852H1
ggcctgattccaagagcttcagtgataatggatttggctccgtctcatcaaaatggcgagggggtaacgtttgtcaaattaacaaactccctggctccaagaaaaatccatgcaacaggaattgattggagcaagattctttaacaaagctttcgaggcatacaatgggaaacttgatccatctagcgatacagcacgtgattttgtggggcatggaacccatactct

SEQ ID NO: 35414 - DNA, 229 bp, Glycine max
  Clone ID: 700889853H1
aggaaaggtggcctgaaagaagaaaatattattgtttttatgtatgatgacattgcattcaatggggaaaacccaaggcctggagtcatcattaacaaaccagatggaggtgatgtttatgaggagttccaaaggattacaccggcgaagatgttactgttggtaacttttttgctgctttacttggaaacaagtcggcacttactggtggcagtgggaaggttgtgga

SEQ ID NO: 35415 - DNA, 226 bp, Glycine max
  Clone ID: 700889854H1
ttcacttttgtggatgaaaactccttatggtcaccttcaaaaccagtcaaccaacgtgatgctgatctcatccatttttgggataagttccgcaaagctcctgagggttctctcaggaaaatacagctcagaaacaagttttggaagcaatgtctcacagaatgcatgtagacaacagtgtaaaactgattgggaagcttttatttggcattgaaaagggtccaga

SEQ ID NO: 35416 - DNA, 226 bp, Glycine max
  unsure (1)..(226): unsure at all n locations
  Clone ID: 700889855H1
tgcaggttggattcagaatgcagcttccaaagtatattgccgcatcattcttctgcctaatctgctcatccattatttactatggtaatttatggcacaatcttccttaacacttgatactctcaaactttctgtttcctatgacatctacgaataaaaaaatatntatgtttgaattattttaagataattatttaaaaaattaataaatttattatatatgatg

SEQ ID NO: 35417 - DNA, 224 bp, Glycine max
  Clone ID: 700889856H1
gcaaaattctcttccgtttcaggattagtgtttcaccgttacagtgaaacatggcaaaaccaaagcgaatctctctgcgtatctttgcgctgctcctcttgatttccacctcttcgtttcgcttctccgcgcttccgatgacgccgatgatgatgcgatcttctatgattcgttcgacgaggattttgaagaccgttgggttgtgtctcagaaagatgagtaca

SEQ ID NO: 35418 - DNA, 223 bp, Glycine max
  Clone ID: 700889858H1
ctcgagccgctcgagccgcaaaaggagagcaccgcctcgcactgcgcatgcagagacaaacctaaactggcggaagatgacggaggtggcgagatcagtggtgcacgacgttttggggcaagagtggtcgacgtggaccagccaatcgtcgattatatcgtcaacgtcctcgccgacgatgacttcgatttcggcctcgacggcgaaggcgccttcgatgccc

SEQ ID NO: 35419 - DNA, 226 bp, Glycine max
  Clone ID: 700889859H1
cttcaattcattctagttctggattccgactagccgcgttgactcggttccgtttttcattctcgcggatctaatattaaggaatagcttaagggcacattacaatgaaggcattgattcggttgggggatttggaacaaggctgaggccactgacactcagtttccctaagcctcttgttgattttgctaacaagcctatgattttgcatcagatagaagccctt

SEQ ID NO: 35420 - DNA, 222 bp, Glycine max
  Clone ID: 700889861H1
atcgagcgattcggctcgaggcttaatgaagcagacaacacaaccagcgggtatatatatagatatacatatctagggttaatgttatcagcgacgaaattaattgcaattaagtggatagatcttgaagctgagaatcgcgtgcgccatgaatagaggtgaaagttcaggtggtggacagagctcgttggggtacctatttgggtcagaagagaagccaaa

SEQ ID NO: 35421 - DNA, 227 bp, Glycine max
  Clone ID: 700889862H1
gagagatcagatacaaagagatcgagcaatggcattagtgtcttcactttctcctgcgaccccttcttcggttcaaaccaacactttgaacccattgggttggactgatgatcagatccggagaaggtttacattacccacgtccacaccgctgaaaggtacgatgtggaatcgcttttcaacgctactgcaaacatcatcaagcgttctactgcacttgctgacag

SEQ ID NO: 35422 - DNA, 229 bp, Glycine max
  Clone ID: 700889826H1
gaattattcctccttctcaaacatttttttgggcaacacggtggacccaagcccaatgaatgttttctttttgactccttttaaacattagttgaatctaggattcataattttgttctgctcgcaatgtatgtcgtttttcaggattcttatgccattcgaagctttgagagaggaatatctgctcaaaatgctggtcattttgcttgggagatagttccggttgaag

SEQ ID NO: 35423 - DNA, 208 bp, Glycine max
  Clone ID: 700889787H1
gctctgtttctgtctctgtgtttgcggctgaggattccgaacgagcgaccttcttcgtttctcgcaaagtttaagtcatcatgggtaaggaaaagactcacatcaacattgtcgtcattggacatgtcgactctgggaagtcaactaccactggtcatttgatctacaagcttggaggtattgacaagcgtgtgattgagaggttcga

SEQ ID NO: 35424 - DNA, 208 bp, Glycine max
  Clone ID: 700889788H1
gtgattctctctatcagaattggagatggcagcccagagattgctctttgcccaagttcaaaccaagacttttgcttgagaagcttagagggaggaggcttatgtttattggagactcactgaacaggaaccagtgggaatcaatgatttgtctggtccagtctgttgttcctcaaggcaaaaaaagtttgagcaagaatggttctct

SEQ ID NO: 35425 - DNA, 209 bp, Glycine max
  Clone ID: 700889790H1
cttgaagatggtagcctcgaattagaaatgggaaaattcaacctccatggaattttgggagagattattgaactgataaaaccaatagcatccgtgaaaaagttacctatcaccttaattctgtctcctgatctgcctactcatgccattggtgatgaaaagcggcttacacaaactcttttgaatgtcgtgggtaatgctgtcaaatt

SEQ ID NO: 35426 - DNA, 211 bp, Glycine max
  Clone ID: 700889791H1
atcccaaattggtgaacaggatgcagaattcccagtcagagatgagaaaaactttgcctctgagaaacctcaatgtcaacagatgcagatatgtcaattggagcaagaaagtactcatgctacgtctgaatgtgcatcagaaatccatgcagatgagccatcatcattttattcctttccacagtcatctagattcgtaaacaatgctgca

SEQ ID NO: 35427 - DNA, 206 bp, Glycine max
  Clone ID: 700889792H1
aaacttaaatagggtatacccaacaagattaacataattactctatcatttattcgtaaaggctcagatcttattaatatccgcaaggttctggggccacatgcaaagaatattcagttgatatcaaaggttaagaatcaggagagaatcctaaattttaacgaaatcctacgggagactaatacattcataatggcacgtgatga

SEQ ID NO: 35428 - DNA, 213 bp, Glycine max
  Clone ID: 700889793H1
ggattctgtcaccctggtctcacaaagtgagatgcttctttgaagtcagtctagcatctcttacactgaccaagagcacttctggttatgtataagattagctgggttctcagtgataataaataactgtgaaatattgtttgaatcatccaatacatcagcaaacacattttagagaccgccaattgattatgactcattttcttggattta

SEQ ID NO: 35429 - DNA, 216 bp, Glycine max
  Clone ID: 700889794H1
ctcgagcgaccgccctgccatagtcgcgagtctgtttataatcgcgactgttgtcaacgtcaacaaggttgaaacttccaggaaaaaacttcgaattgggagggcgatcctcccggtgaactgagccgtaccccaaaccgacacaggtgaacaagtagagtatactagggcgcttgagagaaccatgtcgaaggaactcggcaaaatgaccccgta

SEQ ID NO: 35430 - DNA, 221 bp, Glycine max
  unsure (1)..(221): unsure at all n locations
  Clone ID: 700889795H1
gccccgattaaatccgtccaagtgccacatgttagccctgaagaaaggttcttggtgggtagagttggcccaaaggagtatagactttaccggtgcatagcgcggtatggctaccgcgacattcaccaggatgacattgagcttgagcgggatcctctttgnagnatagctgaattccccanatcanatgnatctcaatatagcttaggatttgggagctt

SEQ ID NO: 35431 - DNA, 224 bp, Glycine max
  Clone ID: 700889796H1
aatgtttattcacatgaaaatgttcttttaaatgtatgaattatggtgtccaaatcaatcaaaaataattttttagttagacgcctatttaattagaagtgtaaaaaaaacataaaacactgacgttatattagaaacgtctatagctgacacttcaaacaaaagagagatatcagtaattcatagtttaagacatattattttcaactaaattaatttctctc

SEQ ID NO: 35432 - DNA, 195 bp, Glycine max
  Clone ID: 700889801H1
gcaccaccgttttcctttgctttgcgttctacaatgtcgaaaacctcagagattattacatgcaaagctgctatttgctggggaataggaaaacctgtgactgtggaagagatacaagtagaccctcccaagccaccgaagttcgagttaagatgctttgtgccagtatatgctccacagacatctctagcacaa

SEQ ID NO: 35433 - DNA, 239 bp, Glycine max
  Clone ID: 700889802H1
gggaccacaaagatagctgcggcggcggcggcgcgcggagggactgtgaagggtgagtgttcctcaatgcagtcaaacgggaaggcgaagatgtgggaggaagagcaacagcagcagcagcagcaacacagcaacaacaacaacaggggatggacgagttgctggcggcgttggggtacaaggttcgtgcttccgacatggctgacgtggcacagaagctggagcagttggagatggtc

SEQ ID NO: 35434 - DNA, 237 bp, Glycine max
  Clone ID: 700889803H1
ggggtagaaccatttccccccattttaagaaaggagttaactttaaaaatatgtcatgctacatgcttgcttcttaaagttaactcctttcttatcaaggggtagaaccatttccccccattttaaaacttcatttttgtttcatagttttgatctatttattggatttcatatagatagaggtttctctaggggggggcttgttaagtctgttgctattatagagaattactgtgg

SEQ ID NO: 35435 - DNA, 235 bp, Glycine max
  Clone ID: 700889804H1
aggtaaatattaagtatgcttcagtaactaaatcatataactcaagaatcttggcccatcaaaagaaaatgaaaactcacatgcacacacgtgcacacagagtctcatcctgaaattaattgggatatgatgagccaacaattcaaaagcagaatgagtatgtagccaaaacatgtagtctatctaattgtgtgtggggccttatattcatatttttgttatatagtctacctaa

SEQ ID NO: 35436 - DNA, 97 bp, Glycine max
  Clone ID: 700889806H1
catcattataattcacaatcatcaaagagagagatggtgaacgtggtggaattgcaaacagttgcagagtgggtgtgaatggatgcacggactcatg

SEQ ID NO: 35437 - DNA, 231 bp, Glycine max
  Clone ID: 700889807H1
ggcaccataacacatggaggctactctgacttgatggttgcggatgaacactttgtggttagaattccggataacctaccacttgatgctgctgctcctctcctctgtgctgggatcactgtgtaagccctttgagatactatggacttgacaagcctggtctgaatcttggtgtggttggtcttggtggacttggtcacatggctgtcaagtttgccaaagctcttggag

SEQ ID NO: 35438 - DNA, 230 bp, Glycine max
  Clone ID: 700889808H1
gggaggagtacatatgagtcaaggtgcatctcggaaagctcctcccattgagagtaaattgccctgcactcttgaggagatatataaagggactacaaagaagatgaagatctctagagaaattgagatgctagtggaaaaaccatgccagtagaggaaatcttgaccattaatgtcaagcctggctggaagaaaggaacaaagatcacattccctgaaaagggaaatga

SEQ ID NO: 35439 - DNA, 204 bp, Glycine max
  Clone ID: 700889812H1
tgctcgtcatgaccggtggaggtctggacactcgtcgaggctgtgttggaggtggcgcacatttgggtgaaggcgttgtccgaaccattgctatggatccaccgaaggtgtcgttagaggctggcgcgttctcaacactggctcccctattaccgttccagttggtagggctacccttggccgtatcataaatgtcattggaga

SEQ ID NO: 35440 - DNA, 229 bp, Glycine max
  Clone ID: 700889813H1
tgcggaatcagctagaattttctaataatggccaaagacgttgagcaggttacagagcaaggtgaatactccgcgaaggattaccatgacccacctccggcgccgttgatcgacccagatgagtcactaagtggtccttgtacagagccgccatagctgagttcatagcaacactccttttcctttacatcaccgtgttgaccattattggctacaagagacagagtga

SEQ ID NO: 35441 - DNA, 228 bp, Glycine max
  Clone ID: 700889814H1
aaggaaagggaaaatgggtaaggatctgagcgaggaacaagtgtcttccatgaaggaagccttctctctattcgacactgacggagacggtcggatcgctccgtcggagctggggatcctgataggtctctgggaggtaacccgacgcaggcccaactcaaagccatcgtggctgaagagaacctcacggcccccttcgacttcccccgattcctcgatctaatggcc

SEQ ID NO: 35442 - DNA, 231 bp, Glycine max
  Clone ID: 700889816H1
tctcgagcgattcggctcaggaatttcttgaaggagttactaggcaaaacttggtatcaaaatcacttgttctcaagaaactgaaccgctaggtactgcaggccccttggctcttgcgagggatagctaatagatgactctggagagccattttttgttctcaacagtgatgttatcagtgagtacccacttaaagaaatgattgaattccacaaaacccatggagtagag

SEQ ID NO: 35443 - DNA, 165 bp, Glycine max
  Clone ID: 700889817H1
ctcttgggtgtgaaaatgtcgcacagcgataccataccccttcacccatcttcccaatccgacatcgacgagatcgggaacctcatcaatgccagcgttcaccaatcagtcccttcggcgttgtcccctttccccgcgggcttccttccccgtctcggtctccgt

SEQ ID NO: 35444 - DNA, 241 bp, Glycine max
  Clone ID: 700889818H1
cagcaactttccttcattttctctcttcctctcaccgagtcacgcactcggcttgactcgtacgaactccgatccccccccgagtcacactcaaccagcaccaccgcccgatccgacgatgtctcgcgcctctccgccgcagattccgccgcctccggtgagatcatactgttcggagtcagagtcgtcgtcgattccatgaggaagagcgtcacatgagcaacctctcacagtacgagca

SEQ ID NO: 35445 - DNA, 234 bp, Glycine max
  Clone ID: 700889819H1
acaaggtgtgctggaagggaggatgcttcagctccgacattcttgccgctatcgagagggcaatattggacaacgtaaacgttctgtctctgtcgctcggtggtggcatgtcggattattacagaacagtgtcgctattggagctttttccgctatggagaatgggattttagtttcatgctccgctgggaacgcgggccccagtccctacagtctctccaatgtggctccatg

SEQ ID NO: 35446 - DNA, 234 bp, Glycine max
  Clone ID: 700889820H1
caaatttctcagtctccggaactcgtttctaccttcacttcgcacatctcgaaccctctctttccggcaactaggttaaagttcatcaatggcaggtcgtggcaaaaccctaggatccagcgccgcaagaaggccacctcaaggagcagcaaagccggcctccaattccccgtcggccgtatcgcccgtttcctcaaggccggaaaatacgccgagcgcgtcggcgccggtgct

SEQ ID NO: 35447 - DNA, 233 bp, Glycine max
  Clone ID: 700889821H1
atatgctgccactcctaggatccaacatggctcaaacactaaactgcagaacactacaaccaatggactcaactatgatcaagtcactgtcccacaatccaaaaaacgccaattccaccgcattccaaggtactttgccaaaaaatctggtgtttttatcaagatcatggcttctgctacacccacagcagctcctatcacctttggattcaagaatttgttggaaacattca

SEQ ID NO: 35448 - DNA, 230 bp, Glycine max
  Clone ID: 700889822H1
cttgaaaccacagaatttgttgatagatcgccgtactaattcactgaagcttgcagattttggattggctagggcatttggcattcctgtcaggacctttacacatgaggtggtgacattatggacagagctccagaaatattgcttggatctcgtcattattctacgccagttgatgtttggtcagtgggatgcatatttgcagagatggtaaacagacgacctctatt

SEQ ID NO: 35449 - DNA, 227 bp, Glycine max
  Clone ID: 700889823H1
tctcgagcgattcggctcagatgaacaaatggctgaggactcagcacaagcttgtgtcagtattccttccaatccctggagttctctgcaaaggggtttcagtgcataataactccctgtaagtgcactagtaaagaccaaagtatgattattgttacattatgttacatggttgtacttgtatatacatatcttgtcccacctttgtaaatacaattgggacacta

SEQ ID NO: 35450 - DNA, 231 bp, Glycine max
  Clone ID: 700889824H1
ctcagaaccttctgaggttaaagcaaaaaacaaagagagagagagagagaaaatgatgaagccatcgatgctcagatctctccactccgccgccacccgcggcgcctctcatctcttccgccgtggtacgcctccgagccggtgccggagcgcaaggtagccgttctcggcgccgccggcgggatcgggcagcctctctcccttctcatgaagctcaatcccctcgtttcg

SEQ ID NO: 35451 - DNA, 212 bp, Glycine max
  Clone ID: 700889784H1
ggctcaagttgtctttgctggaaatttaattgagatacctcacagacttcttaatggacagaatttggcttcaaaggatctctcaagaatggctgagccaataaaggagctagatattctgttgagtcagatagctgctggtttgcctttggatatcatgccagggcccagtgaccctgctaatttctcattaccacagcagtcattgcata

SEQ ID NO: 35452 - DNA, 92 bp, Glycine max
  Clone ID: 700889739H1
cggatgttgcagtcaaggatctcaagcgtggttttgttgcatccaactccaaggatgaccctgccaaggaagctgccaacttcacatctcaa

SEQ ID NO: 35453 - DNA, 217 bp, Glycine max
  Clone ID: 700889741H1
cgtacatggaatccatggttccactccccggaatctatgacccggatttcattgctgccaaccaaggagaccgtgccactaacgtaatcaggggcacaaagaaagaacaagttcaacaaatcatcaaagacattaaggagttcaaagaaagcactaaggttgacaaggtggttgtcctgtggacagccaacacagagaggtacagcaacgtagttgt

SEQ ID NO: 35454 - DNA, 213 bp, Glycine max
  Clone ID: 700889742H1
cctatcccaccggattccacccccgctccaaatccgacgttacgcgctggcagagcttccttcgagagcgtcaggccacgcgctcttctgcttcgccggcgcgccgcgcgcagccttccccgacgactttaggggacttctgctgagtcagtgccgcgactcgggcgagtcgtgccgcgccgtgaactgcaccgggacgcggtgctccaacgg

SEQ ID NO: 35455 - DNA, 214 bp, Glycine max
  Clone ID: 700889743H1
tggttggactcttgagaatctaaaccttgatggttgcaaaaatatcagtgatgctagcttgatggcaattgctgaaaactgtgcattgctatgtgatcttgatgtctccaagtgcacaatcactgatgctgggattgcagtcctggcacatgccgaacagattaatctgcaaatcctttctttgtcaggttgcactttggtctcagacaggagc

SEQ ID NO: 35456 - DNA, 212 bp, Glycine max
  Clone ID: 700889744H1
tcgagaaactttcgaaagattttatccaattgaaattttaaaaatgactgggataaacttaagaattcaattattgaaattgaataagtaaacaatttaattggattggtcgaatggtatcaaaaaaatggagtactaactcccatttcttatttattattgaattaaccgatcaacttgctttgttatcgaacattgctttttgatttcaa

SEQ ID NO: 35457 - DNA, 214 bp, Glycine max
  Clone ID: 700889745H1
gtcaatgggtggtttccctcactatggtgttgttaaggatgattttatcatggtcaagggatgctgtgttggtcccaagaagagggtcattacattgcgtcaatccctccttaagcagacttctcgtgttgctcttgaggagatcaaactcaagtttatcgatacctcttcaaagtttgggcatggtcgcttccagaccacacaggagaagcag

SEQ ID NO: 35458 - DNA, 220 bp, Glycine max
  Clone ID: 700889746H1
ctgtagccaaggcttacaaccatcaagcttcttctcttactgaatgtgtttggattcggggccatgcttctatcaactctctacctgtcaaagggagcaaagcgtcttgctatcataggatggatttgccttgttttcaacatcagtgtctttgctgcacctctcttcattattaggcgagtcataaagacgaggagcgtcgaatacatgccatttactt

SEQ ID NO: 35459 - DNA, 217 bp, Glycine max
  Clone ID: 700889747H1
ggaaccctagcttcgtttctctctctctctctaactactctgtttctctctctacggtagatcggcggcgaggaagatatgggcgacgacgacgagatccagtcgcatccttcgccggcgagcggatcccctccgtcgtcgccgaggtcgaacggtcggataacggtgacggtcgcggctccggcgccgcaagcagaccaaccaccgccgaatagtc

SEQ ID NO: 35460 - DNA, 236 bp, Glycine max
  Clone ID: 700889748H1
ttcggctcgagctgacacatcctcttctcttctgtggttgccccaaaaatcagacacagatcctcaaaccataaaaacacactccaattccaattgaaatgttcaaaacacaagcgaagtgaaaagagagtgagtatcgttggaaaaaatggagttcagtttcgatgagaaggactttgtgtcgtgctgcgggagcactaaattcgcgaaggaaatggcttgggcctctcctttcg

SEQ ID NO: 35461 - DNA, 225 bp, Glycine max
  Clone ID: 700889749H1
tgcgaaagcagttgaaatggtagatgagaacaccatctgtgttgcagccattttggggtcaactatgaccggagagtttgaggatgtgaagcttctcgatgaacttcttactaaaaagaacaatgagacaggttgggataccccaattcatgtagatgctgccagtggggggtttattgccccatttctatatcctgatttagagtgggacttccgtttgccgtt

SEQ ID NO: 35462 - DNA, 134 bp, Glycine max
  Clone ID: 700889750H1
tgtaattttggtcattgattaattctgcaattgagcagaggagccatggccaaaatcgcacttggaagcacccgagaggccactcagcccgcctgcattcagagccctcatcgtgtgaactgtcatagccacct

SEQ ID NO: 35463 - DNA, 217 bp, Glycine max
  Clone ID: 700889752H1
gatagcacaaagcgggttactgtctgttcaagctaccatctctctctctctttcttagtgcctccttgccagaagttaaaatggcccaagaaactttcctattcacatctgaatcagtgaacgaggggcaccctgacaagctctgtgaccagatctccgatgctgtgctcgatgcatgcttggagcaggaccctgacagcaaggttgcctgtgaaac

SEQ ID NO: 35464 - DNA, 214 bp, Glycine max
  Clone ID: 700889753H1
gtaaaaagggtcactcactcttctttcttttcattgtatcataacatgtcttcctcagagggtgtgtttgagttaggaattgagttctcagaagccaacaatgttcttctcatgttactaatggaagaaacacaagaagaagagtactatggcgatgatagacttgtgagcatgattcagtcattggaggcagagatcagtgacactcaaatgg

SEQ ID NO: 35465 - DNA, 211 bp, Glycine max
  Clone ID: 700889754H1
tggacaacaagggcttgttgatagtggatcaccaactagccaatgacaagaggaccaagccttatgtgaagaaaatggccaagagccaggactatttcttcaaggaattttctagagccattactttgctctctgagaacaaccctctcactggcacaaagggtgagatcagaaagcagtgcaatgctgccaacaagcaccatgaggagcc

SEQ ID NO: 35466 - DNA, 211 bp, Glycine max
  Clone ID: 700889755H1
tctcgagcgaatcggctcagtcacaacttccaaaggcttaattactctaatatataggtgattcaagtggttctatgagttttcttgttttagtctgaggctttaagttttgtttaatagatatgccaagggcaaattgcagtttctgatttgttgaaactgcaaagattgaatttagaactgatagaagagttaccatgtgtatcaaact

SEQ ID NO: 35467 - DNA, 215 bp, Glycine max
  Clone ID: 700889756H1
actgagccacaaggtgctgatgaccagcattgctcagcaggttgacggtgataatcccaacctctattaccactgccacgacaccatcctctgcgtgcttcccctctttcacatttactctctcaactccgttcttctctgtggcttgcctgccaaggctaccattctcctcatgcccaagttcaatattaactccttacttactctcattcaca

SEQ ID NO: 35468 - DNA, 214 bp, Glycine max
  Clone ID: 700889757H1
cggatcactttatcataccaataccaatctagtttcatatttcatttcatcttcttctttacttatttttcccttcttcttttcaattaaatggaggaaagtttggtgccaaagaggcctagagaagaagcccaagtggaagaagaaaaaggcttgaactttgaagaagattattcctcatcctcaaagaggcacaagccatacaaccacatcc

SEQ ID NO: 35469 - DNA, 214 bp, Glycine max
  Clone ID: 700889759H1
cgcgagaccgtgcagcggcggtacttcaccgtcaccggcgagagtcccgatgatacgacgctcgatctcttgatctccaccggtgagagtgagaccttccttcagaaagccattcaagagcaaggcaggggtagaattctggacaccatcaatgagattcacgagaggcatgatgccgtcaaagagatagacaagaatcacaaggagttgcacc

SEQ ID NO: 35470 - DNA, 214 bp, Glycine max
  Clone ID: 700889760H1
gtcaaagtatagagtgaaagaatgggtgagagaagcaagattttgatcataggaggcaccggctacatcggcaaacatatagtggaagcaagcgcaaaggctggaaatcccacttttgctttggtgagggaatccacactctctgacccctccaaggcacaactcatccacaattttgaggctttgggcgttaatttggtccgcggggatctgt

SEQ ID NO: 35471 - DNA, 215 bp, Glycine max
  Clone ID: 700889761H1
ctgatggactctgtgtatagatcattcaaggatgaggatggatttctttacatgtattatagcaccgaaaaaacctttggttcgtacatcatgtaaaatattaaactctgtacactattgtatccaacactttgtgaagtgactactatcacgaaaccttgtacaaatttgttgtatggtttaatgtatcactatttattatattgtcgattatc

SEQ ID NO: 35472 - DNA, 219 bp, Glycine max
  Clone ID: 700889764H1
gggaagcatttccactttgacagggagtgggtctgggagtaggaatagtagtggaattggggactctcacatcattgaagctggaaatctaaggatatcagttcaggttctgaggaaagtgaccgagaactttgcgcctgagaatgagcttggccgtggtggatttggggttgtttataagggggagttggatgatggtactaaaattgcagtgaaacg

SEQ ID NO: 35473 - DNA, 227 bp, Glycine max
  Clone ID: 700889765H1
agtcgagcgaatcggctcgagggccaggcaagccccactcaaagtccacacctctcctagttcacgctacccctttcaggtcttcttctacctttcaagttttaaacgtataaagatggcagagacattcctatttacctcagagtcggtgaacgagggacaccctgacaagctctgcgaccaaatctccgatgctgtcctcgacgcttgcctcgagcaggacccag

SEQ ID NO: 35474 - DNA, 62 bp, Glycine max
  Clone ID: 700889766H1
tttcaataagcggaggaaaagaaactaacaaggcttcccttagtaacggcgagcgaaccggg

SEQ ID NO: 35475 - DNA, 86 bp, Glycine max
  Clone ID: 700889768H1
ccgaatatttcctgtttcacgctctgagagatcaaagagaaggttttctttctcaaacttggtggatttggtcatggagaaaagca

SEQ ID NO: 35476 - DNA, 215 bp, Glycine max
  Clone ID: 700889770H1
gtttcttcttccattttcgcttctcgtagcattttcggaacactcatggcttccattgccggatccagctgcgtcgctctccgaaccgccaatttcgcctcctccgataaccggaaaatcggtcagatccggcaatggtctccaattctcactaatctccgtcctgtttccggtcttcgccaccgatcaaatactccgtttagctcctccggtgt

SEQ ID NO: 35477 - DNA, 211 bp, Glycine max
  Clone ID: 700889771H1
gtgaggctttgccgcgcggtttcatttcatttcaccgcagcaagttcgtgtcggtgactccataattcccaatcatcaccgcagcaaccaaatagggtctgcgtttcgtgcaatcaatccattacattacactgcatgttatataatcatacacacacacacacacacctgaaccaatttaggtttagaggaaacggcatcgtcgatggct

SEQ ID NO: 35478 - DNA, 210 bp, Glycine max
  Clone ID: 700889772H1
tgcgtgtgtttgcgaattgtgcaattttcaagatctgaatcagagaatagataataatggctacaccggaccacctgttcaacctccgcaacaacttgtatctcggggcgtaccaagccgccatcaacagcggcgacgtcaccaacctctcccaagaagactccctcgagcgcgacaccctcgtccaccgctgctacatcgccctcggcc

SEQ ID NO: 35479 - DNA, 207 bp, Glycine max
  Clone ID: 700889774H1
cttctcacagaacaaggaaattctatgcacagctttatgaagagtctcaaacttaaaaagtgggagcaagcataggaaaacttatatcagttacatcttccagttatcaagggaatcaatggagactggagagtatcactacggtttgaatagtgtgttgaattgttgtgtgcatatactctgcctctcacgtctctcttttgggct

SEQ ID NO: 35480 - DNA, 172 bp, Glycine max
  Clone ID: 700889775H1
cgtctctctctgtgttttcttgtttttattgtgtctctcaatgagagattgtaatggaaaaggatcatcaaagtctgtccaaggaacatagtgactcttcagtgtgttgttggcttatcaggagtagtacttcatgtcatcatctgaactccttgcaattgctctgtctcca

SEQ ID NO: 35481 - DNA, 100 bp, Glycine max
  Clone ID: 700889776H1
cgtgaaactggtgatgatgatgatgatggctatgatagcaactttataatgttcatgccagatagaagatggtcccttaaaccacgatcttgctggtcaa

SEQ ID NO: 35482 - DNA, 189 bp, Glycine max
  Clone ID: 700889778H1
aggcaattcttcctcaggtgtcagtgttctgtccgactcctacgattccatggaaactccagcaaaaagacagcacctgatacccaaggaggtgctagttccgctctcgatgaaatcaccatcttattcaagcttcttggactgccaagaagtgcggaccaagatgagaaactggccaaagacttggcc

SEQ ID NO: 35483 - DNA, 220 bp, Glycine max
  Clone ID: 700889736H1
ctggcattaacccagctaggagtctcggagctgccatcatcgacaacagagaccatgcatgggatgaccaatggattttctgggttggacctttcattggagctgcccttgctgctgtgtatcaccagatagtcatccgagccatccctttcaagacaagggcttaggctcttgtttttgtatgtgcttgcttgtattagttgttatttatgtatctgga

SEQ ID NO: 35484 - DNA, 241 bp, Glycine max
  Clone ID: 700889691H1
gtaagcactaaggttgacaaggtggttgtcctgtggacagccaacacagagaggtacagcaacgtagttgtgcggactaaacgacaccatggaaaacctctttgcttccttggacaggaatgaggctgagatttccccttccaccttgtatgccattgcttgtgttatggaaaatgttcctttcatcaatggaagccctcagaacacctttgtcccaggactcattgatctggccatcaaa

SEQ ID NO: 35485 - DNA, 240 bp, Glycine max
  Clone ID: 700889692H1
atattcctcttgagcctagtagtaatagtgaactggagtgatgctcaagtgtgttgtgtgtcagtgttttagggaccaatggtggagagtgagttttctgagttaagatataagatatatgctatctaatgcctagtgggatataggaaaggacctcaaatctgctatctttcgttcacatacgcatcatattcttttaattgttagttctgagttctgaccacagttgctgatttgagt

SEQ ID NO: 35486 - DNA, 247 bp, Glycine max
  Clone ID: 700889693H1
gcgttcgattcgtttctatctctctctctctctgtcatgggttcgctcgaggcaccaaccgccgcggaaaacggctccgctcccgccgccggcaacggaaaatcccactccatcaacggcgcggaggcggcgccggagcccgacgcgtcgaagcggcgcagatcgtcggtgctcccgttggaggtgggtacgcgcgtcatgtgccgttggagggacaacaagtaccaccccgtcaaagtcatcgaac

SEQ ID NO: 35487 - DNA, 247 bp, Glycine max
  Clone ID: 700889694H1
gttctagatctccggcggccacgtcaaccccgccgtcaccttcggcgccttcgtgggcggcaacatcaccttactccgcggcatcgtctacgtcatcgcccagctcctcggctccatcgtggcctccctcctcctcgccttcgtcactgcctccgtaagaccgttattaccgttacttacctatctttattttaattaacgaactataactgatagtaagagttttgttctgctgttacgcatcgca

SEQ ID NO: 35488 - DNA, 247 bp, Glycine max
  Clone ID: 700889695H1
ggaatgcttaccggtcctgttaccattctcaactggtcctttgttagaaatgaccaacctagatctgagaccacctaccagattgctttgtctatcaaggacgaactggaagaccttgaaaaggctggcatcactgttatccaaattgatgaagctgctttgagagagggtcttccactgaggaaatcagagcaagctcactacttggactgggctgtccatgccttcagaatcaccaatgttggtg

SEQ ID NO: 35489 - DNA, 250 bp, Glycine max
  Clone ID: 700889696H1
atcactcatctcttacaacgaaaccctcttcatcttgttctatctgtgacgagcatcatggcctcaagagcagtgttattgttggctatgtgtgtgcttccggcgatggttgtggccattcgcccagcaaagaaccctttttgcgtgaagggtcgtgtctactgtgacccttgccgtgctggttttgagacctcagctaccacctacattgctggtgctgagattatgttgcaatgcaagagcagggtta

SEQ ID NO: 35490 - DNA, 236 bp, Glycine max
  Clone ID: 700889701H1
gttcctttcagtcagatactccttcacgctcttcttcattctcctcctcttatcaccttcacacattgcttcaacaacaccaacactagctcacacactaacacaatcagccaccaaaatagccatcacaaaccgcaacatccatagccttaacaatgctggaagaggcaccaaaatcaccggcatatcgcaattcaaacgatacctgcatcgttttgggtacttacaaaacaaca

SEQ ID NO: 35491 - DNA, 229 bp, Glycine max
  Clone ID: 700889702H1
gcagagttccaacgatgcatggtacccttgttccgccaaataagtcgttgcttgagcagttcacatttccaggtagctgagagggctttgttcttatggaataatgatcacattgagaccttaatcaagcagaactacaaaattatacttcccgttgtcttacctgctctggagtataacgcccgaaaccactggaaccaggctgtccagagcttgacaataaatgtcc

SEQ ID NO: 35492 - DNA, 221 bp, Glycine max
  Clone ID: 700889706H1
ctcaggagtatataatctgagcgatgtcagatctcgaggctcccttgcgccctaagaggaagaaggtttgggtggactattttgttcagtttcgatggatccttgttatttttgtggtccttcccatctccttcaccatttatttccttacataccttggggatgtaagatccgagtggaagtcctataagacgcgtcagaaggaacatgatgagaatgtg

SEQ ID NO: 35493 - DNA, 223 bp, Glycine max
  Clone ID: 700889707H1
gctacaaattccaagcacaagttctctgagttgttttatgagagaacacatagcatagcaaggaaggagtattacaaccgaaaccctgaagaaaaaaagagtagaggaagaaaaaacacctgcaccaccaacgatggatgtggattactacaagatcttacaggttgataggagcgccaaagacgacgacttgaagacggcttataggaaacttgctataaaa

SEQ ID NO: 35494 - DNA, 217 bp, Glycine max
  Clone ID: 700889708H1
gtactctcctatctctttcatcataaacaaagattcatctctattctccaactcttttgcttcttcttccaaagtggcatcataacctagaagaaaatggggtgtggccatttgttcttcacagtcctcataaccttctcagtggcactcataacatacaacatcataatctctgccaatgcccctctcaagcaggacttcccaggcccctcacgcc

SEQ ID NO: 35495 - DNA, 87 bp, Glycine max
  Clone ID: 700889711H1
gagaagctaagcggcgcacgagagcaaaagctcatggaattgctaacactggcgcggatcaaggtttacgaactgaggcagaagacg

SEQ ID NO: 35496 - DNA, 98 bp, Glycine max
  Clone ID: 700889714H1
gcgaataggaaccagggaaatatggcatttgcaggcacaactcagaagtgcatggcctgtgacacaacagtttatctggttgataagttgacagcaga

SEQ ID NO: 35497 - DNA, 225 bp, Glycine max
  Clone ID: 700889715H1
aagtgttcgttttgtatctgatatctcggtctgagtggcagatccgcgccgatggtgtgagcgaaaacgttattggggcagaaataaaaaaccatagaatagatagaggtattactccctataacatgtggcagtgatttggagatggcagacttaccagggtatcttcatgcctgtttgagcacagggaagcttgcctccttggcaattttggtgtctggagga

SEQ ID NO: 35498 - DNA, 91 bp, Glycine max
  Clone ID: 700889716H1
cttcgcggaccttctaagaggctccaaggcccttccatctttcaaggtcaacgttgacggcggcttaacggttttctgccccaccgacagc

SEQ ID NO: 35499 - DNA, 229 bp, Glycine max
  Clone ID: 700889717H1
ttttgatcccaaaatatcagacttcggcttggctcgatcttttttgggagatcaattcgacgcaaagacaaatagagtggctggcacatatggttacatacctcctgagtatgctgcacgtgggcatttctcagtgaaatcagatgtctttagttatggtgtgatactactagagattgtaagtgggaagaaaaacagagaattttcagacccacaacactacaataat

SEQ ID NO: 35500 - DNA, 225 bp, Glycine max
  Clone ID: 700889719H1
gaattttgtgattccaagctggcttgtagaagagtccactgggtctacaaaagacaatccattcacgttaccagatgcgtatatggcatctcagcataaaaatcacaaaaatttagaggagataaggcaactcttacgagaagcatctttagaagaaagtcgcaaacgagaattggtctctgcgctccacgtctactttcaaaggtcgggttatatgcttcggga

SEQ ID NO: 35501 - DNA, 223 bp, Glycine max
  Clone ID: 700889720H1
agacgtttcggcacagtagtagtgagagtgaaaactgggaggagggagggagtgaaaaaaaaattatgagtcggtgatgaaacgacggggaaggtgggtgggtgattgcacgacaatagtaccatggggtgtgggcgtcgttttgtgtcagtcaaaggtcaaacgttcggggagtggggtctcttttttaggctgtgtttgagtgtttcggtggttggcccaa

SEQ ID NO: 35502 - DNA, 221 bp, Glycine max
  Clone ID: 700889721H1
actcaagaagcgagctactggatggcaaattattctcccctgtacttacacataagcaacgagagtttcattatcaagcaaacagcgaatcagatgatcgatatagagctcaatatggtacaaatgagacaaacatgtcagactttttgaattcaattattaactgggatcaaataccctttgaggatcccaattgtcaacagcagagctaccccttattt

SEQ ID NO: 35503 - DNA, 212 bp, Glycine max
  Clone ID: 700889723H1
tgcaagagtggcacttcgttgcttggtgatgtccctttctgttctcttcactcttggtcttgcgagagaaagccatgccagagacgaagatttttggcatgctgtttggccaaacactcccattccaagttcattgcgagatcttctaaagcctggccctgcaagtgttgaaatcgatgatcaccctatgcaaattgaagaaacacagtacc

SEQ ID NO: 35504 - DNA, 218 bp, Glycine max
  Clone ID: 700889724H1
ccaaccactcttaatttctctctgccttgctcatttacacacctctccaacctttcactttcagctttatttgaatccctctctctcctttccaaatggccagcgttgaggttgcacatcaaacaccaacaacagttccagaaaatgaaacaaccgaggtaatcaagacccaggaaacaaccccggaaccaataccagccactgaggctcctgcaaca

SEQ ID NO: 35505 - DNA, 219 bp, Glycine max
  Clone ID: 700889725H1
gcgagagcagaagagaagagtgcagcgcaagcttagaagagcaaagtgtgtgatgtggttggacattcagtcccaatcacatggcttcttcttctccttctcctccatcttatctcacacaccttcctcttcatccctctcaccaaggtgagagtgagaagcgcgtggaggacgatgaatcgcgcgttccgattcacatcgtgaccgcggcgacgcaac

SEQ ID NO: 35506 - DNA, 205 bp, Glycine max
  Clone ID: 700889726H1
catggttttctagaaagcccaagtcctgctggttttaagatatctgtcttcaattcaaatcctgatatagtcatggttggttttcgagttcatgtgggaaatacatcagcgagtcacataccgtctagcatttctattttccaaagggttgttaaattcgatgaaggaatgaggtcctggtatgatattccatttactgttgcag

SEQ ID NO: 35507 - DNA, 217 bp, Glycine max
  Clone ID: 700889727H1
tcgggactttcactagccgcagcagcctcaggaggagaataaggatgtctcacaggaaattcgagcacccaaggcacgggtcactgggatttctccccaggaagcgtgctgctcgtcacaggggacaagtgaaggcattccccaaggatgacccatccaaggcacccaagctcactacattcttgggttacaaggctggtcatgactacacattgtt

SEQ ID NO: 35508 - DNA, 216 bp, Glycine max
  Clone ID: 700889728H1
gaattaccactacaccaacatcctttttagcaaccattcttccttaagtcctaccctaaccacacacacactctctctctctctataataatggaaaccactcaccgttctagctttcatctgtcactgcccaggttgctctcttctcggtcttccctttccagcaacacccccacttttctcaggcaatctttctttccctgcatgatataataa

SEQ ID NO: 35509 - DNA, 245 bp, Glycine max
  Clone ID: 700889690H1
agtggatggctacacacccttgtttggtgaccataatttggccatccatagagatggcaaatcagttcacctttcacttgatgaaagaacaggttctggatttgtgtctcatgacctttaccttcacgggtatttcagtgcctcgatcaagttgcctgccgattacactgctggagttgtggtcgcattttatatgtcaaatggtgacatcccccagaacaaccatgatgagatagactttgagt

SEQ ID NO: 35510 - DNA, 225 bp, Glycine max
  Clone ID: 700889732H1
cacaggggaaaatgagggagatccttcacgtgcagggagggcaatgcgggaaccagatcggttccaagttctgggaagtggtgtgcgacgagcacggcatagatccgacggggaagtacgtcggaaactcagatctgcaactcgagcgcgtgaacgtctactacaatgaagcctcgtgcgggcgcttcgtgccacgcgcggtgctgatggacctggagcccggaa

SEQ ID NO: 35511 - DNA, 230 bp, Glycine max
  Clone ID: 700889733H1
tatttgaagggctgtacaagcttaagaaatctcccaagagaggtatataagttgaaatctgtgaaaattctgatcctatctggttgttcaaaaattgacaagttggaagaagatatagtgcagatggaatccttgacaactctaattgctgacaatactgctgtgaaacaagtgcccttttcaatagtaagctcaaaaagcattggatatatatccctttgtggatttga

SEQ ID NO: 35512 - DNA, 226 bp, Glycine max
  Clone ID: 700889734H1
cttatggctgcattccaaacctgcttgcaagtgtggctcacatcttcccttcttgctgatggtttggctgttgctgtacaggcaattctagcttgttcctttgctgagaaagattatgaaaaggtgcttgttgcgccaacacgaacactgcagatgagttttgttttaggagttggactctcttttgcagttggagttggattgtattttggcgctggaatctttt

SEQ ID NO: 35513 - DNA, 246 bp, Glycine max
  Clone ID: 700889660H1
gtccaagccccactcaaccaccacaccactctctctgctcttcttctacctttcaagtttttaaagtattaagatggcagagacattcctatttacctcagagtcagtgaacgagggacaccctgacaagctctgcgaccaaatctccgatgctgtcctcgacgcttgccttgaacaggacccagacagcaaggttgcctgcgaaacatgcaccaagaccaacttggtcatggtcttcggagagat

SEQ ID NO: 35514 - DNA, 251 bp, Glycine max
  unsure (1)..(251): unsure at all n locations
  Clone ID: 700889662H1
tcttaaccaaactcaaccgacttttgacgtagcttccttctccctccttccctctctctccgtttttttttttactcatttttatattttatctatttcgtcttaacgaccacagtccacagaccaaaaacaccacgccttctcacacatatgataatcaaancatataactatctctctgtactgacaaaacctctcgttgctaccttctacattatctcacggtcatggcttggcaccgatggctctgt

SEQ ID NO: 35515 - DNA, 248 bp, Glycine max
  Clone ID: 700889663H1
ttcacttatgtgtgggcttttaaaatcaaggcataactatattagatggggatttttatttgttcttgaaaggctgcttatgagatgcaaatttttgttagatgaatatgaaatgcaacaatcaaggagcagtgatcttgggagtgggctgaaagattggcatcttgagaaagcccatgcattgattgacataatgagcagtgctatgttgtttcagataaatgaaaaagattgcaccaataagtatg

SEQ ID NO: 35516 - DNA, 241 bp, Glycine max
  Clone ID: 700889664H1
gtgctgggcttgcttgatcgtttctattatctcagctgctggctccatccaaggcctcgctcaagatctcaagaaatatcagcccttcaaagcccagcaataattaaatttgttccaaagtgttctaaattgctttcttccctaagtcactttgttttaataagtttcagcatgttcatggataatgtattgttatcaagtgcttatgaaagaaagaatatagcacacagctgcattgtat

SEQ ID NO: 35517 - DNA, 251 bp, Glycine max
  Clone ID: 700889665H1
atgatagggtgtcggaaagagttgtctgcttttgcgattttctgatggttccttcacaaccagttttatcaccaccattggcattgattttaagataagaaccattgaacttgatggcaaacgcattaagttacaaatctgggatactgctggtcaggagcgatttcgaactattaccacagcttattaccgtggagccatgggcatattgcttgtttatgctgttactgatgaagcatctttcaacaata

SEQ ID NO: 35518 - DNA, 248 bp, Glycine max
  Clone ID: 700889667H1
tttgtcgtccatcccgtaaccatgtctcaggtgtggaatcatatgacattgatttgaaggaacaaaaggtggtagtgaaaggaaatgtccagccagacacagttctgcagaccgtttccaaaactgggaagaagactaccttctgggaaggtgaagcagcaacatctgaaactagcacagcaactgcctaaaacatttgcctctattctgtgcagaagaagtagctgtgtgaatcaaatactatttga

SEQ ID NO: 35519 - DNA, 248 bp, Glycine max
  Clone ID: 700889669H1
ttcactctatatatccacttcatataatttcctccacattgtgcaccgttcatggtgatggcaaaactaaagcacccttcattggtggcacttcttctagtactagcgtgtacttttattgctccaacatcctcaacatccagaaaaacgcgtttcaagcagcagcacccttgcccaatcacaaatgggttccgagtcatgcttcgccacgtcgattcgggaaaaaacttaaccaaactagagcgtgt

SEQ ID NO: 35520 - DNA, 245 bp, Glycine max
  Clone ID: 700889670H1
ataaaaagctctttcccttcccctaaatccctcacactcattccatttttacctttctctctcgctcgcaaacgcaaataataaaaaacaaggttttagccatggcatcgaagcggatcttgaaggaactcaaggatctccaaaaggatcctcctagctcatgcagcgccggtcctgttgctgaagacatgtttcactggcaagtaacaattatgggtcctccagacagtccttattctggaggt

SEQ ID NO: 35521 - DNA, 231 bp, Glycine max
  Clone ID: 700889672H1
gtttatccctatgcaatacactagtgtgctcactgaatcaccaatcaccagccatggaaaaggttgaccaagctttcatccaatacccacaacacaggccaaatctcactatcatcgaacctgaacacattcccataatagacctctctccaatacccaaccacttagtttcacatccatctcccattgcaggcttggtgacggagatcaggactgcatcgtaagagtggg

SEQ ID NO: 35522 - DNA, 246 bp, Glycine max
  Clone ID: 700889673H1
attaaaaaagcatctgctcctgctacagcaccttcaccagctgcaaaggactcaccttctgattctgatgacaccaaagacacacccacttccacctccactaaccctaaaacttcaacctccaccaccccttcaactgaaacctccaccactaccacatcttcttatacatcatctgcaactgctgctggctccccaattgttgctatgttttttgcttctttgatcccatactttgtgttgcgt

SEQ ID NO: 35523 - DNA, 245 bp, Glycine max
  Clone ID: 700889674H1
ctggagaagaaccgcaaggagatctgcaaatacctcttccaagagggagtttgcttcgcgaagaaggacttcaatttggccaagcgccctgagatcgacgtgccgaatctgcaggtgattaagctgatgcagagtttcaagtctcgcgagtacgtgagagaaacttttgcttggatgcactattactggttcctcaccaacgatggcatcgagtttctcagaacttaccttaaccttccttccga

SEQ ID NO: 35524 - DNA, 141 bp, Glycine max
  Clone ID: 700889675H1
ctctctctctctctctctcattcacacgaatcacactctccacagtgcgattcattcagcaatggatcgcaagggtgttctctctcttgcattcatctgcattgtagtcgccggcgtcggaggccactctcccgccgcagc

SEQ ID NO: 35525 - DNA, 245 bp, Glycine max
  Clone ID: 700889677H1
gtcaaggttgccgtgacaaatttcaactacaggatgaattactccctctggactcttgctgttcagcatccaaatcttaacaatgtcacccaagttttcagctttgattacaagcctttacttccctatgagtccataaatgacactggtatgttctatggcatgaaatactttaatgatctcttaatggaagctggaccaactgggaatgttcaatcagaaattcttcttcagaagaaccagga

SEQ ID NO: 35526 - DNA, 242 bp, Glycine max
  Clone ID: 700889678H1
cgcttgtggaggccaaaagggttggtgttgcaaaagagagtggcctaattgatgacccaaaagcagtgttaccaatcagcatttggtggctgcttcctcagtacatgatcactgggatctctgatgcattcacaattgtggggctacaagagttgttttatgaccaaatgcctgaggcacttaggagtttgggggctgcagcatacattagcattgtgggggttgggagctttgttggcaac

SEQ ID NO: 35527 - DNA, 239 bp, Glycine max
  Clone ID: 700889679H1
actacaaactagtcctctccacgctgaaacaagttctcgtcgcggtcacatggtgtaggagccactaccaaccaaggactcaccataaccttcaacgacgaggaccctccacttttcagactcaacaccaattcacgcttcttcagaaagaaaaaaggctccaaaatcctcgaatcttctgactcatcatcatccaaggtagaaatcttatgggatctactcagcgccaagtacgaatc

SEQ ID NO: 35528 - DNA, 252 bp, Glycine max
  Clone ID: 700889680H1
cagaattagggttttccaattcacagagcaacacaacgaaccaacaatggcgcacctcagccgcagtcgcagccgcagcacgggcaagcagcgctggagcaggtgcagtgcttcggtcgcaagatgaccgccgtggccgtgacctactgcaagcgcgggcgcggtctcatcaagatcaacggctgccccattgagctcgtggagccggagatcctccgcttcacggccttcgagcctatcctcctgttgggt

SEQ ID NO: 35529 - DNA, 253 bp, Glycine max
  Clone ID: 700889681H1
cgaacccattcaagcaaaattacgactctctcgtcgttcccatcccttcctcttcgcccccaaaattctgtttcacaatcctaactccaaatccaaaatggaacaaccccctaagcccgaaacagtgactgaatcgcacgtcccgaacggcttctccaccaccaccaccaccgtcccgaacggatcgggatcggaatcccaggcccccaaggaacacaccgcatcgtcgtccagtagcaccaaaaaatcggtg

SEQ ID NO: 35530 - DNA, 248 bp, Glycine max
  Clone ID: 700889682H1
atctctctctctcttcattcttgaggtcttctttcattttataccattcttcttatttctttttaccaatcactacttattcaatccaaggatggcttccgccggcgatcttttcaggcatggtttgccggaagttggtggtgccgggaagttacacgtgcttgctgttgatgacagccacgtggaccgcaaggtgatcgagcggttgctcaaaatctcgtcttgcaaagtgacggtggtggaaagtg

SEQ ID NO: 35531 - DNA, 248 bp, Glycine max
  Clone ID: 700889683H1
tctcgagcgaattcggctcgagtgagaatcttggcttaagctaaggatacatcactaaggcactgaatgcgtgggcatggagaaaatgccttcttatggcaccaaggtgagccactaccctccatgtccccatccagagctcgtgaagggtctgcgagctcacaccgatgcaggaggcgtaatcctactcttccaagatgacaaggttggtggccttcagatgctgaaagaagggcaatggattgatg

SEQ ID NO: 35532 - DNA, 249 bp, Glycine max
  Clone ID: 700889684H1
cattctctctgtgtatttccctacctctcccttcaagatgcagatcttcgtcaagaccctcaccggcaagaccatcacccttgaggtggaaagctctgacaccatcgacaacgtcaaggccaagatccaggacaaggaaggaatccccccggaccagcaacgtctcattttcgccggaaagcaacttgaggacggccgtacccttgctgactacaacattcagaaggagtctactcttcacctcgtcct

SEQ ID NO: 35533 - DNA, 254 bp, Glycine max
  Clone ID: 700889685H1
gtgcagagacagtggttgagaatcactgctcaaaagaataataataccaaattccaaccagataaggagtgtggaatttggaagcttcacttctttcttgtattacttgatgcccttttcccttctctccctccctcttctcttattctcattgcttagttacctaccgtggatcaaagtcaattccctatctcgcttcgctctgtagttgatttcttttgggtttcgcagtctccccaaaaggggtgttttta

SEQ ID NO: 35534 - DNA, 230 bp, Glycine max
  Clone ID: 700889686H1
tactcgttcttcttcttttgttgttctgtgtttgtgtttgattattctctctcctgaaaatgacttgatgcggtggtaactgtggttgcggaactcctgaaagtgcaacaacggctgcagagggtaagattttcgttgtaacattgtattattcttgggaaaatagagtttttccaggaaaattttctatatggattttaaattgatattatggttacccttttggtaca

SEQ ID NO: 35535 - DNA, 244 bp, Glycine max
  Clone ID: 700889687H1
ggaatttgctccatctattcccgagaagaacatttcttgtttgactagattggatcacaacagggcattgggccaaatctctgaaagactgaccgttcaggtttctgatgtaaagaatgtcattatctggggcaatcactcatcaacccagtatcctgatgttaatcatgcaactgttgcaacctcagctggggagaagcccgtccgtgagcttatagctgatgatgcctggttgaatggggaa

SEQ ID NO: 35536 - DNA, 245 bp, Glycine max
  Clone ID: 700889688H1
atgtcaatgcacaacttgtgaccacaaaatctggaggaggtttaaccattctagcacctgatgatggtgccttctcacaactcaaagcaggttacttcaactctctcggcgatcgccaacagaaagcattgatacagttccacgttcttccagtttatgtctcaagctctaactttgactctcttagcaatccagtgatgacactggccagtgatagccccaatgggtatcaaataaatgtgaca

SEQ ID NO: 35537 - DNA, 243 bp, Glycine max
  Clone ID: 700889689H1
gatcgagataactagaaacagtgtgatgaaaatgaaggtccttgttttcttcgttgctacaattttggtagcatggcaatgccatgcgtacgatatgttccctctccgaatgaacactggctatggtgcccgtactccggaggtgaaatgcgcaagttggaggcttgctgtggaagcacacaacatctttggctttgagaccattcctgaagagtgcgttgaagcaacaaaggaatacatcca

SEQ ID NO: 35538 - DNA, 245 bp, Glycine max
  Clone ID: 700889659H1
cacgcttcgtcgtttgtggttactgagtcctgagtgatcttgtcatccgacctttgccatgacaggtgcgcttgcttggcaggtcaaaatatgttaataaaaaaagttttattggtttagggagagatcgcacgggagttgcccggggtctctctctcgtgtggtgtgtggtgtttgctgtgctctccttttcgttatgccttttattattacctatctgtcgctccactccgtattacgactct

SEQ ID NO: 35539 - DNA, 244 bp, Glycine max
  Clone ID: 700889627H1
ggaggagctatcatctctgatttcattccggcggcggcgatcgcgggtctcgccgcctgaccgccgattacctgtggccggatttgaagaagcggaagtctgacttggacgttgacttcgaggctgatttcagggattttaaagacgattctgatatcgacgacgacgacgacgatcaccaagtcaagccctttgctttcgccgcctcttctcgtctgtctacggcagcgaaatctgtggcatt

SEQ ID NO: 35540 - DNA, 248 bp, Glycine max
  Clone ID: 700889628H1
ctctcaccaaaacaatttgctcacaaaggaggaaaaatggcacctttcgtttccctctctttgttgcttctctttctcaaccaccccctcctttccctctcaaccaaccctgaagggaacgctctgcatgctttgagaagcaggctttctgatcccaacaatatgttgcagagttgggacccaacactggttaatccctgtacttggtttcatgttacctgtgactccaacaatcatgtgattcgctt

SEQ ID NO: 35541 - DNA, 248 bp, Glycine max
  Clone ID: 700889629H1
cttctttccaccaacaagaaagaagacagagagaaactttcatttcatagattttcatcatctcagcaaaggaatcaatcaatcaagccatggcaggcttcagtggcgacgaaaccgctcctttcttcggcttcctcggtgccgctgcggccctcgtcttctcctgtatgggagcggcgtatggaatcgcgaagagtggggtgggggtggcgtcgatgggagtgatgaggccggagctggtgatgaag

SEQ ID NO: 35542 - DNA, 253 bp, Glycine max
  Clone ID: 700889630H1
atcctcacaaatacaattacgcaaacacatattcagtctcctcacataccaaaaatgaattatttttcttgttattttccctttgctaacggaaagccatgaaattcgggaagagcctgagcagccagatcgagaaaaccctgccagagtggcgcgacaagttcctctcctacaaggagctcaagaagaagctcaagcaattcgaccctcccgcccccgcctccgccgccgatgaacgccccggcaagcgcct

SEQ ID NO: 35543 - DNA, 253 bp, Glycine max
  Clone ID: 700889631H1
aaaatcctcaattttctgagcagccaaacactctctctctgtctctcgaaaattctcagtttgcagagaaaatctgaatcatgtcgtggcaagcgtatgtcgacgatcaccttctgtgtgacatcgaaggtaaccacctcactcacgctgctatcatcggccaagacggcagcgtttgggctcagagtaccgacttccctacagttcaaacctgaggagataactgccatcatgaatgactttaatgagcctg

SEQ ID NO: 35544 - DNA, 256 bp, Glycine max
  Clone ID: 700889632H1
ttctcaaccatggcttcaaagcttttactcatcactgtcttcgtttttgatttgattgcttttggacttgccgtggctgctgagcagagaagaagcaccgctagtgttgtgacggacaatgaaaagaattataattactgtgtctataactctgatatagcaactggctatggtgttggagcatttttgtttctcttggttagtcaagtcctgataatggtggcaagtcgatgcttctgttgcgggaagcctctta

SEQ ID NO: 35545 - DNA, 247 bp, Glycine max
  Clone ID: 700889633H1
ggtcttgaggcagaacaggttacctttttccagcaaggaacaatcccttgtgtttccaaggatggcagatttattatggagactccatacagggtagcaaaagctcctgatgggaatggtggagtgtattcagctctgaaatctaccaaattattggaggatatggcctcaaaaggaattaagtatattgattgctatggagttgacaatgcactggttcgagttgctgatccaacttttttaggtt

SEQ ID NO: 35546 - DNA, 253 bp, Glycine max
  Clone ID: 700889634H1
atttcttacctcttggcatggccattcaaatgtcttcttttgtctttgtttctcttacaattttattttgcttctcttccttggagaagagttttgcctttcaaacaacaaaggaggcgacagaaagcaacaatcttcatcaatatactcatcttgttcacctcagctcactccttccttcatcttcctgcagctcttctgtcaaagactatggagaaaagcatcattagaagtggtacacaaacatgggcca

SEQ ID NO: 35547 - DNA, 253 bp, Glycine max
  Clone ID: 700889635H1
attcatttccttgatatcttagttatctaattacctcaattaatcccttaattgcaagcatcatggctgaggagaaacaccaccaccacttccaccaccacaagggcgatgatgtgcctggcgaggttgattataagaaggaggagaagcaccacaagcatcttgagcaccttggggaacttggtgctgcggctgccggtgcttatgccttgcatgagaagcatgaggccaagaaagacccagagcatgctca

SEQ ID NO: 35548 - DNA, 249 bp, Glycine max
  Clone ID: 700889636H1
actaacacaaacatggatgcatccaaactcaatcaattgaagcatttcatcgaacagtgcaagtccaacccttccctcctctccgatccttcactctccttcttccgcgactatctcgaaagtctcggggcgaaactccctgaatctgcttattccgaatcgacgggcgtggagagcgatgaggacatagaagatgttacggaggagcaagagaaggtagaagaagaagaagaagatgatgaaataatt

SEQ ID NO: 35549 - DNA, 79 bp, Glycine max
  Clone ID: 700889637H1
atcacacataatataattccgaaatcactcctattgctatagcaatatgatgggtgacactgagatcaaaccatcagtt

SEQ ID NO: 35550 - DNA, 249 bp, Glycine max
  Clone ID: 700889638H1
acgctcgccttgcttcgccacacaacagcaactgcagcaatggctcccaaacgaggtggaaaggctccggctcttgccgctaagaagaagcctgagaaggtttcgaatccgttgttcgagaagcgtccaaagcagttcggaatcggaggggcgttgcctccgaagagagacttgactcggttcgtgaagtggccaaagaatgttcaaattcagaggaagaagaggattctgaagcagaggttgaaggtt

SEQ ID NO: 35551 - DNA, 247 bp, Glycine max
  Clone ID: 700889639H1
gtattccactactttttgagcaaggtgctgatgttgtcaccagaactgcacataaaagaatcaactggagtagttacaaaatcaaccagatgcaagataagattggtgtctttgtaagcattgtgagcacaaaaattccattcaaaggaactgggaaagaatacattggagatgacataactgagattgcttctgctgtcaagtatgctattcagcagtgttgtgtccaattaaaatccaagattgt

SEQ ID NO: 35552 - DNA, 248 bp, Glycine max
  Clone ID: 700889640H1
ctaattttgttaagcaactgtttaatacactaaggaagaagtttccagctgcgtcgtttattggtttgccagttttatctgagcttggatttgacttgttgcagcagctgctaacttatgaccctgaaaagaggataacagcagaagatgctctccttcatgattggttccatgaagcccctcttcccaaatctgatttcaagccaatttttccttcttggcagtgataggacaggtactcttgctgg

SEQ ID NO: 35553 - DNA, 248 bp, Glycine max
  Clone ID: 700889642H1
gtttgaagctgcacgagcttctcaaactgaagagatatgtttagacggggaagagtggaatgatggactactagctacaataagagagcgggtgcatatggaggcagatagaaaagcaatgcatggggatgctgacatattagcatgtcctcaggataaaattacatataaaattggaaacaaggtaatttgctgtttggaaggggcaagaattggtgtacaatatgagacatcttttgctggtgaac

SEQ ID NO: 35554 - DNA, 247 bp, Glycine max
  Clone ID: 700889643H1
cgagaacagcatcgaacccgtcgtagcagaaaaacttgtcaccatggtttcttccgacaaggatccacgagaggatgtccttcaagcctggtacatggatgatagtgatgaagatcaaagactcccccaccacaaagaacccaaggagtttgtctcgttggaccaacttgctgaacttggagtccttagctggaaactagatgctgataaccacgggcatgatccagagctgaagaagattcgtgaa

SEQ ID NO: 35555 - DNA, 249 bp, Glycine max
  Clone ID: 700889644H1
tgttcaagcatgatttttctttcttttgactagattggcaagcatgacaagatgggtatgaatgtcatctccactgaaagagattacacctgatgaacctaaagtggtgactcttaatttactcaagaccatggaccctaatgatcctgagaatgagaagttgcgcgggcagctaactgttgaagttctgtacaaaccttttaaggaggatgagttacctcagagtacagaagattccaatgcaataga

SEQ ID NO: 35556 - DNA, 250 bp, Glycine max
  Clone ID: 700889646H1
cttcggaagtcgtttccttgcaaaccctagggccttctcctccgctgcttccactccgatccgcgccactctcttccccggcgacggcatcggccccgagatcgccgattccgtcaaacagatattccaagcagctgatgtcccaatagactgggaagagcactatgtaggaactgaaattgaccctagaacgcagagctttctgacatgggaaagtttagaatctgtaaggacaaataaggttggcttg

SEQ ID NO: 35557 - DNA, 268 bp, Glycine max
  Clone ID: 700889647H1
gctcagaattcggctcaagtggcaacatttataggtctcttagagtatgggagggctaatgaatgggttgtgactgaaaaacttggtgactctgtcaacaataataataagaataaatcaggagatgctgccaagaagaataatgccatcaaggccacccccaaaaagactcgatccaaatttgttgaaagacttaatttactggagctgggatttgctgtcttcctcttcgtatgtggatgctatgattatgttcatgggaaacaca

SEQ ID NO: 35558 - DNA, 253 bp, Glycine max
  Clone ID: 700889649H1
gtcttatttagaaactcatgctgaaccatatatgaggcagctatcagtaggcgatgtagtcacaggcccacttcagacatttaatggggttgagaaggtttgcaacatagtgtttattctcagaactacgggacataatgggtttcccgttatagacgagcctcctatttcgcaagctccagttttatttggcataatcctccgtgaccatcttctcacattgttgaagaagaaagcttttatgtcctcacct

SEQ ID NO: 35559 - DNA, 251 bp, Glycine max
  Clone ID: 700889650H1
acattctggagagagaaacactttttcagttctctctctctctctctaagatggccgacgatccaatgcccacgcgctggtctttccaggacttcaaattgtgttatgatgctaagtttggtagaaagaaagtcgcggagaacggagatgatgctgccggtaaagcggtcagcaatggcaatggaaattcagtgacagtggccattgtgtccaatggcaacacaagggcatcggaaatggctgtttatgag

SEQ ID NO: 35560 - DNA, 85 bp, Glycine max
  Clone ID: 700889651H1
gacttacaaaggcgaagagaaactccttgccccagaagagatatcttccatggttttgtataagatgaaggaagttgccgaaggt

SEQ ID NO: 35561 - DNA, 243 bp, Glycine max
  Clone ID: 700889652H1
agacaacttgtatgggtgccgtcactctctccctgatggtctcatgagggctaccgatgttatgattgctggaaaggaggctgctgtggctggatatgttgatgttagcaacggttgcgctgctcgcaatcaagcacgctgatggacgccccaccgtgaagcagagtcacattcatcgctggcgcagcactctctcacggccggcccctaggtgcctacctcattcagtaggagtgtactctt

SEQ ID NO: 35562 - DNA, 251 bp, Glycine max
  Clone ID: 700889653H1
ctgagcaacacaacacaaccagacccatcgttatcttatctccttctccatggcttccttacccagttttactccttttgtatttctattgcttgtcattggatgcaatgcaaggcctttgtatccacttcccagcaaaggtgatgatggaaataggaagcccctacaaacttttcgcccttataacattgctcatcgcggttcaaacggagagcttcctgaggaaactcatcctgcatacttgagagcta

SEQ ID NO: 35563 - DNA, 248 bp, Glycine max
  Clone ID: 700889657H1
caaaactgtttttgcatctgcaactgagagagatatatacaccggagataaggttgaaatcgtcatcctaaatgccagtggtattcatcgtgaatacatggacctaaggaaagactaatgctttacaggaaattgttgttggagatacctgtcttggattgagaatgtttgaaatgcttctaaaatttaaaatgacgtagtgggtttttcccatgaggcgaaattaagaatagcatttccagtgaaat

SEQ ID NO: 35564 - DNA, 247 bp, Glycine max
  Clone ID: 700889658H1
ctaaaattagggtttttgtcgtagcaggaagaagcagcaatggcgccgaagataacacgcaaggtcagcagaaaccccgaattgataaggggaatcggaaagtactcgaggtcgcagatgtaccacaagaggggcatttgggctatcaaggccaaaaacggtggcgttttacctcgccacgaccccaaacccaaacctgaaactcccactgataaaccagccaaattttaccccgctgatgatgtca

SEQ ID NO: 35565 - DNA, 248 bp, Glycine max
  Clone ID: 700889626H1
ggaaagacggatacagttcgacatgaagctggaagaaagaatgtatgcagaggaagcagagattaatcaaatgcaagcaatgtcacaggtcaagacagatgctgatattaaaaaactccggaagagtctcaactttaaagcaacaccaatgccttcattttactgcacaccttcaccgtcacaaccacatgggaataagtttcaacctcaggctgtgtcaaataacaccagaagtaagacagaacata

SEQ ID NO: 35566 - DNA, 246 bp, Glycine max
  Clone ID: 700889587H1
ctcgtggactaataaccaaattccaagtgacagattctatcaagctagctacctatagaaaactcttttattatatgggcgttgcaagagataaatgaaaatggacatatacgagccatttcagcaagttagcatgtgggggggcaactttaaagttgatggcggtctgaattcaattgcttccccaatgttaatggttggcactaatgtggagaactaagtcagagtatattcctcgggaaccaa

SEQ ID NO: 35567 - DNA, 251 bp, Glycine max
  Clone ID: 700889588H1
aaagcattgaattcaacaacttaagttcattccttgtgttttgctttcttcctcaaaaccaaacatgtcgaacacatgcggcaactgcgactgcgctgacaagactagctgcaccaatggaaacagctatggtgttactgtagagactgagacagagttacatcgagactgttgtcatggatgttccagcagctgagcatcatgggaagtgcaagtgtggcactaactgcacttgcacggactgcacctgt

SEQ ID NO: 35568 - DNA, 245 bp, Glycine max
  Clone ID: 700889590H1
ggcaagtaccatttttatcaatcttatcacccttttgcattgcacctacaaaagggccaccccttcttcccttctcaacttgtacttcatctaattcaatactacaacttctgaatcacttagttgaattgaattatcttcaaaatgagagaaatccttcatgttcaagctggtcaatgtggcaaccaaattggaggcaagttttgggaggtgatgtgtgatgaacatgggattgatgccactgg

SEQ ID NO: 35569 - DNA, 244 bp, Glycine max
  Clone ID: 700889591H1
ccatgacatagcaaacgatccaaactcttttttcatttgcagcatcaaaatgagtggtagcaacgatggtagcggcagctggagctctaggtttttgaaggtggctagtgcagctgccgctacagccgccgttgccggcggtttatatgccattctttcatcctcaacctctgctagctctgagatggaagtgccgtttggcagcgcacggcgtgagagcaaagaacgtgacgatggtggctcc

SEQ ID NO: 35570 - DNA, 244 bp, Glycine max
  Clone ID: 700889592H1
cacattttctgtgcgctctaacaaacattctcgttcacactttcagattgtgtgaagatgggggcgggtggccgaactgatgttcctcctgccaacaggaagtcagaggttgaccctttgaagcgggtgccatttgaaaaacctccatttagtctcagccaaatcaagaaggtcattccacctcactgtttccagcgttctgttttccgctcattctcctatgttgtttacgacctcaccatag

SEQ ID NO: 35571 - DNA, 244 bp, Glycine max
  Clone ID: 700889593H1
gtcaaatatgaatttaaaaccaacacccatgtccctaaactaggggtaatgcttgtggggtgggggggaaacaatggctcaaccctcactggtggtgttattgctaaccgagagggtatttcatgggcaacaaaggacaagattcaacaagccaattactttgggtcgctgacccaggcatcagctatcagagtggggtctttccaaggggaagaaatatatgctccattcaagagcctgcttc

SEQ ID NO: 35572 - DNA, 246 bp, Glycine max
  Clone ID: 700889594H1
tgaaaaattccacagttaattgcacaggcaactttgaccattctcctcaattggatctttctttgagaagatcttgtcccggaagctttgagaataaactcactgaagaaaggcacaccctgatgcattctaatgcttcagctttcaagcggtatactaccaggcaattgcaaatatcaatgcctgcagtgttaattaacttctctgatcaacaaagagaacagataacaaattgtgagaaaaaca

SEQ ID NO: 35573 - DNA, 250 bp, Glycine max
  Clone ID: 700889596H1
atccgcactgcttgacttgaaatctttcactctcagacgccattctcccacttccaactccttcttccccccctttctttgtccatcccacccccgccaccgccgaatccaccactctcgaaatccaatcatgtctgccacatccgtcaactccgaacgagcacgcgcccctcccgccattcccttgggccctccccctctctccaacttcaaaattggcctctgtcaactcttcgtcgagtccgacaaa

SEQ ID NO: 35574 - DNA, 257 bp, Glycine max
  Clone ID: 700889602H1
atcgagccgcacgagccgtccggtgaccctctccaccctcagggcgccaccacccacgtccaggaagacgccggcagcaaccccacgtggaactaccccgtgaaattctctgtcaacgaatcgctggcgaaggaaaatcgtttatctcttgagatcaagctcatctccgaccgcaccctcggcgacaccgtcatcggctatgtccatgttccgtgcaaggaactcctggataaccccggtgatgacagctccttccg

SEQ ID NO: 35575 - DNA, 253 bp, Glycine max
  Clone ID: 700889603H1
ctctcgcattccgtggagatctagtgctgccaaacctcgctgaaaattagggtttcgtttcggaggtagacgaagatgttcggaagggcaccgaagaaaagcgacagcaccaggtactacgaaatcctcggcgtttcgaagaacgcttcgccggatgatttaaagaaggcttacaagaaagccgccattaagaaccaccctgacaaaggcggtgatcctgagaagttcaaagagcttgctcaagcctatgagg

SEQ ID NO: 35576 - DNA, 253 bp, Glycine max
  Clone ID: 700889605H1
attaattgcaagaatggcacttcgttgcttggtgatgtccctttctgttctcttcactcttggtcttgcgagagaaagccatgccagagacgaagatttttggcatgctgtttggctcaacactcccattccaagttcattgcgagatcttctaaagcctggccctgcacgtgttgaaatcgatgatcaccctatgcaaattgaagaaacacagtacgcgaaaaccttcttctataaagaagaccttcatcca

SEQ ID NO: 35577 - DNA, 251 bp, Glycine max
  Clone ID: 700889607H1
agactcttcaagaggatggacgggtaacattcgtggatggttcttccattttggcagactccattttgtactgtacagggtactcctatgcattcccctttcttgatactaaagaaatggtggttgtagatgatgacatagtggggccattgtatgagcacacttttttcccatcacttgctccatccctttctctgataggcattcctatatagatcataggggtccctttctttgagtcacaagtaata

SEQ ID NO: 35578 - DNA, 246 bp, Glycine max
  Clone ID: 700889610H1
gcaatacagcttggaaaactagatgttgcaaagagtattgcaatagaattgcagagcgagcctaaatggaagcagttgggagaattagctatgtctactggaaagttagaaatggctgaggaatgtttgaagtatgcaatggatttgagtggcttgttactgctatattcttctttaggagatgctgaaggaatatcaaaacttgcaatccttgccaaggagcaagggaaaaacaatgttgcattc

SEQ ID NO: 35579 - DNA, 245 bp, Glycine max
  Clone ID: 700889612H1
cagatctgagtctctgtaaagatatttattgcagggaaaaggatcttctttctggataatctgtgctgtccatttattccattgagtgcagcactcatgattgccaaacatccaatagctgctaagtttgatttagctttatgagaacttccatcaatgtggtctaattgggatagagtggatggatgtatgtgagtcagagcaagcattaaggaaacacagaactagaacaagacaaccttggt

SEQ ID NO: 35580 - DNA, 246 bp, Glycine max
  Clone ID: 700889613H1
cttgttggtattggagtctatggctaaatatggtgtgaagacattaatatattctagtacgtgtgcaacatatggggaacctgaaaagatgcctattatagaaacaacagaacagaaaccaattaatccatacggaaaagccaagaagatggcagaagatatcatccttgatttttccaaaaattctaagatggcagtaatgattctgagatacttcaatgtgattggatcagacccagagggcag

SEQ ID NO: 35581 - DNA, 248 bp, Glycine max
  Clone ID: 700889614H1
atcgagcgtcaaaattgagtttaatgtttgatggaagaattttcagattttggttctcatttatctatataaataggtctatgatcatggagtggtaagacaagagtgattagggttttggtttggtgtttttcttaagcttgagatcaggaattaatttcagaggttcagagaatggcaacggattcttctaatggtaatggacatcaccaaacaacaacaaagcaacctcctttgccgtctcccct

SEQ ID NO: 35582 - DNA, 254 bp, Glycine max
  unsure (1)..(254): unsure at all n locations
  Clone ID: 700889615H1
agtttcaccgagtttgggcgtttagatcagaaccaaatcgtgttctcttccattggcaaacatggcaactcaaatgagcaagaagagaaagtttgttgcggacggagtgttctttgccgaactgaacgaggttctgacacgtgaattggcggaggacggttactccggcgtcgaagttagggttacgccgatgcgcaccgagatcatcatcagagccaccagaacccaagccgttctangtgagaagggaagga

SEQ ID NO: 35583 - DNA, 246 bp, Glycine max
  Clone ID: 700889616H1
ccgatacagtatgtaacaaacgttataatccatgggattaacattcatgattgtaagcaaggtgggaatgctatggtgcgggactcaccacggcactacgggtggaggaccatatcggacggtgatggcgtgtcgatctttggagggagtcacgtatgggttgaccattgctctttgtctaactgcaatgatgggttgatcgatgccattcatgggtctactgggattaccactccaacaatacat

SEQ ID NO: 35584 - DNA, 257 bp, Glycine max
  Clone ID: 700889617H1
gcggcgcaataacgctagcacaaaccctgctccaaaccggaaccaagcgtgacctaatcctcctcctggacacctccatctccgtcgcgaaacgccgctccctcgaactctccggctggaagatccgactcataacccggatccgaaatccgcgggccgagaatggcacctacaacgagtacaactacagcaagttccgactctggcagctcacggattatgagagagtgatcttcattgatgctgacatcatcgtc

SEQ ID NO: 35585 - DNA, 254 bp, Glycine max
  Clone ID: 700889618H1
gaccctaacaatgggaggcaaatgtccgcataggaacgtgaagaagagaagatattctcacaagacagcgcggcgtacgaagtttgagttgaaaggggacgacatggtttatgcgcactgaacaaacccgatgaagagagagcccctttacccctcgatgaagatttgcctgggatgggccagtactattgccttcactgcgatcggtacttttccaatgtagccgtgagggatgagcactttaagaccaaacg

SEQ ID NO: 35586 - DNA, 248 bp, Glycine max
  Clone ID: 700889619H1
catccactttcctcaatcttccattccagatctctcaccttcttcttcttcctctgtgccacccttttgttccatgattgttttttgtgtctgtatcagcttgatctttttgtttttttccttgttgtaaaaacatttcaatctgcaagttcagagatattgttgttggagctcaatgtatctgctctgtgagcgatccatgtttggggttaaaacaaattttatgctggctgtcaagggcttaacat

SEQ ID NO: 35587 - DNA, 252 bp, Glycine max
  Clone ID: 700889621H1
ctaattcttactggggaggatcagcttcatgagaagaagacttccaaacttccaaggttccgcctatggacgtttcctgtgtttgtgcagggaccatttggggttgtttctgccacagagcttattgggattgtcctcgatttgttgtatgttatctgggctctctatgcatacactgtgaggacgcttgattttatctctgaatttgctgtgccatcctttagagaaaagagcataatcatgtttaaagtg

SEQ ID NO: 35588 - DNA, 236 bp, Glycine max
  Clone ID: 700889623H1
gaaaaaacctctcatttcagagagagagagagagacttcacagaccaaagtgcagagaacaacaaagttcacaactttaaggaaaattgaaatggcccaagtgagcagagtgcacaatcttgctcaaagcactcaaatttttggccattcttccaactccaacaaactcaaatcggtgaattcggtttcattgaggccacacctttggggggcctcaaaactcgcatccgatgcat

SEQ ID NO: 35589 - DNA, 246 bp, Glycine max
  Clone ID: 700889624H1
gcactcttcatcaagctccgctccaacacaggggcaaatgagggagatccttcacgtgcagggagggcaatgcgggaaccagatcggttccaagttctgggaagtggtgtgcgacgagcacggcatagatccgacggggaagtacgtcggaaactcagatctgcaactcgagcgcgtgaacgtctactacaatgaagcctcgtacgggcgcttcgtgccacgcgcgatgctgatggacctggagcc

SEQ ID NO: 35590 - DNA, 259 bp, Glycine max
  Clone ID: 700889625H1
ttcggctcgagtcataaacgcctttattctccgtttccgtttccttcccggaattcgatttttcatctctgaaaatgagagagtgcatctcgatccacattggtcaggccggtatccaagtcggaaatgcttgctgggagctctactgtcttgagcacggcatcgggcccgatgggcaaatgccaagtgacaaaacagttggcggaggtgatgatgctttcaacactttcttcagtgagactggtgctggaaagcacgt

SEQ ID NO: 35591 - DNA, 246 bp, Glycine max
  Clone ID: 700889585H1
gagagctctttcttgattctatgggtggtggtgcatggccgttcttagttggtggagcgatttgtctggttaattccgttaacgaacgagacctaggaagcacgacgacaacaacactcgtcctcacaccgactgccaccgcgtccaaagatgattgatgatcaagatctgggtttctttgccaattttcttggcgtcttcatctttgtactggtcatagcgtatcattttgtcatggctgaccca

SEQ ID NO: 35592 - DNA, 255 bp, Glycine max
  Clone ID: 700889550H1
gtacaactgaagtcacaacaatctgggccatgactgaactaataaaaaatccaagcattatgaagaaagtgcaagaagaaattagaggcttaagtggtaagaaagatttcttggatgaagatgatattcaaaagttttcctacttaagggcagtgataaaagagacacttagattgcacttaccagcaccactacttataccaagagaaacaaataaaaaatgcatgttagatggctacgaaattccagccaaga

SEQ ID NO: 35593 - DNA, 252 bp, Glycine max
  Clone ID: 700889551H1
gttcaaaatcaaaataacaataacagttcaaaatcaaaatcaaatctacgtctcatcgaataatttcagatctcgtcgatctgagctcaaaacaatggcgaaaccaatgtactctcgtcttccacctcgcaagtcatcgtcgtcttccacgctgattctgactctgttcctggtcttcaccttcctcgttctaattctcctggctctcggcatcctctccattcctagctcctcgcgtggaaatttgcccaa

SEQ ID NO: 35594 - DNA, 248 bp, Glycine max
  Clone ID: 700889552H1
gagagccaaaccaaacctttcccgaaacggttcgttttgcccttcttcggaaccctcccttctgcgccgctgctgctgctccggtcgccgtcggcgatctccggtaaccgaagaccactgcctatccgtcagaaacctcggatctcggatctgaacgagcgaaacgatgccgtctcacgcggatctggaccggcagatcgagcatctgatggagtgcaagcctctgccggaggcgaggtgaaggcgct

SEQ ID NO: 35595 - DNA, 243 bp, Glycine max
  Clone ID: 700889553H1
atttccaacacaactttgttcgcataaatgcccaaattcttgctcaaacaaaactgagagtactatatatctgcctttacttgagatctgatcatatccttcaataaagcagcaaagcagcaatgagatccaaaacaacccaattcacatgtaccttcaaggtagcccttctcagccttgcggttttctgcctcttcatcctggtattcaggtcatccatattctcattgtctcctcaactca

SEQ ID NO: 35596 - DNA, 254 bp, Glycine max
  Clone ID: 700889556H1
attgacacaacacgaaacacacacatgacacagcaacaacagcatagccacaacacaaccaaatgacacccacaaaggaggagagaaagagagacgctactactactactactactactacttccccctctctcgcacagccctgaagctccagaaccccgttttggaattaattcgcttctctttaatctaaattcgttgattctttccgttgacatgttggagggtccaacctttcttgtttcgagggactt

SEQ ID NO: 35597 - DNA, 248 bp, Glycine max
  Clone ID: 700889557H1
cttggtgtaagtgttgttcttccgatttggttcaatcaaatcaatgatgttgaggaggaggggttctgtgacctccttctattccaaattcatcgattctcacaatcttaattgtgggcgttcctcttcgaatccccatcgcgtcgccgcttctgcaacttcattcgatatctcttccgcttctgcgtctaaagctacgaccgactttgtgtcgttgacccgccactatggaaggtgctattgggagc

SEQ ID NO: 35598 - DNA, 250 bp, Glycine max
  Clone ID: 700889558H1
gctagttactgcttagcttctgtggtgtgtgtgggtgagaggaagaagaagaagcaaatggagtttcaacgcagcgattcatcatcgtccccgcccacacccaacaacgccgatccgaagaaaaacacttgttctgacccaatgcattcatggtgggaatcagtctcaaaagcccgttcccgaatccacgccctcgccgccatcctcccctcctcctcctccgactctctctcctctttagcggactccg

SEQ ID NO: 35599 - DNA, 246 bp, Glycine max
  Clone ID: 700889561H1
ccgatctccgacaatggcgacccaaatgagcaagaagagaaagttcgtagctgatggagtgttcttcgctgaactgaacgaggttctgacaagagagttggccgaggacggttactccggcgtggaagttagggttacgccgatgcgcaccgaaatcataattagagccaccagaacccaagctgttctcggtgagaagggaaggagaataagggaacttacctctgtggttcagaagaggttcaa

SEQ ID NO: 35600 - DNA, 251 bp, Glycine max
  Clone ID: 700889563H1
atctttacaaaatgttatttactttgaagatgataacgaagaagatgctttctctggaagttcaagcggctggacaattgcatcttttagtgaagttgagaaacttgggaaagacagtcctgttgagccaagcctgccttccaagaatgctattgcagttatcatgtacacaagtggcagtacaggtcttccaaagggtgtcatgattactcacgggaacattgtagcgactacagcagctgttatgacag

SEQ ID NO: 35601 - DNA, 252 bp, Glycine max
  Clone ID: 700889564H1
gtggtgggccaggttcgggtttctaaagagaagctacaaagaaccaacattatcggcttagtttcggttcaaccgtatttcggaggagaagagagaaccaaatccgaaatccaattaaaccgggcacccattatttcggtggacagaaccgattggcactggaaggtgttcttgccaaatggatcggaccgggatcatgaagcggttaacgtgagtgggcccaatgccgtggatatttcgggtttggattat

SEQ ID NO: 35602 - DNA, 264 bp, Glycine max
  Clone ID: 700889565H1
tcggctcgagaattttacataattaaagataaaatcaacgatagctatagttttaaaattaaccatcgatttagttgcaactggaacacaggtttctttcaatgaaataatattaatatcaatttaataagctggtaatgtaaaatactgctaatgttaatatgaagtttggatggtcttattggcagaagatgctaggtggtgttcatcaatattctgaaaggtaaaacgattttggtttttaatgataatataaccatgaat

SEQ ID NO: 35603 - DNA, 250 bp, Glycine max
  Clone ID: 700889566H1
cacctttgttcactcttcttctcttgcggctagggttttagcgcagcttcttctagatttaaggaagatgggtaaggaaaaggttcacatcagtattgtggtcattggccatgtcgactctgtggtatccactaccactggtcacctgatttacaagcttggaggcattgacaagcgtgttattgagaggtttgagaaggaagctgctgagatgaacaagaggtctttcaagtatgcctgggtgctggac

SEQ ID NO: 35604 - DNA, 246 bp, Glycine max
  Clone ID: 700889571H1
gcgaatccctctctctctttctctttctctctcatccagatcttgcaaaaaaaaagaaacacaatggcagcgagcgctcccactccacgtgaagattccgtgtacatggcgaatctggcggaccaggccgagcgctacgaggatatggtggatttcatggagaaggtctccgcctccgccgagagcgaggagctgaccgtggaggagcgaaacctcctctcggtcgcctaaaagaaggtaatcggc

SEQ ID NO: 35605 - DNA, 248 bp, Glycine max
  Clone ID: 700889572H1
cagcgactcacactggtcttcgcttctcattcatcatttctcacctaaccttctcttcctctcagtctcagatcagaaacctcaaccagccatggcagcgttccagaagatcaaggtcgtcaaccccatcgtcgagatggacggagatgaaatgactagggttatctggaagtcaatcaaggacaagctcattttgcccttcttggagttggacatcaagtattatgacttaggccttccttaccgtg

SEQ ID NO: 35606 - DNA, 252 bp, Glycine max
  Clone ID: 700889573H1
ctcgacggcgcttaaaccaacatcggtgaccttcgacaagaggagactcaacgagctgaagcgactcgcgcgttgcacgagtcaaccaggcgagtcggtgtgttacacgtcgttcgaggtgctagcggcgcacgtgtggagaagctgggcgagagcaatagggtttccgccgaaccagaagctgaagctggtgttcagtgtaaacgtgcggaaccgggttaaaccgggtttgccggaggggtattatgggaa

SEQ ID NO: 35607 - DNA, 245 bp, Glycine max
  Clone ID: 700889574H1
tctcgagcgctcgagcggctcaggttggtcctctggaattagtgagtttcctagcaattggtgcaatgtttgctgcaacagattctgtttgcacattgcaggtgctaaatcaggatgagacacctttgctgtacagtcttgtatttggggagggtgttgtgaatgatgctacatcagtggtgcttttcaatgcaatccaaagctttgacctcaaccaaattgactcttcaattgctgtacacttt

SEQ ID NO: 35608 - DNA, 244 bp, Glycine max
  Clone ID: 700889575H1
actttatgccccatggaaggtccttagttttctctctcttcatctcaaagtttcactctcactcttcttcttcttcttcttcatcctttctgatctgtgctgttttttcagggtacaacaaaattgggtgctttcggttaaactgtgatgtcgccgccagtgctgagcataggggaggaggagggtaaaagcaatgtcactttgttggtttcctcatcaaccaccatggaaagtgtgtgtctca

SEQ ID NO: 35609 - DNA, 245 bp, Glycine max
  Clone ID: 700889576H1
gaagaaaccaccgaagcaccaacaacagaaacagtagaaacaacaactacagaggaagccaagccagaggagcctaaagaagttgcagttgagaccgaggaggtggtgacaaaggagacagaggaagagaagccagcagcagaagagaaatcagaggagaaaactgaagaagtgaaagaagaagcagaagagcctaaagaaactactgaaacagaaacagaatcagcaccagcagcaaccacaga

SEQ ID NO: 35610 - DNA, 244 bp, Glycine max
  Clone ID: 700889577H1
gtttgtttgatttttttttgaacaaaacgcatggaaatatattcaatcaaaaatcaaacaaacaagatgtaagcaacacagcacgcacgcacaagagggtgcaagagttccaattatagctaaaagtattagctaatttaagcaatcatacaaacccaagttacacaaaagagaatacttctagcaagcattctgctattacaacattcgctagaaaagataagcatctttctccaagaaccgc

SEQ ID NO: 35611 - DNA, 245 bp, Glycine max
  Clone ID: 700889578H1
tgcaacttcgagaaatttcaaccacctctctctcccaaaatctcagagtgtgctgcttcagtgtctggtatcaaagatggcaacattgactgcttcaagtaacttagtctctagaaattctcatgtccatcatggaccaacaactgcttcatatgagtctaaagcagtagcaatgggacttagatctctaaagcagacaaatactcatagtggacttagaatttttaacccggtggatgagctac

SEQ ID NO: 35612 - DNA, 245 bp, Glycine max
  Clone ID: 700889579H1
gattgtttgttgttgtaactcgttcttcttcttttgttgttctgtgtttgtgtttgttttttctctcacctgaaaatgtcttgctgcggtggtaactgtggttgcggaagctcctgcaagtgcggcaacggctgcggaggctgcaagatgtacccagacttgagctacactgagtcatccaccatcgagaccttggtcatgggagtggcaactgttaaggctcaatttgagggtgctgaaatggg

SEQ ID NO: 35613 - DNA, 249 bp, Glycine max
  Clone ID: 700889580H1
tattacaacattttaggcttgcacgaatttgacggcatctatgtattaagtgtatcagcttgagctgctcccctatttgtgaaatacgagtcatatagtatttgaccaacttactacacacatgagtgggtaagagttgatggaaattacgcaaccatcggcataactgatcatgcccaagatcattttggtgatgttgtatatgttgaattgccagaagtggtagcagctgtgacacaaggaggtagt

SEQ ID NO: 35614 - DNA, 248 bp, Glycine max
  Clone ID: 700889581H1
acttgaggttagctttgcagaatgcaatgactgtctgcttcaaggcaaagaaccttgccactgctgcaaactttgcccggaggctacttgagacaaatcctaccaatgaaaaccaagctagggcatcaaggcaagtggtagcagctgctgaaaaaactatgactggtgctacccagttgaactaggatttccgcaacccatttgtaatttgtggtgcaacttacgtgccaatctatcgaggacagaag

SEQ ID NO: 35615 - DNA, 245 bp, Glycine max
  Clone ID: 700889582H1
atggaaagtaccctccagtatatgacaacacccatgcctaaagcaagcaatgaggtctattatctacttaataaataagaggaactgctttgtgttttctagcattgtgatttacaacttcgtagcaatgcatattcttgactcttgcatgcacttcaatccttcgtagcattaatgatgtggccaagtcatcatgagcatcatacttatttctttgtgaatgtaaatcagaattataagagaga

SEQ ID NO: 35616 - DNA, 248 bp, Glycine max
  Clone ID: 700889584H1
cctattctcaagtttctctctgtttcttcctacttcatgctatagcacttacaatactcaacaataacctaaccaaaccaaaccaaaccaaaacccttatctgcactcacttcacacaaaccaaagttaattaattaccaacacaaaatggatggaggctgtgtcacagacgaatccaccacatccagcgactctctatccgttccgccgcccagccgcgtctgcagcgttgcaagcgccgtcgtcga

SEQ ID NO: 35617 - DNA, 223 bp, Glycine max
  Clone ID: 700889549H1
cccatttgatgtgggagatagatgtgaaattgatggggttcagatggtggtagaagaaatgaacatattgacaaccatatttctgagatatgataatcaaaaggtcatcatccctaacaatgtccttgctaccaaggccatatataactattaccggagtcctgacatgggagatgctatcgaattctgtgtacatatatctcccccagttgaagagatttca

SEQ ID NO: 35618 - DNA, 250 bp, Glycine max
  Clone ID: 700889522H1
aaaatatggtttcttgctattatctacttcatagcaggaattcctggagcatatgtcttgtggtatcgcccattatatcgtgcttttaggactgacagtgctttgaattttggatggtttttcttgttttacctgcttcacctaggattctgtatcttagctgcagttgctcctcccatagttttcaaaggaaaatccttgacaggcattctgtcagccatagatgtggtgggtgaccatgcagtgattg

SEQ ID NO: 35619 - DNA, 251 bp, Glycine max
  Clone ID: 700889523H1
tgtttgtcagctttttcttgcttccatagttcatggcgtgtgttcaagtcatcacagttcttctctttgcattggctcttgcaaaaattgacccctcaacatgccaaatggtgcagggcagagtcttctgcgttgactgcactcacaactatgacttatctgatattaaggtttcagtgaggtgtgatggtgtgaaaaaactggctttggcaactacagaaaatgatggctccttcaaggttgatcttccc

SEQ ID NO: 35620 - DNA, 255 bp, Glycine max
  Clone ID: 700889524H1
aaaatgcccactttttttcttccaacgctcctcctcctcctcatagccttcgccacctctgtctccggccgccgtgacctcgtcggagactttctccggctgccctaccgaaactgataacgacgacaacttcaagggcacccggtgggccgtcctcctcgccggttccaatggttactggaatcacagacatcaggctgatgtttgtcacggctatcaaatattgaggaaaggtcgtctgacagacgaacatat

SEQ ID NO: 35621 - DNA, 253 bp, Glycine max
  Clone ID: 700889525H1
tggtcacgttttcacagtaacataacatattctgtggaaatatggcaaaacttggagactgtgcagctcatttttttattgcagcaatggttttgagcacgttttacgtgaccaaaactgtggcacaatcagaaattgcacccacatcgcaaatggagactggtgcagggtttgctttgtctgtttctggggtgaccttatgttcttctgtgttggtttctattgtggcatttatgatgcagtgaattgcaag

SEQ ID NO: 35622 - DNA, 252 bp, Glycine max
  Clone ID: 700889526H1
caacagcgttttgaaaacagttgacccgacacaaacctctttgcggagatccaactccgaggatgttgggtctctgggagaaaagcccaccatcctggtctccgagaaacttggagaggcagggctgcaggtgttacgtggcgttgggcacatggaatgcgcgtatgagctctcacaggaggagctatgcacgaagatctcgtgctgtgacgctctgatagtcaggagcgggacgaaggtgacgagggaagt

SEQ ID NO: 35623 - DNA, 250 bp, Glycine max
  Clone ID: 700889527H1
ccagtacaaaattgttgttcttgacaaacttgattattgctcgaatctgaagaatctcattccttcaaaatcatctcccaacttcaagtttgtgaagggggatattggaagtgctgaccttgtcaactaccttctcatcaccgagtccattgacacaataatgcactttgctgctcaaacccatgttgacaactcgtttggtaacagctttgagttcaccaagaacaacatatatggtactcatgtccta

SEQ ID NO: 35624 - DNA, 250 bp, Glycine max
  Clone ID: 700889528H1
ctttcttctccgtttccgtttcctcgttcgaattcgcttttagatctgcgaaaatgagagagtgcatctcgatccacattggtcaggctggtatccaggtcggaaatgcttgctgggagctctactgcctcgagcacggcatcgggcccgatgggcaaatgccaagtgacaagacagttggcggtggtgatgatgctttcaatactttcttcagcgagactggtgctggaaagcacgtgccacgtgcagt

SEQ ID NO: 35625 - DNA, 250 bp, Glycine max
  Clone ID: 700889529H1
tgaaaagaagaaggttgatttgaatgtgaaagcggggggcccatcccaccaaactccctctacctacagctgttgaagcttctccttcttgattcttcagtaaccccttctctcccaaaatctctctgttcagttttcatatggcgaacacactatataacggcgccacatgccgaatccctctccggaaccaatccctggccttctctcgtcacgtttccagatccctctctttcctccctataacacg

SEQ ID NO: 35626 - DNA, 251 bp, Glycine max
  Clone ID: 700889530H1
gaatccgagatcaaccccgacgaaggcaaggggtttttctcggcttcttcagatttctgaaatggcgcctgtttcagctttagccaagtacaagctcgtcttcctgggtgaccaatccgtgggcaaaaccagcatcatcactcgcttcatgtatgatcaattcgataacacctatcaggctacaattggtattgattttctatcaaaaactatgtatcttgaagatcgaactgttcgactgcagttgtggg

SEQ ID NO: 35627 - DNA, 253 bp, Glycine max
  Clone ID: 700889531H1
cttctccctgggttccacaaccatatggattgaactatattatgtagcttacaaggtttgtggaattgacatatggtctatgtgactatacctgagacatgggagaagggggttttctgaaataaaatgtatagcatcagaagttccaagcgtcataactaatacatacatagttaggtgcaactatataatccagcggaagatatggtgcaactacagggtgccgtttttgtatcattatttggattgttga

SEQ ID NO: 35628 - DNA, 249 bp, Glycine max
  Clone ID: 700889532H1
gtataatctatgctctctatgctattatcttcgtcgatcgtgaccagtactttgatgaatacaggcgtcctctctatgcacaatactgatgataattttagtttgtatgcctatgagtgatgctcatgttgatcgtgtgcttaattactgacaatttaagctcgtgtgcttgttgaaattgatggtttgtagaatttattgtttacgctctcgaagcttcaatgacttttatgccataaggattcttct

SEQ ID NO: 35629 - DNA, 232 bp, Glycine max
  Clone ID: 700889533H1
cttgtaaagctgctatcctgattctggaaaggaggggttttccctttgaattttgcggacaactgttgactccgagaatttgtgattgactatgcgaacttcatgggctgatttggctgcaaattctgctaccgaaaatgcaggtcctggttcttctgctgacaatgtgggaacttgtagcactttagctcccacgcgatctgtatatgtacctcctcatctgaggaaccgt

SEQ ID NO: 35630 - DNA, 252 bp, Glycine max
  Clone ID: 700889534H1
ctcgagccgtgccacctccaccagctgcgacatttcttgcatttcatcctcaagacaataatattattgctattggcatagaggactcttccatacaaatctataatgttagagtggacgaggtcaaaaccaagctaaaaggtcatcagaagagaattactggtcttgccttttctcatgttctaaatgtgcttgtctcatctggagctgactctcagttgtgtgtttggagcacagatggatgggaaaagc

SEQ ID NO: 35631 - DNA, 242 bp, Glycine max
  Clone ID: 700889535H1
cacaccttcaacttgttttgtttgttatgtattaccgatttcctgctgtttctgaggttttctcttgatatctctattttagttgagaaacataaaccgaatattgaagtattcattcacttgttatgtgtttaattttttacttcaatcttattttgtctttcttgtaaacgttcctcaagcctttagactttgtgatgcctgtaatgtgctctagagtctagaggcattaaatattagat

SEQ ID NO: 35632 - DNA, 89 bp, Glycine max
  Clone ID: 700889536H1
cacagattttgtgtatgtccaggtaaaaagatgtaccgttgagatgattttcttggtgtgcattgggtttcaccatcgagaattgattt

SEQ ID NO: 35633 - DNA, 247 bp, Glycine max
  Clone ID: 700889537H1
gattccgcaacagagagtagaaaagatggcgcggttgatcacagtggtgtggtgcgcggtggcggtgctactgtgcgccgcggcgggcgcgtcgtgggtggaggaggcggcgaacccgatacgaatggtggcgggggtggaggcggaggtggttcgggtgatagggcagtgccggcgcgcgctgaagtttgctaggttcatgagcaggttcgggaagagttaccgaagctaggaagagatgagggag

SEQ ID NO: 35634 - DNA, 252 bp, Glycine max
  Clone ID: 700889538H1
gtcgttcatacacttcttctgcaaacaaaaaaaattcccgcattagggtttcctttctccggcgacaattgaggtatctgcgaacgcgcgtatccccgccgctaagcgaaaattcgacgacgccgtttctaacggcgtcgccgcccccgccgacgtcgatctctccctcctcgaagccatcgagaagtcgcagaacgcggtcgaagccctcgatctccgagccctaaagaagcacgtgctctccttcgagcg

SEQ ID NO: 35635 - DNA, 252 bp, Glycine max
  Clone ID: 700889539H1
atccgatcaaacaaacatcaaacccatttttctatttttttttcttttcttttctctcttacacaccttccatgccttctcttttcaagagatctttcttccttctcctcctcctccttcatctccacaactcttaaaaaccctcctcatcgatccaacaagcagcaacctcactgaatctacaaacagtaacaaagattattactcgtagatccaataacagtaataacacctcagtttcttctcttaaca

SEQ ID NO: 35636 - DNA, 250 bp, Glycine max
  Clone ID: 700889540H1
agaacacctttgtcccaggactcattgatctggccatcaaaaggaatagtttgattggaggagatgactttaagagtggtcagaccaaaatgaaatcggtgttggtggatttcctagtaggggccggcatcaagccaacatctatagtgagttacaaccatttgggaaacaatgatggcatgaatctctcagcccctcaaaccttccgctcgaaggaaatttccaagagcaatgttgttgacgatatggt

SEQ ID NO: 35637 - DNA, 255 bp, Glycine max
  Clone ID: 700889541H1
gattaagaccgtgaaaagtttcaaaactactttatgtacaaatttggatggccaaagaactagatatgtgtgtgtctgtggggggtgtgtgcgtgttaactttggagtggttttggtcattggaagtcacttcagaagagaacctaatcaagttattatagttattgggggtcgttttagaagcatgtgatcatttttccttacctttgtaaccttcgagaaatgtcacttgcatcttgaaaaaaacacaagatt

SEQ ID NO: 35638 - DNA, 252 bp, Glycine max
  Clone ID: 700889542H1
cttaatccaaatatcatcatctgaaacgatggctgccatggcaaccacaaccctctcttcaaacccgaaactctcatttttccacggaaagcccgttacatattcttcccgcgtcgcacccaccaccaagttattctcatccaaacaaggcacaatctccatgtccctaacccaacccccatacgacctccaatccttcaaattccaacccatcaaagaatccatcgtctcacgcgaaatgacgcgccgcta

SEQ ID NO: 35639 - DNA, 246 bp, Glycine max
  Clone ID: 700889543H1
cacattcctacatcttctgctgcgggggctggtgagggggatataaacagtatgaatatggcatcttcacagaggaatcctgctaacattccttctccaattcaacatcttgctcctggttcaccacttatgccaatggcttctcctgtggcaatgtttgatgtttctcctttccagccctctactgagatgtcggtacaagctcgatggtcacatgttcctaattcacaacttcctctgtcaatg

SEQ ID NO: 35640 - DNA, 248 bp, Glycine max
  Clone ID: 700889544H1
gaagaacgaatcgaaaaaagaaagatcatggcgatggcaaacttggctcgacggaagggttacgccgtcgttttgtcgtcgaggtcgtcgctttgtctgacaaggtgtagggggttcgcgtccggatctgacgaaaacgacgtcgtggtcatcggcggcggtcccggcggctacgtggcggccattaaagcggcgcagctgggtctgaaaaccacttgcatcgaaaaacgtggcactctcggcggtac

SEQ ID NO: 35641 - DNA, 248 bp, Glycine max
  Clone ID: 700889545H1
tgtgaatcaagaaccgctctgctatggctgctctgcaatacttggaatcgctgcgtaattcgcaccctgagctctccgattggtacaattcgctggcggatctgtaccagaagaagctctggcaccagctcactctcaagctcgagcagtttgtggctctcgccgtcttccaggctggtgatgctttaatacaattatatcacaatttcatcacagactttgagacgaaaatcaaccttctcaagctt

SEQ ID NO: 35642 - DNA, 247 bp, Glycine max
  Clone ID: 700889547H1
atccaatcttgggatggaaagagtgagggtaactctgccagttcaacagccctctttttcaataaagggagagactgttacaaatttggatttcattcggaagaggaaggtttctaatgacttcaacatgatggatctgaaaatttacacatgtgaacaccctcagtgcccttacagtcaagttcgccttggtttccctgaccgaatttcaagggacaaccatcagttgatttgtgcttatagaggt

SEQ ID NO: 35643 - DNA, 255 bp, Glycine max
  Clone ID: 700889520H1
gtttgatacagtgatgcatctccacagatatttgagtaaagctatatgccgtgccctagatttttactatgtacttaaatgcaagttatgacgttgagcattcacattctacacaaagaatacaggcatgagctgtggcctctagatccaattgatccaaagaaggcaaagtttccatgttgtttggtttggaatccacttcctgtggtgtcatggttggctcccttcattggtcatgttggcatttgcagggag

SEQ ID NO: 35644 - DNA, 235 bp, Glycine max
  Clone ID: 700889482H1
gctctacgcctctccctctatctcaaaaatcgttctcttcgattttagggttttgttttgctgctgcctccgttccccccttctcataaacaacgcgttttctcttctgcttcgtatctattctttgcttttggttttggttgattcaaggccttcacagcattcgttgcggcattttaatcgatttatccaagcacgactgaatgaactaatggagtctaaaggtgggaaaaag

SEQ ID NO: 35645 - DNA, 242 bp, Glycine max
  Clone ID: 700889483H1
attagcttaggtagaagattttaaaggagggaaggatagtcagagaatttgttggtttcagcaaccagaagcagcttggaagatgaaacgcatttaagaatccatatgataatgacagggccggactcacactaccattcatgctaacgctctaacttccaaacaaacgaaaaacgttactattaacacttaggaatttacttcttcatcgctcacatcacaattcactaggaagctgtaag

SEQ ID NO: 35646 - DNA, 240 bp, Glycine max
  Clone ID: 700889485H1
ggtttggaagattagaaaattccctgggcaaaccgagtcaaccttaagtgcagaagttgaacttatttccacaacaacagaatagaaatcttggactagaccaccaattcagatggagtctcaggttcccatgttcacagcatctggcatacgtgtccgtttcctcaaggtgtgggagaagagtgggtacaataccgttgagtgggttcgttacattacaaaagcaggatcctacgagat

SEQ ID NO: 35647 - DNA, 238 bp, Glycine max
  Clone ID: 700889487H1
ggatgagtctgcagagtggaggctgagcgtatgatcaggacgtagataggacaaaaaaatgtttacaggagcttcaagtgtttcaggagtcctctcagaaggggcaggatgcttctgatattaaccataaattggcaatactgcaaaaggagaatgcagtcttactcgaaaggttggaaacattgaaaagagagcttgaagcggaaaggttgaagtgcagttcatgatacatgaacta

SEQ ID NO: 35648 - DNA, 238 bp, Glycine max
  Clone ID: 700889488H1
gaagattccagttggtaaagggtgtggacttgttcaatttgcagacagagagaatgctgaggaagcaattcacgcattgaatgggacagtaattgggaagcagacagtgcgactttcctggggtcgcagtccaggaaataagcattggagatctgattccaatggaggctattttggtggtcagagttatggaggccatggatttgctgtgagacagaatcaggatatagccatgcaa

SEQ ID NO: 35649 - DNA, 228 bp, Glycine max
  Clone ID: 700889489H1
ctcccaacaacacaacacgccactcactcagtgtgcctctcacgccgacttcctatggcaagggacagttgcctcgctcgtgttacctccggcgccgttattggcggcgctgttcggcagctcagtcagtgccgtgtttggtacctatgaagctattatgtataaagtgccttgactattgaaaattaagcatattggatgaactactcttagaagtgctgctatttt

SEQ ID NO: 35650 - DNA, 231 bp, Glycine max
  Clone ID: 700889492H1
tagagctgcaaaggattttggaccaattggaggatgagaagaatgaggtcgccaagaagcttgaaaccgcagaagggtatgtgtctaagtcagacaaggaaaagatacatagaaaacctttgaaatattatttggaggttgaatcaagagatgtgagtcaggaagactacaacaaggttctcaatgaattggaggaggtcaagaaggaacgcgtaactgaagttgaagagc

SEQ ID NO: 35651 - DNA, 233 bp, Glycine max
  Clone ID: 700889493H1
caattcaataccatttaccagactcactcatcaattctcatctatcttctcactaactattaattcatcatgtcgagcacagctggccaagtcatcacatgcaaagctgcggtttcatgggaggcagggaagccacttgtgattgaagaagtagaggttgcgccaccacaagctggtgaagtgcgtttgaagatcctctacacctctctttgccacactgatgtttacttctg

SEQ ID NO: 35652 - DNA, 201 bp, Glycine max
  Clone ID: 700889494H1
gtctcaggccacagcacctgcttcttctgaggctgtggcagtgacacctgtgtcttctgagatgaaggcatgggtctatggggaatatgggggtgtggatgttctgaagctggactccaatgttactgtgcctgatgtgaaggaagatcaggttctaatcaaagttgttgatgctggtcttaaacctggtgatgccaagag

SEQ ID NO: 35653 - DNA, 190 bp, Glycine max
  Clone ID: 700889495H1
gaagccagaagaaatggggattgaggaagacaatatcaggaagtacacaacccctgcctacagggcccctgagatgtgggatctgttcctgagagaagtcattaatgagaaggtggacatatgggcaattggaatgtcctctttttcgcatatgctacttcaaaagtgttattgatggggtatcaaagct

SEQ ID NO: 35654 - DNA, 237 bp, Glycine max
  Clone ID: 700889496H1
gaagaataaaacagtttttagaacattgcattcagtcactttgttgcacagcttaaactattttgaaagaaacgaatcctgaagcgtgtcactcccactctcactcaatcgttcagccccttctcttcaattttagggttttatcacaaactaaaatcctcaatcatgggcaccaaggttaggagaccctcccatgctggctcttggtacaccgacaatcctaagcagctttcagag

SEQ ID NO: 35655 - DNA, 262 bp, Glycine max
  Clone ID: 700889501H1
gtgcagaagagcgtcgcagtcgcaaccctaatcagaagaagcgcagcttcaagcgagtgacagccaccagccatgggtcgtatgcacagccgcggtaagggtatatcctcttctgctttgccctacaaaaggacacctcctagctggctcaagatctcttcgcaagatgtcgaagaaaatatctgcaagtttgcgaagaaaggtttgaccccgtctcagattggtgtcattctcagagattctcacggtattgctcaggtca

SEQ ID NO: 35656 - DNA, 258 bp, Glycine max
  Clone ID: 700889502H1
tgaacaatgacttgttccggaagaccatgggtccagtgaagaaggctatggaagatgctggattacagaagagtcagattgatgagattgttcttgttggtggaagcacaaggattccaaaggtacaacaacttttgaaggactactttgatggaaaggagccaaacaagggtgtcaaccctgatgaagcagttgcctatggtgctgcagtgcaaggaagcattttgagtggagagggtggtgaagaaaccaaagata

SEQ ID NO: 35657 - DNA, 255 bp, Glycine max
  Clone ID: 700889503H1
atcttctgctgtgccaagaaagcagtaatctccatgagcttctattgaattgatactttgatcaagatggatgggaaaaactctcttcaaataactagaagtggtattggtgcttatgatgatgatggacatgccaaaaggactgggaatttgcagagtgctgtagctcatatcattactgctgttattggttctggtgttctttctcttgcatggagcacttcccaattaggatggattggagggccattttcc

SEQ ID NO: 35658 - DNA, 254 bp, Glycine max
  Clone ID: 700889504H1
cgggaatattgagcaacaaacctgaagaaaaccctgatttctttaactggaatagagttaaattacggtactgtgatggagcatctttcagtggagatagtgaagatgagcctgcacagctccagtttcgaggacaaaaaatatggctagctgcaatggaggaattaatgtccaaaggaatgcagaaagccgatcaggcacttctctctggatgctctgcgggtggtctggcatccataatacactgtgatgag

SEQ ID NO: 35659 - DNA, 254 bp, Glycine max
  Clone ID: 700889505H1
gcaccaacaatgtcatggcctgtgcctggcacactcatgattgagcctactgagagtgaaagcaaggccgagttagacaggttctgtgatgctcttatttccattagacaagaaattgctgagattgagaaaggaaaggttgacattaacaacaatgtacttaagggcgcccctcatccaccatcactgctcatggctgatgcatggacaaaaccatactccagggaatatgcagccttcccagctccttggct

SEQ ID NO: 35660 - DNA, 253 bp, Glycine max
  Clone ID: 700889506H1
atcagggtttgcatggttcttagtttttggtgaaaggctttcgtttctttaccctttcactgtatgagggatctttactgacttgttgaagttttagtttcccgtgtgttccttttctgcactgtgcagggtgttgcccttcatcaagtttggttaaattggtttctgcttagctctggatttttctgtggcattctatttgacatcatgatttagttttacaagttttgtaaattgttccattcatgacatt

SEQ ID NO: 35661 - DNA, 253 bp, Glycine max
  Clone ID: 700889507H1
attccatgatggttgcttctctcttctacctttctctttctctttccctcatcctaaccctctcctccgccgcgcaccacaaacccccccactcaccgtccaagccaccggctaaccccgccgtgaccgccgcctccccggcaatcgaacaagcctgcgccgcgacgctcttcccgcagcaatgcgaagcctctctctcccaatcccagaacctccctccgaacccgacccctctccagctcctccagtccgc

SEQ ID NO: 35662 - DNA, 252 bp, Glycine max
  Clone ID: 700889509H1
gattaagaccgtgaaaagtttcaaaactactttatgtacaaatttggatggccaaagaactagatatgtgtgtgtctgtggggggtgtgtgcgtgttaactttggagtggttttggtcattggaagtcacttcagaagagaacctaatcaagttattatagttattgggggtcgttttagaagcatgtgatcatttttccttacctttgtaaccttcgagaaatgtcacttgcatcttgaaaaaaacacaag

SEQ ID NO: 35663 - DNA, 252 bp, Glycine max
  Clone ID: 700889510H1
tcatcacttactggaagccttgttgtgagtaagagaaaaggcttcctgcaccgagcacaccaacttgatacctctgattctttctttgcttagaattccacagaatatggagactgttcttttcaatcactccccacctttggaattcaagggtttgagcaaggaggaggaagactcattgctagggcaagtggaaatatggaggtacatgacatgcttcacggactccgtggccttgaaagctgtcataga

SEQ ID NO: 35664 - DNA, 249 bp, Glycine max
  Clone ID: 700889511H1
agaacattcattcacattcatatcctctctctccgatcccaatggcggatgagagccccaaaccagagaccttcgaactcaacaatggaagcatgcaggtcctcctcaccaatctcggctgcaccatcatctccttatccgtacctggaaaagatggtgtgttatctgacgttgttcttggccttgaatctgttgaatcctatcagaaaggtcttgctccttattttggctgcattgtgggtcgagttg

SEQ ID NO: 35665 - DNA, 252 bp, Glycine max
  Clone ID: 700889514H1
tgaactcacaaactgccacagctcaagaggcaagagttaaacacagttccacccaccatacttaataattaatggctgagatgaacaagaaagaagagctgatcttcttttccatacctgggagtggccacttaccttcatctctcgaattagcacaactcctaatcaagcaccacaaccatctttcaatcacaatcctctgcatgaagctcccttatgctccttattcagatgcatacatcagatcagtta

SEQ ID NO: 35666 - DNA, 255 bp, Glycine max
  Clone ID: 700889516H1
agcaacaacaagccctaatccttttttcttcttcttgcacttcccaaagcaatagcttccattgtactattcatccactgattgcaattagaaacgtcctcttcacactctcaattcaaattcaaggtttcgcattctcaccgctcacttcgttttccttttcttttctttttttcccgctttagtgttattgggtgctctgagagagttttcgattcttgatcaacaatttcgcgcattcagctgaaataactt

SEQ ID NO: 35667 - DNA, 234 bp, Glycine max
  Clone ID: 700889517H1
ctcgagcgctcgagccatatcaatctatatataagttatatagcaaatgttttggcaaatagtctttaagagtatatgtccacttgtgaaatcacattttgtgttggatttccttagtcagtgtttccagtaactggtaatgtgaatattgcgcacctaagaggcgttgtcacttctatcagtatacttataataaaattgggacaacaatttatgtgttaaaaagaatttggt

SEQ ID NO: 35668 - DNA, 253 bp, Glycine max
  Clone ID: 700889519H1
cttgttttacaaaacctggctcaatggcagggcatgctatgctagttctccctttatattatcaaaagcctgtcttattttcttgggtctgacacaagatttttggtgaatgggattctggcacttaatttttttgaaaaccactgcagaagaattgaaagaacactcatttgagaggaactataatagcctcattatctctatcctttagtactacactaccatgaggtgtctccagtacttgtaattggtt

SEQ ID NO: 35669 - DNA, 236 bp, Glycine max
  Clone ID: 700889480H1
caagctcgttggagatttgtgaattctgatgagtgtttattgacaagaatgcaagagctgtccctggattaccatttcacagtagagcaagatgttggatcagccactcacgctttcttcggtttcaacggaactgctggcatttggagaatagctgctatcaatgaagctggagggtggaaagacagaacaacagtggaagatatggaccttgctgttcgtgctagtcttagggg

SEQ ID NO: 35670 - DNA, 247 bp, Glycine max
  Clone ID: 700889440H1
tctcgagcgaatcggctcgagggattcacttgttggaacttagtgtcgcattctacctacttcttttgtggctgctatgatattatgtttgggaaaaaccacttcttcatcttcctctttatccaatctttggccttcctcatcatggcatttggatatgttggcaccattgttcccaactcctaagaaggattcggcacttcattcggctatttcagcttctgtgccttcatgtcaacgtgtattg

SEQ ID NO: 35671 - DNA, 241 bp, Glycine max
  Clone ID: 700889442H1
cttatctttagttttttaaagactcaaatgagtttatggctataacagggaaagttccactcattccacccagttgcgaccatcctcagttacctgaccaaggcccctctggtaagtataatgtatctgattcataattgttcagtgaattttttcatcccccctttgattaattttctcaaattgtgtgaacaacaattattaaattacaggttccaccgagtacgccagtggttaatgc

SEQ ID NO: 35672 - DNA, 238 bp, Glycine max
  Clone ID: 700889444H1
ctcctcatctctctccaccaccgccaatctcctcccatgtcgccgcttcaccgcattcccccgccgccgcgcctcttcattctccgtgcaagctaagatccgcgaaatcttcatgcccgcactcagctccaccatgaccgagggctaaatcgtctcctggatcaagtccgatggcgacatgctctccaagggctacagcgttgtcgtcgtcgaatccgacaaggccgacatggacgtc

SEQ ID NO: 35673 - DNA, 239 bp, Glycine max
  Clone ID: 700889445H1
gacacaacacagatctgtcttgaacttctctgtgttctcaaacagcaacaatgacaaaaaccatgactatgtggtttctgttggtctctctttccttcatttatgctgttgccactgctaatactcaaatcagaattactaacaaccctgcggacaagttggtagctgcaatcaacgaaaacagaactgctcacaaggtatcagccttaaccgacaacccggggcttgcgtgtattgct

SEQ ID NO: 35674 - DNA, 236 bp, Glycine max
  Clone ID: 700889446H1
acgcctcagtagaccatggcctcattgggtgggttacaaaatctaagcggcatcaattttcttatcaaaaaagagggtccaaaagtcaatgcgaagttcgagctgaagccgccaccatatccactgaatggtttggagccggtgatgagccagcagacacttgagtttcattgggggaaacaccacaagacatatgtggaaaatctgaaaaaacaaattgttgggacagagcttga

SEQ ID NO: 35675 - DNA, 240 bp, Glycine max
  Clone ID: 700889447H1
cgcataattcaatcaaccatggctaacctcattgctcccatcacctgttcgcctggtcttagatgcagaagctcttagacaagctttccaagaatggggactgatgagaagaccgttatagcaatattgggtcacagaaatgttcatcagaggcaacaaatcagaaagatttatgaggaaatttaccaagaggacctcatcaaacgcctagagtctgagctctctggtgactttgagaga

SEQ ID NO: 35676 - DNA, 237 bp, Glycine max
  Clone ID: 700889448H1
ggttctaccagaattcccaaggttcaacaactgctgcaggacttctttaatggaaaagagctttgcaagagcattaatcccgatgaggctgttgcatatggtgcggctgttcaggctgcaatcttaagtggtgagggcaatgagaaggttcaggatcttctcctcctggatgtcacccctctgtctcttggtttggagactgccggtggtgtgatgactgtcctgatccctaggaac

SEQ ID NO: 35677 - DNA, 124 bp, Glycine max
  Clone ID: 700889449H1
aaaaggtatacttttgttttgcatttttatgtttggctctgtcaaaattaaatctttccacattggtctattacaacaacatggatgatgaattaggaaatttaattatgatcttattttcttc

SEQ ID NO: 35678 - DNA, 156 bp, Glycine max
  Clone ID: 700889450H1
cgtttatataaataaagctatgttgaataatatatctattttgtaaaaacggcatgcatatgatttttatatataacataatggccagtatatataaaaatcatatgcatgccgtttatataaataaagctatgttgaataatatatctattttgt

SEQ ID NO: 35679 - DNA, 244 bp, Glycine max
  Clone ID: 700889451H1
agaagcgcaacaattgcagacggtggaggtgaaagtgaagatggactgcgaaggatgcgagaggaaagtgaggaaggcggtggaggggatgaaaggcgtgaaccaggtggatgtggagcgtaaggccaacaaagtcactgtggtcggctacgtcgaggcctctaaggtggtcgcccgcatcgctcaccgcaccggcaagatagcagagctctggccctacgtcccctacgacgtcgttgctcac

SEQ ID NO: 35680 - DNA, 243 bp, Glycine max
  Clone ID: 700889452H1
acttgaacgtgcaagacagcagggaatgtatataggtggtgggttggattctaatcatctgggttttgctggatcagtaaattcaggaattacaacctttgagatggagtatggacactgggtgaatgagcaaaatagacaaatcacagaactgagaaatgctttaaatgctcataatggtgacgtagagctcaggattttagtagatggtatgatgagccactatgccgaaatgtttcgcat

SEQ ID NO: 35681 - DNA, 245 bp, Glycine max
  Clone ID: 700889454H1
cacaatgattcttctaatggtggatttctcaaaagagaagttcaaccaagcctaagttctgtcagtgatggatcaataacaaatttgtcttgtcggaaccatgttcttgatccacagggggcaacacttcagaagtggaacaaaatttttgtaatcacaagtgtgatggcaatctctgtggaccctcttttcttttacatcccaatgattgatgacaagatacaatgccttgctttagatggaac

SEQ ID NO: 35682 - DNA, 247 bp, Glycine max
  Clone ID: 700889456H1
tgacaaaccgcccttctttgataattttgattacgccataaaattgaagctccttttcagcccatgttaaaccttttctagttttctcttggcttatacacacgcaaacacacgacacaacacatgtcacatgttgttggcttaatacgcagagggagtgtgagacgtttgaaagatcagaatcggacaggctagcttagctccatgtctgactcactcctaactttccattctctttcaaccattc

SEQ ID NO: 35683 - DNA, 231 bp, Glycine max
  Clone ID: 700889458H1
catcactcaaacattaagaaaagctatgcctagcatcgtttctactcgtagaggtaacatgggcactcagagaagcaaacccagttgtaccatcgttgcgatctttctagcattttgttgttttgtttcttcttcgaaagcaaagcttgagagtctccaacatgcgcccaaagctgatgggtctctaagcttcttggtggttggagactggggtagaaaaggtgcttataa

SEQ ID NO: 35684 - DNA, 235 bp, Glycine max
  Clone ID: 700889462H1
gtaacgactgtagagtcgcagaactctgtcagcgccggagatgcgctacgtgtaatttatgagcgcaatgtgatacatggagactttgtccttatcagtggagatactgtaagcaatatgtcgcttactcaggcacttctagagcataaagagaggaagaagaaagatagtaatgctgtaatgactatggtcattaaacggtcaaaacctaatccagctatccatcagtctcgac

SEQ ID NO: 35685 - DNA, 238 bp, Glycine max
  Clone ID: 700889463H1
gaagataagacagaacatataataataaataataataattataataaaaaaaagacaagtttgtttgttgttcctgttctaatctctgaaccatgtcatacaactgaatctgatagcaaagcttttgaatttcgtacctctcctctttgtttaccctaccagatattgcaaatacagcaagatcatcatgagtgggatttcggaaaagaaactcatcagaatcgatgctagtgctgat

SEQ ID NO: 35686 - DNA, 241 bp, Glycine max
  Clone ID: 700889464H1
cctaaacctatctttcttctctctctgtgtgtgcgcttcaacggcaaccagaagcagccatggccactgcaaggactgtgaaggatgtttcacctcatgagttcgttaaggcgtactcctctcacctcaagtgatccggcaagatggagctgccagagtggactgatattgtgaaaactgcaagatttaaggagttggctccttatgatcctgactggtactatgtcagagctgcttccat

SEQ ID NO: 35687 - DNA, 246 bp, Glycine max
  Clone ID: 700889465H1
gttagaaacctgagagatggctactcttcctcttctccgaccatgctgcttccttcccactcacaccctcaaaccctcactcacaagacccacacccttcttacctctcaaatcgaagaagaaccctcaaaacggcgccgttgggactcgcatgtcgaacaccgcaactccaccaccgacggagcggctaatctcaatcgcatctaacgccatcccatcttcaactccctccagtacggccgctac

SEQ ID NO: 35688 - DNA, 242 bp, Glycine max
  Clone ID: 700889466H1
gcaaaagacaaattaggttcagtagtcttaaaaactgataggtttcccccaaaaaaaacaataggtaggtttctcatcatgactaaaagcttaatgaatccaggtgatctcgcaagatcatatttttgggcatggttcattgcagggtgtgttaaaacttgttatcctacgaatataatcatgattgagtttatgactaacttgaaccaaactgcatgttcctgatataaaatgtataacat

SEQ ID NO: 35689 - DNA, 245 bp, Glycine max
  Clone ID: 700889468H1
tattaagaccgtgaaaagtttcaatcctctttctccccttagataccccaatcaactagtcttttggattcacaacgttggacacggtcttttccttcagttcttttgcaagcttgtctatggaatctgaaacttcaaccctatatacatagtacctagtaacatacgcgaagaagatgaggttgaggaagtttaatattgcaaaaaatgcatagtagtagtcaagatgagactcattcagattg

SEQ ID NO: 35690 - DNA, 104 bp, Glycine max
  Clone ID: 700889469H1
tgaaatttaaagctttacaattgtatgtatgcatgatataagaatctcccttgcgaaatattttcttgctgctttgtttgaagtgagttgtctatcaatttaat

SEQ ID NO: 35691 - DNA, 242 bp, Glycine max
  Clone ID: 700889470H1
gaagtggggagaaagatgagcgaggggatgagctccatgagtttcaagctcaaggagttcttccagcctgggcccaatcaggccgacaagcttgtggaggacgctacttccgaggccctggacgagcccgaatgggccctcaatctcgatctctgcgacctcgtcaacaccgacaagctcaactgcgtcgaactcgtccgcggaatcaagaagcggatcattctcaagagccctagggttca

SEQ ID NO: 35692 - DNA, 242 bp, Glycine max
  Clone ID: 700889472H1
ttcacttcaagaaaagcttccaggaggatcggaagatgccaactttgagactgctacgtttgatgctactcatgtaagaaagaatatagggctttggaagggagatgtggatgacctaaaaccgtgttgggttaagccatcttctgatgatgtggagcagacccaaggatttgttacttttgcgttaaccaatggcccagagtaccatatttctcagatagcagacgcagtgattgttgcta

SEQ ID NO: 35693 - DNA, 237 bp, Glycine max
  Clone ID: 700889475H1
gcaaaatctccaaagctgggtcggcgaaagagcaacaatggtgcagttaatttatctgaaggtgacaaggagaaaggagctggaatcaggagaaagcatcacacaccgaagaccaacaactatggtgataagagtgatgtaaatggcttatctgaccccaaaaacaagaccaagcatattgaaggaattaatgcaaccgaggtaactggctgccaatctccaagtttgcttgtccag

SEQ ID NO: 35694 - DNA, 237 bp, Glycine max
  Clone ID: 700889476H1
gcaacaacgaaaaccatagaagataaaagagtttcttctttccgaaatccaagcagtagggttagggttttttccgatctcaatggcggaggaaccggagagcaccgtcaccaccggcgcccccgacgaatcgctgctcgataagatcaccgagaagcttcacggccacgattcttcctcttcttcctcttcggattccgattccgaaaaaaccgttacttcgtccgttaaggatag

SEQ ID NO: 35695 - DNA, 235 bp, Glycine max
  Clone ID: 700889477H1
attcaaaccacacgattccacgaccttattttgatgccgcggtggcggtagcggtggacggcgattgtagcggcgtacgagcaagaaatggttttatgttgtgaggaagattgttaagctgtgggaatatgtcattgagaagcatagtccgtgaactcaaggagatgagagatggaataggaagcacatcaaagcggggtgcagaaagcaagcatcggctcagtcggacaaagtc

SEQ ID NO: 35696 - DNA, 246 bp, Glycine max
  Clone ID: 700889439H1
tacaaagcattgaattcaaaaactaagttcatttcttgtgctttgctttattcctcaaaaccaaacatgtcgaacacatgcggcaactgtgactgcgctgacaagactaactgcaccaagggaaacagctatggtgttatagtagagactgagaagagctacatcgagactgttgacatggatgttccagcagctgagcatgatgggaagtgcaagtgtggcactaactgcacttgcacggactgc

SEQ ID NO: 35697 - DNA, 233 bp, Glycine max
  Clone ID: 700889478H1
taatactattattataactttggtggtaggatcaattcaagaactattttccaattaggactaaaatatgttttttcacatagggactaaagaaaaatgatatcaggtgctatggaccaaattttttaattaaacgttaaagttattttatatatgatccaaatatcaaaagggaatagcaaaccctagaacttttatgtaagcacaaatctatcataccttatgctgaaatt

SEQ ID NO: 35698 - DNA, 253 bp, Glycine max
  Clone ID: 700889402H1
tccctcccaattttctctttctctctctttttatttttttgatctctgacctaattgtctctcttctcttctcttctcatattaccactcatctccagccacaacctagagaacaccccccaaaattcagtgggtatttctcatcttcttctgcccccatcacctagatctgtctgtctatacactcattgtttgacaaaaaagaaaataacactgggaagtttagtcatagctgaaagctgactctagctag

SEQ ID NO: 35699 - DNA, 251 bp, Glycine max
  Clone ID: 700889403H1
gaaaaagacggctatgaacataatgcccaaaacaaatttggcaactctaccatgtacattgaatcattaaaggccattcaaggacaacaaacttataaaacgagcatttcaagaaatgtgattttacaggaagcacaagcagtggcctcttgttcctatgagatagacacaaattggggtaatgaggtaggattctcatatgttatattactggagagtacagttactggctatcttcttcactgtagagg

SEQ ID NO: 35700 - DNA, 252 bp, Glycine max
  Clone ID: 700889404H1
ctgatctagatcccggccagctctccgccctccgcgccgccaacgtcagcaccgagaagctcgcccgtgtcgctgtccgcattggcctccaccgctttgtccgccacagcgcccctccccttgtcgacaaggtcgagcgcttcgtcgacgccgtcaagctcgagattaaccccgttgctcacggcggatccgtcaaggcgcccaaggtcctcgccgacgtcgtcgagtccgtcgccgccgcgatttacgtgg

SEQ ID NO: 35701 - DNA, 248 bp, Glycine max
  Clone ID: 700889405H1
attctaatcttcgcaaatcaacaacgtctctctctgttactctgaaaactgacttcaagttagtgtaactagctgccaagttgtgatggcattggtctctggaagaagttctgctctgaacccaaatgcacctatgttcatacctgctgcacttcgtcaggtggaggatttttcacctcaatacagcgatcttgtgaaatcttcaacatggtttcgtgattattggttgagccaacataaggaggaag

SEQ ID NO: 35702 - DNA, 253 bp, Glycine max
  Clone ID: 700889406H1
ctctattcttttaaaccttagtctcccacggaagacttcaacagaagaaaaaggaagaattaatatcactcttccatggttgccgacgaagcttcaccattcgagaccagcgatatgctggcaacgctcctggcgtcgacgccgctgttgtcagagtcatggcggctgtgcaccaccgtggccgccaccgcgccgaggagtttcatgactgagcagcacggtggcggcggtgtggtgtacgtcgctttccccg

SEQ ID NO: 35703 - DNA, 249 bp, Glycine max
  Clone ID: 700889407H1
tgtatagacagctagaatattttaaggagtatcaaaaccgagtgagtgctctaattggagcttcagaggctacgaatttggtgaaacaagcactagtgctcatcactgtagggggcaatgattttgtaaacaactacttcttggtgcccaattcagcaaggtcccgccagtacccactacctcaatacgttaagtatcttatctctgagtaccagaaaattttgcagaggctatatgatcttggagctc

SEQ ID NO: 35704 - DNA, 249 bp, Glycine max
  Clone ID: 700889408H1
ctctcttgtgttagtgagagacagttctctctgcttctctctcttagactcagaaccctattgcgtgctttgcaatcgaccccgattatggccaacagtaacctccctcgaagaatcatcaaggaaacgcagcgtttgctcagtgagccagcacctggaattagtgcgtccccttcggaagacaatatgcggtatttcaatgtgatgatccttggcccaactcagtcgccttatgaagggggagttttc

SEQ ID NO: 35705 - DNA, 247 bp, Glycine max
  Clone ID: 700889409H1
tgggaggatgctgtgtctgggtcgattcggcggggtctctcactacccaatcaaatccggttggagtcggagggactacaccaataacaggcccagatggtgtttgatggccgcccaggaatccgactcttcttttgcaccctctcttgactccgacaaaaccgcctctgctgggtcccttttctattctctctctctctctctctcttttttcctttcttcattcttccattctattctatccgca

SEQ ID NO: 35706 - DNA, 244 bp, Glycine max
  Clone ID: 700889410H1
cggctcgaggagagcgcgtcttaataaacgctcttctctgaaaacccccatttcttttcttctttcttcttctctttcgcttcttcgatcttcgatcttcgtcgctgaaaatgagagagtgcatttcaatccacatcggccaggccgggattcaggttggaaacgcctgctgggagctttactgcctcgaacacggcattcagcctgatgggcagatgccaagtgacaagaccgttggtggagg

SEQ ID NO: 35707 - DNA, 237 bp, Glycine max
  Clone ID: 700889411H1
gcatgcttggtttgggttgggtttgtgtgcatctgagtactctgttttcaaattttgcaagaggaatgcatgccaattttaatccttgaagtttactactatacttttgttaggctagtgattttgatgactcaggagctgttgtgtttgtgcttttgtactcttgtattggtagatacttaatactctcaacattccgcgcttagttctcaattccaaatagcggggcggagtgac

SEQ ID NO: 35708 - DNA, 242 bp, Glycine max
  Clone ID: 700889413H1
gccaaatggtgccatagcggcttcaaatggcagtttaagtgatagaatgcgtgtttctcccaaaattgcagcaatggttcaagcaatggatcatgagataaaggaatctgctgaagctaattcgtttgagaaacatcacgagaggaaagatagtttgagtgccaaaaacacaaaattaaatgctggcttgccagaagaggagaatgagaaatctgatcaggttccaagcccctctgctccac

SEQ ID NO: 35709 - DNA, 242 bp, Glycine max
  Clone ID: 700889414H1
ctaccacttggctttcacgtttaccttcgcagcgctctttctctctgaaccctaatttacacacactccctttattcgatccctctctccaaccatggcgatcaactcttccaagaatccagatggttctgtccaaaatgcaatgccttcgtatttttattctccaccactagatgtttctgctgcatttccacaagcaacaccagcatcaacgtttcctccttgtgcttcagattattttc

SEQ ID NO: 35710 - DNA, 245 bp, Glycine max
  Clone ID: 700889416H1
ctttcaaacactcatgaacaccataagaagcatctctctcttcacctcaaaatcaccctccgtgctttctctaccgaggagcctctcacgcaagctatcatcttcaaggagaaaaacaagaacaagaagaagaaggagccatgtgtgcagcagcgatgtcaacatcacaacggtggtgaagatcaaggacatcatacggtggaagtcattcagggatatcgtggtggaacttctcttccaccacc

SEQ ID NO: 35711 - DNA, 246 bp, Glycine max
  Clone ID: 700889417H1
ttgggaatagtgctgcaatggcttcaagtcaggaggaggtgacccttttgggagctactggaagcccatttgtgtgcagggttcatattgccctcaagttgaagggagttcaatacaaatatgtcgaagaaaatttgaggaacaagagtgaactgcttctcaaatccaacccagttcacaagaaggttccagtgtttattcacaatgagaagcccatagcagagtctcttgtgattgttgaataca

SEQ ID NO: 35712 - DNA, 247 bp, Glycine max
  Clone ID: 700889418H1
gtgaagcgggctattttgtataaattggaggaaatgttttaattttgtttctcaagttcagcttcttgctgtacaagtaatagactattattagacttgccagaaatcaccaactgggttgctctttctaaccaggttctctaagtcaactttcagtttttgattgttgaggatggtgctggttttggccctgggggatttgcacataccccacagggctcctgatcttcctgctaagttcaaatcc

SEQ ID NO: 35713 - DNA, 247 bp, Glycine max
  Clone ID: 700889420H1
gtctccgaggccgacatcttcgtcaccaccacagggaacaaggacattatcatgcttgaccacatgaagaagatgaagaacaatgccatcgtgtgcaacattggccacttcgacaacgaaatcgacatgctggggcttgagacctgccctggtgtgaagcgcatcaacatcaagcctcaaacggacagatgggttttccccgataccaagagggggatcatcgtgttggcagagggtcgtttgatga

SEQ ID NO: 35714 - DNA, 250 bp, Glycine max
  Clone ID: 700889421H1
ccgattgctagaatggaatttcgatgctcagtcatctcttttaccattctcttctctcttgctcttgcaggagagagccatgtccatgcatcgctacctgaggaagattattgggaagctgtttggccaaacactcccattcccactgcactgcgagagcttctaaagcctctccctacaggtgttgaaatcgatgaactccctaagcaaattgatgatacacagtacccaaaaacattcttctataaag

SEQ ID NO: 35715 - DNA, 246 bp, Glycine max
  Clone ID: 700889422H1
caggacagcataaggacaccctcctgtgacttttgccattgctgcatgcgagacacagaatgttaatgtatctggtttgccatgttgtgggttgtctgatggaagtagcacaactgcaaaaggcatgtggagtaaaatggtgaaggatgggcaattttaccaggagaatttcaattctggacctagcatgccctcatcgcctggagagacactatgtgctgctgttgcagcttccatgtgggttga

SEQ ID NO: 35716 - DNA, 247 bp, Glycine max
  Clone ID: 700889423H1
tctttcttcctcttcctcagtagtgcgattttcgattctcttctctgcaactatgcctaaccctaaggtcttcttcgacatgaccatcggcggtcaacctgccggccgcatcgtgatggagctctacgccgacgtgactccgagcaccgccgagaacttccgcgcgctctgcaccggcgagaagggcgccgggcggagcggcaagcccctccactacaaaggctcgtccttccaccgcgtgatcccg

SEQ ID NO: 35717 - DNA, 241 bp, Glycine max
  Clone ID: 700889429H1
gggatgttttacagaacggacctaattggattgatagttctcaaagggaagccagcagaagcatgcactatgaacctccttcccgactaaatgatgttcaaaacctagacttgttcaggccaatagattgtagatctttgggcaacataccaagtgagttcccagtttacacatccaggcgtccgaaccaaggggcgttggtggatgagttcccacacctcgatatcattaatgacctgct

SEQ ID NO: 35718 - DNA, 149 bp, Glycine max
  Clone ID: 700889433H1
gtggcgccggcaaaggtcgcactaacatgcgccgcaccgtcaagagtgctcctcagagcatttggtatagccctgaccgtcccaagtacttgggtccattctcggagcagattccatcatacctgaccggagaattcccgggtgactac

SEQ ID NO: 35719 - DNA, 247 bp, Glycine max
  Clone ID: 700889434H1
atttgactcaactgtaaagctatgggatgtggaacttgggaaactcatctacagcttggatggacacaggcatcctgtatattctgttgctttcagtcccaatggcgattatctagttagtgggtctcttgacagatccatgcacatatggtcattgagggacggcaagattgtcataacatacacaggcaatgggggcatttttgaggtctgctggaataaggagggtgacaagattgctgcatgt

SEQ ID NO: 35720 - DNA, 248 bp, Glycine max
  Clone ID: 700889436H1
gcttgggcttgcaaagcgagtaggagcaaggattttgcttacatcaacttcagaggtatatggggatcctcttgtgcatccccaacctgaaagttattggggcaatgttaaccctattggagttcgtagttgctatgatgaggggaaacgggtggccgagacattgatgtttgattaccataggcagcatgggattgaaatacgcattgcaagaatctttaacacatatggaccacgcatgaatattg

SEQ ID NO: 35721 - DNA, 248 bp, Glycine max
  Clone ID: 700889437H1
gcaccgtgtccacaagattcttagagctcggcaaccttattgggacctcaacttctacattaatctttccaccagacatcagcttgcatgattttctgcactctattctgaggtgaccaattctgttcttcttttctcgcataataaagtaatcaataagcacataaaccttcgaggacatggcatcagccttgtccacgaccagtgtgctttgctggaggaatcctcagcacatgcatattatctca

SEQ ID NO: 35722 - DNA, 248 bp, Glycine max
  Clone ID: 700889438H1
ctttaaaatccgcactgtggagcaggatgggaagactattaaacttcaaatttgggacactgcgggtcaggaacgtttccgaacaatcactagcagctattatcgtggggctcatggcattattgttgtttatgatgtcactgaccaagagagctttaataatgttaagcagtggctgaatgaaattgaccgttatgcaagtgaaaatgttaacaagcttctagttggaaacaagtgcgatctcacgg

SEQ ID NO: 35723 - DNA, 256 bp, Glycine max
  Clone ID: 700889401H1
gttcagagaggatcaaagaaattattgttcagttcaaagggagctttgtgctagaattgcagcagagagctattgaattcaattcgattattgcaaagcatcaaaatattaggtctacacttgtagataggatgccagttttggatgaggcaacttcccattggtaggagggctgggtctctaccaggttgcagcttcaattcaaatggaacttcattttaatcttccaaatggaccggcaaacctgtggctcctc

SEQ ID NO: 35724 - DNA, 233 bp, Glycine max
  Clone ID: 700889368H1
tgattgtttgttgttgtaactcgttcttcttcttttgttgttctgtgtttgtgtttgttttttctctcacctgaaaatgtcttgctgcggtggtaactgtggttgcggaagcgcctgcaagtgcggcaacggctgcggaggctgcaagatgtacccagacttgagctacactgagtcaaccaccaccgagaccttggtcatgggagtggcacctgttaaggctcaatttgagg

SEQ ID NO: 35725 - DNA, 234 bp, Glycine max
  Clone ID: 700889369H1
gtttgatctttcatcaagtgatcgttcaaacacccctggtgctatcaacccacaattgtacctacagttccttacaagttaccaggccccaagtggtcaatcagtgcttcgtgtcacaacagtaactagaagatgggtagatagttctgttagctctgaggtagtttcagccttttttatatctatggcagtggatgcctgtttatttgtcattgacattgtcaaagaaatatt

SEQ ID NO: 35726 - DNA, 237 bp, Glycine max
  Clone ID: 700889370H1
gtgtatttccctacctctcccttcaagatgcagatcttcgtcaagaccctcaccggcaagaccatcacccttgaggtggaaagctctgacaccatcgacaacgtcaaggccaagatccaggacaaggaaggaatccccccggaccagcaacgtctcattttcgccggaaagcaacttgaggacggccgtacccttgctgactacaacattcagaaggagagtactcttcacctcgtc

SEQ ID NO: 35727 - DNA, 234 bp, Glycine max; identical to SEQ ID NO: 27869
  Clone ID: 700889371H1

SEQ ID NO: 35728 - DNA, 261 bp, Glycine max
  Clone ID: 700889372H1
gtttgaagtctgaaagcatcaactgagattccaccaacgatcggcagtgcgacggttttttacgagttgggttatgctaaactacgattcacaccgtacgcgtaccagtttcgttcttccaatgctctgcacgtctcttgctgccaatgcccatttcgagtgcgaaaatgttgccttgtgataggaatcaacgtaagtacttgtatgtggattttggtggtattgattttcaatatccgctttatggtttgagcttctatt

SEQ ID NO: 35729 - DNA, 240 bp, Glycine max
  Clone ID: 700889373H1
caccatattccataagcagctagctactagcatcttcttccatcaccacattcatcttaattaatattctctagtggtgcttcccaatcaatatcctttaattttgtctcaattcctttctttctcattcaccaatccatacttcattttgttaatttcttaatccaacaccaccaagatgccaactgacacatcatcagtttccggcggcgaaatcgtgtgtgtgaccggtgccggcgg

SEQ ID NO: 35730 - DNA, 241 bp, Glycine max
  Clone ID: 700889374H1
ggaccactcttccattcagtcattcaacacctcactcactgattctcagaacacaaaagatggtgatgatgatgaagaaacaccttctcttctcactttcacttctcctaatggttctcttcacttcagctcaaaccaccccagcaccatcaccttcctcagccccaacagacatcatcagaatcctcaaaaaagccggaggattcaccacccttatccgtctcctcaccacaacacaagt

SEQ ID NO: 35731 - DNA, 192 bp, Glycine max
  Clone ID: 700889376H1
aaaagtaagaaatgccccaccactaagtaatgctatatggattatgtatgtgttccatatatgtcaagtgagtggtgtgtggttgtgaagaatctattgcttttaatgaatcagatcctttggtgtgaaaaaaaaaaaaaaaaaaaaaaaaaagggggggcgccaataagggagctcgtgaaccgggaaatt

SEQ ID NO: 35732 - DNA, 243 bp, Glycine max
  Clone ID: 700889377H1
ctccaagtctttctgttcactatgttattactaaagggttcatgacattcgcttgaaaccttggtttgtatcaattgtagcacgagtttgattgtggtgccaagttcttgagctgcggtggtgctgaccctgaaaagttctccaagtccgacatgagataaggctgctgctgctgctgcttttcaaagatgttggagctggtttcaattagtagacaaatttggttgctgaatttcgtgttca

SEQ ID NO: 35733 - DNA, 240 bp, Glycine max
  Clone ID: 700889378H1
taacaaaacaaaatacaatagatttggtaaagggcagtggcactttaaagggaagaaagcaccacctgaaaccagaaggggaaagtgctcctaacattagattagaccctctaccatgttcctctgcctctgaagtctgaacctccccaggcatggcaatggagaatacaacattgtttatgttgctgctgaatctgcttcttgtgttcagtgcctctcttgtgtccgcagagcaacaaa

SEQ ID NO: 35734 - DNA, 250 bp, Glycine max
  Clone ID: 700889379H1
gattgctagaatggaatttcgatgctcagtcatctcttttaccattctcttctctcttgctcttgcaggagagagccatgtccatgcatcgctacctgaggaagattattgggaagctgtttggccaaacactcccattcccactgcactgcgagagcttctaaagcctctccctgcaggtgttgaaatcgatgaactccctaagcaaattgatgatacacagtacccaaaaacattcttctataaagaa

SEQ ID NO: 35735 - DNA, 252 bp, Glycine max
  Clone ID: 700889380H1
tgaactttttgtgtgcttccggatacgaccaacaactcatctccgcactcaatttcaatggcacattcatttgtaaagggtctcacagcgtaacagacttgaactacccttcaatcacattaccaaatcttggcctaaaacccgtaaccattactcgcacagtcacaaatgttggaccaccagccacatacactgcaaatgtccactcgcctgctggatataccattgtcgttgtgccaagatccttgactt

SEQ ID NO: 35736 - DNA, 237 bp, Glycine max
  Clone ID: 700889381H1
gaggcataccggaaacaggtgtggaggtgaacaaacagcaatacaatggagaaatggtttctgaccattgtgttgtggggggttgaggcttattgaattatttaaattggaaggtaagattcaagcaatggcagtcatttattagtgttaggaaccttgaggcttccaactgtttttctttgttgggtgtcactcaattaggaaagtaaaatacaggatgtgatgattctcatagca

SEQ ID NO: 35737 - DNA, 237 bp, Glycine max
  Clone ID: 700889382H1
caacaagaaggcgtccagcagccgagccggccgaattcgcaccctctccgatctgaaccgtccctccgccgattccgacagcgactccgatggccctcaggagtattacaccggcggcgaaaagagtggaatgcttgtccaggatccttcaaagggaaatgatgtggatgaaattttcaatcaagctaggcaacttggggctgttgaaagagcctcttgatcagcttcaggagcctc

SEQ ID NO: 35738 - DNA, 233 bp, Glycine max
  Clone ID: 700889383H1
atcaactcttcaaaagggagaagaaaaggaaagaaaactctcaaaaaactattatagcaatggcagaacaaaaccaaaaccaaacaactgaagctggaaggcaccaagaggttggtcacaagagccttctccagagtgatgctctttaccagtatattctggagacaagtgtctacccaagagaacctgaatccatgaaagaactgagagagttgacagcaaaacacccatgg

SEQ ID NO: 35739 - DNA, 233 bp, Glycine max
  Clone ID: 700889384H1
caggtggtcttagatgcaccattgcgcctcaaaagtccgccaagttgtcaaattttatgcgttaaaccacttgctgtttctgctagttcttgtgctcaatttgttttgaaaggattcaattttttgctgtctaactcgaggttgctctgtgcacttgaagggaagtatctggtacaagataattgttatgatttgattgacagtgttgacgcagccaatggacatcatgagct

SEQ ID NO: 35740 - DNA, 236 bp, Glycine max
  Clone ID: 700889385H1
caacctttcactttcgtttctcagttttattcgaatccctctctcaatctcctttccaaatggccagcgttgaggttgcacagcaaacaccaacaacagttccagaaaatgaaacaaccgaggtaagcaagacccaggaaacaaccccagtcactgaggctcctgcaacagaacaaccagcagctgaggttcctgcaacagaacaaccagccgctgaggctcctgccccagaatca

SEQ ID NO: 35741 - DNA, 237 bp, Glycine max
  Clone ID: 700889386H1
cttcattcactcccctttcactttttcccttccaacaacacaaattttttgttcatttcatactaattgtcattaatttttagacccaaaaacatggacagccaacgaagtcctcttcttagttgggctttctactgccacggcaagtcgatggaggagctgaagcagtctctgatgtacactacccttgagctggtctcaaacaagagcaactgtccaagaagagctaagatttag

SEQ ID NO: 35742 - DNA, 225 bp, Glycine max
  Clone ID: 700889387H1
gtcgctcagggtcacctggcaatgataggttggccactctgcaagatgggtctgactacagtgatggtcctagagggaaaagtagaagccctgctagccctgcaagggaccatgatgagggcaactatgatagccctaaagctagtgggcgtagcacagccccagcaggagccctagggaagatgacaggtgccccattgatgaagttgatgacaacaaccgtcg

SEQ ID NO: 35743 - DNA, 239 bp, Glycine max
  Clone ID: 700889388H1
aacttttcctgaattagttaaagtcactggtactttggcagatatgactaacttcgtagtagaccttaaagtgaaaagagaaaaggatatgcagctcagtaatgtcctttcaaagagacatatagatcaggtcactgctcaagcctggttgttaaaaagtaaagagctggaggcgaaggtcactaaaatgagcattcaaaataaagtcccgtcagagtatacctgcatgaacattgttc

SEQ ID NO: 35744 - DNA, 239 bp, Glycine max
  Clone ID: 700889389H1
attccattgccacccagttttgaatatatttttattccttctttgtttcttcactttcttccatacacataaccatgtcttctcagactgttgtcctcaaagttggtatgtcatgtcaagggtgtgctggagcagtgaacagggttttgggaaaaatggaaggtgttgagtcatttgacattgatctgaaggagcagaaggtgacagtgaaaggcaatgtggagccagatgaagttctg

SEQ ID NO: 35745 - DNA, 241 bp, Glycine max
  Clone ID: 700889390H1
atgtgaacaccgtcattggccctgctttgattggcaaggacacaactgagcagactgctattgacaacttaatggttcaacagcttgatggaactgttaacgaatggggttggtgcaagcaaaagctaggagcaaatgccatattggcagtgtctcttgcagtctgcaaagctggtgctagcgtcctgaaaatttcctctttacaagcttagtgctaatatcgcgggtaacaaaaagttgg

SEQ ID NO: 35746 - DNA, 242 bp, Glycine max
  Clone ID: 700889391H1
ctctaactcaatctctctctctctctctctctgaatttcctcctctctccgattccttttattaattggagtttactcgctccttttcctttccctgaaaacatttcctcgtcgtattgatgtcggaaaagggccggccacttccaaaatttggtgaatgggatgtcaatgatccaacctcagctgaggggttcacagtgatttttaataaggccagggatgagaaaaagacaggtggtaac

SEQ ID NO: 35747 - DNA, 247 bp, Glycine max
  Clone ID: 700889393H1
ctcgggcagtggcagcataaccagaaaaaggttccagaaattctggtaaggaacgaagcaaagcaaacgcagcgtttcgtttcgtgtcgctgctggttatggatggaatgtacggagtgccggcggagtacgccgacaaggctctcatgacgccggagaatctgattttcccgccggactaccaccacgacttcctcgccgccggccggattccgctgttcggatccgacgagttcttctcctcctc

SEQ ID NO: 35748 - DNA, 250 bp, Glycine max
  Clone ID: 700889394H1
aactaattaagcaacacacacttcaatttatcagcatggcctccgttcagtgccacaaaacctgcaaagtgagctgccaacaggaaaaccagcacgcctcgtttgggcagaaagtttctgacttgttcaaagggcatcaacataatgaccacagctccaattatgccacccaaaccaaagtgctttcccagtcagggtcagggttaggccccttcaccaccaaaactcaaacacaatgcggttgccccca

SEQ ID NO: 35749 - DNA, 234 bp, Glycine max
  Clone ID: 700889367H1
tgtggacagccaacacagagaggtacagcaacgtagttgtgaggactaaacgacaccatggaaaacctctttgcttccttggacaggaatgaggctgagatttccccttccaccttgtatgccattgcttgtgttatggaaaatgttcctttcatcaatggaagccctcagaacacctttgccccaggactcattgatctggccatcaaaaggaatagtttgattggaggagat

SEQ ID NO: 35750 - DNA, 250 bp, Glycine max
  Clone ID: 700889395H1
agaaaattactttttccaagaagcagctggtgccattttttgtaaatgtccagcgtgagggcctggaatatctacttcaattagtgaaggacgggaaactgaagtctgttattgactccaagtttcctttgagcaaagctgaagatgcttgggctaagagcattgatggccatgctaccggaaaaatcattgtggagccataggtacagtttgcttggaattgttgtatttctagtttctacatatctgg

SEQ ID NO: 35751 - DNA, 234 bp, Glycine max
  Clone ID: 700889337H1
gttgaatgtgagtcatcatcatcatttgaatctactgagtcatcatcatcatgagtacagaaaccttctgaaagatctcattgttcagtgtttgcttagactgaaagaaccttcagtcctattgagatgtcggaaagatgacctgcacttggtagagcatgtgctggattcatctgcacaggagtatgctgagagagcaaatgttgatcccccagagatcattgttgacaacca

SEQ ID NO: 35752 - DNA, 237 bp, Glycine max
  Clone ID: 700889338H1
atcctccttctgtcccatctgacaaactaactcatgtatacactgcaattctgaagcccgataatgaattgcaaattttgattgatggtgaggagaagaaaaaggcaaatttcttgtcttctgaggactttgagcctcctcttatcccttccaagacaatccctgatcctgatgataagaaacctgaggactgggacgaaagagccaaaatcccggacccaagtgctgtgaagccag

SEQ ID NO: 35753 - DNA, 239 bp, Glycine max
  Clone ID: 700889339H1
tttctttcggctttgatttctctctcctcgactcgatcccaattccactagggattcaattccgatgcgattccgagcttgttagatccacgacaaggtttcgtttcccagattcttttgtaaaaaaaaattcttcctctgcccaacaggtaagttgtaaaaaaatggaccatgacaagactgggtgccaagctcctcctgaaggtcctatattgtgcatcaacaactgtgggtttttt

SEQ ID NO: 35754 - DNA, 210 bp, Glycine max
  Clone ID: 700889340H1
ttcttcgggaatttggtgcttataatgatcattgggtagtggcaaaaatggaagaggaagctcagaaagaggctagccagaggtataatggaaagcagtttcatttaagccaggatcctgacgttcttgatacatggttttcttctggtctgttcccattatctgagctgggatggcttgttgacacagagggcctgtaagacattctat

SEQ ID NO: 35755 - DNA, 242 bp, Glycine max
  Clone ID: 700889341H1
ctctctcttcgcttattgttgcaccttcctcgtaaaagataactcccggtcggcgtgtctagccgccgattgaggcaaaagaaaaacacaaaacacactgtagctcatcacagcaaaagggggggtaacgatgacgagcttttgacattccaaatttgcgcccttcttcccggtgtatatccttgttacaggacttaatgataatttctattattgtttcggtgaggttagctccatgccta

SEQ ID NO: 35756 - DNA, 241 bp, Glycine max
  Clone ID: 700889342H1
gtcaacaccaaaaatatctgctactctttgctctgctctgcttagggttccaacttcaaacccaacagcacttatcgttctcatgcaacaagggaaaatgaggcctattttctgtggaaattttgaatatgatgcccggcagtcagagctggagcggctttttagacgatatgggaaggttgatagggtggatatgaagtctggatttgcttttatctatatggcagacgagagagatgct

SEQ ID NO: 35757 - DNA, 241 bp, Glycine max
  Clone ID: 700889343H1
ctcgagcgattcggctgagggattaacgagattcccactagccctggtcgcggggacaggagatcagagacccaggcacgggcttggcggaatcagcggggaaagaagaccctgttgagcttgactctagtccgactttgtgaaatgacttgagaggtgtaggataagtgggagctggaaacagcgaaagtgaaatactacaacttttaacgttattttacttattccgtgaatcggaagc

SEQ ID NO: 35758 - DNA, 245 bp, Glycine max
  Clone ID: 700889345H1
aagatgatctagaattagggcaattacgtttactagaagtggacaatagagtggtagtgccagctaaaactcatctgcgtgttattataacatcagctgatgtacttcatagttgggcagtaccttccctgggtgtcaaatgtgatgctgtgcctggtcgtttgaatcagatctctacttttatacaaagagaaggggtttactatggtcaatgcagtgagatttgtggaactaaccatgccttt

SEQ ID NO: 35759 - DNA, 252 bp, Glycine max
  Clone ID: 700889348H1
agcgcggaactcggcgcgcgcataaagtgcgagagcggggaagcgtctagctagcgagtcgtccctactatctaatactacgggccatcgctgtagccatggggtctatcagagttgcgagggttatgacccaaactctgaactcgatgttcaagtttcttcagagtaaagagcgcatgcagattcggatttctaagcacacggatttgaggagtgacggcgtacgcatcgatgctgacgaatacatgaacg

SEQ ID NO: 35760 - DNA, 236 bp, Glycine max
  Clone ID: 700889349H1
ctcgtcttcaatcctttcgttattctcttattcatccttctcttctgaataatccagatctctttctgaccttttctccgtcacgcttttcgtgaccggatctgtatggatttgatccagatctacacgccgatggtggttttggccgggtctttcatagatctggtgcgtagaggctcagatctacggtatcgcggtacaacagagaatcgatgcaaataacgcagatccgacgg

SEQ ID NO: 35761 - DNA, 235 bp, Glycine max
  Clone ID: 700889350H1
agttcgctcacctatcccctggctagatgccccactattttcagatgggcaaccaaggcctgtcagtagcacaaccatcacttcttcgatatcaggtggcaacaacactgcctcaaggagccagactttccgccctaattctcagttcatgggcttgcaccacccaagaccaatgcctgccatgggagccacccatagcttcataaataggatgtaccccaacaaattctatggt

SEQ ID NO: 35762 - DNA, 233 bp, Glycine max
  Clone ID: 700889351H1
gaaattgtgtctgagatgagaaacaatacagaggagagggcagctgaaccttcaaatggtgcagttgattgtgaagctgaacttccaaatggtgcagtggagagtgaagctgaaccttcaactagtgctgtcgagagtgaagctgagccttcaaatggtgtagttgagagggatactaaagcttcacgtggtgcaggtgagagggaaactgaaccttcaaatggtgcagtgga

SEQ ID NO: 35763 - DNA, 232 bp, Glycine max
  Clone ID: 700889352H1
ctcgagcggataacctctgtcaacacctgtctgtggcgcgcgagagagaaatcggagatgtcatcaaaccctaacgatcctcgtcagccctcggcggcgagaccctacgtggcgccgcagatttcgccgcaggaccttccgatcgactacgccggcttcatcgccgtcatatgtggcgtcgccggcgtcatgtttcagtaccaactgagctcttggctggcgctcatattct

SEQ ID NO: 35764 - DNA, 235 bp, Glycine max
  Clone ID: 700889353H1
gcaaggtcttggccagaagtttagacaagcagctggaactggtattgatttttcagtgtttgaggagtctgagttattgacagtgggtgacatgaatgtctaccctctagcagtaaaggcagatgcatcagtgaaggcagatgctccccctggtaattatgacgagtcagatagatctccaacctctggtaacacaaactctcagattacgcaagtggtgtttgagaaggagaaa

SEQ ID NO: 35765 - DNA, 235 bp, Glycine max
  Clone ID: 700889354H1
ggccctgatgatgtttacattaaagttcactactgtggaatttgccattctgatctccaccagattaaaaatgatcttggcatgtccaactatcccatggtcccaggacatgaagtggttggtgaggtactggaggtgggatcaaacgttagcaggttcagagtgggagagttggtgggagttggactcctcgtaggttgctgcaaaaactgccagccatgccaacaagacattg

SEQ ID NO: 35766 - DNA, 238 bp, Glycine max
  Clone ID: 700889355H1
aaaactcaaacacaactcaccaacacagttgttgcattatttcttttttccagatccaacttcaaaattgcaatgggagtggaagatacagatatttgtatcatcaaggagctagatcatgttgtagtctattcagatggcatttctcatgattcgggtcatgaagctggaagtggtcatcacaatattacagagtcgtatgaacaaatcaatgagactactgaacatcatagttcag

SEQ ID NO: 35767 - DNA, 236 bp, Glycine max
  Clone ID: 700889357H1
ctcactcatctcttacaacgaaaccctcttcatcttgttctatctgtgacgagcatcatggcctcaagagcagtgttattgttggctatgtgtgtgcttccggcgatggttgtggccattcgcccagcaaagaaccctttttgcgtgaagggtcgtgtctactgtgacccttgccgtgctggttttgagacctcagctaccacctacattgctggtgctgagattatgttgcaatg

SEQ ID NO: 35768 - DNA, 240 bp, Glycine max
  Clone ID: 700889358H1
gcttcagcatcttattcctttaccattactgtgttattcctcctttatttgcacttgtcatgtttcataaataaccttaatgcaaatcataccaatgccagcggtcacaaccatcacaaacaccaacacactcagaatccacccttaaactcaaggcttgacatggcttttcttgggctacaagcatggaagcaagtgatctactcagacccaaataacttcacttccaactgggtaggt

SEQ ID NO: 35769 - DNA, 241 bp, Glycine max
  Clone ID: 700889359H1
tgcatctgcgacgggattgggagcgcggagtttctaaaccacttcgccgagttagccaacgagaaacgcgagttgttattattagctcagaggcccaaacataaacctatttgggagcgtcaccttctgaagccaacgcgtgggaagcagacgcgggtagactcggagagtcaccccgagttcaaccgagtcccggatttatgcaacttcatgaacaaagtctcgacggggcttaaaccga

SEQ ID NO: 35770 - DNA, 247 bp, Glycine max
  Clone ID: 700889360H1
ctccaagttgcatacagatgaggaatatcattctaagtgcatttccacgtagtatgaggctgccagatccatctactcctaatctgaagattgatttgcttcaagaaataacccaatcgcctcgcattctttcggaggttgatgcagcactcaaagcaaagcagatgaaggttgatgtagatgaataccttaagacaaggcaacagagttcgccgtttttatctgaactgaaggataagctgcttct

SEQ ID NO: 35771 - DNA, 248 bp, Glycine max
  Clone ID: 700889361H1
cttgttggtattggagtctatggctaaatatggtgtgaagacattaatatattctagtacgtgtgcaacatatggggaaccggaaaagatgcctattatagaaacaacagaacagaaaccaattaatccatacggaaaagccaagaagatggcagaagatatcatccttgatttttccaaaaattctaagatggcagtaatgattctgagatacttcaatgtgattggatcagacccagagggcagat

SEQ ID NO: 35772 - DNA, 250 bp, Glycine max
  Clone ID: 700889362H1
gggtgaagagcactgtgagagtgccggcgattagttcaaaagtcgccgatattccaccggacgagtactcctggaggaagtacggtcagaaaccgatcaagggttccccatacccaaggtgagtgatatttaattttgaccgttgatttagttgacttttatctcatcaagactcgttccctgacgtcgattttttttatcatcaggggttactacaagtgcagcacgattagagggtgcccagcgagga

SEQ ID NO: 35773 - DNA, 251 bp, Glycine max
  Clone ID: 700889363H1
ctcaaggcaagaatgccaggcctaaaggcatgatcacatgtggcatgactttcataattataggaaccgaggtggctccatggtgcaaaactggtgggttgggagatgttcttggaggtctaccaccggcattggcaggttttgggcatcgagtaatgactattgtgccgcgctatgaccagtacaaagatgcatgggatacaagtgttgtaattgaggtgaaagtaggagatagaacagaaaaggttcgc

SEQ ID NO: 35774 - DNA, 251 bp, Glycine max
  Clone ID: 700889364H1
ctttctctctctctctccatatttgttctatcttctttctcgctctctctctagaatcctctgtgagaacgcgcacagcaatggctgctgaggttagctctctgattcgggtgatgggtggtggctacaaggaggagcagcatcggacggtggggaatgaatcacacggtgagaaatcaacggctctgattactcgggacttgcttggtgggtcctcctcaattgaatcccaggaattggacctcgatttg

SEQ ID NO: 35775 - DNA, 239 bp, Glycine max
  Clone ID: 700889365H1
atggaagctggccgtcctgttgctctggagaattggcgcctctgccccaccaatggttgctgcagaggctccaattctccagcagtattcaccatacatggactctggcctgactataatgatggaagctggccgtcctgttgctctggatctagacttgatccaaaagagatatcaacattgactaatgctttagagcaatattggccatcattgagctgtagcaagccatcattatg

SEQ ID NO: 35776 - DNA, 237 bp, Glycine max
  Clone ID: 700889366H1
cctaaagcacatagatgagagaaacaaggtggtcagcaactactggcttggcttgaatgagtttgctgatttgagccaccaagagttcaagaacaaatatctggggcttaaggtggactactctagaaggagagagtcccctgaagaattcacttacaaagatgttgaattgccaaagtcagtggattggagaaagaaaggtgctgtaacccaagtcaagaaccaaggttcatgtgg

SEQ ID NO: 35777 - DNA, 233 bp, Glycine max
  Clone ID: 700889336H1
cgcttttacgttggtttattcggtttgtgttgctctgttatgctgctcctccctgtttgatttcaaggtatttgcccgaatcttctttctcgaagggtaaaggataaagggatgatctacacagcaattgacacgttctacctcacagatgagcagctagcaaactcaccttctagaaaagatggcatagatgaagccactgagaccacccttagaatctatggttgtgatct

SEQ ID NO: 35778 - DNA, 232 bp, Glycine max
  Clone ID: 700889304H1
ctcgagcgcaccgcttcttctccgacgccgatgctgacgtcagcaccgaggaggccgaggccgcctcctggctgcttcctaatccgaagacagatctaaattcctctcagtacttgttctccgaaaccgagccggttccttacatagatctggattatgctgccgtggatcctaaggcggagagaaaagctccgccaccgccgacgggtcgttcccgtgcagagcaacgtcg

SEQ ID NO: 35779 - DNA, 236 bp, Glycine max
  Clone ID: 700889305H1
ttggagtgcaggcatataggccgagtttggctggaatggattggcttatatttgaaatatcagcccaccagcattgatctatccctccaatctcggctttgcaaggatgcgtcctgcatcttccaccagtccgtgactgtgtccctagtcgacatttgaatttggtgaggagcttttagagcacatagactgttgatcatgaagagtaaattgaggacctcttcagaggaaatgga

SEQ ID NO: 35780 - DNA, 238 bp, Glycine max
  Clone ID: 700889306H1
gctgctccagcctctgtctgtggttggtcttatcttttgctgaaacttgaaattgaatctctctcaagcttcctttcttaaaaggttaggaatttgaagcagaagtaagaactaggaagagatgggagtggatttgagacaagtggtggcaggtgtcctcaccctcacaatgtttgtcatgcttggaaatatgatcaaaagagaccacttcgataattcacttcaagaaaagcgtcca

SEQ ID NO: 35781 - DNA, 243 bp, Glycine max
  Clone ID: 700889309H1
gagagagttcacttctctcactctaaaagtctaaatcaccttgttttcaactgtctctctctccttttctagtcgagtacttttctttcacttttcacttagctgataggtttcaacttgcaccatcttttcattagcattctgtatcagtcctcatcccactgtatgcattgctagctctcatattaccccaactccttgattttctttttgtttgagtcgtagaagatgttacttagaagc

SEQ ID NO: 35782 - DNA, 241 bp, Glycine max
  Clone ID: 700889310H1
ctcagcatcattctgccgtcgacgaagctgaaacttgtttcttcttttccttgcgcgaaccttttctactaaccccaatcgcttctctcccactccaattccccattcctcatctacataaccctaaccccacactctcacacaccaccaccaacatcatatattacatcgattctcaatcaaatcccaaacgttttgaaaccaccgtcacgatgatgctcagaattcgtagccgcgacgg

SEQ ID NO: 35783 - DNA, 244 bp, Glycine max
  Clone ID: 700889311H1
gtgggtttttgagtctacattcaaaagaggacaaataaatgctgttgaaggcatggaaactttgccaaaaggagttgacatttgttgcatctgccaccacaagcatggtgtatgcatgacgtgttgctatggccattgtcagaccacattccatccatcctgtgctagaagtgctggtttgtacatgactgtgaggactactggtggcaaggctcaacacaaagcttactgtgaaaaacatagt

SEQ ID NO: 35784 - DNA, 235 bp, Glycine max
  Clone ID: 700889313H1
cccccaatcgttcctgattcgacgtcgttttcgaaaccctcccgcccgagcggaagctggtcgtcaacgagagaccctccaagaggatgaagagaagggtcacagctgatcttcgtgattttcgtacttttcccgaacctggcgtcactgcctccggctaacccttccggaactatgtacagcggttcctctctgaccatgcgcgactcagtttccctacctcactctttctcgt

SEQ ID NO: 35785 - DNA, 248 bp, Glycine max
  Clone ID: 700889314H1
ccaatcatctttagttcttcagtaatttattgtgggattctattctaagattttgagaatgtctagctgtgggtgtggaagcagctgcaactgtggcagcaactgcggttacaacaagtactcttttgacttgagttacgttgagaagacaaccacagagactctagttttgggtgttgggcctgtgaaggccaattggagggtgctgaaatgggtgttgcatctgagaacggtggctgcaactgtgg

SEQ ID NO: 35786 - DNA, 251 bp, Glycine max
  Clone ID: 700889315H1
ggaaaggagatcagtgatgctgatatcctgaaatgggtgaacagaaaagtgaagatcattggtagaacttctcacatagagagcttcaaggagaagagcttgtcaagtggactctttttccttgagcttctgagtgctgttgagcctatggttgtcaattggaaccttgtcaccaagggtgaaagtgatgatgagaagaggttgaatgccacttatataatcagcgttgcacggaagctcggttgttctat

SEQ ID NO: 35787 - DNA, 254 bp, Glycine max
  Clone ID: 700889316H1
ctcttcaaaccctaaatcgtggcctcggaaatcaaccaaagtgatcgaacttcaaaatcctaaaagccatggcccaatcccatggatccatcctcactcgatcagtgtggtcctccaatctggaatcggagttcgacttaatccgatctgtcatcgactccgtccctctcatctcgatggacaccgagttccccggcgtcgtcgtacgccccgatgcttgcgacccctccttaccgccatcgccaacccgccgc

SEQ ID NO: 35788 - DNA, 243 bp, Glycine max
  Clone ID: 700889317H1
agctaatagagtagctgttgaaagctgtcatagggttctgagtttgttgtctcaaccaagggatcaggttcagcataggaatttaatggtggaaactggggaagctgtggtgaggttcaagaaagttgtttccttgcttcacagtggtatgggtcatgcaagagtgaggaaggttaaaaaccctcaaatccccttttcccaccaaagcatcttcttagacaaccccaattgcaaaaccatcaa

SEQ ID NO: 35789 - DNA, 241 bp, Glycine max
  Clone ID: 700889318H1
atcaccaaaccccatttccattaatctaattcaattgtgttttactaccaaatctccgttgcttccttactctccagcgcctactcatatcacagatcatggataattcatagtactactatttcgtacaagtattcacgaaccattccattccaatttccattcagcagcaaccacatcaccatcttcttttgcatcattagttttttagttagattaccctcttccgtttcaccttcct

SEQ ID NO: 35790 - DNA, 235 bp, Glycine max
  Clone ID: 700889319H1
gacaaatcaagggttcgtaagttggaggagctacaagaaactataagagccactgaagatgcaaagaatgttgcaattagagaatatgagcggatcaaggaaaacaataggagtgaacttgaaaggcttgataaagagaggcaggctgacttcttaaacatgttgaaaggatttgtagttaatcaggtggggtatgctgagaaaatagcaaacgtctggacaaaagttgttgaag

SEQ ID NO: 35791 - DNA, 234 bp, Glycine max
  Clone ID: 700889320H1
cgaatatcttgttgtttggagcgatccgagaaaaactctgtaaacatgttggtttaccaggacctccttacaggtgatgagcttctctctgactccttccgttacaaggaaattgagaatggaatgctgtgggaagttgaggggaagtgggttgttaaaggagcagttgatgtagacattggtgcaaacccttctgctgagggtggaggagaagatgagggagttgatgatgca

SEQ ID NO: 35792 - DNA, 237 bp, Glycine max
  Clone ID: 700889321H1
gattttcgccaaagcaacaggttgcaggaaacaatggatcggttggctgcaaagttagaatcaatttataatgctgcaggagggaagagaataaacattataactcattctatgggcggtcttttggtgaaatgtttcatgtgcctgcaaagcgatatttttgagaaatatgttaagaattgggttgcaatttgtgcgccattccagggtgcaccaggaaccatcaattctaccttt

SEQ ID NO: 35793 - DNA, 238 bp, Glycine max
  Clone ID: 700889322H1
cggctcgagcggttcgagaagcaatttgcagctggcctaagagctttgaagctcgtaggagttgaaggtgttgagctccctatttggtggggaattgttgagaaagatgccatgggacaatatgactggtcaggctatcttgttattgctgagatggtccagaaagtgggtctcaagcttcatgtgtctctttgctttcatgggtctaagaaaccaaatatccccctacctaaatggg

SEQ ID NO: 35794 - DNA, 237 bp, Glycine max
  Clone ID: 700889323H1
ctatctttttcatgacacgaatgcgataaacagtgttgaaggatctgtgcgtgagttcttggtgaaacaaaggaatcgtagatccgtttgtttgtgtagttttttttttttggtcagagaagagaagcgatggggttgtgggaatcttttctcaattggcttcgcagcctctttttcaagcaggaaatggaattatcccaacttggacttcaaaatgctgggaagacttcacttgta

SEQ ID NO: 35795 - DNA, 239 bp, Glycine max
  Clone ID: 700889324H1
gagaaggagacccagttcagagaatgctatttgtagtaaggggtcatcttgcaagcagccaagtcctaagggatggtgtgaagagttgttgcatgttaggtccaggaaacttcagtggggacgagctcctttcgtggtgtttgaggaggcctttcatagaacgccttccgccgtcttcatccacactcatcacgttggaaaccaccgaggcgttcggccgtgaagcccaggacgtgaag

SEQ ID NO: 35796 - DNA, 239 bp, Glycine max
  Clone ID: 700889325H1
ggaaagacggaaacagttctacatgaagctggaagaaaaaatgtatgcaaaggaagcagagattaatcaaatgcaagcaatgtcacaggaaaagacagaagctgatattaaaaaactccggaagagtctcacactttaaagcaacaccaatgccttcattttactgcacaccttcaccgtcacaaccacatgggaataagtttcaacctcaggctgtgtcaaataacaccagaagtaag

SEQ ID NO: 35797 - DNA, 243 bp, Glycine max
  Clone ID: 700889326H1
gaaggtgtgtttcgacgcgcctaggcttgcggtgcggtgtgtgaaagcctcggcgcagcgaaccggtgatactatcgacgatggagagactcggactgggttcaccacacctgccatggaagtcaccacattcaatcgaaccactttcaccgatgctgctgactttcccgtttgggaaaagattggtgctgtcgtcagactcagttatggcctcgggatttatggtgccatggcagttgcggg

SEQ ID NO: 35798 - DNA, 244 bp, Glycine max
  Clone ID: 700889327H1
gaaacatttcactaatagagagacataagcataatattgagaaataatggagggttgtacttattgtgtgaagttgctatgccttgttgggtttgtggtgcttgtgagtactattgcaggggtggagagtgctggtgaatgtgggaaatctaccaccccagataatgaggcttataagcttgcaccatgtgcctcagcagcacgagatgagaatgctagtgtttctcagagttgctgtgctcag

SEQ ID NO: 35799 - DNA, 247 bp, Glycine max
  Clone ID: 700889328H1
gccaaacccaggcttcttgagcctgtctacctggttgaaatacaggctcctgaacaagctcttggtggaatctacagtgttcttaaccagaagcgtggacacgtgttcgaggaaatgcagaggccaggtaccccactatacaacatcaaggcatacctccctgtcatcgagtcctttggtttctcgagcacattgagggctgcaacatcaggccaggccttcccacaatgtgtgtttgatcactggg

SEQ ID NO: 35800 - DNA, 253 bp, Glycine max
  Clone ID: 700889331H1
gtcattcaacacctcactcactgattctcagaacacaaaagatggtgatgatgatgaagaaacaccttctcttctcactttcacttctcctaatggttctcttcacttcagctcaaaccaccccagcaccatcaccttcctcagccccaacagacatcatcagaatcctcaaaaaagccggaggattcaccacccttatccgtctcctcaccacaacacaagtctcaacccaaatcaacgcccagcttttgaa

SEQ ID NO: 35801 - DNA, 202 bp, Glycine max
  Clone ID: 700889333H1
tatatatccctatatgtataggactgcctctttaatgaagacagggaatgttcaaggtgcactggctgaaatcaaccggattcttggctttaaactttcgttagagtgcttggaattacggttttgtatctatctggcccttgaggactacaaagcagcagtccgagatgttcaagcaattcttaccctgtgtccatcttat

SEQ ID NO: 35802 - DNA, 236 bp, Glycine max
  Clone ID: 700889334H1
ggaaaagaaaacacaacacacacacaaaggataaaacagaaaaaccatgtcttctccaagcaagcggcgagagatggacttgatgaaactgatgatgagtgactacaaggtggagatgattaatgatggaatgcaagagttttatgtgcatttccatggacccaatgagagtccttatcatggaggtgtgtggaaagtgagggttgagctgccagatgcttatccttataaatctc

SEQ ID NO: 35803 - DNA, 236 bp, Glycine max
  Clone ID: 700889335H1
gattggatgagtgtaattgagaaagaagactggaaaagtgttacggatttggttacaaatgcaaagcagtttgtgtcttcagtgcaagatgtagctcgcagacttgctgattatgcaaatttcaggagaaacaaaagtttagctgttggtactgctgataaggagttgccagttgccactgaagctcctctgccctccaaagctgcacaggagaattcaggtgtcacgaaagttga

SEQ ID NO: 35804 - DNA, 239 bp, Glycine max
  Clone ID: 700889302H1
ctttgattgattgtattacagtgtcattttccttcataaccgatttctattttatgattgtgcgcaacagttcgcagactcacaatggccgcaatatccaactccttatcactgaagcacagtttctctctgagtcgagctcctccttcttcctcttccatcaaattcaaattcagaagatgttacgccgcgttcgccaatgagaatcgcgagtacgtgatcgttggcggcggacatgc

SEQ ID NO: 35805 - DNA, 239 bp, Glycine max
  Clone ID: 700889267H1
gtgccatgaagccctgataattgccagagcgacgagaaactatttgcagcaattagcatatgggtgaagaagcatctgactgaagtgtgaagtttgagtgtatatatattgtgccatgccgatcaatatacatccaagaaatgggtttttgaagcctgctgaggacatgggatttggtttggagttcagaaagagcagcacaaaacagcatagcagttcaaagacagtgaaagacagtt

SEQ ID NO: 35806 - DNA, 241 bp, Glycine max
  Clone ID: 700889268H1
gcagtcgagcctcccgaagaaaaagcgaaaatgccgtcgcacaagacattcagaatcaagaaacagttggcgaagaagatgaggcagaacaggcccatcccctactggatccgcatgaggaccgacaacaccatcaggtacaacgcgaagcccgtcactggcgtcgcaccaagcttggattctgaggtgcttgctttgcctcgattcagtttatccaattaattagtgttttattttcttg

SEQ ID NO: 35807 - DNA, 238 bp, Glycine max
  Clone ID: 700889269H1
aatatcactgtccctttccctctccctttcatcagaaacacaaacaaaacaccgattcgctatattaccagatcggactcaattcctgaaccgatgaagttgaagccgcagtgaaccaaaccatcatcatcgcgttaccggaataatcgacccatcatcaattagatcgtcatgaaggatgaggacgggcttccgacgacgaccgcggttacaaagaaggaaaacttggattcgagtc

SEQ ID NO: 35808 - DNA, 237 bp, Glycine max
  Clone ID: 700889270H1
ccctcggtgaggtcactgacccaatctacccaggtggcagcttcgacccattgggccttgctgatgacccagaggcttttgctgagcttaaggtgaaggaactcaagaacggacgattggccatgttctctatgtgtggcttctttgttcaggccattgtcaccggaaagggtccattggagaacctcgccgatcaccttgctgaccctgtcaacaacaacgcctgggcctatgcca

SEQ ID NO: 35809 - DNA, 234 bp, Glycine max
  Clone ID: 700889271H1
aaagacggcgtcttcataaacgcctttcttctccgtttccgtttcctcgttcgaattcgctttttgatctgcgaaaatgagagagtgcatctcgatccacattggtcaggctggtatccaggtcggaaatgcttgctgggagctctactgcctcgagcacggcatcgggcccgatgggcaaatgccaagtgacaagacagttggcggtggtgatgatgctttcaatactttctt

SEQ ID NO: 35810 - DNA, 238 bp, Glycine max
  Clone ID: 700889272H1
ctttactcgtcatattaccaatattgacatttgcattccacaaattctgccagagacgttttgagccagcatttaggaagtaccctcttgaggaagcaatgtcaaaggatttattagagaagagcacagaacctgacttgaacatagaggcttatttggctgatgcttacttgcacccaatcttcaggtcatttgaggtagacgacgaattggttgaagtcagagtagataatcacca

SEQ ID NO: 35811 - DNA, 237 bp, Glycine max
  Clone ID: 700889273H1
caattttctagggtttatacaattttcgatggcttcttcagatgttgagtaccgttgctttgtcggtgggctcgcttgggccactgacgaccaagctctcgagagagccttctctcagtacggcgaaatcgttgaaacgaaggtctgtttgttgcaggcatcacatctgatctcacacgattcggattcggaattttctcgatccctttctgatctgtgatctctgatctgtttgcg

SEQ ID NO: 35812 - DNA, 236 bp, Glycine max
  Clone ID: 700889274H1
atcaaagaaaggggcatgaacaacaggcttgcagatcgtattaagaatttcttaaatcgattggttgaagaacatggaagcattgaccttgaatggcttagagacgttccacctgacaaagcaaacgaatacttgctcagcataagaggattgggactaaaaagtgtggaatgtgtgcggcttttaacactgcaccatcttgccttcccggtagaccaaaatgtcggacgtatagc

SEQ ID NO: 35813 - DNA, 238 bp, Glycine max
  Clone ID: 700889275H1
ctcgagccgcaaattccaagcacaagttctctgagttgttttgtgagatagcacatagcatagcaaggcaggagtattacaaccgaaaccctgaagaaaaaaagagtagaggaagaaaaaacacctgcaccaccaacgatgggtgtggattactacaagatcttgcaggttgataggagcgccaaagacgacgacttgaagaaggcttataggaaacttgctatgaaatggcaccctg

SEQ ID NO: 35814 - DNA, 238 bp, Glycine max
  Clone ID: 700889276H1
tagcataacatgttggatgttccacatatgtattgatgtctgttggatatcatggcaaggtaagtccagaggagaagcttataccagccatgttccaacccttcattttgcaatcagggaggggcataaacgtccaccggttccacctggtatcaaaagcgagccacgtcatgtcccaaactccctcacaattagaaaccaacgcagccctaacgacaccgtttttctcctctaagca

SEQ ID NO: 35815 - DNA, 237 bp, Glycine max
  Clone ID: 700889277H1
ggccgcctcagcgatggtgttggatccgccgcccttcctcccgtcgacaaagtccgcctacctccaaggcggcgacgcacggccttcgatgaggaagatctctacagccgcctcaaatccctagtgcgtcactcgagttcgtcgacatccaggaggagtatgtgaaggacgaactgaagaatctcaggcgcgagctcctccgcgcgatggaggaggtgaagcggatccagtcggtgc

SEQ ID NO: 35816 - DNA, 215 bp, Glycine max
  Clone ID: 700889279H1
cttattgcgaaccagttgagcaggccaattcaagccattctttatcagcaggactggctcacagtgttggtctcaggaaacagccattgagggtgtacagcatagtgaaatccgcagcaatagctcgtcgggacgctgaggttctcatgaagtttgcaagggccggttaccaggagatactatgggatcatgctgcaggcgtgatcatcatacaa

SEQ ID NO: 35817 - DNA, 245 bp, Glycine max
  Clone ID: 700889280H1
agtaaacgtaggagtatgcctaaatatgtagtgaaagatatgaagccgaggacaagctgtttttgtcttttgtgggatacgaacgttgactaccacgcccgatttgaggtgctggagaagaagggataaagtgtatggtatgggggcgtggtgaccgagggcacgaaaggaggaaactattggctacagaaagtcgtttctttagccgggtttctatcaaaaaatggtgcagagtctctgtttga

SEQ ID NO: 35818 - DNA, 244 bp, Glycine max
  Clone ID: 700889281H1
ggtaaaaaagaaatggatactctgattactctaagctttcgattccgagattgggaaacattaagaaagaatagacttgtatcatacgttgggtgtgtgccatagttagctagagtgaaattctttttgaataattagcacagagggagggttttgattatatgattttctatgtacaaggtaaattgataatgagctctgattcaaaccacttagtttcatttgcccctagttgagactactt

SEQ ID NO: 35819 - DNA, 242 bp, Glycine max
  Clone ID: 700889282H1
aagagagtgaaagagaatatctgagactctgattctgagagtcgagacgagtgagtgagtgctgcttcttcttctgaatcaaatcattcatcactctctggttctgatttttctgacaccaaaatggtgaatcctcgaattccacgttcaaggatcccaactttcacacttttcacttctgctatctccatcgttctgtgcattttcttcgttctctctttactcttcactgcccattctta

SEQ ID NO: 35820 - DNA, 236 bp, Glycine max
  Clone ID: 700889285H1
catgtatatagctggcctggccgcgaactgagacaaacaatggaccttggtgattcagggcttatacccttagagataaggtttttgcatgatcctgctaaagatacaggttttgtcggcagtgcattgacaagtaacatgatacgattttttaagacccaagatgaatcatggagccatgaggttgccatatcagtgaaaccattgaaagtgcaaaactggattcttcctgaaat

SEQ ID NO: 35821 - DNA, 237 bp, Glycine max
  Clone ID: 700889286H1
gtttgctttgtcattggatccgatgacagccatgtccttccatgacgaaaccctgccagcagatggtgcaaaagtggctcatttctgctcaatacgtggccctaaattctgctctatgaagataacggaggatgtgaggaagtatgctgaggaacatggctatggaactgatgaagctttgcagcgtgggatggatgctatgagtgctgaatttcaagctgccaagaaaactatcag

SEQ ID NO: 35822 - DNA, 235 bp, Glycine max
  Clone ID: 700889287H1
cctctctctatctctcacacacactttctccctctctctctctcacccagatcttgtagcaatggcgagcgctcccactccacgcgaagagttcgtgtacatggcgaactggcggagaggccgagcgctacgaggagatggtggagttcatggagaaggtctccgcctccgccgagagcgaggagctgaccgtggaggagcgtaacctcctctccgtcgcctacaagaacgtgat

SEQ ID NO: 35823 - DNA, 238 bp, Glycine max
  Clone ID: 700889288H1
gcgctctctctctctgtctcctacgattcgttttgccccttttgttgccctaatttcaaccatgcctcgccgtagctccggtggaagatctgcccgtcctgctcctcgggcagctcctcgtcctgctccagttcaccatgctcctcctccagcccctgctcagagtggtggtggatctatgcttggtggcattggttcaaccatagctcaaggtatggcttttggcaccggaagtgca

SEQ ID NO: 35824 - DNA, 235 bp, Glycine max
  Clone ID: 700889289H1
atctcaaaggtatatcctgccatgttcgtagacagtgttactgagcttgcatttgatgatatcacccctgaggaccctgatttttctttcattcaaggcctggcagaagctggacttatcgaaagcaggctttcaagatgttatgatagaccgtggtccacaaatgaagcctatggcccatttaacttctccccggaaagccctttatcacgtcaggatcgtgacacttggaaga

SEQ ID NO: 35825 - DNA, 219 bp, Glycine max
  Clone ID: 700889290H1
gttagccccaaacacccacacgggcacacccctgcaggtacaaaagggggagttcacaacaaaaagataacaatgagaaaaccttgttgtgacaaggaaaacatcaataaaggtgcctggtccaagcaagaagaccaaaagctcattgactacatccaagtccatggtgaaggctgttggcgttccattcctaaaactgctgggctgcatcgttgtggc

SEQ ID NO: 35826 - DNA, 239 bp, Glycine max
  Clone ID: 700889291H1
acaaaccctcccctcacactctccaaaccctagcggcactacacacgttatctctctctctctctctctctctccctctctccttccccaagatgtcgagcgccgatcccgagcaccgagaagaggaggaggcacccgccgtcggcgacgacgaggacaccggagcacacgtcgctcccatcgtcaagctcgaggaggttgctgtcaccaccggcgaggaggacgaagatgcaatccta

SEQ ID NO: 35827 - DNA, 236 bp, Glycine max
  Clone ID: 700889292H1
cttttgtacccactaacgtccccctctcgaaccttggcagcacgtagcaatccgcaggatctggtccggccctcgtgcgtgtccgcgcggtacccgcgtctgtgcctgcgcaccctctcgaactacccgggtcccgcctacacgccgttagacgtggccagggcagctttcagggtaagcctggcccacacgcgccgggcctccaaattcctccatgcactttctcatggaggcgc

SEQ ID NO: 35828 - DNA, 244 bp, Glycine max
  Clone ID: 700889295H1
ggaggagcataagggtgagcaccatgctggagaatacaaaggggagcaccatggtgaacacagtagtgagtacaaaggagagcatcatggtgaacacaaagctggagagtaccatggtgagcacaagccagagcacaaagaggggttcctagacaaagtcaaggacaagatccatggtgagggcggcgccgccgagggcgagacgaagaagaaggagaagaagaagaaggaccatggccatgag

SEQ ID NO: 35829 - DNA, 73 bp, Glycine max
  Clone ID: 700889296H1
gccgatccagccggtctaacagcgttgagtacttctggaagaatttatgatgccaaaattattgtttaatatt

SEQ ID NO: 35830 - DNA, 244 bp, Glycine max
  Clone ID: 700889301H1
ataacactcatcgtacttatacttttcacttttatctctatctatccattccattttctaattctgaaatttgttgatccagggtgttttcactggccgttttgggacaaacctaaaccatggtgttgaagcagttgggtatggaacagaaaacggcactgattactggctagtgaggaactcatggggctcagcatggggggagaatggttacatcaagctagagagaaatgtgcaaaatact

SEQ ID NO: 35831 - DNA, 244 bp, Glycine max
  Clone ID: 700889266H1
cgaggcgacaacatcgacatggagggtctcatcaacggcttcatcaacgttgctctcggagctgatggtggcgatcgggaagaacaacaacacgggagagacgaccgtagtagaagctcctgggctgaagtcgtctcccaggtccaacaagatcaccctcttcctcatcaccaacacaaggaacaatatcgtcctcagtacgaggagccccaatctcaaagttcctacaaaccccagaaggtgg

SEQ ID NO: 35832 - DNA, 244 bp, Glycine max
  Clone ID: 700889234H1
gggcattgttccaaggaatccacatcccccagaagaagagtttcgttatgattcttcagtttctgttgatgctgggggagctggacgacaaacgccaagtcttcagttccctcgaacaaaagaagttgtagtcaatggcattgctgtaaaggtgaaatattgtgagacttgtatgttgtatcgtcctcctcgttgctcgcattgctccatttgcaacaactgtgttgagcgttttgatcaccat

SEQ ID NO: 35833 - DNA, 242 bp, Glycine max
  Clone ID: 700889236H1
agctcttcctcgagaagttgatccagtggtttacaatatgttgcatgaagatcctggtaatatcagctattcagctgttggtggcttatctgatcagatcagggaattgagggagtcaattgaactacctctgatgaatcctgagctctttcttcgagttggaattaaacctccaaagggtgttctcctttacgggcctcctggtactggtaaaacattgttagccagggctattgccagta

SEQ ID NO: 35834 - DNA, 239 bp, Glycine max
  Clone ID: 700889237H1
gttttcttcatatcttccttgtcactgcccgtgtgtcgccgccatggccaccgtcaccacccaagcctccgccgcaattttccggccatgtacctcgaaatcgaggtttttgaccggctcttccggtaaacttaaccgggaagtgactatgcggccaatggggtgccctccttctgcctctttcaaggttgaagccaagaagggagagtggttacctggcttggcctccccaacttacc

SEQ ID NO: 35835 - DNA, 239 bp, Glycine max
  Clone ID: 700889238H1
gggtgatcaaaagcaatttgtacacattgacccgaatgatctgtatccctatcttcttgttaatattgggtctggtgttggcatgattaaggtggaaggagagggaaaatttgagcgagttagtggaacaagtataggcggaggcactttctggggtttaggaaagcttttaaccaagtgcaagagttttgatgagctgctggaattaagttatcgggggaacaatagagcggtagata

SEQ ID NO: 35836 - DNA, 239 bp, Glycine max
  Clone ID: 700889240H1
ctcgagccgcgagacagttatgcgagctcttggtgattacttgggagttaaggtccatgcttgtgttggtgggacaagtgttcgtgaggatcagcgcattctccaagctggtgtccatactgttgttggcactcctgggcgagtgtttgacatgctgcggaggcagtctcttcgcccagattgcataaagatgtttgttttggatgaggctgatgaaatgctttcacgtggtttcaagg

SEQ ID NO: 35837 - DNA, 241 bp, Glycine max
  unsure (1)..(241): unsure at all n locations
  Clone ID: 700889241H1
tgcctttcaagatccaaacctcttcccaatgaggaacctctctttcttcttcttcttcttcttcaccttcttcgccgccgtcagatctgatccctcagatcaccgctacaaagaaggcgaccccgtccctctctacgccaacaaagttggccccttccacaaccctagcgatccctancgttacttcgaccttcccttttgtgaaccaggtgatttgaaagagaagaaggaggcgctcggg

SEQ ID NO: 35838 - DNA, 236 bp, Glycine max
  Clone ID: 700889242H1
gttaaggttccggataaggcggagagtgttaaccaggtgtggcaggtggggccctcggttaccgcggggaggattgacaggcatgactttgctccccccaatataaatgccaagggcgtccttagcttcaacgggtcgcagagtggtggtggtggtggtggtgccgtcgaccccgttaccatgaagaaaaatattcatggaattctaaatactgtgagttggggagttctgtttcc

SEQ ID NO: 35839 - DNA, 239 bp, Glycine max
  Clone ID: 700889245H1
gagcccaagccaacatcaaactcaacaacttcactgaggctgttgctgatgctaacaaagcaattgaattgaattcttctctaccaaaagcatatttgcggaaaggtactgcgtgcatgaagcttgaggaatatgagactgctaaggctgctctagaggtgggtgcatcattgtctccagacaactcaaggtttgctactttgatcaaagaatgtgataagctcattgcagaagaatct

SEQ ID NO: 35840 - DNA, 242 bp, Glycine max
  Clone ID: 700889246H1
ggtttgatggtgccttgaacgttgatgttaatgaattccagaccaaccttgtgccataccccaggattcacttcatgctttcatcttatgctcccgtgatttcagctgagaaggctcaccatgagcagttatcagttggtgaaatcacaaacagcgcattcgagccatcatctatgatggccaagtgtgatcctcgtcatggaaaatacatggcttgctgtctcatgtaccggggtgatgtt

SEQ ID NO: 35841 - DNA, 242 bp, Glycine max
  Clone ID: 700889247H1
gattgtttgttgttgtaactcgttcttcttcttttgttgttctgtgtttgtgtttgttttatctctcacctgaaaatgtcttgctgcggtggtaactgtggttgcggaagctcctgcaagtgcggcaacggctgcggaggctgcaagatgtacccagacttgagctacactgagtcaaccaccaccgagaccttggtcatgggagtggcacctgttaaggctcaatttgagggtgctgaaat

SEQ ID NO: 35842 - DNA, 247 bp, Glycine max
  Clone ID: 700889248H1
tattaattggagttttctcgctcctttttctttccctgaaaacatttcatcttcgtattgatgtcggaaaagggtcggccacttcccaaatttggtgaatgggatgtcaatgatccagcctcagctgaggggttcacagtgatttttaataaggccagggatgagaaaaagacaggtggcaacccagagtcaccaggaaagactgctactgatcctcatagcaaacctgcagtagagcctggcaaaa

SEQ ID NO: 35843 - DNA, 233 bp, Glycine max
  Clone ID: 700889249H1
ctttgttcactcttcttctcttgcggctagggttttagcgcacgtcttctagatttaaggcagatgggtaaggaaaaggttcacatcagtattgtggtcattggccatgtcgactctgggaaatccactaacactggtccactggttttccaagctgggaggccttgaccagcgtgggattgagaaggttgagaaggaagctgctgagatgcaccagaggtctttcaagtatg

SEQ ID NO: 35844 - DNA, 243 bp, Glycine max
  Clone ID: 700889250H1
aaaaattactcgatttttatttctccaaaatgatcaattttataagattgaatcgactaaaaaatgaaatgaatcaattcatattgatagtattgctatgcttagtccccaaagaaccagatttcgtaaacaacatagaggcagactgaaaggaatatcctatcgagggaatcatatttgcttcggaagatatgctcttcaagcacttgagccagcttggataacatctagacaaatagaagc

SEQ ID NO: 35845 - DNA, 240 bp, Glycine max
  Clone ID: 700889251H1
cttcagagtttattaccattggttccagtggtgatgaacaccttttaaagacagatttcagtggtgctagagacactattgtcctcactttgagattattcatcctgaggaggctggggaggaaaggagggttaaggaggaggggttaatcctttaacaggtgaaggaatgtcccgactgctttgcgaaaatctctcgtgtgcgtgggatgtgcagaccaccgagatagggatttggagt

SEQ ID NO: 35846 - DNA, 239 bp, Glycine max
  Clone ID: 700889252H1
ctcgagccgcgtcccaagtatcgtttttccatatttgattactgcctcaactcaaccgtgtctgaagtcactccaatggcggatagggaaccaaagcctaaagactcgccttcagaaaaagatgtgaaaagtccaaacatttttgagcgagctaaggaggagattgaggcagtgtttcatcatgacaaatcgcctcaccatcacaaagaaactcatgggacaagtgatgacattgacga

SEQ ID NO: 35847 - DNA, 240 bp, Glycine max
  Clone ID: 700889253H1
gcgattgcgactctctcttcctacgataaccgtttcctctcgccggaaaaccgacattgatctctctctccggcgatccccgcccatccctccgccatgagttccggcgagctcctccacatacagccccaggagctgcagtttccctttgaattgaggaagcagatctcgtgctctttgcagttgtctaacaagactgacaactatgtggcttccaaggtcaagacaacaaatcctaag

SEQ ID NO: 35848 - DNA, 239 bp, Glycine max
  Clone ID: 700889254H1
caataacatagcatagagtgagaagtgagaagagaaaaatggcaatctccatacccagtagacaacttttcatagatggagagtggaaagtccctcttctcaacaatcggtttccgatcatcaaccccgctactgaagacatcatagggcatattccagcggttattaaggaaattgttaactttgcggggaatttgctaaaaaaagccttttcccataacaaaggcaaagattggtct

SEQ ID NO: 35849 - DNA, 238 bp, Glycine max
  Clone ID: 700889256H1
gaagcaattaatcatattcctctctcattctcactataaacacaaaacccttcccatcctaattaaggtgaaaatgaaggcatcacccattgcttggttcactttggtggttgtgtttcttgtggctgaagttcaagtttcaatggcagtgacatgcagcccagtgcagctgagtgcatgtgtaagtgcaataacctcttcaacccctccatcaaacctatgctgctccaagatcaaa

SEQ ID NO: 35850 - DNA, 237 bp, Glycine max
  Clone ID: 700889257H1
atcagggttttggttttttttcattatcttcctcagtaagcaatgtcttctcccgcggagttttatcactctcttccgccaataacgaaggcatatggcaccgtttgcctgttggctaccgcaacttaccatcttggattatatcatccagcttacattgcactattctacgataaagtgttctacggttttcaggtttggaggttgttcacaaacttatttttccttggaccattc

SEQ ID NO: 35851 - DNA, 238 bp, Glycine max
  Clone ID: 700889258H1
attttctcctcacacagcaggaacacaatggattcttcttcatcagcaagtgtttgtcagcatgccaaggttgttccaaaacaatatgacatcttccatgcaggaaggtacccttcatctcgcaggactcattcctcttcctcctcttgttcatcactttcaccctcctcttcctcctttgaatcattctttttccctgaggatccacttcttagtcctgcatcccctcttagattct

SEQ ID NO: 35852 - DNA, 239 bp, Glycine max
  Clone ID: 700889260H1
accacgtgcaagttgggtctacagtgcaaacaaacaatcctattgtcaatgaagttttcaacagtcctcgagctatgcggataccaccaacctgtccactggccaggatcagacctcttgtgggaagatatgtgccgcctgaagttgttgctgttcgggtgccacttctaaatttgtccaattttcaaatcaacgattggcccgatatgtcagcaaaaagctatgcaatcatggttctc

SEQ ID NO: 35853 - DNA, 241 bp, Glycine max
  Clone ID: 700889262H1
acaaacaccaccacccattgatcggtttttgcttcatccaaactcaatgggtgccgacgaagactacgattacttgttcaagctggtcctcatcggagattcgggtgttggcaagtccaacctcttgtcccgattcacccgaaacgagttcagcttggagaccaaatccaccatcggcgtcgaattcgccacgcgaagtgccccgttgatagcaagctcgtcaaggcacaaatctgggaca

SEQ ID NO: 35854 - DNA, 237 bp, Glycine max
  Clone ID: 700889263H1
gaaacatggcacgtgtgcacattggaccatactgagttacctaacaaatatggcaagtattggtgctggtgcttctggtctttggaggtggaggtgcttgacctacttggggccaaggagattgcggttcgagcttgggatgaaggtctcaacactcagcctgaacacctcatttggactgttatgggcctgatgaataactgctggttcagagtgaaaaccaatgtgtgcaagccc

SEQ ID NO: 35855 - DNA, 251 bp, Glycine max
  Clone ID: 700889264H1
atttctccatttccattttctctctcacttttcaagaatcgtaagctatgggaaagtcttacccaactgtgagtgctgattaccagaaggccgttgagaaggcgaagaagaagctcagaggcttcatcgctgagaagagatgcgctcctctaatgctccgtttggcatggcactctgctggaacctttgacaagggcacgaagaccggtggacccgtcggaaccatcaagcaccctgccgaactggctcac

SEQ ID NO: 35856 - DNA, 243 bp, Glycine max
  Clone ID: 700889265H1
atagtattggggtctttattcttttgtattcaatcaaagtatttttgtatgcgtaggttctaatactcagtttctgaatgacgcaaatacggtggatgaatgtacaagtaaacatgcactaagagaatcactttattttctttgtgtgtgagagagagaaaactgtagaatgaaatatctgtcgcttccttattcatcatcagtttagagctgttgaagtttgttaaaaagaaacaaaaacaa

SEQ ID NO: 35857 - DNA, 253 bp, Glycine max
  Clone ID: 700889232H1
tttttgtaaaaagcaagtaacattaagttggattcggatacacaagataattcacattatctgaagtacttcaccaaacacaaatctaaaaactctcaaaagtcatttcgttctttgacgctcactttccggggacgaagttggtggcataggcccaggcgttgttgttgacagggtcagcaaggtgatcggcgaggttctccaatggaccctttccggtgacaatggcctgaacaaagaagccaaacataga

SEQ ID NO: 35858 - DNA, 249 bp, Glycine max
  Clone ID: 700889201H1
gtggggtctttccaaggggaagaaatatatgctccattcaagagcctgcttccaatggtgaaccctgatgatgttgtgtttgggggatgggatatcagtaacttgaacctggctgatgccatggccagggccaaggtgtttgatatcgacctgcagaaacagttgaggccgtacatggaatccatggttccactccccggaatctatgacccggatttcattgctgccaaccaaggagaccgtgccact

SEQ ID NO: 35859 - DNA, 247 bp, Glycine max
  Clone ID: 700889202H1
cgttgatccgcattcgagccctagatttcaatctagggtttcattgcactctaattccatattctaactcacctttcattcgattcagggggaattaaattgtttctatatttttttttcaatttttcacaaattagaaatcgataaagaaaatggtgagggtgttgagaagctgcattcaatcgacattgaagctggtaaactcggtaattgggatggccgggctagccatgattctatactccgc

SEQ ID NO: 35860 - DNA, 245 bp, Glycine max
  Clone ID: 700889203H1
tgcagaagcaaagccccctggagtcttctaggcagccttcattgctgcagttgatactgtttcagtgcccagttactgcagcaatgaaggctgcctagaagaaagcagaagcaaagccccctggatcgggagctctgataccaacttgaaagataataatctgaatattcctgtaaagctctattttcgaagagtgaatacaaaacttatttataagctggcagcaacctaattaaagaaataaa

SEQ ID NO: 35861 - DNA, 246 bp, Glycine max
  Clone ID: 700889204H1
ttgcagtaacaacttcaaattcatttgcaatttagcagcaaagcaatctatagccttcgattaccaacatgaaaatcaagcaaattctcttgttctcactcctactacttgccccctttttctcaatcaccactttagctcaatcaccagctgcagcccccaaagccccagcaaaacttgcaccttcaaaacctgctcctgccacaccggctccagcgcccgcaaaaccattagtcccttcattac

SEQ ID NO: 35862 - DNA, 243 bp, Glycine max
  Clone ID: 700889205H1
atcacagcctaagagaattggattctaagctctagagagagagagggagagagagagagagagagaagaaagaagcatgtggtgctggaaaggagacggaggctagaagaagaagaaaaagagaagagctagagagagggtaccctcttgttaatttgcactgtttttgtgtctgttgctgcacttttaggagtgcttctattctaacaacctctgccaaccaacacaagcctgaaaataaaa

SEQ ID NO: 35863 - DNA, 242 bp, Glycine max
  Clone ID: 700889206H1
caactttttcacctctgaaacccgcccctcttgtttcagtggaaatggccgaaactcgagacgccgccgccgatggggtgcccggaactcccgccataagggaaatgagacccgagaccgcgacccatgcgggaatcgggtcgggtgggattcggagggtgaatttccgagcggagattgatacgtcaccgccgtttgggtcggtgaaagaggccgtgacccgttttggaggtagcgggcct

SEQ ID NO: 35864 - DNA, 241 bp, Glycine max
  Clone ID: 700889207H1
tgactatccacttcatattgtggaacaccaaggtttcattgattttgttcgagcactacaaccccagttcaatccactgagctttaatgctattcaaggggattgtgtctctatgtacctcagagagaagcaaaacctattgaatcttattgatgggattcctggacgagtcaacctcaccttggacttatggacttcaaaccaaacatcggcctatgtttttgttcgagggcacttcgtt

SEQ ID NO: 35865 - DNA, 242 bp, Glycine max
  Clone ID: 700889208H1
taatcgagcagtccgtgagccccggcggcggcgcgtggctcggcggacaactcttctccgacatggtggttcgcaagccggcgcacctcttcctggacgagctcggcgtggcgtacgacgagcaagaggactacgttgtgataaagcacgcggctttgttcacgtccaccatcatgagcaggcttctagcgaggcccaacgtgaagctcttcaacgcggtggcggcggaggacttgatcgtg

SEQ ID NO: 35866 - DNA, 242 bp, Glycine max
  Clone ID: 700889209H1
agttaggtcagatgtcacaaactcaggcctcacttggctatatacctccttcaaccccgataatgggtccttttggcaccacaggattaaatcagacatctagtgagggtgtttacctacagtggcctagtgctgcaatgatgtatgcacattcatacgaccaatttagacatgctgttttccaggtaaatcacatttagtttacttaattttattaccctgcagaattcgacaagtgatat

SEQ ID NO: 35867 - DNA, 242 bp, Glycine max
  Clone ID: 700889211H1
gcagcatgaagattaaggttgtggctccaccagagagaaagtatagtgtttggattggaggatcaatccttgcatccctcagcaccttccagcagatgtggatatcgaagggtgaatatgatgagtctggtccatccattgtccacaggaagtgcttctaagtccaaaagaaatgctttaatggtgagttatgtttttgctatggcttttttggtgtctgtgtcatgtcgtgcgaactatgt

SEQ ID NO: 35868 - DNA, 240 bp, Glycine max
  Clone ID: 700889212H1
ggcaaccagatcggcgccaagttctgggaggtggtttgcgcggagcacgggatcgaccctaccggaaggtacggtggggactcggagttgcagctcgagaggatcaatgtcgactacaacgaggccagttgcggtcggttcgtgccgcgcgcggttctcatggacctcgaaccgggcaccatggacagcgtccggtccgggccgtacgggcagatcttcaggcccgacaactttgtgttt

SEQ ID NO: 35869 - DNA, 240 bp, Glycine max
  Clone ID: 700889213H1
gtcgcaaggaggtgcagaatggctgatgcaggtgcagaaggagcatcttcttccacggtaggccaaattcacgttttctggcacgaagggatgctgaagcatgacacgggcaatggcgtgtttgacacggggatggatccaggcttcttagaggtgttggagaagcaccctgaaaactcagacagagtgaaaaacctagtgtctattctcaaaaggggtcctatctccccttacatttct

SEQ ID NO: 35870 - DNA, 244 bp, Glycine max
  Clone ID: 700889214H1
gccaaaggaaaaccttaaactgtctattcatactcctgtcagttttgagcatgactttgttgaagaagaaaatgccactgagcctagagactcctccaacaagcttctggtgggacaacttccaaattcagaacatggaaatacagtttggaatgctaaaataatcttgatgaatggacttagtaggtctgcgttggaggagctgtcatctgataaaattgtagatgatcgcattcctcatttt

SEQ ID NO: 35871 - DNA, 244 bp, Glycine max
  Clone ID: 700889215H1
gctttcttgtgtagtacatgaagtaaaagtgtctggagaaaaaaatctcttttcaatcaaatcaatgaattttccacttgggagaatgggatttttgattttgtttattgtgagttgaactttgctttttctagcttgggttgtttgcgatgaattgctttgtttcagggatttatggtgccatggcagttgcggggagttttatatgttcaatcacgggaattgactctctggggggtttcca

SEQ ID NO: 35872 - DNA, 249 bp, Glycine max
  Clone ID: 700889216H1
cccccctccttttccaataccttcttacctccttcaacaaactcttccactaattcaacttcccttaattaccaacaacaacaacaacaactatctgaacatttcggctttgtgaaacagcctctcaactttaacaacacaaccccagacaatagtactctcgaagcatatcatcagctcacgcaccatcttggcaactcttcttctgttctcgtctccagaacacaacaacaccactccttggaaatt

SEQ ID NO: 35873 - DNA, 146 bp, Glycine max
  Clone ID: 700889219H1
ccgagttcaagcggatgccgagcaacaatcgtgaaaatgctagcaatggcgaagaaaaaaccgattaggcgctttggatttgatgtttatagctaggctgggcaaggcacaatccctcttgaataataaatctatgcctgtttgtt

SEQ ID NO: 35874 - DNA, 244 bp, Glycine max
  Clone ID: 700889220H1
ccctaattgaatccaagcaagcaggggaagtgggggtattatttgatcagaagtacaaagctcttcaaaacccaaacaacagctccacggaccacccctactgctctgctctgcaatggccgacgaggaacctgttgatcagaagagatatcttgaagagtcttgcaaaccaaaatgtgtaaaaccattactggaataccaggcgtgcattaaaaggatacatggtgatgattctgggcagaaa

SEQ ID NO: 35875 - DNA, 239 bp, Glycine max
  Clone ID: 700889223H1
ctcaaacctgaattcggttgtgatataaacctgcgttgcgctaaacgacaccgttttcactgtctctgagaatggaggcacgaagtcgctccgtggaagaaatattcgaggatttccagggccgaagagccggcatcatcaaagcccttaccaccgatgttgaagatttctacagccaatgtgatcctgagaaggagaatttgtgcttatatggatttcctaatgagcaatgggaggta

SEQ ID NO: 35876 - DNA, 241 bp, Glycine max
  Clone ID: 700889224H1
ctccaaaagcatgcgtgatattgtcagagttgctatgagtcaagcacagaaaagaactaaattatctggggatacaaattttagccggattatctgttcaagaggggattctgatccttttgatggactctatgttggtgcatttggcccttatggcatggaaatagtgcatttgaggcgaaaatttggacattggaatgaagtggacaatgaaaacaaaacttcagatgtgggattcttt

SEQ ID NO: 35877 - DNA, 243 bp, Glycine max
  Clone ID: 700889225H1
gtgctttctatttcagtcatcttccaaggatgttggtttataaacatgggttttatgctatggattccagcttttgtccctgaagggtgtgtaatgaatttggccaaggcaagtggccatgaaattattggagcagttacttgtggctccaaagaggctgatttcagggccagaggattggccaatttacaattcagctggatcctttcttcaattctgatatttgcaggaatcatttgcttg

SEQ ID NO: 35878 - DNA, 240 bp, Glycine max
  Clone ID: 700889226H1
tggtgagtggtgagtggtgattttgtatgtctgcttccgttgcgttgcgtgtcgtttacatgaatcacaaattaacagatggcttgttcccacctgcgaatccattgcccattccgagttctgagtgccttcaaatattatcatacatcagacatatggccacgccacccttcattcacgcgcgctgtgcctactcgcctagaatttccaatcgcaacagcaagggagcctcacaacaac

SEQ ID NO: 35879 - DNA, 241 bp, Glycine max
  Clone ID: 700889227H1
ccttattcggtctggaaattactttgtggttgtgggtcttgggacacccaagagggacttgtcactcattgttgacactggcagtgatctcacttggactcagtgtgaaccttgtgcgcgttcttgctacaagcagcaagatgtaatatttgatccatccaagtctacatcatattccaatatgacatgtacatctgccctctgcactcagcgctcgactgctacaggaaacgatccagga

SEQ ID NO: 35880 - DNA, 240 bp, Glycine max
  Clone ID: 700889228H1
cactcataacacaaagcacaaagcaaagctcatccttgagttacaaaatggcagcagcttcttccatggctctctcatccccatccttggctggcaaggccgtgaagctgggcccatcagccccagaagtgggaagggtgagcatgaggaagaccgtcaccaagcaggtctcctcaggaagcccatggtacggcccagaccgagtcaagtacttgggcccattctctggcgagcccccgt

SEQ ID NO: 35881 - DNA, 242 bp, Glycine max
  Clone ID: 700889229H1
cacaccaataacaagcttggttggtacttatctacaatctgcatcatggaaggtgttattctgagaagggtcattccttcggataacagttgcctcttcaatgcagttggatatgttatggatcatgacaaaaagaaagctgctgagttgagacaggttatagcagcaacagtagcaagtgatccacagaaatattgtgaagcatttcttgggaagccaaacgctgagtattgtaactggat

SEQ ID NO: 35882 - DNA, 244 bp, Glycine max
  Clone ID: 700889230H1
cgctctcgctctcgcgtcgctgctctattccgttcttcacgtgacatcacggcctcaagaaacgtcgtcgtattagagaaaggcgcgtaacgcatgaagagacaaatgttgcatgatctgattgagaatgcaggaggctgcgctgtcaccgatggaggattcgccacgcagctcgaaaagcatggagcctccatcaacgatcctctttggagcgccatctatttgatcaaagacccacatctta

SEQ ID NO: 35883 - DNA, 247 bp, Glycine max
  Clone ID: 700889231H1
tgatgggcaagttatcaccattggagctgagagattccgttgccctgaagttcttttccagccttctatgattggaatggcagctgctggaattcacgagaccacctacaactccatcatgaagtgtgatgtggatattaggaaggatctgtatggtaacattgttcttagtggtggctcaactatgttccctggtattgctgaccgtatgagcaaagaaatcactgcacttgctcctagcagcatg

SEQ ID NO: 35884 - DNA, 197 bp, Glycine max
  Clone ID: 700889196H1
ttatgcagtagcaactgcatatgagagaaattagtatatcatgatcagaagaagaagttatgagcaataagtttgtgtttcaaaatattgtagcttacatgactcttttatgttgtggaagcatttgtgttgttgctggttgctgtcgtttccaattgtggtttaatggattgcacaagctttgttcctgcttaacg

SEQ ID NO: 35885 - DNA, 266 bp, Glycine max
  Clone ID: 700889168H1
gtttactgatctcaagtcttccacctcactgtcgtagcgtagtgattgtggggtttctcttctcagttctcatcgtgacgatcttgctgctccgaaaaagggttttcctaacatcgcccattcaatttccgggctgttcagttcgtgaatagactgttgtttgttctaaaaagtagtggatagtaaaaattatcgaacttttttaagagaaaaatgcagagtaaagaagcagttgtggaagatggggaaataaagagtgtgactgc

SEQ ID NO: 35886 - DNA, 267 bp, Glycine max
  Clone ID: 700889169H1
tttgcactccgtgccttgaatgttgaaacagcgagggctatggatgttgcctcagatcccaggatcggccttatgcgccttgtttggtggcaggaagccatagacaaaatgttcgccaataaactgattgaacacccaacagcacaggccctgtcatctgtgatagctgagaccaaactcagcaagatatggttgaaacgatctgttgatgctcggatcaatgatgcaagaagagaggttactgacatgcccaaaactattggagag

SEQ ID NO: 35887 - DNA, 265 bp, Glycine max
  Clone ID: 700889171H1
accaattactgaaagagaatatacgctctcatcattcgccatttcgctgtccactaattttctattttcctgcattgtcgttttgatccctcccccaaacgaaacgcaccctctcctctatcggaaccttcgccgcacttctccggccaaattccccgcggtttctcgaacttccgacgccatctccggcacctcagagagtgaagaaggtcgttgacgatgagcaacgtgttcgagggatacgaacgccaatactgtgagctct

SEQ ID NO: 35888 - DNA, 265 bp, Glycine max
  Clone ID: 700889172H1
ctcttaactcacttcttaaattgtgctattattgtggccattgctttcacttcattgcctaaagagagtccccagctcaactctctagttgttgttgctgcatttttcattttctaggcttagtcattagatagaaagagaaggaaaaaaaaggctattatggcaggaggaggagctccagctaaagcagatgagccacagccacatccaccaaaggatcagttaccaaatatttcttactgtattactagtcctcctccatggc

SEQ ID NO: 35889 - DNA, 267 bp, Glycine max
  Clone ID: 700889173H1
acggagactccgtcgccggcgtccccgccggctccctcctcgtgctcaaccgcgacgacaagaaaatcttcgaagcattcgagaacgccggaactccgatgagcgactccgacgcggcggggttctgctcgcagagcagcgtgtaccgtccggggatggatgtaacgaaagcagagctcgtcggaagaaccaattggagaagacaagaaaagatggaaaatgttggagaatggaaagctagggttttcgaagtgcataacgtggttt

SEQ ID NO: 35890 - DNA, 268 bp, Glycine max
  Clone ID: 700889174H1
gacagcatccgcactgcttaacttgaaatctttcactctcagccgccattctcccacttccaactccttctggcccccctttctatgtccatcccacccccgccaccgccgaatccaccactctcgaaatccaatcatgtctgccacatccgtcaactccgaacgagcacgcgcccctcccgccattcccttgccccctccccctctctccagcttcaaaattgggctctgtcaactctccgtcagccccgacaaagacagcaacatc

SEQ ID NO: 35891 - DNA, 265 bp, Glycine max
  Clone ID: 700889175H1
aaggaaatggctatcaaagttcaacagataacaaaagcgctttgataccagatggggtttcagatttgcttagtgtgaaggcaaggattagagcagttgaaaaatcaatggtggaagaaattgagaggcatgtgaaggaacaaaatctaaccactacagctaacctaggagctctgacaaaggtgccaaatgtggagaatcgcaacagaaaagaactcaaggatgagagcacacatgatgtcaactcgtggagaacaagaactga

SEQ ID NO: 35892 - DNA, 264 bp, Glycine max
  Clone ID: 700889176H1
cccttgcagatgatgttgaacctaccctagcagatgaagctgaacctgccctagcagatgaagctgaaccagagccagttgatccttgatgacaattttctgggatgctgaaatgttacaagtgcacaacggcatggatgcagtaaatccctaatcaaactagccaaccaacgtctggtggattaaccgacactgaaacaacaaagaagctgaattgaagtggaataaataaagcgctagttcatctttagttgagagcaggag

SEQ ID NO: 35893 - DNA, 266 bp, Glycine max
  Clone ID: 700889177H1
ggaggggagatacaagatatggcttggcttatcgctttggttcagtgaatgcatttatgttgtataacatatattattgactgggaactggagcaaatgccatcctgttatgaacttttatgtctatatataaatgtcttgtttgtttacttttcagttagaattttcatcaggaagaagctaaggttgtaatatatttcatcctgttaaattaaattaagcagtttcatcttctaaaaaaaaaaaaaaaaaggcggccgccgact

SEQ ID NO: 35894 - DNA, 270 bp, Glycine max
  Clone ID: 700889178H1
ggccggcgcccccgtcgaccaaaccatcgccgccctctccgaccacctcgaccccggcgactgcatcatcgacggcggcaacgagtggtacgagaacaccgagcgccgcatgagcctcgtcgccgacaaaggcctcctctacctcggcatgggcgtctccggcggcgaagacggcgcacgccacggcccctccctcatgcccggtgggtcccaccaggcctactccaacgtccaggacatcctccacaaaatcgccgcccaggtcgacga

SEQ ID NO: 35895 - DNA, 274 bp, Glycine max
  Clone ID: 700889180H1
gtagcacgcacgtttcatcatccactcgcaatcgcgatcacccgttgccgatcccgaagcagagaaaacctaagccaacatgagtggcgacgccccaacccaaacccaaacccaagccaccgacaccaaaccagaagaaacccacacccacacccaaaccatcactaccaaaccggaagaatctcattctcaatctcagtctcagcctcagcctcacactgccgattatgctccataccctaaactggaccccaccgatgttgcgccaccactc

SEQ ID NO: 35896 - DNA, 259 bp, Glycine max
  Clone ID: 700889181H1
gatgcttcagaggactacgttaatacagaaaatgttggctccagtggttatgtggaaatcagtactgtagcagcaattttatttgttgtgattgcttcttgcttcttggttatgctgtataaattaatgtcattctggtttgttgaagttctggtggttctcttttgcattggtgggatagagggtctacaaacttgtttggtggctctgttatcatgtttcagatggtttcaacaacctgctcaaacatttgtgaaga

SEQ ID NO: 35897 - DNA, 265 bp, Glycine max
  Clone ID: 700889182H1
aaaaattcgctaatctctgacctcttcttcacatcttcctccattaatacccttccctctctctcccatggagttgatctacctactctatctggttccaacgttgtacgcgtgtttcctcatatggaagatgttggacgagagaagggacagggagtgttacatcttaaactaccaatgctacaagccccccaacgacagaatgctcggcaccgagttctgtggcaagcttatcagacgcaccgaaaacctgggccccagcgag

SEQ ID NO: 35898 - DNA, 249 bp, Glycine max
  Clone ID: 700889183H1
ctcgagccgaatcggctcgagttcaagctagtttttcatctccttacgttgatcaagatccacattgctgaattgaatattagtgatgggcttgccacagattcccccaaatgaaactgctgaaaaagttgcacttgtgggtgcagctttaactagctcaccgcagttttctgatgcaagtccctctgccataggcagcatgaacagtgtaaacactggtgggttggccgggtgtgatctgggatcttc

SEQ ID NO: 35899 - DNA, 252 bp, Glycine max
  Clone ID: 700889184H1
gatccatcctacaacgccagtgcattaaatatcttggaccaaaagaaagggaagagtatgaagtaattgttgaaaaagggaagctggtgtacaaacaagatgggaggcttgtggatactgacggaaagtccaaatggatatttgttcttagcaccacaaggtccttgtatgtggggcgcaacagaaaggtgcatttcaacactctagcttctagctggggctgctacaacagctgaggagattatggctcac

SEQ ID NO: 35900 - DNA, 260 bp, Glycine max
  Clone ID: 700889185H1
attgacctattcttttttcaagctcttttaattgtcttgggaagaaaatgaacccagaaatgaatggggttgaggctgagaagaggcaagagaatggacatgagaaagtggattatgatgtgcaagagaaaatagactatgtttttaaggtggtggtgataggggactcagcagttggaaagactcaaatactctcaaggtttgcaaagaatgagttctgctatgactcaaagtccaccattggggttgaatccagacta

SEQ ID NO: 35901 - DNA, 233 bp, Glycine max
  Clone ID: 700889186H1
gcggtgacaagatcctgatcgcgaatagaggcgagattgcggttcgcgttattcgaaccgctcatgaattggggattccgtgtgtggctgtgtactccaccattgataaggacgcccttcatgtcaaactggctgatgaagctgtatgcatcggcgaacgccgagtagccagtcgtacttgctgatcccggatgttctgtcggctgctattaagccgaaatgcacgatgttgc

SEQ ID NO: 35902 - DNA, 266 bp, Glycine max
  Clone ID: 700889187H1
tatcaagaaaaaactccttaagataggtattgatcccgttactcatgagcctctcaaaaaacaagctgcagcatcttctcaggatagttcatcctcccctgcagagcatttgccgcaacctggcaataaccttgatgatcaggtcaaagaaactgaagggattcttctcaactcagaggagaattcaagttcatcacaagctgaaaattcttctggggatgattcacttttgctagatagcatttgcagcgacgattctctattaa

SEQ ID NO: 35903 - DNA, 264 bp, Glycine max
  Clone ID: 700889188H1
ctcgagccgctcgagccgcgcagacaagtactggcaaacccttaggaattctactgaaatattccctaaggccttcccacatgattacaaaagcattgaggttcttgagggtgatggcaagtctcctggttctatccgccacataagttatggtgaaggttcaccacttgtgaaatcatcctttgagaagattgaggctgttgatgaggaaaagaaggtagtgtcgtacactatcattgatggggaatcctccagcactacaaa

SEQ ID NO: 35904 - DNA, 256 bp, Glycine max
  Clone ID: 700889190H1
tgagtgatcttccaagtccggctgattgagtttccttttaatggctaagtatacagtggcgttttttgtatcttctttgggagctggtttcagattagatttgcaagttgtaatgttattaattttgtgtccagatgaaaatgatttaagttactattccttttctagggattttgaagaaagtcttgatttttttaaaaatataacaatgaaaaatggaaatcaagattctagtagcaatcgatgcgagcgaata

SEQ ID NO: 35905 - DNA, 265 bp, Glycine max
  Clone ID: 700889192H1
cttttgttaacaataacgttaacatctccaaccttggcagcacaaagcaagccgcaggatctggtccggtcctcgtgcgtgcacgcgcggtacccgcgtctgtgcctgcgcaccctctcgaactacccgggtcccgccaacacgccgttagacgtggccagggcagctttgagggtaagcctggcccacacgcgccgggcctccaaattcctccatgcactttctcatggaggcgctgccgccatgagcaagcgccagcgctccg

SEQ ID NO: 35906 - DNA, 267 bp, Glycine max
  Clone ID: 700889193H1
aagacaactgcaacaagaatgagaagttgacagtgattgtgcttgctgacaggaacaaaaacaccaaccaaacaacaaccactaatgcttccccaccatcaccacaatcatcatcatcatcgccttcaccagcacctactggccaatatcagggtcaatctccaacttcagacacaaaccaaacaccaagccctatcagtgaacctccccctcctccaaatgctgctgcttcagcctttgtctccctagctggctctgttggagcat

SEQ ID NO: 35907 - DNA, 268 bp, Glycine max
  Clone ID: 700889195H1
gtcgaaattgaaagcagcaaggatgcacatctttgtgaggagagggggtcccaactaccagaagggtctagctttgatgcgagcacttggagaggagattggcatccccattgaggtttatggacccgaagccacaatgactggtatatgcaaagaggcaatacagttcattacagccgctgcttaaggtcaacaacaccttcatttatagtattttcatggtgagtctgaagtgaacgttgattcttaatttccttttccattcctg

SEQ ID NO: 35908 - DNA, 267 bp, Glycine max
  Clone ID: 700889167H1
gctttcctttgatctattctattcttcaatatcttagggttccgacagattccccatcaattcaaccacttgccgtgttagttgatccattcttataaaaagatcaaagactcattatttatagccaaaggccttctgggtcgtcgtgaatctatcttgtgtttgagagattaagacaaaactttttgctttgcaaatggctgctgcaactgctgcaactgcttcttggatgcgattcaaaggcggcaaggaaaggaagctaaccaa

SEQ ID NO: 35909 - DNA, 271 bp, Glycine max
  Clone ID: 700889141H1
gaagagcatcactgaactaacaaagcaaccctatgtcgaaggtggtttgtgtcaccggagccagcggcgccatcggatcatgggtggtcctactcctcctccagcgtggttacaccgtccatgccaccgtccaagatatcaaggatgaaaatgagacgaaacatttggaggaaatggaaggagcaaagagtcatctccatttttttgaaatggatcttcttgacatcgactccattgccgctgccataaagggttgttccggcgtaatcca

SEQ ID NO: 35910 - DNA, 271 bp, Glycine max
  Clone ID: 700889142H1
caaaaaagagagagagatggaataagatgaatgaggaaaaatgcaaaaaggaggttgacaagtcatcctccaaaattgatatttccatagcattcttttgttgcttctcttgttgatcgatttccttatgttgtaatatactgtctaatgcattttaaaacactatattcaaattatacatggaatgtagtgtagaaaatttaatatggagatttgtaactttttttggttatttgtttatttcccaatttgtataaggaaaagcataaaa

SEQ ID NO: 35911 - DNA, 268 bp, Glycine max
  Clone ID: 700889143H1
attcttcattgctctcaattatcaatggctccccaaaccatttccattctcaacctcttaccagaacctgatgtcttcattcacacttcccatggaacacgcattccagcccacgcacccattctggcttctatgtccccggttctggagaacttgatagatcgcccacgtaagcatcggagctccgagagaataatccaaatccacggcgtcccctgcgacgctgtcaccgccttcgtccgattcctctactcctccaggtgtacgg

SEQ ID NO: 35912 - DNA, 260 bp, Glycine max
  Clone ID: 700889144H1
attaaaatttcatttggaaaagaatctgccaattttgcggtgtgatatttaggttggagagaagaaaagatgccgttgaaggtgttagaggcgacagtgtcgagtttcgatgtggtttttgagaagttccgatcagaggctccacaaaacaaggccaatctcatcctcttcttggcggacaatgacccggctacctctctcagctggtgccctgattgtgtgagagcaaacctgtgatatacaagaagctggaggcttca

SEQ ID NO: 35913 - DNA, 273 bp, Glycine max
  Clone ID: 700889145H1
tcaggcgctgctgcttcctcaaaacgcctcaaggtgaatccagaggctcagccaatgaaggaaaatctgaacaccgtgaagccgaaaatgaaccagatgttcaattttggtcacaatctggagggctactacagcccaatagatcaggtggaacagaaaccactggttaaccagtatgttaaccctgccccgttccctggaaacggagttcaagtctcacctgttactccatctgctgatgttactgcttacttcagctctgagcattcgagc

SEQ ID NO: 35914 - DNA, 271 bp, Glycine max
  Clone ID: 700889146H1
cgcaccttcacgggacattcaacatctgttatgtcactagattttcatccaaataaagatgacctcatctgctcttgtgatggtgatggtgagatacggtattggagcataaacaatggaagttgtgctagagtctccaagggtggcaccacacagatgagatttcagcctcgtctcgggaggtaccttgctgcagcggcagagaatattgtgtctatttttgatgtggagacacaagtgtgtcgatattcactaaagggacacacaaaac

SEQ ID NO: 35915 - DNA, 277 bp, Glycine max
  Clone ID: 700889147H1
caaataaaaagaaccaaatttcagaagaaaaaagagtcacttgaaggttcaatgggcgaggaagagaaaaaattagaagaaagcaaagaggagaacaaaaaagcagaggaaccaaagaaggaagaagagaagaaagaggagagaaaaactgaggaatcaaaagatgacaaagaatctaaggagaaagttgcgccgtcagaaatcgtgcttaaagtgttcatgcattgtgaagggtgtgctcgcaaggttcgtcgctccctcaaaggattcccagggg

SEQ ID NO: 35916 - DNA, 275 bp, Glycine max
  Clone ID: 700889148H1
caagccccactcaaccaccacacctctcctcgttcacgctacccctttctgctcttcttctacctttcaagttttaaaagtataaagatggcagagacattcctatttacctcagagtcggtgaacgagggacaccctgacaagctctgcgaccaaatctccgatgctgtcctcgacgcttgcctcgagcaggacccagacagcaaagttgcctgcgaaacatgcaccaaaaccaacttggtcatggtcttcggagaaatcacgaccaaggccaa

SEQ ID NO: 35917 - DNA, 272 bp, Glycine max
  Clone ID: 700889149H1
atcaaattcaaaacttgaggctaaatgttgctctgtcactcccaactcttcacaaatggatgccgatgaagccaaaatcttgctcggttaccctcccaattctcgtccaactccatcccaggtaaaatcagcttacaaaaagaaggtgtgggaatctcaccctgatctatttccttctcatgaaaagcctctcgctgagtctaagtttaaactgatttcagaagcttacacatgcctggaatctggtgggagaggaggagcttcaagttcag

SEQ ID NO: 35918 - DNA, 270 bp, Glycine max
  Clone ID: 700889150H1
aagagcacgacacaggttgctgtaattgttgctttggtcgtcaaaagaagcatgcatcactggcaagcaccccagaagagaaccgtgcactgaggatgggtgattctgatgatgaggaaatgaatctatcattgttccctaagaagtttggaaactctactttcctcattgactcaattccagtggcagagtttcaaggtcgaccactagccgatcaccctgctgtgaaaaatggacgtccacctggtgctctcaccatagcccgcgatc

SEQ ID NO: 35919 - DNA, 269 bp, Glycine max
  Clone ID: 700889151H1
atcattctgatgggctcaggttatggccgccttctcggcatctacatgggacctcatacaaacattgaccaagggctgtttgcagtacttggtgcagcctccctcatggctggttccatgaggatgactgtatccctttgtgtgatcttccttgaactcaccaacaatcttctcctactaccaataacaatgattgttctcctaatagccaaaactgttggagacagtttcaacccaagcatctatgagattatactgcacttgaaagg

SEQ ID NO: 35920 - DNA, 268 bp, Glycine max
  Clone ID: 700889152H1
gagcacgatctattgggtcttatttgcgatgggtccggcattgctgctaaggttctgaagtcaatgggaattagtcttaaagatgctcgggttgaagtggagaaaattattggaaggggcggtggatttgttgccgttgagattccgtttactccccgggcaaagcgtgttttggaattctcactggaggaagctcgccaacttggtcataattatattggatctgagcacttgcttcttggtctccttcgagagggtgagggtgtag

SEQ ID NO: 35921 - DNA, 270 bp, Glycine max
  Clone ID: 700889155H1
ctcaccgattgctagaatggaatttcgatgctcagtcatctcttttaccattctcttctctcttgctcttgcaggagagagccatgtccatgcatcgctacctgaggaagattattgggaagctgtttggccaaacactcccattcccactgcactgcgagagcttctaaagcctctccctgcaggtgttggaatcgatgaactccctaagcaaattgatgatacacagtacccaaaaacattcttctataaagaagaccttcatccagg

SEQ ID NO: 35922 - DNA, 271 bp, Glycine max
  Clone ID: 700889156H1
agttcattaaactcgttttttgctagaagcaggaagagaagagaaacaaacaaaccacaaaataatcaattgagctacttactataagatttagatctcccaacagagagtttcacaaaattgccaagtacccttttcaggatcaaggaagagaatcaagaaccaacaaaaggtgttgttcattgttgtagttgtttgtaactgtagcaacaggaagatggttggaaagttggttgtggtgaggcttgtgttggccatatctgtgttgagc

SEQ ID NO: 35923 - DNA, 269 bp, Glycine max
  Clone ID: 700889157H1
aagattctaaagaaatataactaatattctttagaataatcaaaaagaatattaaattcaaataaattttagatagaaaaaagacttaaaaaggaggatttgaaatgcgagatctaaaaacatatctttccgtggcaccagtagtaagtactctatggttcggggctttggcgggtctcttgatagagatcaatcgtttttttccagatgcattgatattcccttttttttcattctagttattgacacggaaaggggtgaagaagatt

SEQ ID NO: 35924 - DNA, 265 bp, Glycine max
  Clone ID: 700889158H1
cacaacttatcacacaactcggtttcatattgcatagtgagagagttacgtacgaggatgtctgacattgctatgctggtggctgaggagtacgagaggagggtcaagagtttaagaaagtccggtggtggaactggagccggggaatttgacatggtttcttgtgtttcggtgatagtgtcgaggctcaaggaaaagaaacaacttctgcaatgggttttggagcccaagactcaagtcgctatggctgcttccaacagcttct

SEQ ID NO: 35925 - DNA, 267 bp, Glycine max
  Clone ID: 700889159H1
agaagaggttgcataactgaacaaacaaagcaaccctatgtcgaaggtggtttgtgtcaccggagccagtggcgaccttggatcatcggtggccctcctcctcctccagcgtggttatacggtccatgccaccgtccaagacatcaaggatgaaaatgagacgaaacatttggaggaaatggaaggagcaaagagtcgtctccattttttttgaaatggatcttcttgacatcgactccattgccgctgccataaagggttgctccg

SEQ ID NO: 35926 - DNA, 207 bp, Glycine max
  Clone ID: 700889160H1
ccctgaaacaattactccatccctagcgcgtacacacacgcacaatcctttctctctctgaaaccgtacgttacgtaaccgtaggcgatatcacaaattcacagcacacacagtcggcactctctacaatgaacggtcaacgcagctcctacggtaagcgctcccactcgtactccgattgcgacgccggctccaaaaacaagcgcc

SEQ ID NO: 35927 - DNA, 270 bp, Glycine max
  Clone ID: 700889161H1
atatggttgagtacttcggtgagcaattgtcaggctttgccttcactgttaatgggtgggtgcaatcctatggttcccgttgtgtgaagccaccaatcatctatggtgatgtgagccgcccaaagccaatgactgtcttctggtcatctctggctcagagctttaccaagcgcccaatgaagggaatgcttaccggtcctgttaccattctcaactggtcctttgttagaaatgaccaacctagatctgagaccacctaccagattgctt

SEQ ID NO: 35928 - DNA, 272 bp, Glycine max
  Clone ID: 700889163H1
taagcggtgagatttgcgaatctgagaaatggcggattcttctcgggaggagaacgtttacatggcgaaattggcggacaggccgagcgttacgaggagatggttgagttcatggagaaggttgcaaagactgtggaggttgaggagttgacggtggaggagaggaatctcctctctgtggcttacaagaacgtgattggtgcgaggagggcttcgtggaggatcatatcctccattgagcagaaggaggagagcaggggcaatgaggacca

SEQ ID NO: 35929 - DNA, 166 bp, Glycine max
  Clone ID: 700889164H1
ctgtaacctcctgagttagtttagtatgtacatccaatacctgtagctgtgtattgtcacaggaatgctctttttggttccttgcctgtgccaattttggttgttaatggaatatagatgatacaactttgagtttattttagaaatttataaatggaagccagtt

SEQ ID NO: 35930 - DNA, 262 bp, Glycine max
  Clone ID: 700889165H1
aaaactcagtggaatcagagcattccagagtcgtggaatgcctttgtttatataattgaaggtgaaggagttttcgggtctccaacatcatccccaactgtgccacaccatgtccttgtattgactcaaggtgatggcctcagcgtatggaataactcttcaaagcctttgagatttgttctgattggaggccaaccacttaatgagccagttgttcagcatggcccttttgtgatgaacacgagtctgagattgagaacac

SEQ ID NO: 35931 - DNA, 266 bp, Glycine max
  Clone ID: 700889166H1
gcatcagttcacacgtggattaatctgggagcacgaacctttcctcacacttggctgcaagagattacgccctcttgctcccaagcttcccaacaccaaaactatcactacccctttcgatctcaagagcttcatcaggcccgaaagtggccccagaaaacccgtttcctctgacgacactaagaaggatccaccttcaccccaaggccagattgaaacgcacccaggagggacacggtggaatcctacgcaagaacagataggca

SEQ ID NO: 35932 - DNA, 273 bp, Glycine max
  Clone ID: 700889140H1
atggaaaatacaaaaattatagagtattgggttgtgtctatactttgcatgcttttgtcgggtcattggatctctgttcaagctgcccctgcaccctctctcatcacacaactccctggctttaacgccaatttcccatccaagcactattccggatatataagtattgatggaaatactgaaagtgggaagaacctgttctactacttcgttagttcagaaagaagtccagagaaggacccagttgtgctatggctgaatggtggacctggg

SEQ ID NO: 35933 - DNA, 80 bp, Glycine max
  Clone ID: 700889112H1
gtagagtttttggagtgaaaatccgtttcaaattgtggattgatgacagtgttcaatggatatttagctaattagctata

SEQ ID NO: 35934 - DNA, 263 bp, Glycine max
  Clone ID: 700889113H1
ctcgagccgattcggctcgagttccaatcctgccaaccaccacacttggatccttccctcagactgtagaactgaggagggtacgccgtgaattcaaggctaacaagatctccgaggaagagtatgtaaagtcaattaaggaggaaattcgcaaagttgttgagcttcaagaagagcttgatattgatgttcttgttcatggagaaccagagagaaatgatatggttgagtactcggtgaacaatgtcaggctttgcttcacg

SEQ ID NO: 35935 - DNA, 279 bp, Glycine max
  Clone ID: 700889114H1
aacaaagtgtagagtgaaagaatgggtgagaaaagcaagattttgatcataggaggcaccggctacatcggcaaacatatagtggaagcaagcgcaaaggctggaaatcccacttttgctttggtgagggaatccacactctctgaccccgccaaggcacaactcatccacaattttgaggctttgggcgttaatttggtccgcggggatctgtacgatcatgagaagttggtgaaagctatcaagcaagtagatgtcgtcatatccacgctgggtcac

SEQ ID NO: 35936 - DNA, 278 bp, Glycine max
  Clone ID: 700889115H1
gatgccctggggctatggctaacctctatcatatgtgaaatctggtttgctttttcatggattctggatcagtttcccaaatggtttcccattgatagagagacctaccttgaccgtctttccatcaggtatgagcgcgaaggtgaaccaaacatgcttgctcctgtagatgtttttgttagtaccgtggatcccatgaaggaacctcctctggttacagcaaacactgtctgttcaatcttggccatggattacccggctgatacaatatcatgcta

SEQ ID NO: 35937 - DNA, 274 bp, Glycine max
  Clone ID: 700889118H1
gcctttttggcacagagaatttcatctgtgaatgctatgtcagcactttgtgaggccactggggcaaatgtcacacaagtttcctatgctgttggcagagacacaaggattggaccgaaattcctcaatgctagtgttggttttggtggatcctgcttccagaaggacatcttgaaccttgtctacatctgtgaatgtaatggccttccagaggtggctgagtactggaaacaagtgatcaaggtcaatgattatcagaagagccggttcgtga

SEQ ID NO: 35938 - DNA, 272 bp, Glycine max
  Clone ID: 700889119H1
gatattgatccatctgtatatgctagctattactgggtatcatctcagtttcataagacacgtcaagaatttgctgagttctacaaaagtgcccttctctatttggcatacacatcagtggaatctctctctgattcattcaagctggatctggcatttgatttgtccctctctgcccttcttggggataacatctacaacttcggagagctacttgcccatcctataattaagagccttatggggacaaaggtggaatggctttactacat

SEQ ID NO: 35939 - DNA, 272 bp, Glycine max
  Clone ID: 700889120H1
gttcatatttcaccagaacaggcagacgctctaagacatgctcctggagtgaaatctgttgagagggactggaaagtgaggagacttacaacacataccccacaatttttagggcttccaactggggtttggccaacaggaggtggctttgatcgggctggagaagacattgtgattggatttgtggactcagggatctatcctcatcacccaagttttgcagctcataatgctgagccatatgggccagttccaaagtatagaggaaaatg

SEQ ID NO: 35940 - DNA, 275 bp, Glycine max
  Clone ID: 700889121H1
ctttgatttctctctcctcgactcgatcccaattccactagggattcaattccgatgcgattccgagcttgttagatccacgacaaggtttcgtttcccagattcttttgtaaaaaaaaattcttcctctgcccaacaggtaagttgtaaaaaaatggaccatgacaagactgggtgccaagctcctcctgaaggtcctatattgtgcatcaacaactgtgggttttttggaagtgcagctaccatgaacatgtgttctaaatgccacaaagaca

SEQ ID NO: 35941 - DNA, 273 bp, Glycine max
  Clone ID: 700889122H1
cagtgagcgagcgagcaaccgagttactcatggcgaacgcggcgcttcggaacgtgaaggtgctcccgaactcggcaaatatggaggaagctcgtcaccgagtcttccaattcttcagaacggcttgcagatcgttaccctccgtcatggaaatctacaacctctacgacgtcgtttccgtctccgaactccgctcctctgtctcctcccagatccgtaagaacatccacgtcaccgatcccaaagtgatcgatatgctgcttttcaagggga

SEQ ID NO: 35942 - DNA, 274 bp, Glycine max
  Clone ID: 700889123H1
ggtttactggggaggctgttgagggagacgagtttgaagacctggaagatgatgaggatggagatgacgatgagtatgatgaagaggaggatgaggacgaagatgatgatgacggcgatgaagaggaggaagacagtaagactaaaaagaagtcatctgctgttaagaagagtggaagggcacaggctggtgatggtgagcgacctccagagtgcaagcagcagtaattgtttatttcttcggagtgtcatgtggctgatgggtgtttttgagg

SEQ ID NO: 35943 - DNA, 274 bp, Glycine max
  Clone ID: 700889124H1
tttttgtacaaagcaagtaacattaagttggattcggatacacggtatacttcacattgtctgaagtacttcaccacacacaaatctacaaactctcaaaagtcatttcgttctttgacgctcactttccggggacgaattggtggcataggcccaggcgttgttgttgacatggtcagcaaggtgatcggcgacgttctccaatggaccctttccggtgacaatggcctgatcaaagaagctaaacatagagaacatggccaatcgtccgttc

SEQ ID NO: 35944 - DNA, 272 bp, Glycine max
  Clone ID: 700889125H1
cacaaatgatggaacttcagtttcaagacaagatattgaaggaaaaagtatgtttggttctcttgctcaaggtataaacagtggactaaacatggagaacttgcagcaagttaattctgaacaaagagacatacctattgaagattttaatgggaggcaagaacttgctggatcttctgacacttcacaggacaaggtgttagcacaggttcctccttcacagaatgtggctaccctagatccaacagaagagaagattttatttggttcag

SEQ ID NO: 35945 - DNA, 273 bp, Glycine max
  Clone ID: 700889126H1
cagtgatgcatatgccttgatcaagcagaacaaaacttcacgagaatgatggtcatgattttagatgagaggaattgaattgacagggttatttggtcaattagaaaatcggggttttctgagaggatctgacggatttgaataaacagagaagctaccttgtgtacaaatgtgcttcagaagtgttgaggccagcaacatgcattcagcctcctttgtaattttttgccattctgctgttatagttgaagtttttgttaaatagtactctct

SEQ ID NO: 35946 - DNA, 274 bp, Glycine max
  Clone ID: 700889128H1
caaatttctcattctcccatttcctctcagaaccctcgatcactcccacgcgctcctatatcctctccttcaccgtcgctctctccaacgatcacaacaacatcgtcatcccatggcaaacgccgcatctggtatggcagtccatgatgactgcaagttaaggtttttggagctgaagacaaagaggacacaccgtttcatagtttttaagattgaggagcagcagaagcaggtcattgtggagaagcttggtgagccagcccaaggctatgaa

SEQ ID NO: 35947 - DNA, 276 bp, Glycine max
  Clone ID: 700889129H1
cttctagtactagcgtgtctttgtattgctccaacatcctcaacatccagaaaaacgagtttcaggcagcagcacccttgcccaacaacaaatgggttccgagtcatgcttcgccacgtcgattcgggaaaaaacttaaccaaactagagcgtgtccaacacgggatcaagcgtggaaagagcaggcttcagaagcttaatgcaatggtgttggcagcatcatcaacacctgattctgaagatcagttagaagcccctattcacgcaggaaatggg

SEQ ID NO: 35948 - DNA, 277 bp, Glycine max
  Clone ID: 700889130H1
gccgccaacaacttcgcgcgtggccactacaccatcgggaaggagatcgtcgatctctgcctcgacaggatccgaaagctcgccgacaactgcaccggtctccagggtttcctcgtcttcaacgccgtcggtggcggcaccggttctggcttgggctcgcttctcttggagcgtctctccgttgactatggaaaaaagtcaaagctcggtttcaccgtttatccatcccctcaggtttcgacctcggtcgtggaaccctacaacagcgtcctttcaa

SEQ ID NO: 35949 - DNA, 278 bp, Glycine max
  Clone ID: 700889131H1
attttgtggcagaactcgtcaagcatcaatcaccactgaattgatagagattatctctggagcttcagcactggaaggttaattacaggagagcaatctgtgtaatatattcaacagtggcgcgatattaagataatatcgttggattcttttgaaatttgttggtgtcatttttttaatcttacttgacttctgtaataagtgttccaaggtcaaacccattgtggggatttcttggttgagactagatatttctggaattgtgtttttgcagttga

SEQ ID NO: 35950 - DNA, 279 bp, Glycine max
  Clone ID: 700889132H1
ttttgaggttctgtgtccatcaagcgacacgtcgttttgaagcaggaaccgaaccgtgcacccctttgtagtttgaagcgatcaacacgcgcaaccacggcgatgatgatgcaaatcaacatcacctccaccacctcaatcgtcacggcgttctcttcggatcattccccgaatgttctaccttgagccatgtccaacctcgttcagattcgcgtcgccgccgacgctagcgatggcttcgactctccggcgaacagaaagcagccaaccgcagctcct

SEQ ID NO: 35951 - DNA, 265 bp, Glycine max
  Clone ID: 700889133H1
cttgggagtgaagttcccatttaaccaaccaatgaagatatacaacagtttgtggaatgctgatgactgggccacaaggggtggtttggagaaaacagattggtccaaagcccccttcatagcctcctacaagggcttccacattgatggttgtgaggcttcattgattcccaattccgttgcacaccaaggaaaaagttgttggatcaaccttagtttcgtgatctctgatgctgctcagtggcgaaaatctcctgggttcgcc

SEQ ID NO: 35952 - DNA, 265 bp, Glycine max
  Clone ID: 700889134H1
gaccgacagttggattgtagtggaaaagatgaaatgagagaattattatgtgtctataataatagttattgaaagttgtgaggaaggaggaggatggtgtccccgatgtcaacggttctggtgacgggaggggcaggcttcatcggatcccacacggtgcttcagcttctgaagcagggcttcagggtttccatcatcgacaaccttgacaattccctcatcgaagccgttcacagggttcgccgcctggtcggtcctcatcttt

SEQ ID NO: 35953 - DNA, 271 bp, Glycine max
  Clone ID: 700889136H1
ggcagactagtatccgatcctctgtcctctcgaagctttcatcgttcaacatattctcaccatctcagtcatgggcctgctatcttgttttaggtctaccgtcctgagaaaatgttccaaaggaagctctggcatgtcaagattcctgtatacgaacaattttcaacgaaacttgatttcgtctggtggcaatgaatcgtattatgggtattttaacaggagatcatacacttcactttatatgggaactggaactgtgggtgggattaca

SEQ ID NO: 35954 - DNA, 271 bp, Glycine max
  Clone ID: 700889137H1
ggctactgagtagaactagaaatcaacataagagtgaattgtgaggcctaagatgttaacagggatcaacaaagcagtctcttgtaaattcttttcctcacaaggtttgcttattttacattcattatagggtatatatattttccataaatatctttttttatgccgataggagaaagaaatcaaacaagggatacatttagtcgtaggataaagggttaaagggtctaaactttggttatgtaactataaattagaatattaatattga

SEQ ID NO: 35955 - DNA, 272 bp, Glycine max
  Clone ID: 700889138H1
ctaatccctatttttcttcctcagtagtgtcatttacgcttctcttctctgcagcaactatgcctaaccctaaggtcttcttcgacatgaccatcggcggtcaatctgctggccgcatcgtgatggagctctacgccgacgtcactccccgcaccgccgagaacttccgcgcgctttgcaccggcgagaagggcgtagggcggagcggcaagcccctccactacaagggctcgtccttccaccgcgtgatcccgagtttcatgtgtcagggt

SEQ ID NO: 35956 - DNA, 275 bp, Glycine max
  Clone ID: 700889111H1
ctctaccctccaacgtgctctcttccctcctccacttcatccaaatctttctcattttctctcccaaatcacactctcaattacaataacacacactcaacttgagaattttccccaaaaatcccaagagctcgcgccatggtttccccggaaaacagcaattggctgttcgattacccgttgatcgacgacgacgttattcccgtcggcgactcctccttcgccgtctccgcttccaccttctcctggcccccacctcccgccaatgtcagtgt

SEQ ID NO: 35957 - DNA, 232 bp, Glycine max
  Clone ID: 700889070H1
cccatctcaaaactcattcctttcctattcttaacaacccttttagtgtctctccaagttaatgccagagacagccaattcttcagcaaagtcacccctctcaacaacaacattaaacagactgaggttcccaaaaatgaaggccaagtaaacaagccagaacaacaaccagttttcaccccagaaacagaaaacagctatggtctatatggtcatgagactggtctgcacc

SEQ ID NO: 35958 - DNA, 231 bp, Glycine max
  Clone ID: 700889071H1
ctgtgcttggctgaggccagatggcaagacacaagtaactgttgagtactacaatgacaatggtgccatggttccagttcgtgtccacactgtcctaatttccacccaacatgatgaagatgtgagcaatgaccaaattgctgctgaccttaaagagcatgttatcaagcctgtcattcctgagaagtacctggatgagaagaccatcttccaccttaacccttctggccg

SEQ ID NO: 35959 - DNA, 191 bp, Glycine max
  Clone ID: 700889073H1
gccgttcgcgttttgttcttccctactctaaaaccgaaacgaaacttctctctgtctaaaaagcgcagtttcaactctctctctcatcgcttcgccggaatctcgccacctccgtcgccggaaagaaagaattgaagaaagatcccctttcccagtcatggcttcaagatcatatgctaatctctttgact

SEQ ID NO: 35960 - DNA, 232 bp, Glycine max
  Clone ID: 700889075H1
cttcgattctctctctttttctctcgcgaaaaccgtatcagcaatgtctggagaatcagccagcgctattcacaagggtcaagtcgatctcttagacttcattgactggtctggggttgaatgcctcaatcaaagctccacccactctctccccaatgctatcaaacagggttatagagaagacgatggtttgcatctggagagtgatgcagacgagcagcttttgctctat

SEQ ID NO: 35961 - DNA, 225 bp, Glycine max
  Clone ID: 700889077H1
cgccgtcgtcgctgtttttgtgtgtcgcttcttcgtaggtgcagctgcaatggtgaagggacgccaaggagaacgtgtcagactctacgtgaggggtacaatccttggatacaaaaggtccaagtcaaaccagtatccaaatacatccctgatccaaattgagggtgtgaatgccaaagaagaagtagcatggtatgctggcaagaaaatggcctatatctacaa

SEQ ID NO: 35962 - DNA, 230 bp, Glycine max
  Clone ID: 700889079H1
aaccgaaccacttccaaggttgtaaacagaaatgggaaagcctttctcagcaatattgagtgccagattttggcccataacagccaatccagcaaggcctattcttgttgtgggttgagccataattaatctcctgaaatttgaagcaaatgacagaaaaaataaggtctgggaatcacagagcacggatcaaaagatgcgggggaataagttatatatatatgtatgta

SEQ ID NO: 35963 - DNA, 230 bp, Glycine max
  Clone ID: 700889080H1
gtgttgggctctgcttctcttactcaagcattacaccaaacagattgtctacgcttctattccattctttatcgccatccctattttcctcaacgtgtattggttcgtggcctgcaccctcggcgcgtcttgcagcaacgcgttccccctcgcgtaccgggttctcgtgatggtgttcgtgttcttggtgattgggatcattgtgtggatcttggtggttaattggcatc

SEQ ID NO: 35964 - DNA, 231 bp, Glycine max
  Clone ID: 700889081H1
gaagaagctatcctagttccaagctgtttattaccttgcatcttccgcaatcaccttctctcttcactcttatctctttctctctaaaaatgtgactttgttgtacgtgtgagagtgagcctaaaacagtacggatacttgagcaaaggaacaaatattgaagtgtccaatgcgtaccaacaataccctttagtttactctctctaaaaaaacaaacaattctctatcctc

SEQ ID NO: 35965 - DNA, 230 bp, Glycine max
  Clone ID: 700889082H1
aagtaagtatcaatggcttccgaagaatcccagaacaagccccccagcgagcagtccactaccgaactcatcacgagcgcgaagctggtggcggaggcggcgcagtcggctctgaagagcgacagcggcaaagtggacaaggccaaggtggctgacgctgccggcgatcttctcgacgcggcggggaagtatggaaaacttgatgacaaacaaggcatagggcaatatgt

SEQ ID NO: 35966 - DNA, 227 bp, Glycine max
  Clone ID: 700889083H1
gaagctagtcttaggagggcgaggcagaggaagcgataatggcaataagaggcataggaatgtcgttctctgctccatcaacaacaagacctatactttccctcaacccacgatttgtttcagcgtcatccacaatcccattatttctcgttcccagcagaagcagttatctgttattatcgttctctttcagcaggcccgaaacagagtgccctgttccacacaac

SEQ ID NO: 35967 - DNA, 229 bp, Glycine max
  Clone ID: 700889084H1
ggtgttttcaacagcagctgacaatcagaatcaggttggtatcaaggtgctacaaggtgagagggaaatggctgtagacaacaaatcgcttggagaatttgagcttgttggcattcctcctgccccaagaggcatgcctcagattgaagtcacatttgacatagatgccaatgggattgttactgtctctgccaaagacaagtctactgggaaagaacaacaaatcacc

SEQ ID NO: 35968 - DNA, 228 bp, Glycine max
  Clone ID: 700889085H1
atcaaaccttaataaaaagtcccccaaaatggctccaacaagaaaccaccttcttcacattgccatgttcccatggtttgcaacaggtcacatgactccattcctccacctttcaaacgagttagccaaaaggggtcacaaaatcacgttcttgctacctaaaaaagccaaactacaactccaacacctcaacaaccatcctcacctcatcacattccataccctcac

SEQ ID NO: 35969 - DNA, 228 bp, Glycine max
  Clone ID: 700889086H1
gcagagttgttgcgattaagaagatgaagagagtggagtttatggggctggggctgttagtggtggtgatgatgggatgttgtgggtctgcgactgctgcggatgacttggcaaccaagtgttcggcggtgattcagaaggtaataccgtgtctgaacttcgcgacggggaaggaagaaatgcccaaaaaggaatgttgcgacgccgccacggccataaaggagagca

SEQ ID NO: 35970 - DNA, 231 bp, Glycine max
  Clone ID: 700889088H1
gaaaatatttgtgttaaattaacaaaattaatttaagctctttaaaaagttaatttaaatatataaaagaaaatatatatcaacatatcattattaccttctattgtaggtaaaataaaatgatttagccgtggaccacttaaaacttcttcatggtagacaaacatgagaacacacatgtaaaagagtgagaatattttgtccatagattaatcaaattaaacacatcta

SEQ ID NO: 35971 - DNA, 228 bp, Glycine max
  Clone ID: 700889090H1
ctccttggcttttgatttgtcaacaggtgtcctccttctgaggttcttaaagaacagcccttcatttcttccatcctccatttgaacttcaaattcacctagttctttttcatgctcctgaatctcttgtctattaagttctgcagattcctcaaactccaccatctggctctctatgtttgctgttatctgccaaacacaaatgaacacaataagcggtcattacta

SEQ ID NO: 35972 - DNA, 228 bp, Glycine max
  Clone ID: 700889092H1
taaaaatgaaaagaagcactcactcgtgaaccccacgcacgtgttcgataatcaaatcttctttctttttcttccgcagtcccaaccttcatggattctcactcacacatcattgcttggggctctggtgaagatggtcagctaggaatcggaagcaacgaagagaaagaatgggtctgcctcgtcaaagccctccagccccaccgtattcgctccgtcgtcgccggc

SEQ ID NO: 35973 - DNA, 226 bp, Glycine max
  Clone ID: 700889094H1
tggtgaagggtttttggtggataagattttggataagaccgggatgaaggggaccgggaaatggacggtgcagcaggcggcggagctttcgatagcggcgcccacgattgcggcttcgttggattgccggtacttgagtgggttgaaggaggagagggagagtgccgcagcggtgttgaaggaggcgggattgagtgatgaattggggagggttagtgtgagtggg

SEQ ID NO: 35974 - DNA, 230 bp, Glycine max
  Clone ID: 700889095H1
gaaaatatttgtgttaaattaacaaaattaatttaagctctttaaaaagttaatttaaatatataaaagaaaatatatatcaacatatcattattaccttctattgtaggtaaaataaaatgatttagccgtggaccacttaaaacttcttcatggtagacaaacatgagaacacacatgtaaaagagtgagaatattttgtccatagattaatcaaattaaacacatct

SEQ ID NO: 35975 - DNA, 279 bp, Glycine max
  Clone ID: 700889101H1
gaagggacttaacgaggtatgaggaactggacaaagagactcaagctcagatgaacgaggagctctctggatggaaacttgttgtgggtgatgtgtttagggagcctgattgctcgaagcttctctgcgtgatggttggagatgggattcaaattcttggaatggctggtgttactattgtttttgcagcacttggcttcatgtcacccgcgtcccgaggaatgctactaacagggatgatcgtcttatatcttatcctgggaattgctgcaggctatg

SEQ ID NO: 35976 - DNA, 275 bp, Glycine max
  Clone ID: 700889103H1
caatttctaattagggtttcgcttagagtaaccaataaccatgggagtcttcacctttgtcgtccgcaaatccggcagcgaatggagcgccaagcaacattccggcgacatcgaggcctccgccgattccaccttcgatctccaacggaagctcgtgcaagccgctctcgccgttgattcctccggtggagttcagtcctctttctctcccgtgtctcctacctccgctgtgttccaggtgatagtgggtggtgcagtattcgttggaggtggtg

SEQ ID NO: 35977 - DNA, 272 bp, Glycine max
  Clone ID: 700889104H1
ctctctctctctctctctcattcacacgaatcacactctccacagtgcgattcattcaccaatggatcgcaacggtgttctctctcttgcattcatctgcattgtagtcgccggcgtcggaggccagtctcccgccgcagcgccctcgaacactccggcaacccccgccgccgccactcccgcccaagcaccttccacaccgaattcaccagccccagttgcttctcccaaatcatctccaccagcttcgtctcctaagcccgcaaccgcaa

SEQ ID NO: 35978 - DNA, 275 bp, Glycine max
  Clone ID: 700889105H1
cgaaccgtagttgttccgtttcagccatggtggagaacaatctcttcgaggatatatttagggtcgaaaaattaaaccccgatgacaaaaaattattcgataaagtcactcgcattgaagcaagaagtgaaaagtttgacatgtttatgcacctggacattaattccgagatatatccgttaaaggttggtcagaagtttgctcttgtgcttgtttcaacacttaatcctgatggaactccagacactggatattatacccagatcagtcgacaa

SEQ ID NO: 35979 - DNA, 272 bp, Glycine max
  Clone ID: 700889107H1
aaagaaggcgtcttcataaacgcctttcttctccgtttccgtttcctcgttcgaattcgctttttgatctgcgaaaatgagagagtgcatctcgatccacattggtcaggctggtatccaggtcggaaatgcttgctgggagctctactgcctcgagcacggcatcgggcccgatgggcaaatgccaagtgacaagacagttggcggtggtgatgatgctttcaatactttcttcagcgagactggtgctggaaagcagtgccacgtgcagt

SEQ ID NO: 35980 - DNA, 276 bp, Glycine max
  Clone ID: 700889109H1
tccaaatataaaagtggtgttggaacacttcaccccggggaactggggaaggatattttcttcttttttggtggttctagttgttaagggaagatattgtaaccatgagtgttgaagaagaggttcagcgtctcagccaagagatcaagaggcttggtgaggtccaagcagatggttcttacaaggtaacatttggaacactatttgacgatgatgaatgcgcaaatatatttgaagcacttgttggaacactaagagcagcgaaaaagcgtaaag

SEQ ID NO: 35981 - DNA, 272 bp, Glycine max
  Clone ID: 700889110H1
atgaaaagggtgaatctggaaagattggtggccacataaggagatgttgtggtcacgcataatggcgtcgtggttgtcgacagcgaggaaggcaaaacaggaatgaagaaggtcgacaagggggcgaactataagaacaaggagtaaccacaacgatgacaaaactccggtgcagtgacttagggtttttgatcgtgttgggtggctttgatctgttaaagattgatgatttgaggatttttgggtgatcttatgttgttggcgacgatgcc

SEQ ID NO: 35982 - DNA, 232 bp, Glycine max
  Clone ID: 700889068H1
ctacttttcttcccttctttccagaacaacaccacaacacaaacagagcaaaaaaagctccaccaatggcgggttacagagccgacgacgactacgactacctcttcaaggtggtcctgatcggcgattccggcgtgggcaagtccaacctcctctctcgcttcaccaagaacgagttcaacttggagtccaagtccaccattggcgtcgagttcgccacccgcaccttgaa

SEQ ID NO: 35983 - DNA, 235 bp, Glycine max
  Clone ID: 700889030H1
catgtgcactgaagttttccagtttgatgcttctccaagtcctggagcaatagttcctgcaacatcagtagccaatgtttccaccgaaaaccatcagaatgctaccagtgttaagaagaccaggaatagaagaacccttcatgagctcccagagccgcttaatgggtctagtctgaacataactgaagaacaagtgaaaaatttgcagaaagaccacttccatggtaacaagtct

SEQ ID NO: 35984 - DNA, 239 bp, Glycine max
  Clone ID: 700889031H1
gtacgagggccaatttccaaaaaccttttgtctcgcaacctcacctcttcctccttcaatctctttcggaatttcccaaaatccttagtgggaggaagagatggttctgactcagaagattcacgaagctttcaaaggcaccgtcgagaggatcactggcccccgaaccgtttccgccttcaaagaaaaaggagttctcagtgtctccgagttcgtcaccgccggcgataatctcgttg

SEQ ID NO: 35985 - DNA, 189 bp, Glycine max
  Clone ID: 700889032H1
atcgtatcgtatcgctctcttatgtcttcagacaaagcaaaccagaaaccaaaccgcccccaattcccgaaaccctaaccctacctcctcgcccccatgcccatggctaagaaacgaaagcttcgatcctccaacccagaacccaccaaacccgtcgagccacagcaacagaaccatgagactgttgaa

SEQ ID NO: 35986 - DNA, 235 bp, Glycine max
  Clone ID: 700889034H1
ctttcagctgctgccatccaaaattcaggttggagtgttctctgctacaatgccaccagaagcccttgagattacaagaaagttcatgaataagccagtgagaatcctggtaaagcgtgatgaactgaccctggagggtatcaagcagttttatgtcaatgttgacaaggaagagtggaagctggagacattatgcgacctttatgagactctggctatcacccagagtgtcatt

SEQ ID NO: 35987 - DNA, 240 bp, Glycine max
  Clone ID: 700889036H1
tggtgaatgcgtagaaaaggaaaataaagaaattagcgtgaaaaatgttgggtgtgttcagcagctccatagtgtcgccgccggaggagctcgttgccgccggcagccgtacaccgtcgccgaagatgacggcggcggcgctgcggaagtggttcgaggagaagaacccttccgcagtgtcggtggaggtcggagagcatgtccagctcgcttatacccaccagaacgagtcgccgtttc

SEQ ID NO: 35988 - DNA, 236 bp, Glycine max
  Clone ID: 700889037H1
gcgtcttcttgttcctctcgcccagaatccgagatcaaccctgacccctaaggccaggggtttttctcggcttcttcagattcctgaaatggcgtctgtttcagctttagccaagtacaagctcgtcttcttgggtgaccaatccgtgggcaaaaccagcatcatcactcgcttcatgtacgataaattcgataacacctatcaggctacaattggtattgattttctatcaaaaa

SEQ ID NO: 35989 - DNA, 235 bp, Glycine max
  Clone ID: 700889039H1
ttcatcgattctctcccttctctttctctctgcgacaccagatgatggagacgacggcgaacgaaacgctgtcgttgcgccaatcgcggcgttgttgttggtggtgctactcgcggcgagtgtggtggtggaggctcaggagaactcggacgtgaagacgctggtgaagcacatgcacgggaagaagtactgcgacaaaggatgggaatgtaagggctggtcaatttactgttgt

SEQ ID NO: 35990 - DNA, 228 bp, Glycine max
  Clone ID: 700889041H1
cgacgcccaatcctggggcgtcaacgtccagccctactccggctccccggccaacttcgccgcctacaccgccgtcctcaacccccacgaccgcatcatggggctagatctcccctccggcggccacctcacccacggctactacacctccggcggaaagaagatctccgccacctccatttacttcgagagtatcccttacaaggtaaactccaccaccggctacat

SEQ ID NO: 35991 - DNA, 236 bp, Glycine max
  Clone ID: 700889043H1
gggcggttactacgtccaagagcagctgtctaggcatcgaactctgatggacatatttgataaggctcctgttgttgatgaggatgtatttgttgcgcctagtgcctccgtcattggagacgttcaacttggaagaggatcatccatttggtatggagttgtcttgaggggtgatgttaacagcatcagagttggaactggaactaacatacaggacaactctctggtgcatgttg

SEQ ID NO: 35992 - DNA, 80 bp, Glycine max
  Clone ID: 700889045H1
ggattttatacgttgtgatcgagatacgaggacaaatgaagttgggtttgaccaagctagaagtagaagttatgtccccg

SEQ ID NO: 35993 - DNA, 233 bp, Glycine max
  Clone ID: 700889046H1
aaaataggtcttcttcttctctgatctaccaaagcttcaaattctccttagtttggtttgtctgtgagtttggagtgtaatgtcgccgccgacgctggtaacggaggaggaggggcgtacaccgtggcgtccgattcttcgcaatccttggactgtttctctcagaatggtgctggattgagaaaacggaattacttagggttgtctgattgctcatcagtggatagctgtgc

SEQ ID NO: 35994 - DNA, 234 bp, Glycine max
  Clone ID: 700889048H1
attttggcagtcaaagggcagaacttgcctgcaagtttaggcaccgatgaagagaaagacaagactagtaccgttccggaccgtgatcagtataacaaagctgattttccagaagaatatactgatgctaaattttttgtcatcaagtcttacagtgaggatgatatccataagagtattaagtataacgtgtgggccagtacccaaaatggcaacaagaagcttgatgctgca

SEQ ID NO: 35995 - DNA, 235 bp, Glycine max
  Clone ID: 700889049H1
tgaatattcaacctgtgatatggggtacctcaattcagttctgtcctcttcaagccaggttcatgctgcagaagattcacctgtcagtggagggggcctcagtcagaatggaaaattcagctatgggtatgctagctcccctggcaagagatcttcaatggaagatttttatgagacaaaaattgatggtgttgatggtgaaattgttggcctttttggagtttttgatggccat

SEQ ID NO: 35996 - DNA, 232 bp, Glycine max
  Clone ID: 700889051H1
gaaaaggggaggagagctcatttatgctggtccacttggccctaaatcttgtgaacttattagttatttcgaggcaatcgaaggagttccaaagatcaggtctggatataaccctgctacgtggatgctggaggctacttcttcagttgaagaaaacagactgggagtggactttgcagaaatctaccgaaaatcaagtttatgtcaatataacctagagttggttgaaagg

SEQ ID NO: 35997 - DNA, 234 bp, Glycine max
  Clone ID: 700889053H1
ctagttcctactaccgtgacgttaattctcgggtttcttctgagcgagcagaaggatttcagcatcggagaccgaatcgttcgggtgaggggagtaaataaacagagtgaaccaactcaagcccccaagtagaactgataattagttgcaattttaaaagattgtgattgttgggattgcagagagaagggtggttagtgttagaataggctgagtgtggatggggaaagagga

SEQ ID NO: 35998 - DNA, 235 bp, Glycine max
  Clone ID: 700889054H1
cttagttccaatctaactgctcataacaaaaggaaccatatagacaccttcgtacttgtcatggcccttaagatcaacactttccttctagttcttctcttgatcctcattcccttatcttcaggcttggctgaaggcttcggggaaaacatgcatccaactcatggcttactttataaggatggtatcaagatgaactcgaggaagcttttggttcatgattttgtgttggatt

SEQ ID NO: 35999 - DNA, 237 bp, Glycine max
  Clone ID: 700889055H1
gctcctctgccattgtaccttcgtattcaagcacaaaaacaaacaaaccctaaccctaaccctaatcgaaacccccttatccgatcatggccaccgatgcccgtgactcgcgtcgcaagcatcaccgatcttcctctccagaggacgtggacagatcctcgaagcgtcacaagcaccgccataacagccatcgccaccgccacgggagcaaaaagcgcgacgaagaggttgaattcg

SEQ ID NO: 36000 - DNA, 165 bp, Glycine max
  Clone ID: 700889056H1
aaaaaatgcttgcttacatttccatatgttcattatcataatgaataaaatgttgatgtacatatgtaatttctttcataaggccccaaaatgcaatttggcctgcatttttccatattattgttgttactaaggttttataatactttgaattaggttcctatc

SEQ ID NO: 36001 - DNA, 232 bp, Glycine max
  Clone ID: 700889057H1
gtaattaataacaagctagctattagttcgattttgtagtaagtgaggtgccaatatggtgaagatagctcttggtactttggatgactcttttagcgctgcctctcttaaggcttatttcgcagagttccacgcaactctgattttcgtgttcgctggtgttggatcagccatcgcttacaacgagcttacaaaagatgcagccttggatccaacggggctggtggcagta

SEQ ID NO: 36002 - DNA, 232 bp, Glycine max
  Clone ID: 700889058H1
ctcgtcttcgtcgtgtttctcttctctgttctgattcgagatctgccagccatgttcgtgctcttcagattctctctcctccctctcttcctctctctggtcttcgcttccgagtcagatcacaggtatcaacaagatgacccagttaccctttgggtgaacaaagttggtccttataacaatccacaagaaacgtacaattattacagcctaccattttgccgtccacctg

SEQ ID NO: 36003 - DNA, 229 bp, Glycine max
  Clone ID: 700889059H1
cttttgtgctgagtttgacggtgaatcagaagcaggcgtacgtatacgtgtagtagggtgattgagagatggacgctcccctgctgctggtgaacggcgaaggggcggcgctggtggcggagaatggtgactacgtggcggtgagggagctgaaggaggtgaagaaggtgttttggattgagaccaagagagtgtgggagattgcgatgcccatcgttttcaacatatg

SEQ ID NO: 36004 - DNA, 231 bp, Glycine max
  Clone ID: 700889060H1
tttacttcccctatggctcgtcactccttgctcttagccctcctcctcttcgccgccgtggccaccgccgcgatggcgtggcgcgtccgacgccgacgacatcctgatccgtcaggtggtgccagatgttggcgaagcgaagaggaggacaacctgctgaacgccgagcaccacttcgcgagcttcaaggccaagttcgccaagacctacgccaccaaggaggagcacgat

SEQ ID NO: 36005 - DNA, 225 bp, Glycine max
  Clone ID: 700889061H1
tggttcgatgcggtcgagtaataataagaacgggaagaagaaaaaggagaaacctgaattggctgttcttgatcatcctggtcttggaagggttccaaagggtttagaaggagagcaagttgcagcagggtggccaacttggttttcttctgttgctggtgaagctgtccaagggtggataccgcggaaggcggatacttttgagaggtttcataaaattggcca

SEQ ID NO: 36006 - DNA, 232 bp, Glycine max
  Clone ID: 700889062H1
cggaaaccagaagaagagaatgggggggagcttgtttttggaggtgctgatcctgctcactacaagggcaaacatacttatgtaccagttacacggaaaggatattggcagtttgacatgggagatgtgcttattgctggtaaacccactggatactgtgctgatgactgctcagcaattgcggactctggaacttctttattggctggtccaacgactgtggttactatga

SEQ ID NO: 36007 - DNA, 172 bp, Glycine max
  Clone ID: 700889063H1
caactctttcaaaagggagaagaaaaggaaaggaaacaaaacgcacaaagggttattatagcaatggcagaacaaaaccaaaaccagacaactgaagctggaaggcaccaagaggttggccacaagagccttctccagagtgatgctctttaccagtatattctggagacca

SEQ ID NO: 36008 - DNA, 215 bp, Glycine max
  Clone ID: 700889029H1
ggttatgtcagggctggtcgtcaagaagctcggccagtccatcgtccaaactttcaggattcaggagcaagttgctcttcgcatgagccgaagaagaaagaggctgggaaaattatcacaggcagaagggcaaagagggcacagaaaagggaagctgctgacaaggcggcggaagcaaagcatcagcagcatttagtaaggttgggtaggaagtg

SEQ ID NO: 36009 - DNA, 230 bp, Glycine max
  Clone ID: 700889064H1
gcaatttgagatgacgggtttggatcctgagtataataggttgttcaatgagggcatggtgtgcactgctagggttgtgtccaaggctgtgatcactggctacaaagatgggttcaaccagattaagtccttggttgatgttggaggtggcattggagggtctctttcggagattgttagggcttatcctcatatcaatgccatcaactttgacttgcctcatgtggttg

SEQ ID NO: 36010 - DNA, 232 bp, Glycine max
  Clone ID: 700889065H1
ctgagagtgactgtagccctgttgtgggtgctaccataatgaatccaaagcatataaatgtttccagaaatggggatgagtgtatgccattagatcaatcaacttctagtaaagcatggcagtcaaatggtgatagtggggttagagaggataggtatcttgatgaccatgcattgcgtaaaactgaaactttgggcagcaatacacagcatggtaaaatgaatagtattgc

SEQ ID NO: 36011 - DNA, 231 bp, Glycine max
  Clone ID: 700889067H1
gatatttacatcaacctcccagctttgcagaagcttgacacaatgctcatagaaatattggatagtttccaggatactgaattttggtatgcggacaagggagcatatcagggaattcaactcggtcacggggaggctcatttcgaaggattgttcagaggaaagatgagaagtggtggctgccggttccttgtgttcacactgggggcctctctgataagtcaaggaagc

SEQ ID NO: 36012 - DNA, 254 bp, Glycine max
  Clone ID: 700888989H1
tttcaatataagattttgtttaatttatagaaggtacaaaatcttgtgttaatagcaattgggtggcgaagatgattgaggtggttttgaacgatcgattggggaagaaggtgcgcgtgaagtgcaacgacgatgataccatcggcgacctgaagaagcttgtggcggctcagactggcacaagagccgacaagatccgcatccagaagtggtacaccatctacaaggatcacatcactctcaaggattacgag

SEQ ID NO: 36013 - DNA, 250 bp, Glycine max
  Clone ID: 700888990H1
caccttcacaattagaaaaaaaaaaaaacaaaaaatgggcgtttctcgttctcaaaagcctcatgttgtttgtgtgccattcccagcacaaggccacgtgaacccttttatgcaactaagcaaactccttctttgcaccggtttccacataacctttgtgtgacaccgagttcaaccacaagcgtttggtgaagtctcttggacaagaatttgtcaagggacaacctcattttcgatttgagaccatacc

SEQ ID NO: 36014 - DNA, 252 bp, Glycine max
  Clone ID: 700888992H1
gattttcctgctctggttcaaatttggaaggtaaatttgatttagcagatttcaagtctcttgatcgacttctcactgaaaaggttggctggcaggatcaagccatatgtgctatcagtcaaactttgtccctttgtaaatctggtgcaggaaagcgtagaggctcaaatggtagagcagacatatggttggctttccttggacccgatagacttggaaaaaggaaaattgcttcagttcttgcagagacta

SEQ ID NO: 36015 - DNA, 253 bp, Glycine max
  Clone ID: 700888994H1
ctgacagcagcattgtcagagagacatgggctagacttatagatcaagctatatcaagagggggtattgctgaagcttgctcagtactaaagagggtcgggccccgcatttatcctggtgatggagctgttttaccactcgacattatttgtcttcacttagagaaggctggactggagaggttaaattctggggttgaagctgttggagatgaagatgttgcaagagcccttgtttctgcttgtaagggtgc

SEQ ID NO: 36016 - DNA, 251 bp, Glycine max
  Clone ID: 700888995H1
gaaaaaagttgactagagaaagggcggagaaggctgttttgtgcatcaacaaaaccagctcctggacttgcttgcatactctctctgttctttctattcaaagatctgtaaatttatatattatcttttatcatatatagtattagtatagtccacttgtttaaaccacctgtgttgcatattctgaatcctatcatcttgtggctttgatgtctagagcattggaacatgattacatagggttggcagag

SEQ ID NO: 36017 - DNA, 256 bp, Glycine max
  Clone ID: 700888996H1
ggatgatcaatctgttctggttgcaacttatgaaggagagcacaatcatacacacccttctcaaatggaggtaacaacaggttccaaccgttcagtatcatgttcagcgtctcttagctcttccgcaccaacagttacccttgactggacaaaatccaagtccagcagtgagtctaagaatgtaaatcccaaaactgaatcaccagaagtcccgcaggttttggtagaacagatggctacttccttgaccaaggat

SEQ ID NO: 36018 - DNA, 244 bp, Glycine max
  Clone ID: 700889003H1
ggaggaggatggtgcaacaatgtagagagttgcctttaccgtaaggatagtcgcttaggttcatctaagcaaatggaggatctttacttttctgcaattttaagcaacgaacaagagtataatccagatttctacaattggaatagagtcaaggttaggtactgtgatgggtcatcgtttactggtgatgtggaagaagttgatcaaacaaccaatttgcacttcagaggagcaaggatttttt

SEQ ID NO: 36019 - DNA, 244 bp, Glycine max
  Clone ID: 700889005H1
tttcaatataagattttgtttaatttatagaaggtacaaaatcttgtgttaatagcaattgggtggcgaagatgattgaggtggttttgaacgatcgattggggaagaaggtgcgcgtgaagtgcaacagcgatgataccatcggcgacctgaagaagcttgtggcggctcagactggcacaagagccgacaagatccgcatccagaagtggtacaccatctacaaggatcacatcactctcaa

SEQ ID NO: 36020 - DNA, 241 bp, Glycine max
  Clone ID: 700889006H1
gttggtgatgttatctctcttttgtggtttaaacgaagccttccccgttactgtactcaatttattgagatatgcatcatgctatgtgccgaccatggtccttgtgtctctggtgctcacaatactattgtgacagcaagggctgggaaggacctagtttctagtcttgtatcaggtttgcttacaattggtcctcgatttgggggtgccattgatgatgctgctcgctacttcaaggatg

SEQ ID NO: 36021 - DNA, 240 bp, Glycine max
  Clone ID: 700889008H1
caaaatctcttcggctctctctcttttccatatccatatatatctccaaaccctaccgttaggttccccaattcaacaccccgtgggccggtgcgctgcttctttgttcgtacggtttccgtcgattgcctccgaaacgatgtcgtatcgcccaagcgggaactccaggaccgatgtccgccgcaaccggtacaaggtggcggtggacgcggacgaaggtcggagacgacgagaggacac

SEQ ID NO: 36022 - DNA, 239 bp, Glycine max
  Clone ID: 700889010H1
gattcacatgtgatacccggagcatgatggaggttataacttcaatccttcagagacttggtgatgatatcgatcctaacaacataccccaaattctgtatgaagacgaagatcatgataaagttgtattggcttcagacagtgatcttgcagcagctgtggatcatgcaaggacagctggtttgaaggggttgaaattgcatttggactacgcaggaccacgtgataatgtgaaaggt

SEQ ID NO: 36023 - DNA, 230 bp, Glycine max
  Clone ID: 700889013H1
ggaggttggtgccgagtctggtgatggagatgatgatggtgaaggagatgatgattattagagtgtgtcaaatatctcctatatcgtgtttgatgattagagtgtgtcaaatatctcctatatcgtgtttgatgatgtgcactttttcgttttcttttggacaaagttttatcatgtgtggtttttgaatgatgattgttaatcaatatatgtgctatgtaagtttctat

SEQ ID NO: 36024 - DNA, 240 bp, Glycine max
  Clone ID: 700889015H1
cggtgattgacatgaagcacatctatggcggggatgagaggcggagggcggagacgctccggctcgtgtcggaggcatgccgggaatggggtttttttcaggtggtgaaccatggggtgagccatgagttgatgaagggggcgagggaggtgtggagggagttctttcagcagccacttgaggtgaaagaggtgtatgccaatacacccctcacttatgaagggtatggaagcaggttgg

SEQ ID NO: 36025 - DNA, 238 bp, Glycine max
  Clone ID: 700889017H1
actgtggccactccacagcacttctttactgcagagccgattcagcaaaactctgtttctcgtgcgatcgcgaggttcactccaccaaccagctcttctcgaaacacacgcgcacgctgctctgcgacgcatgcgatcattcccctgccaccatactctgttccaccgacacctctgttgtgtgccagaactgcgactgggagaagtacaaccctgcgctctccgattcccttcacga

SEQ ID NO: 36026 - DNA, 233 bp, Glycine max
  Clone ID: 700889018H1
agaagttaaagaagagggtatttttactcgtaccagtacttttgagagtatcgtttatctggaaagcatagaacaggggtttattcccttgactcgtattgaagataatttgaatgggacacaaattgcggatgaagctggcgagttatctgtatttttgggtggaccacttttttactggtgggaattgaacttaattagagattagattgcgcaaaaagcttcaggattgt

SEQ ID NO: 36027 - DNA, 231 bp, Glycine max
  Clone ID: 700889019H1
cttttggaagagggaatccaaccagaacaaacggacaaactgaacagtcaagtaccttggtagggcattaatgcgtgattccttcaagtgtatagcactacggcccaatacaagtgaagccttttcagtttgtccgtttcttttggaagagggaatccaaccagaaggctaagattttgcggaaagtagattatcctctggagttggatgtttatgatttttgttctgacg

SEQ ID NO: 36028 - DNA, 240 bp, Glycine max
  Clone ID: 700889020H1
gtcgcgttgtgttgcgtcgtgtcgtgcgctgttcctctgtttctcgtttttgtgttcagaccgaaccctagctccgcatcgcaaccatgtcgaccaagcaaggtggaaaagctaagcctttgaagaaacccaagtctgataagaaggattacgacgagattgatgtggctaacattcagaagaaaaaggaagaggagaaggcgctaaaggagttgaaagccaaggcgcaacagaagggaa

SEQ ID NO: 36029 - DNA, 238 bp, Glycine max
  Clone ID: 700889021H1
acaagtttgattgggaccaccctattcacttgcagccaactagtcctacaactgagaagaaagttagtgtggtttgggatgcttatggggcaacaaaggatgcagatggtgtttgcattctaactgagtgggatgagttcaagagtcttgattatcagaaggtgtatgacaacatgagaaaaccagcatttgtttttgatggaaggaacattgtggatgtggagaagctacgtgagat

SEQ ID NO: 36030 - DNA, 236 bp, Glycine max
  Clone ID: 700889022H1
gaaaattctgcaaaaggatccaagatgtctcaaccatatgtttgttgctgaaatctttatgcaccggtttctcttatccagccctgtccgaacccttaatcctgaagaagctgattggttttatacccctgtatacaccacttgtgacttgacaccaaatggcctccctttaccctttaagtcaccacgaatgatgagaagtgctatacagcttatttcttcaaactggccttatt

SEQ ID NO: 36031 - DNA, 239 bp, Glycine max
  Clone ID: 700889023H1
ctgacatgaccgaggcaggctgtttctggtttcaacttgttatgatggtgtcatcttctccattctcattctcattctctgtcgctcacggctagcaatcatgtcttctcgcttagatgagtgcttgttggaggtggatgggtacggtgatggcgatggaaaggcgaaacccaaattcctgataaggaatctcagcagagtttcggaggatggggttcccatcctcaaaggcataaatc

SEQ ID NO: 36032 - DNA, 241 bp, Glycine max
  Clone ID: 700889024H1
cgggcaaatgcagatgcagatgcaacaaacgcagcagcagctgcaggccacggcggcaccattctcgacctccactcctcctcctcctcctccttcctccggcggctccgcgtccgaagcaccgccgaagcaggtggctcaagcaatggacaagctcggacaagccgaacgaatcatcgccgacatccgaatcggcgccgaccgcctcctcgaagcgctcttcgtcgcggcggcgcagctc

SEQ ID NO: 36033 - DNA, 244 bp, Glycine max
  unsure (1)..(244): unsure at all n locations
  Clone ID: 700889025H1
ngcggagatcttctctcagtcgttagggtttcgtgtgctaacaaccaggagttgtgtgatatttagtaaaatgggtgagactggaaaacgatatcattcgcagagagaccatgatggggacaggaaacatcaaaagagacgaatgactgacagagatgataggggcaatgatgaattgattgtatataggatactctgtccagatgaagttattgggagtgttattgggaggaatgggaaagtg

SEQ ID NO: 36034 - DNA, 234 bp, Glycine max
  Clone ID: 700889026H1
ctctcacgccacccacacccaccaccgcaggacgacgacgacgacgaacgacccaccgtttaccctccgccgggaaactccttcagcaacccgccacctccgttctacggcgtccctcaaccaccaccccctcagccggagacccacgtgttccattccgctcacgtgacaccaggacacgtgtcccatgacttcaacaactactccgctcccccgcctccacccccttcccac

SEQ ID NO: 36035 - DNA, 235 bp, Glycine max
  Clone ID: 700889027H1
gggcaagctgggaagtgtcttccaggcgttggcgcggagcgtgtagagcttgacctgggagtcgaaggagcggtcatgaaggtcgacgaaataagagatgcggacgagcttgtagtcgcgagttttatggtcgaagccgaagccgcagacgcgggcggcaaagagcgtcgtgtcggggtgacggcggcgggggacagggaggtaaggaagaatacggtgttggcggagggagggg

SEQ ID NO: 36036 - DNA, 236 bp, Glycine max
  Clone ID: 700889028H1
agttcatcaatattctggtaggtataatatcttcatgaatctaatataacgttattcatagtgaaaataaatcgagccaaggaatttattaataattgtcttcatttcatattagctgcctgctgcgacttccttatgcataattttactgtttatagaaattgtgaagctatactgttgtaattgtcatgtaaattgttccctttttcatcttacttgatttggtaaactccggt

SEQ ID NO: 36037 - DNA, 256 bp, Glycine max
  unsure (1)..(256): unsure at all n locations
  Clone ID: 700888987H1
ccatcatttccttgttcttcttccttctcttcattctgtctctacccttcaacgcaactttctatgtgttctantgagcttccaatatgctcacgccttgctatcgtagttgcaccctccaaactccttcccttttctttcatctgttcaggtacttgaggtcaagagaacatattgtaaaactaaaagggagaaatggccttagatcactttgaggagactgtgcaccaaaaaggagattggaaatcttccagtg

SEQ ID NO: 36038 - DNA, 290 bp, Glycine max
  unsure (1)..(290): unsure at all n locations
  Clone ID: 700888948H1
tacgtgaacgcggacttcggatccggctcgagcttcttcactgttctctctctgagcaaaaccgaggatccctcatagtattggcaggtcaaatattggctaatgtggatggggcattcatctatgtacaagcgcactccttcgagagataattcaaacatggaggacgtggaagataactcagatcttttagacatcggcctggacaagggaacctcaaatccttcattgatgctttctttaccgcatgtacttgtggcgaccatttcttcattccgntttggatacat

SEQ ID NO: 36039 - DNA, 271 bp, Glycine max
  Clone ID: 700888949H1
gcttggtcttcccggattccaatcgcctgaaagggaaccggatcttttctctttaagctcaccaaagcttgatgagaagccactcttccctttgcttcctactaaagacgggatttgctcgtcggggcagaaagctgttgtttctggcaacaaaagaggttttgctgataccatggatgggttttctcaggggaagtttgctggtaatacagggatgaacgcggtgctatcacctagaccttctggagctcaaccttctgctatgaaagaa

SEQ ID NO: 36040 - DNA, 263 bp, Glycine max
  Clone ID: 700888952H1
acaaaaaaggcaatggactccattggggtctctatggctatgtagtgctcatgtagttcttcttgctgtagaatgtaataataaacaaagttggtcttccttttgagaagttaccagcttttgctgtccaaaattactcaatttgcagctgactagaattcctttctctcttcagtttctgcagatgagtaggtaggcaatttgtgatcactcccttcccttttcatgtcttctgtgttcccttttccatgcttgtttgtgtt

SEQ ID NO: 36041 - DNA, 264 bp, Glycine max
  Clone ID: 700888954H1
gcaaaagctagcggagaactgatgcagataatgctgcttccatttgctgtgattgcatttgttggtggatatgtcatggcttctttccaaatgatgattctcatatatgctgggggtgtggttttcaccaccttgctcactctccccaattggccccttttcaatcggcatccacttacgtggttggatccaactgaggtggaaaagcatcccaagccacaaccatctgtcaatgtaactcaaaagaagaaacccgttaagaag

SEQ ID NO: 36042 - DNA, 263 bp, Glycine max
  Clone ID: 700888955H1
gaggaacggttcttggtctgataggtttcgcggaggtgccgtggatgttagggatggtgaggatgatgattatgagagtggtggattcagtgttagacaccaggatgaggaggatcagcaccagtaccagcagcagcagcatcagaatagtgttgatgatgcttccatgaaatcaaattcgaatttgaatgaatttgcgccgaggagtgaggatggtggtgatttgaatgataaggatggggataaggagagggtgaatgctg

SEQ ID NO: 36043 - DNA, 149 bp, Glycine max
  Clone ID: 700888956H1
cagcaagttcaagtgttttggacttgtgatgggtgtgttaaggtcatggttgcctttctcttatatatatatatatatataaatctctactaaaacaaaaacaacaaacaaaacaaaaaaaaaacaaacaacaaaacaacacacaaaca

SEQ ID NO: 36044 - DNA, 259 bp, Glycine max
  Clone ID: 700888958H1
cctaaaatggccactctttcctcctacgaccacttcatcttcactgccttagctttcttcatatctggcctaattttcttcctcaaacagaaatccaaatccaaaaagttcaacctccctccaggaccccccgggtggcctattgttgggaacctcttccaagttgctcgttctgggaaacctttctttgagtatgtgaacgatgtgagactcaaatatggctcaatcttcaccctcaagatgggaacaaggaccatga

SEQ ID NO: 36045 - DNA, 128 bp, Glycine max
  Clone ID: 700888960H1
ggaaggcggtatgtgtaatgaatttatgtcaagtagtgagttaggtcagcagaggtcttgcctctccccttgttagccactggtgttgcacaattggcattacggctctattataacatcatgccaaa

SEQ ID NO: 36046 - DNA, 256 bp, Glycine max
  Clone ID: 700888962H1
ccgagtatctccgccgggccgaggagatccgggccgtcctcgacgatgggcccagcggcccggcctccagcggggacgccgcggtcgccacaaggcccaagacgaagcccaatgacggaggcaaagacggagacggcgaggatcccgagcaggccaagctacgggccgggctcaactccgcgatcgttagggaaaagcccaacgtgaagtggaacgacgtcgcggggcttgagagcgccaagcaggctttgcagga

SEQ ID NO: 36047 - DNA, 260 bp, Glycine max
  Clone ID: 700888963H1
ctctctctctctctcatggcgaatctagcacacttctccaagagagccctaagaagcgcacacgcgctcgcaaggcaccacgtgcagccgcagctgctggcagcggaacgcgcttttgcgacggaggcggcgaaatcgatatccccgtcggcggatcgcgtgaagtgggactaccgagggcagaggaagataatcccgttagggcagtggctccccaaagtggccgtggatgcttacgtagcacccaacgtggtcctcgc

SEQ ID NO: 36048 - DNA, 287 bp, Glycine max
  Clone ID: 700888964H1
gaacgtcggcattcggttcggctcgaggaaccacaagagtaaaatgcttaagtgatgctggattattccttgattctgctgatgtatctggtcgtcgcagcttaaggaatttgttcggaggtgtggttaccttgcagggagtgcaaagaagtcttccaaggagttgtactagtcgcctcaatccaattttgtgctattttcctcagcacttaattgctggtgtcaggacaccactgtttcttctcaatgcagcttatgatacttggcagattcaagcgagtcttgct

SEQ ID NO: 36049 - DNA, 266 bp, Glycine max
  Clone ID: 700888966H1
ccggaatatctcagttctctgatcagatccatccgacgtcgtttcagtgataatggctccgttcagcggcgatgagctcgcaccgtttttcggcttccttggagccgcagctgccctcgtcttctcctgtatgggagctgcctatggcacagcgaagagtggcgttggcgtggcttcgatgggtgtgatgagaccagagctggtgatgaagtctattgtccctgttgttatggctggagttttgggtatttatggccttattattg

SEQ ID NO: 36050 - DNA, 265 bp, Glycine max
  Clone ID: 700888967H1
gaagccctgaatattcagcctgtgatatggggtacctcaattcagttttgtcctcttcaagccaggttcatgctgcagaagattcacctgtcagtggagggggcctcagtcagaatggaaaattcagctatgggtatgctagctcccctggcaagagatcttcaatggaagatttttatgagacaaaaattgatggtgttgatggtgaaattgttggcctttttggagtttttgatggccatggtggtgctcgtgctgctgagta

SEQ ID NO: 36051 - DNA, 262 bp, Glycine max
  Clone ID: 700888968H1
gcggaattacaacagctctgttgtgcgtggcccatataggccaaacattgtagagaacaatatgattttccgtgatgcttttcctgatgcctacaggagtcgcatgaatgaaccctctccaatagcaagtgcaaggtcaatgtctttcgattatagcactcataacgaaccttatcctgatgcctacaggagtggcatgaatgaatcctctccaatagcaagggcaagggcaactcgtaatgaaccttatcctaaagaggat

SEQ ID NO: 36052 - DNA, 260 bp, Glycine max
  Clone ID: 700888971H1
gagcaagacccaacttctggcaactttcaaccgctacagagatgaccatggcgcttctataactaagaaattgttggataatgcatccactgactttcagaaggcattgcacactgctattagatgtatcaatgaccacaaaaagtactatgaaaaggttctgcgcaacgctctaaaaaatgttggaactgatgaggatgcactgacccgtgtggtggtctcaagggctgagaaggacctcagggacatcaaagagcgat

SEQ ID NO: 36053 - DNA, 260 bp, Glycine max
  Clone ID: 700888972H1
gggattggccttatagaaaagaaacttaaaaatcgaattcaatggaagggactagatgtttcaagaccgggtgaggctgatgatagttttgccagtttacaggcagaagttgaaaatttaacgatgaaggagcgccagttagacgaacaaataagggagatgcaagaaagactgcgggatcttagtgaagatgaaaataatgacaagttgctttttgttactgaggaagatataaagaatttgccctgcttccagaatga

SEQ ID NO: 36054 - DNA, 259 bp, Glycine max
  Clone ID: 700888973H1
gtggaactctggcttccttcatcaattgtacaatctgatttgagtagccacgcccaagaggtatagcatgagtttgaagttccattgaagataaatagattccttctcatacaattctacattgtagcacttggccagtatataagattgtgaaattaaggagtggtaaatattactagttctttcttcggagttgctaaagataagtatccggttctgtatatagctcgtaaaaatttctttggttgagttaatatat

SEQ ID NO: 36055 - DNA, 258 bp, Glycine max
  Clone ID: 700888976H1
caacccttctttccttccgcgacgacaacaacaacgatgaccaactacggcacaattccaacctcctccacaccttccaccaacctcgagttcttctcacgcgccaagcagcgcgtcaaggagggactcggaacccgccgtccatggaagctcatgttcaatttccgatccttcgccctccccgccggcgtcggagacgcggtctcgcgcgtgagggagaacatctcctacttccagatgaactacgcgatcgtcgtg

SEQ ID NO: 36056 - DNA, 256 bp, Glycine max
  Clone ID: 700888978H1
ggacgaggaggtttccatctggggcgtccctctctttaaggatgacaggactgacgtcattctcctcaagtttctcagagctcgtgagctcaaagtgaaggacgcccttgtcatgtttcaaaacactctccgatggaggaaggacttcaacatcgacgcccttctggatgaagatctgggcgaccacttggagaaggttgtcttcatgcacggacacggcagagagggccatcccgtctgttacaacgtctacggc

SEQ ID NO: 36057 - DNA, 260 bp, Glycine max
  Clone ID: 700888982H1
ctcgagccgaatcggctcgaggtgacatagttgtaaaggaccaggaatttattgaagcaactagagaacctggagttacatttgtggctgctaagtttgatggtatactaggacttggatttcaagagatatcagttggatatgctgttccagtgtggtacactatggttgaacaaggtcttgtaaaggatccagtattttcattttggctaaatcggaaaccagaagaagagaatggtggggagcttgtttttggtggt

SEQ ID NO: 36058 - DNA, 259 bp, Glycine max
  Clone ID: 700888983H1
gaatactgtgttgtgccagcaaatggagtgtctgtgttaccagactcattgccatatacagagtctgcaattctaggatgtgctgtttttactgcttacggcgctatggctcatgcagctcaagtgcgtcctggtgattctgttgctgttattggaactggaggtgttggttctagttgtttacagatagctagagcctttggtgcctcagatataattgctgtggatgtacgggatgaaaagctacagaaagcaaaga

SEQ ID NO: 36059 - DNA, 261 bp, Glycine max
  Clone ID: 700888984H1
cacagatgattgtatctcaacatctgaggctgcagaattggctgcaaagcttgatgagaaggaaataagtagtttaccaatgcctggacaagttgatttcattaatggtggtcctccatgccagggtttctctgggatgaataggtttaaccagagcagttggagtaaagtccagtgtgagatgatattggcattcttatcctttgctgattatttccggccaaggtatttcttgttggagaatgtgaggaactttgtgtc

SEQ ID NO: 36060 - DNA, 259 bp, Glycine max
  Clone ID: 700888985H1
tatgaattcatgcaaaagggcagtttggaaaaccatctatttggaaggggttctgctgttcaaccacttccttgggacatcaggcttaagatagcaattggagcagctcgtggcctcgcattcttgcatacatccgagaaagtaatttacagagacttcaaggcctccaatatattgcttgatgggtcctataacgcaaagatatcagattttggcttggcaaaactgggtccttcagctagtcaatcccatgtgacaa

SEQ ID NO: 36061 - DNA, 134 bp, Glycine max
  Clone ID: 700888986H1
ccccatctcaatcaaccctttatttctctcttagtgccttgaattttctatagcctttctgtgcaaaatttgcatcccttaattcttgtagaattgatgtctggtttgtacaatcagatttccacacaacatac

SEQ ID NO: 36062 - DNA, 259 bp, Glycine max
  Clone ID: 700888946H1
gttactcacatggggggtgcacctacagtgttaaacatgataatcaattcatcacctaaagtccagaagccgcttccgggaaaggtccaagtgatgacaggtggtgcaccacctcctccggatgtgattttcaggatggaagaactaggatttaatgtgactcattcatatggtttgacagaaacttttggtccggcatcaatttgcacttggaaaccagaatgggacaatctgcctcaagatgcacaagcaaaactca

SEQ ID NO: 36063 - DNA, 268 bp, Glycine max
  Clone ID: 700888909H1
agacaatatgttcgtagtatcattgcatctgttcaaagggtttcattagcactttctccttcgcgctttggttctcacaatgctttccacttaccacctggcactcctgaggcacaaacacttgctcgatggatctgtaacagctaccggttctatcttggggtagaacttctaaaatgtgaaggcagtgaatccattctcaagtctctttggcatcactcagatgcagttttgtgctgctctttaaaggcattacccgttttcacgt

SEQ ID NO: 36064 - DNA, 266 bp, Glycine max
  Clone ID: 700888910H1
ggtgaataagtgtcgtttaaagatgcagagtctgcaacagaaggcttccgaatggagcggtgtttccatagacgacgctttcggcatcgacgacaccaatctcttccagaaactcggcctccaaaccttcattaacctctccaccaatttctacaacagggtttacgatgacgaggaagaatggtttcgttcaatattcgcgaattctgagaaggagaatgccattcaaaaccaatacgagttcttcgtgcagcgaatgggtggtc

SEQ ID NO: 36065 - DNA, 267 bp, Glycine max
  Clone ID: 700888913H1
ccgccgtaccatgtcggaagcaccaccgcctccaactgccgatgcgtcaccgcctccgtactggtgctaccactgcgagaagcgcgtctccgtcgaaacgctcgcgaatctccccgacgtcgtctgcggcgagtgcaagaacggctttgtggaatccatgcccacgccgtcgcgctctcgctccccctccgcctcctccgacgacccctacttcggctcgcagttcctccaggtccttcgcctaatcgctcagtcggcgcgtgacga

SEQ ID NO: 36066 - DNA, 264 bp, Glycine max
  Clone ID: 700888914H1
ggcctcgagagcagtgctattgttggctatgtgtgtgcttccggccatggttgtggccattcgcccagcaaagaaccctttttgcgtgaagggtcgcgtctactgtgacccttgccgtgctggttttgagacctcagcaaccacctacattgccggtgctgagattatgttgcaatgcaagagcagggttagcaacgaggttgtgtacaccaagaaggggtacactgactcaactggagcatacacaatgtacgtggacgagga

SEQ ID NO: 36067 - DNA, 259 bp, Glycine max
  Clone ID: 700888915H1
ttataagaagcatattggatgttgtgtgcaagatactacaataacagaaatgcagaaaataacagaaaaggtataacagaaaggaaaatggcaaacaataggtagacgtcatcttctagctagccaatgctatcaagccagctcagcaaccaataattgaatctgttaaatgaaatcctttagatgccttggtggattgatcttccttttaggtctctcattcgtgcctatgcatgtagtatcttgttgagccattatt

SEQ ID NO: 36068 - DNA, 267 bp, Glycine max
  Clone ID: 700888916H1
aaaacttcatcttttactttgttttaagggtattggtactataagacatgcttgatagtagaaaagtataccatttggttatcattctctgcacggatttctccagaatagaaaaccaccatgggtattaattagtcttcctttttctagaattttgctttatctttcaatgttatggggggagctagtgtgaatccatctgtgcttgcattgtacaatagttctttcaaatatattctactctaaagttgtccaccataaatttct

SEQ ID NO: 36069 - DNA, 277 bp, Glycine max
  Clone ID: 700888917H1
ggaagatgctgatgaagctggcaatgactccgatgctgaatcaaagacggaagctggagaagacaccaaggaagagggtgtacatgatgaactctaggaagtttgcaaaacggataaagagtgagcggaagttatattccggaaagttatatctttttcagttgtagtgtttttttgtttttatttttccctagataagcagaccgtggaaaactgcaagtgaaagctggagcttttgcttcaatcacatttgactatttcactgattagaacaggc

SEQ ID NO: 36070 - DNA, 77 bp, Glycine max
  Clone ID: 700888918H1
aaacgcttaacctaaaatcatgaattgaaatctctctcgtgaaagtgaaacgcttagagtctcccatccatacaacg

SEQ ID NO: 36071 - DNA, 267 bp, Glycine max
  Clone ID: 700888920H1
caagatgtgattttcatctttctccactgcactaacgcattcttttctttcacctcttcttgtgtcttatttctacctattccaatttccagccaccatgtctggcgaaatgcataccgattccgcgtcatcgtcacgatccgccgccgcctctgatcagcgtcatcagcagccggcggcggctcctctgagccggtacgaatcgcagaaacggcgagactggaacacctttggccagtacttgaagaaccagacacccccagtttc

SEQ ID NO: 36072 - DNA, 266 bp, Glycine max
  Clone ID: 700888921H1
gatttctcaatctatggctctgcattttcttctcctgctgctttttgcagtgtctgttgttgcagctgatgaagaaccatttataggagtgaatattggaacggatctctcagatatgccacaccctactcaagtactagctctactaaaagcccagcaaattcggcatgttcgattatatgatgcagaccaagctatgctccttgcacttgcaaagacaggcattcaggttgctgtgactgtcccaaatgaagagatcctagcaa

SEQ ID NO: 36073 - DNA, 268 bp, Glycine max
  Clone ID: 700888923H1
gcagaccaattgtcatgggttgttcttgattttgcgacttcctcaattttgggtccagcaccgcttccactgccagcagcaggaccatcctcatccatggctccacccgcatcaccaccagctccttggtacatctttgctatgatggggttacaaatgctctccaactccttcatcttgtcctcgaattcgtcagcttcagcaagttggtttccatcgagccattggatagcctgctcaattgcatcctcaattttcttcttatcat

SEQ ID NO: 36074 - DNA, 247 bp, Glycine max
  Clone ID: 700888924H1
gcaaaggggaggtaaaaattgcatctgtaggcttcttagatgtggtttaatgctgactcaaatggtttccctgaattagggaagaattacagctataaaataattgctccgctcttgctatatgaaaacttactgcaatgcatgtgattgtgtttgctgagcaggcttcctcattgaagacccctagcatggagagatgttctctgctttttacagttttgttatatagatttttcctcttctgatt

SEQ ID NO: 36075 - DNA, 268 bp, Glycine max
  Clone ID: 700888925H1
tacgagtaaacctttttcttttagatcagagtctttttatagattttgaaagtgaaaaccctttgtattttttatttgttataactacttgagccggatgaaaggaaaccttcacgtccgattttgaaagggggagatcttattggattggatcctatctcaatttttcgtttgctagacccgtagttaaaaaacccactttcttacgattacgaggttcattcgaatatgaaatccaatcttggaaacacagcataccacttttttt

SEQ ID NO: 36076 - DNA, 261 bp, Glycine max
  Clone ID: 700888928H1
ggcattgaaatcattgtttccggaggaatgactatgccacagttgatatctccagtggaaagggacactcgaccgaatgaaagagtctctttgaacagaattggataagggattattcctgcggatcatgcgggtgttggaaaatattacagtctaaacctccttgtaatggaatatgtatttttatacagaaatttgttgttcaatattaagttctttacagtgttcgatgttcaaatgagagagtaatataccttgtaa

SEQ ID NO: 36077 - DNA, 266 bp, Glycine max
  Clone ID: 700888930H1
ttcttggactcattggtggaagtgtgtccatgaagaacgtagtagccagtaacaccgtaatgtctcatctctctcactcgtgacactttcttcatccctaacccattgtcatgagtgccctcaatttgaacgcatggccacgccccagatccagatccagatcccgatccccaacctttcacgccgtcaataagttacccttcttcaccgttaccaaacggagagcattctcgctctctgcggtgctcacggtcgagacggaagag

SEQ ID NO: 36078 - DNA, 262 bp, Glycine max
  Clone ID: 700888931H1
caaaacagagcaaagagagagtgtgtgaaaagtgaaacaaaaaacagaacaacaatggcgacacttaaggttcctcagcctcttccccccgttgcagatgattgtgagcagctccgaaaagccttctcaggttggggaactaacgaggagctgattgtatcgatcttggctcataggaatgctgctcagaggaagcttatcagagaaacttatgcccagacctatggagaagatctcctcaaggccttggacaaagaatcac

SEQ ID NO: 36079 - DNA, 261 bp, Glycine max
  Clone ID: 700888932H1
attgagggagaagagaagttttgtgcaaaatccttgggaacagtaattggttttgccatttcaaagctgggaaagaacattcaagtactttcaagttcctttgtcaataagcaagaccaatacactgtggaaggagtgcagaatcttggagacaaagcagtgatgtgtcataggctaaatttcagaactgcagtattttactgccatgaagtccgtgaaacaacagctttcatggttccattggtggctggtgatggaacc

SEQ ID NO: 36080 - DNA, 96 bp, Glycine max
  Clone ID: 700888933H1
gttaccttacaccgctttatacatattccaggaaagtttgtaatgttgctggaagaaattctgatttaattcaggcccggtttgccgtcaccttat

SEQ ID NO: 36081 - DNA, 268 bp, Glycine max
  Clone ID: 700888935H1
gttccatccttatttgtgaatccatctgaccatatctgctctgagtatgttggatactttgagcacagaagaaaaatggaggagattggtgcaggaaacattgaaaagttagccactcaaacttcccttaattgtctactgatgggtgtgttggggaaggaatctgatgaacccctgcacctcattccttcagcttctctgacagttaatcatactccttcaaaggatttcaaagaagctcatgggattcaccaatggtggaaacctg

SEQ ID NO: 36082 - DNA, 267 bp, Glycine max
  Clone ID: 700888937H1
gttattgtgtatatacattgacattcgtgtatcaagcctgacaagatgaggccaaaataactgattgtgccaaaaatacagaaactgactactaacaggtgccaaaatcctatgaaccatgaccctgaggacccgataagcatcggttgcttgattttctatattgaaatatagaaaagttggtattcctttgtctgtttggttgttatttgattaaattgaatgtaatactacagcagatgggacagcggaaacaatatcaatggc

SEQ ID NO: 36083 - DNA, 267 bp, Glycine max
  Clone ID: 700888939H1
tgtcaatatcaggaaagagacccttaggctcgaacccgatgaacaaaattctggccacctcctcgtttcgttttccttcgatgccaccgtttctgggagcattgccatatatttctttgcaaaagaaggtgaaggctgcatcctcacaccaatgaaggaaaaccatcttgcaccggtgactgtgcatttcgagcaaggtcttggccagaagtttagacaagcagctggaactggtattgatttttcagtgtttgaggagtctgagtt

SEQ ID NO: 36084 - DNA, 261 bp, Glycine max
  Clone ID: 700888942H1
ataccattcttcattggttccgaaaaggaacaaactccaagggcaggcatgaattctttttagacacttgtcctagtgtcctactcacaataaaactccaattgatagtttcctccttttggtgtctgtaatttttgctgtcactatacatgttatgctacttactgctgcttatttggaaccggtacaggcaaacctttgtgaaggcgctggaaccctttgttaattggctggaggaggctgaagaggatgagtaagtgt

SEQ ID NO: 36085 - DNA, 258 bp, Glycine max
  Clone ID: 700888944H1
attcaagcacaaatatgacctatggcatttgccctaagacatcactaattcatctgaaagttaaccatcagcttggaacttctgcaattggttcggtgtgtgagaaagcaagtagtgtggtgcatgaagatctggttggttctcagggactggttcttaataagtcagtaaatacatctttgaatacagagagtcttaatcaaaagcctttgaaaaaatcaaaaaagaagttccttaagtatcaggtatcttggatgc

SEQ ID NO: 36086 - DNA, 261 bp, Glycine max
  Clone ID: 700888945H1
ggcccggagaaggaggaggaggcatacggcggaggagtggcggtggaggagaaaccgacggagacggaaacggagaagctgaagaaggctttggtggattcgttttatggcacggatcttggactgaaagcaacgagtgaaacgagagcagagatcgttgaactcatcactcagctagaggccaagaaccctaaccctgctcccactgacgccttgactctcctcaacggaaaatggattctcgcgtatacgtcctttgca

SEQ ID NO: 36087 - DNA, 270 bp, Glycine max
  Clone ID: 700888907H1
gtctgatcgacccttatgattagcatttccttttcttttttgtgcacgtgtccttttgggatttcctaggtgattggtttttggtttgtctgaaatagtaacaccacacattgaaatccaatgatttcttccaaatgaggacagagcatagtccttctgtccacactttatgaaatgatttgtaatggagatccaataatttggggatgtctttagatagcattaccaatacaagagactatgtatccaaaaagagaaaaaaagaaaaga

SEQ ID NO: 36088 - DNA, 221 bp, Glycine max
  Clone ID: 700888871H1
aaaccagaaaaagagcaaccgagcacggttgttgcggtatctgagccggtggctacagaagtagaggaaaaaacagaagaaccagaaaaagaattgcaagaagctgagaaaccaagcatagttgcagtgtcctgaggcgctgtggtgtacattgagttggagggaaaataacaggaagataccagagaaaagcaatgcgccaaggatggctgcaagaaagc

SEQ ID NO: 36089 - DNA, 231 bp, Glycine max
  Clone ID: 700888872H1
ggaagaggatggtgaagcagacgaccatatgtgaagagactaaaatgtgaagatgcctgtgtcttacttatgctatgtgatgcgtaagtgtgtttgctctgcactccaacgtgaagaagattgtaattactaatagtgtatgtacggtttgcgggataatactttgatggtagtgagagtggagtttgggacctttgggtacatgttatgcggcacctatcggtttgttct

SEQ ID NO: 36090 - DNA, 231 bp, Glycine max
  Clone ID: 700888874H1
aaataaactcgagtatggatattgtcaggaagactatttgtattacgttacaagtaactctttaaatatagtataaaaagagttacttgtaacgtaatacaaataaactcgagtatggatattgtcaggaagactatttgactttgttttttcaaccccccaataaattcgaatattatggttatgacactgtttttttcagcattcatttttctataatagagagttcta

SEQ ID NO: 36091 - DNA, 231 bp, Glycine max
  Clone ID: 700888875H1
ctacacacacctcagaagaacagaacagaaccaccacataacagtgcttttcaaaggcggtttgagcaatggcgttcttaaataaaattgggaatctgctcaagaattctgctgtcaagcacatcaatcaggatttttcggcgtctaccacttcacttttccaagcaattagatccatgtcatctgcaaagcttttcgtcggaggtatttcttacagcactgatgatatga

SEQ ID NO: 36092 - DNA, 233 bp, Glycine max
  Clone ID: 700888876H1
aaaacaaagagtgtgtgttgttgttgtgtggtttggttttcacttttgttcatcgtttgcgagacacacaggagagaagagatggcgacgagggtggtggcggaacagaagccgaagacgaagattgtgtgcacgctggggcccgcatcgcgctctgtcccaatgatcgagaagcttctgcgggcgggcatgaacgtggctcgcttcaacttctcccatgggtcccacgagta

SEQ ID NO: 36093 - DNA, 236 bp, Glycine max
  Clone ID: 700888877H1
ctgttatgtcactagattttcaccctaataaagatgatcttatctgctcttgtgatgttgatggtgagataagatattggagcattaacaatggcagttgtgctagagtctcaaagggtggcacagctcaaatgagatttcaacctcgtctagggaggtacctagctgcagctgcagagaatgttgtttctatactcgatgtggaaactcaagcatgtcgatattcattaaaagga

SEQ ID NO: 36094 - DNA, 235 bp, Glycine max
  Clone ID: 700888878H1
aaaaaagaaaaaagtttataggtgcctagaagaaaagacaatatagtgtggagcaattacgtttgatcacaagggaaattaaaggtgcaacggttttgcaagatagcatagaagattttgaagaatcttagttgcaatatagttgtgcagttgttgaaatgggggctcctttatcagcatggcctttggagaactttggaacatacaagtatctattgtatgggccgtttgtggg

SEQ ID NO: 36095 - DNA, 243 bp, Glycine max
  Clone ID: 700888879H1
aaatgagcaaattttgaagagaaaaacaaacacctttgctcaatttaaactcttcagccttttgctcccaccaccttgaccttgtgtacataatcagatcagcagctacctgtgcagcaaatcaatcaaaatatgctccaagcttctaattctaaagcttgctggcaaaatacttgggaaaatagctatgatacaaaatctacatccttctgttatccttcctaaatatatgcaagcagcccc

SEQ ID NO: 36096 - DNA, 235 bp, Glycine max
  Clone ID: 700888882H1
caacacaacccacactcctgtctcttcaatcgtttgagtttgagtttgaatttgatttggacgaggttggaggtttgcaatttccttcggttgtgacctgtgaatccgattgtattctgaattagggtttaagctttacacacagagatgggtagcccctcgaagaagaacgaaagtaaggggtttttcgccgccgtgtcttccatgttcaccagcgctgtcaaccgatcggtca

SEQ ID NO: 36097 - DNA, 235 bp, Glycine max
  Clone ID: 700888883H1
cccttcacctcgtcctccgtctccgtggtggcatgcagatcttcgttaagaccctcaccggcaagactattaccctagaagtcgaaagctccgacaccatcgacaacgtcaaggctaagattcaggactaggagggaatccccccagaccagcagaggctgatcttcgccgggaagcagctcgaggacggacgcacccttgctgactacaacatccagaaggagtcaactctcca

SEQ ID NO: 36098 - DNA, 220 bp, Glycine max
  Clone ID: 700888884H1
ccctttctgcccctcagtcactctccctcacctataccttcagccacactggaccaccacaaacttctcctcctcagcatcatatcttctgagttctgagtgttccattccaattccaagttacaacttggctgtgtctatggatcgcgctcagcttctgttgctgggtgtacccctcttcctcttctgctctgacctcttctcccttttcactcatcat

SEQ ID NO: 36099 - DNA, 232 bp, Glycine max
  Clone ID: 700888885H1
atctaaatctcaatctctgtctctgtctctgtccgcctcagctttcactccaaaccctaaccaaccgatctctttcgcctatcccggaaaccttccgaatcgtttaattgacgctacgccgtggaatctgggcggaacaaatccacgatggcggcctccaccaccagccaggtctacatccaggtaatcgacgatgtcatgaacaaggtccgcgacgagtttgtcaacaacg

SEQ ID NO: 36100 - DNA, 233 bp, Glycine max
  Clone ID: 700888886H1
ctcagagaaccttaataattactcattcaaatcaggctttgaatgacctgttcgagaagataatgcagagagatgttcctgcacgttatcttcttcgacttggtcaaggagaacaagagctagcaactgatcttgattttagccggcaaggtcgtgttaatgcaatgcttgttagacggttagaattgctgagtgaagtggagaggctagcaagatctcttcaattgcccgag

SEQ ID NO: 36101 - DNA, 231 bp, Glycine max
  Clone ID: 700888887H1
tgtgcttcttgccgagcattattccccaagctatgcagaacagctgaagaacaccctgaaattcttttcctcaaagtaaattttgatgagaataagccaatgtgtaaaaggttgaatgttaaagtacttccttacttccacttttatcgtggggctgaggggcagcttgaatcattttcatgttcacttgccaagtttcaaaaaataaaagatgccatggagatacataac

SEQ ID NO: 36102 - DNA, 228 bp, Glycine max
  Clone ID: 700888889H1
ggaaaaaggggtttgcagtgttccacccacacgcacgcataagcagaagcagaagcgcaagcgcgtgtaaccctaattagggtttgcaagccgatttgggattcgcctttcgcgtgatcgcagcgctggatccgtaccgtgttcctccgtctacggaagctccttttgctcgatccttcgccgatctcggaagcatgtacggtccccgaggggcaatgttgggaagcg

SEQ ID NO: 36103 - DNA, 232 bp, Glycine max
  Clone ID: 700888892H1
atttgagaaatataaggttctctgacaagaatgaagaggagagacattgggtctcagaaacaacaagaggttgttctgaggttgaaggattgggcctgtccaagaaaaagacacgtagccatgagcctgggatttttgttgtcactgctgcactgggcctcttgacaaacttcgaagatatctacagattatgggctcttctttctaggttcctggatgctgactttgtgga

SEQ ID NO: 36104 - DNA, 235 bp, Glycine max
  Clone ID: 700888893H1
gtgagagctctttgagggatcttctccatggatctgaatatgttcttacatatgaagacaaagatggagattggatgcttgatgttcactgattcatgtcggagactaaggatcatgaaaggctctgaggcaattgggctagctccaagggccatggaaaaatctaggagccaaaactaatgcagaaaaaacctgtttgaccgaagctggttattactgaagcatataaagattt

SEQ ID NO: 36105 - DNA, 238 bp, Glycine max
  Clone ID: 700888894H1
atctccttcaaaaagcttctcatccatggcgaaaacgctcatttcgtctccatcgttcatcggcacgccgctcccctcgctccctcgccaccacctcccccaccgcaccaggtttgtcactaccaaagtccacgtcagcgtccatgaactttcccctattcaatccttaattcactccattgacttctccggaatcgttaccagatccgaagccttctctacacgctcgccgatgccg

SEQ ID NO: 36106 - DNA, 245 bp, Glycine max
  Clone ID: 700888896H1
gtgtgactttcgttggagagagatgcagttccattcagaaactccaaacaaacatccctcgcgacaaccttaggaatctcgatcgccgaaaaaacctatgcagccccgaacacacacactctgcattccaacttgtttaaatcatgcctctcgattcacccttctctctcaataaatcttttggcctatgaaatcagattcttcgccaccgccacagtcataataaagttttatttttccaaata

SEQ ID NO: 36107 - DNA, 284 bp, Glycine max
  Clone ID: 700888901H1
ctcgcatccaacaatgtctctcaccattccctccaacctctccaagcccgccgccctccgccccaaactaagcccaaagctaaggtccgccgccacaaccaccatcgtctgcagcaccaccaacaacaacaacaacaacaacgtgtcctccgacctgaaggcgttctccgccgcgctggccctctcctccatcctcctctccggccctctccccgccggcgccgacatctcgggggtcaccccatgcaaggagtcgaagcagttcgcgaagtcgagtaagcagt

SEQ ID NO: 36108 - DNA, 277 bp, Glycine max
  Clone ID: 700888902H1
ctccaattctataccttcaaaccctggattttcacagtcccaaggacatgcccagattcctgttggttatcaaggacagtttccactgtcccaggcccatcctattgtccaagctcagtccaaggcccaggcccaggcccaggcccaagcagcagctgcagctcatgctcaactccaggctcatttgcaagctcagggattgagtcttaatcagaaccaggctggtggtttgggggtgtcgtcaccgttgatttccacgccgggtaatgctagtggg

SEQ ID NO: 36109 - DNA, 274 bp, Glycine max
  Clone ID: 700888903H1
cggctcgagctttttcaccccaaactctttgtattgtggtgaatgtttgagtgcagaaggtataaaaaatggtggtgaagattcgattggcaaggctcgggtgcaggaaccacccattctatcgcgtggttgttactgatagcaaaacaacaagagatggcaagcaacttgaagttttaggtttctacaatcccgtcgcaggcaaggatgatgagaaaagaatgagcctcaaactggaaagagtcaagtattggctttctgtcggagctaagcc

SEQ ID NO: 36110 - DNA, 265 bp, Glycine max
  Clone ID: 700888904H1
aggctatgtgatttaccgtgttcgtgttaggaggggtggccgaaagagaccagttcccaaaggtattgtttatgggaagcccacaaaccagggagttacccaactgaaatttcagcgaagcaagaggtcagttgccgaggagcgagctggacggaagctgggtggacttagggacctcaattcttactgggtgaatgaggtttgttattgtattacttctgttgaaattgaaatttggttgtgaatcatgtgttgatttggtaaa

SEQ ID NO: 36111 - DNA, 268 bp, Glycine max
  Clone ID: 700888905H1
ctcgagcgtgctggaaaacatcctaagggcttgtgttggattagctcctgagaacaaaatgatcctggagtacaagtgaagttcaaagtcttaagagtaatggtttgggatactgtagttgaatgagatcaaaacttaactcatatcccataccctcttttctgttatatatttatggcaaatgtgaaatttaaagatcgttggatctctctatctttgttcctgctgactaatttgagagcaggctatctatgctatgcatgcatgt

SEQ ID NO: 36112 - DNA, 270 bp, Glycine max
  Clone ID: 700888906H1
gcacaggacagttgaagtaaatggcataaaaatgcacattgcagagaaaggagaaggccctgtggtgttgtttctccacggcttccccgaactctggcactgttggcacaaccagattgtggctcttggttccctcggataccatgcggtggcaccagatctccgaggctacggtgacaccgatgcaccaccttcaatagacagctacacatgctttcatatagtggctgatctcgttgcgcttattgattctcttggtgcagagcaagt

SEQ ID NO: 36113 - DNA, 245 bp, Glycine max
  Clone ID: 700888865H1
tcaagatgaagttcaacattgcgaatcccaccaccggttgtcagaagaagctggagatcgatgatgacctgaagctgcgagcattttgggacaagaggatctcacaagaggttgttggtgatgctctgggtgaggaattcaaaggttatgtcttcaaaattactggaggttgcgacaagcaaggatttccaatgaagcaaggagtgttgacccctggtcgtgttcgcctcttgctgcatagagga

SEQ ID NO: 36114 - DNA, 241 bp, Glycine max
  Clone ID: 700888821H1
tagcgatctgcgaggatatatatgctgctagagctgagggtgagcttggaattgaagaggtcctttactggactctagtgaagatataccggtccccgcacatgctgcttgagtacacaaaacctgattaaaattcagtgtaccattttctggtcactaacagctaaccaggtccaatgctcacatggtttgactgacattgaacgatgtcagagtcaggagcaatacgatgctggtttct

SEQ ID NO: 36115 - DNA, 238 bp, Glycine max
  Clone ID: 700888823H1
ggttctactcctttctctcttcgtttccgatcgatccaattttcttcccatggctacgatcggacacaacaatctcaatgccaaattggttcttctcggggacatgggtgctgggaaatccagcctcgttttgcgctttgtcaagggtcaatttctcgaatttcaggaatcaacaataggggcagcgttcttttcacagacgctggcagtaaatgacgcgacggtaaagtttgagata

SEQ ID NO: 36116 - DNA, 239 bp, Glycine max
  Clone ID: 700888824H1
gacaacttctacagagctgccagaaatctcaattcagacatctacatgccttatagaagcatccccaatagacccagcaattccaatggacccttgccttgcaatctcaacaggccctgaacaggagatgtcaaagaaaaagaagaaaaggagagtaagcttgaaagtgaagcggcagaactcaatgaacactacaagctgcctgaagctgctccgcctgaggcccctgttcagaaatc

SEQ ID NO: 36117 - DNA, 240 bp, Glycine max
  Clone ID: 700888825H1
atcttcatattcatcaaactcatcaaaatgaatctgtaccactcctccaccaccaccaccaccaccaccatcttcaccgtcatattcctcctccttgcaatattattcactctcacaccccacaaggccaacggtgccacgtgtcaccctgaggaagaagcgggcctgttgggcttcaaatccggtatccgatccgacccgtccggcctgctcagtaactggatatcgggtacggactgc

SEQ ID NO: 36118 - DNA, 237 bp, Glycine max
  Clone ID: 700888827H1
tttttagcaagactggtaaagaaggttgggtttctcttggagggatacttctttgtatcactggtatgctagttcttgatctacataacagttacccgaaattcagtataaatttattgtgatgttatgctggatattccacacttctgttttaactttacaaatttagtggagctttaatttactagatgctgagacttttagaattcagatgctagagttctctaactgcttatt

SEQ ID NO: 36119 - DNA, 241 bp, Glycine max
  Clone ID: 700888829H1
gagatagtgatgggacgaacactgagacggaacgaagcaagcttgtgtttttcgataggaggaaccagtttgagttggaggatctgcttcgagcttcggcggagatgctcggaaaaggaagcttgggaacggtttacagagcggtgctcgatgatggttgcactgtggctgtgaagagactcaaagacgctaacccctgcgagaggaacgagtttgaacagtacatggatgttgtagggaa

SEQ ID NO: 36120 - DNA, 247 bp, Glycine max
  Clone ID: 700888830H1
acctcactcactgattctcaaaaactcaaaagatggtgatgaagaaaaaccttctcttctcactttcacttctcctaatggttctcttcacttcatctcaaaccaccccagcaccatcaccttcctcaaccccaacagacatcatcagaatcctcaaaaaagccggaggattcaccaccctaatccgtcttctcaccactacacaagtctcaacccaaatcaacgcccaacttctgaactcaaacaa

SEQ ID NO: 36121 - DNA, 247 bp, Glycine max
  Clone ID: 700888831H1
cctgatttggtgagaaagcatttgggaagagttgtcccctccgacgacaactactacgccgcgttgaacgccgccgtcttcagcgacgggtcgttttgctacattccgaaggacaccaagtgtcctatgcagatttcgacttacttcagaatcaacgcgttggagacagggcagtttgagaggactttgattgtcgccgatgatcggagctctgtggagtatctggaagggtgcactgcgccttcct

SEQ ID NO: 36122 - DNA, 250 bp, Glycine max
  Clone ID: 700888832H1
ctcgagcgcatcaatgttgctgttgctgtggcaattaatggtggtttgatcacccctgttcttcaggatgcggataagttggacttgtatctattgtcccaaaaatggaaggagctagtggaaaaagctcgtgcaaagcagttgcaacctcatgagtataattcaggaactttcacgctttccaatttgggtatgtttggagttgacaggtttgatgccatacttccaccaggccagggtgctatcatgg

SEQ ID NO: 36123 - DNA, 250 bp, Glycine max
  Clone ID: 700888833H1
gcccattccaacttcgatcccaaaacctacgtggacatgcctctcaagtccgccctcacggttaccgaggacgcgttccagaagcttccgaggaacgccaacgggtccgtgccggttgaggatttgaagcgtttcatagaggcctactttgaaggtgcaggggatgatctggtgtaccgggacccacaggatttcgttcccgagccggagggtttcttgctcaaggtgaaccaccctcaggttagggcct

SEQ ID NO: 36124 - DNA, 248 bp, Glycine max
  Clone ID: 700888834H1
gaagaagaagacgaccagcggtgcagcttcgaaattgctggccatggcgaagaagctaagctcgaagcccaccattttgttcatcttcgtctctttcatgcttttttgcgcctttcttcctgttttcgctcctcttccttctttctcctctcaccattctcatcgcaatacagtttacagaaagttcgagatcgccaacgataggttctggaaagatggtgaaccatttcagatcatcggtggtgacg

SEQ ID NO: 36125 - DNA, 232 bp, Glycine max
  Clone ID: 700888835H1
gtcaaatagatgatgctctggatattatgtgcgagcttgcagttgctttagaaaagcattgacttgttcatgccttttctgtttttttgctttgtataccatttttagttttaacctttgttggctttcttagacagaacggagtcatcaaaaaaaaaaaaaaaaaaaaaaaaaaaaaaaaaaaaaaaaaaaaaaaaaaaaaaaaaaaaaaaaaaaaaagaaaaaaaaaaca

SEQ ID NO: 36126 - DNA, 240 bp, Glycine max
  Clone ID: 700888836H1
aagctgcgaagttaaacttggttgcatgcgaagagcaagaaatatgagaccaaacatcgtttctgaggccgggtttcctactaggatgagccaatggtgggaaagcattccgtttctcacttctgcagtggtggttgtctgtggagtcatttacttgatttgtcttttggttggatatgattccttctacgaggtttgcttcttgccatctgcggttgtgtcacggtttcaagtttacag

SEQ ID NO: 36127 - DNA, 236 bp, Glycine max
  Clone ID: 700888842H1
ctttccttaaaggattccctcctaatttggtgggattatcccaagtttcagctgctaccactcatcagcattgccatttcctgtttcactcaccacatggaaaagcttattcgcatgttccctttgcttcttcttcttcttctgttccccacttttgccttcgctggccatgactatggccaagctctgagcaagagccttctcttctttgaagcccagagatctggctaccttcc

SEQ ID NO: 36128 - DNA, 234 bp, Glycine max
  Clone ID: 700888844H1
tgttgaaagtgatcccagctggatcttctagcggtgcaaagaaggcttttactggaatgtgagctttgatttccagtttttattgaagataaatgttaccttattaattattatatctgatttcttttctggatgataacaaatatgaaaaccttgtcaattttggattttctttgaggtttcgttctggctttatgtttaggatcttgttataatacattatggttttcgaat

SEQ ID NO: 36129 - DNA, 241 bp, Glycine max
  Clone ID: 700888845H1
atcgtagcaaagaaagaaagatagaaaaccctagcttaccttttcaactttcaagatgcaaatctttgttaagacactcactggtaagacaatcacccttgaggtggagagttcagataccatagataatgtaaagtccaagattcaagacaaggaagggatcccaccagaccagcaacgtctcatttttgctggcaagcagcttgaggatggacgtacacttgctgattacaacattcaa

SEQ ID NO: 36130 - DNA, 245 bp, Glycine max
  Clone ID: 700888847H1
gggaatgttactgagctcataatagcaatatttgcccttagcagtaacaaaattgccgtggtcaagtattctctgttgggttctattctttcaaaccttcttctggttcttgggacctctctattatgtggtggcattgcaaacgttggagtggaacaaaaatatgatagaagacaagcagatgtgaactcacttatgctgttgttgggattgttgtgctacttgcttccaatgctgttcaaata

SEQ ID NO: 36131 - DNA, 243 bp, Glycine max
  Clone ID: 700888850H1
attcacaaaccaactcccccaaaatctcactttctctgtttttgctctgttttcctctgttttttcctcatcatcacacattaaaatggagggtctaattccatttgtgtacaaagctgtaatgcaatacaagaatgagaaacaagggcctattggttcatggctttgtgagtcaccttcttactcatacatgaaacttcccggcgactcaggtcggtttcaaacctctgcttcttctccgtt

SEQ ID NO: 36132 - DNA, 239 bp, Glycine max
  Clone ID: 700888851H1
ctccgatgaagcccacgcacaatcagatagaaaaaagataatcaaaattttacttccaaacccaaccaaatcaaagaaatgaaggataaggagacattccctattgcgaaaaaggaagcctctgattcaggtttattcggaagaggaagctacaaattctgggcactagctgccatgctgctcttggcattctggtccatgttcaccggcacagtctctctccgctggtccggcaccct

SEQ ID NO: 36133 - DNA, 234 bp, Glycine max
  Clone ID: 700888854H1
ctgccttgaaagtgaacatatttactattctgatcacggggattccttcagctgctccaactttgttgacctggattggctatcttcttcaggaaattcatgtgaagaagagtcatttgagaggtcatcaattaccaactctccaattgctggagtttcttcagaaaatgttgtcaatggaataatggtaggtgaggcaactgcctccactagtgattggggggcctccagcct

SEQ ID NO: 36134 - DNA, 238 bp, Glycine max
  Clone ID: 700888856H1
actaattcgccttggttttgagggatatagaaacgtgatggaaaactgcagagacaacatgttggtgctgaaagaaggactagagaaaacagggagattttcaattgtgtccaaagacaatggagtgcctttggtggcattcacactgaaagaccacacccactttgatgaattccaaatctctgacttcttaaggcgctttgggtggatagtgccagcatacaccatgcccccagat

SEQ ID NO: 36135 - DNA, 234 bp, Glycine max
  Clone ID: 700888857H1
gtggacctgaagttcccttccatcctggaagagaggacaaacctgagccaccaccagagggtcgcttgcccgatgccactaagggttctgaccatttgagagatgtgtttggcaaagctatggggcttagtgaccgagatatcgttgctctgtctgggggtcacactattggagctgcgcacaaggagcgttctggattcgagggtccctggacctctaatcctcttattttcg

SEQ ID NO: 36136 - DNA, 234 bp, Glycine max
  Clone ID: 700888859H1
cgacaaattaggccgaattctgataacttttacgccgaccgtacagcactgtagcatggccacggttattggactttgtctcagagttaaactgaagcactacttccctcctcattacaaagtggacatcaaggtttctcctggatctcatgccaacgaagaatcagtcaataagcagttgaatgataaagaaagagtcgctgctgccttggagaatcctaacctccgccagct

SEQ ID NO: 36137 - DNA, 241 bp, Glycine max
  Clone ID: 700888863H1
agaggttgaagagtattgggatgattgatagcgttcctggaatgaaggctttggatatgaatgctgctgaggacgctattgtcaggctcactagggagattgtgcctggcatgattgtcactggcatggaggttgcagaaattgatggctccccgagaatgggtccgacgtttggggcgatgatgatatcagggcagaaggcggctcatttggcgttgaaggctttgggtaggaacaatgc

SEQ ID NO: 36138 - DNA, 242 bp, Glycine max
  Clone ID: 700888864H1
ggaatttatatgatggaagttgatcgagttctaaggcctggtggttattgggtgctttcgggtcctccaatcaattggaaggctaactacaaatcctggctgagacctaaggaagaacttgaggaagagcaaagaaagattggagagactgctaagcaactttgctgggagaagaggtcagagaaggctgaaatggccatttggcaaaaggttgtagactctgaatcatgtcaaaggagaaa

SEQ ID NO: 36139 - DNA, 243 bp, Glycine max
  Clone ID: 700888820H1
aacaacagcacaaagcgggttactgtctgttcaagctaccatctctctctctctttcttagtgcctccttgccagaagttaaaatggcccaagaaactttcctattcacatctgaatcagtgaacgaggggcaccctgacaagctctgtgaccagatctccgatgctgtgctcgatgcatgcttggagcaggaccctgacagcaaggttgcctgtgaaacctgcaccaagaccaacatggtga

SEQ ID NO: 36140 - DNA, 226 bp, Glycine max
  Clone ID: 700888776H1
cacattgctgttcaccattttcaattttctaagtggtttggcttggtttgacatacataaacctttcaagatttcagaggggcagaagatcaaagccaagacattctctcgtatataaagagtgtttctgatttgatctttgtctcttctctttctcttgtttgagatttttcattactccaccaaggtcttgtcagaaaagcttgaatttttcgtctacccttta

SEQ ID NO: 36141 - DNA, 229 bp, Glycine max
  Clone ID: 700888778H1
tgcacctccttcaaccccgataatgagtccttttggcaccccaggattgaatcagacatctactgagggtgcttttctacagtggcctagtgctgcaatgatgtttgctcattcatatgaccaatccttacatggtgttttccactctccatttggtcaactaccgttgagctttgtctattcacagaactattagatgacatttccggggagaatattctaattggat

SEQ ID NO: 36142 - DNA, 231 bp, Glycine max
  Clone ID: 700888779H1
acaaaccagtttttggaatcattgaaagcagaaggtgaggtcattcttgaagatgttcagccaaaactctcccactctcgggtttctgccccaccacctactgattctatcactttgactgttgaggataaactaaatgtgacactttaacgagatggtggtctcagtaattttgatgttcaaggcacattgtctctccaaattcttaaccaagaggatgcacatattcaa

SEQ ID NO: 36143 - DNA, 235 bp, Glycine max
  Clone ID: 700888780H1
gaagaatcttgctggaagtctcacatataggtatgacctggttgacttgacacggcaagtattatcaaaattggcataccaggtataccacaaggcagttacttcttctcagaagaagaatattgaagccttgcaatttcacagcaatctagtttcttcaactgtcaaaagatattgatgtattgcttgcttcggttgataactttctctttggaacttggcctgagagtgctaa

SEQ ID NO: 36144 - DNA, 97 bp, Glycine max
  Clone ID: 700888781H1
cacttgtgtcttcgttccattatctagttctcaattctctgcaccctttgcctctgaaagaaatgggtagtctcttagcggaaagaacaacagtagg

SEQ ID NO: 36145 - DNA, 97 bp, Glycine max
  Clone ID: 700888782H1
ctagctttcttctccactctctcaaatggcccaaaatgattccaaccctactccgcctccggaaccccatgtcttggcggaacccattactgaggat

SEQ ID NO: 36146 - DNA, 230 bp, Glycine max
  Clone ID: 700888783H1
ttggaagtttgcttaaaagacacggagatttgacagagcgtcttgctagggattctgacaagataatatttgtgcgtctacagaaggagtttgaagctgcactagcttctcaaactgaagagatatgtttagacggggaagagtggaatgatggactatctagctacaataagagttcgggtgcatatggttgcagacagaaaactaatgcatggggtcgctgacatatt

SEQ ID NO: 36147 - DNA, 94 bp, Glycine max
  Clone ID: 700888784H1
ctcaaacacaaacatccctcttgatttgaaggttgttttgtgcttatagataaaagttctgccaaatcacttggggttttcagatcatagtgtg

SEQ ID NO: 36148 - DNA, 223 bp, Glycine max
  Clone ID: 700888785H1
gtttgaacacagatccaccaaactctggttggagaggctctttcgaggttaaatgctgtgatccagcatcttaatgctcttcattcagataatgtaatggtatatgacaatgctgtttccgctttgggaaaaatttgccattttcatcgtgacagtcttgattctgcccaggtagttcctgcatggttaaactgtttgctattaaaaggtgatctgattgagg

SEQ ID NO: 36149 - DNA, 93 bp, Glycine max
  Clone ID: 700888786H1
ggcaaaggcattgaaccagatggttgatcaaactccgctgcctctacttttcatgagaacagttattcctgcaattgatgcttttcctgcaat

SEQ ID NO: 36150 - DNA, 91 bp, Glycine max
  Clone ID: 700888787H1
ttttcatcttgtaccgtgaaggctcttcttgcctcccgctactttccctttcccgattaatctgctcccttgtttgttcactcatcaaacc

SEQ ID NO: 36151 - DNA, 224 bp, Glycine max
  Clone ID: 700888788H1
agaaaagaaaatcctcacccattttcttcgtagccaaacactctgaaattctcagttatgtcgtggcaatcgtatgtggatgatcacctactgtgtgaattcgaaggtaaccacctcactcactccgctatcatcggccacgacggaagcgtttctgctcagagcaccaacttccctcagttcaaacctgaggaaataactgccatcaatactgactttaatga

SEQ ID NO: 36152 - DNA, 223 bp, Glycine max
  Clone ID: 700888789H1
actttcccaagttttctctctcacacccttcatttacacacaacggaatcattctcctttctgctaacatttttgctttttcttcatggctttctttctttttgctattttaatcttgatggttccttctagtaatgccttttggccaccttcacttggctactggccaatttccaaattcaggtctatgagtttttattaagggtttagattcctctggggc

SEQ ID NO: 36153 - DNA, 93 bp, Glycine max
  Clone ID: 700888790H1
tgctgttaataaaattaagccaacagtgttgattggaacatcgggacaaggaagaacatttactaaagatctgattgaggcaatggcttctat

SEQ ID NO: 36154 - DNA, 94 bp, Glycine max
  Clone ID: 700888791H1
ttttcttgcacaaggaatggataatggagcagtgggataaaaacttttacattacttctattgcagggagttcaatggcagctctcttgtggtg

SEQ ID NO: 36155 - DNA, 95 bp, Glycine max
  Clone ID: 700888792H1
ctgtttcgcccgagttggggaaccggtcacagtatgttagagttcaactccctggacttaaccaagagctctttcagaaattcagggaaaagaat

SEQ ID NO: 36156 - DNA, 92 bp, Glycine max
  Clone ID: 700888793H1
gttgtaactcgttcttcttcttttgttgttctgtgtttgtgtttgtattttctctcacctgaaaatgtctctttgcggtggtaactgtggtt

SEQ ID NO: 36157 - DNA, 96 bp, Glycine max
  Clone ID: 700888794H1
ggacacttggctacatatgccagcacttttccagccatagcaagtcatggtgaaattcttgagctctccatctcattggcaatgagttccctggaa

SEQ ID NO: 36158 - DNA, 95 bp, Glycine max
  Clone ID: 700888795H1
ctcgagccgatcagcagatggtaggtgaccatgattggttgtaaataattccaaggtgactctttagtgtgcatcttcattctccagtccttgct

SEQ ID NO: 36159 - DNA, 99 bp, Glycine max
  Clone ID: 700888796H1
cacatttcattttctttacttctttaatggcccaggatttctccaaagctgttgatgacggcctcaagctctcccttcgcatatacttcgggaaggaca

SEQ ID NO: 36160 - DNA, 236 bp, Glycine max
  Clone ID: 700888803H1
tcgtcgatcaccgtacttcggcccgaaggcaacgaactcttcacagacgttggcatcgcattcgacatgatgcttctcgctcacaacgccggtggcaaagagaggaccgaagagaactggaagtggctgttcaaggaaaccggtttcgcgcgtcacaacatcatcaagatcaacgctctcccttccatcattgacgcgtttccaatctgaacaagatgccactaccacaactgcat

SEQ ID NO: 36161 - DNA, 239 bp, Glycine max
  Clone ID: 700888804H1
gtacaccaacagtcgcagtgtgaggttgccgcggttctggcaagatgccttcgaggctgcctatgaggatttgacgagcgatgtcgctgaggtcagatacgctgccgtcgccgagatcgccaagatgtctgttcgctccattcatttttatccacctcctcttcaatccacgagtgcccgatatttcagcaagagcctggaggaagccgagataggtaaagatgcaacaacctcaaggc

SEQ ID NO: 36162 - DNA, 159 bp, Glycine max
  Clone ID: 700888805H1
cttctaaagaaaaagctgagtgctccacgcgaggaagaagagaacattagcaaaggaaaaaaagataaaagagaaagaaggagagagcgagcagaataaggtgtctctcttggactgattcgcttcaatcgcatctctattctctagtactcattcatt

SEQ ID NO: 36163 - DNA, 243 bp, Glycine max
  Clone ID: 700888806H1
gtctgctgttagatctgtacccgcctagccattgatttggaaaagtccaacttcaaggatgagtaagcttcagagtgatgctctaagagaagctatctcaggaatcatggctgattccaaggaaaagaacaggaaatttgtggagaccattgatgtccaaattgggttgataaattatgatccccagatggacaagcgtttcagtggctctgttaagttgcctcatattcctcgccccaagat

SEQ ID NO: 36164 - DNA, 241 bp, Glycine max
  Clone ID: 700888810H1
aaaacaaaagggttttctattcgattcgacccatacttcttcaaatcgccatctcatcctttctcaccaaccaataccaaagactatggcgagcgcgggcaagtatccaagtccgactcccccatcgataatagaagtgaagaagccgccgccggtaaccataatctctggaccctctggaccctctggaacctctggagccttatacaactatgctgggaatgggaatagcaagacccaa

SEQ ID NO: 36165 - DNA, 226 bp, Glycine max
  Clone ID: 700888775H1
ttcttttgttaaaaaaaattgatttctgaataatataaagtcttcaaaagtacgcttccccttccacctttctttccaacgttcacaaaggaaggttggtattaaaatggaaagcaaccatagcatgaggcaaaacaccatggtaacagagtttgaggttcttgctgccagtgatggcagaaaagctggttgtggagtcctctgtctctgaactatgtggaggttt

SEQ ID NO: 36166 - DNA, 241 bp, Glycine max
  Clone ID: 700888811H1
gtcagaacgtccttgctcaactgataatggaaccggtcataaccatacaggtgcttctatcagtggcagcgcaccggcttctaaggcacaggttgttggttggcctcctattagatcatttaggaaaaactcaatggctaccaccactaacaagaacaatggatgaagtcgatggaaaaccaggtgttggcgcactctgtgtaaaggtcagcatggatggtgctccgtatctaaggaaggt

SEQ ID NO: 36167 - DNA, 238 bp, Glycine max
  Clone ID: 700888812H1
attacaatgaagccagcggcgtaaggtacgttccacgcgccgtcctcatcgatctggagcccggcaccatggactccgtcagatccggcccctacggccagatcttccgccccgacaacttcgtctttggccagtccggcgccggcaacaactgggccaaaggtcactacaccgaaggcgccgagctcatcgactccgtcctcgacgtcgtacgcaaagaagccgagaattgctactg

SEQ ID NO: 36168 - DNA, 244 bp, Glycine max
  Clone ID: 700888813H1
cacattcagatactcactcacctgtttttagtagtttcttccctattttctgttcataactcagtttgtaactatgactgctgaggttatggctcaagaggagacacaagcagctgaggttgttgttgctgttgagcccctgaaagaggagaaggttgctgaagaaaatgtgaaaccaagagagtcatcagtggaagcatccaaacccaaaatggtggagaaaagctcttcttacaaggaagaa

SEQ ID NO: 36169 - DNA, 248 bp, Glycine max
  Clone ID: 700888814H1
atcaaatctccacttcaatagactgcagtcaggcctatttcaagctggtttccctccacttgatcacactgcttccccagtattgagagtctcctccaacaatgcagcaacaatgcaaaaggtcggcacgggtgacaacgtctcttgcttactgtccatgtcaactgctactcaaccttcaaagaaagtggatgatgtgaaggcaccccaattggtgctttttggccaaacaattctcaccgaacagc

SEQ ID NO: 36170 - DNA, 248 bp, Glycine max
  Clone ID: 700888815H1
caaaagggtaaaagctcgtttgattctgatttccagtacgaatacgaaccgtgaaagcttggcctatcgatcctttagtccttcggaatttgaagctagaggtgtcagataagttaccacagggataactggcttgttgcagccaagctttcatagcgacgttgctttttgatccttcgatgtcggctcttcctatcattgagaagcagaattcaccaagtgttggattgttcacccaccaataggga

SEQ ID NO: 36171 - DNA, 278 bp, Glycine max
  Clone ID: 700888817H1
gcatgcatgagtacgtaattcggctctagcaagaatgacactatggagaatcgggttcctggatttggcactacaatgaacattctctatggggatggtgtttgtggacaaggtgatgtggactcaatgaacaatattgtttcccattacctgtattatcttgaccttcttggtgttggtcgagaacaggctgggccccatgacatccttacatgcgctgagcaggttcctttcaacccatcttccaaacctgcttcatcatcttaagattattatat

SEQ ID NO: 36172 - DNA, 248 bp, Glycine max
  Clone ID: 700888818H1
attaagcaacacacacttcaatttatcagcatggcctccgttcagtgccacaaaacctgcaaagtgagctgccaacagggaaaccagcacgcctcgtttgggcagaaagtttctgacttgttcaaagggcatcaacataatgaccacagctccaattatgccacccaaaccaaagtgctttcccagtcagggtcagggttaggccccttcaccaccaaaactcaaacacaatgcggttgcccccaaac

SEQ ID NO: 36173 - DNA, 238 bp, Glycine max
  Clone ID: 700888734H1
aattaaagcaaatccagtaccaagtttctactatgaagcgcctccccctaagactgaactaaagaagctgccactgactttgccaaaatcaccaaagctaagtcggagaatgagccttggggatgctctgaactcatctcctgaagtttgttgtcgagggcgtcacatcactggaggtgtaggttacaccaagggtggttccaatgcctctttccctcacaaaaacattattcgacgc

SEQ ID NO: 36174 - DNA, 100 bp, Glycine max
  Clone ID: 700888737H1
gaatattttctttctctgaaagaaaataatatttctaaattatctaaagcctatttcatggatgatgttgtactctgcagcaagctatgactttagtttt

SEQ ID NO: 36175 - DNA, 230 bp, Glycine max
  Clone ID: 700888738H1
gttaccattctcaactggtcctttgttagaaatgaccaacctagatctgagaccacctaccagattgctttgtctatcaaggacgaagtggaagaccttgaaaaggctggcatcactgttatccaaattgatgaagctgctttgagtgagggtcttccacttcggaaatcagagcaatctcactacttggactgggctgtccatctcttcagaatcacctttgttggtgt

SEQ ID NO: 36176 - DNA, 72 bp, Glycine max
  Clone ID: 700888739H1
aatgattcgagggttttgtggggtttggcggttagggtttagtttcagtacttaacaagtgagacaagacag

SEQ ID NO: 36177 - DNA, 230 bp, Glycine max
  Clone ID: 700888740H1
ggcgggcaaaggtgttagttcggtggctaaggcggtagcagaatatcagtatccttggcgtgagaagttggggaaatataaggatgagcttgccaagggtgtgtggtgatactgggagctgggggcatggaagccgctgagtatcattgctcggcatcgtgttagaattcgcaaggctgtcctccttgctggtgaagattggccctacgatcctgaaagttaggagatga

SEQ ID NO: 36178 - DNA, 228 bp, Glycine max
  Clone ID: 700888742H1
gaaaaagaagggattatttcatcattctagttttttggctggaggagctacattagctgctggaaggctggtggcttagaatggaattcttaagtccatctctgcttatagtggacactaccggccatcagatgacactcttgattgtttcttatcatatttcaaggaaaatggtgtcaagcttgatgaatttgagttgcacattgcaaatgaagattctgatatgta

SEQ ID NO: 36179 - DNA, 229 bp, Glycine max
  Clone ID: 700888744H1
gtttgttgttgtaactcgttcttcttcttttgttgttctgtgtttgtgtttgtgttttctctcacctgaaaatgtcttgctgcggtggtaactgtggttgcggaatctcctgcaagtgcggcaacggcttcggaggctgcaagatttacccagacttgagctacactgagtcaaccaccaccgagaccttgttcatgggagtggtacctgttaaggctcaatttgaggg

SEQ ID NO: 36180 - DNA, 233 bp, Glycine max
  Clone ID: 700888746H1
ggaggacagaagggcttgacccggtttacgctcaagctgttcagatgaaggagagggatccggtcaccgggaagatgatgattgtcaatccacagagcagtaggcttgtgtgggaaacttatttgactgaattcaagtccttggggaaatttgcagtgaggctattattccttcacgcaacctcgtgtggcttcatatgcaattggtctttgtggagatgggtttgtgcacaa

SEQ ID NO: 36181 - DNA, 234 bp, Glycine max
  Clone ID: 700888747H1
ctggaagctacgggcttcctttctttggacccatgagtgacacacatgactatttctacaaccaaggacgcgacaagctctttgccgaacgaattaaaaagtacaacctcacggttatacgaaccaacatctcaccgggtcctttcattccctctaatcctagagtcatcgctctcctcctcggtgtctccttcctcattctattcgaccaatccaaggtcgataagcgcgatg

SEQ ID NO: 36182 - DNA, 103 bp, Glycine max
  Clone ID: 700888749H1
atcaaggacaatgaagaagctgtcaaggcttatggaattcacctgggaactgaaatgtgcaaaaagattttagctcatttaattaagacattgcatctttata

SEQ ID NO: 36183 - DNA, 234 bp, Glycine max
  Clone ID: 700888751H1
accgaaacccttcttccattaccggcgaacgaagtcggtggcagaaaaggaacaacctcgattcccaaatcgtaaactccgatgacgaccgctgcaagacccacatgcgcacctgctaaaggtggcaattcacaaggcggtactcgaattttcggtccctcacaaaagtactcttctacggacatcgcatcgcataccactctcaagctcaggaaggaagggcaggacactcag

SEQ ID NO: 36184 - DNA, 98 bp, Glycine max
  Clone ID: 700888752H1
cacaagttgcaagcattcactgacgcatatgcagaacttgcgcctgctttgtctggtttgaatgtgcttgttgattcctactttgctgacatccctgc

SEQ ID NO: 36185 - DNA, 229 bp, Glycine max
  Clone ID: 700888753H1
gagcccgcagccctaatcctaaaccctagcaatactaatagtagaacttattcgcgatctcgttctgttctgtatctgcacccagccgcagcagcaagtgatcgtagcgaaaagagagtaatcagcatagaaattcatcgtcgtacttatgggtaaagtctacggatcacttgcacctgccggtaaggttataggccaaaccccctaagtggccaagccggataagaag

SEQ ID NO: 36186 - DNA, 92 bp, Glycine max
  Clone ID: 700888754H1
aggcgaagaaagaactagaacagcaagaatattttgatccaaagttggctgatgatgagagagcaaaaggtactttattcttcaagcagcag

SEQ ID NO: 36187 - DNA, 227 bp, Glycine max
  Clone ID: 700888755H1
agattatcgtgaatgcgtataaaaggaaaataaagaaattagcgtcaaaatgttgggtgtgttcagcagctccttagtgtcgccgccggacgagctcgtggctctcggcagccgtactccgtcgcccaagatgacggcggcggtgctgcggaagcggttcgaggagaagaacccctccgccgtgtcggtctaggtcggagagcttgtccagctcgtttatacccacc

SEQ ID NO: 36188 - DNA, 97 bp, Glycine max
  Clone ID: 700888756H1
acttttcaactctcttttacctttttcgtagttttcactaacactcccctattttagctctcacaaacttcgtttagtgacaatatgaagaaagttg

SEQ ID NO: 36189 - DNA, 223 bp, Glycine max
  Clone ID: 700888757H1
gtttgttgttgtaactcgttcttcttcttttgttgttctgtgtttgtgtttgttttttctctcacctgaaaatctcttgctgcggtggtaactgtggttgcgttagctcctgcaagtgcggcaactgctgcggaggctgcaatttgtacccagacttgtgctacactgagtcatccaccaccgagaccttggtcatgggattggccctgttaatgtcaatttg

SEQ ID NO: 36190 - DNA, 227 bp, Glycine max
  Clone ID: 700888758H1
tgcaacagaacaaccagcagctgaggttcctgcaacagaacaaccagccgctgaggctcctgccccagaatcaaccaccgaagcaccaaaggaagaaaccaccgcggcaccaacagaaacagtagaacaaacaactacagaagctgccccagaggagcctcaagaagttccagtctagaccgaggaggtgctggcaaaggagacacaggaagagacgccagcagaag

SEQ ID NO: 36191 - DNA, 230 bp, Glycine max
  Clone ID: 700888759H1
ctggaggagaagtctttggaggtcaaagaacattgattcctcttcatgctatgtttgaaaatgttattgatagatcttctctaagcactccttgggaaatgattattgctctatgggaaagaggtgaatcttgttgatactcctggttcgccacctttcgtttaagaagtaacaaagcgtgcagcttggaaatttgcaggtccacttcctcgcccacttcctccacctcc

SEQ ID NO: 36192 - DNA, 99 bp, Glycine max
  Clone ID: 700888760H1
agtccggcgagcagaagtgggtgcacgagggtctcatcatggagtctctcccgaacgcggaacatgccgttcgggttagactccatgatgagacctccc

SEQ ID NO: 36193 - DNA, 99 bp, Glycine max
  Clone ID: 700888761H1
tagatcgcgagcagccgcccttttttttttctcttgacaggggagcttatataattgttactacgtgtggctggcttggacatagtagttgttagcatg

SEQ ID NO: 36194 - DNA, 233 bp, Glycine max
  Clone ID: 700888762H1
gatagctagaagcaataagatgaaaatgaaagtgcttgttttgtttgttgctacagttttggtagcatatgaatgctatggctcagactaccagaagttccctctcctaatgaaaactgggtttggtggtcaatacagcaatgaggttgcatgtgccagttggtggcttggcgtggaatcaaacaacgtagtcatatggcaaactgttcctgcagcttgcgtagagtacatag

SEQ ID NO: 36195 - DNA, 102 bp, Glycine max
  Clone ID: 700888763H1
cgagaaagtcgtactgattcctcttcatctttcgttaaagcgagtacttttcgttcttgatctgttggttacgatgtcttattcaaggagatctaggtattc

SEQ ID NO: 36196 - DNA, 223 bp, Glycine max
  Clone ID: 700888764H1
ctctctctctcaacccacaagaatccctccctttctggctttctctctctaaaactatcatgtcctccaccgcggctcccctccttcccatatccaacccccaaaccaccgccgcagaccggcgccatcgaccctccggcgaacaaccccgccttccgcgccttcatcaacaacctctccgccctcctccgacacggcctcgaccagcgcccgccgtggtcgg

SEQ ID NO: 36197 - DNA, 232 bp, Glycine max
  Clone ID: 700888766H1
cgagtcgtggaaagtcatgtgagagagaaaaaaatattgagaatttgagatgagatagattcgctgaaaattttcttttggctttttccctttttgcccctctcgttggttaatgaatctggacggggttagttagctagctaggcttatttatgtaaattctggaagggaaaatggttatgaaactagtatcttttttttttttctctttatgtaattttctttacatagt

SEQ ID NO: 36198 - DNA, 231 bp, Glycine max
  Clone ID: 700888767H1
cttcacacccaccataataataatatcttcattgttcttttcatctttgttaccattaaaaacacacacacacctccaacaacactctcaaactaacaacaacaacaaaagaccatgtcggtgaaggcatgcgagcaccacaagggcaagaagaggaagatcctccggcaagtgttcccgtgcttagtggtgctcctttcatcgtgctggtcacaattcccctgatatggg

SEQ ID NO: 36199 - DNA, 227 bp, Glycine max
  Clone ID: 700888769H1
agccttccatggcttccgcttgtgcttcctctgcaattacagctgttgccatctctacgccgagttccgggcttaagaatggatcaggaggttgttttcttattggaaggaaattgagggtgaaacaggagagagcagcaatttgaggacgatcgatgtgcactacagtgtgcgcagttgctgagcctgtcagacctctatgtttcccaggcagccctcctcctcca

SEQ ID NO: 36200 - DNA, 225 bp, Glycine max
  Clone ID: 700888770H1
actcgagcgattcggctcaggagaagaatgatgcaaatggagaggctgcaagcgtaaaagggatggatgattacaaagaggtgttgatgtcccaaatgaatcttgagaagaaatttggacaattctctatttttgtgacttctaccttgatggaagttggtggtgtgcctccttcttcaagtccagttgccctgcttaaagaagccattcatgtgattagctgtg

SEQ ID NO: 36201 - DNA, 104 bp, Glycine max
  Clone ID: 700888733H1
cattgctcaggtcgttattgacgagagtaggccctttggccatgactaagttacctggaagcagatcttcctacttgttagttgtcgtctgttgttgcgctgtg

SEQ ID NO: 36202 - DNA, 225 bp, Glycine max
  Clone ID: 700888771H1
actcgagccgaatcggctcgagctagaatcactcagcactggataagaaattaatggttaattcacagggagttatgaacttttggtacctcaagcttaccgttgaggatcagacctttctgctttctgtggtgacagttcatcaaagatgataacaatttcattacacgaaaggttttcaaatccgtttccttggtttatttcactgctgatattatgcaatgg

SEQ ID NO: 36203 - DNA, 226 bp, Glycine max
  Clone ID: 700888772H1
actcgagcgctcgagccgctcgagccgatcaggctctgcagagacagctcttacagaagcatgcaagagagtttgagagcacgcggatgggagaggaatgggttgacagcctacaatcaaaagatcaaatcgaagccaagtctcttagcaagtatgaatctacaacgagaagataaagagcgctggcttatgcattcactcatcagcaaaattggcagaactcatc

SEQ ID NO: 36204 - DNA, 228 bp, Glycine max
  Clone ID: 700888773H1
gtgaatctcaaaaaggagtacaagggcattttctggcaagaagagatcattccattcttccaaagtgccacctttccaaaagaatgcacttctgtccaaaaattctacattgaactctccaagcactgtcaaagagaagcttggtgctgttgatccctatttcaccaagcttgcatatgccatggtgactctgattgaagctctggatgagcttacttgcaccacatc

SEQ ID NO: 36205 - DNA, 225 bp, Glycine max
  Clone ID: 700888774H1
gtgtaatattcttaaacgtgtacccaacagtgcactctggctcctcagatttcctgcagctggggaaatgattctgagagcatatgctgctgcacaaggggtataaccggatcaaattattttcccagatgttgccacgaattatgaacacatcagatgaagttctttagcatacttattccttgacccgcctttatgcattgcacatacaacatgaacagatat

SEQ ID NO: 36206 - DNA, 178 bp, Glycine max
  Clone ID: 700888695H1
tatttctggaccaggtcctggatatgcgagacatcatatggatggtatagctccaacaagtcctgttcgtgaatatgctgagatgtcctccgggagattgaggctgcactctggcagtcttgttggtaagtcaggtatagatgattttgatgacagagttgcacgtcgttttggtgaa

SEQ ID NO: 36207 - DNA, 244 bp, Glycine max
  Clone ID: 700888701H1
caccttgcgaactccgccttctacaactctctcttctgctgcatcttccattcacagaacaagatccaccaccttctccttctcctcttgttccccaccaactcttcgcttcaatctccacagctccctctctcttacttccgcttccgcttcctctcccactaccgcttcgaccactgagctggacgcctgtcctccttcagcccgatcgttcccgacctctcgttttcgctcttttcgaaaa

SEQ ID NO: 36208 - DNA, 243 bp, Glycine max
  Clone ID: 700888702H1
agccaaatggtgaaagggttttctcgtttggcagaatccctagatgatcttgctcttgatattccatcagctaaggcattgtcttagtcatttgtccccaaggcaatatctgatcgatggcttgatgcttcacttaccaaacctgcaactgaagttggggaaatccaagatcatgagaaggtgaggtcttacaaaaaggaatctgtaactataattcatgagtattttccttctgatgacatt

SEQ ID NO: 36209 - DNA, 240 bp, Glycine max
  Clone ID: 700888703H1
cggaggtgagcagtgtcgacgaaatctacgacggagtggtggatctgctccggagcccgatctcgcacccgcgcgcgctcacgatcgggatcaaggccttgttcgcgctttgtctggtgaagaatacgcggcagatcgcggtggacgccggcaccccggcggttctagtccaccggctcgcggacttcgagaagtgcgacgcggagagggcgctggccacggtggagctcctctgccgga

SEQ ID NO: 36210 - DNA, 238 bp, Glycine max
  Clone ID: 700888704H1
ctactgcacacactctctctctctctctcattgtatggccgccaattcgagtagccgagggatcaccgccttggggaagcgtttcgccaaccagatctggacttccaacccccccctcagctcctctcacttctaggaggggagcaatagcatctgcatacagtagctgcggcgggtcagtgtctgacaagaaccctgttgatcagatccactctggggcggtcctcgacgatgtgat

SEQ ID NO: 36211 - DNA, 235 bp, Glycine max
  Clone ID: 700888705H1
agatcattcaaactacaaaggcacatatctatagcatcctagctatatctgggtgaagaagcaaaatgaaaatgaggcttctggtaattgcactaacaatattgatgcttccaagttcttctatggctatccatgtgaagactttggtggccaacaacatgctacaagagaaggagggagatcacagtaatggtaataataatgagcattcaatccctctgacacgctatagtga

SEQ ID NO: 36212 - DNA, 235 bp, Glycine max
  Clone ID: 700888706H1
aaagattccagctcgtctttgctgatgtgttcaagcatgatataactgaaggaagacctaaacttgcaacatggattgagtaagtgaacaagattagtgcttatacacagtcaagagctgatccaaaggaaatcgttgatcttttcaagatacgttttttggctcaacagtgaaaatttggttgcagtgggtatcctctaagttgtagattgttgtcaataaattgttgtgtgtt

SEQ ID NO: 36213 - DNA, 232 bp, Glycine max
  Clone ID: 700888707H1
gagattagttttgagaagaaaccagcaatcggcgattaggagtgagagagatatggagggaattgaaggaaatagcagtagatacagtctgaaaccctcgcgaatttgtaacgaagatgttctgatctgcgtcgacgtcgatcctcagtgcctcgtcgaaatgtcaggtgccaccggtctcaatggcagacccctcacccgtttggactccatcaaacaagccatcgttctc

SEQ ID NO: 36214 - DNA, 102 bp, Glycine max
  Clone ID: 700888708H1
ctccttactactatcagagtgctcctccaccatctcccactgctcatcctccctattactacaaatcccctccaccaccatcgtgatagcctccacctcctt

SEQ ID NO: 36215 - DNA, 233 bp, Glycine max
  Clone ID: 700888709H1
gtttgaaaatgagttgaagtggtattggactgagccacaacaaggaaatttcaattacaaagatgctgataatctgctatgcttgtgtcagaagcacaagatacaaactcgcggtcattgtatcttctgggtagtggatgaaactgttctgcagtggatcaagttactgaacaaaaacgatttgatgacggctgtccaaaaccgcctatacggcctgctgattcgctacaagg

SEQ ID NO: 36216 - DNA, 232 bp, Glycine max
  Clone ID: 700888710H1
tggcaaccagaattttcctccaccaaaggggaagcccattgaagaatcagctgcttcttttttggttcatcaagcaaaagttaaccctggcaaagtcactgtggtcgcattgggcccgcttacaaatattgccttggctatacagctggttccggaatttgctaataacattgggcagatcctgattcttggtggtgcttttgcagtaaatggcaatgtgcttccagctgct

SEQ ID NO: 36217 - DNA, 103 bp, Glycine max
  Clone ID: 700888711H1
ccaaactccatttctcactcgccgtcgtctcttccgtctagggtttctcctcttcacaaaaatggttgccgcaaaaaaaattaagaagacccatgagagcatc

SEQ ID NO: 36218 - DNA, 232 bp, Glycine max
  unsure (1)..(232): unsure at all n locations
  Clone ID: 700888712H1
attgtttgttgttgtaactcgttcttcttcttttgttgttctgtgtttgtgtttgtattttctctcacctgaaaatgtcttgctgcggtggtaactgtggttgcggaacntcctgcaagtgcggcaacggcttcggaggctgcaagatgtacccagacttgagcttcactgagtcaaccatcaccgagaccttggccatgggagtggccctgttaaggctccatttgagggt

SEQ ID NO: 36219 - DNA, 236 bp, Glycine max
  Clone ID: 700888713H1
cacaaatgatgagattgcagctgatcttaaagaacacgtgattaagcctgtgattcctgagaagtaccttgatgagaagaccattttccatttgaacccttctggcaggtttttcattggagggccgcatggcgatgctggtctcaccggccttaagatcatcatcgtcacctatggaggatcgggtgcacatggtgtgtgtgccttctcttggaaggatcctaccaaggttgata

SEQ ID NO: 36220 - DNA, 240 bp, Glycine max
  Clone ID: 700888715H1
agccagcttggagctaggctcaccaagctttccaaagaccaagctgattacatcagtgtgcctgttgagggtccatacaagccttctcactacaggtactgatccatcctattgtgggagaataaacctaaactattctatcaattcccgaggcttcattgttacactttcctttttggattttttccattacaatttacatttgtggtagcataggagcttctttttcctttttttagt

SEQ ID NO: 36221 - DNA, 104 bp, Glycine max
  Clone ID: 700888717H1
ccctgagccatggtaccatttccctcataaaattctctcttcctttttgggatctcctattccaagcttcaatcttttctctcttctcacagccttcttcactc

SEQ ID NO: 36222 - DNA, 105 bp, Glycine max
  Clone ID: 700888718H1
aaaagacactgttgtatggctcaacaacagtgtcctctccacccattctctcttggagcacaccgatgttgctgtcctctctgacaatgaagacatttatgacat

SEQ ID NO: 36223 - DNA, 238 bp, Glycine max
  Clone ID: 700888719H1
aaaagttgcaactacttcctcagaaaaaaagtttctaagttaaggaaatccagagagacaaaaatggccggtgacggtgcctttacatgcatagacatcctccttgccatctttctccctcctcttggagtctctctcaaatatggctgccacgtggagttctggattcgtttggtgctgaccttctttggttatatacctggaattatctctgctgtctatgctatcaccaagtgat

SEQ ID NO: 36224 - DNA, 235 bp, Glycine max
  Clone ID: 700888720H1
agaaaagttagggttcacaacttttccttttccttttgcttgcgaatctgaatcaaataatcaatcatccattcattatccaacatgtcgtcggcgaagaaaatcacgctgaagagttcggacggcgaggctctcgaggtggaggaggcggtggcgctggagtcggagacgataaagcacatgatcgaggacgactgcgccgacagcggtatccctctgccgaacgtgacgagca

SEQ ID NO: 36225 - DNA, 234 bp, Glycine max
  Clone ID: 700888721H1
tgtgaaactaacaacaacacaaggccatcatcatggcagctgcttccccaatggcaagccaactcaagtccaccttcactaggactcttgtagctcccaagggcctcttcgcctcttcaccacttcacctcttgccttctagaaggcaatctagcttcactgtttaggccatccaatcactgaaggtacaccaccttctccaatttactttctaattagtatctactctctttt

SEQ ID NO: 36226 - DNA, 101 bp, Glycine max
  Clone ID: 700888722H1
gaccatgcctaagagagtggaaggagttgtagccatgaagcagcactttgtgcttgtacatggcataggtggaggaatttggtgctggtacaaaatccggt

SEQ ID NO: 36227 - DNA, 236 bp, Glycine max
  Clone ID: 700888723H1
ctgaaagtgaaggtgaagaaatgcttcttcaaacgaggcaatttggcacagcgtgtccatgggtcagactcacacccccaagcaaaagaaatagctcagtctcattcagaaggagcaattgtggcccaacatgttcggtgtcccaattggaattgaagagtgtgagtgagagcaaaatcaagccgtatccatcagaggcatcgaggaccataatggagttggctaaggtgggcacg

SEQ ID NO: 36228 - DNA, 229 bp, Glycine max
  Clone ID: 700888724H1
ttcctcctttagccgcaacccatattctaagcttcctttctcctactgttctgtgtcgggccagcaaaactgttgcgtgtatctttgcctctgaaggaaagttgtgcctattattatggcttattgctctagtggcgtagatcccctcaacagttatgcttgcactgccttttgtcttcgagactaacaaacttgattgtatgtcttcttgttgctaatcttttgattt

SEQ ID NO: 36229 - DNA, 233 bp, Glycine max
  Clone ID: 700888725H1
ccaaccaccaaattaatccatatatagagagagttaggaaaacaatggaagccatttctcctaagcatcttatgacattccttgtaataattatagcttctagtttgatcgcacactgtggctgtgccaagtgagggggtgaaagaccatacaaagaagccaactcactgttcataagatcatcttgcagctccacaacatatccaagtctctgctacagctccttagtgaag

SEQ ID NO: 36230 - DNA, 229 bp, Glycine max
  Clone ID: 700888726H1
tggcagtgactcttacatcaacactctttctggctttgctatttgctgcttcagcttttgctgctcttcagcctagattacctgaagcttacctccaaaatgggaacgttgaggagcagccaaaccctatatacctgaagaaaacaaagctctttggtaaattcgctttgcctaaatgggagatcaatggtctggttgagtatgtttctgggggtccccacctggaggc

SEQ ID NO: 36231 - DNA, 231 bp, Glycine max
  Clone ID: 700888727H1
gatgaaacttatgagactgaggatgttcccgctctatcagatgcattgcaactcatccccctccttgtttactgggttttcgcttccctcgtcgcttgcaacaccaatatccagggtgtttcgaactatgtattatcggacttccgttgcaaactttctaccgttctggatgagttcattcatcacctggagatatgcgagcaacataaagctagtatattagactaccgg

SEQ ID NO: 36232 - DNA, 232 bp, Glycine max
  Clone ID: 700888728H1
ggagggtctctttctgagattgttagggcttatcctcacatcaatgccatcaactttgacttgcctcatgtggttgccactgctcctaagtatgatggaatcacccatgttggaggtgacatgttcgtgtccattccagatgctgatgttatttacatgaagtgcattctgcatgactggagcgacgagcactgtgtcaagatcttgtagaactgcaggaatggaataccag

SEQ ID NO: 36233 - DNA, 101 bp, Glycine max
  Clone ID: 700888730H1
cttgtggcagccaagcgttcatagcgacgttgctttttgatccttcgatgtcggctcttcctatcattgtgaagcagaactcaccaagtgttggattgttc

SEQ ID NO: 36234 - DNA, 91 bp, Glycine max
  Clone ID: 700888731H1
acaaaataaatacatgttttttttattcaacatagattccatgaatagccagtacatgccagcacgcttgtgtttctggcaggatttatat

SEQ ID NO: 36235 - DNA, 174 bp, Glycine max
  unsure (1)..(174): unsure at all n locations
  Clone ID: 700888693H1
gcaaaacatacagcatagattctctcctanctgcattgctacgatcactagatgaacaaaggtcaccaaaggcaaaattggctgttattgagtttcgcataagttcgtttaataagcatgcaatagatccagaaggtgctgctaatattggcatcctaaaattatggcttgcca

SEQ ID NO: 36236 - DNA, 241 bp, Glycine max
  Clone ID: 700888732H1
agggggtttgccaatcagataactactatagaagaagcaaaacgattctacccactgtttggacttggggccaatgtagccctctttttctctggccggacagtgaaatacttctctaatctgaggcagaatttaggtcttggagttgatggttctgccatctctctgaaattaatgatgagcatagttgtgggtatggggtctgcaatttgttttctgtactggtgggtgaacaattatg

SEQ ID NO: 36237 - DNA, 177 bp, Glycine max
  Clone ID: 700888652H1
atgcaacatctagcatttccaagggaattctttaagatagatttaggctggttgcatttcattaagcatgttatccaattgtgtaaagaaacaaaaatggacatttttttcactggatttggaaatgttcctccgacacactctcaatagcacaaaggtatcttcagttattgtagc

SEQ ID NO: 36238 - DNA, 181 bp, Glycine max
  Clone ID: 700888653H1
gacacaaccattctgtggacgccatgagcaaaacctgcatgttttctccctttggatggaaaggaacagttatgcttttcttagtaggatttggtcctctctctctttttaccttttgattggtactatggttggtgccttgttggttggtgcaactaactggcaagggttgttcattgtt

SEQ ID NO: 36239 - DNA, 178 bp, Glycine max
  Clone ID: 700888655H1
ctccactttactcatcttcaatcagttgcatattctttgctattccaatggccactgttgaggttgtgtcagccaaggttgccctcccagaggacacaaacgaggcatcattgaaggttgacgaggagaagaacacagaagaagttgttgagactccaacaccagaaactgtggtcac

SEQ ID NO: 36240 - DNA, 177 bp, Glycine max
  Clone ID: 700888656H1
gttagtagtcctgtggcaataatcatgggagttggaatgtggtggctcccagcttctcctagatggttactattacgtgctatacagggaaaaggggctgttcagaattcaaaagacatagcaattcgtagtttgtgtcagcttcgaggtcaagctttttatgattcagttcctcgg

SEQ ID NO: 36241 - DNA, 181 bp, Glycine max
  Clone ID: 700888657H1
cacacacattcttcaaaaacaaaacccaccatgactgatagggttcacccttcggccaaaaccaccgccaacgccggccccaagccgacattccccgctacgaaatcccagctttccggcgccaaccgccccacctaccgcccccaaccgcagcaccaccgccgccgccgtagtcgcggat

SEQ ID NO: 36242 - DNA, 180 bp, Glycine max
  Clone ID: 700888659H1
ctcatcatgggttgtgaaagcagagaagtgagatacactaagttatcctcataaatacactctaattaggtggcaagataagtgtctaaccatagtaacacgtgccacatatagtgttcattttggaattgtgccactaaaattctattcaagtcatctatagctgcctcttcttatgct

SEQ ID NO: 36243 - DNA, 180 bp, Glycine max
  Clone ID: 700888660H1
acgagttaactcactaacaatcacatggcttctgaactcaccaaactgatccttccatggaaagttcgcttactcatttccctcctttccaccctcgcccacacctctcgccgctccaacgccaccatcaaccgccgcctctttaacctcgctgaccgccagtcactgccaaaccccacc

SEQ ID NO: 36244 - DNA, 182 bp, Glycine max
  Clone ID: 700888663H1
ttgctatatatccacgttataagattgaaaacgcttgcattcaaatatcaagctagttccttctggagacttgcacaaaggtgctctcctgactggcatgatcattaattggctctatagggtctgtagtatctggaccccttagtgcattcattgcttatgttctaagtgctgtcctcagt

SEQ ID NO: 36245 - DNA, 121 bp, Glycine max
  Clone ID: 700888664H1
gtccaatcctgcagctgactagctggaaatttaattgagatacctcacagactacttaatggacacaatttggcttcaaaggttctctcaacatggctgagcgatgaaggaccaagatatt

SEQ ID NO: 36246 - DNA, 180 bp, Glycine max
  Clone ID: 700888665H1
gaccttgaaagttgctttttcaagtgtcagtagcgggacgttctgtcaatcggggaaggtttttggtgacaacacctggagatatcagaagtgagaatgctgacatgagtaacgataaatcctgtgaaaaacacgatcgcctgccagtggaaggctttctgcgttcagtcaatctacgca

SEQ ID NO: 36247 - DNA, 177 bp, Glycine max
  Clone ID: 700888667H1
caatttatttttattctcctctctcccttttgttttggctatgtgtgggcaggtggccagggggtcaagtcaatgttctaattcttactgacttcctctcatgtcatcttggtttttggtttccttgatgtcaatcagtgctgatgctcaataacagcaacaacttcaactgcaaca

SEQ ID NO: 36248 - DNA, 179 bp, Glycine max
  Clone ID: 700888668H1
tggcaaaggccagaggacatgacaaccgaccgtcatgcctacaagatcgatccaagcaatcccgggtcggatcttgccggagaaaccgccgccgctatggccgctgcctccattgttttccgacgctctgaccctgcctatgccgccgaactcctccgccatgcctaccagctatttga

SEQ ID NO: 36249 - DNA, 179 bp, Glycine max
  Clone ID: 700888669H1
ggcgagagcaagcactggtcttcaatacccagacaggttctacgccgcggcctctgacgttggattcgacggatccaccaaatctctcacttccaagttctccaactccaccgctcttcttctctacagtctctatcagcacgctagtataggaccttgtaatgtcccagaacccagtt

SEQ ID NO: 36250 - DNA, 185 bp, Glycine max
  Clone ID: 700888670H1
gcacgtgctgggtaggccacttgcgtggtccttccggaagaacatgtcgcatgtgcaaaagcacgttgaagaggacagcgtgacgaacagcagccctgatgctaggttggtcaaagttagcatggaagtagcaccttaccttcgcaacatggacttgaagatgtacaagagttaccgagagctct

SEQ ID NO: 36251 - DNA, 186 bp, Glycine max
  Clone ID: 700888671H1
cttacctttctctcttctctctagccgcccaaaccctaactgcctaccctattccgctttctctcatccatcatgaaaagaggatagtccaagaccggatctaagacagccgatgccaaacttgctgtgaataagatgggcgccgccaccaagactaggaaacccgccggaaaggggaaggcagcg

SEQ ID NO: 36252 - DNA, 184 bp, Glycine max
  Clone ID: 700888672H1
tgacagtgaaagcaaggctgaactagacaggttctgtgatgctcttatttccattagacaagaaattgctgagattgacaaaggtaatgctgacattaacaacaaagtacttaagagcgcccctcatccaccatcactgctcatggctgatgcatggacaaaaccatactccagggaatatgca

SEQ ID NO: 36253 - DNA, 179 bp, Glycine max
  Clone ID: 700888673H1
cttcaaggagttaggaagacaacggtttgcgcatagttggcaaattatctcaagaaacagggaaaaagttgcatgctagttgctggggacgtttacaggcctgctgctattgaccaactggctatattgaggaaaacaggtggatgtgcctgtctatacagcaggtaccgatgttaaac

SEQ ID NO: 36254 - DNA, 179 bp, Glycine max
  Clone ID: 700888674H1
aaagattccaccagctgatactcgctataggacagcggatgtcacggcatctaaaggaaatgagtttgaggattactttttgaagcgtgactgctcatatggactatatgagaagggttttgaaaggccttctcccatccaataagaaatcatagcgattgctcttactggtagtgaca

SEQ ID NO: 36255 - DNA, 177 bp, Glycine max
  Clone ID: 700888675H1
ttcttcctcaataaaccaagaatcaaggacatgatgagtgcatgccgcaagaggagacaatccaacagaacattcacttcaagttctgacttgtcaacctcttctttccttcacatggagctctctactcagtttcatcaagttttcaagcttatcgacactaatggggatgggaag

SEQ ID NO: 36256 - DNA, 179 bp, Glycine max
  Clone ID: 700888676H1
gtccttgaagggggtattccatttaacaaagcatatggaatgacagccattgaataccatggaacggatccaaggtttaacaaggttttcaacaagggcgatggctgatcactctaccattacaatgaagaaaattcttgagacctacacaggctttgagggacttaaatccctggttg

SEQ ID NO: 36257 - DNA, 176 bp, Glycine max
  Clone ID: 700888677H1
catatagcactgattgtcacgcacaactcagcttcagttcgtgcttcattaacatgggtgctggtgactactccaaaatactcaaggtgaagcatgacgccactgatgaagaagtgaacaaggcttataagaaattggcaatgaaatggcacccagataagaaccttgaagaccct

SEQ ID NO: 36258 - DNA, 177 bp, Glycine max
  Clone ID: 700888678H1
tactgaggagagcatcatcaaatcaaccatggctaccctcattgctcccatcaccttttcgcctggtatagatgcacaagctcttaggaaagctttcgaacgatgggggactgatgagtagaccgttatagcaatattgggtcacagcaatgatcatcagaggcaacaaatcagaaa

SEQ ID NO: 36259 - DNA, 176 bp, Glycine max
  Clone ID: 700888679H1
ctactatgcctgtctcatatcatatttcatgtctgttgctcttttcttctcttcttcttcttctactacccttcaatattaatattccgagcaaaaaccaccaacaacaacatcaccaccaataagaagaacaagattggcgtaatgggtctcttcctttctaggaatttggcttg

SEQ ID NO: 36260 - DNA, 177 bp, Glycine max
  Clone ID: 700888681H1
atagtccaaagaatcgatggcggctttgcactgtgactcaagtggaggaagccaaatgtgtgttaagaatgttaccagtttggctatgcaccattgtatacacagttgtgtttacacaaatggcttctctttttgttgagcaaggggatgtcatgaactcctacataggaagttttc

SEQ ID NO: 36261 - DNA, 178 bp, Glycine max
  Clone ID: 700888682H1
cgaagatggcaagaatatcaaattggtctcttgtcttcctcatcatctctacactactccacatagagcccagcctctcaagcccaagcaccaagcacagcccaagcccgttcataaaatcctcctgcagcagaacccagtacccagccctctgcgtctcatccctctccgtctacgc

SEQ ID NO: 36262 - DNA, 177 bp, Glycine max
  Clone ID: 700888683H1
aatttggtatgcccatttccttaacctcacttcattcatcttttgaaacagggtcatggcttccgaaatgactctcttttcaaatggtggcacatatgaaaccaaaatttctcagatgtccaggagggtgttatgtagaaggacatgatctcggaaaccgatttcaatggaaagata

SEQ ID NO: 36263 - DNA, 176 bp, Glycine max
  Clone ID: 700888684H1
ccttatttggtgaccaagcatttgggaagagttgtcccctccgacgacaactactacgccgcgttgaactccgccgtcttcagcgacgggtcgttttgctacattccgcaggacaccaagtgtcctatgcagatttcgacttacttcagactcaacgcgttggagacagggcagtt

SEQ ID NO: 36264 - DNA, 186 bp, Glycine max
  Clone ID: 700888685H1
tgctactctctttgctggtatctttcagacttcctttggactcttcaggcttgggttccttgtggatttcctatcccatgctgcaatagtaggatttgtagcaggagagccattgtgattgggcttcaacagttaaagggactcttaggaatcacccattttacgaccaaaaccgacatagtctct

SEQ ID NO: 36265 - DNA, 180 bp, Glycine max
  unsure (1)..(180): unsure at all n locations
  Clone ID: 700888651H1
tcaaaagtagtgcagttcccaaatggcaataatctttctttcaagctccgcaattcttcttccaagtcttgctttcttacncacattatttaaccatgcaagttccgaatcattcatcggcgtgaactacggacaagtcgctgacaacctgccgccgccgtcggcacggcnaagctgctc

SEQ ID NO: 36266 - DNA, 185 bp, Glycine max
  Clone ID: 700888686H1
cttcttccttattttcttccctagtcaaggagattcatctctgcaggttgttttagaacagaaaaaatggtgaagatttgctgcattggtgctggatatgtggggggccaacaatggcagtcattgctctgaagtgcccctccattgaagtggctgttgttgacatctccaaatcccggattgca

SEQ ID NO: 36267 - DNA, 186 bp, Glycine max
  Clone ID: 700888687H1
actcggcccagcatataacaattgctctgcagctatacgtgtattctctctagattcttctctaaaacgccgtcgttttcaacctctttttttcccctacgcttcatcgactttgtaaccgaaaggggggaaaatataattaacaccgatttcgcgaccaattcttcttctgcgttgaattgggac

SEQ ID NO: 36268 - DNA, 177 bp, Glycine max
  Clone ID: 700888689H1
atatgaaatgtcatttcatgcaagtgattgcagatgctctttactataatgcagctttgactctcagcacagtgcaaaagctaggtgttgcatcagaaatattccatctttggttccatttgcttcaacaagttaagacgagtggcatgcgtactaattttaaaagggaacatgaaa

SEQ ID NO: 36269 - DNA, 176 bp, Glycine max
  Clone ID: 700888690H1
agatggtgttgatgtccatcagactagctttatcaccgagttcggtgcattgtcaactaatagagaattggtttttagcaactattgccgtcaactagacagatccagtccatatattaacaaattgcctgaggctcttgaaggaaaagcagaaaaattctcgaaacagagaaatc

SEQ ID NO: 36270 - DNA, 177 bp, Glycine max
  Clone ID: 700888691H1
caccctctgtgcaacacagcttctatttcaccttccccagaaaatagccttttctttttccctcaccagcagtgttcctttgctgttattctagcttcattaatcacacactcacacgcgtagcgccaggtggagtaaaacacactagccaaacggccatgctttagagctcaagaa

SEQ ID NO: 36271 - DNA, 56 bp, Glycine max
  Clone ID: 700888692H1
cgaccccataatagactactggttgtgtatgtatcagatgcagttaggcgttactc

SEQ ID NO: 36272 - DNA, 189 bp, Glycine max
  Clone ID: 700888613H1
ccgacgtcttgcgcacccctaaattgtaaaattgtatttactttgaacatcaggtaccttggtgctgcaattttggtcgaagatgctgaattggtcgaaggagggttggcagtcgctatctaagattgatcttcacggcaatgttgcttcgaaggtgatcgtgactcgccgatttggaagcggcgttaa

SEQ ID NO: 36273 - DNA, 188 bp, Glycine max
  Clone ID: 700888614H1
gagatcgagaaagagggtgtttagagacgaacatatgaattacgtaaagaagcagctgcagcaacttttcttgtgcaatacccgtcagatgcaaatgcaaagacactcagcattataattactactgagtatatgttcctttcatccttctgtgtcctgaccatgccagtcggactccttcaaaggga

SEQ ID NO: 36274 - DNA, 202 bp, Glycine max
  Clone ID: 700888617H1
ggaatccggctcgagctcttcaaaaggtagaagaaacggaatgaaaactctcaaaaaactattacagcaatggcagaacaaaacctaaaccaaacaactggagctggaaggcatcaaaatgttggtaacaagagccttctacacagtgatgcactttaccagtatatgctggcgactcgtgtctacccaagagaacctgaat

SEQ ID NO: 36275 - DNA, 195 bp, Glycine max
  Clone ID: 700888618H1
tcggctcgagtaataggtgagcacacgagatctggttgccggtagcatcaagcaaagtaagagtttagagtttgaactctgtttatccagtgcacaaagcgtagatcactgtgttagtaatggaatagagtaaaatcaaaaccgagggatgacggagttgacgccgccggaagatcatttttgctgtcagtccca

SEQ ID NO: 36276 - DNA, 183 bp, Glycine max
  Clone ID: 700888620H1
gttcaagtttacataccatagtcacaattgaaccctccggaattcctaggggtggatctatgcatgaccaattgtcaacactatataaacacccctgcagattccgaggtgtcaagtttacataccatagtcccaattgaagttccaccgtagatcgctgtattattatttgtgccgagaact

SEQ ID NO: 36277 - DNA, 186 bp, Glycine max
  unsure (1)..(186): unsure at all n locations
  Clone ID: 700888621H1
gtntctttctcccatcataaacaaccgaccctctcctttccctcttcaccaaccaatggctcccccaaaggccgagaagaagcccgcggagaaaaagcccgcagagaaggctccggcggagaagaagcccaaggccgagaagaagatatcgaaggaaggaggaagcgagaagaagaagaagagaac

SEQ ID NO: 36278 - DNA, 181 bp, Glycine max
  Clone ID: 700888622H1
ctgattccagagcaatagttgctgttccagctaccacagaaacattagctgtggttcctgtgagtcagaaaaccaagcgctctgagtttgtacagcgtcgaaccaggagaccattctctgtgactgaggtagaagcacttgttcacgcagttgaggaacttggaactgggaggtggcgtga

SEQ ID NO: 36279 - DNA, 181 bp, Glycine max
  Clone ID: 700888623H1
cgaaaattctcagtttgcagagaaaatctgaatcatgtcgtggcaagcgtatgtcgacgatcaccttctgtgtgacatcgaaggtaaccacctcactcacgcgctatcatcggccaagacggcagcgtttgggctcagagtaccgacttccctcagttcaaacctgaggagataactgcca

SEQ ID NO: 36280 - DNA, 180 bp, Glycine max
  Clone ID: 700888624H1
cttagactatcggcaacaagatgtggatagtttgaatcaaactattctcgcacactttaaccttcccatccacactgccataggagcggcttatacaacagacctcagtagttagacaatgcttaagcctggaggatggggggcctcaccattttccttgaaggatattcttaaaagtca

SEQ ID NO: 36281 - DNA, 184 bp, Glycine max
  Clone ID: 700888625H1
tgggattgaagtatctctagtggcgattgcagctctcagatattgtttgggtgtattatgtccctttcgggagatgtttttaagttggacctgcacaatttccctatctataagagaagcaaagtatgtacaatatgtgatctctatcataagagaagcaaagtagatacaatatttgttaggg

SEQ ID NO: 36282 - DNA, 184 bp, Glycine max
  Clone ID: 700888626H1
ctttcaaagagacgaagccttcgaatctctcagaaacttttctcttctctttgattcttctctatcagttaaacattagaatgagccgttcacaggatccacatccttcccgatctttcttcccttttggaaatccttttcggatgatatcacctaaaggctctcgcatgtctccacaacttct

SEQ ID NO: 36283 - DNA, 183 bp, Glycine max
  Clone ID: 700888627H1
ccattctttaattcttaaaatatagtgttaaaatcattttcaagtgatccttaggcagaaatcattatgttatttatgccacggttgagaaagatatggatacacggtctgcacaaatttgacgggatccttttgtatgtcaacatagtaatagagattggatgatttagtaatagagattga

SEQ ID NO: 36284 - DNA, 182 bp, Glycine max
  Clone ID: 700888628H1
gcataaactactacgaggagactactccatacgaatccaaagctgacagagagtgagagagagagaggagccacacacgcaaaggaaacggacatagcaagaagatgacaaaagacgtctgcgccacctcttaatatgtatagcaaatttccgaaacactaaagaaacataaaagtaaaaag

SEQ ID NO: 36285 - DNA, 182 bp, Glycine max
  Clone ID: 700888629H1
cttctactgtggctcttctctctatgggcggttaaaccctcagagcgtgagggattggatcgcttgccacgtgatgttcttcgggccaaagtcggatgtcggtcttcatgatgctggtggggtgcatgaggaggtgcttgaggtgctgaagcggtgcctggaactagggtttgtgacattgc

SEQ ID NO: 36286 - DNA, 183 bp, Glycine max
  Clone ID: 700888630H1
gaatctgcaaattttgcggtgtgaattttcgtttgcagagaagaaaaagatgcctttgaaggtgttagatgcgacagtgtcgagctttgatggggtttttgacaagttccgatcacaggctccaacaaacaaagccaatctcctcctctgacccagctggtgccctgattgtgtgagagctga

SEQ ID NO: 36287 - DNA, 185 bp, Glycine max
  Clone ID: 700888631H1
caagtttatatgtagttctaaaataataactttgtaaaagttttcattctactatctgcatatagaccacattatctctttagtagtggaacagtgattatagaacgacagcattaagatcataggctgcatgatgtcttcgttgcactgaacgggtctctaggaattatgaatattcaacccat

SEQ ID NO: 36288 - DNA, 183 bp, Glycine max
  Clone ID: 700888632H1
gcccaagccctatacaagcaaaccctaacacacacccatttgattcagtttccatggctagcctcaaggttgcatctttggctgcagtgctctgcatggttgcggtgtgatgcaccatggcacatgcagctatcacgtgcgggcaggtgacgattagcctgatcaattgcatcggttacctcc

SEQ ID NO: 36289 - DNA, 185 bp, Glycine max
  Clone ID: 700888633H1
attgaatttatatgatgtgaaagctacaagaattgaagaccagttgaagttttgtttggatcagcttcaaaaacttgcagcggctaagcttcaaagttctgtcactttggaaaatacacaaagaaggctgtccagtgttagaagacaatctcagcaggttacggatatggtggtggaaatgcaat

SEQ ID NO: 36290 - DNA, 183 bp, Glycine max
  Clone ID: 700888634H1
ctatagcgaccatttccttatctatattcacctccatcttaaaacagtgcccctagaaacttcgatctgaagatggttggcattgcatttggacgctttgacgattctttcagtttaacctcaatcacggcctatattgctgagtaccattcgaccttgctctttgtttttgccggtgttggt

SEQ ID NO: 36291 - DNA, 183 bp, Glycine max
  Clone ID: 700888635H1
cgcactttggtggccacagcaacaataacaatggcagcctcactacaagctgcagctaccttcatgcaacccaccaaggtgggcatggccactcgcaacctcaaatcgacacaatgcatttctaaggcttttggcttggaacccgctgcagcttaactcatttgctcccttaagcccgatctc

SEQ ID NO: 36292 - DNA, 180 bp, Glycine max
  Clone ID: 700888636H1
gcagatcgacacttttcttagcatccctttcaccatggacgaatttccggatctcgaatcccaagacggagtgcgagtgccatggaacgtgatccctggcacgagcaggacgcccaaaacgccgtcgtccccgtctccgccgtctacactcccatgaagcacttcacctcgatgccgctc

SEQ ID NO: 36293 - DNA, 183 bp, Glycine max
  Clone ID: 700888637H1
cattctcaaaccaaagccatgaccaatatggaatccaccacacctatactcactcctctagtgctcctcctcctcttctctctagccaaagggcttcacaacccaaatgtgatgctgcctatcaacatgaccatgatggctcaaccctccaagtgttccatgtgttcagcccttgttccccat

SEQ ID NO: 36294 - DNA, 180 bp, Glycine max
  Clone ID: 700888639H1
caaaatggcttcagtagcgactaagcagcaagatggtgagaaaccggccaagagaaaaccggttttcaccaaagtggatcagctgaaaccgggaaccaacggtcacactctggttgcaaaggtgttgtcctccaacactgtgttgcagaagggacgaccctcttcttcgcacaacattcg

SEQ ID NO: 36295 - DNA, 183 bp, Glycine max
  Clone ID: 700888640H1
cagcctcagttcagctcggaggactatatgatgctatacacgaccatatacaatatgtgcactcagaagccgccttatgactattcccaacaacagcatcgctcgtacaaggaatcgtttgaagactacatcacatcaacggtattaccttcgttgagacagaagcatgatgaatttatgtta

SEQ ID NO: 36296 - DNA, 184 bp, Glycine max
  Clone ID: 700888641H1
attcgggaccacgccactcttctcccctctccggtcgcactctcgcgccttcgaatctccgtttctgcggcctccggcgacaggcattcacttccactcccctgaaccacgccttccgcctccgccgacgccgcctcccgcattccgccgcggtattcgccgcgctttccgccaacggtacctc

SEQ ID NO: 36297 - DNA, 182 bp, Glycine max
  Clone ID: 700888642H1
tggtttttttatctttctgttctctctctctctctctgtgaaatggagccgtttgcttagagctgcttcttctgacctttgaatcttgatctagatatctagatacagaattggaaatggattcaaatgggaccctacgtgctaacacctgggcaaggtcgtcgtccttgacctctcctgca

SEQ ID NO: 36298 - DNA, 182 bp, Glycine max
  Clone ID: 700888643H1
ctcctcaatccattccaagcttcaatcttttctctcttctgccctctgcacctcccctcacacccttcctcattcgcaggaggtgaagatgtctaccccggcaaggaagagactgatgagggattttaaaagcttgcaacaagatcctcctgctggcatcagtggggctccccaagacaata

SEQ ID NO: 36299 - DNA, 184 bp, Glycine max
  Clone ID: 700888644H1
tggatgttgcagttccccactcataaagatagctaggtaagagggtgcaagggaagagaaagagatcatagaagagatctagtttaattttgctttgctttaacttgtgaggatttgatttcatggaagaacatgctcactccattggctgttacgcatctccttcaacacactctcagaagtt

SEQ ID NO: 36300 - DNA, 180 bp, Glycine max
  Clone ID: 700888646H1
cagatgttgacattgtacatctgcagaatccttttgatcatctataccgtgactcagacgtggagtccatgagtgacagtcatgataacatgacagcttatggctataatgatgtgtttgatgaacctacaatgggttgggctctatatgctcatactatgaggatatgggtttacaact

SEQ ID NO: 36301 - DNA, 182 bp, Glycine max
  Clone ID: 700888647H1
gtcaagctcaattctggtgttgatcacataggtatacctgcttgcctagatggctatatgaatattgcaatggaccagacagaggaatacgtcaatggacaagtgaagaacaagtatggtgacgctttcatccgagggaataatgttctatacattgacagctcaaagaggactctagcaga

SEQ ID NO: 36302 - DNA, 187 bp, Glycine max
  Clone ID: 700888612H1
ggttcagatggcatccaaggacgaatatatgtgggaactgggtgtgtcttcaggaggcaggcattttatggatgtgatgcccctacttcgaagaaagcaccaaggacggacatgtaactgttggcctaaatggtgctgctgtctgtgttgtcgatctacgaagacaaagattaaagcaaagtccagt

SEQ ID NO: 36303 - DNA, 181 bp, Glycine max
  Clone ID: 700888648H1
actctctctctctctctgaaaattaaaactaagcgtgtgctctgccatatcccaagtggaacaagaagagttgctcgccaaattagaggtgttcaagatccgagcgagggacaagcatggccgcaagatcgttcgcattatcgccaaactcgtcccaggtagattgattaattaattaatt

SEQ ID NO: 36304 - DNA, 182 bp, Glycine max
  Clone ID: 700888649H1
caagaagctaagtgtccagtgtgcatggcacaccctcacaatgcagttctcctcatatgttcatcccatgagaagggctgccgcccttacatgtgcaacactagttctcgccactcaaattgtcttggtcagttctgcaagtcatttgcaggcaccttatcaaccattcctcaagtagaaag

SEQ ID NO: 36305 - DNA, 179 bp, Glycine max
  Clone ID: 700888650H1
atagattgagaaatgggaatagagaagcacttactgcattaaggacaagggctcgaacaacaaagagcagtgttccatctccttttgaatcaataatgaagggagttgcagggtccagctcaagacctttggtgcaagacgtttgcaccacctgtggcaaacatgactcttctgagcag

SEQ ID NO: 36306 - DNA, 248 bp, Glycine max
  Clone ID: 700888569H1
gagcaagtgaatgtaaaaatgctaaataattcgttagtatgctaagttttgttaagccagatctgccttgaactttggcgattggttaatctttttctccctttgttaaatgattagtattaaaataaataaatttttgttaaaatcttatgttgtaactagttgttagtgccatctgtatttataactaaaatataattacatgttcaaaattgtgataaaaaaaaaaaaaaagggcggccgccgtt

SEQ ID NO: 36307 - DNA, 248 bp, Glycine max
  Clone ID: 700888571H1
aggcgattcgtattcggtgagctggtccgtttcctagacgaaatggtgtaagaattgaaagcatgatgattgattgatgggagcagcgaaccatataatttaatttaatttgtgtccacatgagaacgtcgtgacctgcattttctatctcgcaacaccgcgataatggtataaaatagtttcagatacgttgcgttgattgattggtatgaagtgattgactttttttcttcttctattctcacaca

SEQ ID NO: 36308 - DNA, 251 bp, Glycine max
  Clone ID: 700888572H1
gttccttacaggaatgcagactggtgaactgtagaaacccatcagctgttttggatgtacgcgttgagattttggcaactgtaggcgaagatggagttactcgttggcttgaatagagtgattgtaggtctgtaatactcaaaagggaggagcttgtaaattactccagtcccgtgacttaatgatctttcaaatgtctctttgtgaaagattggaatgtattcatagtgtagagcataattttttatttt

SEQ ID NO: 36309 - DNA, 251 bp, Glycine max
  unsure (1)..(251): unsure at all n locations
  Clone ID: 700888573H1
caacagcaaggccttgagggaagctatgtgctttatgatggatcccaatcttggtaaacatgtttgctatgtccagtttccgcagaggtttgacgagattgataggaatgatcgatatgccaatcgtaatacagttttctttgatataaacttgagaggtttggatggcattcaaggtcctgtttatgtgnggtactggatgtgtcttcaacaggacagctttatatggttatgaacctcctcttaaaccc

SEQ ID NO: 36310 - DNA, 251 bp, Glycine max
  Clone ID: 700888574H1
gaaattgtttggtgaggttgttgctgttactggtgatggaactaatgatgctcctgcactgtgcgaggcagacattggacttgcaatgggcatagcaggaactgaggttgccaaagaaaatgccgatgtcattataatggatgataacttcacgactattgtcaatgttgtcaaatggggacgtgcagtatacataaacattcaaaaatttgtgcagtttcaattgacagttaatgttgttgctctggtta

SEQ ID NO: 36311 - DNA, 251 bp, Glycine max
  Clone ID: 700888576H1
ataaaacctcactctcactcgcagatcttcactcacccaaaaccaacctactccaaggaagtcccctaatcagaaccagagatggacaccaaacccaccgagatcagcagcggcaagatgttcggaggttacaacaagagattcaagcatttcagccttaccctgggatgctccatgaacttccacatctacttccctccatctccttctccctctcacaaattccctgtgctgtactttctctctggcct

SEQ ID NO: 36312 - DNA, 251 bp, Glycine max
  Clone ID: 700888577H1
ttcatgctttcctcctatgcaccagttatctctgctgagaaggcctaccatgaacagctctcagtggcagaaattaccaacagtgcttttgagccatcgtccatgatggccaagtgtgatcctcgtcacggaaagtacatggcgtgttgcctgatgtaccgtggtgatgttgtgcccaaagatgtaaacgctgctgttgccaccatcaagaccaagaggaccattcagtttgtggattggtgccctactgg

SEQ ID NO: 36313 - DNA, 252 bp, Glycine max
  Clone ID: 700888578H1
ctcgagccgcgcgcagtgctgatggacctggagcccggaaccatggacagcgtgcggactgcgccgtacgggcagatattccggcccgacaacttcgtgttcgggcagtccggcgcgggcaacaactgggccaaggggcactacacggagggcgccgagctcatcgactccgtccttgacgtcgtgcgcaaggaggccgagaactgcgactgcctccaggggttccaggtctgccactcgctcggcggagga

SEQ ID NO: 36314 - DNA, 250 bp, Glycine max
  Clone ID: 700888579H1
gaaattgagtttccgagataaccagttttctctttgattcatcaatggcaactgcgaggaccgtgaaggatgtttcgcctcacgatttcgtgaaggcttatgcttcccacctcaagcgttccggcaagatggagcttcctgagtggaccgatattgtaaaaacagcaaaatttaaggagttggctccatatgatcctgactggtactacattagggctgcctcaatggcaagaaagatctatttgagagg

SEQ ID NO: 36315 - DNA, 246 bp, Glycine max
  Clone ID: 700888581H1
agagaagagaagagctgaggctgctaggattagagagaaatacccagaccgtatcccggtgattgtggagaaggcagaaagaagtgatatcccaagtattgacaagaagaagtaccttgtccctgctgatctgacagttggacagtttgtctatgttatccgcaaaaggattaaattaagtgcagaaaaggcaatctttatctttgtggacaacgtccttccacctacaggagcaattatgtcttc

SEQ ID NO: 36316 - DNA, 247 bp, Glycine max
  Clone ID: 700888583H1
agcagataagcatgttgtgaactgcattgagtctcatcctcatacaatggttcttgccagcagtggtattgagaatcacatcaagatatggactccaaaggcccttgagaaagctactttgcccaaaaatattgagcaggtatgattttggtcttcttgagttaattattgcaagttggaacttaaaagcacataatgatattattacctgtggatgaatgccttttatgtgtaggaagcttgttat

SEQ ID NO: 36317 - DNA, 116 bp, Glycine max
  Clone ID: 700888585H1
aaatggcctatttcattcccaatccgtttcctccagtctctgggggatttgattgatgagaattgcttatggtgggtgtatttccttttccaatgaaatgctacaacatttactgc

SEQ ID NO: 36318 - DNA, 250 bp, Glycine max
  Clone ID: 700888588H1
ctccagtgtctgcgtctcttcctcctctctctgcatcgctgcgttttccgaatcgaaaggtgaggttagtaagtaacaatggtggagaaggccaagggtaggaaggaggaggttgtcactcgagagtacaccatcaacctccacaaacgcttgcatggctgcacatttaagaagaaggctcctaaagcaattaaggagataaggaagtttgctcagacagcgatggggacgaatgatgtaagagtggatg

SEQ ID NO: 36319 - DNA, 248 bp, Glycine max
  Clone ID: 700888589H1
gagctctgcgagatcttcattcgccgattttaaaagatgagtaagcttcagagtgatgctttgcgtgaagccatttcaggaatcatggccgattccaaggagaagaatcgcaaatttgtggagaccatcgaactccaaatcgggttgaaaaactacgatccacagaaggacaagcgtttcagtggctctgtcaagctgccccacatccctcgccccaagatgaaaatttgcatgcttggtgatgctca

SEQ ID NO: 36320 - DNA, 248 bp, Glycine max
  Clone ID: 700888592H1
cttgattcttactcgcagtttgaggagagcatgcttgctttcaagatggaggagatgaggctgagtgatgaagaggatggtgaggaggagggtgaagagaacggtgttgaggaaggggatcaagaggatattcgttttaaaggaagattggtggaggaggattttgagaggaagattttacatgggttttggttgaatgacaagaatgacatagacttgaggttggcccggtttgattaccttatgga

SEQ ID NO: 36321 - DNA, 243 bp, Glycine max
  Clone ID: 700888593H1
tagcaagctagctaggttgaaaatagtttggttttgtagtaagtgaggtgaggtgccaaaatggtgaagataactcttggtactttcgatgactcttttggtgttgcctctcttaaggcttatttggcagagttccatgcaactctgattttcgtgttcgctggtgttggttcagccatcgcttacaacgagcttacaaaagatgcagccttggatccaacggggctggtggcagtagctgtg

SEQ ID NO: 36322 - DNA, 131 bp, Glycine max
  Clone ID: 700888594H1
ctagactttgaacagtagagaaaagagaatacaaaggtgatagagattggaactttacatacgtcaacggaaccatgtcgagatcagttcctggaacacatagtctgtgcgttcgacatagatgcggtggg

SEQ ID NO: 36323 - DNA, 252 bp, Glycine max
  Clone ID: 700888596H1
gagaattagaagaataaacataataccccagatggcttcaaaaacttgttcctcccttgcccttttcctcacactcaacctcgttttcttctcacttgtctctgcatgcggttatacaccatgccctggtccaaacccaaagccaaggcccaacaaacgacactaaccctaaccccagcgcaagtggctcgtgcccccgtgacgcactcaaactaggtgtatgcgccaatgtgctaaacttggtgaacgcca

SEQ ID NO: 36324 - DNA, 189 bp, Glycine max
  Clone ID: 700888601H1
gaaccccccaaaaccctaggtagagagctcttcctcactctcattcgcaatggccgcagcagcacgtcctctcgtcaccgtgcaggccctcgacagtgacatggccaccgacgcctccgccaccgtccctatccctgacggcatgaagtcctccatccgcccggacatcgtcaacttcgtacactccaa

SEQ ID NO: 36325 - DNA, 187 bp, Glycine max
  Clone ID: 700888602H1
ctccgagctagctacagtcgcgaattccaagccggagaagttctgcaatttcgccatctaacttcccgacgaggcaagactcttcgacgacggtctctaccgagtagtcgatgtgtatctcaaggcacatccgtgggttttggaagaggagaaagagaagatttgcggattgttggactgtcagaag

SEQ ID NO: 36326 - DNA, 189 bp, Glycine max
  Clone ID: 700888604H1
cactccccttactcgctcgacctagaactgtgttagggttttacgaaaccaccgaagttgcagaaaaaggaagaaagaagaaaaaatggtggctgacaggagcaagaagccgaaggtcttccgagaaagggcgaaaaacctcgatgaaatcgacggagaactcgtcctctctatcgaaaagttgcagga

SEQ ID NO: 36327 - DNA, 185 bp, Glycine max
  Clone ID: 700888605H1
gaactgcttgatcagataaccaggaaaggtcgtctatcagagcatgaggcacgattctatgcagctgaagttatcgatgctcttgaatacatacataatttgggagtcatacatcgtgatattaagccagagaacttattacttaccgctgaaggacatattaaaatagccgattttgggagtgt

SEQ ID NO: 36328 - DNA, 181 bp, Glycine max
  Clone ID: 700888606H1
ttcagttccatgggccttgggcacatgcgccttgatcggaaggaaggttcttgtctcacccccaacccccaaaacaaccaaatcatctactccgttacaattctttccaagagaagcatcttacatgctcacaattcacaagctgctctagctgcccttatcttttcctccgcgagcctct

SEQ ID NO: 36329 - DNA, 183 bp, Glycine max
  Clone ID: 700888607H1
gagaaacttcggacgtggcaacaagaaaaccattgacattagcttgagtcatccaataagagttggccttatcctatcggaaatcttactcacagcagagccatcaaatacttgtgttgtgacgattctctgccatccatgatccatcacttacaaactagtactacttgctttcaataaaaa

SEQ ID NO: 36330 - DNA, 183 bp, Glycine max
  Clone ID: 700888608H1
accgtctcgtttcccaggtgatttcatccctcaccgcctcgttgacgtgtgatggagcactgaacgttgatgtgactgagttccaaaccaacttggttccttagcctaggatccatttcatgctttcctcatacgcccctgttatctctgctgagaaagcataccatgaacagctttccgttg

SEQ ID NO: 36331 - DNA, 188 bp, Glycine max
  Clone ID: 700888609H1
gtcaaatatgaatttaaaaccaacacgcatgtccctaaactaggggtaatgcttgtggcgtgggggggaaacaatggctcaacactcactggtggtgttattgctaactcgagagggtatttcatgggcaacaaaggacaagattcaacaagccaattactttgggtcgctgacccaggcatcagcta

SEQ ID NO: 36332 - DNA, 186 bp, Glycine max
  Clone ID: 700888610H1
aattatttcaaggactagaaaaaggactttgctcctaattatcctgcatattacccatctggtgtagatgttttcttgtatccacggaaagttgaccatatagctcgtttgtggaacttcctgttatgagttcctccgcgaaatttcctcccatactagttgtaaacgttcaggttccactctatc

SEQ ID NO: 36333 - DNA, 249 bp, Glycine max
  Clone ID: 700888567H1
aagatagtgacaggtgaactgatttcgttatcagaacaagaattggtggattgtgatacaggatataacgaaggatgcaatggaggacttatggactatgcatttgagttcattatcaacaatggcggcattgattctgaagaggattacccttaccgtggtgttgatggtagatgtgacacatataggaaaaatgctaaggttgtttctattgatgactacgaagatgttcctgcctatgatgagtta

SEQ ID NO: 36334 - DNA, 194 bp, Glycine max
  Clone ID: 700888611H1
cggctcgagtacccatttgtgagccaaggttgacgattttctgccccctcctagattatgccttcggaagaagatttctcggatgttgtatcatgttcctaaaacatgcttactgcaactcaaccaggggtcctctcctttttactagaaaagatttgttttctttttattgaaacaaaatagagtaaagtaga

SEQ ID NO: 36335 - DNA, 257 bp, Glycine max
  Clone ID: 700888527H1
atcactctcaactttactcctcttcaatcagttgcatattctttgctattccaatggccactgttgaggttgtgtcagccaaggttgccctcccagaggacacaaaagaggcatcattgaaggttgacgaggagaagaacacagaagaagttgttgagactccaacaccagaaactgtggtcactgagcaaaccatggcggaaagtactgaggccccacgacctgcagcttcagaagacaagccctcggttgaagtt

SEQ ID NO: 36336 - DNA, 255 bp, Glycine max
  Clone ID: 700888528H1
gcactgcaacttagccacttgaacccccttcgtaagcctcttcacatcttcacttcttcacttcttcttccgcactaatacgaaaccagagggaattcacaaaagaggttaccatgtcggacgatgagagagaggagaaggagttggatctcacttctccggaagttgtcaccaagtacaagagcgccgcggagattgttaacagggctttgcagttagttatttcagaatgtaaaccgaaggcaaagattgttg

SEQ ID NO: 36337 - DNA, 255 bp, Glycine max
  Clone ID: 700888529H1
aattgggacttgatcccagaaaggtcaatgtcaatggtggtgccattgctcttggacatcctttgggtgttacaggtgcacgctgtgttgcaactttgttgaatgagatgaaacgtcgtggcaaggattgtcgctatggtgtaatctcaatgtgcatagggtcaggtatgggagctgctgctgtatttgaaaggggagacttttgaagatttgtgcaagtttagaagagttcatacaaataacgatcttttgtca

SEQ ID NO: 36338 - DNA, 97 bp, Glycine max
  Clone ID: 700888531H1
caatcagaaaacaaaggcaacaagttcaacatattttgtgcacatgcttttgaaagcagtgaaattgttgtaagtgataatgttctggccttgtggc

SEQ ID NO: 36339 - DNA, 256 bp, Glycine max
  Clone ID: 700888532H1
ggttccttagggagctggatctgcaagaaaatgaagttgaggatcacaaaggtcaatggctaagttgctttcctgatgactgcacatcagttgtttctcttaattttggttgccttaaaggagaggttagtttgggagcactagagagatttgtggccagatctaagaagcttaagagtttaaagctgcatcgttcggtgcccgttgatgcactgcaaaggataatgatgcgagcacctcaactatcggatttggg

SEQ ID NO: 36340 - DNA, 83 bp, Glycine max
  Clone ID: 700888533H1
gaacaacatcaactcacagctcataacagccaagagtggcggcagaatcatctggtgcaaggctggttatgccgccactcttg

SEQ ID NO: 36341 - DNA, 254 bp, Glycine max
  Clone ID: 700888534H1
ttcgatttcctattgcactctctcatctcacatctcattctagctaacatccccttttcttcttctcacttctctccaagtttttttttcacatttctctgtctgtctttgatctgcacacacaacatccctctaaaacattgagggataaaataaaaaacatgaagaaatttgtactcaggttagatttgccagatgacaaggcaaagcagaaggccctgaaaacagtttcaacactttcagggattgatgcc

SEQ ID NO: 36342 - DNA, 254 bp, Glycine max
  Clone ID: 700888536H1
agccctcattgaagctgtggaaaggtctgacagaattcatgttatcgatttcgatattgggtttggagtgcagtggtcatcttttatgcaagagattgccttgagaagtagtggtgcaccttcactcaaagtcactgccattgtgtcaccctccacttgtgatgaggttgagctcaatttcactagagagaatttgattcaatacgcgaaagacatcaatgtgtcatttgaattcaatgttttgagcattgaat

SEQ ID NO: 36343 - DNA, 254 bp, Glycine max
  Clone ID: 700888540H1
ctttgggtggcttatacacatatgggtggagcaaatatggccaattaggacatggaaattttgaggattctcttgtgcctcaaaagcttcaagccttgagtgataagttaatcagtcaggtatcgggtggttggaggcatagtatggcactgacgtctactggactactatatggatggggttggaataagtttggacaggttggagttggtgacaatgttgatcgttgctctcctgtgcaagtgaagttcccc

SEQ ID NO: 36344 - DNA, 256 bp, Glycine max
  Clone ID: 700888541H1
tagagaaagaaaaaagtccttgtgagtctttgattctagcatccttcctttgtgcaagtttaaagaatggagaaccaacaagaaatgatgaaagtagaaaaggtatgtgaaatctatgaaaaaatctccaaactagaagacctcaacccttcaaaccatgtcaacaacctcttcacccaacttgtcacaatttgcaccaccccatgccaaatagatgttaccaaactaagccaacaagttagagaaaccatagcca

SEQ ID NO: 36345 - DNA, 256 bp, Glycine max
  Clone ID: 700888543H1
aacctacctctttttcttctctctcaacaacttcaccttcttcctcctcgatcatgtctcacttcaagggcaagtaccatgatgagcttatcgccaatgctgcgtacattggcactcctggaaagggtattcttgctgctgatgagtcaacagggacaattggcaagcgtttggccagcatcagtgtagagaacattgaatccaacaggcgagctcttagggagctgcttttcactgctcctggtgttcttcaata

SEQ ID NO: 36346 - DNA, 254 bp, Glycine max
  Clone ID: 700888544H1
gcctattccaaagccagttcccgtgtataagcctataccaaagccagttcccatttttaagccaataccgaaaccagttcccatttataagcgaattcccatttttaagccagtaccaataccaattcctttttttaagcctataccaaggcgagtggcaatgcctagaccgaagccagtgtgtaagcgtattccaaagcctgtaccagtgtctaagcctattcctatgccagttcctgtggatatgcctattg

SEQ ID NO: 36347 - DNA, 245 bp, Glycine max
  Clone ID: 700888548H1
gggatattgccccagccaagaatattgatggctatggcaagggatgggttgctgccaccatttttttctgacataaacaagtgcagccaagttcctgttaagagcacaatagttactggccttgttgcttcactcttagcattttctatggaagtctctgaactggctgggatggtcagtgtgcggtacacttcttgcattcaccatggtggcaatatctgtgctaatactaagatatatcccac

SEQ ID NO: 36348 - DNA, 251 bp, Glycine max
  Clone ID: 700888550H1
aacgtcgcggtcatggcacgccaatatgtccgcagtgtgatttcctccgtgcagagggttgccatggctatatctccatctggtataaacccatcaattggagctaaactttctcctggttctccagaggctgttacactagctcactggatctgccaaagttatagttactatttagggtccgacttactgagatcagattctcttgttggtgacatgatgctgaaacaactgtggcatcaccaggatgc

SEQ ID NO: 36349 - DNA, 253 bp, Glycine max
  Clone ID: 700888552H1
gttcgacaagttacacgtccaagttgagaagccgagggagcaagttgcagatgcggaggcactgctggatctcacacgcactctagtgggatctgttaagtcgttgacgaatgagggcgtcacaccttctcaatttgtttcatctttgctcatacgctacgtccacgcccaacactcaattgattggcaccaacttggccttgccgcctccccaatcttcctctcctttcatggctcttctaccatgcttggt

SEQ ID NO: 36350 - DNA, 241 bp, Glycine max
  Clone ID: 700888554H1
gtttcccagttccacagcgttccgcgaagaaaaccagagaccaagaaagagtgcttacctgaaattgaattcaatggcgacgagaaatcgaacaatagaatttagaaaacacagagacgccgtgaagagcgtgcgcgctcctctatcctcctcggcatctgcctccaccggccccgtcatcgaaatggttaccacttcgcttcttcctcccaatcgatcctcctcctatgctcttctaagc

SEQ ID NO: 36351 - DNA, 252 bp, Glycine max
  Clone ID: 700888555H1
agccgtacaacaatcttctcccccgaaggacgtctttaccaagtggagtatgcaatggaggccattgggaatgctggaactgcaatagggatcttgtcaaaagatggggtagttctggttggtgaaaagaaggtcacatccaagctgctgcaaacctcaacctccactgagaaaatgtacaagattgatgatcatgttgcatgtgctgtggctggaattatgtctgatgccaacatcttaatcaatactgct

SEQ ID NO: 36352 - DNA, 254 bp, Glycine max
  Clone ID: 700888556H1
gcttgatcaagtgaatcaggttataggaattgatctgttatctcagtctttgttaccagccattgttgagcttgctgaggataggcattggagggtccggcttgcaattatagaatatatacccttattggcaagtcaattgggggttagttttttcgatgacaagcttggtgctctttgcatgcagtggttacaggataaggttcattcaattcgtgaagcagctgctaacaacttgaaacgccttgctgaag

SEQ ID NO: 36353 - DNA, 251 bp, Glycine max
  Clone ID: 700888559H1
ctttgtcgagtggattcccaacaatgtcaagtcgagtgtgtgtgacattgctcctagagggctctccatggcgtccacattcattggaaactcgacctcgattcaggagatgttcaggagggtgagcgagcagttcacggccatgtttaggaggaaggctttcttgcattggtacactggtgaaggcatggacgagatggagttcacggaggcagagagcaacatgaatgaccttgtgtctgagtaccagc

SEQ ID NO: 36354 - DNA, 249 bp, Glycine max
  Clone ID: 700888560H1
tctctctcccttccttccatcccaaccacaaggttgctgagaagacataaaaaatggtgaagatttgctgcattggagctggctatgttggtggcccaaccatggctgtaattgccttgaagtgtcctgagatcgaggtggtcgtggtggacattgctgcaccgcgaatcaacgcgtggaacagcgaccacctcccgatatatgagcctggccttgatgatgtggtgaagcagtgcagggggaagaatc

SEQ ID NO: 36355 - DNA, 234 bp, Glycine max
  Clone ID: 700888561H1
agagaaaaaccgaaatagaaacataaaaagtagctgccaatttcacgttctcattctccgaattaaaacctcattcctcaatccgcaagtttctcgtgacccttctcatcatcatcctcctcgtcgtcgtcgtcttcgtgccctaatcggttctcacgttgcgggtgcagatgattgatcgattgattgggctataaaacgctgccaccgaccatgatcaaccattcataatcc

SEQ ID NO: 36356 - DNA, 253 bp, Glycine max
  Clone ID: 700888562H1
ggaaaacaaagtatagagtgaaagaatgggtgagaaaagcaagattttgatcataggaggcaccggctacatcggcaaacatatagtggaagcaagcgcaaaggctggaaatcccacttttgctttggtgagggaatccacactctctgacccctccaaggcaagcatcatccacaattttgaggctttgggcgttaatttggtccggcggggatctgtacgatcatgagaagttggtgaaagctatcaagca

SEQ ID NO: 36357 - DNA, 254 bp, Glycine max
  Clone ID: 700888563H1
gcgttaaacaaaacgtaacggagggtcgacggtttttggtgcaagccaacgtgcgtgaactcgccgccgtgctctccgccgggaataacaagcgtccctggctgacgtggagccaccaacctgtcccccacccgaggctccggtcggaaaccgggtcgggttgtccgctgttaagtgattacggctgcaacgttccggcgccggaagttccaccggcgagttcattcatgtcggagtggtttgatattcggggc

SEQ ID NO: 36358 - DNA, 251 bp, Glycine max
  Clone ID: 700888565H1
gaaaaaagaaaaaagaaaagcactaaaaaaaaaaatgaagaagggtttctcccttgtgctgctgattcttctgatccagtacaacaacgttgtcaacgcctacaacaacaaaaactgtgtcacagaggattgcctcatcggcaacaaggatttggaatcagagtgctactttggatcccatgtggccagaatgctctacgatgtgagccaatctgtgagtggcaaaacaggcaataaaaataacaaagctg

SEQ ID NO: 36359 - DNA, 250 bp, Glycine max
  Clone ID: 700888566H1
gacgaatcccgacttccgtcacaaggtcctctgtactatacaatggagcatttagatgctggaaaagaatcatcaaatagtgtcaatgaaatagaagccactaattccctacttatctgtggccttccagatgatctttctcttatgtgcctagcaagagttcctagaaaatatcattctgttctgaagtgtgtctcaaagagatggagggacttaatttgcagtgaagagtggtatcattatcgccgaa

SEQ ID NO: 36360 - DNA, 260 bp, Glycine max
  Clone ID: 700888526H1
gaccaaccaaaaccaaaaccagaagataacaattaaaccgttcttcttcgattcaagttcgaagaagaagcgatgagttcgggtagcagccacagcagtgagaaggagaaggagaaacagagggtgagtcgcacgtcgctgatactgtggcacgcgcaccaaaacgacgccggatcggtgcgcaagctcctccaggaggatccctcgctcgtcaaggccagggactacgacaaccgaacgccgctccatgtggcgtccct

SEQ ID NO: 36361 - DNA, 242 bp, Glycine max
  Clone ID: 700888488H1
gaaatcattgggactggggaggaaggtatgggtgttatttctgaagctgacaagaagaaggtatccggatatgaaattgttggctttcaggttaccccttgcagtgttaagcgcgaccctgaagtcatgacaaaactccacatgtatgacaatatctactcgacaaactgtccatctgagctagacaagtaccaaccgattaaagagcaagagaggatatcatttacatatgaagttgagtt

SEQ ID NO: 36362 - DNA, 244 bp, Glycine max
  Clone ID: 700888490H1
aaccaagctagtccgaggaagtcctctattcagaaccagatatggagacaaaacccaccgagatcagcagcggcaagatgttcggaggctacaacaagaggttcagacatttcagccctaccctcggctgctccatgaacttccacatctacttccctccatctccttctccctctcacaaattcccagtcttgtactttctctctggcctcacatgcacggacgagaacttcattttcaagtc

SEQ ID NO: 36363 - DNA, 240 bp, Glycine max
  Clone ID: 700888491H1
gcaattgttagggccagtgctgttagcacactggcaaaatttggtgctgctgttgatgtgttaaagccccgcatatttgttctgctaaggcgatgtctttttgacagtgatgatgaggtccgtgatagggctacactttacctggacacacttggaggtgatggttcagttgttgagactgataaagatgtaaaggacttcccgtttgggccatttgatatcccacttgtcaatctggag

SEQ ID NO: 36364 - DNA, 241 bp, Glycine max
  Clone ID: 700888493H1
cacggcacgacttgttcaccgaccagagctgattttcgcggcggttaccactcatcggagattctatccaaaatcgttttccgatgacgataaaaactgttaaagtcagtaacgtttccttgggagcaactgaacaagacattaaggagttcttttcattttctggtgatattgaatatgttgaactacagagccatgatgaacgatctcaaattgcttttattaccttcaaggattcaca

SEQ ID NO: 36365 - DNA, 242 bp, Glycine max
  Clone ID: 700888494H1
gtccatcttcttcttctcttcctcttcgcacaaagcagcaagcatccttgagatggaaactttcctcttcacctcagaatctgtaaacgaaggccatcccgacaagctgtgtgaccaggtttcagatgccatcctagatgcatgcttggagcaagacccagaaagcaaggttgcttgcgagacctgtacaaaaactaacatggttatggtctttggtgagattacaaccaaggccagcgtga

SEQ ID NO: 36366 - DNA, 243 bp, Glycine max
  Clone ID: 700888495H1
atcgcctcgaatccacacagttctactcttcgctctaaaccctctctctctctctctctcgatctatcatggctttgcccaatcagcaaaccgtggattaccctagtttcaaactcgtcatcgtcggtgacggcggtacaggaaagacaacgttcgtgaaaaggcatcttaccggtgcattcgagaaaaaatacgaaccgaccattggagtggaggttcacccattggatttcttcacaaact

SEQ ID NO: 36367 - DNA, 243 bp, Glycine max
  Clone ID: 700888496H1
attaaatgttacagcagtggtggagtgaatcacataaaaaattgagaagttaagacagaaagccgtccttgtttcttggctgatatttaggaacccaatttcgtatttaaattctgttggatgtaccgtgactcttgtgggatgtacattctatggttatgtgaggcacaagctctcccaacagccacaagtcccaggaactcctcggacacccaggactcccaggacccctcgtagtaagat

SEQ ID NO: 36368 - DNA, 261 bp, Glycine max
  Clone ID: 700888501H1
ggagaactcgactgaagctgcctctgcgacgccgtttcgattcagcctcagacatttccgttgcaaccatggtgcaagaaaatggcaagaggaagaaaccaaacattctggtgactggcacaccggggacaggaaagacaactgtgtgcactgctctagctgaagccacccagctctgccacatcaatgtcggagaattagtcaaagaaaagaacttgcatgatggatgggatgatgagcttgattgttaccttcttaatg

SEQ ID NO: 36369 - DNA, 255 bp, Glycine max
  Clone ID: 700888503H1
gaaggtcttgctgaggccattgatgatggcaagattggaccaagggatgaccccaaggttcgttccaagatcttgtctgaagagttcggttgggacaaggatcttgccaagaaaatctggtgctttggccctgagacccttggacccaacatggtggttgatatgtgcaagggagtccagtatttgaatgaaatcaaggattctgtggttgctggattccagtgggcatcaaaagaaggtgctttggctgaagaa

SEQ ID NO: 36370 - DNA, 258 bp, Glycine max
  Clone ID: 700888504H1
ctcgagccgattcggctcgagtgcagctgcacgatttatggaaacctggtttgagcgaaaggggtctgtaagaatggaagtggttagatttgaaaatgatggagtcccccgaagaatttcaaacataattcccagtcttcatgataattaccatgaattactggaacttgctgcctcattccgatctcctcttggtaaacctgcaaccaaaacttcaagcattgctagacgtgttagaggtgtccttaggcaggttga

SEQ ID NO: 36371 - DNA, 260 bp, Glycine max
  Clone ID: 700888505H1
tgggaatgaagaatgtgaatcagtacctaaggtggtggaagcattgagcaatgtcaaagctgttcatgttgcaacaggagattacacaacctttgtcgtgtctgatgatggtgatgtgtattcatttggctgtggagaatctgctagtcttgggcataatgctgctggaaatgatgagcagggcaacagacatgcaaatgtgttaagtccagagcttgtcacttcactgaagcagatcaatgaacgggtggtacagatta

SEQ ID NO: 36372 - DNA, 253 bp, Glycine max
  Clone ID: 700888507H1
gttgattcctgagtatttgggctttgtcaagggtattgttgattctgaagatctcccactcaacatttcaagagaaatgttgcaacagaacaagatcttgaaggtcatccgtaagaacttggtcaagaagtgccttgagctcttctttgaaattgcagagaacaaggaggattacaacaagttctatgaggcttgctctaagaacttaaagcttggtatccatgaggattcccagaacaagggaaagattgct

SEQ ID NO: 36373 - DNA, 262 bp, Glycine max
  Clone ID: 700888509H1
cgttgaccttcttcattgattactatttctccctcagatttcgcttcaatcttccatccccgttccgttcacttctactttcaaggttgtgtattacatgaatcgttggttgaaagatgtttgactgtggttacaagtcgcaatatgtgggtgggcaatgtgaaaaatttgtgaggttggatgacttggattctagactatcatcatcttctgaagctgcagttaaaacatgtggatttagtattgataaattaagccatgg

SEQ ID NO: 36374 - DNA, 89 bp, Glycine max
  Clone ID: 700888510H1
cgtttttgctccaaactgtggtgttgatgcatcaacaccacagtttcgagcaaaaacttcagcaaatcgagattcaggaggtttcttgc

SEQ ID NO: 36375 - DNA, 259 bp, Glycine max
  Clone ID: 700888511H1
tacacgttgggttggaattgatgaagttgaggacgaggaaaatgaggaggcataaacatgtcatctaaatatctgactgcctcttcagccaaggcaaaagggcttttctggttttcccttgaaataaaggccaagttgctacacgttgaattttactgaaactgtcattcctgaagttcattatgtaaatagtaagtgtagaactcagtgccgtattgaagaaatgttcaaatttatgtgttaaatgctaccatagtga

SEQ ID NO: 36376 - DNA, 260 bp, Glycine max
  Clone ID: 700888512H1
ctgaaacgcagatcgaactccgccgtagccatcatcaccgatcgaacttcgcaagacagagatcagattctgattccgacacagtaacagtatgagcgtcatcgacattctaacccgagtcgattccatttgcaagaagtacgacaaatacgacgtcgataagcaccgcgatgctaatgtctctggcgacgatgcctttgccagactctacgcctccgtcgacgccgacatcgaggccctacttcagaaagcagaaagtg

SEQ ID NO: 36377 - DNA, 261 bp, Glycine max
  Clone ID: 700888513H1
ctaaaccctactcattctccatacctcaacgaagaggttaaagagacggcaacactttgctgtccgccttgaccgagcagagcttcgtcttggccctcgattttgccctaaagtactctcagtcacaacagacaccgtcgtcgtcgtcgtcgtcatcaatggcaccgaagcagaccaaggctgagaagaagatcgcttacgatgcgaactgtgcgacctaatggaggagtacggccagatcctcgttgtgaactccgataa

SEQ ID NO: 36378 - DNA, 152 bp, Glycine max
  Clone ID: 700888514H1
cggtatttggggtaaaggagcacatgacatgtaacgaatttggggtaaaggagcacatgacatgtaacatttttgttttgtaatttgggattattttttcaatatcaaagtaactgtataagctataaagcatgaattacattattgtctgg

SEQ ID NO: 36379 - DNA, 261 bp, Glycine max
  Clone ID: 700888515H1
ggtatatctataggcatagttactgccattgcagctccagcaagtctaacggttgaatttgaaggcaatggtggccatgcgggtgctgcccttatgcctaacagaaatgatgctggtctggctgcttctgaattagccctggctgtagagaggcatgtgttggattctggctcaattgatactgttggcactgtcggtatcctggaactgcatcctggagcaatcaacagcatccccagcaaatctcacctagaaattgac

SEQ ID NO: 36380 - DNA, 132 bp, Glycine max
  Clone ID: 700888516H1
tgcaaatggatggatacaagggatgtccttatcgtaaatcctactggttctaatcaagttgatcctgactatttggaatctgagcaaagacttgaaaaatggtactctttgaatccatgtaaggtaatcatt

SEQ ID NO: 36381 - DNA, 257 bp, Glycine max
  Clone ID: 700888518H1
gacctttctaactaatctacagtccatcctgtaataatctccgtttcaacaccaaacaccaagcgaaacctgaattaagcctcttcttcttcatcgaatcgaaacaacctcgtccgtgctaaggaaactcaacgacagagactgcaacaatgtacgtagatcacgcgttctcgatttcggacgaggatatcatgatgggaacctcgtacaccgtcaacaacaaaccccccatcaaggagattgccctcgccgtttcc

SEQ ID NO: 36382 - DNA, 219 bp, Glycine max
  Clone ID: 700888520H1
gtgaaagtacgatgtaataactgctcacctgagtactgttgttggtgttttggggtatgatgtatcataatgcttgacttgactctgagaaataataaattcagttatctgtttgttcttgtagtagttcttaaggatgaaatcttcacttgctgtatttctggtttccctttgtaataaatgtttgtatattaataaatgttttatgttatgggttat

SEQ ID NO: 36383 - DNA, 257 bp, Glycine max
  Clone ID: 700888522H1
atatgttgattctatagaaggaatcacgcatgcccttcgatctagtgaataccatgatcgcaatgcccagtattactggattcaagaggacatgggtcttagaaaagttcttatctacgaatttagccggttgaatatggtctacactcttctgagcaaacgaaagcttttgtggtttgtacaaaatgggaaagttgatggatgggatgatgcacgatttcctacagtgcaaggaattgtgcgtagaggtttgaaaa

SEQ ID NO: 36384 - DNA, 257 bp, Glycine max
  Clone ID: 700888523H1
atggttctctctatggtgatctcaagcgtatttgtgaaaccgaccttggtttaatttctcaatgttgtttgacaaagcatgtctttaagatcacaaagcagtatttggctaatgtgtctctgaaaatcaatgtcaagatgggaggtagaaacaccgttcttgttgatgctgtaagctgtagaataccattggttagtgacataccaactataatatttggagcagatgttacccatcctgaaaatggagaagactcc

SEQ ID NO: 36385 - DNA, 258 bp, Glycine max
  Clone ID: 700888524H1
gaatttattttcaaaaaccttctcttttctcaattgggtttccatctttgatttgatttcattgccatggctccaaaggatcccaagcaagttgctgatgctgcttcttctggtggtgggggtggcttttttgcttctattgcttccagcttgtccaatttcggtagtgccatgtccaaatccgttaatggtttggtgggctacgaggggctggaggttgttaatccagatggaggaactgaagatgctgaagaggaa

SEQ ID NO: 36386 - DNA, 263 bp, Glycine max
  Clone ID: 700888525H1
ggctcgagccgaatcggctcgagcgcacttctttcgcttggcgtggtcgtctctcccgcgaaccctatctccacgcgctccagtctcacgcgcttcttccacctcagcaaaaatacaatagtcttcacagtaacttcagtcgttgagaaaacacaagactttcatgttagaaccgtactcctcgactcgcccgagttcgactcgctcacgaagactcggattcagatacatcctccgagtccactcgtttcccccgtgactca

SEQ ID NO: 36387 - DNA, 239 bp, Glycine max
  Clone ID: 700888487H1
gtagatgtgcttgatgatggttataaatggaggaagtatggtcagaaagttgtcaagaatagccttcacccaagaagctactaccgctgtacccataacaactgtagggtgaagaaaagagttgaacgactctctgaagattgtcgtatggtaataactacctatgaaggcagacacaaccactctccttgtgatgactcaaattcatcggaacatgaatgtttcacctctttttgaac

SEQ ID NO: 36388 - DNA, 246 bp, Glycine max
  Clone ID: 700888455H1
atcaatgattgcaatgagtatgatgttgaagggggtgacgatgagccaaactttgacgtcgaagatcgcaaacctgagaatcttcatgcaccgaatcttgggatggacagaatgatgggaagactgccttctttcccaatcaagggagaggctgttacaaatttggatttcattcggaagaggaagatctctggtgacttcaacatgataatggatcagaaaatttacacatgcgaacaacctcag

SEQ ID NO: 36389 - DNA, 248 bp, Glycine max
  Clone ID: 700888456H1
attgacctctctttcttttcctttccttttttctccatctctcgcaactcttcacctcaccgcgtcattcgcagcaaccaccgaacactgaatcgcgattcgcagtgtatgacgagcgcttcggagctattccacaccagaaggcatcgattgggacgaaatgctctcgatctagggctcgacaccgaactccacgccgccgattctctccgccaactccgccttcgtcactactacctccgccgcca

SEQ ID NO: 36390 - DNA, 248 bp, Glycine max
  Clone ID: 700888457H1
ggtctgttaaatggctggaagatatcaatatcattgaagaagaatgtcaggagttcttcatgcaaaaggactacaaaatgtttcccaccatcagtgaaattgggttaaaattgattggtctacccggagaccccaaatggatttcccagttcagtgtgttatatgttctcttgaagacgtgagcacaataaagcctgggaaggtaaaaattagtggatatgcagcatcaggaggtggcagaggcattg

SEQ ID NO: 36391 - DNA, 245 bp, Glycine max
  Clone ID: 700888458H1
caatggaggaagaagccaaggtggttttgttgggtgcacggttcagtatgtttgagatgagagttaagatagctttggcagagaaaggaatcaaatatgagtacatggaacaagatctcaccaacaagagtactttgcttcaagaaatgaacccaattcacaagaagattccagttctcatacatcatggaagacctatctgtgagtccctcataattgttgagtatattgataatggttgggac

SEQ ID NO: 36392 - DNA, 246 bp, Glycine max
  Clone ID: 700888459H1
accaaagggccttttcttagaatggagctcttgtggaaagatcacatgagggtacaagtaattagattggtttgtgctgtccttttggtgacactgctgagctcacaggtagctgagagcagaaaagtcaaaactgttggtacttcctttaagtacgaagctataaattgcaggactcatagtgcttcattgactgattttggtggtgttggagatggaaagacatcaaacacaaaggcatttcag

SEQ ID NO: 36393 - DNA, 182 bp, Glycine max
  Clone ID: 700888460H1
agctcatttacacacctctccaacctatcactttcagctttatttgaatccctctctctcctttccaaatggccagcgttgaggtcgcacatcaaacaccaacaacagttccagaaaatgaaacaacagaggtaatcaagacccaggaaacaaccccggaaccagtaccagccactgaggcc

SEQ ID NO: 36394 - DNA, 248 bp, Glycine max
  Clone ID: 700888462H1
cacttgccaaaggaaaaggctaaagagaagaaaaggcaaagcaagggaccaaccaaaacacacacagagaaacatgtcttccccaagcaagcgccgagagatggacttgatgaaactgatgatgagtgattacaaggtggagatgattaatgatggaatgcaagaattttatgtgcaatttcatggacccaatgacagtccttatcatggtggtgtgtggaaagtaagagttgagttaccggatgctt

SEQ ID NO: 36395 - DNA, 247 bp, Glycine max
  Clone ID: 700888463H1
agccatgctccctggaaaaactgtctatgatgtgatcaaacaatacagagaattggaagaagatgtttgtgaaatagcagcagggaggattccagttcctggatatcctacctcttctttaacattggagatggttgacaaccaatgttatgatgcatgcagaaagaagcctgcaactctcaggagttctgatcaggagaggaagaaaggggttccttggacagaagaggaacatagacgttttctt

SEQ ID NO: 36396 - DNA, 249 bp, Glycine max
  Clone ID: 700888464H1
ggatagatagagtgatacacatcacattttctcaaagtaatttattaattaataaataaatggcggccgcggcggcagtgacggtgctactcccacctaggattccgaccgccaccaacgttacccgctgctctgctttgccttctctgcctcctcgcggcaccaacactaaaaccactttgctcttatcttccctcaaccacttctcagtgtcccgaaaatcttctctgcttcagaccagagcttctt

SEQ ID NO: 36397 - DNA, 103 bp, Glycine max
  Clone ID: 700888465H1
cacttgttgagagaaatagaaaatgcggaggcgtgcaacccttttccttcgcgtcctggaacctcctatacacatcaacgcttcgctttcccaaacatttacg

SEQ ID NO: 36398 - DNA, 95 bp, Glycine max
  Clone ID: 700888466H1
agcgtattctctcgctctttctttcactgtcacagagccacatccatgggcttcccagccaacggcgcctctgcggcccagcccctaaacttcct

SEQ ID NO: 36399 - DNA, 239 bp, Glycine max
  Clone ID: 700888467H1
caagactttgcctaaggagaagactcttctgcctgcagatcctgctaagcctccagccaaggcacaggtggtaggttggccacctgtgcggtccttccggaagaacatgttagctgtacaaaagagcgtcggagaagagaacgagaagaacagcagcagccctaatgcaagctttgtcaaagttagcatggatggagcaccttaccaccgcaaagtggacttgaagatgtacaagagtt

SEQ ID NO: 36400 - DNA, 238 bp, Glycine max
  Clone ID: 700888468H1
gtgatttcagtgagtgatcggtgttcacttgatctcatcataatcgtcagcgtcaattgaagaagatgccgatcagaaacatcgccgtcggaaggcctgaagaggcgactcaccccgacacgttgaaggcggctttggctgagttcatctcaaccttcatcttcgtgttcgccggctcaggctccggcatcgcctacaacaagctcaccgacaacggcgctgccacccctgccggcct

SEQ ID NO: 36401 - DNA, 241 bp, Glycine max
  Clone ID: 700888469H1
tcttcctcttcctcagtagtgcgattttcgattctcttctctgcaactatgcctaaccctaaggtcttcttcgacatgactatcggcggtcaacctgccggccgcatcgtgatggagctctacgccgacgtgactccgagcaccgccgagaacttccgcgcgctctgcaccggcgagaagggcgccgggcggagcggcaagcccctccactacaaaggctcgtccttccaccgcgtgatcc

SEQ ID NO: 36402 - DNA, 235 bp, Glycine max
  Clone ID: 700888470H1
cagcttaaatattggttgaaccagaggcaacaatgggtttgacggtgtcacggctattgagattgttttatgcaaggaaagaaatgaggattctgatggtgggtcttgatgctgctgggaaaacaacaatactctacaaactgaaacttggagaaatcgtcactacaatacccacaataggcttcaatgtggagactgttgagtacaaaaatgtcagcttcaccgtctgggatgt

SEQ ID NO: 36403 - DNA, 243 bp, Glycine max
  Clone ID: 700888471H1
gagccatgtctagcaccgttggccagaccatcaagtgcaaagctgcgattgcatgggaggctgggaagccgctggtgattgaagaagtggaggttgcgccaccgcaagccggtgaagtccgtttgaagatcctctacacctctctttgccacactgatgtttacttctgggatgcgaagggccagactccattgtttcctcgcatttttggccatgaagcttcggggattgtggagagcgtag

SEQ ID NO: 36404 - DNA, 246 bp, Glycine max
  Clone ID: 700888472H1
ctctcttctctctctgcgtttcactgcagaaccaaaacaagctccggagaaaccgcaacaaaaaaagaaaaaaacacacaaacttaacccaaaactgtaaccccagtatgccatgcttcacaccacaccattctcttctcctcctccttctctctattttcttcttctctctctccgtcaccgctgcaagaacctcttctttccattccttacgtattcaagatggaattgagggtggtggcgagg

SEQ ID NO: 36405 - DNA, 244 bp, Glycine max
  Clone ID: 700888473H1
tgagggttgcagctagaaggctctcttctctctcctcctcctctccgtggcggcccaaccacgccgcttccgcttatgtctctcgaaacgcagtcgttgatgaccgcagatccgatccttcctcccatcccctttttcccttcagaggttttgctactgaatccctgatccacccaatagaaaacagcattattcctgagattcctgcaactgttactgctgttaagaaccctacttctaagat

SEQ ID NO: 36406 - DNA, 246 bp, Glycine max
  Clone ID: 700888474H1
agcaaagctctcaactttactttacgatttcgctacttccagttccattggcactcttgtttactcttttgaggaagttaagttcactggttcaagtattttgggatccacaaggtggggacgtaaaggattgggatttcgatggagactgacagacctgacggccggactcccaatcaactgagacccctggcctgctcctgctctatcctgcatcgcgcccatggctcggccagttgggctcaa

SEQ ID NO: 36407 - DNA, 241 bp, Glycine max
  Clone ID: 700888475H1
cagaagcccatttggatgagaaagcctgaggagatcacaaaggaggagtattctgctttctacaagagtctcaccaatgactgggaagagcatttggctgtcaagcacttctcagttgagggacagttggagtttaaggctatcctctttgttcctaagagggcaccttttgacctctttgacacaaggaagaagcctaacaatattaagctttatgtccgccgtgtctttatcatggaca

SEQ ID NO: 36408 - DNA, 243 bp, Glycine max
  Clone ID: 700888476H1
gatactttggttcctgttatagaacctcactatgtgatcatgtcagacacctttattacaggattaaatcaggggggccacttgcatatactaccatttctacctcaactctcaattcccctcataagctcatgtttggtgctcagtacaaggcgcctgcatatatgggcagtatttctgtctgtgtctgtttattggctgcagtggtgtctcttggattagctctcttgatagtaccacggc

SEQ ID NO: 36409 - DNA, 243 bp, Glycine max
  Clone ID: 700888477H1
ctagctaagcgagctaaaaccaaactcttcagcagtttgtttttgcttagcttcttcttctgcttatgctttctccaccaccacaaccacgtcgtattctgccactgcctccaacactttcttccttctctcttgtttccttctcttctgtctcctctcagctccttcctgtgtttccatgttctctggtattgagacaggagatttagaaaaaagagatgatttgtttccacagattctaag

SEQ ID NO: 36410 - DNA, 104 bp, Glycine max
  Clone ID: 700888479H1
ataccccttgttaacattacccgtggcatctatgggcatgcctcctcaaggtttcattgttgctcctgagggagaagtaatacagaattcaaacccatgcgcac

SEQ ID NO: 36411 - DNA, 247 bp, Glycine max
  Clone ID: 700888480H1
gtggttagcagcgaaacccatccaagaaatatgagtatggttcccagtcccaaacaaaaacaagttgtgcaattgcagcatatccagaacaccaagaagctctcttactcattctcacattcctactcccaagcctaagaggtaccggagagaccaccggcatcatccaagggatgaacattccgacgcgtggcaggccaactcgtcgacagccacctcatcttcgccactctccaacgcatcgtcg

SEQ ID NO: 36412 - DNA, 230 bp, Glycine max
  Clone ID: 700888481H1
gcagagttatgttgctggtgctggggcacaacggataatgggtcctacaggtagtgctccttttggtcctgaaatctacagaggaccagtgctttcatcctctccagccgttgcttatccacctactacaccttttccctatccaggatttccatttgaaaccaattttccattatcttcaaactccttttctggttgttcaacggcatttatggattcatctactgtgg

SEQ ID NO: 36413 - DNA, 235 bp, Glycine max
  Clone ID: 700888482H1
tggacattggatgtcccagcttttttgtatggtaacatctagctagtcttaggctttagtgttaggatcagtcatgtcttcataaatatgtttttatttttattttttattttatcaattttcacaaaaaggggtttaaccagccaaccaattaacaatcttccctttgggtaaggggaggcaatatctaactactgtttttttatcctgtaaattcaaagaggctaaactatgg

SEQ ID NO: 36414 - DNA, 236 bp, Glycine max
  Clone ID: 700888485H1
attgaagagggaattgaaggaattgacaatgagaaatcatcattaatgtctcaatcgaagtttgagaagaagtttgggcaatcatctgttttcatagcttcaacactcttggaagatgggggtgttccaaaagcagcaagttccgcaacactcttgaaagaggccatccatgtaattagttgtggttatgaagataagacagaatgggggaaagaggttgggtggatatatggctc

SEQ ID NO: 36415 - DNA, 124 bp, Glycine max
  Clone ID: 700888454H1
cgtccacctgcgagactaacctttggctttcgtctcggtaggtgtattcttatacattttcccaaaagaacattcattcatttctttcttccccgtcgaccacgacgactgaaacgacgcaaaa

SEQ ID NO: 36416 - DNA, 118 bp, Glycine max
  Clone ID: 700888419H1
tgcaaagtcttccttcccacgcgtccttcttctaactcttgcttcccctgttttttcttctgtatttcactgccaacaagaacagcacaaacaaacaaaccatgaaacctttcgtggc

SEQ ID NO: 36417 - DNA, 228 bp, Glycine max
  Clone ID: 700888420H1
ctccaacgtgaagaagattgtaattactaatagtgtatgtacggtttgcgggataatactttgatggtagtgagagtggagtttgggacctttgggtacatgttatgcggcacctatcggtttgttcttatattggcttgctttttatttttatttttgtccatctggtatattggatctcatgtttccgtaatatgttgttgttcttatgcatggcttttgtttaca

SEQ ID NO: 36418 - DNA, 245 bp, Glycine max
  unsure (1)..(245): unsure at all n locations
  Clone ID: 700888421H1
ggtttntgttaatgggcttgtaagtgttgtggtgaatgtgatgggtgatagtttcccggagctaaaacaacaggaaacacacattcggaatataattgaagaggaggaggaaagttttgggagaaccttaattaagggaattgagaaatttgaggcagctgttcgacaagttcagggaaacatactgaacggggaggaagcatttgtcttgtgggatacatatgggattccattagatctcactc

SEQ ID NO: 36419 - DNA, 249 bp, Glycine max
  Clone ID: 700888422H1
cgctgtctccgacatggacccggtgaaattgaattctccgtgaagatgcggagtaccaacggctagacggtaagaccccgtgcaccttaactatagcttcgcagtgacaaccttgatcgaatgtgtaggataggtgggaggtgatgacacagaacgaccaatcctgaaagaccactctttcgtctaaggatgcctaaccgccgcaccgaaaattcgggggggggcgggacactgcgaggtgggtagttt

SEQ ID NO: 36420 - DNA, 251 bp, Glycine max
  Clone ID: 700888423H1
aggggttcctagacaaagtcaaggacaagatccatggtgagggcggcgccgccgagggcgagaagaagaagaaggagaagaagaagaaggagcatggccatgagcatggccatgacagcagcagcagcagtgacagtgattaaactgctgcatcacctatatatttaaaaggtttatgggaccatagtagcgagggctgtgccttaatttctctctctctctctctccctatctctctctctctctctttt

SEQ ID NO: 36421 - DNA, 88 bp, Glycine max
  Clone ID: 700888425H1
ttaagtccttcaaatttattaattctttcttattttgatcctaaatgttattattatggttatgttcttaattacttggtaacaaaat

SEQ ID NO: 36422 - DNA, 255 bp, Glycine max
  Clone ID: 700888426H1
gaaacacctatagttaaggacagatcagtaaaagtaccaccacctgcaccctcttccaaccctcttcttccttcacaaaaaactgagaaaggaatgaaagtgcagccattggcattgccaagaacagcaccaccacctcctccaacaccaccaaaatcactagttggattgaaatcagtgcgtcgtgtgccagaagtaatagaactgtatcgttctctcacaagaaaggatgccaacaatgataacaaaataagt

SEQ ID NO: 36423 - DNA, 251 bp, Glycine max
  Clone ID: 700888427H1
attcttcttcacaggcatggttgtggtggttcctcttgattggctctcttttcagcattgtcttcgcaatcgcacaacccatttgcccctctcctccagattcaccaccaccaccaccacctctctctgcttccactctcccataattcaagccaagttgccttttttcaccaattccgactcctttcaagtgggtcgacccattggcacttatggcttcatcaacgtcaccagctactctgcctttccct

SEQ ID NO: 36424 - DNA, 250 bp, Glycine max
  Clone ID: 700888428H1
gtgaaatttataaaggaactttaactttcgcgagcgacacaaacgcaatcaaatcaaatcatagattgatttggcaaccccaattcccttttgattatttttttttttttatgaattaaagcaatgggtttggttgcttagtgtttttttggacgcacgaaagatgattccttggggtggcctcagttgctgtttgagtgctgctgctctttaccttctcggcagaagcagtggcagggatgcggaaatt

SEQ ID NO: 36425 - DNA, 78 bp, Glycine max
  Clone ID: 700888430H1
tgagaaagacacaaagcgtaagaggcagtgtacatgacaggaacactgcttcttacgctttgtgtcttttgcttgaaa

SEQ ID NO: 36426 - DNA, 252 bp, Glycine max
  Clone ID: 700888431H1
atttgatttttcaacgattcttcttctacgcgtcttcttcttcacactctcactcccaagtcccaatggcctcttctcctccctcttcctccgctattaaggatgccaaggtgcttatggttggcgctggcggaattggctgcgagcttctcaagaccctcgccctctccggtttccctgacattcacatcattgacatggacaccatagaagtcagtaacctgaacaggcaatttttatttcgacaattcc

SEQ ID NO: 36427 - DNA, 254 bp, Glycine max
  Clone ID: 700888432H1
catctctacattcccaagggctcctactacgcaataactccaagcccgatctcaaattaatatttcatttactcatcttaatcaatattaaataagaaaagatgggagagatgtcaaacttccaattgggtgtgattggtgcactatttctctctgtggcttcttctgtctccattgtcatctgcaacaaagccttgatgagcaatcttggcttcccttttgccacaacgcttactagttggcatttgatggtc

SEQ ID NO: 36428 - DNA, 141 bp, Glycine max
  Clone ID: 700888433H1
cttctcttcactctgcccgctgcatcaatggcttcagagaagaaactttcgaacccaatgagggagataaaagtgcagaagctcgtcctcaatatctctgttggcgagagtggagatcgtctcaccagagcctccaaggtg

SEQ ID NO: 36429 - DNA, 245 bp, Glycine max
  Clone ID: 700888434H1
gattttgcattatgggagccacctcatggtccatacaaaacattcaattatccttggagaagctatgttaaagtcagtggagctttgaggcattgtgctttcatggtcatggcaatgcatggatgcatactttcagaaatacaggcacccccagaaaagaggctggttttcagcattgaacttcagaaggttggcactgaaggagctaaagtattacgccaacttggaagcaaagtggaaaatat

SEQ ID NO: 36430 - DNA, 242 bp, Glycine max
  Clone ID: 700888435H1
ccttgccttgccatggcctcaaactccatggctggcttgatcaccggttcgaattctcacttctcgcgtgactccgatgagcatcagactcctcctacccgacaggcttcatcgaaaactacttgtcgagtttgtggcgatgagattggatacaaggaaaatggggagctgtttgtggcttgtcatgtgtgtggatttcctgtttgccgaccgtgttatgagtatgagaggagtgaagggaa

SEQ ID NO: 36431 - DNA, 245 bp, Glycine max
  Clone ID: 700888437H1
ccttctcctctcacagtcacaggttctgtttgttatggtttcctttttttccatttcccccctttctcccacactatctctttcttcattttcccaattatgatgtgtcattgagacagaagaagaagaagaaattggagggggtgtgtgatcgggtcctcaggtgaagatctgaggcggttggtgtctcttttcttttctccgagttccaaagatgagcgcttctaggttcatcaagtgcgtca

SEQ ID NO: 36432 - DNA, 246 bp, Glycine max
  Clone ID: 700888438H1
cgattcagaactctgtcccagccattacatttctcatggcagtcatactcaggatagagcaagtgaggctgaacagaaaggatgggatagcgaaggtggcgggaacgatattctgtgtggctggggcgacggtgattacactatacaagggtccaacaatatatagcccaagtccacctctacagagtgagagctcagtagtagttgagtttgggacactctcatcactgggagatgcaaagggga

SEQ ID NO: 36433 - DNA, 248 bp, Glycine max
  Clone ID: 700888439H1
aggacattcattcatctatggctacccttattgctcccagcaaccactctccccaagaagatgctgaagctctcagaaaggcttttgaaggatggggaactgatgagaacactgtcatagtaattttgggtcatagaactgtgtatcagaggcagcaaatcagaagagtttatgaggaaatttaccaggaggatcttgtgaagcgcctagagtctgagatcaaaggagactttgagaaagccgtgtac

SEQ ID NO: 36434 - DNA, 250 bp, Glycine max
  Clone ID: 700888441H1
tgtgattcttgctttgaagaaaagcaacattactactatagtactattcttccataagaaaccggaatattaagaagctggtgacttcaagagaaagaaacggctttctatccaaggggcagtattgtttggacagggggaaaggaagtggcaaaaaattcgaaagaagatggtattctgataaagagcttcttttcctttgttttttgttttttgttttttgagggattaaatgatgctttttctttat

SEQ ID NO: 36435 - DNA, 250 bp, Glycine max
  Clone ID: 700888442H1
gagagagagagagatggcagcttctggttcgtggaagagtgggagtggttcttcgatgggtctggagaggatgagcgtggagcagctgaaggcggtgaaagagcaagccgatctggaagttaatcttctccaagacagcctctccaacattcgcaccgccaccacccgcctcgagatcgcctcctccgccctcaacgatctctccctccgcccccagggcaaccacatcctcgtcaccctcaccgcctcc

SEQ ID NO: 36436 - DNA, 103 bp, Glycine max
  Clone ID: 700888443H1
tctctctcgtcttcaccaatggcgtcgtcgtcaccaccaccttctctgttcttcctcctcctcctcgctctattcgccgccacggcatcctgcctcacctgca

SEQ ID NO: 36437 - DNA, 248 bp, Glycine max
  Clone ID: 700888444H1
gtgaaattggagagaaaaaaaaaaatacactcaaacatggagggctatgagatcctcaaagatattggttctggaaattttgctgtggccaagcttgttagagacaactgcaccaatgagctttttgctgtcaagtttattgagagaggccagaagattgacgagcatgtccagagggaaatcatgaaccacagatcattgaaacaccccaatattattagattcaaagaggttctgttgacaccaac

SEQ ID NO: 36438 - DNA, 246 bp, Glycine max
  Clone ID: 700888445H1
gtgatccttgctatgttgaaggttatcatttggctgatgcaagtgatgggaggatcactctgcatttgaaggtcttaaacttaactgagcttgaattaaatcgggtggatgtacgcgtgggattatcaggtgcattatattatatggatggctcttctcaagctgtgcggcaattgcgtggtcttgtttcacaggatccagtgttgtgcagtgtgacagttggtgtttcccactttgaaagatgtg

SEQ ID NO: 36439 - DNA, 247 bp, Glycine max
  unsure (1)..(247): unsure at all n locations
  Clone ID: 700888446H1
cacaacatgggacgaatntctttgtttattgtttgttnagttgaaactttananaaaatcaatagtgatatggaggcaaagggtgtgcggttcttagcgtatcaatcaatattttcgagcgttggatctggggacttcgatggggtgaagaaactggtggaggaagtgaagaaggaagaagggtcatcgctctctgatgtgatgtctcttcagaacgatgctggagagactgcgctatacatcgctg

SEQ ID NO: 36440 - DNA, 151 bp, Glycine max
  unsure (1)..(151): unsure at all n locations
  Clone ID: 700888447H1
ttacgtttttgttctcgtgtcaatttctaaatccaccaccacaccctctattctcttctcttctctccacacaacataaggaacgaataaccttntctcgaatcttcaaaagnaatnnactaaaacannttnaanctctccgctctcaaat

SEQ ID NO: 36441 - DNA, 96 bp, Glycine max
  Clone ID: 700888417H1
caagccccactcaaccaccacaccactctctctgctcttcttctacctttcaagtttttaaagtattaagatggcagagacattcctatttacctc

SEQ ID NO: 36442 - DNA, 250 bp, Glycine max
  Clone ID: 700888448H1
acctccaaaacataacatcctacgccaaacaaaactttgacctccttcagatctatacccttctctctctctctcttctattttcaaattctacatcatgggcacggaggttctacggccacaagattgtttcacccaacgcatcggtgttccaccgcctggcttttcccggcgaagaacctattgtacccaccacaacaacaaaaacaataacgttaacaattatttcaggggtaaccggaagccgaca

SEQ ID NO: 36443 - DNA, 123 bp, Glycine max
  Clone ID: 700888450H1
ggcctgccactcctccggagagacctaaaacaccaccttatgtccctccaagagctccttctcctagacctccctctccgagggctccttctccaaggcctccgtctccaagggctgcttctc

SEQ ID NO: 36444 - DNA, 124 bp, Glycine max
  Clone ID: 700888451H1
gtcagctgccgtggaggttatgctacttggtttagcagcaaaaggagcgacccgaacctgctcactggtgctcttgttggtggacctgatgcatatgatgactttgctgatgaaagagataact

SEQ ID NO: 36445 - DNA, 177 bp, Glycine max
  Clone ID: 700888452H1
gttgggagtgacgatagtgaaccggggtccagacacagaacttctggttgctaatcctgtggagctgagtggaaaggggagaccccgtgtattctatgatgttacgttgactttaaaagcgttgggagtaggcattttctcggctgaagttgttagacattcaacacaagaacgtca

SEQ ID NO: 36446 - DNA, 66 bp, Glycine max
  Clone ID: 700888453H1
accttcttgtatatataaaaattaagggattgttatatggtaccggattcttagtgttgcactaaa

SEQ ID NO: 36447 - DNA, 240 bp, Glycine max
  Clone ID: 700888383H1
gcagagccatgtctcactccgacagcagcaagaagaagaagcagcagcagcgtagcaagcacgaaggaggaggaggagaggaagaatcgaaagacgaatgcgggttgatgatcaagccgcagagcgtcactcccccaatcgacacctgcccaatggcccatacctcctcagaaactatgagcgtctcaatgtccggaacgggcactacatccccatctcctccggctactcccccatgaa

SEQ ID NO: 36448 - DNA, 241 bp, Glycine max
  Clone ID: 700888385H1
tctcgagccgattcggctcgagggaattgcagccctgatatctaactctttctatcctccagtatattactcttttatgtgttacccatttttctgcaacctttacttgggatttatcactgtattgggcatctccaccatcttgttttctctactcccagtgttccaaaatccagaattccgcaccatccgagcatctctcttctttggaatgggtttatctggcgcacacctattctgc

SEQ ID NO: 36449 - DNA, 240 bp, Glycine max
  Clone ID: 700888386H1
tgatcatgccgctttgcagtttctgcgctgttcataaaacccttctccgacaacttgtagctgctgctgctgtttctctttcattttttttttgctaaggactcaaggaatacaacatcctgatatttggaggacagattaaagagaaacatcgtggaggaaacaatggcagcaaggtattggtgtcacatgtgctctcaaatggtcaatcccatcatggatatggaaatcagatgcccg

SEQ ID NO: 36450 - DNA, 242 bp, Glycine max
  Clone ID: 700888387H1
gaggcattaggattttgagcagacctagaattccagtccctttcgatgatcctgccggtgattacactgtcctcattggagattggtacaagctcaaccacacggatttgatgtctctgcttgatagcggtaggaagctgcctttccccaatggaatcctaatcaatggtcgtggttctaatggtgcatatttcaatgtggaacaaggaaagacctacaggcttaggatatcaaatgtgggg

SEQ ID NO: 36451 - DNA, 247 bp, Glycine max
  Clone ID: 700888388H1
gttcccagtgtgctagaaacatggactctgctttgcaaagactaattttgagagttctcagtttttggactatactttcctagattttcagggtgccatcatgtgtcaaaagctattgacgaataatccatctccagatccaatcttgttagtagagtcacaaccaaaaatgcgatgtttcttctcgaagttgctgtgtaagtttagtccaccaagtagaagagattgacgaaggagggatgatgga

SEQ ID NO: 36452 - DNA, 234 bp, Glycine max
  Clone ID: 700888389H1
gcagtgggcctccgtctcctacggcgtcttcatgtgcgtcgaatgctccggcaagcatcgtggcctcggcgtcgagatctccttcgtccgatcggacaccatggactcctggtcagacattcagatctcgactatggcagccggcggcaacgacaagctcaacgcattcgtcgcacagtactccatatacgaagatcccgacatcgctacgggtacaacaccaacgcagcttct

SEQ ID NO: 36453 - DNA, 244 bp, Glycine max
  Clone ID: 700888390H1
caactcttcaaaagggagaagaaaaggaaagaaaactctcaaaaaactattatagcaatggcagaacaaaaccaaaaccaaacaactgaagctggaaggcaccaagaggttggtcacaagagccttctccagagtgatgctctttaccagtatattctggagacaagtgtctacccaagagaacctgaatccatgaaagaactgagagagttgacagcaaaacacccatggaacatcatgacaa

SEQ ID NO: 36454 - DNA, 243 bp, Glycine max
  Clone ID: 700888391H1
atagctctggaactgaaatctggataattttccaggtttcctacagctttgaacaaagttttagcaggagcagacttaggagatagaaaaatcagctccttttccccttagtttcagaaggaattgattgctcgacgattgctacttttttaaggaacgggttcaagagatggagaacgagtcaattattcagagcaataacaatacgaacacaatgtctagtgttagagaaaaaaacggagg

SEQ ID NO: 36455 - DNA, 242 bp, Glycine max
  Clone ID: 700888392H1
gtttgttgttgtaactcgttcttcttcttttgttgttctgtgtttgtgtttgttttttctctcacctgaaaatgtcttgctgcggtggtaactgtggttgcggaagctcctgcaagtgcggcaacggctgcggaggctgcaagatgtacccagacttgagctacactgagtcaaccaccaccgagaccttggtcatgggagtggcacctgttaaggctcaatttgagggtgctgaaatgggt

SEQ ID NO: 36456 - DNA, 242 bp, Glycine max
  Clone ID: 700888393H1
ctttgatgaaattgcagagagtgggaattgaagagcaatggcttacagtagcttcatcatcatcattttctacaaggcttcttctgcattcacacacacctctagtatgcagaagaagatgcagacccaattttctgaggatggtgactcgctcctgtctcgatgacagctctgctctcctccgagcagcgcaacacactgtggatacatacgtgaaaagtggcatggttgtaggattgggg

SEQ ID NO: 36457 - DNA, 243 bp, Glycine max
  Clone ID: 700888394H1
cagacccgtgagcatgctcttcttgctttcaccctaggtgtgaagcagatgatctgttgctgtaacaagatggatgccactacccccaagtactctaaggctaggtatgatgaaatcgtgaaggaagtctcttcttacttgaagaaggttggttacaacccagacaagattccctttgttcccatctctggttttgagggtgacaacatgattgagaggtccaccaaccttgactggtacaag

SEQ ID NO: 36458 - DNA, 240 bp, Glycine max
  Clone ID: 700888395H1
cagacccgtgagcatgctcttcttgctttcaccctaggtgtgaagcagatgatctgttgctgtaacaagatggatgccactacccccaagtactctaaggctaggtatgatgaaatcgtgaaggaagtctcttcttacttgaagaaggttggttacaacccagacaagattccctttgttcccatctctggttttgagggtgacaacatgattgagaggtccaccaaccttgactggtac

SEQ ID NO: 36459 - DNA, 243 bp, Glycine max
  Clone ID: 700888396H1
attggccagctgataagattaagggagaagagtgttggacggaccttgaatactgcaagcaaaaggggttgtattatcccattgcaaagactctagcagagaaagcgggttgggactttgcgaaggagacaggttttgatgttgtcatgataaaccctggtacagcattgggccctctgcttcctccaagaatcaattcaagcatggctgtgcttgttagtgttctcaaagggggcaaagaga

SEQ ID NO: 36460 - DNA, 100 bp, Glycine max
  Clone ID: 700888401H1
ggagaactcgactgaagctgcctctgcgacgccgtttcgattcagcctcagacatttccgttgcagtcatggtgcaagaaaatggcaagaggaagaaacc

SEQ ID NO: 36461 - DNA, 250 bp, Glycine max
  Clone ID: 700888402H1
acacaactcccggctattcaaagaactgctccagggcgaacttcaccttctttgcaagcccctgctccacaggttggtaatcgacctggtagtgggtctcaagcttcatctccccccaaaacatccagcgcgattagttcattggattctggagaaattgatgcagcttcagattccgataaattgaagggtgcattggttgggaagggaaggggagctccacagggtagtggaaggggctcttttgttt

SEQ ID NO: 36462 - DNA, 247 bp, Glycine max
  Clone ID: 700888403H1
gaaggtcttgctgaggccattgatgatggcaagattggaccaagggatgaccccaaggttcgttccaagatcttgtctgaagagttcggttgggacaaggatcttgccaagaaaatctggtgctttggccctgagacccttggacccaacatggtggttgatatgtgcaagggagtccagtatttgaatgaaatcaaggattctgtggttgctggattccagtgggcatcaaaagaaggtgctttgg

SEQ ID NO: 36463 - DNA, 233 bp, Glycine max
  Clone ID: 700888404H1
ctcgagccgattcggctcgagtgcagctgcacgatttatggaagactggtttgagcgaaaggggtctgtaagaatggatagggttagatttgaaaatgatggagtcccccgaagaatttcaaacataattcccagtcttcatgataattaccatgaattactggaacttgctgcctcattccgatctcctcttggtaaacctgcaaaccaaacttcaggattgctagacgtgt

SEQ ID NO: 36464 - DNA, 249 bp, Glycine max
  Clone ID: 700888405H1
tgggaatgaagaatgtgaatcagtacctaaggtggtggaagcattgagcaatgtcaaagctgttcatgttgcaacaggagattacacaacctttgtcgtgtctgatgatggtgatgtgtattcatttggctgtggagaatctgctagtcttgggcataatgctgctggaaatgatgagcagggcaacagacatgcaaatgtgttaagtccagagcttgtcacttcactgaagcagatcaatgaacgggt

SEQ ID NO: 36465 - DNA, 250 bp, Glycine max
  Clone ID: 700888406H1
tttcattctgagcaggtatctcttagagttccagcatgtaactatgttgtaagcaccattgcctatgagttgaatgttctccgtgcaagagggccaaggagaatgcactgcaccatgaactccatatctgtctcagctgttcaggaagggggcaatgctccaactcctacatcttttcctcaaatcattgacgagcctttttctccctcaccagcactgaaaggaaaaggtccaattagagatctagaca

SEQ ID NO: 36466 - DNA, 254 bp, Glycine max
  Clone ID: 700888409H1
agttgaccttcttcattgattactatttctccctcagatttcgcttcaatcttccatccccgttccgttcaattctactttcaaggttgtgtattacatgaatcgttggttgaaagatgtttgactgtggttacaagtcgcaatatgtgggtgggcaatgtgaaaaatttgtgaggttggatgacttggattctagactatcatcatcttctgaagctgcagttaaaacatgtggatttagtattgataaatta

SEQ ID NO: 36467 - DNA, 251 bp, Glycine max
  Clone ID: 700888410H1
tgtttttgctccaaactgtggtgttgaggcatcaacaccacagtttgcgacaaaaactttcagcaaatcgagattcaggaggtttcttgccatcagatccacccacagcatcacaagtaccctggtatgccttaatgtattgtagagcaatacacgcaagcaccgggttgtccgttgaggctgacaccttgtgagcagttctgttttcgttaatcgcaactaccaacttgtccgcagggttgttagtaact

SEQ ID NO: 36468 - DNA, 252 bp, Glycine max
  Clone ID: 700888411H1
tacacgttgggttggaattgatgaagttgaggacgaggaaaatgaggaggcataaacatgtcatctaaatatctgactgcctcttcagccaaggcaaaagggcttttctggttttcccttgaaataaaggccaagttgctacacgttgaattttactgaaactgtcattcctgaagttcattatgtaaatagtaagtgtagaactcagtgccgtattgaagaaatgttcaaatttatgtgttaaatgctacc

SEQ ID NO: 36469 - DNA, 254 bp, Glycine max
  Clone ID: 700888412H1
ctgaaacgcagatcgaactccgccgtagccatcatcaccgatcgaacttcgcaagacagagatcagattctgattccgacacagtaacagtatgagcgtcatcgacattctaacccgagtcgattccatttgcaagaagtacgacaaatacgacgtcgataagcaccgcgatgctaatgtctctggcgacgatgcctttgccagactctacgcctccgtcgacgccgacatcgaggccctacttcagaaagcag

SEQ ID NO: 36470 - DNA, 252 bp, Glycine max
  Clone ID: 700888413H1
ctaaaccctactcattctccatacctcaacgaagaggttaaagagacggcaacactttgctgtccgccttgaccgagcagagcttcgtcttggccctcgattttgccctaaagtactctcagtcacaacagacaccgtcgtcgtcgtcgtcgtcatcaatggcaccgaagcagaccaaggctgagaagaagatcgcttacgatgcgaactgtgcgacctaatggaggagtacggccagatcctcgttgtgaa

SEQ ID NO: 36471 - DNA, 189 bp, Glycine max
  Clone ID: 700888414H1
atgaatttggggtaaaggaacacatgacatgtaacgaatttggggtaaaggagcacatgacatgtaacatttttgttttgtaatttgggattattttttcaatatcaaagtaactgtataagctataaagcatgaattacattattgtctggttcacttttactgaacatttgaatgaaatcacaaaag

SEQ ID NO: 36472 - DNA, 255 bp, Glycine max
  Clone ID: 700888415H1
ggtatatctataggcatagttactgccattgcagctccagcaagtctaacggttgaatttgaaggcaatggtggccatgcgggtgctgcccttatgcctaacagaaatgatgctggtctggctgcttctgaattagccctggctgtagagaggcatgtgtgggattctggaaaaattgacactgtgggaactgtgggtatcctggaactgcatcctggagcaatcaacagcatccccagcaaatctcacctagaa

SEQ ID NO: 36473 - DNA, 242 bp, Glycine max
  Clone ID: 700888382H1
atgcaaactcatgtgcagagcacttgtgcatccccaatttttgaagccgagagtacatttgtggaaaatatgcaggatgtgccccagctggaaagttctaaactgaacaaaattgatatggtggaccatgaaaagtttgccaaatttgaaaggaaatcagctaagcataaggatgaaacagaggatttaatgctagaacaagactgtggtgttgctgaacctgaaactgaaaacgaggatga

SEQ ID NO: 36474 - DNA, 244 bp, Glycine max
  Clone ID: 700888353H1
gagacccaagttttgttttaacccatagaagaagaagggaagggttagcgagtaactactactactgtcacttgactcaatggaaggtgaagaggtgttggatgtggacattcaggaggagaagctttctggctttattttcatgtgtaatagaattacaaaaccggagtgctactgttaccgagttttcgggcttcctgctgggagaaaggatgttgttgagaagatcaatcctgggacatac

SEQ ID NO: 36475 - DNA, 246 bp, Glycine max
  Clone ID: 700888354H1
caaaaacaccaaatgggagaggaaaaagagcagcctaagaatgaaaccgagaagaagcccgaggaggccgccgcagcccccaagaaagacgacggacccatccctgtcgtttacaaactcgacttgcattgcgagggatgcgtcaagaagatcaaacgcacatgtcgccacttccaaggtgtggaaaccgttaaggcagatctatcgtcgaacaaagtgactgttaccggcaaattggatgccgag

SEQ ID NO: 36476 - DNA, 246 bp, Glycine max
  Clone ID: 700888356H1
ttactacacaggttttgatgcactcatgtcctcaacattttcaggtgagtgtgcatcttgtgtgtgcaggaaagaggccttggttgtgggagggaaactagtgaggtataggggttggtcaatgaccatattttttgttgtgggggtgttgtgtttgaggattatgtgcaaaatctcaggagaaaactatgcagggaaatttttgttcatcaaagccttgatggaaaggtttagctggattttaat

SEQ ID NO: 36477 - DNA, 248 bp, Glycine max
  Clone ID: 700888357H1
tttttaagccagtaccgaaaccagttcccatttataagccaattccaatttttaagccagtaccaacaccaattcctttttttaagcctataccaaagcctgttcctattgttaaacctattcctattccagtttttaaacccatacctaaaccatttccaattgttaaacctatcccttaagccaaagtcattttttaagccagagactttcttcagaaaacctattcctaaacttcacccaaatct

SEQ ID NO: 36478 - DNA, 246 bp, Glycine max
  Clone ID: 700888358H1
ctaagaatttacaacaagggaggatgttgcaattgtgctgattagccaatatgttgcaaatatgataaggtttttggttgatagctataacaagcctgttcctgcaatacttgaaatcccttctaaagaccatccttatgatccagcacatgattcagttctgtcacgagtgaagtatctcttcaataccgaatcagttgcatctgggagacgctgaattcaccgtttacagttgcagctttttgg

SEQ ID NO: 36479 - DNA, 246 bp, Glycine max
  Clone ID: 700888359H1
atcctatcatttgcaatcatttcctatgtcatctaaaccttcttttaacaaaacaaaaaccatgttgaagaagcaatctgtcttgtccttctcactagtaatgctaatttcatttatgtattcgacaaccaccttagcccaattatcaccagcttcagcccctctcaaaccgccccaacctgctcctaccataccagctgcggctcctcaacaaccattggttccctcattgccacagtcaccaag

SEQ ID NO: 36480 - DNA, 244 bp, Glycine max
  Clone ID: 700888360H1
agtatctggtgctttggttgggaataacgaaacgatgggagctgaaactgaatcatcacaggaaaaacccgaacaagagaggccgaagcctactctctcacaggaacagtttctctcatggaagcgccacaaggacgctgcagtatcagccagaaaagccgaagtatccagtaagcgtgcagaagatattgctgcaggaactgtccaaatgaatggccgggagctatttttacatgagccatgg

SEQ ID NO: 36481 - DNA, 245 bp, Glycine max
  Clone ID: 700888361H1
cgctctgttactcttctgcattgcctttacctcccacgttgccgtgcaggcgcacatggaggacacggccttcaacctcatgtcggacgccttggagtggcccaccacaatgtcgctctacgacgaagacgacgcccaagaggatgtcgagaacgcttacagtcggagatcgttgttctggcggcggatgaagtactacatctcctacggtgctctttctgctaaccgaattccttgcccgcctc

SEQ ID NO: 36482 - DNA, 247 bp, Glycine max
  Clone ID: 700888362H1
gtgtccttgaagcttcagaagctcctcgccgctagcgtcctaaagtgcggcaagggcaaggtctggcttgatccaaatgaagtcaatgaaatctccatggccaattctcgacaaaacataaggaagttggttaaggatgggtttattatcaggaagccgactaagattcactctcgctcccgtgctcgtcgaatgaaggaggccaagagaaaggggcgtcactctggttatggtaagcgtaagggta

SEQ ID NO: 36483 - DNA, 241 bp, Glycine max
  Clone ID: 700888363H1
gtttatcccacttgggtcagctggataaacacagtcattctgaacatttcagtgtcactggcattgtattctcttgttgttttctaccatgtgttttctaaagagctggagccacataagcctcttgccaagtttttatgcataaaggggattgtctttttctgcttttggcagggaattgtgcttgatctcctggcagcactaggaataatccgatcccgttattcctggctagctgtgg

SEQ ID NO: 36484 - DNA, 248 bp, Glycine max
  Clone ID: 700888364H1
tgttgctgctcatcctccgtaacctccgagctctgcaccgaagaacgaagccatggggaagacacatggaataggatctgctcgcaagctcaagtcccaccgcaggaggcaaaggtgggctgacaagtcatacaagaaatcacatcttggaaatgaatggaagaaaccttttgctggttcatcccatgccaagggaattgtccttgaaaagataggtattgaggctaagcagcccaactctgccattc

SEQ ID NO: 36485 - DNA, 237 bp, Glycine max
  Clone ID: 700888365H1
agcgtggccaaacaactatcagtggatcatgaaccaagcatagaaagtgaagatataagaaacagaggtggttttgtgtcaaacttcccaggggatgttccacgtgtcgatggtcagttggcggtgtcaagggcatttggtgacaaaagcctgaagatacatttgagctcagaaccatatgtaactttggagatgatagaagatgatgcagagcttcttatactagccagtgatggg

SEQ ID NO: 36486 - DNA, 241 bp, Glycine max
  Clone ID: 700888366H1
ctgaattgcggaggaagatgattcagcttctgttcacggtgatattttcggaggattcgatgatagcgttgctgctgttcaagacacctttgaggaagctcgtgataatgggcttggatcggttgaagcgaggtcgtggacccttgatggtgaagaccgttgcagggaccgttctcgtggtgttgttgtcgagtgtgtatagcatgttgaagattcagaagcgtgggatccaagagggtgc

SEQ ID NO: 36487 - DNA, 241 bp, Glycine max
  Clone ID: 700888367H1
gcaaaatcatctaaatccgtttctgatcctgaatcatcagtttttcccttgaaagatgggaggtggcaaggacaaacacaatgaagaagagaaaggagttttctcacatctggctcatggagtagctcaagctgctcatggttaccctccaggggcataccctccacctcctggggcataccctccttaccaagggtacccacctgctcatggctaccctccacaaggtggctatcctccg

SEQ ID NO: 36488 - DNA, 191 bp, Glycine max
  Clone ID: 700888368H1
ctgaactcatctcactacattaatattcccttgggtttcattaactgtgacatttagctttgtttattgaaccgtgtcaatggccgctactatgaaggctttagcttttgttgctttgcgtgttaccattaatgcaatagtgtgtgaaagtagagtggcgagacatgaccttggattggaccttggagggg

SEQ ID NO: 36489 - DNA, 244 bp, Glycine max
  Clone ID: 700888369H1
gataaaaagaatattcagagaattccaaagacagagatgactgtcattaaggaagagcaacaaccaaaccaaatagctggccacaaagaacttggtcacaaaagtctccttcagagcgatgcactctatcagtatatacttgaaaccagtgtgtacccaagagagcatgagagcttgaaggagctacgagagttgacggaaaaacacccttggaacctgatggctacaccacctgacgaaggac

SEQ ID NO: 36490 - DNA, 244 bp, Glycine max
  Clone ID: 700888370H1
gtctcaagttgctcttcttctttttttcttttctttcaccctcaaaatttctcactctctttatcttcaccttttcagtttaaagcttcagatcacaacagatccaccattcacctcaccactttctcttcacaaggcaaatctaacaagaaaaagtagtctctgaagccgatccagtgtcttgtgaatttggaattggtagtgaatttagatctaaaaagccatagcaatgtcttttatcggt

SEQ ID NO: 36491 - DNA, 242 bp, Glycine max
  Clone ID: 700888371H1
gttcaaacctctgtcgttgtgattgagcaaaaggcaaagaagcagctcgtttttgtcattaacaagctcatgtggatggcttgccttttcatttccattgccttcatttctcttacatacgtggtggtgggatcacactccagatggcttgcaatatatgctactgtgattggaagcttgataatgctctctacaattggctccatgtgctattgtgtaattttgcataggatggaggagac

SEQ ID NO: 36492 - DNA, 233 bp, Glycine max
  Clone ID: 700888372H1
gtctggaatggtggtgacttttgcaccaactggactgacaactgaagtcaagtctgtggagatgcaccatgaatctcttacagaggcacatcctggtgacaatgtgggattcaatgttaagaatgttgctgttaaggacttgaagcgtggttatgttgcctcaaactcaaaggatgaccctgcaaaggaggctgctaacttcacagcccaagtcatcatcatgaaccaccctg

SEQ ID NO: 36493 - DNA, 245 bp, Glycine max
  Clone ID: 700888373H1
ctcaccaaccacctagggtttctctccgacgttaggttttttttttcgtttctcgccgggattttgggggcagacttaatctccggcagctatggcctccaacttgcagatgagccctcaggtggagcagatccacggtgaaattcgcgacaactttcgagccctcgcaaatggctttcagaagctggataagattaaagatgccaatagacaaagtaatcagctggaagaactcacggacaaga

SEQ ID NO: 36494 - DNA, 245 bp, Glycine max
  Clone ID: 700888374H1
gtcggaggacagtctcccgccgcagcgccgttaaacactccggcaactcccgccgccgccactcccgcccaagcaccttccacagtaccgaaatcaccagctcccgttgcttctcccaaatcatctccaccagctgcaacccctgcatctactccggcggcatctcccaccaccacccccgccgcgcctgctccggtgaccaagccacctgcagcctctcctcctccggcgactcctccaccggc

SEQ ID NO: 36495 - DNA, 244 bp, Glycine max
  Clone ID: 700888376H1
atttcctataactttatggctaataagtatccaatgttcttttattttccttcaggtaagtccacagctatatggagacaactatccaaggttcttcacttattggactactgatgcatatcaaacaactgggtgctacaacttactctgttcaggctttattcaaaccaacaataggatagcaataggtgctgcaatttccccaagatccgctttcaacagaagacaatttgatattggccta

SEQ ID NO: 36496 - DNA, 244 bp, Glycine max
  Clone ID: 700888377H1
tgttgctgctcatcctccgtaacctccgagctctgcaccgaagaacgaagccatggggaagacacatggaatgggatctgctcgcaagctcaagtcccaccgcaggaggcaaaggtgggctgacaagtcatacaagaaatcacatcttggaaatgaatggaagaaaccttttgctggttcatcccatgccaagggaattgtccttgaaaagataggtattgaggctaagcagcccaactctgcc

SEQ ID NO: 36497 - DNA, 247 bp, Glycine max
  Clone ID: 700888378H1
ctcggtgaagtcaaggttggtctcttctggtctgttctgttcttctacgcagacacataaaggaaacacaacgcacctcttcttcttcttctttcccttcaaatttcaacttcttcatccaacttgtcctccaaacagcacaaacactgcaatcacaccgtcttcgctttctactcatctaaaagatcctcatgggttgctttggcttctgcaaaggagatgatagtgttacagttgctgacagagg

SEQ ID NO: 36498 - DNA, 224 bp, Glycine max
  Clone ID: 700888379H1
agagactgcaaagaagaatgaactggggagaagattcggtttataataaccaagatgcagttgagttatcgggtggaagatgagaagatacataaatttagaccattacagttgatactgtatcacattatcccttcttaagaggtgaattcgattaaaaacaaacataggtgttattgtactccaagtgtaaaaatataggtaataatcttcatattctgatt

SEQ ID NO: 36499 - DNA, 247 bp, Glycine max
  Clone ID: 700888352H1
gtaacagagtaccttgcttctcttgaggcatcatatctaaaccttcctgattctactttcaaggatcttcggagaaagcttcctgtcacccgcacgttatttccatggcataatactttgcagttcagcttgacaagagacatctcaaaagaacttggcattggaaagtaaatacactacattcacacagaacaaataaaagtttgtgtttactcggtggtgacaagttcctcatatattcactaca

SEQ ID NO: 36500 - DNA, 250 bp, Glycine max
  Clone ID: 700888323H1
tgttttcagctcctttaaagcgcacaagtagcttgtgttttgatgaaaagctctttgtgcagtcactttacaagcttttggtttttatcacagaaactagttccatcattttatacatcagggatgttgagaagctcgttctccaatcaccaaggttatataatttactacaaaaaatgataaagaaactatcaggttcagtgttgatccttggttcccagatattagattcagaagatgattgcaaaga

SEQ ID NO: 36501 - DNA, 244 bp, Glycine max
  Clone ID: 700888325H1
cggctcgagcaacactgtgttcctgtttttgttcttcgatggcggcaacctcaacatcactggcttctcaactctacattggcctgcgccgcccctgcctcaagctcgattctttcaattctcaatctttctctctcttcgaccctaatcttcgcctatccctctctccacccaaaccctcacgcgccgtcatcgccatggccggcaccgggaagttctttgttggtggcaactggaagtgtaa

SEQ ID NO: 36502 - DNA, 248 bp, Glycine max
  Clone ID: 700888327H1
caaacacagagaaagagagtgaataaatccagcattgttctgttctctgcaacattctccactctcaaccatggcttcaaagcttttactcatcactgtcttcgtttttgatttgattgcttttggacttgccgtggctgctgagcagagaagaagcaccgctagtgttgtgacggacaatgaaaagaattataattactgtgtctataactctgatatagcaactggctatggtgttggagcatttt

SEQ ID NO: 36503 - DNA, 252 bp, Glycine max
  Clone ID: 700888329H1
cctctcttcattccaattcattttggcaccacattaactctaaacacaccatgccaaccctcaatgatgtcctcacattctcattcttccttctcctctcttgctattgccacctcctcaatggccaagaggactcctcatttggccatgccatcgacagaaaattgctaggcctaaagagaaaagaaaaactcagccacttcaagttctattggcatgacatagtgagtggtcgcaacccctcgtcggtgg

SEQ ID NO: 36504 - DNA, 224 bp, Glycine max
  Clone ID: 700888330H1
cacaggtcctagtccaagtactccaaggccaaatttcttgtactcttcagctagtggtggaaaccatagtcataatcatcatcagcatcatagccatcaccgccaccatcagtttccactcaacatcttaggccgtcaatcgggtggatcagatcattgctttcagtctgatcaagtgtcaccacaccattctgtgaaatccgaagccagcacttctcagcttc

SEQ ID NO: 36505 - DNA, 251 bp, Glycine max
  Clone ID: 700888331H1
actgtctctgaacgcgctggttcgtcttcctctctcgaattcacgcttccacgacgatgctgctccgatgattattaggcactctctgttttcgagccgaaagcaacagcagcagcagcagagttataaggttccacagcgtcatcaagtgttcgtggttgaagccaagggcaaaaagggaatgatgtctcgtcaatttcagcgcaatgctcctcctcctttacccaagattgaagacgatggcaatccca

SEQ ID NO: 36506 - DNA, 247 bp, Glycine max
  Clone ID: 700888333H1
gccatttttgaaacaggaataaaagtagtagatcttttagctccttatcgtcgtggaggaaaaataggacttttcggtggagctggagtgggtaaaacggtactgattatggaattgatcaataacattgccaaagctcatggaggtgtatctgtatttggcggagtaggtgaacgtactcgtgagggaaatgatctttatatggaaatgaaagaatctggagtaattaatgaacaaaatattgcag

SEQ ID NO: 36507 - DNA, 247 bp, Glycine max
  Clone ID: 700888334H1
tctcgagcgaatcggctcgaggacaaatttatggagttcctctctgtggaacaatagtactgcaaccttttgctatcggcggatctgggtccagttacttgtatggtttctttgaccaagcctggaaagagggaatgaccaaggatgaagccgaggatttagtaaaaaaggcagtttcactggctattgctcgtgatggtgcaagtggtggggtggtgcgaacagtcataataaactcagagggagt

SEQ ID NO: 36508 - DNA, 232 bp, Glycine max
  Clone ID: 700888335H1
ctcgttgatagacgagatgctggttattacaaatgtgctccctcactacatgtaaaagttggggtctgagtgcatgttagctattgcaacattgcaggttcaacgtcacaaaacccactaatgctaaattgtcgcgattcttgtgaatacattatcatgaatgcttctgggtcacctatccaccattatgcatctttttttccactcacgtctctccagtctccactatgag

SEQ ID NO: 36509 - DNA, 247 bp, Glycine max
  Clone ID: 700888336H1
cctttttcttttctttctcaagctgctgtaatattgcttacctagctagctaggtagggacatctctctctctttctatctatctatggagcttggagacactaccacagtgatggaaacgtcgtccggtgaggctgtggcggcgcatgccggtggcgaggtgattatgatggatgcgaattccggtgaagaagagaataataatcataataataaaggaaaattagaagagggtggtggagaagaa

SEQ ID NO: 36510 - DNA, 248 bp, Glycine max
  Clone ID: 700888337H1
acaaatcctaccatttgtactcctttccaaaagcctcagagccttcattcaccaaaactaaatcatgatgaaaaagcaatctctcttgtcctcctcactagcattgctagtttcatttttgtatttcaccaccactttagcccaattatcaccagcttctgcccctttcaaaccaccccaacctacccctatagcaccagctgcagccccaaaaccattggttccctcattgccacagtcaccaagtg

SEQ ID NO: 36511 - DNA, 252 bp, Glycine max
  Clone ID: 700888338H1
tatctgaggcctgtgctgtgctctgaggggccatagtttgggaccctttgaaccctaatctccacccaaacccattttcccgggaaattgccttggaaaagaaagagcgaagaggaaaatgcagaatcacaggctgaagcagcagcagcagcagcaacaacaagctcttatgcagcaagctcttctccaacaacagttgctctaccaccctggcctccttgctcctcctcagattgaaccatatccaagtgg

SEQ ID NO: 36512 - DNA, 251 bp, Glycine max
  unsure (1)..(251): unsure at all n locations
  Clone ID: 700888339H1
tgatgactcagtctgaccaaatcaactaccaaaagaatatttatatcacaatgatgaaatgaaagcctgtatagtataactttcgcagttaaatttgaattccatccagccttaaaatctcacctacagtagattttccattgtaggtgatctgtatacactgttttgtattttacaaatcgntgcatttctcgctatgctttacaaatcgtgcatttacttgtctaaaaaaaaaaaagaaaaaaataaaa

SEQ ID NO: 36513 - DNA, 248 bp, Glycine max
  Clone ID: 700888340H1
ccaagatccaggacaaggaaggtatccctcctgaccagcaggttgatttttgctggtaagcagctggaagatggtcgcactcttgctgattataacatacaaaaggaatcaacacttcacttggtcttgaggctaaggggaggtaacatgattaaagtgaagactttaactgggaaagaaattgaaattgacattgaaccaactgatacaatcgaccggatcaaggaacgtgtagaagaaaaagaggg

SEQ ID NO: 36514 - DNA, 250 bp, Glycine max
  Clone ID: 700888341H1
gtgagatctctctattcctggaacgtgcgtttgttcgattggaagcatggttccattggttcaatacaactcagtcagggaaacagatgggcagctactattggcacggacgggacgataggacaatgcgtgaagtaaatcctaagacactgtcctctggtttggatgattatccacgagcttcacacccaagtgaagatgaacgccacttggatcttagatgttggatgttacttgcagcagactgtat

SEQ ID NO: 36515 - DNA, 244 bp, Glycine max
  Clone ID: 700888342H1
tgccactcaaatacttctggaatgaatcatcaaatgcttcatcaacttatgggagttgatcctggaactaaccctgtttgccatttccttggaagcaaggccattttatgggtacccaatttatctgtggacactgcctatcagaccaacattgttgcttaattagtccatgcatcttgagcaccatgagaatgagattgtgtataaaataaattatcatgtgctgtgtgttgtgcaagtacta

SEQ ID NO: 36516 - DNA, 246 bp, Glycine max
  Clone ID: 700888343H1
ctctataactctttctcacccgctaggtttccttttcatcgcatcttgagtttgcaacctcgtcttgtgatttccatggagggtgctgggatggaagagaataatattattaatgatgatgataataataacaagtctgaggcgcatttgacttctgccgctgcttttgtggagggtggaattcaggacgcttgtgatgatgcttgcagtatatgccttgaagctttctgtgatagtgatccttcc

SEQ ID NO: 36517 - DNA, 249 bp, Glycine max
  Clone ID: 700888344H1
gaaccactatgttcaagagtttaagagaaagaacaagaaggacataagtgggaaccccagagcacttagaaggttgaggactgcttgtgagagggccaagagaacattgtcatccactgcccagaccaccattgaaattgattctctctatgagggaattgatttctactccactgttactcgtgccagattcgaggaactgaacatggatctctttaggaagtgtatggagccggtggagaaatgttt

SEQ ID NO: 36518 - DNA, 245 bp, Glycine max
  Clone ID: 700888345H1
gtattctgcttgtttgagggagcccttgacaatttgggcaacttgagacaacaatatggattggccaagtcaaccaatgaagtattgttggtcattgaggcttacaaagcattgcgtgacagagcaccctaccctgctaatcacgttgttggccatctcagtgggagctttgctttcatagtttttgacaaatctacttctaccctctttgtggcctctgatcaatatggtaaggtacctctata

SEQ ID NO: 36519 - DNA, 248 bp, Glycine max
  Clone ID: 700888346H1
tgacgatggtcgaaagctgtgcctggagtgtcttgactcagctatcatggatactcatgaatgccaacctctctatgtcgaaatacaagagttttatgagggtttacatatgaagatagagcagcaagttccgatgcttttggttgagagacaagcactgaacgaggctatggagggagagaagaatggtcatcatcacttacctgaaaccagaggactttgcttgtccgaagagcaaactgttccca

SEQ ID NO: 36520 - DNA, 251 bp, Glycine max
  Clone ID: 700888347H1
gtctcaacaacccagttgagtaactaagatggcgcaagtgaggaacaagcaagtgcttctaaaggactatgttaccggttttcccaaagaatccgacatgaatattgtcgaaagtaccataacattgaagcttccacaaggttccaatgaagtcttgctcaaaaatttgtacttgtcttgtgatccgtatatgaggaatctcatgaacaagcccgaaggccctcccaatagtcgtgcttacactcctggct

SEQ ID NO: 36521 - DNA, 251 bp, Glycine max
  Clone ID: 700888348H1
cattggagttcggagttgttatgatgagggcaagcgtgttgcagaaactttgatgtttgattatcataggcagcatggaatcgaaatacgcattgcgagaatcttcaacacatatggaccacgcatgaatattgatgatgggcgtgttgtcagtaacttcattgctcaagcaattcgtggtgaacccttgactgtccaagttccaggaactcaaactcgcagtttctgctatgtctctgacatggttgatg

SEQ ID NO: 36522 - DNA, 242 bp, Glycine max
  Clone ID: 700888349H1
attccattcatcaggagttgaattgaattcgtgatgaagagggaccacaaagatagctgcggcggggcggcgccgcggagggactgtgaagggtgagtgttcctcaatgcagtcaaacgggaaggcgaagatgtgggaggaagagcaacagcagcagcagcagcaacaacagcaacaacaacaacaggggatggacgagttgctggcggcgttggggtacaaggttcgtgcttccgacatgg

SEQ ID NO: 36523 - DNA, 247 bp, Glycine max
  Clone ID: 700888350H1
ctcgagccgaatcggctcgagaggaattgacggaggcattcgaactcggtgaagatggtacgctatgtggtttcatcagagccaggtggtgggaagggctcttcctaccgaatccgatgagcatcctaagatctaccgcatgaaactctgggcaactaacgaggtccgtgccaaatccaagttctggtattttttgagaaaattgaagaaggttaagaaaagcaatgggcaagtgctagccataaat

SEQ ID NO: 36524 - DNA, 246 bp, Glycine max
  Clone ID: 700888351H1
attcattctcatctttctctcttctctctccacccaaaccctaactcccgaccctgttcccctctcgtatccgtcatgaaaggaggaaagtccaagaccgaatctaagagagccgatcccaaacttgctgtgaataagaagggagccgccaccaaggctaggaaacccgccggcaaggggaaggcagcgaaagaccctaacaagccaaagaggcctccaagtgctttcttcgttttcatggaggag

SEQ ID NO: 36525 - DNA, 250 bp, Glycine max
  Clone ID: 700888322H1
ctcaaatttctcagtctccggaactcgtttctaccttcacttcgcacatctcgaaccctctctttccggcaactaggttaaagttcatcaatggcaggtcgtggcaaaaccctaggatccagcgccgccaagaaggccacctcaaggagcagcaaagccggcctccaattccccgtcggccgtatcgcccgtttcctcaaggccggaaaatacgccgagcgcgtcggcgccggtgctcccgtttacctcg

SEQ ID NO: 36526 - DNA, 245 bp, Glycine max
  Clone ID: 700888292H1
ttctaattcaccgaccaactgcaaaggagactgctgtagctgctaagttcaaaacaaaaggtggttctcaggtgaggcaatactgtgacatactgacaaaagaggattgtcgacgtcaatctggtcctttatagcatgtgaaaaggttcattttagacggatcattgcacctcatactgacatcaatttaggagattgttcttttcttgatacctgccgacacatgaagacatgcaagtatgtgc

SEQ ID NO: 36527 - DNA, 243 bp, Glycine max
  Clone ID: 700888293H1
ctacaatctaagacacacaggccctgatgatgtttacattaaagttcactactgtggaatttgccattctgatctccaccagattaaaaatgatcttggcatgtccaactatcccatggtcccagacatgaagtggttggtgaggtactggaggtgggatcaaacgttagcaggttcagagtgggagagttggtgggagttggactcctcgtaggttgctgcaaaaactgccagccatgccaa

SEQ ID NO: 36528 - DNA, 245 bp, Glycine max
  Clone ID: 700888294H1
ggagagcaaatctaatgccatcattgatcatcttcttcgagattgtgatttagttggaaggtttctccaggcagataaacattgtattctttcagtggaaagcagtcagcacacagtacctgctgtggaaaacggggaacacgtgtaggaaacattggacatattactcgaattttcaataaacttgtccacttggctcgtaaccaaagccacattctggcatgtctccaggagaatagcgagtg

SEQ ID NO: 36529 - DNA, 235 bp, Glycine max
  Clone ID: 700888295H1
gtgcagaagaaggcaaagatagtggcagagctccaagctgtgaagcacaacagtggcaaggcctacaatcagttaacggaggagactggactcaccaacggctaaggtgctcaacttctcaagggacaggtcaactccattcccaaaatggccctccaattcggggaacggtggccggacttgcccaagaacctggttccgagattgttaagaccccctttgaggcctaatgacc

SEQ ID NO: 36530 - DNA, 245 bp, Glycine max
  Clone ID: 700888296H1
ggccttttccctctctttctctggaaaattcccccgattttctcgagaaagtgaaacggaattatgagctttcaggacatcgaggctgggcggcccttcagttcgaggcgcgggttgatgaacgggagcaagacccgacgcaagcggtggctgccggaatattccagatcaacaccgccgtctccaccttccagagactcgtcaacaccctcggaacccccaaagacaccccgacctccgcgaaa

SEQ ID NO: 36531 - DNA, 254 bp, Glycine max
  Clone ID: 700888301H1
atttcctccacatcctcccatgaagcctccgacgaccgacccgaacttgtagggcatcgtgacgatgtatttggcttccggcagcgcggaggggaaccaacgacggcagcagtgctgttgctggggaagagaatgatgttcgcagacgccgcagtgttctgggtgctggttgctatagaccccaatactttttttctcgaatgccattgttcctagtttcattgaacataagtgaggattttgttgtgtgataa

SEQ ID NO: 36532 - DNA, 252 bp, Glycine max
  Clone ID: 700888302H1
gttcctatgacaaggcttcggaaacgagttgctacacggctgaaagattcccaaaacacatttgctatgctgactaccttcaatgaagttgatatgactaatttgatgaagctccgttctgattataaggatgcttttgttgaaaagcatggagtcaaattggggcttatgtctggctttgtcaaagctgctgtcaatgcactccaacatcagccgattgtcaatgcagtcattgatggtgatgatattata

SEQ ID NO: 36533 - DNA, 252 bp, Glycine max
  Clone ID: 700888303H1
aacaaaaccactccttctgagccttgttctgttccggaaccatctccaacaacacaaaagaaaaagctgttggatctttttcgcgaaagtgtcagagaaaaccaaagtgatgatgctgagaacactttcggcaacgaaaagaaagaagtgaaaccaacaatggtacatgatcttattcctaaatctgcacacagtactccttatgtctcgggaggaaattctgcatgtagcagtgaaagaacaatgaatgat

SEQ ID NO: 36534 - DNA, 241 bp, Glycine max
  Clone ID: 700888304H1
actttgactaatgaaaaggaagttgatgcccatcccattcgagctatgaagttttctgtctcacctgttgttcgtgttgctgttcaatgtaaggttgcatcagatcttcccaagcttgttgaaggtcttaagcggttggccaagtcagatcctatggttgtttgtaccattgaggagtctggtgaacacattgttgctggtgcaggagagcttcatcttgagatctgtttgaaggacttgc

SEQ ID NO: 36535 - DNA, 249 bp, Glycine max
  Clone ID: 700888305H1
gatttctgggtgtggcggctaaagtttgtgagtgatctctgccaccaagcccgcactgtgtctgtgttggatcttcaacttgaatggcacgttccttatgcctatcccttccaaatacttccggaaccttgtctgatttcaacaaactatactcttcctctcattctcaccatttaccaaaaccgaacctgcaatttaactctagctggggcccagaggtgcggcccgtgacggcggcccatttgggta

SEQ ID NO: 36536 - DNA, 251 bp, Glycine max
  Clone ID: 700888306H1
gagagagggagaaagggtgtgagaatggagagcaaagaggaagatgtaagggttggagcaactaagttctcagaaaggcaaccaattggtacagcagctcagggtgacaaggactacaaagaaccacccccagcacctttgtttgagcctggtgagctaaagtcatggtccttctacagagctggaattgctgagtttgtggccactttcttgttcctctacattaccatcttaactgtcatgggtgtcaa

SEQ ID NO: 36537 - DNA, 253 bp, Glycine max
  Clone ID: 700888307H1
aacgacgacgttgtatagcagtccttcttcttctttctgtgttgacggtggcgttgatctgattggaattcaggatcaatggcaggggcagcctctgctctgttcctcctcgacatcaaaggccgcgtcctcatctggcgcgactaccgcggcgacgtctccgccctcgacgccgaacgcttcttcaccaaactcatcgaaaaacaggccgatccgcaagctcaagatccggttgtgcacgacaacggcgtga

SEQ ID NO: 36538 - DNA, 258 bp, Glycine max
  Clone ID: 700888308H1
cttccatgccttctcttttcaagagatctttcttccttctcctgcctcctccttcatctccacaactcttaaaaaccctcctcatcgatccaacacagcagcaacctcactgaatctacaaacagtaacaaagattattactcgtagatccaataacagtaataacacctcagtttcttctcttaacagatcatgaattcctttcaagaatttgactcatcaaacacggacagtaacagtaccaaagccatcatcaac

SEQ ID NO: 36539 - DNA, 252 bp, Glycine max
  Clone ID: 700888310H1
cggatcttttctctttaagctcaccaaagcttgatgagaagccactcttccctttgcttcctactaaagacgggatttgctcgtcggggcagaaagctgttgtttctggcaacaaaagaggttttgctgataccatggatgggttttctcaggggaagtttgctggtaatacagggatgaacgcggtgctatcacctagaccttctggagctcaaccttctgctatgaaagaaacaccaagcaaattgtcag

SEQ ID NO: 36540 - DNA, 254 bp, Glycine max
  Clone ID: 700888311H1
tctcgagcgctcgagccgcttagtcagaaaacatagaccatgtcgaatttgagtttccactcaatttcatagtagcagccctttggggcactcctcttctcaacccaaaagtccaaccccaaacagcaacaacttcaaatcatcaaaacatacatcaaatgtagggtgcaatattcaaccaaaatcggaggaaatgaaattggtgttcgacaagtttgacaccaacaaagatggcaagattacccttgaagagt

SEQ ID NO: 36541 - DNA, 250 bp, Glycine max
  Clone ID: 700888312H1
aaggaagctagtattggttttggtgcaatctttagaaatgataaaggtcaattattagctgcaacatcgaataagctggaaatatgtgtggacctattcataatcatattgccatgggatcttgaagctgacactgatgatttgttgcttgctcttaacgcccaataccattgaatatcgaccaattgttgcgaagaagagatcctcagcctcaacctctgaaattgacaagcttttaaagacagtgaag

SEQ ID NO: 36542 - DNA, 254 bp, Glycine max
  Clone ID: 700888313H1
agcaaagcgtgtttgggtacgggggaaagcaagggatgatttgaagagaagagtctagaaacaacacaacacaacgcgaatggctacggcgctggagaagaaagcgaaggaggcattcttcgacgacgaattcggtctggccgtcgatctctactctgaagccatacgattggatccgaacgacgccaatctcttcgcggacagagcccaagcccatatcaaactcaacgctttcactgaagccgtttccgatg

SEQ ID NO: 36543 - DNA, 253 bp, Glycine max
  Clone ID: 700888314H1
tggctaatccctcactcttgttcttcagtctcctcctattatccgccaccgtagccgccgccgaacggatcgacgatgaagacgaccttctgatccgtcaagtggtgccggatgcggaggaccaccacctgctcaacgcggagcaccacttctccgccttcaagacaaagttcggcaagacctacgccacgcaggaggagcacgaccaccgcttccgtatcttcaagaacaacttgctccgcgccaagtcaca

SEQ ID NO: 36544 - DNA, 254 bp, Glycine max
  Clone ID: 700888315H1
ctctttctctctttctagttcgtgttcttcgtcgcaaatccgcagtaggatctctcttgttttttctctaggtttttcgcgatggcgtcgaagcgaattttgaaggagcttaaggatttgcagaaggatcctccaacatcttgcagtgccggtcctgttcatgaagatatgtttcattggcaagctacaattatgggtcctccagacagtccctatgctggaggtgttttcctagtgactattcatttccctcc

SEQ ID NO: 36545 - DNA, 235 bp, Glycine max
  Clone ID: 700888316H1
ataggcgagacaaaacatagttttgtaagtaattttagttcaattttaatcaatgaacggtactaaacatgcttataaaactgaatttaagttttgtgtttattataattattgttgttaagcaggtggcaagtgatggttagttgaagacgattgttgacaccttctcatcctcctcttaagaagaagcaaaagaagaagaatagtctttcttgtgcctgagtcatctagttat

SEQ ID NO: 36546 - DNA, 251 bp, Glycine max
  Clone ID: 700888317H1
aggctcgagtgaacagtctgcctggatccagttactgcttgttttggtatgatttcaggtaacatgtggatctcatggaattctgggcagggagatgctgaatgaaaccaagctgaaggaccttcttcatggatcagaatatgttcttacatatgaggacagagagggcgattggatgcttgtgggtgatgttccctgggagatgtttattgaaacatgcaagaggctgaggatcatgaagagttctgatg

SEQ ID NO: 36547 - DNA, 249 bp, Glycine max
  Clone ID: 700888318H1
tcagaatgggcagacaacaatatggatgcttacacagctgctgctattaaagttggcccttgcagcctatcaggatcctgtgttggaaactttggcggtcaagttatactccccctagcacacacaattgagcatgaggagtttttggaagtcattaaattggaaggaatagctcattctcctgaagacacaataatgcccagagaaatgtttcttttgcaactctgcagtggaatggatgagaatgct

SEQ ID NO: 36548 - DNA, 249 bp, Glycine max
  Clone ID: 700888319H1
cccttttcagctttcattggtgtggcctagctgttttctcaatgagaaagccttcatctctgcaaagcgcacttttgcgctttggggttcccttgttgcttgttatcaccttctgttatgctacttctactgctgcagcaacaactcaagtttcagggaatgaagagctgccaaagacaaacctaaatgggcatgctgaagaagcaaaattcggattttttcatcataaaccaatattcaagaaacata

SEQ ID NO: 36549 - DNA, 249 bp, Glycine max
  Clone ID: 700888320H1
cagcaccaccttggtacatcttggcaatgataggattgcagatgctggggcagccgaggatgattatgctgctccttctggtggaagtggtgctggccccaagattgaggaagtggactaaatgtgtagttgctttcatccatttatctgtttaaaacttatttgatgcttttttattgaattttaacttttatgatttttgttggatgggatactaattgttttgcccgtgtgatatgaacgttgctt

SEQ ID NO: 36550 - DNA, 250 bp, Glycine max
  Clone ID: 700888321H1
gctgagattaagatgtataggaatgagattgcatcactacaagaagataagaaagctttggaacgactcacaaagtcaaaagaggcagcattgcttgaagcagagaagattttaagaagtgcactagagagagttttaatagttgaggaagttcaaaatgaaaattttgacttgaagagacagattgaaatctgccaggaagagaacaaaatcttagagaaaacacatcgccaaaagattttggaagttg

SEQ ID NO: 36551 - DNA, 247 bp, Glycine max
  Clone ID: 700888291H1
ccatttttgtatttcgtgcatcgaaactttccagaagatggtggtgatagagcaggaagagagcgagcatcgaaacgcgaacccctccaacgacgcttccgacggcttcgaaaccgccagcgacacgatctcgccagtgacggcgacgacggtggagccggcagcccggaagaacagaatcacatcgaacagagtcataccgaacagaatcacaccgaacagagtcacaccgagaaacaccagcagc

SEQ ID NO: 36552 - DNA, 249 bp, Glycine max
  Clone ID: 700888259H1
atcgaagaagaagatggcttcaggtgttcctgctcttccgttgacatacgtggctcacgttctggcagttgttgccagcgtcttggtcgtggtctgggtcgtcaatttcaggggtggcttggcttgggatctgataacaagtccctcatcttcaacattcatccagttcttattgttattggcttactagttcatgggggtgaagctattataagttacaaagcttttcccctaaagaaggaagtgaag

SEQ ID NO: 36553 - DNA, 247 bp, Glycine max
  Clone ID: 700888261H1
gtcagattgtttcaaaatcttctagaagatctgtctgaagttgtttcaaaatcccaaaaataaccttactgagtggtggtagtggggccattttgggaattttaatattgtatcaagtatcaacatcaagaacaaaaaacccctcgacccttcattctcctcacttgtgcatgacagcctcttgctttcactgaggtacagtcccttaattttttggaattttcacttttagtcttcaataattttt

SEQ ID NO: 36554 - DNA, 247 bp, Glycine max
  Clone ID: 700888262H1
gtaacttctggagagggtctctatgagggtttggactggctttctaacaacattgccagcaaagcatgagacatttgaaaaattttggtcttgtctggtgatttcatgcgagtctggcggttcttggagaagatgcttatcttttctagcgaatgttgtaatagcagaatgcttgctagaagtattctcttttgtgtaacttgggtttgtatgattgcttaaattagctaatacttgtagctataat

SEQ ID NO: 36555 - DNA, 234 bp, Glycine max
  Clone ID: 700888263H1
ctaaatttggagctgaggcttatcatttttacggtgtgggtgcttcctcggatttgaggggtgtggggaagaggtcctcagagtgggatttgaatgattggagatgggatggtgatctgttcatcgctaccggctgaatccggtgccggccgatggtgttggagtgggacagcaatttttccctattgggtccgggatcccggtggccggaggccactccaacagttcttccac

SEQ ID NO: 36556 - DNA, 233 bp, Glycine max
  Clone ID: 700888264H1
ggcaagttgcttctcaaagggctgttgggggtcttacacatggcaagccaaagggtctgctgggatctatgtctcttcattagcattctcgatggattaaactctgggatgatcgcacattgtaatagcccaagctgaggaatctctgcttgttgagtcagtcatgagatggaatcttgctcttgagtctggcaattattggtgcactgttgacgtctataaccgtgagaatg

SEQ ID NO: 36557 - DNA, 249 bp, Glycine max
  Clone ID: 700888265H1
attattattaagatgatcaacattattggagcacttgttctactctttgcatttctcttcctcagttgtgtgtatgcacaagacacaacaacccttgtgcctgcaatcataacttttggtgattctgcttggatgtagggaacaatgactatcttcccacccttttcaaggctgattaccctccttatgggagggactttgttaaccaccaacctactgggaggttttgcaatggcaaattagctactg

SEQ ID NO: 36558 - DNA, 248 bp, Glycine max
  Clone ID: 700888266H1
tgcagataagcaagctgcttgggatacaggtgctacgaaagtcaagaatcgtaaggtgccagcacatcgtaggaccaaagtaagaggggccctcttacatgatagtgatgaatgagttttaactcagtctctttcaaaccagttgctcagtagaaagtgaaaggataagcaatgaaagtagcattccattgaatttcagatatttttgctgggcttggtagatagggacatgtgatgggagactgagg

SEQ ID NO: 36559 - DNA, 245 bp, Glycine max
  Clone ID: 700888267H1
gtgcaagatatgaaggattttaccatttaaagagatcaacttgttaggtatatggagaagaaagagatggctgtgaaaactgaggatgcggttgggtcctcttctttcccttgttataattattcaatctttatccattctcgaacgcgtttgatttctctgaggttgaaaagagctctttagggtttatggagttactgggtgtgcaggactatagtcctctgcttgagttgcctcaactttca

SEQ ID NO: 36560 - DNA, 250 bp, Glycine max
  Clone ID: 700888268H1
ctcgagccgttttgacgcaacacactttcactgagaaaggatctctatctaccaaggagcagaataaaacccttctctctggtaagtgaataagagaatggcttcagatcggaaacttcacactttcgagaggtggcaaagcacgaccagaccaaggattgctggctcatcatttctggcaaggtgtatgatgtcacccctttcatggaggatcatcccggaggtgatgaggttttgttatctgcaacag

SEQ ID NO: 36561 - DNA, 246 bp, Glycine max
  Clone ID: 700888269H1
gtagaacaatgctgggacaaagttgttttgtgtgtcggggcatgtgaacaagccttgcactgttgaggaggaaatgagtattccactgaaggagttgatagagaggcactgtggaggtattcgaggagatgggataatttacttgcagtgattccgggaggatcatctgttcctctgattccaaagcatgtatgtgatgatatctttatggattatgatgcattaaaggctgttgggacagggttg

SEQ ID NO: 36562 - DNA, 247 bp, Glycine max
  Clone ID: 700888270H1
cgacaccgacgtcggtatcgtcggagccggctcggcggggctctcctgtgcgtacgagatcagcaagaaccccgccgtgagcgtcgccataatcgagcagtccgtgagccccggcggcggcgcgtggtcggcggacaactcttctccgccatggtggttcgcaagccggcgcacctcttcctggacgagctcggcgtggcgtacgacgagcaagaggactacgttgtgataaagcacgcggctttgt

SEQ ID NO: 36563 - DNA, 192 bp, Glycine max
  Clone ID: 700888271H1
cgtgttttttttcaagtgttcttgttttaagcgtgtcttttttcaagtgttcttgtatgtcatgtctgttatgttcaatttctcccttgaacttgtttgctgttctggtttaggtgctgctttttatgttttaatatgatgtattgagctcgtttcgccaaaagaattaaatatcaatatcgtatcatagtt

SEQ ID NO: 36564 - DNA, 247 bp, Glycine max
  Clone ID: 700888272H1
gtgaaccacaacggaccgggttttctagaccggttcactgaagccttgcattactattccagtcttttcgactcgcttgagggttcgtcttcttcttcgaccgggttgggctcgccgagtcaggatctttgatgtccgagttgtaccttgggagacagatttgcaacgtggtggcttacgagggcccggaccgggtcgagcggcacgagactttgactcagtggagggggagattggactcggccgg

SEQ ID NO: 36565 - DNA, 248 bp, Glycine max
  Clone ID: 700888273H1
gtaagactttgtaattgaggtgctgcaatggcttcaagtcaggaagaggtgactcttttgggagtaattggaagcccatttgcttgcagggtgaagattgcccttaagttgaagggagttgaatacaatatgtggaagaaaatttggccaacaagagtgatttgcttctcaaatccaacccagttcacaagaaagttccagtttttattcacaatgagaagcccatagcagagtctcttgtgattgtt

SEQ ID NO: 36566 - DNA, 246 bp, Glycine max
  Clone ID: 700888275H1
gttggatacgattaagggttccattcttaatccgtgcatatggaagaacatctgccaatggcttaaattgatgtcagtatttcaagaaattaatctctgattctgaatcaaggatacctttaacttttaaatcattttctgtaccatgtaagtttatatattattgtgttttcaaaaggttagttgcaaagttgactttgccttttttcaggttaatggtggatatgattcctataagagtttata

SEQ ID NO: 36567 - DNA, 248 bp, Glycine max
  Clone ID: 700888278H1
gtggcaaaataaaaacagtgtttaatatctattttagcagcggctcttgcagccaacagcttcttcaacagtcagaaagactctgccaccgattttgccgacaaagttggacacctttagcttgtgtacacttgccacctagagttcgcaatggctaactgttttccttgtgaagacaaactcttatgcagttcctctagagcagtaattccagaggtgtcaatgttcaccaaattggaggtgtcaag

SEQ ID NO: 36568 - DNA, 169 bp, Glycine max
  Clone ID: 700888279H1
cttgttctcttcatttcaagtttcaaccttaatccttccgaaccaccacataactactccaacactctcttcttcttctctctccgcgggttcaattgaacctcacaaaaccctctatctctctctctaatctgttcaaatcccgaatcatttccgctccaatttcaat

SEQ ID NO: 36569 - DNA, 244 bp, Glycine max
  Clone ID: 700888280H1
atcaaattgacgagtttttgttactgggcgctgttccgttccccaaagacgttcctcacttgaagaagcttggtgtgggtggtgtgattactctcaatgagccctacgaaaccttggtgccatcgtcttgtatcatgctcacgggattgatcatttggtgattcccaccagggattatctctttgccccctcattcgtggatattaaccgggctgtgcagttcattcatcagaatgcaacttgc

SEQ ID NO: 36570 - DNA, 217 bp, Glycine max
  Clone ID: 700888282H1
cttgagcctgcttctaatggtgcatcctgatgatgttgtgtttgggggatgatgatatcagcatacttggacctagctcatgccatggccacggccagggtgtttgatatcgatctgccacctacaccgacgccgtacatagtatccatcgatccactcaccgcgatctatgtcccttattgcatagctggcaaccaaggagaccgagtcaataacg

SEQ ID NO: 36571 - DNA, 247 bp, Glycine max
  Clone ID: 700888283H1
cttgtggttagtgaagaatttttttatcggtatcaaatgaccacagaaaaattaattaagcaacacacacttcaatttatcagcatggcctccgttcagtgccacaaaacctgcaaagtgagctgtcacaggaaaaccagcacgcctcgtttgggcagaaagtttctgacttgttcaaagggcatcaacataatgaccacagctccaattatgccacccaaaccaaagtgctttcccagtcagggtc

SEQ ID NO: 36572 - DNA, 232 bp, Glycine max
  Clone ID: 700888284H1
tttgtatgttcttgatttagagttaagggggaatgctagaggcccttgtatactaaaattggactttgtatataacaatgttgatagcatgcaggttattaattcaattaaagtcaaaaaaaaaaaaaaaaaaaaaaaaaaaaaaaaaaaaaaaaaaaaaaaaaaaaaaaaaaaaaaagaagtaaataaaaaaaataaaaaagcaaagataagagggttgcactgtaagtgc

SEQ ID NO: 36573 - DNA, 192 bp, Glycine max
  Clone ID: 700888285H1
cctgtttccccttctgaaatcgacgatatcaagtacacccgcgccaccaacatcaccagcagcttaagtcttaatttcagaaccaccgcgaccgccgccgcgcctgatgcgggaagacggtgggaggtggctcaaggacaggaaggagaagaagaaagaggagaccagggcgcacaatgctcagctccacac

SEQ ID NO: 36574 - DNA, 243 bp, Glycine max
  Clone ID: 700888287H1
gttggaagaagaagaagggaagatgaacttgagatggatggaagcggtgctgccgctgggaatcatagcgggaatgctctgcgtcatgggaaacgctcagtattacattcacaaatccgcgcatgcagacctaagcacatcgggaacgatatgtgggacgtggccatggaacgaagggacaagaagcttgtcgagcaagcctctccctccaattaacatcgttgttttgccaatgacattgtg

SEQ ID NO: 36575 - DNA, 244 bp, Glycine max
  Clone ID: 700888288H1
gtttgttgttgtaactcgttcttcttcttttgttgttctgtgtttgtgtttgttttttctctcacctgaaaatgtcttgctgcggtggtaactgtggttgcggaagctcctgcaagtgcggcaacgctgcggaggctgcaagatgtacccagacttgagctacactgagtcaaccacgaccgagaccttggtcatgggagtggcacctgttaaggctcaatttgagggtgctgaaatgggtgtg

SEQ ID NO: 36576 - DNA, 245 bp, Glycine max
  Clone ID: 700888289H1
cgtaaagcatggccttgttggtggagaaaaccacgagtggtcgcgagtacaaggtcaaggacctttcccaggccgacttcggccgcctcgagatcgagctggccgaggttgagatgcccggcctcatggcctgtcggaccgagttcggcccctcccagcccttcaagggggcccgcatcaccggctccctccacatgaccatccagaccgccgttctcattgagaccctcaccgcccttggcgcc

SEQ ID NO: 36577 - DNA, 219 bp, Glycine max
  Clone ID: 700888290H1
tttggaagatatgctgaaaaagcatgtagacttaacaacagctgtgaagaaattttagggcttttaggtgatatcatcctaaaaggatttccaaaagggaagaatgattggtttgcaacctgtgccgactcatttggaatttgtactcgaagtgttcagatcggaaaagttgacttaaggttagttgggttggatgttgtgtctagttctagatcgcga

SEQ ID NO: 36578 - DNA, 238 bp, Glycine max
  Clone ID: 700888258H1
gtgcaatatatgctagatttgaacacttacagagatcaacttgtcaggtatatggagcagtcacagatggctgtgattactgaggatgcggttgggtcctcatctttcccgtattataactagtcaaaccatttccattctcgaacgcgtcatgatttctctgaggctgaaaagatctctttagggttgatggagttactgtgagtgcaggactatagtccactgcttgagttacctc

SEQ ID NO: 36579 - DNA, 179 bp, Glycine max
  Clone ID: 700888224H1
cgacccctcgggtttaaatcccctgcgacgcagcacaagctactacttcaccgtcaccggagaaaatggccgacgacggagcaacctcggcggcgacgagccggagaaagccgtcgtggagacaaagagagaacacagaagaacagaaagacgcataagagcactagcatcgaaaatat

SEQ ID NO: 36580 - DNA, 250 bp, Glycine max
  Clone ID: 700888226H1
cgtgcgtttactcggaactactcttccactcttcgtttaaaatgtctgacgtggaagagtatcgttgtttcattggtggccttgcgtggtcaacatctgatagaaagttaaaggatacgtttgaaaagtttggaagcttattgaggcaaaggtggttgttgacaagttctctgggcgttctcgtggttttggatttgtcacatttgatgacaagaaagcaatggacgaggctattgatgctatgaatggg

SEQ ID NO: 36581 - DNA, 250 bp, Glycine max
  Clone ID: 700888227H1
ctcatttccatggccactgcggcacccactgtcgcggtggaacccgctcccgaacctgcctccgccgaccctcccccagaggagaaggaggagaccaaacctgaagccaaggctaagagaaccaaggagcccaacctaaaaaggtttccagacctcgcaaccctcccactcatccttcctacgaagagatggttaaagatgcaattagctcgctgaaggagaaaaccggttcgagccaatacgcgattgc

SEQ ID NO: 36582 - DNA, 253 bp, Glycine max
  Clone ID: 700888228H1
cacactttgcggaaatgagacagcagatgaaagcactgcttttggtacagttggacggcaagctctgatggatctacaaatagcaacaccaaaaattcatggctactttgcagctaccaagacacaagtggctgtggtacgatctatgcctttgctcaatgtgttgaaactctcacgcaagaaacctgttcggactgtttgtcaattgcacagagtggcatacacgattgtcttccaaagacaaatggtcggg

SEQ ID NO: 36583 - DNA, 254 bp, Glycine max
  Clone ID: 700888230H1
gccttctttcatgactagagtggccatgagaatatctagatcaagatggttcactttcttgagaagagtattccattaccaaaacggaccaagatccaatctcggctccaaccctttcaattccagcacttggagatgctggagttgattgcgttgttggtctaaatagtaagcacaacattcactttggccatttcgacgagtgtgaagccaatttggcctatgagagtgtggatagcaggttatgatattgg

SEQ ID NO: 36584 - DNA, 254 bp, Glycine max
  Clone ID: 700888232H1
gtggtgttagatctgtacccgcctagccattgatttggaaaagtccaagcttcaaagatgagtaagcttcagagtgatgctcttagagaagctatctcaggaatcatgactgattccaaggaaaagaacaggcaattgtggagaccattgaactccaaattgggctgaaaaactatgatccccagaaggacaagcgttttagtggctctgttaagttgcctcacattcctcgccccaagatgaagatttgtatg

SEQ ID NO: 36585 - DNA, 249 bp, Glycine max
  Clone ID: 700888234H1
ctagcattgaattcaaaaacttaagttcattccttgtgttttgctttcttcctcaaaaccaaacatgtcgaacacatgcggcaactgcgactgcgctgacaagactagctgcaccaagggaaacagctatgggttattgtagagactgagacgagttacatcgagactgttgtcatggatgttccagcagctgagcatgatgggaagtgcaagtgcggcactaactgcacttgcacggactgcacctgt

SEQ ID NO: 36586 - DNA, 251 bp, Glycine max
  Clone ID: 700888235H1
gtaatgttatttgtttatggacggattctgagtcaacgcctggttaacacagtaacttcagacatggttttatatcggctagtgagcaatcttattaagtatcatatggttatctgctactccctatacattctggatttatgtggttcattctcacattgcagaagaagatgtacaagtaccaatttggccagtatgcttggacacacatgattctaattgttgtatttggccagtcctccttcactgtg

SEQ ID NO: 36587 - DNA, 252 bp, Glycine max
  Clone ID: 700888237H1
ctttcttctttggagcctccgacatagctgccctacgtcgcttggttccccactaccatagaaaatgcaccagtttcgatctcatcacggcatgcttctggcgctgtcgcacaaaagcattggagatagatgagacgaggatgttcgcatgatggtcatagtcaacgcacgtgctaggtttaatcctccattacctgctggttactacggcaatgcctttgcataccccgcggcagttaccaccgcagggaa

SEQ ID NO: 36588 - DNA, 251 bp, Glycine max
  Clone ID: 700888239H1
gtatactcttactctgattcgttagtgaagaaaaatggcaacaatcatcgccggcaccccaactacatcaatcactcgcacaggtcatgtgctcaaacgacctgttggggcctcatcctctaccgttcttggttgccagcaatggccaaggcggggagagtgaggtgctccatggaggcaaagccttcaagcagctcaaacctagggatgggggcatcagtgttagcagctgcagctgccgcaaccatgtc

SEQ ID NO: 36589 - DNA, 249 bp, Glycine max
  Clone ID: 700888240H1
gtacgaggaatatatgtgaagcatttcaaaaacattccaatggctgatatggaaatagttcttccagaaaagaaaaaccctggattaactccaatggattgggtcaagtttcttggatcagctgtagttggttggttgctgtagttagttcacttgaaatgccttcagctgattggtgggtcatcattgctgttgtctccacagtaattggttatattgctaagacttacttcacgttccaacaaaaca

SEQ ID NO: 36590 - DNA, 247 bp, Glycine max
  Clone ID: 700888241H1
agtaagactttgtgattgatgtgctgcaatggcgtcaagtcaggaagaggtgactcttttgggagtaattggaagcccatttgcttgcagggtgaagattgcccttaagttgaagggagttgaatacaatatgtggaagaaaatttggccaacaagagtgatttgcttctcaaatccaacccagttcacaagaaagttccagtttttattcacaatgagaagcccatagcagagtctcttgtgattg

SEQ ID NO: 36591 - DNA, 248 bp, Glycine max
  Clone ID: 700888242H1
gttaattactttgtgactgcttcacttgatggctcttggtgcttttatgaactttcttcagggacgtgtttgactcaggtttatgacacttcaggttcttcggaagggtacacatctgcggcttttcatccgatggtctcattcttggaaccggcaccacagaatctcttgtcaagatttgggatgtaaaaagtcaggcaaatgttgctaggtttgacggacatgctgggccagtaactgccatatct

SEQ ID NO: 36592 - DNA, 252 bp, Glycine max
  Clone ID: 700888243H1
cacgcgcttccattttcaaaggactctccgccgcccaaacccaaggaggctcatttccggggtgtccgcaagcgtccctggggccgctttgccgctgagatccgtgacccctggaaaaagacccgaaagtggtcggcacctttgacactgccgaggaagccgccagggcttatgacgccgccgccagaacactccgtgggcccaaggccaagaccaacttctcctacatccttgctcccgctttccacctcc

SEQ ID NO: 36593 - DNA, 252 bp, Glycine max
  Clone ID: 700888244H1
gcattgcttcgcctcacaacagcagctgcagcagcaatggctcccaaacgaggtggaaaggctccggctcttgccgctaagaagaagcctgagaaggtcacgaatccgttgttcgagaagcgtccgaagcagtcggaatcggaggggcgttgcctccgaagagagacttgactaggttcgtgaagtggccaaagaatgttcaaattcagaggaagaagaggattctgaagcagaggttgaaggttcccccag

SEQ ID NO: 36594 - DNA, 204 bp, Glycine max
  Clone ID: 700888246H1
ccgcaaactcactgcaatgaccaagttgttgatggaggagaatgatcggttgcagcagcaggtgtcacagcttgtttgtgagaatggttttatgaggcagcaattgcatactccatcggcaacaactactatgctagttgtgattcggtggttaccactcctcagcataccctgagagatgctagtcatcctgctggcctccta

SEQ ID NO: 36595 - DNA, 250 bp, Glycine max
  Clone ID: 700888247H1
ctacaggcttctccgaaaccatttgtgtgaccggcgctggtggcttcatcgcctcttggatggtcaaactcctcttggagaaaggctacactgtccgaggaaccctcagaaacccagatgatcccaagaacggcacttaaaagagtttgaaggagcttcccagagactaactctgcataaggttgatctctctcatcttgactccgttagatctgttattaacggctgtcatggtgtctttcacactgct

SEQ ID NO: 36596 - DNA, 252 bp, Glycine max
  Clone ID: 700888248H1
ctgcatcgtctttctcaattgtcgaaagatgagtacaagtggttaatgagattgaggaacttgcgttctttgagcgaaacaaagcagagatgtacctgaaggagccgctatggagtgaaacagggaaaggcgtggaagtgcaaaaacagaggattatggtgcagtgagtgaagtcgtgaagtcactgcagcaacagaaggtgtatagagaagtcactctcgcgctcagaacgggactcagagacgcgcgtgc

SEQ ID NO: 36597 - DNA, 247 bp, Glycine max
  Clone ID: 700888249H1
cattctcaaccccgaaccctaagagcagagcgaaaatgacaaccaccttcgcgaccgtcgcaggactcggtggcgcattactgtcatccacctcatctcgtctcacctcagggtttgtgaaatccccagtgatgctaggaatcccttgaggcaagctgtggcaatgggaaatgggaggattacatgctttgagaggaattggctgcgggcagattacagtgtgattgggtttgggttgattggttgg

SEQ ID NO: 36598 - DNA, 247 bp, Glycine max
  Clone ID: 700888250H1
ctgttgatgtgtttgttagtacagtggatcccctcaaagagccacctcttgttactgcaaacaccgttttgtctatactttctgttgattaccctgtcgacaaagtttcctgctatgtatcagatgatggtcagctatgttgacctttgaagcactatctgaaacagctgagtttgcgaagaagtgggtgcccttttgcaaaaagcacaatattgaaccaagagccccagagttttattttgcccag

SEQ ID NO: 36599 - DNA, 247 bp, Glycine max
  Clone ID: 700888253H1
gttactgatgtctttggcagctgcaggaggattcctggctcttttctttgcttttgttacagctatatacattggagcattatcaattgccatatttgctatttcagttaccacattttgggcaattgtgctattctgatgatcacaggctggattggattcatttacactgtgtggctggtaactagaaaaagctttggatttgcttcacactccttggacgtgaccggctctgcaatttcatctt

SEQ ID NO: 36600 - DNA, 241 bp, Glycine max
  Clone ID: 700888254H1
ctcattttaattctcaaatccaagcttgggagacagagacagtgaaagtgcattgacgccattgattctgagctcgatccgctgagagtattcgcaaagggcagcgtgtgggccgtgaagtgctgttactaccctatcgtaaggatgtcttcaaggctgctgtgtggactgctattggctccgtcgatatgggcatcgtcggttcctccgtcgaggtcatcatcataccctataataacat

SEQ ID NO: 36601 - DNA, 247 bp, Glycine max
  Clone ID: 700888255H1
ctatcacagatccgcaaaatgatgggtttgggatgttgaagcggtggaggattcacaatttgcgatggaaagggaaaattggagagaacacatcaatagcaatgggaattattacgatgacgacggagtaaacgaagccctgcaaagccttcttcgctgtcttcatcgcctcccagacttgcttacatcgatcaccgtgtttccaaattcgataccttggccggtgtcgctatcaagtacggtgttg

SEQ ID NO: 36602 - DNA, 243 bp, Glycine max
  Clone ID: 700888256H1
gttctagatcgcgagcggccgccctttttttcttttgttgttccgggtttttgtttaggtttgctctcacctgaaaatgtcttgctgcggtggtaactgtggttgcggaagctcctgcaagtgcggcaacgctgcggaggctgcaagatgtacccagacttgagctacactgagtcaaccacccgcccgaccttggtcatgggagtggcactgttaagctcaatttgaggtgctgaatgggtg

SEQ ID NO: 36603 - DNA, 246 bp, Glycine max
  Clone ID: 700888257H1
tgctcttcgtgagattaggatataccagaagagcactgagctcctaatcaggaagcttcctttccagaggttggttcgtgaaattgcccaggattacaagactgatctgcgtttccagagccatgctgtgctgcattgcaagaggctgctgaggcataccttgttgggctctttgaggacactaacttgtgtgccattcacgccaagcgtgtgactattatgcccaaggatattcagctggcaaga

SEQ ID NO: 36604 - DNA, 178 bp, Glycine max
  Clone ID: 700888223H1
catttttcttcagcatttatatataaagtgaataatctcccatcccttttagccacgcccacttgaatttcctcatcgcatcagcatcgaacacagcacatccttcaacgactcaaataacagcctctcttcacacgaagcctcccttcagttccttccctcaactcacactctcaat

SEQ ID NO: 36605 - DNA, 240 bp, Glycine max
  Clone ID: 700888190H1
gtaagttttggaggatctaatattgatccaacggcttgggcggataagaagtgccctggtgaatctcgtttccctgctcaggttcaagtgattactaggaaagtttgtgagccactagaggaagattccttcagaccaattcttcacgactacgacggccctaagttccgtcttgagctgagtgtgcctgaggcactgtctcttctggatatctctgcaaaccagaacagtttcgatgac

SEQ ID NO: 36606 - DNA, 244 bp, Glycine max
  Clone ID: 700888191H1
atcaaaggcaaaggttgtggttgcatctgttgaagataaactagagattgtggcatcgcgcaaagttaaactggaggcagacatgctcctcgatgaagcaaccaaactttcatatgaccttattgtgttacctggtggacttggtggtgcccaaacttttgcaaactcagaaaccttggtgagtttgctgaaaaagcaaagagaatcagacaaatattacggagcaatttgtgcatccccggct

SEQ ID NO: 36607 - DNA, 247 bp, Glycine max
  Clone ID: 700888192H1
ctttcttttactagcacctagctaggactcaattctttggttacttactagtagttcctttttaactatctttcttcaatggctgactcagcctcagcctcagcctcttcttccagaatgtggtgctccatccccgaaaggtttcagctgcatgcggccatgttggccctgcagtttggctatgccggcttccatgttgtctcaagagctgcccttaacatgggcattagcaaacttgttttcccag

SEQ ID NO: 36608 - DNA, 250 bp, Glycine max
  Clone ID: 700888194H1
tttaaaaaaaaattaagaatttatcagaaaactaaaattggatgattttattaatttaaaagatcaaataattcacactgtaagacttatttgatcttttaaattgttaaaatgtacgaataagtcttacagtgtgaattatcgattccaatattgaaatttttggatatatacgaaaaaatacggaccatctcatcatctacgttttgccaattgagatagactaatcctattattcgatttgaaccca

SEQ ID NO: 36609 - DNA, 246 bp, Glycine max
  Clone ID: 700888195H1
tcggaaccttcaccggaaaattctcagtcgacgtagcgaaaatggcggtatccctagcgacgaggctcgtgcggcggcgatcgccaccgcttctctggcggcgcacttttctatgtcggcagtggacgccgaaaaggaagtcgtggtcgtgccggagcttccaccgttcgattacttcccgccgccatatgcgggccccaccgctgaggagattctggcgaacgcagggagtatcttagtccttcc

SEQ ID NO: 36610 - DNA, 251 bp, Glycine max
  Clone ID: 700888196H1
gtacactcataacacaaagcacaaagcaaagctcatccttgagttaaaaaatggcagcagcttcttccatggctctctcatccccatccttggctggcaaggccgtgaagctgggcccatcagccccagaagtgggaagggtgagcatgaggaagaccgtcaccaagcaggtctcctcaggaagcccatggtacggcccagaccgagtcaagtacttgggcccattctctggcgagcccccgtcctaccta

SEQ ID NO: 36611 - DNA, 251 bp, Glycine max
  Clone ID: 700888201H1
ctctgctattctggagtggtcatggcaaattggcgaggcagatgacgttgttgatggcgttttgtgattatattgggaactgcacaaaggatgtggtttcagctccaagacctgcttctccacctgtcaagagagtaatgccacaaaagatgaagaggataatgcgttagaatatggattgccttcttctcacacacttaacacagtttgcttatctggctaccttttgcgctatgtcctgactcatactc

SEQ ID NO: 36612 - DNA, 234 bp, Glycine max
  Clone ID: 700888202H1
ggccatacgattgcactatcactccaattttgcggataatagagggcacatcgatcactctgcacgggtcatgcgagttattacatggaaccgatcctttaagggaatacctaatttaatgatgggaaggatgattttgactcggatgagcatgagacgcatgccaccatcttggacaagttgttagcgtgggagaagaaactctacgatgaagttaaggctggtgaactaatg

SEQ ID NO: 36613 - DNA, 253 bp, Glycine max
  Clone ID: 700888205H1
ctcctttaccaccattctagatatcagagaactttgcagctctcttaggtttttaaaaaacaccacgcaaacagcaagatggccacttccgacagtaacatgctactaaattatgttccagtttatgtgatgctccactcggagttgtcaatgttgacaatgtttttgaagacccagatggccttaaagaacagctcttgcagcttcgagctgcgggtgttgacggggttatggttgatgtgtggtgggggat

SEQ ID NO: 36614 - DNA, 255 bp, Glycine max
  Clone ID: 700888206H1
gtgactcgttcttcttcgtcgttatcttcttcttttgttgtttgtgtgtttgttttttctctcacctgaaaatgtcttgctgcggtggtaactgtggttgcggaagcgcctgcaagtgcggcaacggctgcggagctgcaagatgtacccagacttgagctacaccgagtcaaccaccaccgagaccttggtcatgggagtggcaccagttaatgctcaattcgagagtgctgaaatgggtgttcccgctgagaa

SEQ ID NO: 36615 - DNA, 257 bp, Glycine max
  Clone ID: 700888207H1
cttttactagttatagcacttataacctttttccacaccacttcagcctccctcacaccaatccaagccccagtttcatcacccccatccccgccgcgtaccacaaccaccagcattcacaccaccatctccaccagcactgctccagctccaggattcaacacagtacccttagttcccgtgacaccaagtggcgctcccacacccaccatcccacaagcaccctccattgacatagtccaaatcctaagcaaagc

SEQ ID NO: 36616 - DNA, 257 bp, Glycine max
  Clone ID: 700888208H1
ggagaataaaaatgagaaagagacaaacaatgataacaaaccaaccagtgaacatgaaaggactgaaagtcctgatagaaggcatgatagaaaaagcagagagagggaccgagatagggagctaaaacgagaaaaagtagagaacttgaaagatatgaaagagaagcagagcgggaacgtgttcggaaagagagggaacaaagacgaagggttgaggagactgagcgtcagtatgaaacatatttgaaggattggga

SEQ ID NO: 36617 - DNA, 256 bp, Glycine max
  Clone ID: 700888209H1
gtttctcttcctcccttggagaaaaagaagagccaccgctgcgacgccgttcgtgcatttttgaggtgccgctgtcatgtttgggcgtggtggaccaaggaggagtgataactccaaatattatgatattctcgggtttccaaaaatgccagtgaagatgaaatcaagaaggcctatagaaaggcggctatgaagaaccatccagataagggaggagatcctgaaaagtttaaggagttaggtcaagcatatgaag

SEQ ID NO: 36618 - DNA, 253 bp, Glycine max
  Clone ID: 700888210H1
gtgaatgggaagaaggatagaatggtaaaaacagaattatgttttataaatggcaaatgcttgattacaatttgatttgaattatgcctaagttgatacattttttccctctattcttttccttttttattgcttgtaaagttctagtctagctttttaactgtagcattatagttgttgggctctgttgaactgtttggtaattgtaagctgcctttaatatttccccccctaaaagaacagctttaataat

SEQ ID NO: 36619 - DNA, 254 bp, Glycine max
  Clone ID: 700888211H1
gtatggaggagattggctttaacatctctcacctttatggcctcacagaaacatatggtccaggaactttctgtgcatggagacctgagtgggacttgttgccccatgaagagagatcaaagatgaaagcaaggcaagggtgccccatgtggctttggaggaaattgatgtgcaagatccttccacaatggaaagtgttccatctgatggcaaaacaatgggggaggtaatgtttagagggaatacagtgatga

SEQ ID NO: 36620 - DNA, 256 bp, Glycine max
  Clone ID: 700888212H1
gttgaaagtttcattaattatgtcatttacaagctatcaagaagtggacttcaaaatgtggagggaaaacggattcatgatttctttctgacactggcaacctgcaacaccattgtgcctcttgttgttgagtgttacacacctgaccctgatgtcaagctgatagattaccaaggagaatcaccagatgaacaagcactggcttattctgctgctgcctatggttttatgctcatagaacgaacctctggccatt

SEQ ID NO: 36621 - DNA, 251 bp, Glycine max
  Clone ID: 700888214H1
agagaatggctcccaagggtttaacctttctggctgtgttaatatgcgtttcagcactgtcactgagtccttctgttgcgggggaagggcaaaataatggccttgttatgaacttctacaaggaatcatgccctaggctgaagacatcatcacagaacaagtcaagcttctctacaagcgccacaagaacactgctttctcctggctcaggaacatcttccatgactgtgctgttcagagttgtgatgctt

SEQ ID NO: 36622 - DNA, 255 bp, Glycine max
  Clone ID: 700888215H1
tttaggtgaggcttaccaagttctgagtgacccagctcaaagacaagcttatgatgctcatggtaaatcaggaatttcaactgaagcaattattgatcctgcagcaatctttgccatgctttttggtagtgagcttttgaggaatatataggtcagttagccatggcatcaatggcttcaatggacatctttactgaaggagaacaatttgatagtaaaaagttgcaagagaaaatgagggttgttcagaaggag

SEQ ID NO: 36623 - DNA, 254 bp, Glycine max
  Clone ID: 700888216H1
taacccttttcgatccaccacttgagcttggcctagctagctttgcttcccattcctcacttaacttcaatccggttccaatggatcgtttttcttctagtaccattctccccgaagcgtttcaaggtgccaaagatacttcaccatgcagcttgcattggtctggaaccaaatcaaagcgccactcattgtcccgttgctgagaataacagtgtttctgtgcttgatcatgtcggtgatgatgttcatcgaga

SEQ ID NO: 36624 - DNA, 252 bp, Glycine max
  Clone ID: 700888217H1
atagtctacacctaattagccaaacacaccacagcaccaaactagttggctcaattctctttgaatggctttggaggctttgaattcaccaacagcagccaccactcccttccgtggttaccaagaagaggaggagaggttgaccttcacctacgcgagccttgggccaagagcaaacgctccaaacgacctcgttttgagtcggaggaagagtacttggctctttgcctcatcatgcttgcacaaagcggt

SEQ ID NO: 36625 - DNA, 255 bp, Glycine max
  Clone ID: 700888218H1
agttagttcagttatggttgcagagattcctttcaaacacaaaagaacctcagattttggttcctaattgacaaccatggcgggtgcgtgcagagcacccatttgccatcttcctccgcagaagcccaaaaccagatccagaattctcacagcagaagagctcaacttccaaataggcgtttgttcctcttctctctgcctctctctagtttccttctccttcctgttccaagctttggtgatggtaacaatgca

SEQ ID NO: 36626 - DNA, 130 bp, Glycine max
  Clone ID: 700888219H1
ctctacagagagaaagccacatgcactgttgacaccattaccacttcaaggccatatcaacccattgttgagattagcaaagctgcttcatctgagaggctttcacataacctttgtccacacaacatac

SEQ ID NO: 36627 - DNA, 252 bp, Glycine max
  Clone ID: 700888220H1
gagagggctaagaagaagaagtaggaggaagaaaaggggaaaacgcaaagaaaaaaagaggaagatagatcaagatctcccttgcgtttgtctcagttgaagaaattcaagagcagaacgagactaactcaacggttcagacgtttcagggtttcagcacttccattttttttttttccggatttgagttggaagaagatcaaagaggttcctagttgcttggattgttcctctgggtggtggagatttgtg

SEQ ID NO: 36628 - DNA, 253 bp, Glycine max
  Clone ID: 700888221H1
ggcggcgccactgtcgaagaggtttccgccgttccgccccttgaaatctctatcaacgattctagccagctcacgctctcgtttcgcggccaagtctatgtcttcgacgctgttacacctgataaggttcaagcgtgttgttgctgttgggaggaaatgaactaacttcgggttcgcaatgtgcggagctatcatctcaaaatcagactggtgaggaggaatatcctgcaaaatgtagtctaccacagcgagc

SEQ ID NO: 36629 - DNA, 253 bp, Glycine max
  Clone ID: 700888222H1
gaccaagctagtccgaggaagtcctctattcagaaccagatatggagacaaaacccaccgagatcagcagcggcaagatgttcggaggctacaacaagaggttcagacatttcagccctaccctcggctgctccagaacttccacatctacttccctccatctccttctccctctcacaaattcccagtcttgtactttctctctggcctcacatgcacggacgagaacttcattttcaagtcgggtgctcaa

SEQ ID NO: 36630 - DNA, 243 bp, Glycine max
  Clone ID: 700888189H1
gacaaacttggttctccatacaggatttgcattcccagacttaacaactttggtgcaatatttgctattatgatcaatccacccaacagcaaacacatgacgcttccaaagtgaggttgaaagctggagtccatgtgcagatatcaagcagacctccacccatataatccccatagaaagtgcaggaaagaaaaaatgagatgttcaagggatgatgtctccgataagcttctttagataagg

SEQ ID NO: 36631 - DNA, 249 bp, Glycine max
  Clone ID: 700888154H1
ttctctctctctgtctctctctctctagacttagattttgtgaatggctgaagtggaagagggacaggtcatcggcgtccacaccgttgatgagtggaagctgcaactccagaatgcaaaagactccaaaaaactgattgtggtggattttactgcttcctggtgtggtccatgccgttttatggccccagttcttgcagagattgcaaagaacactcctgaattgatcttcctcaaagtggatgtgga

SEQ ID NO: 36632 - DNA, 250 bp, Glycine max
  unsure (1)..(250): unsure at all n locations
  Clone ID: 700888155H1
cgagcccaccgtcatcgacgaagtccgttcgtggcacttaccgtcaactcttccacacagcataccacaccacncgcaaggaagatgccgccaacaactttgccagaggccacctctccggtggcaaagagatcgtagatctgtgcttggatcgcgtccgaagtctcgcagacaactgcactggtctccagggcttcctcgtcttcaacgctgtcggcggtggcaccggttccggtctcggatctctctt

SEQ ID NO: 36633 - DNA, 246 bp, Glycine max
  Clone ID: 700888156H1
gtaaaggatagaagtggagagattgttccttaccatcctccatttaatttgggtcctgaaaagggttccacttcagtgcgccgttggagggatggtagcttggagaatgatttacctatgatgcagttgaaagagttgttcaacgtcaatcactttatagttagtcaggccaatcctcatattgcaccattattgagattgaaagaatttgtacgagcttatggaggtaattttgcagcaaagctt

SEQ ID NO: 36634 - DNA, 83 bp, Glycine max
  Clone ID: 700888157H1
gtccagtctctttccaattctgcatagaatacacataagtgagtattataaatttggggtaacacttaataggagcgttaaac

SEQ ID NO: 36635 - DNA, 246 bp, Glycine max
  Clone ID: 700888158H1
ctccacttatctatgctgtaatgggaacttctagagagatagcaattggtcctgtggcagtggtttctctgctgttatcatcaatgatggtgaaattagtagaccctgctactgatccagtgggttatacaaagctgattttgcctgctactctctttgctggtatctttcagacttcctttggactcttcaggcttgggttccttgtggatttcctatcccatgctgcaatagtaggatttgtag

SEQ ID NO: 36636 - DNA, 85 bp, Glycine max
  Clone ID: 700888159H1
ctcgagccgttactggaagccttgttgtgagtaagagaaaaggcttcctgcaccgagcacaccaacttgatacctctgattcttt

SEQ ID NO: 36637 - DNA, 238 bp, Glycine max
  Clone ID: 700888160H1
tctgagacgaagccttcgaatctctctgagacttttctcttctctttgattcttctctatgcagttaaacattagaatgagccgttcacaggatccacacccttcccgatctttcttcccttttggaaatccttttcggatgatagcacctaaaggctctcgcatgtctccacaacttcttgcagtgttgcgagcttttgaggcaacattggcagagacgctgcataatcttatgcct

SEQ ID NO: 36638 - DNA, 251 bp, Glycine max
  Clone ID: 700888162H1
agattgtggaagtaatgacccggatctgaaggaggagatggagaagcagtttgtggaccttctcagtgaggagttgaagttgcaagagtctgttactgaagcaaacacccggcacatgaacataactttggctgaagcaaaaagagtggcttctcagtaccagagagaggcagataaatgcattgctgcaactgaaacatgcgagcaggcaagagaacgtgctcaggccatacttaccaaggagaaaaaga

SEQ ID NO: 36639 - DNA, 255 bp, Glycine max
  Clone ID: 700888163H1
cttcgccaaatcccaatctcaatcccgaaaaccatttcactgagcccctacccctccccctccctccaacaatgttccgacacccttaaaaaatcaaaacctcaaaaaccaaaaaacatcaaaccatgttttccttccctcacaatgtcttcctacccatccttgtctttccaatcattatttgttgctgctccgcctccttgttgggtcggagcaatgcgacgacaatctacgaggtcctgagcgagcacgggc

SEQ ID NO: 36640 - DNA, 228 bp, Glycine max
  Clone ID: 700888164H1
gtgttcctcaatctgtaagtcaatgcagtcgaccccaagaggctattcatggtatcagctgtggttacgaggataaaactgattggggaagtgagataggatggatttatggttctgtcacagaagatattcttaccggatttaagatgcatgcccggggttggcggtctatatactgcatgcctaagcgcccagcgtttaaaggttctgctcccatcgatctttcgg

SEQ ID NO: 36641 - DNA, 204 bp, Glycine max
  Clone ID: 700888168H1
cctaaactggaccccaccgatcttgcgccaccacaacaaccacttgacactgaatctcgcgctcccatttccgaagatgctgccactactatgcccatagactccaatccctatgtcactcctgctcccgtcactgcttcttctactaagactactttagattcggtgaacgacgttctcgggtaatgggggaagaaagccgcc

SEQ ID NO: 36642 - DNA, 82 bp, Glycine max
  Clone ID: 700888169H1
ctagccaaaaacggggtgtgtcccatttgtgggaagaaggtgggattggatctcgttggacatatgactacgcaacatggga

SEQ ID NO: 36643 - DNA, 72 bp, Glycine max
  unsure (1)..(72): unsure at all n locations
  Clone ID: 700888170H1
gctactgaaggacctgctcctattgtatccacacaacatacgagacggtcnttcagtagcctcgagccgaat

SEQ ID NO: 36644 - DNA, 245 bp, Glycine max
  Clone ID: 700888171H1
gttagtttccttggaaggagggtctgcgagtgcttgttcattttgcctccatatccaggtatggtttactactgtagatgtgtgcccctggagaagttgtaatgaattccataagtaggaccagctcactggtaccttcacttccttttcattttgattgctgcagatccatatgatgacaacttagttgatgcctgtgttaattatttcacccaacccccataaaggaaatagaaatcgtgtaa

SEQ ID NO: 36645 - DNA, 243 bp, Glycine max
  Clone ID: 700888172H1
gtaaagatagcggcaagtgttccaaaatgaaattaaaccaaacccatcatgttatggtgttattatacgatgcccgcataagcaagcttcaacacaaaaggaagaggcgctgttgcttgatcccgctagcttttacgtattttctcttacgtaacaaccgtgtataagttaccagtgtgattttcttacagaactatcttctgtaaagatttcaatctgtcaaggactttcaccttctataat

SEQ ID NO: 36646 - DNA, 245 bp, Glycine max
  Clone ID: 700888173H1
atacgacacacacaataaaaagctttagtttaggatgatccaagtgaggtacaagcaagtggttctaagagattatgtcaccggattccctaaagaatccgacatgaacattgttgaaggcaccataatattgaaggttccagaaggttccaatgatgtccttctaaaaaatctctacttgtcatgtgatccatacatgcgactcctcatggccaaggaccgttctttcggagatggctccttca

SEQ ID NO: 36647 - DNA, 244 bp, Glycine max
  Clone ID: 700888174H1
ttaaaagagaactggaaatacgaaaccctaaacccatcatcgctcccagaaagttgtatcggtttctcttcttaagttttcttcaccatctcaagattaagctttttgggttcattacaggaaaatgttgaaattcttgtcgagagtgaaaatcgagttcaacgcgttggaaccgcgaacggcgtcgtgtatggagtatctggcgcaatgcaactcgcggaaggcgtacgagtagcatgcggcg

SEQ ID NO: 36648 - DNA, 78 bp, Glycine max
  Clone ID: 700888175H1
ctacgggtgcgtaatgcgtgggaatctgccgaacagttcgggccaaatcctgaacaaagctataaagcgctgtttgat

SEQ ID NO: 36649 - DNA, 241 bp, Glycine max
  Clone ID: 700888176H1
gtcaagtgaaagtgagataaaataaaaatcaaagagcataatgtcagggatcattcacaagattggggagacccttcatgtgggagggcacaagaaggaggatgagcataagggtgagcaccatgctggagaatacaaaggggagcaccatggtgaacacagtagtgagtacaaaggagagcatcatggtgaacacaaagctggagagcaccatggtgagcacaagccagagcacaatgag

SEQ ID NO: 36650 - DNA, 246 bp, Glycine max
  unsure (1)..(246): unsure at all n locations
  Clone ID: 700888177H1
ggaagnggtgttgagaaggggttttagacgtccacatttttcagatttcattcgcgttcctcttctctctactcatcatcaatggcgacccccattcctccccctcctgccgccgccgccgccgccgccgccgacaccaaggtcgattacttgaaccttccatgtccgattcccttcgaagagctccatcgcgaagtatgatgtctttgaagccagatctttttgagggcatgcgttttgatttca

SEQ ID NO: 36651 - DNA, 247 bp, Glycine max
  Clone ID: 700888178H1
gtataaaaagacttccttttttgcaattgtcatttgtcaccaaacaattgttgttagctctcacaagcaagcttcagcaacgacagtgaagaaagtagtcttacagttggacttacatggtgatagaatcaagcaaaaagctatgaaaacagcatctggcctttcaggggttgaatcagtttctgttgatatgaaagacatgaaaatgatcgtgttgggggacattgatccagtgagtgcagtgtcg

SEQ ID NO: 36652 - DNA, 223 bp, Glycine max
  Clone ID: 700888179H1
gtatggcaaaggcacatcaaatagtgctagggagcaattgggggatcagaaacatttttcagtctcttgtggccatcttaaccactattctagttgtcgctgccatttatctaacacaggagggagaacaatggtctaatgaaaggaacaagttacattcattatcaaaatgtaacttgttttctggcaagtgggtttttgataatgaatcatatccacacaa

SEQ ID NO: 36653 - DNA, 85 bp, Glycine max
  Clone ID: 700888180H1
gtggcatcgatgcattccctttcagacgctctgatgatgatgtcctcacccagaactggaattggtcctgggcagaaatgaagaa

SEQ ID NO: 36654 - DNA, 246 bp, Glycine max
  Clone ID: 700888182H1
gtgcttacttatactaattcgttttgcttggcgccgtttttattctctcaacaaagacgcgacaacggttacgaggatctagaaacaaaaaagaccggataacgagagcggcggctggaggcaccgtgcgacgccgttatctccgtcgagcatcagcacctgttttccatcaaccgctgaattctcgtctgcgttcaccttcacttctcaattccgcttctctgctcagcactcatttgattttcg

SEQ ID NO: 36655 - DNA, 246 bp, Glycine max
  Clone ID: 700888184H1
gtcaatttttctcaggataagtcatggcgtgttcgttacatggttgctaatcaactatatgagctatgtgaagctgttggtcctgaccccaccagatcagaattggtccctgcatatgttcgtctgctgcgtgataatgaggctgaagtacgtattgctgctgctgggaaagtaactaagttttcccgcatattaaatcccgatcttgcgattcagcatattctaccatgtgtgaaggagttatca

SEQ ID NO: 36656 - DNA, 250 bp, Glycine max
  Clone ID: 700888153H1
gttcggtgtatctaggtgtgcttgaagatggcactcaattggctgtaaaaaaattggaaggtgttggacaaggtgcaaaagagtttaaagcggaagtgtccatagttggaagtattcatcatgttcatttggttaagctatcagttattgttcaagttgaagagatcttccctcatatgacagagttaacaagtttttgttcaagtcacctatgtaacaaggatatactctagctagagtagttgcaaat

SEQ ID NO: 36657 - DNA, 244 bp, Glycine max
  Clone ID: 700888185H1
gtcttacatcaaaactccaacctgtgtcattctcgctgtgacgccggcgaattcggatttggcgaactcggatgctcttcagatggctggaattgccgatcctgatgggaacagaacgcctggtgtcatcacgaagttggctatcatggatagatgcactgatgcgcggaatctgttgctaggaaaagttattcccctccgacttggatatgtcggtgttgtgcatcgtagtcaagaggatatt

SEQ ID NO: 36658 - DNA, 246 bp, Glycine max
  Clone ID: 700888186H1
ttattctctgtctctctctctctctctcgatcaatcatggctttgcccaatcagcaaaccgtcgattaccctagtttcaaactcgtcatcgtcggtgacggtggtacaggaaagacaacgttcgtgaaaaggcatcttaccggtgaatttgagaagaaatacgaaccgaccattggagtggaggttcacccattggatttcttcacaaactgtggaaagattcgcttctactgttgggatactgcc

SEQ ID NO: 36659 - DNA, 243 bp, Glycine max
  Clone ID: 700888187H1
ctcaaagctaaggctaagccgcaggaacctgaagtgactgtggcgagtgatgcatttacgcaattcaagcatctgcttctgcctattacggataggaatccctatctctctgagggtacaagacaagctatagcaaccacctctgctttagctaaaaagtatggagctgacattactgttgtagttattgatgcacagcagaaagagtcactgcctgagcatgagacccaactatccagcatc

SEQ ID NO: 36660 - DNA, 235 bp, Glycine max
  Clone ID: 700888188H1
gttaattgcaagaatggcacttcgttgcttggtgatgtccctttctgttctcttcactcttggtcttgcgagagaaagccatgccagagacgaagatttttggcatgctgtttggccaaacactcccattccaagttcattgcgagatcttctaaagcctggccctgcaagtgttgaaatcgaagatcaccctatgcaaattgaagaaacacagtacccgaaaaccttcttctat

SEQ ID NO: 36661 - DNA, 245 bp, Glycine max
  unsure (1)..(245): unsure at all n locations
  Clone ID: 700888115H1
tcncctcagcggcatcgttgtattgttcttacacatctttctctctctcactttcggtttctaaaccaaaaccctaatcgagatcacaatcggatcgtaaacaaacagagaccagccatggacggtgattcctcttggagtgctcgactctcttccgcttccaggcgctaccaatccgctcttcaatctcgatcagacatgttcatgggttttgatgaaaatgatggggacgatgatataagaga

SEQ ID NO: 36662 - DNA, 235 bp, Glycine max
  Clone ID: 700888117H1
cgcgacgtgttcgggctgcagaggatccgcgagtgcgagctcattcacgggaggtgggccatgctcgccactctcggagctctcactgttgagtggctcactggtgttacatggcaagacgccggaaaggtgaagctagtggaaggttcatcatagttagggcaaccacttccattctcaatcaccacactgatctggatcgaggttctcgaaatggggctacatagagttccag

SEQ ID NO: 36663 - DNA, 253 bp, Glycine max
  Clone ID: 700888118H1
ttttcagctttcattggtgtggcctagctgttttctcaatgagaaagccttcatctctgcaaagcgcaacgattgcgctttggggttcccttgttgcttgttatcaccttctgttatgctacttctactgctgcagcaacaactcaagtttcagggaatgaagagctgccaaagacaaacctaaatgagcttgatgaagaagcaaaattcggattttttcatcataaaccaatattcaagaaacatattccaa

SEQ ID NO: 36664 - DNA, 250 bp, Glycine max
  Clone ID: 700888119H1
ctaccatgacccttcctcaatcatttggctgtggacttgtgcaagcacccttggtgacaagctctggtcttcttactaaagtttggagtgttatctcttctcgtgatgaagacatagtttcatactcaggaaataatggactgtccttgaaagtttctgaggattcgggtttgacggttgttgcgtttgaggtcaacccggattttgatcttcaatctacagttgtttctttctctgatcccaaggagaa

SEQ ID NO: 36665 - DNA, 253 bp, Glycine max
  Clone ID: 700888120H1
ttaatttactatattcatttttgaaaaacgatgttattatcttcattttctatcatatgcacactcaatcacaagtctgcatgccttttatatagaaactaattctatcagttaacttacattcccatgttaaatacaatattttcaaggtccaaatgaaggaggtagaaaagagaaattctctcataatcatgaacacggagcagtgattagtgcatgctccaagaattagttagtagcctaaaattgatgt

SEQ ID NO: 36666 - DNA, 249 bp, Glycine max
  Clone ID: 700888121H1
gtttatctcataaaacttctcttgattggcgatagtggtgttggaaagagttgccttcttctacgattctctgatggttctttcacaactagtttcatcacaaccataggcattgattttaagataagaaccattgagcaggatggaaaacggatcaagctccaaatttgggatactgcaggtcaggagcggttccgaacaattacaactgcttactatcgtggtgctatgggcatattgctagtctat

SEQ ID NO: 36667 - DNA, 250 bp, Glycine max
  Clone ID: 700888122H1
ctttgagttgaaagctctaacctctgctacaaatcacttatacttcgataactattatgctgctgattcctttgccaaattcggtttatccatgaaaaggcagcctgtgaaaatttttcgtgtttactcttctttttgccaaccttatatttcagaatacagataaatgttaaataaataagtacctcaatataatattcatttcttactaaactgtaaaaaaaaaataaaaaaaaaagaagtacaagct

SEQ ID NO: 36668 - DNA, 241 bp, Glycine max
  Clone ID: 700888123H1
gatcatctgcaaggacttgttctccttccttcccaacagccatgcgttcatttcttcccgcctcagccgagcacgttgatctggcagtggaggccaaagacccgtctgagtccatctccattctttatcaggtacttgatgatccttcttcttctccagatgctctgcgcatgaaagagcaggccatcacaaacctcactgagcatctcagggaacagaatagggcagaggatttgcacag

SEQ ID NO: 36669 - DNA, 148 bp, Glycine max
  Clone ID: 700888125H1
gttctttctttcttttttttattttgttgttgttgttgtttccttgaagtagtaaatttctcttcttttttcaattgattatgtgaatgcttagtccttttgtcttcaaaaaaagaaagattatccctgaactggtacattatcaatg

SEQ ID NO: 36670 - DNA, 250 bp, Glycine max
  Clone ID: 700888126H1
gtagcatctttctcatagggcttatcgcctttgttttctgggcactctttgctcttctttgtactcattgtactcacaatatgggaaaccaagagcatggaattggcaggccttgcaagtttactttcagtcaataattgcttcgaaggattttttatacttcatctactgccttacatttgttacatctcatctttgccttaaatttgctttgatccctatcttatgttggtcctttgaacatgttgcc

SEQ ID NO: 36671 - DNA, 137 bp, Glycine max
  Clone ID: 700888127H1
gaggttgggccagaagaagagacaactatggttgagaaccgggaaaacaacaacagcgactcaagaagatcactcactcttcatttcatttcagtaatggctacccaaacccaaacacacacacatccaaacaccac

SEQ ID NO: 36672 - DNA, 253 bp, Glycine max
  Clone ID: 700888128H1
gtaattttggtcattgattaattctgcaattgagcagaggagccatggccaaaatcgcacttggaagcacccgagaggccactcagccagactgcattcaggccctcatcgttgaattcatagccaccttcctctttgtctttgttggcgttggttcttccatggtcgttgacaagcttggtggggatgcactagtgggattgtttgctgtggccgtggcacatgcacttgtggtggctgtaatgatctccgc

SEQ ID NO: 36673 - DNA, 252 bp, Glycine max
  Clone ID: 700888130H1
gtgctaggaaagtgagtgagagaaagagatcacatagcagaatggcttctactcaatgtttcttgcaccaccatgctcttaccacccctgccagatccccatcacaacgcatcatggttagcaccaagcctaaccagcttgtttgcaaggcaccaaagcaagaggatattgaatgtcagcccaatctctcgccggttagctctaaccgtgctcattggtgctgctgctgttggctccaaagtccagcctgct

SEQ ID NO: 36674 - DNA, 102 bp, Glycine max
  Clone ID: 700888131H1
gtagctatctatttatctatagcaagtgcgtcaagagacacgtggtaccctagctagagtgccattctgtggcttctttctttctttctttctgcatcacat

SEQ ID NO: 36675 - DNA, 125 bp, Glycine max
  Clone ID: 700888132H1
ggacttcggctcgagccggtttggtgtacacagtctacgccactgccgttgaccccaagaagggcaatttgggaattactggtcccatcgccattgggttcattggtggcgctaacattttggtg

SEQ ID NO: 36676 - DNA, 104 bp, Glycine max
  Clone ID: 700888133H1
ataactttgaactgtgtggcagtgtgggaattcattatagcattttgttcgttcttgtgtagaagtttaagtcatttgcaatatcatacgtcttgaaaaatttg

SEQ ID NO: 36677 - DNA, 84 bp, Glycine max
  Clone ID: 700888134H1
ctattagttaagagagttgagtaacatcagaatggcagacttgatgaaaagaatcctccaaatgattgaggctgaacaagcaag

SEQ ID NO: 36678 - DNA, 251 bp, Glycine max
  Clone ID: 700888135H1
cttcctcattctcaccgttctctccagcccactgctgtggcttgtacgtttgattgtgctgactggtatatagaggggggttcagcctctcaacacaacagcttggtgaccttttggactactcaatttctcatctgttgcttttcaagaagccctcaggcttttctcctggaaaatatatgagaggttacaagatatgttagatgcctttgctgatagaatatcaaaaccacatcttcacctgccagata

SEQ ID NO: 36679 - DNA, 251 bp, Glycine max
  Clone ID: 700888136H1
tgtgagagagagagagagacgtatcacagtgatacgaagaagccctaactatgcacgcactcactcttgagaaagctcaatattcattcgtcgatggcactctcttctcgtctcttttccaaatccaaattgatctatggctgtcaaatacttctgcaaaaggagcatgctattccagttcgtcactttgctacagagtctgaccctcctgcccttaagggagatcagatgctgaagcacatttttgtgga

SEQ ID NO: 36680 - DNA, 86 bp, Glycine max
  Clone ID: 700888139H1
gtttttcctttcgggattggtttctatggcttctgaagtaatagagtaccgatgcttcgtcggtgggactgcttgggccaacgaca

SEQ ID NO: 36681 - DNA, 247 bp, Glycine max
  Clone ID: 700888142H1
gttcttactaacatggttgcatacattcaaaaagaatttcctggaaacacacttaaattctggcgattacaatccccaaggtacttttatggtggtgactggaatcaaaatgggagctgcttgttcaacaagccccttgaggaggatgagcttgacttatggtttgaacccaggaacaacggagttaacaaggaagcgagagtgttgaattttgtgattgaagaagcattacaagctgcaaacattc

SEQ ID NO: 36682 - DNA, 244 bp, Glycine max
  Clone ID: 700888143H1
gtaagcagtgcaatgttgccaacaagcaccatgatcaggacccttgaattttcctccccttgtctatgatcgaggaagaaaatctgtaatatattatgcaaaaaataattaaggtcttttcctttaaatgggctggttcaatgaaccgagaccactgcaggttcatggggatgggaggattaagaggctatgctttttaatcttccgatgttactgttgttttttttttaatttcaataaggat

SEQ ID NO: 36683 - DNA, 241 bp, Glycine max
  Clone ID: 700888144H1
gtcagatgaaggcagcaggtacagtaatgacaagaagcaagattgcgatctttaagtggttgtcaaatgtgcagagaaattgaggttcttcgtagtcatgggagatgatgtgggtttcaaatagggttggatttgatcactcttggactatcatttgagtgaatcaaaactgaaccagaatttagtcaactcacacgtgttgtctcttaatcctctgcgtgaaccgcggttcaatattttt

SEQ ID NO: 36684 - DNA, 251 bp, Glycine max
  Clone ID: 700888145H1
ctctgatcccttacacctaccactccatcacagagcgacatgatgatgatgtagcagatgagcttgctgcttccatcccagtcatcgacttgtctctcctcacttcgcatgaccctcaaatccacgccaaagccgtgcaccaactcggcaaggcctgtgcagagtggagtttcttcatgctcacaaatcatggaattcccgagagcctggtggaggagttgatgaaaaagtctcgcgagtttcatgatttg

SEQ ID NO: 36685 - DNA, 251 bp, Glycine max
  Clone ID: 700888146H1
ctgcccgagaagaagtgccaggaagacgtggttatcctggatatatgtatacagatcttgcaacaatttatgaacgagctgggagaattgaggggcgtaaaggctctattacacaaattccaattctaaccatgcccaatgatgatattacgcacccaactcctgatctaacaggatatatcactgaggggcagatatacatcgacaggtagctgtataatggaccgatatacccaccagtcaatggcctc

SEQ ID NO: 36686 - DNA, 251 bp, Glycine max
  Clone ID: 700888114H1
gtagattgaagctgttgttcaaagcaagccaaagcgccctgaatcataccgatgaattgacgtttttccatggtggacacatatatgcattagatgggaggctccgtcatacccgtgcacttgagtgaaaattcatgttgaaaattattggtgtggttgatgtgctttcttgggaattctattctatgtcatttcttctttctggcactgattatgcctatctcattatgggttcaaactttccaaattga

SEQ ID NO: 36687 - DNA, 89 bp, Glycine max
  Clone ID: 700888147H1
gaatttacaacccttggtattttaggtgtgacagagactcacacacacagcacaagaacagcggtttatcttccggtccatgtctatac

SEQ ID NO: 36688 - DNA, 215 bp, Glycine max
  Clone ID: 700888149H1
gtaaatgcacaacaaaatgcaggagttgcattgaacgaacggatgttgcagaccactaataggaatacacaaacccaatacaatactacgatggacctgagaaatgtagctgatgattctgcagtagaatcttcaagtggtaccaggagagaaagggatggaggcttagttccagtatggtctccaccagcttccagttactcagaacaatttgt

SEQ ID NO: 36689 - DNA, 248 bp, Glycine max
  Clone ID: 700888150H1
tcatcacttttgtctgcattacacctgagcctcagatctcatctcttatccacaaaacaaacgatacaaaggtgaccatcatgaaactcaaggttgatcttgagtgctgaatatgctacaagaaggctgagcgacttctcgacaagtatcctcaaatcggagatcagaagcacgatgcgaaggattctcgtctgcgcacaacatcagtgcgcaattccgcttctctgctcagcactcagttgattttc

SEQ ID NO: 36690 - DNA, 246 bp, Glycine max
  Clone ID: 700888151H1
ctataacaaaaatgagtgacaaaaacaacatggttatagcctccaaaacagccactggtagttcttcatcatcttcaagaatgtccacaaaaacattctcgggactcggaaacctcgtcaagctccttcccaccggcactgtctttctgttccagttcctcatccctgtcgtaaccaatagcggacactgcaccactcttcacaagtacctcactggctctttccttgtcgtatgcgcattcgact

SEQ ID NO: 36691 - DNA, 90 bp, Glycine max
  Clone ID: 700888101H1
ctctgctattctggagtgttcatggcaaattggcgaggcagatgacgttgttgatggcgttttgtgattatattgggaactgcacaaagg

SEQ ID NO: 36692 - DNA, 250 bp, Glycine max
  Clone ID: 700888102H1
gtgattgcggaaagcaaaaacatttggcgtctgaggcgcaccaacggaggccactcgaggggttctcggggtgcccttctgtgactgagttgttaacaattctgggtctcagtgaaaaatctctgctttcaaatgagggaacttcccagattgatgatgacctttcggatttgcacgtgtggagtgctccttctattaatggtcttgaagatttgatcactaccacagcttcttctcaaaaggtgtgtgt

SEQ ID NO: 36693 - DNA, 250 bp, Glycine max
  Clone ID: 700888103H1
cttcctcattctcaccgttctctccagcacactgctgtggcttataagtttgattgtgctgtctggaatatggaggggggttttgcctctcaacacaacagcttggtggccttttggaatactcattttctcatctgttgcttttcaagaagccctcaggcttttctcctggaaaatatataagaggttacaagatatgttagatgcctttgctgatagaatatcaaaaccacatcttcacctgacagat

SEQ ID NO: 36694 - DNA, 249 bp, Glycine max
  Clone ID: 700888104H1
ttcaaattgattcttaagtttcctgtacttggactgaagggagctccctttttcttttgaatcttctcttttcctttcttctattttgcacatgacaagcattatatcatttctcatctctatttaaagtagtatatcacataactcatttttgtatcttctctcttcctttcttctattttgcacatgacaaactttatatcatttttcatctctatttaaggtagtatatcacataactcataactc

SEQ ID NO: 36695 - DNA, 249 bp, Glycine max
  Clone ID: 700888105H1
ggtattagcaacgagaaggagaggaggggtttgcgtgtgtgagagagaatcagaatcagaagatgaagaaagaagacacagtgaagctgatcagttccgaaggtttcgaatttgtggtcgacaaagaacctgcaatagtttcacagaccatacataacatgcttacttctccagggagtttcgctgagaggcagcacggcgaagttacctttcctgagatcagcaccaccattctcgagaagatttgcc

SEQ ID NO: 36696 - DNA, 245 bp, Glycine max
  Clone ID: 700888106H1
tgcaaccatttaaaggtaatgatccagcggatgacgaggtggacattggtggaaatgagccccctgtgtcaagctatcctcatgtggagattgaaaaggatacaacttatggaatgaacaaaagcctaagcccaggcagctcaaatgatacggactctgatagttcttctgatagtgaagctgatgatgttaaagcaagaccagcaaatgcagcaaaggcaccagaaaatctgggttctgaagct

SEQ ID NO: 36697 - DNA, 250 bp, Glycine max
  Clone ID: 700888107H1
ggacaattggtcagcttattgagtgtatcatggggaaggtggcatcccacatgggaaaacaaggagatgcaactccttttacagatgttactgtggacaatatcagtaaagctctacacaaatgtgggtaccaaatgcgtggttttgagactatgtacaatggtcatacagggaaacgtctaagtgcaatgattttccaagggcctacatattaccagagactgaagcatatggttgacgacgggatcca

SEQ ID NO: 36698 - DNA, 248 bp, Glycine max
  Clone ID: 700888108H1
tctctacactctattcaacccttcacattttctctcttctttatcttaaattacttttccatggaggaaagcaagaaacgagtccgggacgagtccagctactcacccgagtcccaaactcagctggtcgactctcccgagtctgaaagtcagcgggtcgactcacctgagtctaagattcgtcgagttgactcgtccgagtctcaactcgactcggtccttgactcggaggtgcgtctacaagacga

SEQ ID NO: 36699 - DNA, 235 bp, Glycine max
  Clone ID: 700888109H1
cctcctttagcagagtggatgagtgggtgaaagatctcgaaattcagcagccacctcctgaggatgattttgatgatgacaatattggaaccattgccttcccaccttctcctgatgctatcccacaattcatagcatcctcaagcacagctcagtctgttcgacatccagatgccaatctttcaaaagagatattgaatgccaatagtgtggttcagtccctgaacccagcctc

SEQ ID NO: 36700 - DNA, 245 bp, Glycine max
  Clone ID: 700888110H1
gtgaaacaaagaaagctgtgccaattgacatagatctgaccatgagtcatgctagtgtatcagggaaattcaatactcatgcaacaaatggcaaagagattgaagtaattgatttagaaaatgatgattccattcaagaagagaagtcaatcaacagtatggatagaaagacagagactatgtttcctggccttgaaggtttttccaaccatgctcaaaatgcttgctgacatgcatgatgttca

SEQ ID NO: 36701 - DNA, 216 bp, Glycine max
  Clone ID: 700888111H1
gcagcttaccttaaatctctaataaaaaaccactggaagatggaattcgtgagattttttgattgctggaatgattttcaagaaaaggccacaacccaagtcttgattgttttggacaagcatgagaaccgcgatacttatgtggtagctttccgaggaacggaaccctttgatgcagatgcatggtgcactgaccttgacatctcatggtacggg

SEQ ID NO: 36702 - DNA, 250 bp, Glycine max
  Clone ID: 700888112H1
gtatgtttcatccaaatatttatgctgatggaagtatttgtttggatatattacaaaatcagtggagtcctatttatgatgtggctgctatactcacatctatccagtcattgctttgtgatcccaacccaaattctcctgcaaactctgaagcagctcgaatgtttagtgagaacaagcgtgagtacaatcgaagagtgagggaaattgtggagcagagttggacagcagattaagttcatccttatat

SEQ ID NO: 36703 - DNA, 254 bp, Glycine max
  Clone ID: 700888113H1
cttaacattagctcaaatttcatttatgggggaattccagaatctctatcctcgatgaggaatctaaggagtcttgttttggttgataatctcttcaatggaagtgttcctgacctccaaaggctaacttctctagaagagctcaacttgggaggcaataaagtgggtgctcaattcccttcagtgggaaagaatcttgtcactattatgttgagaaataattcactgagatctcatatccctccacaacttgt

SEQ ID NO: 36704 - DNA, 251 bp, Glycine max
  unsure (1)..(251): unsure at all n locations
  Clone ID: 700808472H1
aaattaaccaaagcaatgaagaaactaaaacactactattcacaccaccaccacaactcctccgaacaacaacaatcaaagtgtattttcccattaataaccattatctctcttttctctctcttcttcctcctcctctttgctctcacgctaacccctctctccgccacacgcgtcttcccattctctatctccaccgccactcctccggggncctggtcgttcgtcgagtccaagctttttcctctccc

SEQ ID NO: 36705 - DNA, 215 bp, Glycine max
  Clone ID: 700808473H1
gcagtgttgggagtacttctgatccgaaagaatgaggactttgaaaaccttaagaagctatttgatgagactacattatatgacaagcaatggcaagcaacttggcaggatgagattcaagcattccaaaatgagtagtggattgcgtttgtagtctcctcctcatgtcctatacagtgctgcgataattgtatacaacagcatgtatgatagac

SEQ ID NO: 36706 - DNA, 93 bp, Glycine max
  Clone ID: 700808474H1
gcagcaattcagtcttactacatgtgctcctcaaaagaacaatgtatgaaatacctatgctatgctatatgctatgatacctttattacatgc

SEQ ID NO: 36707 - DNA, 257 bp, Glycine max
  Clone ID: 700808475H1
cggctcgagcggctcgagcggctcgagactcaattgctttacaatgtgttgcaccccaccatccgccattgcttagagttagaagcctcttatccactaaccacttatgacccatttgagtactgattgccaggtagaaaggagggtagaaaaagaagataaattggggatggaagtgggggaaaagagggtaggggttagagggagtgtggttgcagcagggtcagtgtgggacagcaggatgaagagtgatgaag

SEQ ID NO: 36708 - DNA, 247 bp, Glycine max
  Clone ID: 700808476H1
aattggcgttggcttaggagccagcgagagagagagagagagagacagatttaccggtgaccggtcggtgttgttgattgaattcacctgacgttcaacgcatctctgtcaatgtctccagtttggagaatcattccgtatattcggtgaattataagatagagtggaagcacaggcttctttcttcccttttgtggcggtggcggtggcgatggcggaaggggaagagcttcggcctgacttgctg

SEQ ID NO: 36709 - DNA, 259 bp, Glycine max
  Clone ID: 700808477H1
attgaatctcagaattctctaaaagagatctttttctgctctttgaagaaagaagggtctttgcttgattttggagatgtctctgctctcagatctcatcaaccttaacctctccgataccaccgagaaggtgatcgcagagtacatatggatcggtggatcaggaatggacctgaggagcaaagcaaggactctcccaggaccagttagcgacccttcagagcttcccaagtggaactatgatggttccagcacaggt

SEQ ID NO: 36710 - DNA, 263 bp, Glycine max
  Clone ID: 700808478H1
cgctcgagccgaatcggctcgagcttttttctccttcacattctccagcccacaacatcaaggacctgatcatgtcggggaagaggccccggccaatgatcggaaagttgtcggagttgttggtctcgagaggccgcacggtggcacttttggacaccactggaagcccaagaggcccattagacatgaagatgatgcaatcaccaagaggcttaaaaaattatgatcttggtggcgttggtcttggaattgtggtggctctt

SEQ ID NO: 36711 - DNA, 262 bp, Glycine max
  Clone ID: 700808479H1
gaaaaaaaaaatattttcatttcattttcgagtaaaagtaaaacacagttcctgatcaatggcatctcgccgccgcatgttattgaaggtcataatcctcggagacagcggggttggtaaaacatcactgatgaatcagtatgtgaatcgtaaatttagtaatcagtataaggcaaccatcggtgcagattttcttaccaaggaagttcaatttgaagataggttgttcacattgcagatttgggatactgctggtcaagaa

SEQ ID NO: 36712 - DNA, 209 bp, Glycine max
  Clone ID: 700808480H1
ggtttacaatgttccgttaacgacggaggaactcaaggactaccacgatcgtccggcgccggtgagcggcggcggacagcagaagggaacgccggcgccggcgccggttgtgagcggcggggtctccaagagtaccactggaaacacgtggtgcgttgcaaacccggatgcggataaggttaagctgcaggcggctctagatttcgctt

SEQ ID NO: 36713 - DNA, 258 bp, Glycine max
  Clone ID: 700808481H1
atctatatcattgatactgtgactggtcgcatattgcatcgcatgacacaccatggttgccagggtcctgttcatgctgtatttagtgaaaactgggttgtctaccactattttaatctcagagcacacagatatgagatgtcagttgttgaggtctatgatcagtctcgagcggataacaaagatgtctggaagtttgttcttgggaagcataatcttacatcacccatctcttcttattatcgagcagaagttgtt

SEQ ID NO: 36714 - DNA, 257 bp, Glycine max
  Clone ID: 700808483H1
gaagaaacggccgagcctttctgttttcccatgcaatgaatattgtcacggggccaaaagaagacaggcatctcttgactggcctccatactgttgctgatgtttattgtggcgattgccgtgaagtgttgggttggaagtatgaaagagcttatgaagcatcccagaagtacaaggaaggaaagttcatacttgaaaagtcaaaaattgttaaggagaactggtagcattcctttctgctccccattctattcatt

SEQ ID NO: 36715 - DNA, 94 bp, Glycine max
  Clone ID: 700808484H1
agtttgctttaggactgtcggacggtggagttcatgtttttgaaccccttgaatctgaaggcaagtgagggtgtgcctccctccggattggaga

SEQ ID NO: 36716 - DNA, 256 bp, Glycine max
  Clone ID: 700808485H1
tatttttcttcctcagtagtgtcatttacgcttctcttctctgcagcaactatgcctaaccctaaggtcttcttcgacatgaccatcggcggtcaatctgctggccgcatcgtgatggagctctacgccgacgtcactccccgcaccgccgagaacttccgcgcgctttgcaccggcgaccagggcgtagggcggagcggcaagcccctccactacaagggctcgtccttccaccgcgtgatcccgagtttcatgt

SEQ ID NO: 36717 - DNA, 251 bp, Glycine max
  Clone ID: 700808487H1
tctctagtcctgttatttctcagcgcgtaaagcatggctttgttggtggagaaaaccacgagtggtcgcgagtacaaggtcaaggacctttcccaggccgacttcggccgcctcgagatcgagctggccgaggttgagatgcccggcctcatggcctgtcggaccgagttcggcccctcccagcccttcaagggggcccgcatcaccggctccctccacatgaccatccagaccgccgttctcattgagac

SEQ ID NO: 36718 - DNA, 229 bp, Glycine max
  unsure (1)..(229): unsure at all n locations
  Clone ID: 700808489H1
atggattcagctgccaccccagaaaactcatcaatatcaattggagatgatgattttgagcagagttcccaaaagtgtaaatcaggaggggatgaatatgatgaagatgaacctgatgccaaaagatggaaaattcgaagggtgaaaattgcagggtatcgtacagcaccctggacanggtagaacaaagtgagagcaaccttagnnagttcgtaagttcaaagacaac

SEQ ID NO: 36719 - DNA, 194 bp, Glycine max
  Clone ID: 700808490H1
aaagataataagatgtttagtttattcatcatatatatatatatatatatatatatacacacttgcgattttgtacatgctttagtatggattacagtttaaaagttgtatcagaacaggtaggctctctattctgtaaattgtgctaggttttataatttataatatagagtttaaatgccttttaactatcc

SEQ ID NO: 36720 - DNA, 258 bp, Glycine max
  Clone ID: 700808492H1
gctggaatgttcttttcctactgtatggtctttgctatgtcactcaccaaggccccaaattggagactcatgttgggtgttctttcaattccctctctcatttattttgcactcacgctattcttcttgcctgaatctccaagatggcttgtcaaaggccggatgctagaggccaagaaggttttgcaacgacttcgcggcagacaagatgtcgctggtgagatggctttactagttgagggtcttggagttgggcgt

SEQ ID NO: 36721 - DNA, 260 bp, Glycine max
  Clone ID: 700808493H1
tgaatctcagaattctctaaaagagatctttttctgctctttgaagaaagaagggtctttgcttgattttggagatgtctctgctctcagatctcatcaaccttaacctctccgataccaccgagaaggtgatcgcagagtacatatggatcggtggatcaggaatggacctgaggagcaaagcaaggactctcccaggaccagttagcgacccttcagagcttcccaagtggaactatgatggttccagcacaggtcaa

SEQ ID NO: 36722 - DNA, 261 bp, Glycine max
  Clone ID: 700808494H1
agaagggtaaggagggtgggagtgggaagaaggagaagaggatgaagggagagaagagttttgggagtggcggtgcgaagagtgggtccaaatttgggagtggaaagaaagggtttggtgggaaggcagggaaggatcatgatggtgaagttaaggagatgtgggacacaattgctgggggagattctgaggatgatcaagagggtctcaggaatgtggatgatgacaactttattgatgacactggagtggaacctgctt

SEQ ID NO: 36723 - DNA, 267 bp, Glycine max
  Clone ID: 700808496H1
cggctcgagcttagttccaatctaactgctcataacaaaaggaaccatatagacaccttcgtacttgtcatggcctttaagatcaacactttccttctagttcttctcttgatcctcattcccttatcttcaggcttggctgaaggcttcggggaaaacatgcatccaactcatggcttactttataaggatggtatcaagatgaactcgaggaagcttttggttcatgattttgtgttggattatgatgaggcacgacccaaccca

SEQ ID NO: 36724 - DNA, 257 bp, Glycine max
  Clone ID: 700808470H1
gaaaaaaaaaaacccttagccaacacaaccatcatggccacctctgctattcagcaatcagcattcactggtcaaactgctctgaagcagctcaatgagttcgtccgcaagaccggtggcgccggcaaaggtcgcactaacatgcgccgcaccgtcaagagtgctcctcagagcatttggtatggccctgaccgtcccaagtacttgggtccattctcggagcagattccatcatacctgaccggagaattccctgg

SEQ ID NO: 36725 - DNA, 263 bp, Glycine max
  Clone ID: 700808427H1
ctgtaataaacaccctcctccactatgcctcaaaatccaacgacacctttcacatgccccactcagacctcaaaaccatctccgacatgctccgaaagtgtccctcgccatgcaacttcctcgtcttcggcctcacccacgagaccctcctttggaaagccctcaaccacaacggaagaaccgtcttcatcgacgaaaaccggtactacgccgcgtatttcgaagaaaaacaccccgaaatcgatgcttacgacgtggcatac

SEQ ID NO: 36726 - DNA, 265 bp, Glycine max
  Clone ID: 700808430H1
tttatttggttgcaaaataagctgaacttgcattaaatatatattaatgttatctttaattggctggtagcaatattatattaatcaatgtttggcttttatagggctttacttgtcttggtgtatcgacaaggtcactgatcatttgagatctcagccactgccttcaagtattggtgggaaaagttatagctaaaggcacagtgagtgccaccttctattttgtcgttgttgagattaagatgaatttacctatgtgagtgtg

SEQ ID NO: 36727 - DNA, 268 bp, Glycine max
  Clone ID: 700808431H1
gccaagtgaaagtgagaaaaaataaaaatcaaagagcataatgtcagggatcattcacaagattggggagacccttcatgtgggagggcacaagaaggaggaggagcataagggtgagcaccatgctggagaatacaaaggggagcaccatggtgaacacagtagtgagtacaaaggagagcatcatggtgaacacaaagctggagagtaccatggtgagcacaagccagagcacaaagaggggttcctagacaaagtcaaggacaag

SEQ ID NO: 36728 - DNA, 271 bp, Glycine max
  Clone ID: 700808432H1
gtgtgattcaattgaagagatagtgtcttcaacagaggaaggggatgaatcagatgagaatgagataatatttaagcagctcaattgtttgaaacttaaatatttaggaaagctgagaaggttctacaaagggagtttaagtttcccgtccttggaggaattcacagtaaagtattgcaagaggatggaaagtttgtgtgcaggtacagtcaaaacagacaagctgttagaagtgatattcgaatggagagatcatatcccattggaaact

SEQ ID NO: 36729 - DNA, 265 bp, Glycine max
  Clone ID: 700808433H1
ggtgatcctaaacttgtcggaaagtacagaagtcacaaacgcacccggttcgttatcagatcttgccttggtggtcttaagcaatcttttattgctagtggtagtgaggattctcaggtttacatatggcacagaagctcaggggatttagtagaggcattgcctggtcattctggagcagttaactgtgtgagctggaatccagctaacccacacatgttagcttccgccagtgatgaccggacaattcggatatggggcctaa

SEQ ID NO: 36730 - DNA, 262 bp, Glycine max
  Clone ID: 700808435H1
ctcattatccacacaaaaattcttctctcaaacatatgtttctatctttcccacttttccctaatgaaaaacacccttccttaaaacactctccactatgatcactacaaaaaaacaagaacaacttcttttgttcatcatcatctttgttttggggaaaataacatttttcattccaacaacgaatgcccaagtgaaccaccacgagtgccgccaaacatgcggttcctccaaacccgtcccttacccattcggattctcc

SEQ ID NO: 36731 - DNA, 258 bp, Glycine max
  Clone ID: 700808437H1
ccacaattttgcaggacatttttcatctggtccaaagaagagtgaactgaagattggagagtcatcagcctttttcacctatgtcaaagcaacaacattgaagagcaacattgaagagagtgctcatgttgacaatagtaacaatactactactactactactactacagaagttaggatggaagatatgaatcaagcatgtactgaacagggggataatggccttaaaacacacaacaatggagaaatgtttggaaa

SEQ ID NO: 36732 - DNA, 260 bp, Glycine max
  Clone ID: 700808438H1
aaaatccctttgtttgctcacataagatttgggtttcttcaaaattatctttttttttctctcctaaaaaaaaaagagaaaactttgtttgattctttgaaggaggtttgaagaaagcaaaaggtgtagttttgttttaagtttctttgaaatggttttcatgtctgagatattgttccccgaagaaaaaattgaggaaggagagtgggagaaggagagataagaagaagagaagaatacctacccagcaagcagaatta

SEQ ID NO: 36733 - DNA, 260 bp, Glycine max
  Clone ID: 700808440H1
tgctcactggctcatcagaaaccacaaatcctcaacagcaactacaagatccagttcaaccacaatcatcatcatccaagaacttcaacatccctccaatgaaaacaacgccaaagaagcagcaagggttcaagctctatgagaggaggaacaacaacaaccatctcaagaacaccctcatgatcaacaccttggtccccaattttgcacacagctcaggattctcctcctcctcatcatcaccctgcaacaagccagag

SEQ ID NO: 36734 - DNA, 257 bp, Glycine max
  Clone ID: 700808441H1
caacattagcatcaaaaccagagtggttctagtaatccggtgctgctagaggatgggaactagtgaatggcatatcgagcgaagatctagcttcggcactgaatcccccttagcaagagaggcaggaaatgtgcctgaaactgggtcactctctattgttgtgcttggcgcttctggggatcttgctaagaagaagacatttcctgcacttttccatctataccggcagggattcttaccagcagatgaagttcaca

SEQ ID NO: 36735 - DNA, 260 bp, Glycine max
  Clone ID: 700808444H1
ctatcacccaattgcagtgttcgcttttcactctctttccgcacagcatacgtcacaaccccttcttcctcttctccaccatcgttcttcagctgatgacgacgtcttttggaccagccaccacctcagcgccgcttaaggaccacaaagttcagatcccaagcttccatggcttgaggtcttcctccgcctctgctctcccccgcaatgccctctcccttccttcatccactcgctctctctccctcatacgtgctgtt

SEQ ID NO: 36736 - DNA, 157 bp, Glycine max
  Clone ID: 700808445H1
gataacataagaagcgcactcgcaacaggggaaggaagcagagcactgcagcctcatcatttcaaggccaacacaaagcagagaaagcaaaaaaaaaaaagagggggttagagagttattaaggtgaaggaagaggaaagggtttgtttgtgtgaaa

SEQ ID NO: 36737 - DNA, 268 bp, Glycine max
  Clone ID: 700808448H1
aaaataatttttcttttaagtttgaagtttcatctgctttgcctcgtaaccctaattcagagtcctctgttactgaaacacttccatcccaaaccaatgtctgtttctcttttcggatttcctaattcataatgagtagtagaaagagaacggggatgcgggaaggttacgagtttatgccaatacgagatgttggtagatctgttggccagaaagccaagttgattggggttattcttgacttcggctttccaaagaaatccaaggg

SEQ ID NO: 36738 - DNA, 263 bp, Glycine max
  Clone ID: 700808450H1
attcaaaagtttttgaaatgttgtcaccccttcttctatttctatgcctaactcttcctttgtttttgttgtccttcttacaaataccgtaaaaccttcaagaatccaccacttccaccaggtcctagaggccttcccataatagggaatcttcatcaactagatagtccttctcttcatgagcagctatggcatctctcaaagaaatatggtcctttattttcccttcaatttggattaaggccagccatagttgtttcctc

SEQ ID NO: 36739 - DNA, 68 bp, Glycine max
  Clone ID: 700808451H1
tgggacattcatgggctgatttggctgacaattaggcgactgaaaatgtgggaacgtctaaatacaca

SEQ ID NO: 36740 - DNA, 255 bp, Glycine max
  Clone ID: 700808453H1
ccacgactcacaagagcttgcggggcccacgtgcggggatgatcttttaccggaagggccccaagccgccgaagaaggggcagccggagaacgcggtttatgatttcgaggacaagattaacttcgcggtgttcccttcgctgcagggtgggccccacaaccaccagatcggtgctctcgccgtggcgctgaagcaggccgcgtcgcccgggtttaaggcctacgcgaacaggttaaggcgaacgcgttgcgctt

SEQ ID NO: 36741 - DNA, 257 bp, Glycine max
  Clone ID: 700808454H1
cttctccttttgtactctcattcacattcttataggctaattaacatacactctcttccaaagttgagtactttgccaaaaaaaaaaaaaggtttccccttggggaaggaaaccccaaggagggtttttggaccatttggagcgttggcatccctggtttcctccaattgggggcccccccaaaagtggttcaaaaggggtccctttccctccagggatgtcggggaagttcatccccggggttcgggaccggtttt

SEQ ID NO: 36742 - DNA, 256 bp, Glycine max
  Clone ID: 700808457H1
tgtgaatcgggtgaatgatctctggggacaacctcaattcaatggccttgacctggagtttgatcaacctcttagagagcttggcttccctggtgtgcctcataaatcttcagtatttatcgtacctacttctgcctgccttgttgaactgatagagactcctttccttgttgtcacgcttagtgagattgagattgttaatcttgagagagttggacttgggcagaaaaactttgatatgacagtagtatttaag

SEQ ID NO: 36743 - DNA, 250 bp, Glycine max
  Clone ID: 700808458H1
aagctattccccaacacaattgtctccattcatgcatatcgcgatcggatttatgttggtgatgtccaagagtccttccattattgcaagtataggcgtgatgaaaaccaactttacatatttgctgatgattgtgttccaaggtggcttactgcatcataccacatagattttgacaccatggcaggtgcagacaagtttggaaatatctattttgtgcggttgccacaggatgtttcagatgagatag

SEQ ID NO: 36744 - DNA, 257 bp, Glycine max
  Clone ID: 700808459H1
ggaaatctgtgatactcagatatgcatttcctataaagtgcactgaagttattctagctgatgataatgagactattcttgagattcgagcagagtatgatccttcaaagaagaccaagcctaagggggttctccattgggttgctcaaccttctcctggagttgatccattaaaggtggaagtcagattgtttgagaggctgttcctattagagaatcccgctgaacttgacaactggcttggcgatttaaaccca

SEQ ID NO: 36745 - DNA, 260 bp, Glycine max
  Clone ID: 700808461H1
gtgggtctcaagcttcatgtgtctctttgctttcatgggtctaagaaaccaaatatccccctacctaaatgggtatctcagattggtgaatctcaacccagtattttcttcacagataggtcaggacagcattataaagaatgcctgtccatggcagttgataatcttcctgttcttgatgggaagactccagtccaagtgtaccagagtttctgtgagagcttcaagtcttcattctctccattcatgggctctacaat

SEQ ID NO: 36746 - DNA, 262 bp, Glycine max
  Clone ID: 700808462H1
tgacgacaaaacggggaagatcgtcgatgctcgcttcaaaaccttcggttgtggatccgccattgcttcttcctccgtcgctactgaatgggtgaagggaaagcaaatggaggaagttttgaccattaaaaacactgaaattgcaaagcatctttcacttccaccagtcaagcttcactgcagcatgcttgctgaggatgctataaaagcagctgttaaagattatgaagctaagcgtgcctcagcatctgctggtggacag

SEQ ID NO: 36747 - DNA, 267 bp, Glycine max
  Clone ID: 700808464H1
caaggccattaatctgtggtctgcaattcagacaagagaggattggttagacgttagcttcacggatggagttcatctatcagcagagggaagcaaggtagtggtgaaggaaatattaaaggttctaagagaagtagattggaaacctagtctgcattggatgtcaatgccaactgaatatgcagaagattcaccatattatcctccaagtcctgatggaacaacaaccataaatgtgtctcatattatctcccgaaggtgtttgca

SEQ ID NO: 36748 - DNA, 186 bp, Glycine max
  unsure (1)..(186): unsure at all n locations
  Clone ID: 700808467H1
gtctggtgccagtttctagtacatttccagtgactcacgaacccacagttgagtattggacaccaacatttggaggaacttacagatagctagcttcattaattaattataatgggtggcaaaaagtggcacggaaggagtactctcagcgaacancacacaagnncaacaacgaacatttgcatg

SEQ ID NO: 36749 - DNA, 257 bp, Glycine max
  Clone ID: 700808468H1
aacattgaaaaggtatccggcggaattgtcactatcttcattggtatgcttatcgggtgctttgcaagccagcgtggtggcaatagtagcgactcgtcattctgggcttgtggcatgggccttaggttgggacttcaggctctatggccctctctacacgggaatagttacctctggaattacatattatgcccaaggattgatattgcaaaccagaggcccagtatttttaactgccttcaatcccctttgcatgg

SEQ ID NO: 36750 - DNA, 258 bp, Glycine max
  Clone ID: 700808426H1
ccgtggcttcaagaagagaatctcaatggaggcccaggagctgaagcgcgtgttccagatgttcgaccgcaacggcgacgggagaataacgaagaaggagctgaacgactcgctggagaacctgggcatcttcatctctgacaaggacctgagccaaatgatccagaggatcgacgtcaacggcgacggttgcgtggacatggacgagtttggggagctgtatcagaccataatggacgagcgcgacaatgaggagga

SEQ ID NO: 36751 - DNA, 248 bp, Glycine max
  Clone ID: 700808391H1
gttgctgcagagtgaggcgttcgattaactttggcgatcacagaagagaagggaatggagttttctcaagatgattttgatcggttactgttattcgaacacacgcgaaagactgctgaagcaactacgcagagaatcctcaagacgctgataatctgaccaggtgggggggagctttgatcgagttgtcgtcattccaagctcctagggatgccaagcgatgattgatgatgccttcgaagctggag

SEQ ID NO: 36752 - DNA, 150 bp, Glycine max
  Clone ID: 700808392H1
gcgaggagctgaccgtggaggagcgtaactcctctccgtcgcctacaagatcgtgatcggcgctcgccgcgcctcctggcgcatcatctcctcaatcgagcagaaggaggagatccgggcaagaggaccacgtcgcgtcatccgcgacta

SEQ ID NO: 36753 - DNA, 251 bp, Glycine max
  Clone ID: 700808393H1
ggagtcgcgagtgctgtcacgcgccggaacttgttctccctccctcacctccgcaagctgccgccggaggtcggcgccggcccctccctcgtcgccgtgaaggccgtgggctccgtggcggaggcgggaacctgatttgggggaggcaactgcgcccagagctctgctcgccggcgctgaagaaggaggccgtcctcctccggccatgcctcgccgcgcctcctcgccggccgagggagtgattccgccgg

SEQ ID NO: 36754 - DNA, 246 bp, Glycine max
  Clone ID: 700808395H1
atttgtaacgacaaagaagcagaaggtgtagtaatactgagtggtcaaattaaggatcgggattcaggaatttccattctggacacacagaagaacagaaagaaactccttttaattttcaatttcaagtcaagatcgatctgacatcatagaaaatgaccatggatgtcgttcagctgcagatgagctgcgcgaacacaagccgctatgtttcaacaggtttttggatgatcagtcgccagttca

SEQ ID NO: 36755 - DNA, 259 bp, Glycine max
  Clone ID: 700808396H1
tgaaccctaattatacagaatttaaattcccacagattaaagcacatccatggcacaagatcttccataagcgcatgcctccagaggctgttgatttggtatcaagactactacaatactccctacttgcggtgcacagctttagatgccttgacgcatcctttctttgacgaacttcgtgatccaaattctcgcttgccaaatggccgattccttccaccactatttaatttcaaatcgcataactgaaaggtgtcca

SEQ ID NO: 36756 - DNA, 269 bp, Glycine max
  Clone ID: 700808402H1
gagcgtgccacgtgcccccactgtcaccgtccagacccaattttccgtccaagttcattttcccggaaaatcttcttggaagattcccctgttttttccttgcaattgggcactgtaaaaagggatttttttttttttattttcagtgtggagcatctgggaaaaaatggcagcaccaacgccgattcacaaaactgaagaggaatggaaggtcattctctcccccgagcagtttcggatccttcgccagaaaggaactgaattgaagg

SEQ ID NO: 36757 - DNA, 266 bp, Glycine max
  Clone ID: 700808403H1
agattctgtagagaagaagagcaatggcgtccaacgattccgattcgcagatgaagatcgtacatggcgatgctggttacatacttgaagacgttcctcacttcgccgactatattccaaatcttcctacatatccgaatccgcttcgatccaatcctgcttactcggttgttaagcagtatttcgtgcacatggacgacactgttcctcagaaggttgttgttcacaaggatagtccaagaggtgtacattttcgacgtgcaggg

SEQ ID NO: 36758 - DNA, 174 bp, Glycine max
  Clone ID: 700808405H1
ctgcgactgcctccaggggttccaggtctgccactcgctcggcggcggaacgggctccgggatggggacgcttcttatttccaagatcagagaggagtatcctgacaggatgatgcttactttctccgtttttaccttcgcccaagtggtctccgacacttgttgttacgagcc

SEQ ID NO: 36759 - DNA, 262 bp, Glycine max
  Clone ID: 700808407H1
gagtcccttgggtatctcaggtttggctcatttgtttggcatcttagccttcatcctcttgctcgtttggttgttgcattaccgtgaaggaattgactatgattcagacaatggatttcgcgtcttcaatgctcaccctttattgatgtactcgtgcttcattttccttgctggagaagtggctttttggtttcgttgtgttcatgcttcaaggagcttcagctactacaagagctaaagtgctaccatggcacaaagttgg

SEQ ID NO: 36760 - DNA, 261 bp, Glycine max
  Clone ID: 700808408H1
ggaacacaggaaaagcctccaaaaccaacccaccgttggcgcgatggctttcccctccaaaggcgatgacgagcaggttctggtgcagcgtaaatcgaatgcgagagttttgacactaaacaggactaaacagttgaatgccctctctttttatatggtttctcggctacttgaaattttttctgaagatgagaaagattctgatattaaattggttgtcgtgaagggaaatggaagggctttttgtgctggtggtgatgt

SEQ ID NO: 36761 - DNA, 258 bp, Glycine max
  Clone ID: 700808410H1
atcgaagaagcacttgctcaccgtcgagaagaagcagattaaggccattctcgactccgccgacgcgcctttcttctgttccacgcgcttccctctccagatccgcgccggttccggatcctcgcatttgctcgaatcgggaaccgttttacctatcaagattcatagggatgaagagagtgggaagattttgaatttggtgtttgtttgggctgaggatggaatgaaattgaaggtggatgtgcctgttgttttcga

SEQ ID NO: 36762 - DNA, 265 bp, Glycine max
  Clone ID: 700808411H1
tgatgtacactcccaacgccgattccggcacggcgccgcatccgcgccccaccatcacgctccctccgcgtccctccgccgaggccttcttctctgccgccggcggcgccagccccggccccatgaccctcgtctccagcttcttcggctccgatgccgctgccgactgccgctccttctcgcagctcctcgccggcgctatggcctccccaatggccttctccgccgccgcagcatccgccgccgacaactccggcaaggacga

SEQ ID NO: 36763 - DNA, 267 bp, Glycine max
  Clone ID: 700808412H1
tcaccacctacttccaacgcgctcaatttgaagcatgtttttcgcccgcgacttggcgcgtcaagccgaatctctgtcaaatgcgcttttgggtttgagccggtgagctacggagtcggctccagccgagccgattggcagagctcctgcgccatcttagccagcaaggtcgtttctcaggaacaaccctccgctgaccagaacagcggcaccaccgaccacatcgccgccgtcaacggtcacaaagccgccgtcagcgacttccaa

SEQ ID NO: 36764 - DNA, 239 bp, Glycine max
  Clone ID: 700808414H1
gactaacaatacactgaccattgttgacagtggtattggcatgaccaaagctgatttggtgaacaacttgggtacaattgctagatctggtaccaaggaattcatggaagccttggctgctggtgctgatgttagtatgattggacagtttggtgtggggttctactctgcatatcttgttgctgagaaggtcattgttacaaccaaacacaatgatgatgaccagtatgtttgggaat

SEQ ID NO: 36765 - DNA, 270 bp, Glycine max
  Clone ID: 700808415H1
ctgcaacagcgtgtagtaccatcatgttcgtgagtagggccggaagctctgcttagagtgtcttgattctgctatcatggatactaatgaatgccaaccccttcatgctgatatacaaagattttatgaaagcctaaatatgaaactggaccaacaaattccacttctattggttgaaagacaagcactgaatgaagcaagagaaggagagaagaatggccactatcacatgccggaaaccagagggctctgcctctcagaggagctcag

SEQ ID NO: 36766 - DNA, 267 bp, Glycine max
  Clone ID: 700808416H1
atgcataatgaatcattaataatagagacagacccggcatcggtggcacacaatacgtgagttctggtccctcttcttctagtaaacctcatccatcatcatccatataaactcacactcctaccaccacctctatcacaatctctctgttcatcaccaagaacaaaacaaaaaagaagaagaaagaaatatggctggaggatcatacgaggaagccattgcagcgttgacgaagcttctcagcgagaaagccgacctgggtggtgt

SEQ ID NO: 36767 - DNA, 268 bp, Glycine max
  Clone ID: 700808417H1
atcaaaggagaggaaaagtactgtgccacttcgcttgaatccatgattgatttcagcacttccaagcttggaaaaaatgttgaggttgtgtccacggaagtagtggaggacaaggaaacgggattgcagaaatacaccgtagcaccgggagtgaacaagttatcaggggacaaggctgttgtgtgccacaagcagaactacccttatgctgttttttactgtcacaaaactgagaccacaagagcttactctgtgcctttggagggtg

SEQ ID NO: 36768 - DNA, 266 bp, Glycine max
  Clone ID: 700808418H1
gccttcattgagtttacagacgaagaaggtgcaagggctgctttgaacctgtctggaaccatgcttggatattacccgttgagagtgctaccttcaaaaactgctattgcccctgttaatccaacatttttgcccaggtctgaagatgaaagggagatgtgttcaagaacaatttattgcacaaatattgacaagaagcttactcaagccgatgtcaaacacttctttgaatctatttgtggagaggttcaacggttgaggcttct

SEQ ID NO: 36769 - DNA, 263 bp, Glycine max
  Clone ID: 700808419H1
ctcgagccgctcgagccgattcggctcgagatttctgacttgttatcacaaaaagaatcacctgaacaaactctgcaacctgatgatgcgtgcaatgtggaaagccagtcaaatgatcaaatatctgcatcgaccagcatggaggatatctctcattcatcggaaaatggaatttctgatcttggggctgagaatactgcacctgctaaagaagtttggaaagctccaaaggccggagaaagggcgcaaaaagaaatcattga

SEQ ID NO: 36770 - DNA, 261 bp, Glycine max
  Clone ID: 700808421H1
gccggatcctcatcgaaccaacgctcttctcaattttggtgcctatagggacgccaggttgaactgtcttggaaattgaggacgaagtgaatgcgatagaggcgcaacgaacagagttggaggagaataggatgttgcaggatgatgagaaagggaaatcatagatggtgcttgaaattattggctgacaaaaaacaagtggttgcaacatgcctgagaatatacatgatgaaatgaggcctaatttattgatgcgacaca

SEQ ID NO: 36771 - DNA, 259 bp, Glycine max
  Clone ID: 700808422H1
ctagctccagaaaattaggatctgcttcagatctagtgtttccctgtcccaaatcacgagtccattgagtttgattttgtggatgaaaagcatagatagggcttttgcaaaactctccaatgtttcttgaaattatatgaccatgcgtcgaattcgtatgctgcactccttctccgtcgtgttcctctactggttctacgttttctcatgaactccctcttaaatccgtgattaattagatctatctccttagttaatc

SEQ ID NO: 36772 - DNA, 260 bp, Glycine max
  Clone ID: 700808423H1
cggctcgagcggctcgagatcgaatcgtgcgatacgtatcggtagaagctggtatcgtatcgaatcgtgcgatacgtatcgtgaatcgtacgatactaactaccgtggtctgaaccattttaatttgtggatcaaataacaaggctcctcggttagaattcctgatcggtcatggctgattttcagacctctacccacagagccaagtggattttctctcctcaacagctggttgagaaatatagagctgccaatcagag

SEQ ID NO: 36773 - DNA, 261 bp, Glycine max
  Clone ID: 700808424H1
cacctttgttcactcttcttctcttgcggctagggttttagcgcacttcttctagatttaaggaagatgggtaaggaaaaggttcacatcagtattgtggtcattggccatgtcgactctgggaaatccactaccactggtcacctgatttacaagcttggaggcattgacaagcgtgttattgagaggtttgagaaggaagctgctgagatgaacaagaggtctttcaagtatgcctgggtgctggacaaacttaaggct

SEQ ID NO: 36774 - DNA, 254 bp, Glycine max
  Clone ID: 700808425H1
ctctctcttgcaaaacctaattttcatttcttccctcaaatttcaaaatgcgtgagatccttcacatccagggtggccaatgcggcaaccagatcggcgccaagttctgggaggtggtttgcgcggagcacgggatcgaccctaccggaaggtacggtggggactcggagttgcagctcgagaggatcaatgtctactacaacgaggccagttgcggtcggttcgtgccgcgcgcggttctcatggacctcgaa

SEQ ID NO: 36775 - DNA, 179 bp, Glycine max
  Clone ID: 700808390H1
tgaaacctccattctcagatcaagcttgcaccaaaatacatacatagctatggacaataatactagtgcctgtgcctaccccaacttgagtcagaagaagcatcttcagagcacaaatcagaaactcaaacatcaaagaaaaggaaaatggttgagaaaacagttgtgactgagggtag

SEQ ID NO: 36776 - DNA, 251 bp, Glycine max
  Clone ID: 700808362H1
catttgtgcccatctctggtttcgagggtgacaacatgattgagaggtccaccaaccttgactggtacaagggaccaactctcctgaggctcttgaccaaatcaatgagcccaagaggccctcagacaagccactcaggctccattgcaggatgtctacaaattggtggtattggtaccgtgccagtgggacgtgttgagactggtgtcgtgaagcccgtatggtggtgacttttggtccactgggctgac

SEQ ID NO: 36777 - DNA, 256 bp, Glycine max
  Clone ID: 700808363H1
gtttagttgctgaaagggctgtgctgcaaactttagaaacgtctcctggaaattatttgcaggctttgaaaagtattccaaggctctgagaatgttgtatgttcatagttaccaaagctatttatggaaccatgctagcaagtaagagggtgcaaaaatatggaactgagaatgtagtattaggggacttggtatattgtaaagaaattctactggtacggtacagatttggtgggatctgatatgctgaagactg

SEQ ID NO: 36778 - DNA, 262 bp, Glycine max
  Clone ID: 700808365H1
agaaaccttctctgatcagggacaaagggaacaggtggagtcaaatctactgaggtgaatggttctgctgagaaggcaaagggaattcaggaagaaaagttgtgggagataaggtttctcttgatgactacccagtaaaagaaaatctcaaggagataaaaatttcaactcaatgatagttgaatctaatgtttccaaagttaggacagaaccaaacactgaagagctgcctaagaaggctaatcaggaggtaactctctga

SEQ ID NO: 36779 - DNA, 260 bp, Glycine max
  Clone ID: 700808366H1
gggagtgagtcactcttcttgcataacccagatctgacaatatgcgaagaactggcttgttacatttgttatgccttgtcattgccttagtaagtgtgcaagcagaagatgcgtataagtattacacatggacggtgacttatggaactatttctccattgggtagtcccagcaggttattcttatcaatggtcagtttcctgggcctagacttgacttggtgactatgagatgtaattctcaacctatcaacaagctgg

SEQ ID NO: 36780 - DNA, 260 bp, Glycine max
  Clone ID: 700808367H1
caaaaggagcatcgagtaggtttcctactcccttctcatcgttggcaagatgagtgccatgaaattttgccgtgaatgcaataacattctgtaccctaaggaagacagagaccagaaagttcttctcttcgcttgccgcaactggaccatcaggaggttgctgataacttctgtgtgtataggaatgagatacatcactctgttggagagcgcactcaggtgttgcaggatgtcgctgcagatccacgcttcctcgaacc

SEQ ID NO: 36781 - DNA, 257 bp, Glycine max
  Clone ID: 700808368H1
gtcgcgctgatgggcaaaactgtggcaactttctcactgatcggccatctaccaaggttcatgctgccccgggtggtggatcttcttgcattacctctttggtggtcctccagggaactgattcatactaccatgtgatgtatcatgtgtaaaatggatagtgtgcattgtgtttagaccagtggactttgtttcttgttcaattgaatctcttgacaatttggtgtggcttgatggccaactaagctgattcatag

SEQ ID NO: 36782 - DNA, 220 bp, Glycine max
  unsure (1)..(220): unsure at all n locations
  Clone ID: 700808369H1
ngatgttgagataataaaataagttatcttgttcatattggattgttatcctgtataatttctgatgttgacattgtctacagtttgacaatgnntgtgcatancngttgaaagtgcttgatcgtctttgctcttgtccgcttgcgcatttgctggcttttctacatttaattttttccttgacacgatattaatgttatgctacctgttcgttttagtt

SEQ ID NO: 36783 - DNA, 255 bp, Glycine max
  Clone ID: 700808370H1
gcctcacagaggttaggaagaatggcacctgtgctggttgaggccagatggtaagacacaagtaaccgtcgagtactacaatgacaatggtgccatggttccagttcgtgtccacactgtcctaatttccacccaacatgatgagactgtgagcaatgatcaaattgctgcggaccttaaagagcatgttatcaagcctgtcattcctgagaagtaccttgatgagaagaccatcttccacctaacccttctggc

SEQ ID NO: 36784 - DNA, 252 bp, Glycine max
  Clone ID: 700808371H1
aatcgttcaaaaccaatctatctatctatttggtataagcatggagctttgttggcaaaaatccatccatggctcttaaagaagcttggaggattttgtgtgagagggttctcacccttcacactccacctcctacagtttgcttatgctttagccattggtttctctaatcaatcaccacaaaagggtatacatggaggaacataattctctgagtgggctgaagcagagaagctatggccacatcttagc

SEQ ID NO: 36785 - DNA, 164 bp, Glycine max
  Clone ID: 700808372H1
aacaaaatcatatcgagaaatttgttacacagattcctcgtaaggtgaggattaccacaactagaacagttctatgtggtaatctcaacttacgaggaatctgtgtaacaaaatcagtatcgagaaattgttaaaggggatgaaagaaagctgtgtttgataac

SEQ ID NO: 36786 - DNA, 198 bp, Glycine max
  Clone ID: 700808374H1
ctacgaccaggaatgaaatcctcaaaacggcggcgtttgaacgaaacgcatgatcgcattcgcaggtcacttcgcttccgccttctcctcatctcgtcgttgcctgagaacactgcggtaccttttctcgttttgttaggtaagtttcttcacattcgttatcgtatcttttcgaatttcaatcttaagcgattagtc

SEQ ID NO: 36787 - DNA, 250 bp, Glycine max
  Clone ID: 700808375H1
attttctagggttttattcattttccgatggttctgcaatgttgagtaccgttgctttgtcggtgggctcgcttgggcactgacgaccatgccctcgagagagccttctctcagtacggcgaaatcgttgaaacgaagattatcaacgatcgtgagacggcagatccaggggttttggatttgtgaccttcgcctcggagcagtccatgaaagatgcgatcggagcgatgaatggtcagaacttggacgg

SEQ ID NO: 36788 - DNA, 251 bp, Glycine max
  Clone ID: 700808376H1
atttcacctgataatgatgttgctccgagtgtccaatgatccaaagaaatgaagtttgcttcccctcaagagctgctcaggtcaaactcctctcccaaaggaaaggaatgaacagcctgtgaatgttcatagagttgaaactcttgcaatgaatggctcacatctgtacctcaggtacctggaggagctgtcagttctagtaacttagttgcctctaccagaaagcgtgccttctgtgacgggccagacac

SEQ ID NO: 36789 - DNA, 245 bp, Glycine max
  Clone ID: 700808377H1
gagcaacatcaagctttatgtcaggagggtgttataatggacaattgtgaggagctcattcctgagtaccttggatttgtgaaggtgttgttgactccgatgacttgccgctcaacatctctcgtgagatgctgcaacaaaacaagatctcgaggtgacaggaagaatctctgaagaagtcattgagatgttcaatgaaattgcggagaactagaagttacaaaagttctagatgcttttcgaga

SEQ ID NO: 36790 - DNA, 251 bp, Glycine max
  Clone ID: 700808378H1
tgcttctctctccataataacaaaaccaacaccctctttctctttctctcttcttcatttccaatgctgcagcaatctgcaacttcataggcactacgacagacccaattgaattcccgagaaaaattgaagagaaaaaaccgtaaagttaggatcttttgtgtgatttcgatgggtgcgtacagagcggacgatgattacgactaacttgttcaagtggtgttgatcggagactcagggttgggaaatcg

SEQ ID NO: 36791 - DNA, 252 bp, Glycine max
  Clone ID: 700808379H1
gtttgacagcacagcactcggaaatttctggcatctctgcgttttcccctattttttctgaatcccacagaatggcatccaacaggggtcaaggtggaattcagcagttgttggctgctgaacaagaggcacaacggattgtgaatgctgcaaaaaatgaaaattggctaggttgaaacaggccaaggagaagctgaaaaaggagattgctgaataccgactcaactagaggctgagttcaaaagaagtgtc

SEQ ID NO: 36792 - DNA, 258 bp, Glycine max
  Clone ID: 700808380H1
cgttcatggatccagtaagcgtgtggggtaacacgcccttggcgacggtggatcccgagatccatgacctcatcgagaaggagaagcgccgtcaatgccgcggaatcgagctcatcgcctccgagaacttcacctccttcgccgtcatcgaggccctcggaacggtctccacgaacaaatactccgagggcatgccgggcaaccgctactacggcggcaatgaataatcgaccagatcgaaaactctgccgctcagcg

SEQ ID NO: 36793 - DNA, 261 bp, Glycine max
  Clone ID: 700808381H1
gttcgcaacacgatcactattctgcgacgatggtggcacattcgagttcttggtggaagggcactcgtcgcgatctcgccctacacttctccgccatcggcatcgccgtcgctatcggcgtctccgtcctcggcgccgcctgggggatctacatcaccggaagcagcttgatcggcgctgcaatcagggctcttcgaatcacttccaaaaatctcattagtgtaatcttctgtgaagctgttgctataatggtgttattgt

SEQ ID NO: 36794 - DNA, 255 bp, Glycine max
  unsure (1)..(255): unsure at all n locations
  Clone ID: 700808382H1
gagaatgtctagctgtgggtgtggaagcagctgcaactgtggcagcaactgcggttgcaacaagtactcttttgacttgagttacgttgagaagacaaccacagagactctagttttgggtgctgnggcgtgaaggcccaattggagggtgctgaaatgggtgttgcatctgagaacggtggctgcaactgtggatcaagctgcacctgtgacccatgcaactgcagtaaggtcaagatgtataccttgaagcag

SEQ ID NO: 36795 - DNA, 250 bp, Glycine max
  Clone ID: 700808383H1
gcaagttcgacgctgagattgtttactctctctaaaacgccatcacgtgactcacatgtgcggcgcgccggtggtgctcaacatgttaaccaacgcgaactccccgttggagaaaccggttcagatcctcaccgccggaggccgcctcctgcggcggtgctctcagaacagaggctttggggtttgtcgtgagtcacgggtatggtttgactgagaccggagattggtggtgtcatgcgctggaaggggg

SEQ ID NO: 36796 - DNA, 248 bp, Glycine max
  Clone ID: 700808385H1
gcacggccatgctaagtgtcactttgttgggatgatatttcactgccaagaagcttgaagatattgtgccctcttcccacaactgtgatgttccccatgtgaatcgtactgattaccagttgattgacattgctgaggatggattcttagcttgcttactgaaaatgggaacaccaaggatgacctgaagttacctacagatgagagtctgcttactcagataaaggatgggtttgctgaggtaagga

SEQ ID NO: 36797 - DNA, 253 bp, Glycine max
  Clone ID: 700808386H1
gagagacagtggaaagaaaggaaagggatgacgctgggtctgatcaatgcgaatcctgtggttcacgccaagaaagagcgaatcgctcgttctgatgatcctcacgccgatgacgccgttgatctctcgacatctatgatttcgtgagggatattcgggatccgaacatccttattccctggaacagctcagtgttctctccgaggaatctatctccgttgacgacaaattaggccgaatctgataactttac

SEQ ID NO: 36798 - DNA, 237 bp, Glycine max
  Clone ID: 700808387H1
tgacagtgtaaatgcaattgagtttggtagaataagaattgtcttccaaagttgaaaagcttcatgaggaagttgacattcaagagcttggtgaaatatctgctgaagctcaacaatatatttttaatttgcaatctcgtttgtcttctatgaaaaaggagctgcatgaagtaaagaggaaaagtgctgctcttcaaatgcaacagtttgttggagaagaaagaatgatttattgga

SEQ ID NO: 36799 - DNA, 241 bp, Glycine max
  Clone ID: 700808388H1
aacagtcaaaactttcatctttgtcatccacttaacccaggtgtaaaaatgtcagcagtgaacatgtccactatgagacttcaagagcttccttgtctggaacaacaccagctaggagatcatgtgctcttacaaagagtccatcatctttgaggtctgtgaagaatgtgtctaaagtgtttggattgaaatcatcttcctttagagtgtcagcaatggcggtataagggagctgattgga

SEQ ID NO: 36800 - DNA, 237 bp, Glycine max
  Clone ID: 700808389H1
actcgagccgattcggctcgagaaagcccagaaagaagtatttgaaagctaacaaacaggatataactgttgccatgatgaagcttacccattactcttgcgaaaattcatttcagataaagcaaagtctcatcactggttgagattgttttgcatatgaacttgaatactattccttgaagaggcaggaacagaatttcaaaaatttactccaactcgtgaaagaagcatttttta

SEQ ID NO: 36801 - DNA, 254 bp, Glycine max
  Clone ID: 700808361H1
atatgctcatctacttactgttggaggggcctaaatgatgctccacataaaactcagatatcatgccgcactgaccgtgctggacttattgattctgctccttggataagaattccatatccatttcaatggggagcaccttcatttgatgcaggtgaagcctttgccatgatgatggcatcttttgttgctcttgtggagtccagtggagctttcattgctgcatataggtatgcaagtgcaagccattgcca

SEQ ID NO: 36802 - DNA, 262 bp, Glycine max
  Clone ID: 700808334H1
atctggatcgaggttctcgtaattggctacatagagttccagaggaacgcagagctggacccagaaaagaggctgtacccaggtggcagttacttcgacccactgggcctggcctcagatccagagaagaaagccacccttcaattggcggagatcaagcacgcccgtctcgcatggtgggcttctgggctttgcagtccaagctgccgccactggcaagggcccgctcaacaactgggccacccacttgaggacccatcca

SEQ ID NO: 36803 - DNA, 256 bp, Glycine max
  Clone ID: 700808335H1
gtggaagcatatagatccatgttccatgaattgcggaaacttcaggtcgaagaagagatgcttatgcgcaagatgcatgaagttatgtcagctcatggtcccactaaaagtgtagatgaagaagaatcagtagcacctgaagcagtactagcaactagagaaggggagcgaatggcaagacaatttctgaagctcactggtagaggaggcacttgggaggcatcagagacgagacagagacgatcaaggagttccc

SEQ ID NO: 36804 - DNA, 261 bp, Glycine max
  Clone ID: 700808336H1
cgccaccgttttcacccactccacgccaccgtcgtggctcacccccgccaaaaccaccctcccaattccatttccatttttaccccttccagcgctccgaattccaattcgccccaatcgcagttcggttctcgatctccaagaaacggagtcctaaaaatagttcttttagggtttctctgtctcggtggttttgggattgaaacttttgttccgtttaagaatgggggatcgaggtgaagacgaggattgcaaatggcg

SEQ ID NO: 36805 - DNA, 264 bp, Glycine max
  unsure (1)..(264): unsure at all n locations
  Clone ID: 700808337H1
tctcgaccgattcggctcgangaacacatcacaccttcaaacccgagtcctaaccctagaagttagataaaaacccacaacacacaatcagtactaccaactagggtttttgtcatggctagtttgcaaactaggttttcttgatggccctctgtgcctgctggctcttggtgcaaccattattccaatggcacaaggggaagtgtcatgtggccaagttgtgagtaacctgaccccatgcatctcctagtgctatatggtgga

SEQ ID NO: 36806 - DNA, 258 bp, Glycine max
  unsure (1)..(258): unsure at all n locations
  Clone ID: 700808338H1
gtcggccgaatcggctcgagcgaagggtttcaacggtttccaaagtttgtagcttcggttgctggcgtgggaaagttctcatctttgaagatgaagtctcaggttctcagatcttggtcctcttcttctgagttcagggtataaagcttgtctttcatgtaaatagaggttacccaatagggtcaattcgcgcttgagagcttcaactggggctcagatgagctttanctagggacagttcagaatggtgggaaaagg

SEQ ID NO: 36807 - DNA, 261 bp, Glycine max
  Clone ID: 700808339H1
cgggaaccagatttccaccattctgagtaacttcacacaccatataacagaaaatgaggtggggcttgtggcaacttgcggcaatcaatccctcgccgtcttgctcacggtaataataaagctgttgcttgtcgatattttgcctcagatgctgagctgaaaaagacagtcctttatgacttccatgttgctaatggagggaagatggtgccatttgctggatggagcagccaatccaatacaaggatcaattatggactc

SEQ ID NO: 36808 - DNA, 240 bp, Glycine max
  Clone ID: 700808340H1
tagcttcagctgatagtgtggcgcactcttacatggatgacgtcatcaccctcgttttgggaagcttcattctcgccctcgccgtcgaacgctacaacgttcaccggagattggccttgaatgtaacactgctgttttgtggcgacccggttaatccagcgctgttactgctggggctgtgcgcgacgatattcttcgtgagcatgtggctgcacaacgtggcgacggcggtgatgatga

SEQ ID NO: 36809 - DNA, 259 bp, Glycine max
  Clone ID: 700808341H1
gttgatgttgacaattctcccagctttgttgccatcatgtcagtcctattgagtatgggcatgttttgctgattccgcgcattttcgagtgtttgcctcaaaggattgaccgtgagagcttcctccttgcacttcacatggcagttgaagctgataatccatattttcgattgggttacaacagtttgggcgtttgcaaccattaaccatcttccaccttccaggcttattatttggctctgccttcccaattgagaag

SEQ ID NO: 36810 - DNA, 191 bp, Glycine max
  Clone ID: 700808342H1
ctcaacctgaatgcaatgaacaagttggaggtgttgaagccatggactctctcattctcattcgggcgagcactgcaacaaagcacactcaagacatggggtggaaagaaggagaatgtcgccaaagctcaagaggcatttctggcaagatgcaaggccattctgatgctactcggggaatatgttgtgga

SEQ ID NO: 36811 - DNA, 256 bp, Glycine max
  Clone ID: 700808343H1
cgcagaagaagaaaactgaagcattttctattgaaagttattgatgaagttgccagcatgtaatttgaagttgaagcactagcatatttggcgttttgaaaaggataaaaatgtgccccttgattaatatatgcagttcaatagtgtctgagtgagcgaattgaagacgttggaaatggttctatgtactatttggcttgtatgcttgtattacaacgctaatagaatattaaatgagcttgcggagaaaaataaa

SEQ ID NO: 36812 - DNA, 230 bp, Glycine max
  Clone ID: 700808344H1
acgcgtccttcttcttactcttgcttcccctgttttttcttctgtttttcactggcaacaacaacagcacatacaaacaaaccatgaacctttcgtggctgcggctgttttgttgttgttgttggtggggtggtggttgttgatgccaggtttgtggtggagagagcagtataactgttctgtccccgcataagctgaacgcgaacgctgatggcgccatcggtaacttc

SEQ ID NO: 36813 - DNA, 245 bp, Glycine max
  Clone ID: 700808345H1
gtgcagagtagagcagcagagaagagagaaaacggcactgcagccgtagaaggaaaaccgaccatggtgcacgtctccttttacaggactatggtaagacgtttaagaagccccgccgtccgtacgagaggagcgtctagacgcggagctgaagctggtgggggatacggctccgtgcaaaaggggctgtggatggtgcatacgcgctcagccgctccgcaacaaccgcggaatctctaccctcg

SEQ ID NO: 36814 - DNA, 259 bp, Glycine max
  unsure (1)..(259): unsure at all n locations
  Clone ID: 700808346H1
nagtaaattcctatcatttcctatatcatctaaaccttcttttaacaaaaaccaaaatgatgaacaagcaatctgtcttgcccttctcactagcattgctagtttcatttttgaattgcaccaccaccttagcccaattatcaccagcttctgcccctctcaaaccacccaacctgctcctaccataccagctgctgctcctcaacaaccattggttccttcattgccacaatcaccaagtgattccaccctgacagta

SEQ ID NO: 36815 - DNA, 260 bp, Glycine max
  Clone ID: 700808347H1
gaagtgaggttgtctttcaaagatggaagaggagacatttgaaaaaccattgttgaagaaaaactatcatgagaattgtcctggttgtaaggtggatcaagccaaggagctcaaaaaggatgtttcctttagaaatctttcttatatatggctggcggtgttatgtggcactttgcctgtagcatcattctttccctttgtttacttcatggtgaaggattttaatatgctgaaacagaggaagcataagtactatgctg

SEQ ID NO: 36816 - DNA, 273 bp, Glycine max
  Clone ID: 700808348H1
attgcggttcggctcgagcaacttctctctttctacacaaataactccttctcagtgtgagcagttgataagagagatgatgatcaacgtgaaggaatcgaccatggtgcggccggcggaggaggtggcgcggcgggtggtgtggaactccaacgtggacctggtggtccccaatttccacacgccagcgtctattccaaggtccaatggcgcccccaactttttcgacggcaaggttatgaaggagcatgaccaggtgcggtgccttctacc

SEQ ID NO: 36817 - DNA, 263 bp, Glycine max
  Clone ID: 700808349H1
cgttggtggagaaattgatggctgaaaatgcggaacttgtggagaaggtcaccgagttatgtgttgagttggatcaccaaagtgcagtcatgaacccaatgagatgactgaattcgctaaacctactggtgttgccattcctccaccagaatctgctgagtatgcgtctgtgtcggcccccaagttgaattcattggaagagacttcagtgaaggataatggtaactcttttaatgacgctaagcatgatgtggggtaatgtc

SEQ ID NO: 36818 - DNA, 262 bp, Glycine max
  Clone ID: 700808350H1
agatatggctgaggaatgtttgaagtatgcaatggatttgagtggcttgttactgctatattcttctttaggagatgctgaaggaatatcaaaacttgcaatccttgccaaggagcaagggaaaaacaatgttgcattcctttgctatttatgttgggtaaattagaagactgccttcaactgttggtagaaagcaatcgaattccagaggcagctttaatggctcgatcttatctcccaagtaaggtccagagatagtggc

SEQ ID NO: 36819 - DNA, 261 bp, Glycine max
  Clone ID: 700808351H1
gtttctttgtttcatgacttttgagtagcaaagctgatgcttagggacagagctgaataagtgaaaacattgcaatattctactattatcttttttggagattaattaaagtagttccaaatatcattgagttcaagtagtacataatgcccaccaagcttcaatcaggtttttcatttcatgattaattagttcaagtagtacataatgcccaacaagcttctagatgagaaaactactgttattacataaactttactt

SEQ ID NO: 36820 - DNA, 261 bp, Glycine max
  Clone ID: 700808352H1
ctcgagccgctcgagccgcacaaggcagaaagcaagctcatcctagagttttaaaaatggcagcagcctcatccatggctctctcttcccatccttggctggcaaggccgtgaagctgggcccatcagccccgaagtcgggagggtcagcatgaggaagaccgtcaccaagcaggcctcctccggaagcccatggtacggcccagaccgcgtcaagtacttgggcccatctctggcgagcccccgtcctacctcactggcg

SEQ ID NO: 36821 - DNA, 238 bp, Glycine max
  Clone ID: 700808353H1
cctactctcaacacactgcagcgagaaccaaagagaaaaaagcttcttccattttccgaaatcgaagcattagggttagggtttttccgatctgagaaattcgcggcccaatggcggaggaaccggagagcaccgtcaccaccggcgccgccgacgaatcgctgctcgataagatcaccgagaagcttcacggccacgattcttcgtcctcttcatctcccgactcgatccgactccg

SEQ ID NO: 36822 - DNA, 230 bp, Glycine max
  Clone ID: 700808356H1
tcaatttgtgacactaaatctaagttactatgactgcgcagacccaagaggagcttctatgcgcaacacctcgaacagcaaaagatccatgatgatgaacctgtcgtcgaggatgatgatgacgaggaagtggatgatgatgatgacgatgaggatgatgaccatgagaaggactagaaggtgatgcatctggtaggtcgaagcagaccagaagtgacaagaagagtcgc

SEQ ID NO: 36823 - DNA, 171 bp, Glycine max
  Clone ID: 700808357H1
cgcaagtgttgttgctgattcagttcgatccagtcttgtctctttatctctgcagaacctacagggtggttttttccgggcaacaaatttgtggggttcatcaaagttcgctcctctctgcagcataaatttggcccataagtataatcaatactcagtatttcttgagga

SEQ ID NO: 36824 - DNA, 163 bp, Glycine max
  Clone ID: 700808358H1
gtagaaaggtgaagttccaggtacgtgtgcatattcatcaaagcatcatcaaagcacactgcatcctaacagcacacgtacgtgtgcatacttcatcaaagcatcatcacagcacactgcatcctagcagcacacgtacgtagaaaggtgaagttaggatgca

SEQ ID NO: 36825 - DNA, 162 bp, Glycine max
  Clone ID: 700808359H1
cttccaaatcctgtgatcccattccaatccgttcgttcagctcaatctcaaaatctcaatggccgataatgagcaaccgaataacgaggaggcaagtactcttctccaccagccccatccccaaccaaatccgaaccaccaacgccacatgagactcccgag

SEQ ID NO: 36826 - DNA, 255 bp, Glycine max
  Clone ID: 700808360H1
gcggattcgacaagtacgatgcttcttctggtgagtaaatctctcttttttcggtataaccatgagcagcttcttgttaacttcccttacttccctaacgacgcttcgtggcagcatgagttctctcaccagtcttgctccactcgaagcagtgctctttgatgttgatggaactctctgtgattctgatccactccactattacgttgcgctgaaattgctccaagagcttggttttaatggaggtgctcctat

SEQ ID NO: 36827 - DNA, 272 bp, Glycine max
  Clone ID: 700808333H1
caaagaggctgaaattgccaaaaggcaaagaacgattcaggtgatggacatccatgagttaccgaagtcaaaacccaagaatagatgccttctttgggaagaacaaaggtggtggtggtggtggtggttctcagggaagcactggtgatggtgattactattatgatgatgcatgtttttccattgttggtgccattttgcgtgtaaaaaagccttgtgggaggggtgcggatataatcaagtcccaaaccctgttcatcatccctgtggaa

SEQ ID NO: 36828 - DNA, 266 bp, Glycine max
  Clone ID: 700808304H1
gtacgaatcatgtcaaaaatattcagaagtatgtttgaagctgtgccacgagatgaacatcaaggcaattgatctatggtctgcactccagaaaggggtaactggagagatgtttgtttcacggatggaattcatcttacttctgaggggagcaatatagtggcaaaagagatcttgaaggtcatcaaagaagcagagtgggaaccttgcctgcactggaattcaatgccactgaatatggagaagattcacttatgatcctgttg

SEQ ID NO: 36829 - DNA, 259 bp, Glycine max
  Clone ID: 700808305H1
ttcccttctgagctttgattagtgtggcctagttgttgttttctcgatgagaaaggcttcttccactatgcattgcgcacttctgcgctttgggttcccttgttgctgcttgctagcttcagctatgctccttctgttcggccacaactgaaatttcagggaatgaagtgaacacagatgggaaggtgataaatgaagagttagcaaaaccaagtctaaaaggacatgataagaagcaaagttcaaaggttttttccaa

SEQ ID NO: 36830 - DNA, 269 bp, Glycine max
  Clone ID: 700808306H1
tttgagagctttgcataaagcaataaaacaaagtgaacctgctttagtggctacagatcccaaagtgcaatcgcttggatataaccttgaggccacgtgttctcggccccaggtgcttgtgctgcattcattgctaattatgacaccaaatcttatgcaaaagctaaatttggaaatgggcaatatgatctaccgccttggtctatcagtattcttcctgattgcaaaactgttgtttacaacacagcaaaggttggttacggctggct

SEQ ID NO: 36831 - DNA, 265 bp, Glycine max
  Clone ID: 700808307H1
gaatagatcaggttatgaagagtgttctcatcactttggaccgagaattgatgactatcttccaattctaagcccctttttctcaaagcaaagaaagaaagccttggaggttcgcagagaacaggttgagttctagttccaattatagaacaaagaagaagagcaattcaaaaccctgggtcagatcacaccgccacaacgttttcctacctagacacactttttgacctcaaagttgaagggaagaaatcgcaccctctgatgc

SEQ ID NO: 36832 - DNA, 247 bp, Glycine max
  Clone ID: 700808310H1
gttgcaattagcaaaagtggcacaaaggaagaaaaaagaagaaattctgaagcaggcccaatccaataggggcgctaagcgcgcatcaggcgctaagcgagcaactaactgcaggcgctgagcgtggcgttaacacgaaggtggaaaccgttacgcgcgctaagcccagtaggcgcccagcgcacgatccaacagaagcacaggcccagcgtgcatggtgcgcccagcgacgatctgaacgcgctaa

SEQ ID NO: 36833 - DNA, 129 bp, Glycine max
  Clone ID: 700808311H1
attcaagatcgagaaggaagcttccaagtacggaatctgcaaatcatccctcccttcccaccttcttccaggaagaccgcaatcgcgcactcaaccgctcactcgcggagaccggctccacattcacca

SEQ ID NO: 36834 - DNA, 91 bp, Glycine max
  Clone ID: 700808312H1
atcagatctccccatgattattgatcaataagtcgtgtcctaatttcgttctaaatgcatgtattttgttaaaaaacgcatatgctatggt

SEQ ID NO: 36835 - DNA, 241 bp, Glycine max
  Clone ID: 700808313H1
gactctggaaagaatggggatgtttttccttgactcttcggtgtacacgccaagtgctccgccactttgtctgccaaatggattgattatagttcttacaaagaggtcttggaagctgaacccctgagtggctccctgatagttctactactgtttgtatgcaatgtagtgctcttttactgcgttacgcgtggtagacatcattgcaggttttgtggggggattttctgtcgaacagtac

SEQ ID NO: 36836 - DNA, 257 bp, Glycine max
  Clone ID: 700808314H1
gcacggagctccgttcagctgaacccttcctccgtcgtggcaagcaccacggcaaagacatcatcaagaagtctcagaggaagagcagcaggtacctcttctccttccccggcttaattgctcccatcgccggtggcaagatcggtgacctcaaggacttgggcaccaaaaaccccgttctctacctcgatttcccccagggtcaaatgaagttattcgggaccatttatatcaaagaacagatactgactctacag

SEQ ID NO: 36837 - DNA, 266 bp, Glycine max
  Clone ID: 700808316H1
ggccgttcaatcagggttcccttcatgacgagcaggaagaatcagtttattagggcttttgatggtttcaaagtccttggtcttccctacaagaaggtgaagataagcgccaattcaccatgtactttttccttccagaaacaaaagatgggctgttagctttggctgagaagttggcttctgaatctgggtctttgaacgcaagccttcctaataacaaattggcagtaggagacttcaggatctcaagatcaaaatttctttgg

SEQ ID NO: 36838 - DNA, 268 bp, Glycine max
  unsure (1)..(268): unsure at all n locations
  Clone ID: 700808317H1
cgcgtttcggagagagacgtcgcaatnggggaggaggcctgcaaggtgttatcggcagataaaaaacaagccataccccaaatcacgcttttgccgtggtgttcctgatcctaagatcagaatttatgatgttggtatgagaagaaaggtgttgatgagtttcccttctgtgttcatctggttagctgggaaaaagaaaatgtttcaagtgaagcattggaagctgctagaattgcatgaacaaatatatggcgaaattgctggaaaa

SEQ ID NO: 36839 - DNA, 268 bp, Glycine max
  Clone ID: 700808318H1
gtctgcatcgtctgcacagttcgattcagttatctccagatttcatcaaatactgcggatatatctatacatctatatttttttaaaatttttgttgagattggatgtgtaggattgaattggcttgtttcttgttgtcattgttaaattccatgtatttatttcatcgcacttgtagtgccgagtctgctgacacccattgagccataatgcaacaataggtttgggttgtggggtaatgttgtttgtcattaacgttaatgccctc

SEQ ID NO: 36840 - DNA, 263 bp, Glycine max
  Clone ID: 700808319H1
gtttgggagagaacatttaaatatcatatgatatttttgcttggattgtactgaactagttgggtcaattcccttacagttcgctcctttcctaagtattagtttggtgtctaagacgagaatttgaattatatataagatttactgtactttataactttcactgcttgacttattgatggaataatttaatttgagtgccatataaggtcatcagtcctccaaattttcttgtaataattgaatttcgtgatttatattaa

SEQ ID NO: 36841 - DNA, 257 bp, Glycine max
  Clone ID: 700808320H1
gcacccctttggttcccaccccactggtgcttgatttaggaggtccttttctctggcttcactgtgcatcacgcaacacaccttcatcttcttccctcaccaccccttaccgttcccttcaatgcttcactgccaaacccacaaatccaccaactcctttctctccagccccgtcgacgagtcgccagtaccaccatgccaagtgttcccgaaaacagcatcacggaacatcgccccgaagagactcgtggagactc

SEQ ID NO: 36842 - DNA, 93 bp, Glycine max
  unsure (1)..(93): unsure at all n locations
  Clone ID: 700808321H1
gtcaacgccactatttnttccatcctcaccagaatatagagcgcagtcactcatctttctctctgtttttttttggcctccgtttcagccttc

SEQ ID NO: 36843 - DNA, 261 bp, Glycine max
  Clone ID: 700808322H1
ggcattcttcttgaggccagacaaggattccaagtatcgaacatttggaatttgtatcacagttggtttggaagaatggcacttttctttgcagcattgaatatagtcctggggatgcgagctgcgggagcaggaatgattggaaggcaggctatgggttccttcttagcattgtacttgtcgcagttatcgttctggaagtcttggcgtatttgaaaaggtcagaaaagcgttctcttcctcagatttccaaatggacca

SEQ ID NO: 36844 - DNA, 259 bp, Glycine max
  Clone ID: 700808323H1
ggtaaacagtttgaggaaggtacaactctaccagcatttggcttgactgaaaagggggagagtatgtatgaccctgcaaaatacacttctttgagggtgaaacagctattggtggcgtaacagcatatggtgaaagcatagttgatcctgaagcaactgaaatggaatatcaaggttcaaatgtatctcctgatttgtcactgtcaaagaacttgtccaaagataacgatacaacacttcagatctcttgtggagcttg

SEQ ID NO: 36845 - DNA, 240 bp, Glycine max
  Clone ID: 700808324H1
gactggggaggatgagatgggggtcgaagatgatggggagtttgaagatgacgatgaagaagaagactatggtgctgggtatcttgttcagccagttggacagtctgatgctctcaatgctggaggagtgatgtggatggtggaaatgatgacgatggtgaagaggaggtgaagttgatgacgacgacgatgatcaggtgttgcctcctcctgactcttcccacaagaggagaggatgat

SEQ ID NO: 36846 - DNA, 177 bp, Glycine max
  Clone ID: 700808325H1
ggcgactggatattgaaaagcacatgaggacagatcttgaagaagctaaagggcaagagattgcaaaattgcaaaatgctttccaatgatgcaaggtcagttagatgaagcccatgctgcaattatacatgagagagaagcagcaaaatagcaattgaacaagcaccaccagtaatt

SEQ ID NO: 36847 - DNA, 167 bp, Glycine max
  Clone ID: 700808326H1
gttctaaaggatggtactactttggaggaaaataaagtagctgaaaatagttttattgtaattatgttatcaaagactaagagttcatctggtgaaggatctactacttcaactgctccttcagttaaggcaagtgcaactcctacttcaacctctgtgtctgctgc

SEQ ID NO: 36848 - DNA, 255 bp, Glycine max
  Clone ID: 700808327H1
ctaaaacacccttcaaattcaattcccttaaactctcatctttccccctcatattcacctcttccaaccctttctctctcctcacacttcttctcccttcacactctcagctgcttctgcttcttcttcttcttcttcttcttcagtagcagttggcaaggacagggacgtcttccagcagaattgaatgtcactgaaacagcggcacccaattccagagttagatgcatgtggaggtgccatcatggtatgtga

SEQ ID NO: 36849 - DNA, 263 bp, Glycine max
  Clone ID: 700808328H1
tttcccctcttcttcccctctctcgtgttatccgctttagttttctcgggaaaatcatggtgaaaggtccaggtctctactctgacatcggcaagagagctcgcgatcttctgttcaaggattatcagaatgaccacaagttcaccatcaccacttacacttccactggagtggaaatcacttcaactggagtcaggaaaggtgaaatatatctggccgagtcagcactaaggtgaagaacaagaacatcacaactgatgtca

SEQ ID NO: 36850 - DNA, 260 bp, Glycine max
  Clone ID: 700808329H1
gttaatttgcttcccttttttcacactcactctcactaaatggcttcctctgttgctttagttttgggtctatgtctagcactcaacatggttctgccgacacgtgcagctacccacacagtgggagacacctcaggttgggcactcggtgctgattacagtacatgggccagtggcttgaaattgacagtcggagatagtcttgttttcaattatggggctggtcacacagtggacgaagtgaaagaagtgattacaag

SEQ ID NO: 36851 - DNA, 258 bp, Glycine max
  Clone ID: 700808330H1
acaagcttttgcttgttttggtgttccagttccagttagagccatgtccatgtcctttctctttacctttaccatcatcatcagctttggcttgtgcattctttatgcatctgcagaactccagagattatcacactcttccaaacatgatggtgctcttagcttcttggtgcttggtgactggggaagaagaggcgcttacaaccaatcacaagtttctttccagtgggaaggttggagagagctgatatcgacttg

SEQ ID NO: 36852 - DNA, 264 bp, Glycine max
  Clone ID: 700808331H1
ggggttaaaaaatatcgattaacctctgatatttctcttagctgcagtctgcagtgagaatcggaaaatctccgaacccgctacttcctatcctttcaaaagagtgtgactgtaatagtgagctaaacaacatcggcagctagatcgtcgaagaaaacgaaaaagaaaagctttgaaaatggctcaaggagtcactctcagaaacccccgatatctcgcccccttcgtctactgcacaatcgaagccagatcatctgctttcag

SEQ ID NO: 36853 - DNA, 262 bp, Glycine max
  Clone ID: 700808332H1
gctttttagtggtgacggacagtccaaaaagggccggagaggactaaatgagatgcctcttcctccaagcatttaccaaagattgacatcaagttctactctaatgaatttggcgcaggctttagcttaccataaatgtgttacgagatatgccgctgcaggagctgcaacgacccaggagcagcggactattcaaaatctatctgacacccttcgaaccattcttcggttgtaggtcaatggcatggttgtgtaactagta

SEQ ID NO: 36854 - DNA, 269 bp, Glycine max
  Clone ID: 700808303H1
cttctatggctggccttcaacaatacaacttcttccccaccgattcttgtacctcgtccacaaccccaacaagcttctcctaaacccaccatgcttcccctccaaacccctaatgttcaagatcacactcagcaccacaaccaccaaggaccaatgccaccccttcaacttcttctgccgttgtttatagccaaaagggtcattctattgctgccgttgacgacaacaacaagtctccaaattctcatcagacctctttcttggttgct

SEQ ID NO: 36855 - DNA, 271 bp, Glycine max
  Clone ID: 700808302H1
ggagtcctcaaagatctatgcttacctcttcctctgcatgatctttctctcttccgccactcccattctcggttgtggctactgtggcaaaccctccaaaaagcacaagcctggtaaaacaccaaagacacccaaaacaccgttgttaagccaccagtcaccatccctcccattaatgttcctcccgttgttcttccaccaatagtgaagcccccaggtattctccctccaattccattattaacccaccaaccacacagggaagggaggg

SEQ ID NO: 36856 - DNA, 234 bp, Glycine max
  Clone ID: 700946468H1
gaagaggcagctgacaggctcatgggccttatatgtgagacaaagggaaatcatgaaacagctcttgagcatcttgttttagccagcatggcaatggtaaataatggccaggaagcagaagtggcatctgttgactgcagcattggagacacatacttgtctttgtctcgatatgatgaggctgcctttgcatatcagaaagcgctaacagttttcaagaccagcaaaggagag

SEQ ID NO: 36857 - DNA, 242 bp, Glycine max
  Clone ID: 700946469H1
ctcgagcgttcaaattggctatagtttgaaagttctgcagcagatctagtcatagaaatcagttgtagattgtagaaatcaattcattcttacatacattacattacagtacaaaagaatcaaatggaagaaagatgatcatccctgttcgttgtttcacctgcggaaaggtcattggaaacaaatgggatacctatttagaccttctgcagtcagattacagtgaaggagatgccctggat

SEQ ID NO: 36858 - DNA, 239 bp, Glycine max
  Clone ID: 700946470H1
gacacaataataagtggagactctattgtaagttctaacagcactgagtaacggcaaagtccttgctggttgcttccattcgcgatggcgttgcaggagaggctagacaagttcaagaaacagcaagagaagtgccaaacgacactttcgaccattgcagctaccaaggccgccgcggcaacccaaaagtccgccacacatgcctcggcaaatggaagaaacgctgcccctgcggttaa

SEQ ID NO: 36859 - DNA, 239 bp, Glycine max
  Clone ID: 700946471H1
ctctgctatcccccatattcctgtgtttcctttgaaaaaaacagaagaagaaaaaacatgtctaggttttttggattcttctttgtgggtcttacgttgatgttggtcggtgtggcaaatgctatggctaactcttccaacaaatttgatcaactcttccaaccaagtcgggcttttgaccactttattcatgaaagggatcttctcaaactcaaacttgacaaattttccggggctgg

SEQ ID NO: 36860 - DNA, 239 bp, Glycine max
  Clone ID: 700946472H1
gtgtgagtgtttgatattctcgattaaataaatctcactgtctctttctctctctctctctgtctctgtgtttttgttgtgttctctttactacctcttgaaaccaaaagggtcactctctgtgctgtggcctctgttttcaaaggaaacccttgttcttttccttgcctttctttcttagcactgtcttccaactcccaactcatataatttcattttccctagtcttttttgttttc

SEQ ID NO: 36861 - DNA, 239 bp, Glycine max
  Clone ID: 700946473H1
caataatcattttacaaaagcctccatcaacgaagtgatcaaagttcctcttttgaaccttcgtgcttccttccacgatccttctcctctcatcaaaccccaaatgatagaaagctgaaaaaagggtttctgaaatatcagctaatgttactgagtgcgtaatcattgagatctgccttcatcttggggtgattttgttgatgggtgcttgctggagtaataggattaaggctgtgagt

SEQ ID NO: 36862 - DNA, 237 bp, Glycine max
  Clone ID: 700946474H1
cattatgtcaataacagcaaggctgctcgagaggccatgtgctttttaatggacccccaaactgggaagaaggtctgctatgtccaatttcctcaaagatttgatggcattgataggcatgatcgttatgctaatagaaacacggttttctttgatattaacatgaagggcctagatggtattcagggtcctgcatatgttggcacagggtgcgtattttaggaggcaagctttata

SEQ ID NO: 36863 - DNA, 234 bp, Glycine max
  Clone ID: 700946475H1
gaaaagcaaaaccgtctgttttggcatcagaggacgcaacaacaagagcaaggaaaacaaagtcgaagatttagagaaactctcccatgtcaagcctaatcacaagggaaaaactaaaaggtgtgcttcaacaactcctgttggtgatgatgatggtggcatcaatgttcatggagccaacatagttgctagcaatgatgcaggagtagctgctgctgtgatcactgcagctca

SEQ ID NO: 36864 - DNA, 232 bp, Glycine max
  Clone ID: 700946478H1
cataaacaatgttgttaacatacaacttcaaaaaagcaaacccatcaacccttttctttgaacttattccttcttggtaaccttaagacacacacacactactctttcattatggaattcagatccaagtcatgcagagatgaaaggctgcagattgaaaggtactgtggaggcaaggtggccccaacaagcatgcaagatctgaggtgttacagtgctaataatgctgctt

SEQ ID NO: 36865 - DNA, 231 bp, Glycine max
  Clone ID: 700946480H1
ctttgttcactcttcttctcttgcggctagggttttagcgcgctcttctagatttaaggaagatgggtaaggaaaaggttcacatcagtattgtggtcattggccatgtcgactctgggaaatccactaccactggtcacctgatttacaagcttggaggcattgacaagcgtgttattgagaggtttgagaaggaagctgctgagatgaacaagaggtctttcaagtatg

SEQ ID NO: 36866 - DNA, 235 bp, Glycine max
  Clone ID: 700946481H1
cattcaaaagtttttgaaatgttgtcaccccttcttctatttctatgcctaactcttcctttgtttttgttgtccttcttcaaataccgtaaaaccttcaagaatccaccacttccaccaggtcctagaggccttcccataatagggaatcttcatcaactagatagtccttctcttcatgagcagctatggcatctctcaaaggaatatggtcctttattttcccttcaaattg

SEQ ID NO: 36867 - DNA, 233 bp, Glycine max
  Clone ID: 700946482H1
ccatcatttgctgacacatggggttgggttatggcttcggaccaaccactatcgatttgcgctgatgaaatggacagaagaatcgaagcaagaatagatggggaacttctctatctaaatggtgcttggttccattcatctacaactatgaacaaaactgtttaccaatcgctgcaaaatgaaactcacgtgtacacagaagaaaatgctagatttattcctggacatggcat

SEQ ID NO: 36868 - DNA, 238 bp, Glycine max
  Clone ID: 700946483H1
ggaccaaacagcatccgcggcagcgacggtaaccctccaacaacaacacttccgctgcgaaaaatgtctctggtggcgaacgaggatttccagcacattctgcgtgtgctgaacaccaacgtggatgggaagcagaagataatgttcgcaatgacctccatcaagggtattggaaggagattcgccaacatcgcttgcaagaaggctgatgttgacatgaacaaaagggctggtgagt

SEQ ID NO: 36869 - DNA, 239 bp, Glycine max
  Clone ID: 700946484H1
gggaaacatcaaatcaacatgctgagagtgggcgcaaagagggttttggaaacgacgttgtttggggttagggttccggcgaggctgtaccacgagagggttgtggatcactacgacaacccccggaacgttggatcgtttgacaagaacgacccgagcgtggggacgggtttagtgggggccccggcgtgcggcgatgtgatgaagctccagattaaggtcgacgacaaaaccggaat

SEQ ID NO: 36870 - DNA, 239 bp, Glycine max
  Clone ID: 700946485H1
atcagaaccttagccatggcagcgttccagaagatcaaggtcgccaaccccatcgtcgagatggacggagatgaaatgactagggttatctggaagtcaatcaaggacaagctcattttgcccttcttggagttggacatcaagtattatgacttaggccttccttaccgtgatgagaccgatgataaagttacaattgaaagtgcggaagcaactctcaagtataatgtggcaattaa

SEQ ID NO: 36871 - DNA, 239 bp, Glycine max
  Clone ID: 700946486H1
tctgggtatgatgaatatgttccaatggtagacatacctgttgatgctggttggaagaagcaagcatctctacagaggtcttacacctctaaaggagcacctcctcctgacactcagaaaactcctgaagggattcaagctcggatgtgggtagcactgtctatcttcttcttgactgtattaactctcttacgccaagttgcataccctgtgaccaagaaatttccagcattatcttc

SEQ ID NO: 36872 - DNA, 239 bp, Glycine max
  Clone ID: 700946487H1
cttctggaaaaacttttccaacttttgatcctaggactggagatgtaattgccaatgttgctgaaggagatgctgaagatgtaaatcgcgctgtccatgctgctcgcaaggcttttgatgagggaccatggccaaagatgacagcttatgaaagatcacgtataattttgcgctttgctgatttattggagaaacacaatgatgaagttgcagccatagaaacatgggatagtggcaag

SEQ ID NO: 36873 - DNA, 235 bp, Glycine max
  Clone ID: 700946489H1
cagacatgaactccaatcacagtcacagcaacagcagcaatagcaatacttcatcccggcctacctctgcttccaaacatgatgatgatgttaatgaccgttccagcatgcttggcatgacaatggatgatgatgatgtacagtctttggaatcctatgccatggaactctctggtcctagataaacagttactggggtaacgaatacagctagatagattaaggcgaaagtaag

SEQ ID NO: 36874 - DNA, 236 bp, Glycine max
  Clone ID: 700946490H1
caacaatcctgaatgataacgggacactgacttcagtgaatggtaactacaagtcagaagagtcaagtgaaaatgcaggagctgatgataacccaggatggatatcagtggaaaaagtgggaagtggaaagtattaagcaaacttggcttggagtggtggttctaaatgatatcaaagaatatagctgagtatagatttgttattcaatcttgaatcagaagggtgtcactcaagg

SEQ ID NO: 36875 - DNA, 234 bp, Glycine max
  Clone ID: 700946492H1
gcaaccctatgtcgaaggtggtttgtgtcaccggagccagtggcgccattggatcactggtggccctcctcctccaccagcgtggttatacggtccatgccaccgtccaagacatcaaggatgaaaatgagacgaaacatttggaggaaatggaaggagcaaagagtcgtctccatttttttgaaatggatcttcttgacatcgactccattgccgctgccataaagggttgct

SEQ ID NO: 36876 - DNA, 81 bp, Glycine max
  Clone ID: 700946494H1
gattctgactgggcttcagaccctgatgataggcattctacttctggctgcagcactgctatgttcgagtccaaactatgg

SEQ ID NO: 36877 - DNA, 230 bp, Glycine max
  Clone ID: 700946495H1
ctttgttcactcttcttctcttgcggctagggttttagcgggctcttcgagatttaaggaagatgggtaaggaaaaggttcacatcagtattgtggacattggccatgtcgactctgggaaatccactaccactggtcacctgatttacaagcttggaggcattgacaagcgtgttattgagaggtttgagaaggcagctgctgagatgaacaagaggtctttcaagtat

SEQ ID NO: 36878 - DNA, 233 bp, Glycine max
  Clone ID: 700946496H1
tttgaggccaggcaagccccactcaaccaccacacctctcctcgttcacgctacccctttctgctcttcttctacctttcaagttttaaaagtataaagatggcagagacattcctatttacctcagagtcggtgaacgagggacaccctgacaagctctgcgaccaaatctccgatgctgtcctcgacgcttgcctcgagcaggacccagacagcaaagttgcctgcgaaac

SEQ ID NO: 36879 - DNA, 235 bp, Glycine max
  Clone ID: 700946467H1
ggcatgattgatagcgttcctggaatgaaggctttggatatgaatgctgcagaggatgctattgtgaggctcacgagggagattgtgcccggcatgattgtcaccggcatggaggtggcagaaattgatggctccccaaggatgggtccgacgtttggggcgatgatgatatcagggcagaaggcggctcatttggcgttgaaggcgttggggaggaacaatgcaattgatggaa

SEQ ID NO: 36880 - DNA, 202 bp, Glycine max
  Clone ID: 700946433H1
cgccacgctccttcttcccaaccctttctccaccaagctccccgcccagcgctactcgcaccggcgcttcacctgctcctccatcaccgcccaatcacgatccgccaaggagcaactcctcgccctcatcgccgaccaggaccgcggcatcaagacccagagcgaccccgcgaagcacgccgcgatcgtcgaagccatcaat

SEQ ID NO: 36881 - DNA, 239 bp, Glycine max
  Clone ID: 700946434H1
gatggatctctgaattgattaaaccactgttaggcaacagtgtgatgcgaaccatctatttatgaaacagcaatttgagcataggtcattattgtagaatcttgttgaaatgaatgaaccttgtaaaattttgctactttcactgcaagattaagctataaaatgcaagaacattggtttagttcaactgattgcagacttgtagtggacggcttggccatctgttcacagacgttaat

SEQ ID NO: 36882 - DNA, 229 bp, Glycine max
  Clone ID: 700946435H1
atctgtgagaattctggaggccaagcacgacctttactctgcagtaatcggagagaaggtgtgcatgaagattggaaatggttcatggtgcccaactgggagggaatggacactatcaacttctggtcacaattatgctgtgtggcacaagtagtgttctgttggcatgtcatgacccgtctccactggaatcacagagaagagaaaggaattacgtgcttatatgctt

SEQ ID NO: 36883 - DNA, 240 bp, Glycine max
  Clone ID: 700946437H1
cgttcctcgccaatcaccacaatcacatgtatagcaaggcagcgtgagatgtgagctcgaagtatcgagaagtgaatccagagtgctacacagcttggaattacagaaagctcgccgttcaacatcttctctctaactccgattccgatcctcactctatcttcgatgacgagctcaaactcgtggagattgcgctgaggaagaatttcaagtcttacggcgcgtggcataatagaaaat

SEQ ID NO: 36884 - DNA, 244 bp, Glycine max
  Clone ID: 700946438H1
cagcgacacgtatcttcatcaataatcgcagaagcagtttccggtgcatctcatcgtcttccaaaatgaacgacgcagatgtctcgaagcaaatccagcagatggtgcgtttcatccgccaggaagctgaggagaaagccaacgagatctctgtatctgccgaagaggaattcaatatcgagaagctgcagttggttgaagccgaaaagaagaagatcaggcaagaatacgaacgcaaagagcg

SEQ ID NO: 36885 - DNA, 242 bp, Glycine max
  Clone ID: 700946439H1
tgatcctagaatagcaccccccaaggatccgattgtgaggaagcagttggctgtgattgctgccaagtgtgtgaggtcttgtagggagagaaggccctctatgaaggagcttgttacttggctttgtgggttgtgtaaattggtgcctcttcattcgtggaatggttttaacaacccttgcatgatggctgagattgcagggcgcccagtggaagcggcggcggcggcggcaaggaattatg

SEQ ID NO: 36886 - DNA, 235 bp, Glycine max
  Clone ID: 700946440H1
tctcatgcttcttaaatgtgaagatccatatatctataatgactcacatatataataattacatagagcacataaaagaagaaaagtaaagcattaagcaaccaagatcattggtcccaactagtgttgtgcagcatagtggttaataagcgagcgagcattgctagtaacctgagcaacattgagcatcctagccctaatagagtccttgatctgcttttatgtgctctatgta

SEQ ID NO: 36887 - DNA, 196 bp, Glycine max
  Clone ID: 700946441H1
ctcacaacctcttcttctgcccagatgcaaccatgaatcctttaataacatgcatgaagaaacaagaggcaactcaatacaattagttatctaaataataatttctgctgttattgcctccattttcatgtaatcttactcgccaaacccatcattgtatacatatcaagaataaaacgtgggtggatttctcaat

SEQ ID NO: 36888 - DNA, 240 bp, Glycine max
  Clone ID: 700946442H1
caagttatcagtgtgtcaccctgacttttcaaaaacaattatttgttgcttcatatttcactgtgatttcataatagattttcactcatcttacttgactccaagcattctatatatctagtgcctccacgcatctctaccctcaaatcttcaccacacaacactacctcaattactcaactaaagcttcattcattcatcgtgtcgtgttgtgttctttgcaaccatgcttcttagaac

SEQ ID NO: 36889 - DNA, 238 bp, Glycine max
  Clone ID: 700946443H1
aaacaaccttctttctttttctgtgagcctttctttcaggttcttaacttgatcagtgtgcagtgtccaaatcataagggtagttgcaaattgcaatggctaagcatgatgttgagggtggttccttctctgcaaaggactaccatgatcctcctccagcaccgttgattgatgctgaggaactcacacagtggtccttctacagggctttgattgctgagttcattgccacaatgct

SEQ ID NO: 36890 - DNA, 235 bp, Glycine max
  Clone ID: 700946445H1
ggcagcagtgcgaagagaaagaaagagaagaagcgcttatcgaactcggacggaagcactgagttaactcagagcgagtgaaagtgttgctgcgtgatgtctggtggtatcgcccgtggacgcctcaccgaggagcgcaagtcgtggcggaagaaccatccccatggttttgttgcgaagcggagacgctgcccgatggaaccgtgaacttgatggtgtggcattgcactattcc

SEQ ID NO: 36891 - DNA, 237 bp, Glycine max
  Clone ID: 700946446H1
gcgtgaggaagaagaagaagtaccaggcccacgaccccgataaccaattcaaagtcggcgacatcgtccagctccagaagaccaggcccatcagcaagaccaaggcctttctcgcactccccgttcccaaaaggccctccagcaggcccgaggcccagcccgaggaactttccattcccttcgagtcccagccctagaagactccagagtcacccctcaatttcactctctcacgcc

SEQ ID NO: 36892 - DNA, 234 bp, Glycine max
  Clone ID: 700946448H1
gaccgctacggttcagaaaggctcggtggtgaaatccgccggagcgttggggatggtgctgtccaacaccgccgctaacgggaggagctagtggcggatgctcatttattaccggccaccgcagttgggcagaaagccggtgacgctattaagaagtatttggtttccgatgcgaaaccgacggtgaagattttttttgagggaaccaaggtggggattcagccatcgccggtg

SEQ ID NO: 36893 - DNA, 248 bp, Glycine max
  Clone ID: 700946450H1
cgccttggtgttggagatcgtgatgaccttcggtctggtgtacacggtctacgcaactgccattgaccccaagaagggtaatttgggaattattgctcccatcgccattggtttcattgtcggcgctaacattttgttcgggtggggccttctctaggtgcggccatggaaccccgctgtggacattgtggggcctgcttgtcgttgagctggcacctgggaccagatcactggactctactggggcc

SEQ ID NO: 36894 - DNA, 238 bp, Glycine max
  Clone ID: 700946451H1
ccgtgggtgcttctggtgcattatttggcttactaggaggcatgctatcggagctcttgataaattggacaatatatgccaataagtttgcagcgttattgactcttatagtcatcgttgtaatcaatttagccattggagttcttccacatgtggacaattttgctcatattggaggatttgtctctggcttttttcttgggtttatctttctgattcgcccccagttcaaatgggt

SEQ ID NO: 36895 - DNA, 241 bp, Glycine max
  Clone ID: 700946452H1
caggggtgggagaaagctacctttggaagtggagcaaacgatcatgtcttctggaattatgcttgttataattctggggttattccttattgttcgtgataccctaaaccttgattttatcaaagacttgttgtaattattgagaattctagttagtagtgggcttcaaaaagtatttcatgattctcatctgcaatgctgttgcaccagtgtcttaggcagggatattctgtagaggagg

SEQ ID NO: 36896 - DNA, 241 bp, Glycine max
  Clone ID: 700946455H1
ccaaaatggtgaatcctcgaattccacgttcaaggatccctactttcacacttttcacttcttctatctccatcgttctgtgcattttcttcgttctctcttttctcttcactgcccattcttattcctcccatcaacaccacaacgcgggttctgacggtggtgttgcacatggatttgagtcgattaggagatccgtcctagctctgaaaacagatcctctcaagcctcggttggacca

SEQ ID NO: 36897 - DNA, 239 bp, Glycine max
  Clone ID: 700946457H1
cgtatttaactgccttaaccacctacttcagctacggcttgctcttcgccttcggccagttcagggatttcttccgcaaaatcttcgactcgtgcagcgccaacaatcttcagggttacgcgccgatctgcttagggctcgaagatttctatattcgccgcttgtacctccgaattcaggactgttttgggagaccaattgcgagtgctcctgatgcatggtttgatgtagtcgaacgc

SEQ ID NO: 36898 - DNA, 237 bp, Glycine max
  Clone ID: 700946458H1
caagttacaaattacaagaagtaagtcacatccatgtagttatagtgattgcgtttgtgactttgtaacttggtctcgtggtatggagagggtatagcttcaaaggactcgtctctcggttcctcaggctctgataggctataggatttgctggcggtgattacaaatcacaagcatttatcatggtccttttcccatcttttgtgaatggattggtaagaactgtgtcaatcaaga

SEQ ID NO: 36899 - DNA, 236 bp, Glycine max
  Clone ID: 700946459H1
cgcaacaaaaagaaagaatcccaggcgaggagaaagatggaggggaaggagcaggatgtgtcgttgggagcgaacaagttccccgagagacagccgattgggacggcggcgcagagccaagacgacggcaaggactaccaggagccggcgccggcgccgctggttgacccgacggagtttacgtcatggtcgttttacagagcagggatagcagagtttgtggccacttttctgtt

SEQ ID NO: 36900 - DNA, 235 bp, Glycine max
  Clone ID: 700946460H1
tatttggaacatttccttatctatcttcacctccatcttttaacagttcccctcgaaacttctgaagatgggtggcattgcattcggacgcttggatgattctttcagtttaacctcaatcaaggcctatattgctgagttccattcaaccttgctctttgtttttgccggtgttggttcagccatagcctatggtaagttgacatcagatgcagcacttgatcctgctgggtta

SEQ ID NO: 36901 - DNA, 235 bp, Glycine max
  Clone ID: 700946461H1
cttagagagacattgtggttacccatagtctcatatagtgtcatacagcaaaaaaattcagcaacacaaaacaatgggttctcttatggcaggatggtattctacccacatggatcctcaatcagccacacttaaaaggaaccgctcactcactaaggatgaaattgatgcttactggaaatcaaagaagaagatagaggaagaacaccttagagctatttccaatgtgtcagag

SEQ ID NO: 36902 - DNA, 226 bp, Glycine max
  Clone ID: 700946462H1
ctcacaacctcttcttctgcccagatgcaaccatgaatcctttaataacatgcatgaagaaacaagaggcaactcaatacaattagttatctaaataataatttctgctgttattgcctccattttcatgtaatcttactcgccaaacccatcattgtatacatatcacgaataaaacgtgggtggatttctcaataaaaaacaaaaaacagggcggcccccgatt

SEQ ID NO: 36903 - DNA, 233 bp, Glycine max
  Clone ID: 700946463H1
gtgactctgtgacaatgccttctacagaaaatcagggcttttcgttgtccttttcctcgtttggccgttccatatttggtgtcgggcaggagcaggttcattctgtggaagcaagtaatgaatctgattcctgtaatttagagctcgggtcattccaaaagcgtgttaccgatcgatttcaagacctttctgtagctagtgatgagcaatttctctcaattgattggattcag

SEQ ID NO: 36904 - DNA, 265 bp, Glycine max
  Clone ID: 700946432H1
cgcgtacatctccgcattcggctcgacagaggtaaaacccttaggtataaactacaattttctatacttaataacaaaatgtgttatatcttgttgactcattcattgataattgcaataaagatttgtgtgggattatttctaccaaaaaaaaaaaaaaaaaaaaaaaacaaaggggtgcccccgtattagggctctcttggccccggagtttattgcggacggggtccctgagggggttcaagcttccccaaaggggggcggc

SEQ ID NO: 36905 - DNA, 236 bp, Glycine max
  Clone ID: 700946465H1
aaaatgtccatcctaagcactgcagggagtggaaaattcagcagtgaccggacaattgctcaatatgccaaggaaatttggaacatagaagagtgccgcgtgccataatttctgctggatgtgtgtctcttgcactcaagttactgtatatagcaccaacagaatgataagtaaaaagaagtgaataataaaaattagaaataattctggaaagggacatgaggggatttagtttc

SEQ ID NO: 36906 - DNA, 233 bp, Glycine max
  Clone ID: 700946466H1
agcagcaattcttatttatttcagattaatacttgataacctaaacaatatatctatatatagaatatagatagatatatatataatagaacgtaaaacaaaaaaagattaataaatagaaaaaggagcatgttgattatatagaaagtaaagggcaacaatcatttttgtttaccatgggtaaggtcaccatcgctgacataataacctatataagcaatgctgacatgaat

SEQ ID NO: 36907 - DNA, 199 bp, Glycine max
  Clone ID: 700946401H1
cgaagatactgttttgcaaaccagcctgacattggtttgtggaatattgcacagttcacaacaacactacaagctgctcatttaataaatgaaaaagaggccaactatgctatggaaagatatggaacgagatttatggatgattatcaggttacaatgaccataaagcttggcctccctaagtataataagcagatga

SEQ ID NO: 36908 - DNA, 243 bp, Glycine max
  Clone ID: 700946402H1
cataaaatttggtagaattcttatcatatatctaaggaatgtgtatgaaattgcaggcccttcttttcctgttagcccttattgttagggctgcaaataggccagcagattatgatagtgatgaggagttcattaatccaaggcagcaagtacaacagccattgctcaacagactaccagcaggcccagcaacagggataccggttgctggaacaattgaccagcgtccaagcagaatgatgc

SEQ ID NO: 36909 - DNA, 240 bp, Glycine max
  Clone ID: 700946403H1
ctcgagcgattcggctcggaaaccacggatatacattggatgcatgaaatctgggcctgtcctatcccaacaaggggtaaggtaccatgaacctgagtactggaagtttggagaggctggaaacagatacttccgtcatgccacaggacagttgtatgccatttcaaacgatttggctacatacatatcaattaaccagaatgttcttcacaagtatgccaacgaggatgtgtcactagg

SEQ ID NO: 36910 - DNA, 90 bp, Glycine max
  Clone ID: 700946404H1
attatttttacactagaacgattatggaatttgcctagagttttttcacaaatggtctaatgagcttattagcctacgtagcaagaagtt

SEQ ID NO: 36911 - DNA, 245 bp, Glycine max
  Clone ID: 700946405H1
cttggcaatataataaccaacaaacttggtcaggttccaactcttcgaacaaactaactagctaggtgagaaaaagagaaacatgccttgcctttacatcaccaccaaccttaacctagatggagttgacaccaaccccgtcttttctgaagccaccactgctgtctctacaatcattggcaaacctgagaagtttgtaatggtcatattgaagtcatcagtaccaatatcatttgagggtaaca

SEQ ID NO: 36912 - DNA, 243 bp, Glycine max
  Clone ID: 700946406H1
acctactctccgctcccaagagcacgcaccaccactattgcacttcttcctcgttctccctctttttcttcttcttcgctaaacccttttttctatctcactaacacaacaatgggagacgagaagaagggcaagcctgctgcttccggcgtgtggtccaccatcaagcctttcgtcaatggtggagcctccggcatgctcgccacctgcgtcattcaacccatcgatatgatcaaggtgagg

SEQ ID NO: 36913 - DNA, 243 bp, Glycine max
  Clone ID: 700946407H1
gtgcattttctacattgcaacaccgcgatatgaacgatgcaaaatagtttcagatacgtcgcgttgattgattgatatgaagtggttgactttctggaactgcatatctatcctcgtgttgtcttttgctttcttcttcttctattgtcacacatacacatctactccttccctcatggctgagcaatcttccaagtccatttacgatttcacagtcaaggacatcagtggaaatgatgtgag

SEQ ID NO: 36914 - DNA, 240 bp, Glycine max
  Clone ID: 700946408H1
acgtgatggaggctaaggttgttgtgagctcttgtgggcacgatggaccttttggcgccaccggggttaagaggttgaagagtattggcatgattgatagcgttcctggaatgaaggctttggatatgaatgctgcagaggatgctattgtgaggctcacgagggagattgtgcccggcatgattgtcaccggcatggaggtggcagaaattgatggctccccaaggatgggtccgacgt

SEQ ID NO: 36915 - DNA, 244 bp, Glycine max
  Clone ID: 700946409H1
atatatatagaatatagatagatatattgtttaggttatcaagtattaatctgaacaatatatctatatatagaatatagatagatatatatataatagaacgtaaaaaaaaaaagaataataaatagaaaaaggagcacgttgattatatagaaagtaaagggcaacaatcatttttgtttaccatgggtaaggacaccatcgctgacataataacctatataagaaatgctgacatgaataa

SEQ ID NO: 36916 - DNA, 236 bp, Glycine max
  Clone ID: 700946410H1
attttacacgaaatagaagactcatcttgtatacttatttgcagaaaacctgggtggtccaaagtttaagattggaacctactattgtaaaggagcaatatctccaacggctgatgggagaagtggaggcaaagtcgaactttctagtgcaagatctgcttaatgtcaggacacatgtcaaagtgcgtactgtttgagcattcttcaagacacaaatgccccagactcgttgaaca

SEQ ID NO: 36917 - DNA, 242 bp, Glycine max
  Clone ID: 700946411H1
caaattcgtgagagctaattcaatcaaaatgcctcccaaatacaagctagtgctgttgatagcattggttttggttgcaacctcccttgctggtcgcacaaaggaacatcctaagcatcctccatcccttcaagaacaacaacacaccccacaccttgatagctacccgcataaacacataccacctcatcctgtacatggtgccggggaggaaccaacctccattccacgaaagaagggac

SEQ ID NO: 36918 - DNA, 236 bp, Glycine max
  Clone ID: 700946415H1
ctcagaagaagaaggatcgatgtgggcagcttcttgcctggcgtcatgctgcgcggcctgcgcatgcgacgcctgcaggaccgtcgtatcgggaatcagccgccgttccgccaggatcgcctactgcggcctcttcgccttctctctcgtcgtcgcctggatcctccgtgaggtcgccgctcccctcatggaatcccttccctggatcaatcacttcaaacacacacctagccgag

SEQ ID NO: 36919 - DNA, 237 bp, Glycine max
  Clone ID: 700946416H1
ggtaattggtccgaaggcattctgggggcgtcgaggaatcgccgtagggttcccatcagaagattcaatagatttcatccacctgatgatgataatgtatacagtatgcagcttagagaacttctgagcaggagaagtgtttctaaccttcttcgtagtggtttccgtgaaagtctggaccaattaatacagtcatatgtggaaaggcaaggtcgtgcaccaattgactgggatttg

SEQ ID NO: 36920 - DNA, 187 bp, Glycine max
  Clone ID: 700946417H1
ctttctcactctcctctgatatttctatattttggtgctactgtgtctctacgatctggatccaacggtccaaaatgttcggggcttgtgctgcttgttttcccaggttttagagctccaaaccttcagatccacctcattcgtctccagatcttccttccttgataacgtgatcgggttcgagaag

SEQ ID NO: 36921 - DNA, 243 bp, Glycine max
  Clone ID: 700946418H1
gtctcaagcaaccatggcaatggcaacccaagcctctctcttaaccccacccctctccggtctcaaagccagcgaccgcgcctccgtgccatggaagcaaaactccagcctctccttctccagcccgaagcccctcaagttctccagaacaatcagagcagcagccgccgacgagaccacagaggcaccagcaaaagtagaggctgcaccggtcgggttcaccccaccagaacttgaaccaaa

SEQ ID NO: 36922 - DNA, 221 bp, Glycine max
  Clone ID: 700946419H1
gaaaaggacaacttcgcgactcgtgaatcgattactgtagaaatcgtcgattctatcttaaaacgtattgggcactggccgccattttgaattctggttgagggattgaagtgcgattatacgtggaggaggatggcttgtaggggatgctgggaatgccttgtgaagcttttgaacttcatattgacccttgctggtctggccatggtcggcgatgggat

SEQ ID NO: 36923 - DNA, 245 bp, Glycine max
  Clone ID: 700946421H1
cggctcgagcggctcgagaaggattctcagtgatgttgattactaagccaattaatggctgtaactctccattaacatcctctttcacatgaagatcagtttacactgtaaataacttaaaagtaattccacttatctataagaagtttgtgcatattacaaattatacctagcatagttgctactgctaccatatatgaagcatgatgtagctttgtaaacaagtctatatcaatattttgaca

SEQ ID NO: 36924 - DNA, 245 bp, Glycine max
  Clone ID: 700946422H1
agcagatgttatcaaaacctgggggtaattttctggaagatacttgggttcttcagtggtcaaatgcagaaattaatgacaagcaggtcaatgatgaattggagagacatgaggactactttgtgaacttggccattcaacttcttactacttaccagaaagagttagagccttgcattaaccatatcaaaacatttgtcgtgaacctcaagaatttaagtcagaggttagagatgagcaccagt

SEQ ID NO: 36925 - DNA, 225 bp, Glycine max
  Clone ID: 700946424H1
gtatataccaatgctgtctgtttcagtcgcacgctgtaatcctgatcttgtgtgcatttcaaaatctcattcatcatcatcttcttctgaaaagttaaaaggtgaagagagagagagagatatgagtagcgtgttgtagcattgtgtggtgggatggtgcaaatcagggccatgctatgctagaccactggaagccatgtctggtcgaagagtagtctcttattt

SEQ ID NO: 36926 - DNA, 240 bp, Glycine max
  Clone ID: 700946425H1
agcagctgtctctattttcagactcacgcgtgaccagctcaacacactgaaagccaaatccaaagaagatggcaacacaatcagctatagttcttatgagatgttggcgggtcacgtgtggcgaagtgtaagcaaagcaagagcacttcctgatgatcaagaaaccaaattgtacattgcaactgatggaaggtcaaggttgcagcctcctaccccacccggttactttggcaatgtgat

SEQ ID NO: 36927 - DNA, 239 bp, Glycine max
  Clone ID: 700946426H1
cctggttctatgagaggcagtttagggcaacctactacaagtgagcacattatcggtggacattctatggttgacaattctaagggtctgcttcattgggcgcaaagcatgagttttgttgcagtctccatggaccatactttacaactagttctcccagcagattcatcaactcctggttacatagaaggttgcactccagttaagtctcttggtgctacgtcttctgcatatattct

SEQ ID NO: 36928 - DNA, 239 bp, Glycine max
  Clone ID: 700946427H1
gcatgagcctgttggcagtctcctagaagctgttaaggtaatcaagcctacagttttgattggatcatcaggagtgggaaaaacatttacaaaggaagtaattgaggctgtgacttctatcaatgaaaaacctcttgttttggccctctccaatccaacttcacagtctgagtgtacagctgaagaggcttacgaatggagtgagggtcgtgcgattttcgctagtggaagtccatttg

SEQ ID NO: 36929 - DNA, 237 bp, Glycine max
  Clone ID: 700946428H1
gcattctaaaggattcctacacagggatataaaacctgacaactttctcatgggacttggtcggaaggcaaaccaggtttatataattgattttgggcttgcaaaacgatatagggactcctcaactaatcgccacatcccttacagggagaacaaaaacttaacagggactgcacgctatgctagttgcaatactcatcttgggattgagcaaagtcgacgggatgatttggagtc

SEQ ID NO: 36930 - DNA, 234 bp, Glycine max
  Clone ID: 700946429H1
gcactgagcagttgaggaaatgggaacccttgggagagcgatctacagcgttggtaactggattcgagaaactggacaggccattgatcgtctcggttcccgtcttcagggcggttactacttccaagagcagctctctaggcatcgaactctgatgaacatatttgataaggctcctgttgttgataaggatgtatttgttgcgccaagcgcctccgtcattggagacgttca

SEQ ID NO: 36931 - DNA, 235 bp, Glycine max
  Clone ID: 700946430H1
caacagcacaaagcgggttactgtctgttcaagctaccatctctctctctctttcttagtgcctccttgccagaagttaaaatggcccaagaaactttcctattcacatctgaatcagtgaacgaggggcaccctgacaagctctgtgaccagatctccgatgctgtgctcgatgcatgcttggagcaggaccctgacagcaaggttgcctgtgaaacctgcaccaagaccaaca

SEQ ID NO: 36932 - DNA, 237 bp, Glycine max
  Clone ID: 700946431H1
caactatggaaaagctggggaagccttgaaggtggatctgttgaaccatccagaatacatagaacaaaatgccaccttagccttccaggctgcactctggcagtggatgaacccaccagagaagcacctaccatcaccccacgatgtctttgttggcaactggaaacccacaaaaaatgacacattgtccaaaagggtgcctggatttggtgccacaataaacttgctctatgggga

SEQ ID NO: 36933 - DNA, 260 bp, Glycine max
  Clone ID: 700946396H1
ctgatacttggaatgaactcctatatgcagctctatcaatgtgaaggtaagtgtttcaaggagtgtggcaagacaccaatcgaccaagttctgaagttaccagggagtgaacgcttcttgccaccaaaatctgcacagacatttgattcttaagtcaaaaaacaacattcggcagttgtaaatgctcattgctgtttccctgcaacttgaactttggttcttcaatttgaagccaccttagtcattcatattagttgaca

SEQ ID NO: 36934 - DNA, 249 bp, Glycine max
  Clone ID: 700946351H1
tggggtgactcagatggatgttgcaactgctgtaaattcaaaaggacgtgataattatgatagaagaaagcaacggattgaaatttctcctgaaaagcaaaaacttgcagataaattgtttggtggttcaacaaaactgagaaaagatcatcaactagcaataaggttccaaaggctagtactagtgctgcagacagaactcaggaatcaaaagccgcagctgtacccagtgaagtagctcgggagaaa

SEQ ID NO: 36935 - DNA, 252 bp, Glycine max
  Clone ID: 700946352H1
cttctgtcccttctcaatttttctcttcttccaattccatcgcaaacaattaaaaataaaaataaaaataaaataagcagacatgtccacacttccctcctcaacctttccaaactccaacctctccctctctcctccttatcctcacaaaaactcccacttttccacacccttttccccaaacccctcccttttcctcatctgcgaattcaaaccccaccaccattccttcccccgcttctctgcaagtcc

SEQ ID NO: 36936 - DNA, 75 bp, Glycine max
  Clone ID: 700946358H1
gcaatggcctcgtctggtagttagtaagctcatagaggttcaattatgcgttttcccgcggaccgtaccgttcgc

SEQ ID NO: 36937 - DNA, 248 bp, Glycine max
  Clone ID: 700946359H1
aagaccggtggacccttcggaaccatcaagcaccctgccgaactggctcacagcgctaacaacggtcttgacatcgctgttaggcttttggagccactcaaggcggagttccctattttgagctacgccgattctaccagttggctggcgttgttgccgttgaggtcacgggtggacctgaagttccattccaccctggaagagaggacaagcctgagccaccaccagagggtcgcttgcccgatgcc

SEQ ID NO: 36938 - DNA, 252 bp, Glycine max
  Clone ID: 700946361H1
ccccatacattttccgcccaaagatcacgtataacggcggcttgataaaaattttactaggtttctgaataagctggttaatgtttatggacaagtaaatgaatcattggctatttcaaatgttgtagagctattaaacttgtttttttaagcacctcaaccgatcctcaggcacccaaattaccagatgacattcttcggcgatactcacagcatgatctatttgctgcttttaactatctttaagagaaa

SEQ ID NO: 36939 - DNA, 250 bp, Glycine max
  Clone ID: 700946362H1
gtggggagatcagaaggaattgcagggttgtgaattgatcatgatgtattttgtaataatgatgcatgcattggcatttaattcatgtttgtgtgttggctttttgtgtagctggtgatggcaataataacaaagtatcagcaggtggtagtagtagcgacgtgttagaggtcatgactcatgagagattagtgtattgcaaggtcatggtcatataagtttgactagatcttgggttatattaatgtta

SEQ ID NO: 36940 - DNA, 249 bp, Glycine max
  Clone ID: 700946363H1
ggttgatgcgcaacaatagctatagcaatcgcattgtgttactgttaccctagggctaggctagtagtatgaatggattatggatggtgaagattgattgattcaagatgactgcaactggagtggccgtgtcgtggggttggggacattctctaactgttactgttacccagtgcctgtaaaggaattgcttttttctacaacgcgcattcgcaatcggagtaggaagaagcgttttggttttggtca

SEQ ID NO: 36941 - DNA, 246 bp, Glycine max
  Clone ID: 700946366H1
gttctagatcgcgagctgccgcctattattactttataccctcttcactatatctatatatagtttatcgctagatatatatataatagaacgttcaaaggaaatagaattttcctcagaaccaggatcctgcaatcatataaaaagtaaacggtctctttcctttgtggttaccatgggcccggacaccgtcgctgactcaatagcctctgtaagacatgctgccttctttttcaacggattggt

SEQ ID NO: 36942 - DNA, 248 bp, Glycine max
  Clone ID: 700946367H1
gaaaagcaaaaccgtctgttttggcatcagaggacgcaacaacaagagcaaggacaacaaagtcgaagatttagagaaactctcccatgtcaagcctaatcacaagggaaaaactaaaaggtgtgcttcacaactcctgttggctgatgatgatggtggcatcaatgttcatggagccaacatagttgctagcaatgatgcaggagtagctgctgcggtgatcactgcagctcatatgtctttgatgt

SEQ ID NO: 36943 - DNA, 247 bp, Glycine max
  Clone ID: 700946368H1
gcagagctgaagcatggcagtgttgtgattgctgcaatcacaagttgtacaaatacatcaaacccaagtgttatgcttggggctggtcttgtagcaaagaaggcacatgatctaggtttgcaggttaagcatgggtgaaaacgagtcttgctcctggctctggagttgttacaaaatatctacttaaaagtggcctgcaaaagtatctaaatgaacagggtttcaacattgttggatttggctgtac

SEQ ID NO: 36944 - DNA, 250 bp, Glycine max
  Clone ID: 700946369H1
gaagtttcaaggaaattggcagagcttggatatcaaaggagtgcaaagaagtgcaaggaaaaatttgagaacgtgtacaagtacaacaagagaaccaaagagaacaaaagtggcaaatcacatggaaaagctataaattctttgatcaattacaagccctcgagaaccaattcacagtctcttacccgccaaaaccacaacctacttctactttgactacaacaaacacattgacaagtgatcatggtaa

SEQ ID NO: 36945 - DNA, 244 bp, Glycine max
  Clone ID: 700946370H1
catggatatcacttacattcagttatgcttcctctccatcatcgtcattatcttcttcttctctacctttcgatcctttcactttcgcgtgaacgaaccattccactcgctcgcaaaacggcgtcgtgccgtcgcgttcgttcggttaaactcgcgtgttcagaatcctccggaatgacgctcttcgcccaattccctataattcacttctctactctctcacgctttctctggtcatctcctc

SEQ ID NO: 36946 - DNA, 246 bp, Glycine max
  Clone ID: 700946373H1
cttgtagagcacccagattactcctgcttttttgatgatatcagggcagaaggcggctcatttggcgttgaaggctttgggtaggaacaatgcaattgatggaacgtgtggagttggaagggaagaacccagcttattttggcttctgcggacactgaggaaattgttgatgcttaaattaagtttcaaattatataccttttcttttctgttttgtctctgcttatgatttgaattttagaataa

SEQ ID NO: 36947 - DNA, 251 bp, Glycine max
  Clone ID: 700946376H1
cttatatgctactaactctgtcattacgagcgattatcggcagcttgcgcggctttgtcatcgatatgtcgactaagtacctggaggtgaacagctattgaatgatattagtaactcatatgaggtgttatcgatgatgatcatcgatccatcctataactgatcatgataggctgtgcttatatggtcttgactggggttgcagggtttcagccttccatccagatctgtatgtgtctctgtatgagggc

SEQ ID NO: 36948 - DNA, 248 bp, Glycine max
  Clone ID: 700946377H1
tattcaccatgtcatgtataaatgaggtagtctggtttctaattgatatttctagactttgctgatctgaataataggactggactttgtgtattgtcaacataaatgatctatgttacttgtggggtttcttacaattgtttaatgatgcattacttctagagttaaacattttgacaacacctttttgattccatgattgatttctctatagtaaattagtaatattggtgctctctatgtagcat

SEQ ID NO: 36949 - DNA, 252 bp, Glycine max
  Clone ID: 700946379H1
ccaagaggaacaatgcctgttgcagggcctgctgatgcccttccatactgctacatgccgcctcagcatccgtcccaagttggagctgctggtgtcataatgggtaagcctgtgatggacccaaacatgtatgtcagcagtctcacccttacatggcaccacaaatgtggccacagccaccagaccaacgacagtcatctccagaacattagctgatgtgtcgtggaaattaagataaccaggcactggaat

SEQ ID NO: 36950 - DNA, 215 bp, Glycine max
  Clone ID: 700946380H1
atagaaaatcccgatggtaacgccgctttggtgaactccttctgcgaaatcacttcctcttccaaggaagaagctcttttctttttggagagccacaatttcgacctagacgctgccgtttcgacttttctcgacaacccagcaatccccttatatgtctccatgacgaccttggcattcccaatcccaacgccgttgccactcccgcagattct

SEQ ID NO: 36951 - DNA, 249 bp, Glycine max
  Clone ID: 700946381H1
gcatccatctctgatctcactcaccattcaccaacctgcttctctgttctcttctttcccttcccaagaagaagaagaagaagatgccttcttcagaatcatcaacaggcttctccgaaaccatttgtgtaccggcgctggtggcttcatcgcctcttggatggtcaaactcctcttggagaaaggctacactgtccgaggaaccctcagaaacccagatgatcccaagaacgggcacttaaaagagtt

SEQ ID NO: 36952 - DNA, 246 bp, Glycine max
  Clone ID: 700946382H1
gcaagacaaaggtaggatggtcttgattatcttttttactctaattcgtgctttagttttggtaagtgtgttgttttcttgttctgtttcatcttcataaatttatttgtagcattatctcgtatatgaggtctatcatccaaatattgacttggaaggaaatgtttgtctcaacatcttacgagaagattggaaacctgtccttaatataaacactgtcatctatggcttgtatcatctcttcac

SEQ ID NO: 36953 - DNA, 56 bp, Glycine max
  Clone ID: 700946383H1
cccacacttgctcactctttcgctctcgctctctctccctgagcaatcactcatta

SEQ ID NO: 36954 - DNA, 252 bp, Glycine max
  Clone ID: 700946384H1
acgtaagtcgatcggctcgagggcatcaactgaccctgattgcgggtgtggcctgtggcgtgatctaacccagagagatcatcatcatcatcatcccctcacgcgccagggcctccgtggactgctccaacctggtctcaccatggccgattgcttgtccttcgtcaccaacggcagcaccatcacaaagccagagggcacatgctgctctggtttgaagtctgttctcaaaaccgctccggcgtgtctctg

SEQ ID NO: 36955 - DNA, 248 bp, Glycine max
  Clone ID: 700946385H1
gcttctttcttccttgcagcgcgattgctgcatcctcctccaataagagctcgctgctagcgaaccctaacacggcggcaacgtgaggtgttcggttgaagttcagatcagccatggccgcagcaaccccacttctctgcggttcctcctctccgtttccgtaaccctaaccctaaccctgcttaacctcgccgcctcaaattccgaaggcgacgctctctacacgctgaaacggagcctctcggacc

SEQ ID NO: 36956 - DNA, 247 bp, Glycine max
  Clone ID: 700946386H1
aaaatgtccatcctaagcactgcagggagtggaaaattcagcagtgaccggacaattgctcaatatgccaaggaaatttggaacatagaagagtgccgcgtgccataatttctgctggatgtgtgtctatgcactcaagttactgtatatagcaccaacagaatgataagtaaaaagaagtgaataataaaaattaaaaataatttctgaaaagagaaagtgaaggagattttagctttctataata

SEQ ID NO: 36957 - DNA, 248 bp, Glycine max
  Clone ID: 700946391H1
aagcaatctacagccttcaattaccaacaagaatatgaagcaaactctcttcttctccttccttctactcaccaccattttctcaatcaccactttagctcagtcaccagctgcagcccctaaagccccacaaaacctgcccctgccacaccggctccagcgccggcaaaacctttagtcccttcattaccccagtcaccatcttcaggtgttgattcttctggaagccaagacattgtgaagatcct

SEQ ID NO: 36958 - DNA, 247 bp, Glycine max
  Clone ID: 700946392H1
aagagctttgagctctattgaaggaatcggagaccaagtcttgtgaggtagatgatctgtctcgtctcccttgttaagcccctcagaatctggggtggtaaagaaactaaaaatgtgaacctctttactaattgtgatcatgctttgagctgaaacgagtgacccctgcaagctctgttgaagagaacagagaccaagctttgtcaagaagatgatttgtatggatcacaaaatggagaactgagca

SEQ ID NO: 36959 - DNA, 233 bp, Glycine max
  Clone ID: 700946394H1
tattcacttcttgccaccgctctcgctcttcctgaagatggaaagatcttggccatggatattaacagggagaattatgaattgggtttgccagtaattaagaaagctggtgttgaccacaaaattgaatcagagaaggtcctgctctcccagttcttgatgaaatggttaaagatgagaagaaccatgggagctcatgacttcatctttgtggacgctagacaagggacaac

SEQ ID NO: 36960 - DNA, 134 bp, Glycine max
  Clone ID: 700946395H1
catggctcttcgcagactcaacaaacctttctccaacgccacttccatttatcgccagtcctcttcgctctccgctcacgaaaaacacaaatctcgcgccgattggataaagcagctcaacgatcctctcgggc

SEQ ID NO: 36961 - DNA, 250 bp, Glycine max
  Clone ID: 700946350H1
caaagctcctgagggttctctcaggaaaaatgcagctcagaaacaagttttggaagcaatgtctcatagaatgcatgtagacaacagtgtaaaacttattgggaagcttttatttggtattgaaaagggtccgaagtactcaacgctgttagaccggcaggatcggcacttgttgatgattggcactgccttaaaaccatggtgaggacttttgagacacattgtggatccttgtctcagtatggcatga

SEQ ID NO: 36962 - DNA, 204 bp, Glycine max
  Clone ID: 700946312H1
cgaactcattgacttcatctacttaatgtcattgatgtccgagatatgcagtatacatttctctataatctttgtgagcagctgaacttgggatatttatggaatattattctgatatgttctcctcaggatggttttgtccctatcagtactggtagaatttgagatcaatgccaagctccagtgcacgtgagcacttcaaca

SEQ ID NO: 36963 - DNA, 261 bp, Glycine max
  Clone ID: 700946314H1
cctaacgcgtgcatagcagagtcagagacagagacgcagccatggggcggagacctgcgaggtgttataggcaaattaagaacaagccataccccaagtcacgtttctgccgtggtgttcctgatcccaagatcaggatttagatgttggtatgaagaagaagggtgttgatgagtttcctttctgtgtccatctggttagttgggagaaggaaaatgtttcaagtgaggccctggaagctgctcgcattgcttgcaacaa

SEQ ID NO: 36964 - DNA, 262 bp, Glycine max
  Clone ID: 700946315H1
aaagaaatggtttaagataatagtcaaattgaagaaatcgaagaaagataaatccaaagaagaaaagatcactgatgaaaattcaaacgaatactccaacgggaagcagagtactcgtgaagagtcaagtagcattcccaataaggtttaatgatggacaggacagttccttcaaagttgatggatgatattgcagctactcggattcaaaatgcatttcgttcatttatggcaagaagaacattacaccatctaaggggtg

SEQ ID NO: 36965 - DNA, 254 bp, Glycine max
  Clone ID: 700946317H1
tatctatgtttgcaagattctctgattcctgagaaagtttcagggaaaattgttatatgtgagagaggtgggaatccgagagtggaaaagggtttggtggttaagcttgctggaggtgctggaatgatattggcgaaagtgaagcctacggagaagagttagttgctgactctcatcttcttcctgctgcgtctttgggacaaaaatcaagcgagattttgaagaactatgtttcatcttcacctaatccaaca

SEQ ID NO: 36966 - DNA, 256 bp, Glycine max
  Clone ID: 700946318H1
cctggttttatgaaaggcagtttagggcaacctactgcaagagagcaacttatcggtggacattctatggttgacaattctaggggtttgcttcattgggcgcaaagcattagttttgttgcagtttccatggacctactttacaactagttctcccagcagattcatcaactcctggttacatagaaggtttcactccagttaagtctcttggttctacgtcttctgcatatattctaattccttctcctagcat

SEQ ID NO: 36967 - DNA, 254 bp, Glycine max
  Clone ID: 700946320H1
ctccaattcatcctctctctcccatagataacaacaaaaaagtcccagtcacgaattagtcaccaccatcagtacatacacttcctcaaaaaatggaaatggaagcaagcccaagcccaagcccaagcccgaagcaatagtggcaaggaagctatggaacatagtacgcatcgtgttcctgatgttgagaaagggcatatcaaagagcaaactcgccgctgacttcaacttgaacttgtcgttcaaacgtggca

SEQ ID NO: 36968 - DNA, 252 bp, Glycine max
  Clone ID: 700946321H1
cttccccactctctcacatattgcctctctctttcctctttccattgtccatggcgtccctcatcgaatctggctggcagtacttgatcacacatttcagtgactttcaactggcgtgtttgggaagtttctttctcatgaaggcgttttcttcttgtctggacttccctttatatggcttgagagggcagggtggatgagcaagtacaaaattcaggccaaaaataacacccctgcagctcaggagaaatg

SEQ ID NO: 36969 - DNA, 241 bp, Glycine max
  Clone ID: 700946323H1
ctcgagcgaatctgctccattgctcgttcttgctacaaacgagaagatgctatctttgatccatcatagtctacatcatattccagtattacatgcacatctacgctttgcacccagctctctactgctacagggatgagccgggatgttcagcctccagataagcatgcatatacggcatccagtacggtgacagttcgttctccgctggctacgtcagccgcgagcggctctccgtgac

SEQ ID NO: 36970 - DNA, 256 bp, Glycine max
  Clone ID: 700946324H1
tgaattccagaccaaccttgtgccataccccaggattcacttcatgctttcatcttatgctcccgtgatttcagctgagaaggctcaccatgagcagttatcagttggtgaaatcacaaacagcgcattcgagccatatctatgatggccaagtgtgatcctcgccatggaaaatacatggcttgctgtctcatgtaccggggtgatgttgtgcctaaagatgttaatgcagctgtgggaattatcaagaccaagc

SEQ ID NO: 36971 - DNA, 253 bp, Glycine max
  Clone ID: 700946327H1
cgaggatttgacactgatatatctgttgaagtacatgaaattaaggtatttttttggctcatcattgtggctaaaattttccacccaaatgcatgataggatgcatatgtgaggtgcagttaagtatatagctttaaatatgtatttcagaaacatgcactgctaaccattttacttttctagagatctgtggcttcaacgggaaaaagagctgcaatccgatttgcagatctcaagaggaaaagatattggt

SEQ ID NO: 36972 - DNA, 256 bp, Glycine max
  Clone ID: 700946330H1
accgaatctaagtgtaaactgtacaccacaaacaaaagagagtctctgtctctttcattcacatttcccagttctgaaaaaccctatatcagtgttcctcattctctctctcgccggaaaaccgcctcgggatgaggaccgcggtggttggtttgggtgacgtggatcgaaatgggtgtgtggaaggctcggttgctgtcgaccaacctgcctctgttgcaccccaacgccaaacacagttgttggtgatccacgg

SEQ ID NO: 36973 - DNA, 255 bp, Glycine max
  Clone ID: 700946331H1
gcatcactgcgttgaaaaccattagaaacatatagtaattgcttagataacaagtttgcacgtatgtaattaaaggagtttgcagcttgtataatagatatttccattgtttcagtgtgccaaacaattctgtcccagctcagtcagtctacttcataatatattttcttatttgaagtggcattcatttgaattcacggtagatttggtgccacaataaacttgctctatggggaacaaacttgtggccaggga

SEQ ID NO: 36974 - DNA, 260 bp, Glycine max
  Clone ID: 700946332H1
gtagagcaaatcccgatggtaacgccgctttggtgaactccttctgcgaaatcacttcctcttccaaggaagaagctcttttctttttggagagccacaatttcgacctagacgctgccgtttcgactttcctcgacaacccaacaaccccctcatccctctcaacgacgaccttgccattcccaaccccaacgccgtttcccctccctcagattctcactctccggacttcaacccttctcgctcgccgtctccgtctc

SEQ ID NO: 36975 - DNA, 252 bp, Glycine max
  Clone ID: 700946333H1
tctcgagtccgaatcggctcgagggccaacccctttgggtctagcactagcagcccctacgtgttgtctatctgataatgctcctgcaggcatacagggagccaggcatgctcaaattggaatatctttatcagatctcaccttaacaataagctgcagttggggttgcttccgactaacgtccaccagcttaatttgcacactgggatttgtaatggcaacatcaccaaccatggtaagagtaaagaaagt

SEQ ID NO: 36976 - DNA, 255 bp, Glycine max
  Clone ID: 700946334H1
gaaggatggtaaaactcattagtttccttccatcaaggtcatggagtatataaagcactcacatgcattggtactatttgcaatacaagctcatctcttgggaagaaattagtttaagccttagctagaaaaagggagtgagttagtgagttgagaggcagaagaaaagaagaagaaaggtggagtgagtgagtgaatagaaaaaaaaaacccaccatggggaggcctccttgctgtgacaaagttggcatcaag

SEQ ID NO: 36977 - DNA, 252 bp, Glycine max
  Clone ID: 700946335H1
caacagcacaaagcgggttactgtctgttcaagctaccatctctctctctctttcttagtgcctccttgccagaagttaaaatggcccaagaaactttcctattcacatctgaatcagtgaacgaggggcacccgacaagctctgtgaccagatctccgatgctgtgctcgatgcatgcttggagcaggaccctgacagcaaggttgcctgtgaaacctgcaccaagaccaacatggtgatggttttcggag

SEQ ID NO: 36978 - DNA, 252 bp, Glycine max
  Clone ID: 700946336H1
gcagaaagcaagctcatcctagagttttaaaaatggcagcagcctcctccatggctctctcttccccatccttggctggcaaggccgtgaagctgggcccatcagcccccgaagtcgggagggtcagcatgaggagaccgtcaccaagcaggcctcctccggaagcccatggtacggcccagaccgcgtcaagtacttgggcccattctctggcgagcccccgtcctacctcactggcgagttcccaggtga

SEQ ID NO: 36979 - DNA, 253 bp, Glycine max
  Clone ID: 700946337H1
ataatgtcgtcagagaaggaaactgagagtcggaagttgggttcggaagagatttcacgcgagttcaaaaccctagtcagctccaatgatctccactcccttaaccacatgcaacacaccatattgggaaggttcaggacagcaatgcggtgttgtcgcatttcaatgacttctctcagcactgcttcgctgagatttccggcgacatcgctagaaacacgcgtgttttgaagtctgtcaagtctgaccttga

SEQ ID NO: 36980 - DNA, 258 bp, Glycine max
  Clone ID: 700946338H1
gctcgcgatctagaactagtgttccaataaacgatccaatactcgtgatatctggtcatatagtccacccaagttgacgacccaggctcataggtggatctgcatcttggtgccgctggccctgcgctactgggagatgtttcttggtacctgtcacattggtctccaaaggacatgatgtctactcaggtgaattgaagatcaatcttgtggatctgaaggggggtggcttgttcagcccaagagactctgcgccat

SEQ ID NO: 36981 - DNA, 250 bp, Glycine max
  Clone ID: 700946339H1
gaaaaggctgtgtccgttactcgggagtggaagatggcgacggcgccgggaaatcaaatgttggagggcggaggaggagcgccgcagcctccgggtacagacatgaccggaatatgcttccgggatcagctctgctcaatagcttccctctggatcgcaacttggtcttcgattacttcgcactctcccctttctacgactggacctgcaacaacgagcagctccgcatgcgctccgttcaccccctcga

SEQ ID NO: 36982 - DNA, 252 bp, Glycine max
  Clone ID: 700946344H1
ctcgagcgaatcggctcgagcatgccaaatggaagtttaggtgaggttcttcatagcaagaaagggggccactgccattggtacacaaggtataagattgctgtggaggcttcaaagggcctttgctatctacacatgactgttcaccactcattgtccatagagatgttaaatccaacaacatccttcttgattccaattttgaagcacatgttgctgattttgggctcgctaaattcctgcaagattctg

SEQ ID NO: 36983 - DNA, 252 bp, Glycine max
  Clone ID: 700946346H1
acaaaaccctgaagaaagacacagccattgtttgtttactttccattgattgagcgaaagtttgttttttctgcgatcattttccattgggtggaagaaagtctcaacctttagtcgaaagagcaaggatctgaggagtgagcgatcatgtgtggtggtgcgattatctccgacttcattccagcgggtcccgccggcggggcgcacgcgtgaccgccgacatcctgtggccgaatttgaggaagcggttct

SEQ ID NO: 36984 - DNA, 253 bp, Glycine max
  Clone ID: 700946347H1
acaagattggggagacccttcatgtgggagggcacaagaaggaggaggagcataagggtgagcaccatgctggagaatacaaaggggagcaccatggtgaacacagtagtgagtacaaaggagagcatcatggtgacacaaagctggagagtaccatggtgagcacaagccagagcacaaagaggggttcctagacaaagtcaaggacaagatccatggtgagggcggcgcgccgagggcgagaagaagaaga

SEQ ID NO: 36985 - DNA, 261 bp, Glycine max
  Clone ID: 700946348H1
ggctgactggtctatttggtatggatgatgacgacccacttgaggatatagatgataatgaccttgatagcaatgatgaaagtcaaaataccttcaagtccttccatcttcttaatgctttaagcgacctcctgatgcttctaaggatatgctcttaaatgcatccatcaggaaagaggtgtgtccaatgtttagtgcatcgctaatcaagaagattctagacaattttgtcccggatgagttttgccctgatccaattcc

SEQ ID NO: 36986 - DNA, 260 bp, Glycine max
  Clone ID: 700946311H1
cgcaaattctcctcctacaccaacaataatggcaccttctccacaagaaatcatcttccgatccccactccccgatattcccatccccacacatctcccattgtactcttactgcttccaaaacttgtcaaagttccatgacgtccatgcctcatcgacggcgacaccggcgagaccctcacctacgccgacgtcgacctcgctgctcgccgcatcgcctccggcctccacaaaatcggcatccgccagggtgacgtcat

SEQ ID NO: 36987 - DNA, 264 bp, Glycine max
  Clone ID: 700946274H1
ctctcgcacttcgttttcaccttcgcctcgcagaagacagagcgtagtaagaggacgcagagatgaatatgaacgaagatagtggtgaaggaagcgcgaggagggtccaagtgcgcttcgtgacgacgttaggcgagccgtacaaagttccgaccactgccatcgccatccccgccgacctcactcgattaggcctctcctcactcgtcaacgcactccttcaatccaacgacgctgatcatcagccggcgccgtttgattttt

SEQ ID NO: 36988 - DNA, 261 bp, Glycine max
  Clone ID: 700946275H1
cctggaattattgatccatatagggaagatcacaatcctggagtttttaataatcccagtgaagatgattttggtatgccctccctctggccattgcaatctggaactccagcagtcccgggattccaattattcagttctgaagtggaggatgatgtgtcagacgcattgattgatttgcatcatggcaatattaattgctcctcgtcactgaatggttatacgttggctccagatactttgggatctggcactctcata

SEQ ID NO: 36989 - DNA, 262 bp, Glycine max
  Clone ID: 700946276H1
cttcctagacctcctggtaatcaatctagcaagccacgagtgggtcactctgctccattagtattaaaaaatccagaggctgccatgactaataaatttccttcagttgtatttagtgcagcatctccacttccaactccacctgtctctcggagtttctctataccttctagtggtcagagagttgtggcattaaatgtctctaatactaagtatttggatactccccaagtttcaaaggttgataaagccgtgtcacctc

SEQ ID NO: 36990 - DNA, 260 bp, Glycine max
  Clone ID: 700946277H1
cgaacagcaaaagatccatgatggtgaacctgttgtcgaggatgatgatgatgaggaagaggatgatgatgatgatgatgatgaggatgatgaccatgccgaaggactagaaggtgatgcatctggtaggtcgaagcagaccagaagtgaaaagaagagtcgcaaggcaatgcttaaacttggaatgaaacctgtcacaggtgtcagccgagtgacagtcaagaagagcaagaatatcctgttcgttatctcaaaaccag

SEQ ID NO: 36991 - DNA, 262 bp, Glycine max
  Clone ID: 700946278H1
aaaggcaggagcaaccaaacgcctcgcctcctcctttgagagcaatccatcgatcgatgccgttgcaacacccgtcactccaaagccgcgtgtcgttgtagagcgaaacggcgccgttttgagcaagtgggttttattgctgtgcctcctcagctcgattagatcaactcacctgggtgctgcgtgtgaagaaaagaaaagagagaaaaaccgaaacagaaacataaaaagtagctgccaatttcacgttctcattcttcca

SEQ ID NO: 36992 - DNA, 262 bp, Glycine max
  Clone ID: 700946279H1
gtggggagatcagaaggaattgcagggttgtgaattgatcatgatgtattttgtaataatgatgcatgcattggcatttaattcatgtttgtgtgttggctttttgtgtagctggtgatggcaataataacaagagtatcagcaggtggtagtagtagcgacgtgttagaggtcatgactcatgagagattagtgtattgcaaggtcatggtcatataagtttgactagatcttgggttatattaatgttagtatttttcag

SEQ ID NO: 36993 - DNA, 266 bp, Glycine max
  Clone ID: 700946281H1
tggagctcttgaaaatgtcaaggatacattgaaggaattggttatgcttcctttacaaaggccagagctattttgtaaagggcaattaaccaagccgtgcaagggtatcctattatttggtccccctggaacaggtaagacaatgcttgcaaaggcagttgctaccgaagctggtgcacatttcatcaacatttccatgtcaagtatcacatctaagtggtttggtgagggtgaaaaatacgtgaaagctgttttttccctggcaa

SEQ ID NO: 36994 - DNA, 262 bp, Glycine max
  Clone ID: 700946282H1
cacacactttctctctctatctctctctctctctctctctggttgtctttcattttgttcattgttgttgatgatgtcacgcgccgccgtgttattacacgcgcaggaggaggaggaggaggagtgtagtacttcgacgtcgtcgtcgatcgggaggaacagcgacgtgtcgtcggagagatcaatggaggaaggagaaaacgaggtggaaagtgcctaccatggacctttgcatgccatggaaactttggaagaggttctt

SEQ ID NO: 36995 - DNA, 262 bp, Glycine max
  Clone ID: 700946283H1
atttactgtgtctagcgttatgctattagcggcctataatgtacatcggaagttgcttttgtcttgctcatagatttgagtacagaagatcgctggttagtagttagttagtcgtgcgtgtattagcggtatttatgtggttgatattttgctatgattattactgaattcatcaaataacagtgacttctcaattgtgtcaactcaaataactcagtccttcccattaggtgggattggttaaatgcgcagatcgacaatt

SEQ ID NO: 36996 - DNA, 263 bp, Glycine max
  Clone ID: 700946284H1
ctgatttgtctggcagggaaacccttgtccgaatcactggtggtatgaaagttaaagctgacagagatgaatcatctccttatgctgctatgcttgcagctcaggatgttgctgccagatgcaaggaactgggcataactgctcttcatatcaagctccgtgctactggtggtaactagaccaaaacacctggtcctggtgctcaatcagctcttcgagcccttgctcgttcaggcatgaaaattggtcgtatagaggatgtt

SEQ ID NO: 36997 - DNA, 264 bp, Glycine max
  Clone ID: 700946285H1
ccaagctgaagttcaaaccagcttacaatccatatactgaacctagcatagagatttttagttatcatgaaggctttaaaaaatgggtagagataggaaactctggcatgttcagacctgaaatgttgcagacgatgggacttcctgaagatgtccaagttatagcttggggtctttcccttgaaaggccaacgatgatactatacgggatagataacatcagagatctctttggacacaaggtggatcttgggcttataaaga

SEQ ID NO: 36998 - DNA, 258 bp, Glycine max
  Clone ID: 700946286H1
atcacaatcgccacttggctggctataacggaagcgtattgcactgggatctgcaagggggcttgcgtatttgcatgatcattgtgacgctaagattattcaccgtgatgtcaaagcagcaaatatattgttggacgaggaatttgcagcagttgttggagattttggtttagctaaacttatggattataaaggtactcatgtcactactactgtacgtggaacaatttgacatatcgcaccagagtacctctcaac

SEQ ID NO: 36999 - DNA, 260 bp, Glycine max
  Clone ID: 700946290H1
gattctgactgggcttcagaccctgatgataggcattctacttctggtgcagcactgtatgttggtccaaacttggtatcttggtggtccagaaagctgaaagtggtctctcgatccagtacagaggcagaatacagaagtttggctgctgtcacagctgatattctatggattcagactcttcaggaacttgcagttcctcatatcacaccgcttgtgctctgtgataattccagtgctgttcaattagcacataatct

SEQ ID NO: 37000 - DNA, 260 bp, Glycine max
  Clone ID: 700946291H1
atctattcttacaagttacatccattgagaaacatgaaggtctcccccttagcattttcaatcctttttttgtccttcaccatagaactcttcattggcattgcttcagcagcacaagaaccagtgcttgacacctcaggccagaagctgagaacaggtgtcaagtactacattctaccagtcttcagaggcagaggtggaggcctaacagtttcaagcagtggcaacaacacatgccccctctttgtggtgcaagagaa

SEQ ID NO: 37001 - DNA, 261 bp, Glycine max
  Clone ID: 700946294H1
cggctcgaggaagagcatcactgaactaacaaagcaaccctatgtcgaaggtggtttgtgtcaccggagccagcggcgccatcggatcatgggtggtcctactcctccaccagcgtggttacaccgtccatgccaccgtccaagatatcaaggatgaaaatgagacgaaacatttggaggaaatggaaggagcaaagagtcatctccatttttttgaaatggatcttcttgacatcgactccattgccgctgccataaagg

SEQ ID NO: 37002 - DNA, 260 bp, Glycine max
  Clone ID: 700946295H1
gttacaacttacggctaaattctcaaagatttaaactttgtctcagagtttccaaattcacccaaccccagagagaaaatgtctctaatcccaaatttcttcggtggcagaaggagcaacgttttcgatcctttttccctcgacgtctgggaccccttcaaggattttcctttcccaaacactctttcttcagcttcctttcctgaattttctcgggaaaattctgcattcgtgagcactcgtgtggattggaaggagac

SEQ ID NO: 37003 - DNA, 217 bp, Glycine max
  Clone ID: 700946296H1
ggaaaaaggcaaaagattctatcttgggtgaaagcgaagatgacactgaagatagaatcaacaaccatatatcaaaatgaagagtgagagataaagtgaaagagggaagacaaatatcatggagaaaattgacataggaaaggaccaagtcgacgaaagggtaaggaaacagcgtggcaatcccagtggcggttgcaagtttgacccactgatgaag

SEQ ID NO: 37004 - DNA, 263 bp, Glycine max
  Clone ID: 700946301H1
ctgaaaagggtgtggtgattttcacaaagagctcttgttgcctctgctatgcagtcaacattctgtttcaagaacttgagtgtgaatcctgtggttcatgagattgatcatgaccctgaaggcagagaaatggagaaagctctttgaggcaaggctgcactgctccagttccagctgtattcataggagggaagctaatgggatccaccaatgaaatcatgtccctccacctaagtggttcactcactcagatgctgaaacct

SEQ ID NO: 37005 - DNA, 257 bp, Glycine max
  Clone ID: 700946304H1
gcaagaatgctgctttagaccctttgtcctactttgaattccaaatgggttacaacccaataagacaatttgatcagaaccatgtggggaccaactcaagctatggattctcctcattgccgtgtctgaatagttctctgatcacgggaacgtgtcggtggcggcggagttttcagataacaactcagcttcaaaaatcagttctttgatgaaggaaagttccagcaatagctcaagtatgagtgtttatccagctg

SEQ ID NO: 37006 - DNA, 257 bp, Glycine max
  Clone ID: 700946306H1
caaaatcaaatccaaacaatgatataaacaatgggggaagagtcaggtctgttcttgatgttggctgtggggttgctagctttggaggatatcttatttcctctaatgtgatagcaatgtcattggcaccaaatgatgtcatcaaaatcaaatccagtttgccttagagaggggaattccagcatatcttggtgtcttggggacccaaagactcccttatccaagtagatcattcgaacttgctcattgctctcgct

SEQ ID NO: 37007 - DNA, 257 bp, Glycine max
  Clone ID: 700946307H1
tttgaaggaggatctgcctagtcggcttcattatgccgcgagtgatcggattgcgccgataattgggttgattgaggaaggtttcaaggttgagcagaagagaaccaagcgccaagagtgtggcggttcgcacggttagacaatgcggttttctccatgaggactatttttattggacatggtcctcgatttgctagagggaggaagataccgtcgtttgagaatgttgagatttataatttgattacttctattct

SEQ ID NO: 37008 - DNA, 257 bp, Glycine max
  Clone ID: 700946308H1
cgctctcgaaggggatcgggattgggaagtacatggtctccgacgtgttttctgtcggagggtacaattgggcgatttatttctaccccgatgggaagagcgtggaggacaatgcaacctacgtgtcgctcttcatcggctggccagcgaaggcaccgatgttagggcacttttcgagttgacccttttggatcagagtgggaaggagaggcacaaggtgcatagccatttcgagaggactcttgaaagcgggcctt

SEQ ID NO: 37009 - DNA, 256 bp, Glycine max
  Clone ID: 700946309H1
tggtaatcgtgagtggtactattcccgaatagcagcaagcaaggcaaggcgtgtgtccgagcagagcaggagtgaaggagaaaaggacccttgtccgtccagtccttattctcttttctcctccctccctcacgcaaccgcaattcctgaaccctaagctagcgccatggctgtcgtttcgcgaagtgcgacgacctatacgcgccactacttaatacgacacgagtttgataggaaaacgaaaacctgcgttgcc

SEQ ID NO: 37010 - DNA, 259 bp, Glycine max
  Clone ID: 700946310H1
aaagcaccatttctcttccctcaactaaactcatattccaaaacgcagagccaaaccatgtcgttccccttcaaccactctcacgccacccacacccaccaccgcaggacgacgacgacgacgaacgacccaccgtttacctccgccgggaaactccttcagcaacccgccacctccgttctacggcgtccctcaaccaccaccccctcagccggagacccacgtgttccattccgctcacgtgacaccaggacacgtg

SEQ ID NO: 37011 - DNA, 263 bp, Glycine max
  Clone ID: 700946273H1
cttgtgttttgctttcttcctcaaaaccaaacatgtcgaacacatgcggcaactgcgactgcgctgacaagactagctgcaccaagggaaacagctatggtgttattgtagagactgagaagagttacatcgagactgttgtcatggatgttccagcagctgagcatgatgggaagtgcaagtgtggcactaactgcacttgcacggactgcacctgtggccattaaggaatatgtatgaaaatgtaattgccatgtgtttgg

SEQ ID NO: 37012 - DNA, 264 bp, Glycine max
  Clone ID: 700946243H1
ccggaaccctacccggtggccggagtctccctccgattaccgtgagctggtggcgaggtacagcgacgagatgaatgttctggcgcaaaagttgctggctttgattacggagagtcttgggctgcgagcttcgtgcattgaagatgctgttggggagttttatcagaacattacgattagttattaccctccgtgccccgaaccggatcttactctcgggttgcaatcgcattctgatatgggagcaatcacgcttctgattca

SEQ ID NO: 37013 - DNA, 263 bp, Glycine max
  Clone ID: 700946244H1
ctgatgtggcatcattctttagactattcactgtagttcctgtgtttgtgactgcatatatctgccactacaatgttcacagcatagacaatgaacttgaggacccctcgcatctgtgaggagtagtacaaaccgcccttgttctatgctcttcagtgtacgtaatgataagcttctttgggttcctcctatttggcgaaggaactcttgatgatgtgctggccaatttcgataccaatcttggaattcctttcggttctgtg

SEQ ID NO: 37014 - DNA, 263 bp, Glycine max
  Clone ID: 700946245H1
aaagaatcaggagaaggaaataatcatcaaccatggcagggagattgacgaacgcagcatcgaggatcttaggcggaaacggcgtcgtttaccgatccgttgcttcctctcttcgcctccgctccggcatgggcctccccgtcggcaaacactatgttcccgacaaaccccttcccatgaatgaggaactcctgtgggacaacggcactgcatttcccgaaccgtgtatagatcgtattgctgacactgtcggaaagtatgaa

SEQ ID NO: 37015 - DNA, 268 bp, Glycine max
  Clone ID: 700946247H1
gagaatagccaatcattggttaaggaggccatccatgttataagctgtggctatgaagagaagactgaatggggcaaagagattgggtggatttacggctcggtcacagaagatattttgactggattcaagatgcactgcagagggtggaaatcagtatattgcatgccaaagcgaccagcattcaagggatctgccccaataaatctatcagatagattgcaccaagttctgaggtgggctcttggctctgttgaaatttttctta

SEQ ID NO: 37016 - DNA, 265 bp, Glycine max
  Clone ID: 700946248H1
gaaaaccagacatcacaaaagcaaaggaattgttgggctgggagccaaaggtcaagttgcgtgatggtcttcctcgtatggaagaggatttccgtctgaggcttggagttggcaaaaagaattaacttgtttttcgctcctttggtgacatgttaaagtagaataataagtgagatgggtctggcccgttttcaaaattttcgtcattatagttattgttacgattatgatactgagaaagttggggggcctgaaatttggcatc

SEQ ID NO: 37017 - DNA, 267 bp, Glycine max
  Clone ID: 700946250H1
gcttcttcagccactccgcacctcgcagcctctgtgccctcaacaaccatggctgaaatcgaaactaccgttccagatcccacccaaatcgacgtcaaactcttcaatcgctggagacttcgaggatgttgaggttaatgatatgtctctggctgattacattggagtgtccccatcaaagcatgctacatatgttcctcacactgctggtaggtactcagtgaagaggttcaggaaagcgcagtgccccattgttgagaggctcac

SEQ ID NO: 37018 - DNA, 268 bp, Glycine max
  Clone ID: 700946251H1
tgatcacatcaaaggggtcctcatgaacatacttgcagcaggtacagataccactgcagccacatcagtttgggctatgacagccctagtaaaaaaccctagagtaatgaagaaagttcaagaagaagttagaaatgtggggggaacaaaagatttcttagatgaagatgatattcaaaaacttccctatttcaaggcaatgataaaagagacgttgagattgcacctaccaggtccactacttgtaccaagagaatcaactgaagag

SEQ ID NO: 37019 - DNA, 265 bp, Glycine max
  Clone ID: 700946252H1
gaaaaaaggagagtgcttagagagagagcaaaacatattattttcattttcatctttttttgagtatcaacaaatggcaaccactgtgatgaccactctcccccaattcagtggtcttagaccccaattctcagctgcccctgtgaagaacttggttgctgtgcaacccatgagtcgcaaggggaagggtgcattgggagctcgatgtgactacattggttcatccactaatctgattatggtggcttctacaaccctgatgctg

SEQ ID NO: 37020 - DNA, 266 bp, Glycine max
  Clone ID: 700946253H1
gtcgagcgaatcggctcaatgccaacccctttgggtctaggcctagcagcccctagtgttgtctatctgataaagctcctgcaggcatacagggagccaggcatgctcaaattggaatatctctgccagatctccaccttaacaataagctgcagttggggttgcttccgactaacgtccaccagcttaatttgcacactgggatttgtaattgcaacatcaccaaccattgtaagagtaaaggctgtctatcatgcttgctgacc

SEQ ID NO: 37021 - DNA, 267 bp, Glycine max
  Clone ID: 700946254H1
gaagaaatgtctcaaaaagacgaatactctcaacaagactctgaaacggagaagtcaccggaaaagcccaagtctcttgatcatacacctgtggctgagggaaacgacacccttgaaactgataacacaatgcatatggaacctgaagaaaacacaacaaaagaagaaaataaagtggttaaggaagaagatggtgagcatacagagtcagcggatggaacagttgcacagaacttggatcatggaaaggaagaaaaccatttactg

SEQ ID NO: 37022 - DNA, 266 bp, Glycine max
  Clone ID: 700946256H1
gggttctcatttcgcaaccatcggccgcacttactcttgttctcaagggattcgattttctctgcactcacttctagggtttcctccgcgctatcagcaatcatggccgacgaaacaccaaatgagatgaaggaggaggttccagaaattgttccttttgatcctaccaagaagaagaagaagaagaagattacaattgtagatcctgctgatgaccctgtggagaaattggctgagaagacagaaaacctctcagtttctgaggg

SEQ ID NO: 37023 - DNA, 265 bp, Glycine max
  Clone ID: 700946257H1
cacaacataacaaaagcttccatttcatttattcattccttcccctctgttttctgcatgtgattgcaacaagaagaaggcttttccacttttcttcagtgttccgttctctctttcttagggtttacgagcttcgataaaagttgaacaaacccagagaaacggaacagaacaccattgattctgtttcttctgggtttgaaaaaaaatgaagaggggtagtagtactagtagtaaagtagagccatttgtgctacccaacagg

SEQ ID NO: 37024 - DNA, 263 bp, Glycine max
  Clone ID: 700946258H1
caagaatggggttctctacagaggtgtgtcacctgatgttttgatgttggaacagacaggacatatacagctggtggacttcagatttggaaaacagctttcaggtgagagaacattcacaatttgtgggatggcagattcactggctccagagattgttttgggaaaaggccacggtttccctgctgactggtgggcgttgggagttttaatatattttatgttacgtggtgagatgccatttggatcatggagagaaaatg

SEQ ID NO: 37025 - DNA, 263 bp, Glycine max
  Clone ID: 700946259H1
ccagaatggggttctctgcagaggtgtgtcaccggatgttttgatgtcaggaacagacaggacatatacagctggtggacttcagatatcgaagacagctttcaggtgagagaacattcacaatttgtgggatggcagattcactggctccagagattgttttgggagaacgccacggtttccctgctgactggtgggcgttcggagttttgatatacattatgttacgtcgtgagatgccatttggatcatgtagagaagat

SEQ ID NO: 37026 - DNA, 259 bp, Glycine max
  Clone ID: 700946260H1
cttttgactccgaacgagcttgaccgcgaaaagattggtcattggtgatcgcagtgttcaattcaataagttctgggattgattcttttacaaagagaatattgccttttttgctctgagatttatccgttcatttcttttattccttttcttttaatggtgatgcttgaatatcagagcaagattctggtgttattatgtttagattaaagagttgtgaaggccctgtgcgctacttgtatcagcaaacttggcatca

SEQ ID NO: 37027 - DNA, 262 bp, Glycine max
  Clone ID: 700946261H1
tttttaatagccttacaaagtacaatggtgacaaaatggttcctgttccagcatcacaggttaaacaaattgcaggaagagctggtcggagaggatgcctttaccctgatggactcgccacaaccttgcatttagatgatttggactacttgattgagtgtttgaaacaaccttttgatgatgtaaaaaaggtaggcctttttccatcttatgagcaggttgaattgttttctgggcaacttccagatttgacattcaccca

SEQ ID NO: 37028 - DNA, 224 bp, Glycine max
  Clone ID: 700946262H1
ctcgagagaaacgttctccgagagctttactcagagtccgaggcgtagatacgacgctctcgggaccacccaactcatcatctgaagtcaagccatggctataattgcacctgagcggtcacagcacgatgctcgtcaatatcattctacaatgtgtgacggactgtcatctgatggacaggactcgcgtcacatcctatgacgacgtctatgatcagttttga

SEQ ID NO: 37029 - DNA, 211 bp, Glycine max
  Clone ID: 700946264H1
gaggaaaggaagggagtagggagtgagtaattttgaaaataaagaggaaagcttgaagcagaagagagagatgtcatcatcttcagacctggacaggcaaatagagcagttgaagaggtgtgagcctcttgaggagtctgaagtgaaggtgctctgcctcaaagccatggaaatcctcgtcgaagagagcaacgttcagagggtcaacgct

SEQ ID NO: 37030 - DNA, 265 bp, Glycine max
  Clone ID: 700946266H1
ccagaatccatcttagacccatgtgtttagtagtaaatgcttgcgcaacagggatcttcgagataatgttgttggggtttgttttgtggcccatgatataactgctcagaagaatgtcatggacaaatttacgcgtattgaaggtgattacaaggcaattgtacagaaccgcaatccattaatccctcctatatttggcacagatgaatttggctggtgttgtgagtggaatccagctatgacgaagttaactggatggaagcga

SEQ ID NO: 37031 - DNA, 265 bp, Glycine max
  Clone ID: 700946267H1
cgcagagtagagcagcagagaagagagaaaacggcactgcagccgtagaaggaaaaccgaccatggtgcacgtctccttttacaggaactatggtaagacgtttaagaagccccgccgtccgtacgagaaggagcgtctagacgcggagctgaagctggtgggggagtacgggctgcggtgcaagagggagctgtggagggtgcagtacgcgctcagccgcatccgcaacaacgcgcggaatctccttaccctcgacgagaagaa

SEQ ID NO: 37032 - DNA, 261 bp, Glycine max
  Clone ID: 700946268H1
ctagtactagtaaatcaagcactcaaaaatgtcctccagaaattcaaagtcatcttagtgatgggactgatgacgatctaagaactcttcctgctctagatccaccaattgaacaagatgattctaatacaatgtcagtggcagttggtaatgatttcgttgaagataccgtattgtacagacttcaggatattatatcaaagttagacatcaaaataagactctgcatcagagatagtttgttccggttggcacaaaggc

SEQ ID NO: 37033 - DNA, 265 bp, Glycine max
  Clone ID: 700946270H1
ctacaacacaatcaagtccctgaatgctttttagagagagaaagagtcataataaagtgaaagaaaaagaaaaaggagagtagtgaaacaagaagaaaggagaagaagatggtgtttgaggaaactgagctgaggcttggactgagactaggactccctggaaatggagccgcgccaacaactgaagctgctgcggaattaggagtgaggaagagagggttctactgaaactgaaaccgatgaaacaacctccgttgatttgatg

SEQ ID NO: 37034 - DNA, 264 bp, Glycine max
  Clone ID: 700946272H1
ttcaaaaattttccggaaaaaatttgaatctatttctatatgcgaatcaatcctactacttctggtcctgaggttactgcgcttgcgaaaaaaaatctgggacgtatcgcccaaataattggtccggtactagatgtagcttttcccccaggtaagatgcctaatatttacaacgctctgatagttaagggtcgagatactgttggtcaacaaattaatgtgccttgtgaagtacagcaattattaggacatagtcgaattaga

SEQ ID NO: 37035 - DNA, 266 bp, Glycine max
  Clone ID: 700946242H1
atctgagcgattcggctcgaactttttctacttaccttttgccttaatccaaatacgatggcagccatggcaaccacaaccctctcttcaaaccccaaactctcattcttcaacggaaagcccgtcacatattcttcccgcgtcgcgcccaccaccaaattatcctcatccaaacaaggcacaatttccatgtccctaaccccacccccctacgacctccagtccttcaaattccagcccatcaaagaatccatcgtgtcacggga

SEQ ID NO: 37036 - DNA, 259 bp, Glycine max
  Clone ID: 700946214H1
ccgtaatgaagatcagcgtagtcgtcagcactaggccgcacgagatccgatttcgcgccaactggggttaaatgatgaaggttataaggatgatcagtagagtacctagcatcaagagtttggcgattcgtacctgttatggctacgagtgtgacgcctaaaagagtatatttatcccggcatggtcctccaccgggctagatggtagcaaaatatcgacggctccccaatgatgagatccgacgtttggattccatca

SEQ ID NO: 37037 - DNA, 265 bp, Glycine max
  Clone ID: 700946215H1
ctggtttgaatgttcttgttgagacctactttgctgacatccctgctgaggcatacaagaccctcacatctctgaatggcgtcactgcatatggatttgatttggtccgtggaaccaacactcttgatttgatcaagggtggatttcccagcggaaaatacctctttgctggagtggttgatggaaggaacatctgggccaatgaccttgctgcttctctcactaccttgcagggtcttgagggcattgtgggcaaagataagct

SEQ ID NO: 37038 - DNA, 266 bp, Glycine max
  Clone ID: 700946216H1
tgtttgttgttgtaactcgttcttcttcttttgttgttctgtgtttgtgtttgttttttctctcacctgaaaatgtcttgctgcggtggtaactgtggttgcggaagctcctgcaagtgcggcaacggctgcggaggctgcaagatgtacccagacttgagctacactgagtcaaccaccaccgagaccttggtcatgggagtggcacctgttaaggctcaatttgagggtgctgaaatgggtgtgcccgctgagaacgatggctg

SEQ ID NO: 37039 - DNA, 77 bp, Glycine max
  Clone ID: 700946217H1
ctgattcgttcgttcactttcactttaccaactcctaacaatttctctctgatttccttacttcaccgctatcaatg

SEQ ID NO: 37040 - DNA, 268 bp, Glycine max
  Clone ID: 700946218H1
ctcggataaccgtagtaattctagagctaatacgtgcaacaaaccccgacttctggaagggatgcatttattagataaaaggtcaacacaggctctgcctgttgctttgatgattcatgataactcgtcggatcgcacggcctttgtgccggcgacgcatcattcaaatttctgccctatcaactttcgatggtaggatagtggcctaccatggtggtgacgggtgacggagaattagggttcgattccggagagggagcctgagaaa

SEQ ID NO: 37041 - DNA, 269 bp, Glycine max
  Clone ID: 700946219H1
tgcatgttcatggcacccatgagagacattggctctgataatggagctccacaaaagaagattgtgtagtccctcaaaaggaaggattgcatcaaacactttgccagcgtcagagagaaagtcaaagtgggtgtaaacggctatgagcttggtggccaagcagagcaaactatgcgcagtggtgaaaaccaactgagagtgaagttagagagcttgttggagagtgaggcaatattgaaaaaaagtgttgaaggagtccttaagttcat

SEQ ID NO: 37042 - DNA, 270 bp, Glycine max
  Clone ID: 700946220H1
caccctgcaacaagccagagatcctctctccaagcttgcttgacttcccttccctcactctcagcagcccagtcactcctttgaatgatgacccttttgacaagtcctcctcattaccttcattgggaagcacttcttcagaggaagagagagccatagctgaaaaagggttctacttgcatccctctcccatgtctactccaagagactttgagcctcagctcttgcctttgttccctgtgacttcacctagagtttctgagtcaacta

SEQ ID NO: 37043 - DNA, 234 bp, Glycine max
  Clone ID: 700946221H1
ggagtggcaaggattgaattcataatcagttggagaacatatctaggactaactcattgttaaaacttaagctattaatggagtgtaggaatggtttatatctgtaacttattactgccaagtattgcagctaaattaatattctaacttatcggctgtgaaaaggcactgtaattgtagattagatttgggacaactgtgcactataaattctacatttgacatcgtggttct

SEQ ID NO: 37044 - DNA, 266 bp, Glycine max
  Clone ID: 700946222H1
gtactcttcacctcgtcctccgtctccgtggtggcatgcagatcttcgttaagacactcaccggcaagaccataaccctagaggttgaaagctccgacaccatcgataacgtcaaggccaagatccaggacaaggagggtatccccccggaccagcaacgtctcatcttcgccggaaagcagctcgaggacggccgcaccctcgccgactacaacatccagaaggaatcaacccttcacctcgtcctccgtctccgtggtggcatg

SEQ ID NO: 37045 - DNA, 270 bp, Glycine max
  Clone ID: 700946223H1
cccaaagctgagaagcccaaggccgagcccgagaaaaagaaggacggtggcggcgagaagcccaaggccgagcccgagaaaaagaaggacggtggcggcgagaaacccaaggccgagcccgagaaaaagaaggatggtggggagaagcccaaaggggatgctccgaaaaaggaagccgagaagcccaagcccgggcccgagaagcccaaggacaagcccgcgccagctcccttacccgtgcagccacatatggctgcacctatggcggtt

SEQ ID NO: 37046 - DNA, 266 bp, Glycine max
  Clone ID: 700946224H1
ctcgagcgctcgagccgctgccttccattttccgtgattttctcatattctattccagttggtacccttgacctttttttagatctcgaattctcattttctgttgacacaagtaaatgagtaatctatcaaaagcttaaatatacaggcatgtgcactaaagtggctagtgttgcttgtgattgagaagatataactaggaccgttatatgttatctaggattctaggttaagtgaacctgccttccattttccgtgattttctc

SEQ ID NO: 37047 - DNA, 267 bp, Glycine max
  Clone ID: 700946225H1
ctttctccggcgacgatctcagattccggccactcctctcgccggcgagcccttactcttccctcctccgtcgagccctctccgattcgaatcgttcccagcctcgcaccaccatgaatcccgaatacgattatttgttcaagcttttgctgattggagattctggtgtaggcaagtcatgtcttctcctgaggtttgctgatgattcataccttgacagctatatcagtaccattggagtggactttaaaatccgcactgtggagc

SEQ ID NO: 37048 - DNA, 263 bp, Glycine max
  Clone ID: 700946227H1
gaacgtgtactacaacgaagcttcctgcgggcggtttgtcccacgcgcagtgctgatggacctggagcccggaaccatggacagcgtgcggactgggccgtacgggcagatattccggcccgacaacttcgtgttcgggcagtccggcgcgggcaacaactgggccaaggggcactacacggagggcgccgagctcatcgactccgtccttgacgtcgtgcgcaaggaggccgagaactgcgactgcctccaggggttccagg

SEQ ID NO: 37049 - DNA, 266 bp, Glycine max
  Clone ID: 700946228H1
gtcccaaagagttaacaagagattcaagaccggcatggctaatgaagaggaacagaaaaaccacctcttcggcatcaaagatctcggtcacaagactctccttcagagtgatgcactctatcagtatatacttgaaaccagtgtctatccaagagagcacgagtgcttgaaagagatacgcaagatgactgcaaaacacccactgaacatcatggcaacaccagcagacgaaggacaacttctgagcatgcttgttaagctcacga

SEQ ID NO: 37050 - DNA, 267 bp, Glycine max
  Clone ID: 700946231H1
ctttttgctagtacacagaagtttgataccctagttgactacaatcctgtttatgtgtcatctttccggaagcaagaactccagggtggggcaaggctgcttctaccaattggtgtcaatgacactgtaattccagtatatgatgatgaaccctcaagtattatagcttatgccttaatgtcaccagaatatcatttccaattaaatgatgaaggagaaaggccaagagaaggaaatgagttcacttcatcatatttttctgactca

SEQ ID NO: 37051 - DNA, 265 bp, Glycine max
  Clone ID: 700946232H1
gtgacaaagtgttcactgctttgtgccaagggaagatcattgatccacttttggaatgccttggggagtggaatggggcacctcttccaatatgttagtttttcttattttctgttttcttgaagagtggtttcttttctgtacacgtgtttgtgttgatattaagcatttggtttgtctatataaggctgtggcaaatcaatccacatacaacaacttcccagttttccttgatgtatgccatgcaaggaacttgtaattcata

SEQ ID NO: 37052 - DNA, 272 bp, Glycine max
  Clone ID: 700946233H1
gggtgggtggtgtgattgagtatgagcatgaattctctcctagcaagcacgcgtgcttcttcttctccattataccaacactcttccaccttgacactcagacaaccccattttcttttcatctcctccaattccaagtcgtctgcctttccattggttgcatattgttcctctgccccttcacccaatgaatcagaccaaaccattcttctaaacgaaacctttcattctcaagtcacaacccccaaaatccctccctttgtatctcctgt

SEQ ID NO: 37053 - DNA, 271 bp, Glycine max
  Clone ID: 700946234H1
ttcttttcttactctcttccatgcaacctcctcgctgcaagaacaatgatcttcccaactcagaaacctcaacaacaatgaaaggctaaaggaacagcagcatcagcatctccattgttgtggtggtgttctccatattcctctttggggtcttcatgtacaacgaggacgttaagtcaatggccgagttcactttcttgaggcctaaggctcaagaaatccaagaagaaacggtttccaacaacaattcaagatctcaaccagagagaaa

SEQ ID NO: 37054 - DNA, 267 bp, Glycine max
  Clone ID: 700946235H1
acagagtcctgatattgctcaaggtgtgcacggccacctcacaaagaggcctgaggagattggtgctggtgaccaaggtcatatgttcggctatgccactgacgagactcccgagctcatgcccttgagccatgtccttgccacgaagctcggtgccaagctcaccgaggttcggaagaacgggacatgcccttggctgagacctgatggcaagacccaagtcactgttgagtactacaatgacaagggtgccatggttccaatccg

SEQ ID NO: 37055 - DNA, 266 bp, Glycine max
  Clone ID: 700946237H1
actgaaagttcggtgcaaacacaagaattaattgttggaagtaaacctcaactgtgcccagaaccatccaatgctgtaaattactcccttggtactgtatctgggccccaggatacagggataactccagagaaccgaacatgcaatcctaagagatgtagattttttggctgtacgaaaggagctcgaggtgcttcggggctttgtatcgggcatggtggtagacagagatgtcagaaacctggatgctacaaaggtgctgagag

SEQ ID NO: 37056 - DNA, 269 bp, Glycine max
  Clone ID: 700946238H1
gtccaaaatcaagcaaattgatgatgcactgaaagccatagacaaggatatccagtctctacaggaggaactgacagctgtttctcagaagagggacaaggcttttgagagcatgcagcagctaagaaaacagcgcgaggaggggaacacctatttctaccaaagtcgtacagttctgaacaaagcacgggagctggctgcaaagaaagatattaatgctcttgatgaagtttcacagacagaggttgagaaatttatggcactctgga

SEQ ID NO: 37057 - DNA, 268 bp, Glycine max
  unsure (1)..(268): unsure at all n locations
  Clone ID: 700946239H1
cttcctgaaccgaatctaattggagagaggcttcagtctgccaccaacagaaatagttatcgtcaagtccacactccacattgtatcagatccatggatcatcgtcattggcgcttcttcattatgcttttcattaccgcagcagcaataggacttgtttcgtcgttagggataaactacggccaaatagcgaacaatcttccttcacaagacgacgccgntgcgttggtgaaatccatcggagcgacgaaggtgaagctctacgacg

SEQ ID NO: 37058 - DNA, 264 bp, Glycine max
  Clone ID: 700946240H1
gaggtggtgtccattgcagttttctaatgaaaacaacaaaatagacacctgttaagaaggaggacaacgatggtgctgccgctatttactgctttcattctctttgcttttattccgaatggattgttagcagttccttccaccgtcccggcattcctttggtcatcacattatgaactggcctctgaaaatatattgaaggaatctgtaaattaccaagtcatttctccgaagatctagcaaaatctattttatctgaagcag

SEQ ID NO: 37059 - DNA, 263 bp, Glycine max
  Clone ID: 700946241H1
aagatgtcaaagaaacattacttaaggagattccctccgctaaagttgatgccatggagttagatctcagttcattggagtctgtcaagaaatttgcatcagagtttaagtcctctggtcttccattgaatatgttgataaacaatgcaggaattatggcatgtcctttcaagctctctaaagacaaaattgaactacagtttgccacaaatcacttaggtcattttctcttgaccaatcttttgttggacactatgaagaaa

SEQ ID NO: 37060 - DNA, 267 bp, Glycine max
  Clone ID: 700946213H1
accttccacacttaataggaacccaaaaaaaaaaaaaaaaagtaagcccagctttgttctgctccaatcctcacacaatggcgatggctttcaaaatggcgactactgggatgtgggttacggatgagtgcaagaactcatccatggaaatgaagtggaagaaggtgcccagatacatagtcttcaagatcgctgagaagtcaaggcttgtcaccgttaaaaaggtcggtggccccggcgaaaactatggtaatctcgctgccccct

SEQ ID NO: 37061 - DNA, 249 bp, Glycine max
  Clone ID: 700946177H1
ggcggatgtagtgggcctggaccgtcgggtcgaagagtccgatttcgagaaactcacttatctcaaatgtgccctcaaagagaccctccgcctccaccctccgataccgctcctcctccacgagacggcggaggacgccaccgtcggcggctacttcgtccccaggaaggcgcgtgttatgatcaacgcgtgggccattgggagggacaagaattccggggaggaacccgaaacttttaagcccgcccg

SEQ ID NO: 37062 - DNA, 251 bp, Glycine max
  Clone ID: 700946178H1
agcaaatacagaaaaaaagagtcaagcggcgagcaatggcgacatcgctggtgcgatcgggttttcttcgaagcgccctaagaggaagcgctcgtggctcccaggttccgaagcgaaactttgcttcctctggtcatcacgatgatgcatatgagacggccaaatgggagaagattacatatctaggcattgttagttgcactggtttagccgtttataatctatcaaagggccacccacacttcaaagaa

SEQ ID NO: 37063 - DNA, 252 bp, Glycine max
  Clone ID: 700946179H1
ccttgttagaagtttatgttgtgtttaaagtatatatatttgctgggcataactatggggaggttctatgttgcagtagcagagaccatattatgtggcagtggatgggttttcttgaatgcggcttttgagtcctattatttattgagtcagtagttgtattggtaatttatacagagtcggtatttgatttgagtgaatacagtatccagaaaccaattttatggtgtattcaaatgaaagaattagcgc

SEQ ID NO: 37064 - DNA, 228 bp, Glycine max
  Clone ID: 700946180H1
attggaggcagggaaaccccagagggccaaaaagctattcaaacattgaaggatgtttatgctcaatgggtccccgaagaaagaatactgaccacaatctttggtcggcagaactgtctaagcttgctgctaatgccttcttagcacaaaggatttcatctgtcaatgccatgtcagcactttgtgaggctactggggcaaacgttcaacaggtgtcctattctgtgg

SEQ ID NO: 37065 - DNA, 251 bp, Glycine max
  Clone ID: 700946181H1
tggagcgtctctccgttgattatggcaagaaatcaaagcttggtttcacagtctacccctctcctcaggtgtccacctctgttgttgagccataaacagtgtcctctccacccattctctcttggagcacaccgatgttgctgtcctcttggacaatgaagccatttatgacatctgcagacgctctctcgacattgagcgtcccacctacaccaacctcaaccgccttgtttctcaggtgatttcatctt

SEQ ID NO: 37066 - DNA, 247 bp, Glycine max
  Clone ID: 700946182H1
actcgagccgattcggctcgagtgagaccaagccccactcaaccaacacaccactctctctgctcttcttctacctttcaagtttttaaagtattaagatggcagagacattcctatttacctcagagtcagtgaacgagggacaccctgacaagctctgcgaccaaatctccgatgctgtcctcgacgcttgccttgaacaggacccagacagcaaggttgcctgcgaaacatgcaccaagaccaa

SEQ ID NO: 37067 - DNA, 243 bp, Glycine max
  Clone ID: 700946183H1
attctctaaaagagatctttttctgctctttgaagaaagaagggtctttgcttgattttggagatgtctctgctctcagatctcatcaaccttaacctctccgataccaccgagaaggtgatcgcagagtacatatggatcggtggatcaggaatggacctgaggagcaaagaaaggactctcccaggaccagttagcgacccttcagagcttcccaagtggaactatgatggttccagcaca

SEQ ID NO: 37068 - DNA, 251 bp, Glycine max
  Clone ID: 700946184H1
cacacagtgtgcagcagcagcagcaacaacaagagaagaagatggctctgcaactatgggagacattgaaggaggccatagttgcctacacggggctctccccgcacaccttcttcacccttctggccctgatcctagccctatactacgtcgtttctgggctcttcccctctttccgaccaccgccacaacaccgcctcgcgcgacttggagcaccagatggagcctctgcgaccccccgttcagatcgg

SEQ ID NO: 37069 - DNA, 193 bp, Glycine max
  Clone ID: 700946187H1
aattcaaaagttatggaaatgttgtcacccattatgctatgtatatgcctaaatcgtcctgtgtctgtgtcgtacttctccaaataccgtataccttcaagaatccgccacttccgccaggtcctagaggacttcccataatagggaatcttcatcaactagatagtccctagcttcatgagcagctatggca

SEQ ID NO: 37070 - DNA, 247 bp, Glycine max
  Clone ID: 700946188H1
cattcaaaagtttttgaaatgttgtcaccccttcttctatttctatgcctaactcttcctttgtttttgttgtccttcttcaaataccgtaaaaccttcaagaatccaacacttccaccaggtcctagaggccttcccataatagggaatcatcatcaactagatagtccttctcttcatgagcagctatggcatctctcaaagaaatatggtccattatgttcccttcaatttggattaaggccag

SEQ ID NO: 37071 - DNA, 243 bp, Glycine max
  Clone ID: 700946189H1
ctggaccagaaacccagcgacatgcatctgctataagaaggaagatcacgatattggggaccagacttgatagcttgcaatcccttttgtcaaggtccctgcaaaaactgagaaggagatgaatcgtcgcaaggacatgcttttgaatttgaggacaaaagttaaccaaatggcttcaacattgaacatgtcaaactttgcaaatagggatagtttgtttgggccagaaataaaatcagatgc

SEQ ID NO: 37072 - DNA, 234 bp, Glycine max
  Clone ID: 700946190H1
gagaatcgtaacaaaagcggtaaccggaataagttgtctctacgatttgagccatggcaacaacaacaccctcaaaccgatcatcagaggcgttgctctcatggcaatcctcagcactctgctttgcacggcggtggcggcgaaggagagcgtgtacgagatactccccaagtacggcctcccgagcggtctgttaccggacaccgtcaccgactacacgctcgacgaggacgg

SEQ ID NO: 37073 - DNA, 95 bp, Glycine max
  Clone ID: 700946194H1
cccagaccaatttaagagctcctttgactttattgatgggcatgttaaaccagtggttggaaggaaaatcaattggttgaaagctggacttatag

SEQ ID NO: 37074 - DNA, 127 bp, Glycine max
  Clone ID: 700946195H1
ggaacttgcatgcaaataaaatagtggcgttttacaagctagtgatatctagtcactactgcgtatcgccacaaggatgtgcatattgtatgaaaaaattgcggagttattatcattgattaaaaag

SEQ ID NO: 37075 - DNA, 128 bp, Glycine max
  Clone ID: 700946196H1
taaagtggtacttgagagtgtgtctctttaaatttttgtgatacacatatagtatatatgtatctaaatcaaatcttgtattctttaaacatgaaaactgaacagcttgtaattgtttgacagtttca

SEQ ID NO: 37076 - DNA, 240 bp, Glycine max
  Clone ID: 700946201H1
tgcgattccgtggtggcgacatccgagccggcaatggcagccgtggccgctgccgacctttctcttagacggtatcctccaactggtgcctggacatcagccgctccgccgctctggcaggatcgcattcaccacctcctcggcgatctcttaggaatcgtcgccgccgtcgctctcggtcgattagtgcgaatctacatgagagtgccggctgtatcgatggaccacgcagaacgtctt

SEQ ID NO: 37077 - DNA, 274 bp, Glycine max
  Clone ID: 700946202H1
attccattggtccaactccacacaccttgcaagagttactggagacaaccttgggttctctcttgtcagcacttatgcagcactgtgatccccctcagaggagattcccattagagaagggtgttcctccaccatggtggccaactgggaatgaagaatggtggcctcaaattggtctacctaaagatcaaagcccaccaccttacaagaaaccacatgacctaaaggaggcatggaaggttggtgttctcactgcggtcatcaagcatatgtc

SEQ ID NO: 37078 - DNA, 271 bp, Glycine max
  Clone ID: 700946203H1
attcaagagaacatgaaagcaatcgatgtcattccattactgactcctgttgtgatggagaagattgaagctgttgttcaaagcaagccaaagcgccctgaatcataccgatgaattgaagtttttccatggtggacacatatatgcattagatgggaggctccgtcatccccgtgcacttgagtgaaaattcttgttgaaaattattggtgtggttgatgtgatttcttgggacttcttttctttgtcattttttctttctggcactgat

SEQ ID NO: 37079 - DNA, 270 bp, Glycine max
  Clone ID: 700946204H1
ctgctgaggtggccttgaggcttgtcaggccgggaaagaagaccaaggatgtaagtgatgcaattcaaaaggttgctgctgcctatgactgtaaaattgttgagggtgttcttagccaccaaatgaagcagtttgttattgatgggaataaagttgtgcttagtttgtctaatccagacacaagggttgacgaagcagagtttgaggagaacgaatttatgctattgatatagtaacaagcactggggatggcaagcctaagctgttgga

SEQ ID NO: 37080 - DNA, 271 bp, Glycine max
  Clone ID: 700946205H1
ccatttttgggataagttccgcaaagctcctgatggttctctcaggaaaaatacagctcagaaacaagttttggaagcaatgtctcacagaatgcatgtagacaacagtgtaaaactgattgggaagcttttatttggcattgaaaagggtccagaagtactcaacgctgttagaccggctggatcggcacttgttgatgactggcactgcctgaaaaccatggtgaggacttttgagacacattgtggatccttgtctcaatacgggatg

SEQ ID NO: 37081 - DNA, 271 bp, Glycine max
  Clone ID: 700946206H1
ctacgcgttcgtgtcgcggggaacagtgattctcgcggagtacaccgaattcagcggaaacttcaactccatcgccttccagtgccttcagaagctccctgccaccaacaacaagttcacctacaattgcgacgcacacaccttcaattacctcgtcgacaatggctacacatattgtgttgttgcagatgaatcaattggaagacagttacccatggcttttctagagcgtgtcaaagatgaatttgtgtcaaaatatggtggtggaaag

SEQ ID NO: 37082 - DNA, 269 bp, Glycine max
  Clone ID: 700946207H1
ctcgagcgcgggcgatgaagaggcaatgcaagagttcattgccagaggtggaatgattggaacaaccattggtcccaaagggatggttaagggtgataaggatgagagtgactacaagaaggagctgaaggacaagaagtttgggcaagaggctcagaaactgtggatgaggatgaggagtgaggtcattgctgagcttcaggagaagggctttgatgtggaatgaatgagtgcaatgagtgctcaaaactattggtggtagtaaatat

SEQ ID NO: 37083 - DNA, 267 bp, Glycine max
  Clone ID: 700946209H1
ctttgctggtttgtactttgttgctctcttctcctcaatcattgcaactggtattcttgagttgaaatggagtggagtgagcattgaggaatggtggagaaatgagcagttttgggtcattggtggtgtatcagctcacctctttgctgttatacaaggtctgctaaaggttctggctggaattgacaccaatttcactgttacatcaaaggcaacagatgatgaagagtttggagaattgtacacctttaagtggactacactctt

SEQ ID NO: 37084 - DNA, 267 bp, Glycine max
  Clone ID: 700946210H1
gcagggcatgaatcaagcaacaccaactttgctacccgagtccccattatctgtccatggaactcctctgcgcgaggacgttcatggggccatcaaggatcaccataattcaaagaaaagaaagataacgcccaaatggatggatcgtgtaagagtgagctgtgagagtggtcttgaaggaccacatgaagatggttacaactggagaaaatatggtcagaaagacatccttggagccaaatatcccagaagttactataggtgcac

SEQ ID NO: 37085 - DNA, 269 bp, Glycine max
  Clone ID: 700946211H1
gttgcgaagtttgccacctcaaaaaaggctttttatgacgcttttgcaaagtccatgatcaaaatgagtagcatcaatggtggacaggaggttagaaaggactgcagagtgatcaattaaaaagtcttaaattaattcaagttaaattgatgtttcaaacaagttagaagtatgaacttgttggatcaaatttcctagatggcaagaatattatgtctttttcctctattaaagaaatatgtatatttatctgaagttaataaatatat

SEQ ID NO: 37086 - DNA, 226 bp, Glycine max
  Clone ID: 700946212H1
ttatggcggcccggggacgttctatcaccactcgccggtgatgcgacctccggcggcggcgcagggatactacgctgtgcagaggatgggttctgatggctaccgtgaacagcaggcggtgtacggaggcatggctgcgccgaaagcggggttttcgacggcggggatggttaaggggccggcgtattcggagggatatagtggcggcgtagtaaagccagcgggg

SEQ ID NO: 37087 - DNA, 239 bp, Glycine max
  Clone ID: 700946176H1
ctcactcactctgcactcaccactgccacacttcaatcgcactaatggctgtcaccttctcagatctacacaccgaagagggcatcaaatccctcgatcaattcctttctgggaaaacctatatttctggggatcagttgacaaaggatgatattaaagtgtatgcagctgttgtttgaaaagccaggggaaacttttcctaatgctgccaagtggtacgatgctgtctcttctaaatt

SEQ ID NO: 37088 - DNA, 100 bp, Glycine max
  Clone ID: 700946146H1
ggaggaggagggtggttttacgcgacttgcctcattcgtctgcgattgcgagcctttgacggaggatgatctggaagccatcgaagcctctctttccaat

SEQ ID NO: 37089 - DNA, 184 bp, Glycine max
  Clone ID: 700946147H1
tggagctacgctttctcatactcccagcagaaatggttctaataatccatcaccttgtattacggaaccttctatcaagcctgtgcaagacaagcaagaatataaacaccttgaagctccgagcccttctaacaataattcttcgttggatactaatgaaatcgaacagtcacacataaacaat

SEQ ID NO: 37090 - DNA, 259 bp, Glycine max
  Clone ID: 700946148H1
ccttgaagaaggacaggaaccccaagtaccctcgcattagcgccccgccgaggaacaagcttgatcattatcagatcctgaaataccccctcaccactgagtctgccatgaagaagattgaggacaacaacactttggttttcattgtcgacctgcgtgccgacaagaagaagatcaaggatgcggtgaagaaaatgtatgacatccaggccaaaaaagtgaacaccttgatcaggcctgatggcaccaagaaggcata

SEQ ID NO: 37091 - DNA, 256 bp, Glycine max
  Clone ID: 700946149H1
cagctcgagcagctcgaggggctcgagcggctcgagctggaaaattgtagatagcaagagtgaccaaattcacttgcatacctgaaacaccaagagactaggatgtctttgcctttcatatataggctttaccaatttgttctccatgtattttcggtgctggctaaatggatgtctatgccttccgtgatagagccaaagtagtgttagtttctttagtccttacttttcccctgccttcatatgggcttgggtg

SEQ ID NO: 37092 - DNA, 235 bp, Glycine max
  Clone ID: 700946150H1
atcccgccattgaatatagtcatgcttattgttggtacacgaggagatgtgcaaccctttattgcaataggcaaacgcatgcaggactatgggcatcgtgttagattagcaacccattcaaattttaaggagtttgttttgacagctgggttggagttttatccattaggaggtgatccaaaagttcttgctggttatatggttaaaaataagggcttgctgccatcgggacctt

SEQ ID NO: 37093 - DNA, 252 bp, Glycine max
  Clone ID: 700946151H1
ctacaccaaagtcttcgtcggaggattggcctgggagactcagagcgaaaccatgcgccgctacttcgaccagttcggcgagattctcgaggccgtcgtctcaccgataagaacaccggaagatccaagggctacggtttcggtataggtgactttccgggatcccgaggccgcaaggaagagcgtgtgctgatccatctcctgttattgatggcagaagggccaattgtaatttggcttcacttggtcgac

SEQ ID NO: 37094 - DNA, 249 bp, Glycine max
  Clone ID: 700946152H1
gtccttgcatcatgatgataagaagcaccatgatgatgaagataattggtctgttgcttcctctagcgttgcatctgcacgcactgccaagtctaaggtactgtagggtcagcccctacttctagatgctcggatcgtgcagagaaacggatggagttttatctgaagttagaggagaaacatcgagctcttgatagaagaaaaacaccactatgaggcaacgaataaggaagaggaagatgcagccat

SEQ ID NO: 37095 - DNA, 250 bp, Glycine max
  Clone ID: 700946155H1
tagagggggggttcaacatatcttacgtaaagccaaaaagttgatataaacaaattaaagatgatgaactacttttgcggctgccacggccttgtgatatcttggtgctaattgcatctccggcagaaggagaggacaaccaccctttgttggagttattatcaagtagagatgaagtggtgcaaattgctggctatggagaggagaagctttccacagtcctcattacaggctcagttacttgtgaggc

SEQ ID NO: 37096 - DNA, 253 bp, Glycine max
  Clone ID: 700946156H1
ctcgagccgctcgaagatgatggctactccgatcgctggggatcccaagagtggttacctgctactgtgagagtggtgggggaatagtatattattcaaacagtggtggtgaatcgtgatatccgtttttttttgtggtagaaatgtaaatagaacactttggcatgtataagtcaaagacgcgtagtagaaccaaggaaaaaccgttacaaggctcttgtcgggggtgtcaattttttttcccttagaaaaa

SEQ ID NO: 37097 - DNA, 252 bp, Glycine max
  Clone ID: 700946157H1
gaaactctctctctctctctctctctctctctagaaaccctattgcacgttttgcaatcgaactcgacaatggccaacagcaacctccctcgaagaatatcaaggaaacgcagcgtttgctcagtgagccagcacctggtattagtgcctccccctctggagagaatatgcgatatttcaatgtgatgatccttgggcatacccagtcgccttatgaaggaggcgttttcaagttagaactatttttgccag

SEQ ID NO: 37098 - DNA, 248 bp, Glycine max
  Clone ID: 700946158H1
ggaacctaattgaggctgctgagcaagagtatgagaaagaaaagctgaatgagagaattgctaaattgtctggtggtgtggctgtgatacaggttggcgcacaaactgagacagagctcaaggaaaagaaattgagagttgaagacgctcttaatgctacaaaggcagctgtagaggaaggtattgttgttggtggtggttgcactcttctgagacttgcatcaaaggtggatgcaatcaaggatagc

SEQ ID NO: 37099 - DNA, 252 bp, Glycine max
  Clone ID: 700946159H1
gtttgttgttgtaactcgttcttcttcttttgttgttctgtgtttgtgtttgttttttctctcacctgaaaatgtcttgctgcggtggtaactgtggttgcggaagctcctgcaagtgcggcaacggctgcggaggctgcaagatgtacccagacttgagctacactgagtcaaccaccaccgagaccttggtcatgggagtggcacctgttaaggctcaatttgagggtgctgaaatgggtgtgcccgctg

SEQ ID NO: 37100 - DNA, 227 bp, Glycine max
  Clone ID: 700946160H1
tgactcggggtgagttgactcagcgatggcggaagaggtgactcgggtgatggtggcagtgaacgagtcgagcatgaagggataccctcatccttcgatcagcagcaaaggggctttcgaatggaccatcaacaagatcgttcgcaacaacgtctctgccttcaaccttctttttcttcacgttcaagtccccgatgaagatggttttaatgacatgggtagtatct

SEQ ID NO: 37101 - DNA, 253 bp, Glycine max
  Clone ID: 700946161H1
cgttttgcgtttctctgcctaaaaggattgaaagatgggtcaagcactaggttgctatcaagttgatcagtcaaatgtggctatcaaggagcattttggaaatttgatgatgtcctagaacctggatgtcattgcctgacttggtgtcttgggtaccagattgctggtagtttgtcactgcgtgtgcagcaacttgatgttcgatgtgagacgaaaaccaaggacaatgtctttgtcactgtggttgcatctg

SEQ ID NO: 37102 - DNA, 252 bp, Glycine max
  Clone ID: 700946162H1
atgtttttaagataatccctggatatgagagagtgtcagcatctgatgctgacccttctgatgttcatctctacaggctgcaacgtggcttgacaaatgcagttactcaagagatcagtcctagtgctgatagcatgcggattatgataagttcctcaaggggcactagccatctatgggctataaatcctcaaggaggaccagtagatattctgtcatgtgacaatagtttagcagtgaataatggtggat

SEQ ID NO: 37103 - DNA, 90 bp, Glycine max
  Clone ID: 700946163H1
atgtttttaagataatccctggatatgagagagtgtcagcatctgatgctgacccttcttatgttcatctctacaggctgcaacgtggct

SEQ ID NO: 37104 - DNA, 255 bp, Glycine max
  Clone ID: 700946164H1
ataaacctaagatgatgctcggaaagagacctcgtcctccaatgaagagaacaacaagcatgtccgaaatgaccttggatctgaacacagccgccgatgccgccgccgccgccgaccaacagagatcaggtgttggtccctcggcagcagcagatcagactacgaggatgttggcatcacccaaaatcctcagaagacattcttcgtatttcggcgacgcgcgtcacttccttcgtgcgtgttccctctgcaaac

SEQ ID NO: 37105 - DNA, 187 bp, Glycine max
  Clone ID: 700946165H1
gcgagccagggttttggtttttgtaaggcgaaaacagtgagagcggtgtggtgcttagtgcccacaccaattaccaatggcagtggagaagacggagcagaactccgcaacgagatcgatgaagctcttcgccaacagcgcgagatttcggaaaggcttcgagatcctcgaggtcttcgcagaggtg

SEQ ID NO: 37106 - DNA, 88 bp, Glycine max
  Clone ID: 700946166H1
tgttcatggtggagccattatagcaggtggattatagtctccatcagagatataggtttaatgtggaaactattgaatgtccaattat

SEQ ID NO: 37107 - DNA, 246 bp, Glycine max
  Clone ID: 700946167H1
cagagcttcatcacgaacttgcaagcgttggattgtgctgagactttggcaatgaaaatgaaaagatcgaatattactgcagatgtttatggtctctgtcacataagccttaaagacttttccctccaagttggaaatcaagaggctggttgtctattacctagtttgccttcagatgctacatttgacagtgtttctgggatcagcttcctctgtgatctaaatgataatattccagctccttgg

SEQ ID NO: 37108 - DNA, 250 bp, Glycine max
  Clone ID: 700946169H1
gctgatgaggatgagtatgaggaggaagaggaggaggaggagtatggccaacatgatatgtgattttgaacttggtaatgtattgcggtggcttgaagatgtataacatgccgcaacttcctgttgccggttgattgtctcttttgaggggatggttctgttccggctagatctagtttccattactgttctataaaactggttctgtttgtttccgtttttatgtaacctgttgtttgtagggaagaca

SEQ ID NO: 37109 - DNA, 250 bp, Glycine max
  Clone ID: 700946170H1
gctggtagctgcatgccaacgcaggattgaggaggaagattcaagtgcaagttctgcagctgagaggagaagagtaacatgggaaaggctagaagctgctgctgctaattgtgtcccagttcaatctactacttctgtaggtggagctggagatgttttagtcccaataaattctgctaaatgctcagtggaatgctaagctaattaattggtttgagtaatgatgtaaggttaaggtggttctaattac

SEQ ID NO: 37110 - DNA, 250 bp, Glycine max
  Clone ID: 700946171H1
catatttgtaacactaggctaggctctagaaatttaccacaaccaatataattatctcacagtttttacccctgctgctccattaaaagccaatattctgtgtttcataaaaaattaccaaatggtacattcttttgggtgaatctaaggtatttgtttcaatttaattatttttcattagtattgatgaattaaatattttttttataaaaatagaggtaatatttttcatgtgaaaatcaatgactaa

SEQ ID NO: 37111 - DNA, 246 bp, Glycine max
  Clone ID: 700946172H1
ctttgcttagaattccacagaatatggagacagttcttttcaatgactccccacctttggagttcaagggtatgagcaaggaggaggaagactcattgctagggcaagttgaaatatggaggtacatgacatgcttcacggactccgtggccttgaaatccgtcatagagctgcgcatagccgacataatagaccgttatgggaaaccactatccttgtcacaaatcgtggagaacatagatgatg

SEQ ID NO: 37112 - DNA, 238 bp, Glycine max
  Clone ID: 700946173H1
ctgaattccagaccaacttggtcccataccctagaatccatttcatgctttcctcatatgcaccagttatctctgctgagaaggcctaccatgaacagctctcagtggcagaaattaccaacagtgcttttgagccatcgtccatgatggccaagtgtgatcctcgtcacggaaaagtacatggcgtgttgcctgatgtaccgtggtgatgttgtgcccaaagatgtaaacgctgctg

SEQ ID NO: 37113 - DNA, 246 bp, Glycine max
  Clone ID: 700946174H1
ggaactcggacggaatctatcagggtgcttgtcaaaaagttgattggaatggcatgggtgaaccaaatacttcatacaactgtacttctcaagtaactgcaaacctgttgctgaaggtcaactagaaggacttcgggacttgaacaagcatgtcaaggtgacaacaacggaggcaaagttattgcctgatggatctctcacacctcagagattgcttccttatcgccattcacgcttcactgttaa

SEQ ID NO: 37114 - DNA, 251 bp, Glycine max
  Clone ID: 700946175H1
ctgcaacaaaactgcatcacatacacctgaatcctcagattagcatattatacctcacaacatcaccaccatcctgactgagaaagaattctgagtactttctgatctcattgctcttaaatccccatgcaatcttctcatatttggctttcaacctcagtaccttatcctctcttccatgaatgcagctggtagcaccatctttctcgatgacgactcccatatgataagcaaggtaagaacaatctcca

SEQ ID NO: 37115 - DNA, 254 bp, Glycine max
  Clone ID: 700946145H1
agcctcttttacagttcagtctcttgttaaagcaaaatggtcttagaagagtgtgtagtgcatgatgtgaggctatcctcagttgggccaggccgggccacaggtcggaggtgttccacagcccgggtggcttggacttggccatgaagcttcactatctcagggtggtgtacttctttggctagtgaggctgcacaagacctaaccatcatgaaaattaaggaggccatgttcactttgctcaaccattactt

SEQ ID NO: 37116 - DNA, 142 bp, Glycine max
  Clone ID: 700946112H1
atttcttctgttgtctgtattgcagaatgcaacgctacttttaaaacagtggaaatgtaaagcccaattaaaaagtttaaaattttaaccttgtattgacagtattgtacgaatatttagagaatgattggtttggctctgt

SEQ ID NO: 37117 - DNA, 263 bp, Glycine max
  Clone ID: 700946113H1
cgagcattcggttttgaatcttttgagcgaaaatgcagtcgagtcctttgcttctggaggaacccataaggatggcctccatcctcgagccatccaagcctagtttctttccagcgatgacaaagattgttggcacacttggcccaaagtcacgatcggttgacgtgatttcccaatgtcttgaggcaggaatgtctgtggcaaggtttgattattcatggggtgatcctgaataccaccaagagacgttggaaaatttaagg

SEQ ID NO: 37118 - DNA, 265 bp, Glycine max
  Clone ID: 700946114H1
aatttgtgttgactcacttggatagccgtcagcttcttattaaatcaaatcccggggaagttgtgaagcctgattcatacaaggctataaatgatgagggaatgcccatgtatcagaggccattcatgaaggggaaactttacattcaattcactgtggagtttccagattctctaaaccctgatcaagttaaggccttggaggctgttctgccaccaaagccttcttcacaattgacaaacatggagctggatgaatgtgagga

SEQ ID NO: 37119 - DNA, 274 bp, Glycine max
  Clone ID: 700946117H1
ctcgagtatcgctcttgcaattattcctcttctcgcaatccgcactagaattctagggttccgaaatggacgctgacggaaagatcaagaagggcgccggctgaagatagggcggcggcccaaagaagaagccggtttcaaggtccgtcaaagccggtctccaattccccgtcggaagaattggcagttatttgaagaaaggaaggtacgctcagcgtgtcggtaccggtgctcccgtatacttggctgcagttctcgaatacctagctgccgg

SEQ ID NO: 37120 - DNA, 274 bp, Glycine max
  Clone ID: 700946118H1
cggctcgagggaacactgccccaaggtcaaacggatatgcatccacaagtctcaacattggagcaccccctcatcaaacagatgtatcaggcacttctcatgatcattttctgccttcatcaagtgctggaatgttttatgcagtgcctgaaaattatgtacaccagccttctaattctaattatgacagacaagcattttctgctgctgatgggggttttattgatcttacaatgggaaatggacgagggcctcacaagcgaaagagccctgg

SEQ ID NO: 37121 - DNA, 262 bp, Glycine max
  Clone ID: 700946119H1
attgtattaataggttgaaggattttgggtctgctactgccatcttgctcgtcctgcttctttacctagtccaacagatttgcaccttttcaaggaaggaatccgtctctatgggaggactctgctaactgcaatggtggtaaatggattatacgattcaaaaaggttgtcactggccgtttatgtggaggacctggtaatgcaaatatggtcatctgtaacatttggtatcatccttgataaaatgtatggctatggcatg

SEQ ID NO: 37122 - DNA, 261 bp, Glycine max
  Clone ID: 700946120H1
aaaccctcttttttctctctcttgcaaaacctaattttcatttcttccctcaaatttcaaaatgcgtgagatccttcacatccagggtggccaatgcggcaaccagatcggcgccaagttctgggaggtggtttgcgcggacacgggatcgaccctaccggaaggtacggtggggactcggagttgcagctcgagaggatcaatgtctactacaacgaggccagttgcggtcggttcgtgccgcgcgcggttcacatggac

SEQ ID NO: 37123 - DNA, 260 bp, Glycine max
  Clone ID: 700946122H1
agcagcgatgggaatcgatcttaaggctgggggtaagagcaaaaagaccataagaacagcaccagaatccaatgacatctacctcagattacttgtcaagctttatcggttccttgttcgaaggactggcagcaatttcaatgctgttatactcaagcgcttgttcataagcaaggttaacaagcctccaatttctttgtcaaggttaatgaagtatacaaaggggaaggaggataaaattgctgtagtagtggggactg

SEQ ID NO: 37124 - DNA, 261 bp, Glycine max
  Clone ID: 700946123H1
cacaatcaccactcggatcagtatgcacaccagtctcagaaaacccacaagaacaaaaatcagatttttccaagactcttgagtgatagactttgaatgaaatcttgtttttcattaacgagattcaattgaagtgaagtgattattcactggaaaacttatttttcatagtattggaggtacaactgaagctgttagatttgttttaactacacgagttcgttggatatttgagcatggctgggaatcaagatcagtttg

SEQ ID NO: 37125 - DNA, 261 bp, Glycine max
  Clone ID: 700946124H1
aaaaaagccaaactatctttctctttccatctctctctctttctctctcattgattacagccaccgttttctctttcttccaacttgctttggttcctctcctcaactaaagcctattcccttcttctcacccatgtccatttgtagcatgttttctcttgagcacttcaaagttcaaatctttcacacacactcattcatctccaacctccacacccacttgggtcacttctagaagatctatctgccaacccttttggc

SEQ ID NO: 37126 - DNA, 260 bp, Glycine max
  Clone ID: 700946125H1
tttagagagaagaaaacgttggtcggagaacattaccggaaagagaatctttgttgattccagaaatgtctagcatcgcttcctcacaccaaagcttcctcaccaacgcccttattccactaacgcacaacccaaagttcaggaccactgttactttcccttcttcactcaaaactgtctcttgcagttccccacaacatgaacagatacaatctccaaggaagaagaatgagaccagttagcaaaagttggcaatagtt

SEQ ID NO: 37127 - DNA, 234 bp, Glycine max
  Clone ID: 700946126H1
attaattgcaagaatggcacttcgttgcttggtgatgtccctttctgtactcttcactcttggtcttgcgagagaaagccatgccagagacgaagatttttggcagctgtttggccaaacactcccattccaagttcattgcgagatcttctaaagcctggccctgcaagtgttgaaatcgatgatcaccctatgcaaattgaagaaacacagtacccgaaaaccatcttctat

SEQ ID NO: 37128 - DNA, 259 bp, Glycine max
  Clone ID: 700946127H1
tgataacccataaccgaccgcaccaccgtttacctttgctgtgcgttctacaatgtcgaaaacctcagagattattacatgcaaagctgctatttgatggggagtaggagaacctgtgactgtggaagagatacaagtagaccctcccagagccaccgaagttcgagttaagatgctttgtgcaagtatatgctccacagacatctctagcacaataggattcccacataccaattgtcctatagcacttggacacgaa

SEQ ID NO: 37129 - DNA, 255 bp, Glycine max
  Clone ID: 700946128H1
ttaaaagagcctttgctttttctttaggcctttccgaattaagtacttgtttcattttctctcgaagcaagaaaaatgttcatcgagagtttcaaggttgagagtcctaacgtgaagtacacagagactgagattcagtccgtgtacaactatgaaaccactgaacttgttcacgagaacaagaatggcacttatcagtgggttgtcaagcccaaaactgtcagatatgaatttaaaaccaacacccatgtccct

SEQ ID NO: 37130 - DNA, 257 bp, Glycine max
  Clone ID: 700946129H1
ctcctcgttcgcatcttcaccctttccctgtctctcagaaagatgaaggtggtcgctgcgtatctgctcgccgtcctcggtggcaacaacaccccctccaccgatgacatcaaggaaatcctcggctccgttggaatagaggcagatgaagataggattgaatcgttcttgtctgaagttaagggtaaggatatagttgagctaattgctgccggtaaggaaaagctggcctcggtgccttctggtggcggtggtgc

SEQ ID NO: 37131 - DNA, 275 bp, Glycine max
  Clone ID: 700946132H1
ttcggctcgagaggataggaaataaagttcctctcattctaaaccatatcatttatttattgatttattttgctgattcctttgctcttaggaggaaccattaaaaaaaagatttttcaccgtttcataaagatccagtgcttctcactttattaataaatcctgtctgtattatatgatttttcatgttatgaagaaaatatatttggctgtttttgtgaatcccatatgtaaaacaatgaccttttggtatctaggagctctctgcttacatg

SEQ ID NO: 37132 - DNA, 258 bp, Glycine max
  Clone ID: 700946135H1
attcttcttgcaggtctatttaggagagcagtacgtaaacaatgctacgttgtctgacgttacatttttggttgaaggcaaacgattttatgctcatagaatttgtcttcttgcatcatcagattcatttcgtgcaatgtttgatggtggttacagggagaaggaggcaagggacatagagattccaaatattagatgggaggtttttgagttgatgatgagatttgtatattgtggatcagttgatgtcactctgga

SEQ ID NO: 37133 - DNA, 259 bp, Glycine max
  Clone ID: 700946136H1
aagccccactcaaccaccacacctctcctcgttcacgctacccctttctgctcttcttctacctttcaagttttaaaagtataaagatggcagagacattcctatttacctcagagtcggtgaacgagggacaccctgacaagctctgcgaccaaatctccgatgctgtcctcgacgcttgcctcgagcaggacccagacagcaaagttgcctgcgaaacatgcaccaaaaccaacttggtcatggtcttcggagaaat

SEQ ID NO: 37134 - DNA, 256 bp, Glycine max
  Clone ID: 700946137H1
gtccagtcagaaatggtcttacaaggttggactgaaaggtgaatcgttgagccttcacactgaaagtgggagtagctctgttgaatggatacgaggatcattagtggctaaaaaacaacctttgacatggtacaagacaacttttagcgcaccggctggcaatgatccattggctctagatttgggaagcatgggaaagggtgaagtatgggtaaacggtcgcagcattggtcgccattggcctggatatatagca

SEQ ID NO: 37135 - DNA, 252 bp, Glycine max
  Clone ID: 700946140H1
gcaaggagggttgggtttggggttaggtatgagagtgagaacgaggaagggtaagtgtattcacattttgtagagggcgatttcctagactctgtcttgggggcacaattcaattgtggctccgatcaagggcgtagtggtgaaggagccgaagtggatggtggcggctgcggcgacaacggaggagaagcataatgagaatttgagcagcgaggggagtttggaggacgatgattcgtggagagtcagaat

SEQ ID NO: 37136 - DNA, 256 bp, Glycine max
  Clone ID: 700946141H1
cacctcattgccataccccctttcaagcaggagaaaatctctcgctccctttctctttcttctcttcacgccgccatcaccatgccttcactctctctctcgaaactgacaccaccacccctaaacctatttccaacaaaaagaaaccaaagacccaatccctcactgatcccgacctcgatggggtttcggggaagaagacgaagaagcgcaaggcttcagatttattagaaccagaggccatgcccgccgctta

SEQ ID NO: 37137 - DNA, 252 bp, Glycine max
  Clone ID: 700946142H1
gaagatgccgccaacaactttgcccgtggccattataccattgggaaagagattgttgatctgtgcttggaccgcatcagaaagcttgctgacaattgcacggactccaagggtttttggtcttcaatgccgttggtggaggaactggttctggacttggttcccttctcttggagcgtctctccgttgattatggcaagaaatcaaagcttggtttcacagtctacccctctcctcaggtgtccacctctg

SEQ ID NO: 37138 - DNA, 253 bp, Glycine max
  Clone ID: 700946143H1
ctcaactcctggacgaggaaactgacgtagcttgtatcgacctttgtgaattgatggagattccattttcttcacgacaaactttcacaaaccttattaagcatcactttctcccttcccttccttcccttgtttcccagctttgatttagagaaagagagcgaaagatgttgcagtgcatatttcttctgtcagattccggagaggtaatgctagagaaacagcttagtgggcaccgcgtagatcgctccat

SEQ ID NO: 37139 - DNA, 264 bp, Glycine max
  Clone ID: 700946110H1
ggcacacagtgcattcatcaacttactttcacagatggtccagatttccaaaatacatttctctatagactgtgtaagcagaagaccttggaacattttaggaatattattctgctatcttccccccaggatggttatgtgccttaccattctgctagaattgaatcatggcacgctgcttcacgtggacacttcaaagaagggtaaactgttcctagggatgttgaatgactgtttggagcacatccgtgccaactcaatgca

SEQ ID NO: 37140 - DNA, 254 bp, Glycine max
  Clone ID: 700946144H1
ctcgagccgcgatcagaaacatcgccgtcggaaggcctgaagaggcgactcaccccgacacgttgaaggcggctttggctgagttcatctcaaccttcatctcgtgttcgccggctcaggctccggcatcgcctacaacaagctcaccgacaacggcgctgccacccctgccggcctcatctccgcctccatcgcccatgcattcgccctcttcgtcgccgtctccgtcggcgccaacatctccggcggccacg

SEQ ID NO: 37141 - DNA, 252 bp, Glycine max
  Clone ID: 700946074H1
atgatcttcatccttgtctactgcactgctgggatttcaggaggtcacattaacccagcagtgacatttgggctgtttttggctcgcaaggtgtctttgatccgagccatcatgtacatggtggctcagtgcttgggtgctatccgtggagttggtttagttaaggctttccaaaagtcttacttcaacaagtatggtggtggggctaattccctcgctgatgggtacagcacaggtactggattgggtgct

SEQ ID NO: 37142 - DNA, 251 bp, Glycine max
  Clone ID: 700946075H1
aggtcatgcgaagatcacgagacaacatcaccgaggaagatttgttgaatgaaataagtgagataattcgccttcccatgtatgctgacaggatcagaattgatagcaaagcgaatcagcatgctaatgtcgcaaggcgaaggtgatttggtggtggtttagatcagatcagggacttttatgccttcaatctttacattggtggtagtgggtgacatcaagtgaaaacaagatttcgtgtataccccgat

SEQ ID NO: 37143 - DNA, 247 bp, Glycine max
  Clone ID: 700946076H1
atggacttttatgaaccttgcattttgttcattgtgtggcattgtagggggaattgttggaggcctacttggttctggaggtggatttgttttgggacctcttcttctagagattggtgtcattcctcaggttgctagtgctacagcaacatttgtgatgatgttttcatcatctctgtcagtggttgaattctaccttctcaagaggttcccattccttatgcattatacctcacctcagtgtctg

SEQ ID NO: 37144 - DNA, 254 bp, Glycine max
  Clone ID: 700946078H1
gtgaaccagtgctgccccgtgcttcaaggcctggttgagcttgaagctgcggtgtgtctttgcaccactcttaagctgaagcttctcaacctcaacatagatgtcccacttgcccttcagcttagtgtggcttgtggcaagtctcctcctcctggttacacctgctccctctaaaccagtgaaaggattgaggaaaatatggtcaaaatcgacatgagaggatgtcgagccacactatctctcttctgtcctga

SEQ ID NO: 37145 - DNA, 257 bp, Glycine max
  Clone ID: 700946079H1
cgaaatgaaaacccaaagtgcttctctcctctgtctttttctctctcttgctatccttttggctagtggcactgctgcaagtgcaactccaagaagcgcagtgccaagccaccatgtttcaacattcaacagaagcctttttccttccacttttctctttggacttggttcttctgcttaccaggcagaaggagcagcaagtgtagatgggagaggaccaagcatatgggacacctacactagacagcatactgaaa

SEQ ID NO: 37146 - DNA, 103 bp, Glycine max
  Clone ID: 700946080H1
ctcgagccgaatcggctcgaggagtcaccttggtccagttagctacaaggattacagctggagtacatggtgtcgcccaacctgatattgatcatatttggcg

SEQ ID NO: 37147 - DNA, 255 bp, Glycine max
  Clone ID: 700946081H1
cttcgaatctctctgaaacttttctcttctctttgattcttctctactcgttcaacattagaatgagccgttcacaggatccacacccttcccgatctttcttcccttttggaaatccttttcggatgatatcacctaaaggctctcgcatgtctccacaacttcttgcagtgttgcaagcttttgaggcaacattggcagagaggctgaaaaatcttatgcctaaaagcacagatgaaatcctcaccttgtctt

SEQ ID NO: 37148 - DNA, 228 bp, Glycine max
  Clone ID: 700946082H1
atggaatctaaaggtttcacgattgcaaatgtaggtgcacaagaaatgtactctcaaggttttctagcatcagtggatgtgaccaaattggctgaagctcatgcaagtgtattcaaggcaatgaacaacgaggcttctggtagatacatttgctttgaccatgtaattgatacacatagtgaggccgagaagctggccaaggatattgggatgcctaaggcaaagata

SEQ ID NO: 37149 - DNA, 237 bp, Glycine max
  Clone ID: 700946083H1
tcggcatcaagatcacatgttctcaggaaactgaaccattgggaacagcaggtcctctggctcttgccagggataagctgatagatgactctggagaacccttttttgttctcaacagtgatgttatcagtgagtatccactcaaagaaatgattgaattccataaaaaccatggaggagaaggttccataatggtaaccaaggttgacgagccatcaaagtacggcgtggttgtga

SEQ ID NO: 37150 - DNA, 225 bp, Glycine max
  Clone ID: 700946086H1
ctggaagtgaagcaaatatggcatactctcaacttcaaaaggtgacagctaatgtgcacatcaaggcttctgctgatcagttccataatgttttatgcaacaggacacaccatattgccaacattttccctggaaaagtacagtctgttgaaattcataaaggtgaatggggcactgagggatccgtcatctcctggaattatttacatgcaggcaaagtttgtg

SEQ ID NO: 37151 - DNA, 112 bp, Glycine max
  Clone ID: 700946087H1
gcactttagagcaaattgttaggaaagacatggcaagaagggggacatggatggaccttggacttgacacagaaacaattggttttgagatgggtgaggccattcttgctga

SEQ ID NO: 37152 - DNA, 227 bp, Glycine max
  Clone ID: 700946088H1
gtaatattgagaaataatggagggttgtacttattgtgtgaagttgctatgccttgttgggtttgtggtgcttgtgagtactattgcaggggtggagagtgctggtgaatgtgggaaatctaccacccagataatgaggcttataagcttgcaccatgtgcctcagcagcacaagatgagaatgctagtgtttctcagagttgctgtgctcaagtgaagaaaattgg

SEQ ID NO: 37153 - DNA, 245 bp, Glycine max
  Clone ID: 700946089H1
catcttcttcccaaccactactactcactcactgcagatctcaattgcatcgctgtccatggctaccatcgttagcatcaaggcccgccagatcttcgacagtcgtggcaatccaactgtcgaggtggatttgacttgctccgatggtacttttgccagagctgctgttccaagtggtgcatccactgggatttatgaggcccttgaattgagagatggaggatctgactaccttggaacaggtg

SEQ ID NO: 37154 - DNA, 240 bp, Glycine max
  Clone ID: 700946090H1
ttggtatcgtggctgctactgggatttcttttatacagtttgcaaataccaattccataagaaatatctatgttctgggcctaaccttgttccttgcgatatcaataccacaatattttgtcatgaacactgcaccggatggtcctggtcccattagaacaggtggtggatggtttaatgacattttgaacaccatattctcttctggccccactgtggctataattgttgggactcctg

SEQ ID NO: 37155 - DNA, 215 bp, Glycine max
  Clone ID: 700946091H1
ccttgtctccttgagctgcaaaaaaaatttcaccatattttcatattcacatactttgttgatgatcaccatgctagctatgcttcttgttggatgattttcataaggccttttgttttgcatgctggtgatacagcatcttccttctccacttgcatggccattttcttctctttgctctattctcacttcactatggccatgctaaaacaata

SEQ ID NO: 37156 - DNA, 249 bp, Glycine max
  Clone ID: 700946092H1
caagtctcgagactctttgaccacacgcactcttcattcagagcttgtttacaactactcagggtctaagcatattactgaatctttgaaaagatgcggcatctctgacagcacaacttgtatccttgctgctcgatttgatgctagtcctgatgagataaaagctatagggaagctcattaacggcaaagagattgacctggaggagctagaagggagagcaaaccaatcccagatacaaaagattta

SEQ ID NO: 37157 - DNA, 252 bp, Glycine max
  unsure (1)..(252): unsure at all n locations
  Clone ID: 700946093H1
gcagtggagaggtccaacaagcaattccccttttacagaaagcatatggagatagcatgcataaagttttgcatgttggtcctgatacttgttatgtggtctctaaattgctgaaggaggatgaaactgacgcctggggaatagaaccatatgatatagaggatgctgataataattgcaaagcacttatacgtagaggcagtgtgcgtgtgtctgatatcaagtttcctcttccatacaggccanaatctt

SEQ ID NO: 37158 - DNA, 235 bp, Glycine max
  Clone ID: 700946094H1
gggaaggccaggctatgagcacttgaatgaaccactgcacgttttgattgaggccgaattacctgtcaatgttgttgatataaggctgaggcaagcacaagagatcatagaagagctactcaaacccatggatgagtcacaggatctccacaaaaggcaacaactaagagaacttgctatgctgaattccaattttagagaagatagccctcaactcagtggtagtccctctaca

SEQ ID NO: 37159 - DNA, 251 bp, Glycine max
  Clone ID: 700946096H1
gcaacactagcgactgttgccgagtacatggtggatggttctcttaggaatgttttgcttcgtaaggataggtatcttgatcgccgcaagagactgataattgccatggatgctgcttttggaatggatatttacactcgaaaaatattgtgcattttgacttgaaatgtgacaatttgctcgtgaacttgaaggatcctatgcggccaatatgcaaggtcggtgattttggcctatcaaagattaagcga

SEQ ID NO: 37160 - DNA, 275 bp, Glycine max
  Clone ID: 700946101H1
cagtgataggtttggtttggaaggaagaagaaaatgaaggccatagtgataacgaggccaggaggtcccgaagtgctccaacttgaggaagtggaagatcccctagtcggagacgacgagcttctcatcggagtccacgccacttcccttaacagagccgatacctttcagaggaaaggctcctaccctcccccttaagggcgccagccattacctcggtctcgaatgttccggaactgtcctttccctgggtaaaaacgtttccagctggaaaa

SEQ ID NO: 37161 - DNA, 155 bp, Glycine max
  Clone ID: 700946102H1
cgggtagaggctttatggatgtcctttacatatccctttgcgatgttcatgaatgttactgtgacattcatgaacatcgcaaagggatatgtaaatgaatgtcacagtaacattcctccttgtttgtttgcatgcttggtgatctgtatgaatga

SEQ ID NO: 37162 - DNA, 265 bp, Glycine max
  Clone ID: 700946105H1
cggaatctgaaatgagtagtagggtttggtttctactattccttctgctgatctcgaaatgccatcaagtgtggggctcctacgcgggttccgctagctccatcgtcaaccttccaaggtcaaacagatttcctggaagccaagagctttcgtttatgaaggtttcctcacggatttggaatgcgaccacttgatctctttagccaaatcggagcttaagagatctgccgtagcggataatctctctggagagagccagttaagt

SEQ ID NO: 37163 - DNA, 261 bp, Glycine max
  Clone ID: 700946106H1
aacgcctcaaagagggtattgctggatctggggcttaactagagaaactgccaagtgctcaataaggtccagactccagagaaaaaattaattttttttctggtacataaataagtttgtttgtttatgtataaaattatgatatcagatagataaataaaatcatgaaatcaataagaccatggtttcagtattttttttctatctgaaaaaaaaagaaagactccttgtatttgcaatgtcataacataaattgtataa

SEQ ID NO: 37164 - DNA, 260 bp, Glycine max
  Clone ID: 700946107H1
gatggatatgctgataaatagttttttaagactttatattatctcaactctcaagaaacattgatgcacaccaaacaaataactgtttgagtgcagtactgcagtaataagtaattatgtgcttgttgagcctgctgctaatttgctaggttgattcaaatacttggtttaagtggccaattcataatttatttttttaccatttcaagttgcactctctatctgttgcttctcatataattttttgttatagtggtgaa

SEQ ID NO: 37165 - DNA, 232 bp, Glycine max
  Clone ID: 700946072H1
gatttctccctcttcgctctctctcagtgaccagagacagatgatgatggagatggcgaacgaaacgctgtcgttgcggcactcgcggcgttggtgctactcgcggcgagtgtggcggtggatgctcaggagaactcggacgtgaagacgctggtgaagtacaagcacgggaagaagtactgcgacaaaggatgggaatgtaagggctggtcaatttactgttgtaacctca

SEQ ID NO: 37166 - DNA, 264 bp, Glycine max
  Clone ID: 700946108H1
cacaccattaaccaccacctcttaaatatattttccataaatcaccaaaatttcccatttttttcacctccatcgtttcacccactgaatcacagttttcttttctttttttctaacaaaaatcgcttctgcacacacaaggattcagggattggtgaattacgatattttaattattgattggtagcatgttttggctagaatttggataattgcttttgattatcagaggcagaaggaaacaataccttgaaagtagataga

SEQ ID NO: 37167 - DNA, 249 bp, Glycine max
  Clone ID: 700946109H1
ggcacacagtgcattcatcaacttactttcacagatgatccagatttccaaaatacatttctctataaactgtgtaagcagaagaccttggaacattttaggaatattattctgctatcttccccccaggatggttatgtgccttaccattctgctagaattgaatcatgccaggctgcttcacgtgacacttcaaagaagggtaaactgttcctagagatgttgaatgcttgtttgggacaaatccgt

SEQ ID NO: 37168 - DNA, 249 bp, Glycine max
  Clone ID: 700946044H1
caggggtggaaatggcaggttcttgaagactgctgcatatggacactttggcagagatgaccctgacttcacatgggaagtggtgaagccactcaagggggagaaggtacctgcttaactaaaaggggttccacactcttggcaagggacttttgcactactactggcttcttattatctgattgctaaaattttctctatgcttccttccctcttactcaattctgtttttttttttctgtatttttt

SEQ ID NO: 37169 - DNA, 258 bp, Glycine max
  Clone ID: 700946045H1
ctcgagccgattcggctcgagaacacatggggcttcgtcttctcgaacaacctcctctcagttatgatggctccctttagctccttcgtcaccggcgagaacgtcgagattatcgccgcggttagatccggcggccttttcgaccccgccgccttctacgccgtctccctgtcttgcctcttcggcttgctcattagtttcttcgggttcgcggccaggagggccgtttccgccaccgcgttcaccgtcaccggcgtg

SEQ ID NO: 37170 - DNA, 254 bp, Glycine max
  Clone ID: 700946046H1
caagcagggctttcttggttagcaaaacctgtcactggacagagttctattggccttgcgtcacgccatggaagcatcatcaaccaaagcatgcccctcatggatcctctggtgacactgtttggtagcattcatgagaggctccccgagacaggagcaggaggaagcatgcgaacactctgtttccaaattttggaagcatgttcagcactgctgagccgcatgctaaaagtgaacagtgggatgaagagagc

SEQ ID NO: 37171 - DNA, 260 bp, Glycine max
  Clone ID: 700946047H1
gtaggttaatgtaataataaaatcaggattcctgttgtagactagcataaccccttcacgacaggtgctttggggcagtatgtctgtgtcatgccggatatgtacgctccaacagtgcctgaatgaagctgtggaaatcacgacatggaacgcctagaaaattaatggcatcctgtaatgctgtaccgtgtatatcaatctttggtatttacgtatcatacgttcgtgtaagtacaattaatttgttgaaatgcatattt

SEQ ID NO: 37172 - DNA, 264 bp, Glycine max
  Clone ID: 700946048H1
gtgaaatagatgcagcggcttcaaaagttgaagacaaattttctaatgacggatttgataaagctgaagcacagagggaagacgccaaacttgagagctctagtaaatcaataatttcctgtaaaaacagcaatgggaatgatgaagatggtcctggtatgaggtcacatcttacagtatgctagattctgtaggtgaagaaaaaagactttctgctgaataccttcagaagtctgatgcaattgacataaatgcagagactac

SEQ ID NO: 37173 - DNA, 234 bp, Glycine max
  Clone ID: 700946049H1
agtgatcgctgcggcattgtatggattcattttacccttggtggagttggtgtacaaaaaaatcaaacagcctcttacttactctcttgtcatggagattcagttcgttatgtgcttctccgccactctcttttgcctccttggaatgatcatcaacaatgaacttaagggtgattcggaggaaacccaaaaaatttaagcacggagaaggaagtactaagctggttttggtgg

SEQ ID NO: 37174 - DNA, 243 bp, Glycine max
  Clone ID: 700946050H1
ggggaatattcgcgaagagagagagggcggttgcaattgcatagagaagtgcagagagagcgcagggacacgactcagtcaaacagtcggtaactctttcttttcttttctttctttctccgatcgcatcgctcgcaaccacaatcatgccttcccgaagaagaactctcttgaaggtcatcattctcggtgacagcggggtggggaagacgtctttgatgaaccagtatgtgattaggaagt

SEQ ID NO: 37175 - DNA, 255 bp, Glycine max
  Clone ID: 700946051H1
ggagtattccaagtttgcagaaaaagccacagcactgcttgaaatcctttccaactccgaagaaggacgaactgcaatctcaattgcagatggtggaatcttaacgctagtagagacagttgaagatggatcacttgtcagcacagaacacgctgttggaactctgctatcattatgtcgaagctgtcgagataaataccgggagctgattcaggaagaaggagcaattccgggtctgttacgtctgacagtgga

SEQ ID NO: 37176 - DNA, 257 bp, Glycine max
  Clone ID: 700946052H1
gtgaattggcttttctgtgcccctatgcgcacccccacaatctaggtctaaccttgataaattcagttttttctatttcaaggatgtgagggtgttctagctgattatgcagaacatgaaattcctattctggctggagcagtttgatcaagtcaagcatgaagtgaagttgcctgttattaggtattctctctttctcataattgcccccagggatttggttggagatatgttatagttatactacacagatatac

SEQ ID NO: 37177 - DNA, 91 bp, Glycine max
  unsure (1)..(91): unsure at all n locations
  Clone ID: 700946053H1
ggcggcgttgggaagttcccgntgaattcaccgggaagggcgcgatcgggcaggtctgccatgtcattggtgccgtcgtctatgtcatatt

SEQ ID NO: 37178 - DNA, 252 bp, Glycine max
  Clone ID: 700946057H1
cgaaggtgcaaagcaaggaagctgaaataactaaatgattctgaattcttgttccatgagtccacaacctctgtcacctcacaatttcagagacctcttcgattccgtcgaagcttttctcttcgactgcgacggtgtgatttggaagggcgacgaactcatcgatggtgttccgcaaactctggacatgcttcgcgccaagggcaagaagctcgtcttcgtcaccaacaattcctggaagtcgcgttctca

SEQ ID NO: 37179 - DNA, 238 bp, Glycine max
  Clone ID: 700946058H1
ctctctccaaatttctagggtttggttcagagagagaggaacctcaaatgtctcaaaacgggaagctgatgccaaatctagaccagcacagcaccaagcttctcaatctcactgttctccaacgaatcgaccccttcgttgaagaaattctcatcaccgccgcacatgtcaccttctacgagttcaacatcgacctcagtcaatggagccgcacagacgttgaaggatctctcttcgt

SEQ ID NO: 37180 - DNA, 253 bp, Glycine max
  Clone ID: 700946059H1
gcaggatccacctacatcaaattagcgaattgcaatttaaaggttactaactaacttctgaatttttattttatttattttgtgttctttgatttgactatctccacctgttgtgatgaatcgtgttgttgtagttggaaagcaagcatgaagctgcacaagcttatgttgacgctgcgcattgctataaaaaaactaatataaatgagtctgtatcttgcttagacaatgctgtaaatatcttctgtggaga

SEQ ID NO: 37181 - DNA, 254 bp, Glycine max
  Clone ID: 700946060H1
gttgcgattgcgactctctcttcctacgataaccgtttcctctcgccggaacaccgacattgatctctctctccggcgatccccgcccatccctccgccatgagttccggcgagctcctccacatacagccccaggagctgcagtttccctttgaattgcggaagcagatctcgtgctctttgcagttgtctaacaagactgacaactatgtggctttcactgtcaagacaacaaatcctaagaactattgtgt

SEQ ID NO: 37182 - DNA, 255 bp, Glycine max
  Clone ID: 700946061H1
gtttcgtaagattaggtttttgttctctctctctctgattcgatcgatttcgattgttgaattcatcacatcacggagccctgtacgttgacaacgatggtgctgccgctatttactgctttcattctctttgcttttattccgaatggcttgttagcagttccttccaccgtcccggcattcccttggtcatcacattatgaactggcctctgaaaatatattgacggcatctgtaaattaccaagtcatttct

SEQ ID NO: 37183 - DNA, 252 bp, Glycine max
  Clone ID: 700946062H1
taatttctaaaatctaataaaccatcatgaagagcacaaacaccaacacaaaactcatcctcctccacccttatatccaaacacaaggaagctccaatcgcttgtggcttctagcattcatatcaatcctcaccctcgcttttctcgttaccctaatttatacaagagaatccaccttcatcaccgctgccacttcttctgtgattccctcttcaaataatgctgcagtttctggttttggcagtgctcctt

SEQ ID NO: 37184 - DNA, 258 bp, Glycine max
  Clone ID: 700946063H1
tcaaaacactcataacacaaggcacaaagcaaagctcatccttgagttaaaaaatggcagcagcttcttccatggctctctcatccccatccttggctggcaaggccgtgaagctgggcccatcagccccagaagtgggaagggtgagcatgaggaagaccgtcaccaagcaggtctcctcaggaagcccatggtacggcccagaccgagtcaagtacttgggcccattctctggcgagcccccgtcctacctaaccg

SEQ ID NO: 37185 - DNA, 255 bp, Glycine max
  Clone ID: 700946064H1
gtggctaactatgagtatggatttttctggcacttttatcaggatggaaaaatagaagcagaggtcaagctcacaggaattctcagcttaggagcattgcaaccaggtgaaactcgaaaatatggcacaaccattgcacctggataataggggctggtcaacaacaattttttggtgcccgtatggacatggcactagattgcaagcctggtgaagcatttaatcaggttgttgaggtgaatgtcaaagttgaaa

SEQ ID NO: 37186 - DNA, 251 bp, Glycine max
  Clone ID: 700946065H1
caaaaagaaagaatcccaggcgaggagaaagatggaggggaaggagcaggatgtgtcgttgggagcgaacaagttccccgagagacagccgattgggacggcggcgcagagccaagacgacggcaaggactaccaggagccggcgccggcgccgctggttgacccgacggagtttacgtcatggtcgttttacagagcagggatagcagagtttgtggccacttttctgtttctctacatcacgtcttaac

SEQ ID NO: 37187 - DNA, 254 bp, Glycine max
  Clone ID: 700946066H1
caatttcagttggagatagctgtgagtagtgagagggaggaagacatagacataaagaaggagaagtgaagtgatgaatgccccagatcgttacgagcgtttcgttgtccctgaaggcaccaaaaaggtttcttatgagagggacacaaagatcatcaatgccgcgtccttcaccatcgagagagaggagcacactatcggcaacatcctccgcatgcagcttcacagagaccccaatgtgttgtttgccggat

SEQ ID NO: 37188 - DNA, 252 bp, Glycine max
  Clone ID: 700946067H1
acaagaactagctataggcctcaattagttattatattaatttggtctaagtagttgttattacttgtgtagtagttcttctccaatggctgatttaggttcagcctcttccaagagaatgtggtgttcgttccagaaagaatgcagcttcacttggccatgttggccttgcagtttggctatgctggattccatgttgtctcaagagctgcacttaacatgggcgttagcaagcttgttttcccagtctat

SEQ ID NO: 37189 - DNA, 254 bp, Glycine max
  Clone ID: 700946068H1
agtttctcaacaccataattgatgacctttttgcctttgtcattaaaatgccaacactccatcggctttctgtcttccgtgatgatcttatctttgtcatatacttataccagaggtggatttataaagtggacaagaaacgtgttaatgaatttggttttggaggcgaggatgatcaggttgtggcagagacagacgccacaaaggaagaagagaacactacaacggaagaagagaagaaaactaattgattt

SEQ ID NO: 37190 - DNA, 254 bp, Glycine max
  Clone ID: 700946069H1
ggttaacgaaacggtgcggtggtgtgctttgttgtagtcgtctccgatcatcatcgagaatgcgcaatctggctgcacctcattccttgggggttttcatctttcgccccaataagcctccttttctcattctcccctcaatctctcgaagatctctcccttccatccagtgcggtgcagttcaattcggcccctgcatcgatatccacaaagggaaagtgaagcaaattgtagggtccacccttcaagacttg

SEQ ID NO: 37191 - DNA, 246 bp, Glycine max
  unsure (1)..(246): unsure at all n locations
  Clone ID: 700946070H1
gcacaatggagataattttgcagctgaaattcagaataggttgagaataattgttgcaggtggagatggtactgccagctggcttctaggagttgtatctgaccttaaattacctcaaccgccaccaattgctactgtgccattggggacgggaaataatcttccctttgcgtttggatggggaaagaaaaatccaaccacggatctccaatcagtggagacattcctanatcatgtanaagcggc

SEQ ID NO: 37192 - DNA, 248 bp, Glycine max
  Clone ID: 700946071H1
cacaattctctgtgaactttctagaatctcgttcttcctttgccttctccttcttcttcaaccctttttctttctctttctttcgcactttcattctctaaaaaaatctaagtccctttggtcttcatcttctgttctgatccaggtatggcttctaaacgcatcttgaaggagctcaaggatttgcagaaggatcctcctacctcatgcagtgcaggccctgttgctgaggacatgtttcactggca

SEQ ID NO: 37193 - DNA, 259 bp, Glycine max
  Clone ID: 700946043H1
ctcaactctaagaaacaaatagtttctcacgctccccagacccagtttcgtgatattcacgatgatcaccgtgatgatggtcgccgacaccgtcgcagtaaccaccgccaaaggcctcggcgtccttcgcgcctgccaatccacctgtaacttttccctcgccgatcagatctccgccatgattcagacttacgacgccgtctcgccgccgccggtcaagcctactacctacaggctaagacgccggacgctcctccgg

SEQ ID NO: 37194 - DNA, 213 bp, Glycine max
  Clone ID: 700946011H1
ctgtgcgtcaataaaagatatgttcgaggagaaaaggaacatattagaaccagcaggagcacttgcactagctggagctgaggcatactgcaagcatcatgggatccaggggaaaaatattgtagcaataaccagtggagcaaacatgaattttgataaacttcgggttgtaactgaacttgctaatgttggtcgtaaacaagaggctgtgct

SEQ ID NO: 37195 - DNA, 263 bp, Glycine max
  Clone ID: 700946012H1
caaagttttatattaagaaaatccagttaaatgactcaaatctttgcgatggccatttgtttagggtgaatttgtttaaactaagtaactttaaaataagtgttttttatataagcgcttttttatgaagtagataggatttacttcttaaaataagcagaaatagtttagacaaaacacactaaaaaatcaaaaaaacttcttattattaaaacaagcggttatttccaccaataagtttaaacaaattggcccttaatctt

SEQ ID NO: 37196 - DNA, 264 bp, Glycine max
  Clone ID: 700946014H1
tgtcaatgaacaccttgaaatctgtccatgtttcctcagaagccaatcaaacacaagtccccaccaattctttttccatgcaaacattagatgcatctgtccaaagtttagtgaaatcatggcagagaaggcaaagatggctgcatctattcaccaaatccagcccacaagatttgaatattaatagagcattatggcgtactcatttggccaattttctggattcaacatcggttcgcgtgtttacaatctcattgctcattg

SEQ ID NO: 37197 - DNA, 87 bp, Glycine max
  Clone ID: 700946015H1
gagcgggggatctgctaaaatacgcttgatccatatgggcctcctcgaccacttgtgggacgacaccggcgccggcccaagggcgga

SEQ ID NO: 37198 - DNA, 267 bp, Glycine max
  Clone ID: 700946016H1
cttaagatgcgtccataacaatcctcagggaggacatcttccagattatgcaccacatcctgctattgtattgaagatggaagatggcactggtctacttctccctataattgttttggagatgccaagtgttctactaatggcagcaatacgcaatgttcccatagctagacctactttgtatcaagtagtgaaggagatgattgacaagatgggttacgaagtcaaacttgtcagagtaaccaggagagttcatgaggcatactt

SEQ ID NO: 37199 - DNA, 262 bp, Glycine max
  Clone ID: 700946017H1
ggcaaaatagatgcttggaagattccatcttctgaatcagattccctcaatcaatgggctgaaaggtctcgtttcagagtcggcgatcatcttgtgtggaaatatgagaatgggaaggactcagtgttggaagtaacaagggaagattatgccaattgcagcacatccaagcccatcaaagagtacaatgatggaaacacaaaggtgaagctagagcatgctggtccattctacttcataagtggagcaacagggcactgtg

SEQ ID NO: 37200 - DNA, 244 bp, Glycine max
  Clone ID: 700946018H1
ccttgtctccttgagctgcaaaaaaaatttcaccatattttcatattcacatactttgttgatgatcaccatgctagctatgcttcttgtcggatgattttcataaggccttttgttttgcatggctggtgatacagcatcttccttctccacttgcatggccattttcttctctttgctcctactttctcacttcactatggccatgctagaacacaataacttttctccttcaacatctaac

SEQ ID NO: 37201 - DNA, 233 bp, Glycine max
  Clone ID: 700946019H1
atgccaatgaggagaagaacaaagaccttgcatcacaatatgatgttaagggattcccaacaattaatattctgagaaattgggggaagaatgttcaggaatacaaaggtcccgtgaagcagatgggctccgtgactatttgaagaaacaaagtggtcctgcttcaactgaaattaaatctgctgatgaagctactgcttttattggtgaacataaagttgctattgttggag

SEQ ID NO: 37202 - DNA, 83 bp, Glycine max
  Clone ID: 700946020H1
gccaggcgaatggtctggtacctattgtagagccagcgatcctggtggatggacctcatgacatcaacaagtgtgctgaggtg

SEQ ID NO: 37203 - DNA, 258 bp, Glycine max
  Clone ID: 700946021H1
gtaatttcctagatctcccaaacaaattgtagcataagtcccatggccaaagagactagtgttgtttatctatatcccagcaaatcacaagtttggggtgagaattttgatcataaaaaacttgtaataacaacactagctgctaatggaaagaaggaggagagtaatggagcacctaatgacacatatcctgcgtttcccgggtggtatgctgatgtttcctggccaggagaagcacacacatataaaatagaaaag

SEQ ID NO: 37204 - DNA, 214 bp, Glycine max
  Clone ID: 700946023H1
gctattttagggaatgatttgaacaaattgcaggaagttttacgattgcgtcatcaccaaagagatgaattaaagcgtcagaaggaagaagagcttgctcttctttatgctgatccttttgatgttgaagcacaaaagaagattgaagctgccatccgccagagcaggattgatgaaaattgggctgctgcattagacataatctggaaccttt

SEQ ID NO: 37205 - DNA, 244 bp, Glycine max
  Clone ID: 700946024H1
cccatctactccttccctcatggctgaacaatcttccaactccatttacgatttcactgtcaaggacatcagtggaaatgatgtgagtctgaatgattacagcgggaaggttctactgattgtgaatgtcgcctctcaatgtggtttgacacagacaaattacaaagaattgaatgtattgtacgagaagtacaagaatcaaggatttgaaatcttggcatttccgtgcaaccagtttgctgga

SEQ ID NO: 37206 - DNA, 256 bp, Glycine max
  Clone ID: 700946025H1
attctatcaagtttatgtaaatatatgctttgtcttattttgtttgcagattcgtgtatgttgaacttctggaaattcgtaaagatgtccaatgcccaatttgccttggcattattaagaagacaagaactgttcaggaatgcttgcaccgtttttgcagggaatgcattgataaatcaatgcgactagggaacaatgaatgccctgcttgtcgcacacattgtgccagtcgtcgttccttgagagacgatccaaa

SEQ ID NO: 37207 - DNA, 249 bp, Glycine max
  Clone ID: 700946026H1
gaatgaacttatccaattccacgtgctaccaacatttgtttcaatctcaaacttcgacactcttagcaacccggttagaacgcaagccggtgatgaccctgataggttggcattgaacataacaagctcagggaaccaagtgaacttgacaacaggtgttgttaacaccacagttggtggaagtgtttactccgatcaccagctcgcgatttatcaagtggacaaggttcttcttccgagggattcttc

SEQ ID NO: 37208 - DNA, 250 bp, Glycine max
  Clone ID: 700946027H1
ccagatctcaattttctgcaatttcactcagaccaggaccttaaccatggctcaacctgcaagcctcacaagaataggccttgctggcctggctgtgatgggccaaaaccttgctctcaacattgctgacaaaggctttcccatttctgtctacaaccggaccgcgtccaaggttgatgagacagttgaaagagcaaaacaagaaggaaaccttcctgtgtatggctaccataacctcaaattctttgtc

SEQ ID NO: 37209 - DNA, 244 bp, Glycine max
  Clone ID: 700946029H1
gtcttgcccagcagcagcatggtggctggctccctgtttctgcaatggatgcggtagctaagattgtagaggttcctcccatacgggtctatgaggttgccacattttactccatgttcaaccgagctaaggttgggaagtaccatctgttggtttgtggaacaacaccttgtatgataagaggttcacgaggaattgaagaagccttattgaaacacttgggagtgaagcgcaatgaagtaac

SEQ ID NO: 37210 - DNA, 258 bp, Glycine max
  Clone ID: 700946030H1
gagtaataataatgtgtataatgctacagcagcgggtatggtaaaaaaaatcatacgaaaagaaaaagggggatacgaaataactatagtggatgcattggatgggcgtgaagtgattgatattatacctccaggaccagaacttcttgtttcagaaggtgaatctatcaaacttgatcagccattaacaagtaatccaaatgtgggtggatttggtcagggggatgcggaaatagtacttcaagatccgttacgtgt

SEQ ID NO: 37211 - DNA, 262 bp, Glycine max
  Clone ID: 700946031H1
ccaaatctcacccttttctgcaactttctctctgacacacaccgaacactcaaacacacacagtgtgcagcagcagcagcaacaacaagagaagaagatggctctgcaactatgggagacattgaaggaggccatagttgcctacacggggctctccccgcccaccttcttcacccttctggccctgatcctagccctatactacgtcgtttctgggctcttcccctcttccgacccacgccacaacacggctcgggcgact

SEQ ID NO: 37212 - DNA, 205 bp, Glycine max
  Clone ID: 700946032H1
tggagaagaagaagaagaaaaagggaaaaacgcaagagaaatagaggaagatcgatcgagatctccctcgcgtttgtctcagttgaagaaattaaaaagcagaactagagtaactcaacggtctcaacatttcaagggttttcagaattccatattttttcctacggatttgagttggaaggagatcgaagaggtttctagttgc

SEQ ID NO: 37213 - DNA, 80 bp, Glycine max
  Clone ID: 700946033H1
cgcactcaagctggcctgtaaggcgatgtgcaagatgctaataagcatcgagagtggccaagaattagtgacgatgcata

SEQ ID NO: 37214 - DNA, 196 bp, Glycine max
  Clone ID: 700946034H1
cagggaacttcaccactgaagccctaatccaccgtatccatccaccgcagcacactctgcttttgcggcttcttctccaacatgggtcgcgcaactatgtgcctttcaaccccaccacctaccactgccaccaccacagtgtacccagtgccgccaccgctactagagtgagtgaccttcttgttccaggcgtcag

SEQ ID NO: 37215 - DNA, 188 bp, Glycine max
  Clone ID: 700946035H1
ctagaacaagaacaacagccatgcggcggctgcagcggcgtacggactatccgacgtcgatcatgattcgcaagatcacagaggcagcacatgttagttcgaatcatggcatcgccattcagagcactggcgtcagcgcgtgccaagtacgtgcggtgattacgaactgcggtcagcacgtgagatac

SEQ ID NO: 37216 - DNA, 262 bp, Glycine max
  Clone ID: 700946036H1
ctcgagccgattcggctcgaggggaatggctcacttcaaagaaggagcattggcacatagtgttggcacttgagaacaaaggagcagcaggaaggcacttgtgtgtggaatctattcgtcactttagtgatcttgtggacaaggttgctgagttataccctgaatacgatgtggctaagttgccaaaggatacccaaccagggttgttgagagcaagtggaaaggatgcatcaaagaagctgattgatttaggtctagaatt

SEQ ID NO: 37217 - DNA, 260 bp, Glycine max
  Clone ID: 700946037H1
gcagatcgtcgaagttttaggttgtaattgcgctttatgacggctattgctgctgtattcttttacttaattggaaagccacttcgatgattggtagctgcaagaaaggaaagccataacttggagtgccccgagtcgatttatgtttttcaactcaatctgcctgtgcggtgtgttggctcatgtctatgaagcatggatacagatatggaccctggacacccatggacatgtacacgcacagatctcctgtcactcag

SEQ ID NO: 37218 - DNA, 74 bp, Glycine max
  Clone ID: 700946038H1
gcaaactggaaaatttggggcagctgttagacggccatgagaacgtcttggcggtctcagctagtctgccggtg

SEQ ID NO: 37219 - DNA, 179 bp, Glycine max
  Clone ID: 700946039H1
ccactctcactacactcactccctccaaaaaatggaagagatactaaagtacccctttctctcttccttcttaaccctcttcttctgcatctccgccacttccattgccccacataactcccaaacccaaaccctcctcctccgcaccctccctagagccaccacactcctctggcccg

SEQ ID NO: 37220 - DNA, 127 bp, Glycine max
  Clone ID: 700946010H1
ctcattctctgtttcgctttcaccgagtaacttcactttcccgaactccacctgagaaaaagatacccataattcgcacgcacgcacgcacgcacttgttctgactcagtgcttgtgttggacgcat

SEQ ID NO: 37221 - DNA, 129 bp, Glycine max
  Clone ID: 700946040H1
gcaaggaagacgccgccaacaacttcgcccgcggccactacaccgttggcaaagagatcgtagatctgtgcttggatcgcgtccgcaagctcgccgacaactgcaccggcctacaaggcttcctcgtct

SEQ ID NO: 37222 - DNA, 231 bp, Glycine max
  Clone ID: 700946041H1
ctcctttcttttactagcacctagctaggactcaattctttggtcacttaatagtagttcctttttaactatctttcttcaatggctgactcagcctcagcctcagcctcttcttccagaatgtggtgctcctccccgaaaggtttcagctgcatgcggccatgttggccctgcagtttggctatggcggcttccatgttgtctcaagagctgcccttaaacatgggcatt

SEQ ID NO: 37223 - DNA, 257 bp, Glycine max
  Clone ID: 700946042H1
aaaaaaatgagtaataaatccaaaaatactgatacttccaagacaagtgaatcaaaggatgatggcagtatcaaacaaaaaccttctgccaagtttaagcatgaaactccaaaaagtggaaaatccaagcaagaaaccccaaaggctgccatttccaaaggaaaacctgtcaaaagtggtggaaagactgatgttaatggtaccagcaaagcaagatctggtttattgaagagaaaagattccgagaatgagaactc

SEQ ID NO: 37224 - DNA, 246 bp, Glycine max
  Clone ID: 700945972H1
gttcgggcaaagtggtgtttccatgttgtttctgagtttacttccgcaatatcccaggatatgtgtgtgttcttatgaaggttgcagtgctacggagtctatagattttatgctgcagcttcattagataccaattttggtgaatttttcttgataacttgttcttggatttttgttttgtggtgttgatgaagatggctatgggtggcctaatttccggtgctggtgttattattgttagtttct

SEQ ID NO: 37225 - DNA, 234 bp, Glycine max
  Clone ID: 700945974H1
ctgacactacaaaatattcaccaattcccagttccgtggactgcagcacccttagatttcgttaccaaggagaaggagaagcgcccgaagcgcaataaaatggatatgtacattcgtgttaaacgtagtaagacaacctacttcatcaggtgcatagcatctgataaaattcttgacataaaacagaagttgcaagaacttgttgatcagccagctaataatcaacggttaatt

SEQ ID NO: 37226 - DNA, 245 bp, Glycine max
  Clone ID: 700945975H1
aggtaatgcacacagtagcattacggactgaagctactataccaggtggtcaaatgccacctaatattggtccagtgttgaagaaccacatgagtgagatgtttgcataccatgcaaccatgatgtctaacactcttggaacctcaactgttgtcttcactagaacgggtttcatggctgtccttctgagccattatcgtccttcgggcaccatatttgcttttacagatgagaagagggtacaa

SEQ ID NO: 37227 - DNA, 243 bp, Glycine max
  Clone ID: 700945976H1
agaaaaagcaactaagcatagtgtgtaagaaagggagaaaaacaagtgctgtgtagagagaaaaatggctaggtggtgcatgatcttggtggttcttgctcttgccgtggttgcaagtgccagaaacatgcccaatgacgctggtttggaggaccagaagaacttccttgggtatgggttttcgggaattggcaacaatgggcttccctttggtggaatgggttctgggtttgatggtaatat

SEQ ID NO: 37228 - DNA, 246 bp, Glycine max
  unsure (1)..(246): unsure at all n locations
  Clone ID: 700945977H1
cagaaatccaccttgtgatggtgccctagatccatggcttctctgtccaacctttgcatgtgtttcactgttgctgagtttcaaggctaccgtttatcctctcttccctctctgggtcctgggaaaccctttggtgggtcccacattcacaactttgcaaactcacttccacacaacagcttatccaaatttnncanccttcnaatttccgaggtttggcttgtggatattcaggttgtaaactgt

SEQ ID NO: 37229 - DNA, 248 bp, Glycine max
  Clone ID: 700945978H1
gggaaaagttggccacggttccttctggtggtggtggtgccgttgccgtcgccgcagctcctgggggaggtgctgctgctgctgctcctgctgctgaggcaaagaaggaggaaaaggaggaggagaaagaggaatctgatgatgatatgggtttcagtctcttcgattaattggtgtagtctattcagcttttttgttcagaacatattcttaattaacactagagcatgagtttgtcaaagttttgt

SEQ ID NO: 37230 - DNA, 124 bp, Glycine max
  Clone ID: 700945980H1
gattcttcatccatagacatggccaccgtcacttctgcagccgttgctattccctcattcactggcctcaaggcaagcgcaggtaaagtgagagccgcagttaaagtctcagctccccaagcca

SEQ ID NO: 37231 - DNA, 242 bp, Glycine max
  Clone ID: 700945982H1
ggtgtattcctagtcactattcacttccctccggattatcctttcaagcctcctaaggttgcctttaggactaaggtgtttcacccgaacatcaatagcaatggtagcatttgtcttgatatcctgaaggagcagtggagccctgcactcaccatctctaaggtactgctttctatctgctcattgctgactgatccaaatcctgatgatccacttgttccggaaatcgctcacatgtacaa

SEQ ID NO: 37232 - DNA, 242 bp, Glycine max
  Clone ID: 700945983H1
gccacgtcacttagtttgtctctccctgggttcactgtacctcaaccagtgtctccgccgccgccgccactgccactgccggcggagacggtggaggagcgagggaagcaaatgttcaacgcggagttcttgagagtgatgcacgagatgataaaaaaggaagtgaggagttacatgtcagggatggaagagcaggagtttgggatcacaatgcaaaccgaagcgattgggaacgcggtggt

SEQ ID NO: 37233 - DNA, 239 bp, Glycine max
  Clone ID: 700945984H1
caatttttggtgcatgatcgtttagggtttgtgcttgttgttgccgccttagtgacaataatcgcgccaactcttgtatgatccatcactcagatccttccaattccgctgtctcgctttgaccgccgccacaccaaactagcatgttcttcagtgttcccctttcagatatttgatgcgtggaaacgtagggagagttgcccaatctattcttatgacccatagaagccggtctttgg

SEQ ID NO: 37234 - DNA, 129 bp, Glycine max
  Clone ID: 700945985H1
ggaccctcattttcacaacgctcatgaaaatgaacaacctcaacttgctagatctccctccgttctccagagactcaaatccatcaacctctacagttactgccctaccgaacccttcacttccaaact

SEQ ID NO: 37235 - DNA, 80 bp, Glycine max
  Clone ID: 700945986H1
tggcgcatcatctcctcaatgctgcagaaggtggagagccgcggcaacgaggaccacgtcgccgtcatccgcgactaccg

SEQ ID NO: 37236 - DNA, 244 bp, Glycine max
  Clone ID: 700945987H1
gtcaggttggaactccttgggcagatggaactgcttccatctcacagtgtgctattaacccaggagaaacttttcattacaagtttacagttgacaggcctggtacatatttctatcatggacaccatggtatgcaaagagcagctgggttgtatggttcattgatagtagatttgccaaagggacaaaacgaaccgtttcattacgatggtgaattcgtccttctttttagtgatttgtggca

SEQ ID NO: 37237 - DNA, 246 bp, Glycine max
  Clone ID: 700945988H1
gccacgtctccttccactgcatttcttcacttaacccctaaaataaatttcatcctatggttcatctccattgctattgttgctactattttcaccacctatctcttcagaataattctccattttgaagcagttcgtcgtgagtaccaacatccgatctgtgttaacttcttctttgcaccatggatagcccttttgttcctagctcttggagttcccccatcagttaccaaggacttgcatcaa

SEQ ID NO: 37238 - DNA, 226 bp, Glycine max
  unsure (1)..(226): unsure at all n locations
  Clone ID: 700945989H1
acatcactgaactaacaaagcaaccctatgtcgaaggtggtttgtgtcaccggagccagcggcgccntcggatcatgggtggtcctactcctcctccagcgtggttacaccgtccatgccaccgtacaagatatcaaggatgaaaatgagacgaaacatttggaggaaatggaaggagcaaagagtcatctccatttttttgaaatggatcttcctgacatcgact

SEQ ID NO: 37239 - DNA, 242 bp, Glycine max
  Clone ID: 700945990H1
ggtgttgagggggctgctgatctctcttcacatggcactacaaggaagctacataaagtggaagatgtagacacgagtgaaggcaactttggcactgttataatccatggagatgaattacataagaccacacaagatgcagattctgcagcttctgtatctgctctgaccagtggctcaggagacagattggctgactctgggattgagagtcagaaagttggtattatgaacactgcctc

SEQ ID NO: 37240 - DNA, 82 bp, Glycine max
  Clone ID: 700945991H1
gcctttcaagccccagggttttcttcaacgcatcaccctcacggcaaaacacgtacgccgtaaagttcgcagttccacacaa

SEQ ID NO: 37241 - DNA, 241 bp, Glycine max
  Clone ID: 700945992H1
gttatgactttgtacaaaggcccggctcttcagttcataaagggacaagcagcaacccaccatgaaagtggcaacagcacacaaccctctgaacaaaactgggtgcttggcacagtagagctcattgtaagttgtggtggttgggctagcttctttatcttgcaatctttcactttgaagatgtacccggcagagctctcggtcacagcttggatttgctttttgggcatttttgagggtg

SEQ ID NO: 37242 - DNA, 244 bp, Glycine max
  Clone ID: 700945993H1
gcaggtttggaagatgggttgaaaggaacctgctcagcgcatgtaaggatttcatggggcccagcctgttctcgaccaacacctagaaggtcaagataatacttattagcatatgatattgttgtaccaatccctttgaaagtgaaagttaataagggttcttgaaattattggtatgcaataattttgaactgcgtggtagtgtgggaattcattatatagcttttgttcgttgttatctaga

SEQ ID NO: 37243 - DNA, 247 bp, Glycine max
  Clone ID: 700945994H1
tgagaattggtttgaagaagagacctctagatcttgatagtattaatgctgctagaaaggcaagagaaggtctaagatctgtaagaccaatgatgggtgcacatgatcagtttattggtaagtcaaaaggtgaagatatagtacctttgaagaattatttggacgctcaatattttggtgagattggaattggcacacccccacagcccttcactgtagtgtttgacactgggagttccaacctttg

SEQ ID NO: 37244 - DNA, 247 bp, Glycine max
  Clone ID: 700945995H1
ctattattactcccaatgagcttcctgaggctgatggctttttgtttggttttcccacaagatttggatctatggccgctcaatttaaagcattttttgatgcaactggaggcctttggcgtacacaggcactagcagggttcttctatagcactagttctcaaggaggaggccaagaaactaccccgttgacatctattactcagcttgttcaccatggattgatctttgtccccattggatacac

SEQ ID NO: 37245 - DNA, 265 bp, Glycine max
  Clone ID: 700946001H1
gtgcatgatgctgaattaaatgcagaataagtgatttatcctgatagtgatgatgaattggatggcgtcatgaggaatagtggattatttttatctagaaagtgtacgatggcacatcttttgtactttaaataggtgttgtggtatcaggctaaatcacttcagcctgcagattatgttctataattagaaatcttagttatggttctctttgtgtgactgtgtgaacaataaaattgcttatgccttaacatgcagcaaaata

SEQ ID NO: 37246 - DNA, 102 bp, Glycine max
  Clone ID: 700946002H1
gggaaactgggctatccaagatttactcagatgtactatgctaagcaagggatcatcacggaagagatgctttactgtgccactcgtgagaaccttgaccca

SEQ ID NO: 37247 - DNA, 264 bp, Glycine max
  Clone ID: 700946003H1
cctgaatccttccttcatttcatcagtgaattatcaagtgtcaagtgttaactaaccgccatcgatcatgaggtgcaaaaagcagagccagaacaagttagttcgaatcatggcatcgccaatcagagcactgggaaaagcacgtgacatgtacgtgcggagcattacgaactgcggccagcacgtgagctactacggcggcggcgaccccacggaaggcgccggaacgttctcgaggagccacagcgtggccacctcgacaac

SEQ ID NO: 37248 - DNA, 246 bp, Glycine max
  unsure (1)..(246): unsure at all n locations
  Clone ID: 700946004H1
agnccctacactcgacagtctcttcttctcttctctgcagcttctctcccctcaacagtgagtaattttggcagaatctccgccaagtatcccaaaatttcctccaatctcttcagagttctgcagacattcatccactttccctctataaaaccattcacaatcccaatccaacttgcaaaaccaaaacctagggttcccaaatcctaatcgcactaaaacccagaatggaagcctctttgaagt

SEQ ID NO: 37249 - DNA, 235 bp, Glycine max
  Clone ID: 700945971H1
atgattagggttttggtttggtgtttttcttaagcttgagatcaggaattaatttcagaggttcagagaatggcaacggattcttctaatggtaatggacatcaccaaacaacaacaaagcaacctcctttgccgtctcccctgcgcttttccaaattttttcagtccaacatgagaatcttggttactggaggagctggattcattgggtctcacttagttgacagattgatgg

SEQ ID NO: 37250 - DNA, 263 bp, Glycine max
  Clone ID: 700946006H1
gttctagctcgcgatctagaactagatgcattctgtaatctgcaacagcgccgtttcactttcgccttaccactcttgtcgccggaaacctaaccgattgcgggccaaatcctctctgctcgttcagaaacaggacaccaactcggcgagccactctccgactccgtctccgtctcgcgccgcctcattctccttcgccatgccaagagttcctgggataaccgctctctccgcgaccatgaccggcctctgagcaagtctgg

SEQ ID NO: 37251 - DNA, 243 bp, Glycine max
  Clone ID: 700946007H1
aaaagaactcgaaagaaggaggaaaacaaaagaaaaatttagtaactaccgataccatataataataagaatagtattattaaaagagaaagggaagggaaggtaacacgctatggcggcggaatcgggtggtacgccgacaaactttgatcttcccgaggaggtggtgcaagtgctaccgtccgatccctttcagcagctcgatgtggctcgcaagatcacttccaatgctctatcgacacg

SEQ ID NO: 37252 - DNA, 250 bp, Glycine max
  Clone ID: 700946009H1
tgactatttaaatatgatctaatggtccgtattcaccgttcttatttattataataatatccatgagttcttacctgatactatgtatgtcacgtcacgcgtgagtactccagtcttagatgttttgttttaaatggctgttttgttgttcagatcactttgagcaatggtgaaggctgtggcagttcttggcagcagcgagggtgtcactggaactattttcttcactcaagagggaaatggtccacca

SEQ ID NO: 37253 - DNA, 255 bp, Glycine max
  Clone ID: 700945929H1
gaacaatcctaaagcactggacaccgcatccaatgtcattgttggtgaatatttgctcaagctcaatgagaactgttgaggaggctctcaaatgagaagtttttgctcaaggtgtctcactttttgtgttaaaaattcactaaaacaaaaaggaagaaaactacacactactcatttgtgggtattcatggacctggaagggaatgatggggtaattccctcttattcactgtttaggaaggccagatatggtga

SEQ ID NO: 37254 - DNA, 243 bp, Glycine max
  Clone ID: 700945930H1
caaaggtgcagtgaagtggcggctgtggacattccctagggattttgattggggatggcttcgagcatccaacaagtggaaggggacgagtcagttgtgctgcgcgtgactcattccaatctcaaaaccttcgcctccgacatccgcttctcgcttcacctcaccgtcgaagccgtcaaagacaagctctggaaaaaatgcggcacctctgtcaactcaatgcacctccaactctacgacgac

SEQ ID NO: 37255 - DNA, 255 bp, Glycine max
  Clone ID: 700945931H1
gctttctccgagaacaaaaaaaaaaacgtgattcgctcttctcttcgaataaaccacaaaaccaacaaacgagaagaggagtgagacaagatggggttgtcgttcacgaagctgttcagcaggttgtttgcgaagaaggaaatgaggattctgatggtaggtctcgatgctgctggtaagacaaccatcttgtacaagctcaagcttggagaaatcgtcaccaccatccccaccatcggatttaatgttgagact

SEQ ID NO: 37256 - DNA, 255 bp, Glycine max
  Clone ID: 700945932H1
ctacaaacaaactaattaagcaacacacacttcaatttatcagcatggcctccgttcagtgccacaaaacctgcaaagtgagctgccaacaggaaaaccagcacgcctcgtttgggcagaaagtttctgacttgttcaaagggcatcaacataatgaccacagctccaattatgccacccaaaccaaagtgctttcccaatcaaggtcagggttaagccccttcaccaccaaaactcaaacacaatgcggttgcc

SEQ ID NO: 37257 - DNA, 91 bp, Glycine max
  Clone ID: 700945933H1
gttgatgtatttggacccaccggatatttgcaagcttgcacgattgaacagggcgtttcgcgatgcttcggtggcggatttcatttgggaa

SEQ ID NO: 37258 - DNA, 258 bp, Glycine max
  Clone ID: 700945934H1
ggagtccatcgcttagaaaccaaaaggctctctcacgcagtcgcagtgagtgaaaaggaaaaccctaattgcggtattctcagtgccttcgagagaaagaaaaaatggcagataatcttgttctccgtggcaccatgcgcgcccacaccgacgttgtgacggcgattgccactcccatcgacaactccgacatgatcgtcaccgcctcacgcgacaaatccatcatcctctggcatcttaccaaggaggacaagactt

SEQ ID NO: 37259 - DNA, 242 bp, Glycine max
  Clone ID: 700945936H1
gatatgcctctctatgatatactaaatgagttccaaaagggaagtagtcatatggctgctgttgttaaggctaggggaaaaggcacagaaactcgacaaatcattgatgaagacaaacatgaagacaacaaaaccattggcggggactcacagttgaccgctccgttgctacataagcaggatgcagaatcaggaagcgatgttgatgcctaagtcaagccttgataacattactgccctaa

SEQ ID NO: 37260 - DNA, 252 bp, Glycine max
  Clone ID: 700945938H1
gtagaaacacgaaactcagaatccatggcgacaccagcgacgacgaagcgaaaaccggtgttcgtgaaggtggatcagttaaaacctggcaccaacggccacacactgacggtgaaggtggtcagttccaagccggtgagaacggtgaccacccgcggcggtcgaccgacggtgctagccgcgcgcccgtcgcgcattgccgagtgcctcgtcggcgacgaaaccggaaccataatcttcaccgctcgcaaa

SEQ ID NO: 37261 - DNA, 251 bp, Glycine max
  Clone ID: 700945940H1
attttccggccatgtacctcgaaatcgaggtttttgaccggctcttccggtaaacttaaccgggaagtgactatgcggccaatggggtgccctcctcgtgcctagttcaaggttgaagccaagaagggagagtggttacctggacttggcctccccaacttacctcaatggcactcttcctggtgacaatggatttgaccctctggggctagctgaggacccagcgaacttgaggtggtacgttcaagccg

SEQ ID NO: 37262 - DNA, 249 bp, Glycine max
  Clone ID: 700945942H1
cccaaatctcctccttagactgccaacccaatatagccattggatcgaattcagtctgaattcggtctaatggtttgggagttctaattaagtctaaggaacagaattctgtacatatatatatttagaagatcacagggtgcttgatcagtggtgtatcaggaacgacaaggtgacgaggttggcttctgaaaagggtgtggtgattttcacaaagagctcttgttgcctctgctatgcagtcaacat

SEQ ID NO: 37263 - DNA, 245 bp, Glycine max
  Clone ID: 700945944H1
cctttgttcactcttcttctcttgcggctagggttttagcgcacttcttctagatttaaggaagatcggtaaggaaaaggttcacatcagtattgtggtcattggccatgtcgactctgggaaatccactaccactggtcacctgatttacaagcttggaggcattgacaagcgtgttattgagaggtttgagaaggaagctgctgagatgaacaagaggtctttcaagtatgcctgggtgctgg

SEQ ID NO: 37264 - DNA, 252 bp, Glycine max
  Clone ID: 700945946H1
cgcgcatgttcgccggagaactcagccccgaccgcgacttcttcatctacagccgccacttcaacccgacggtgctgagcctcagtcgcctcatggccgccctcgaaggcaccgaggccgcctactgcaccgccagcgggatgtccgccatcgccgccgtcctcctccagctctgcagccacggcgaacacgtgggtcgcctccaaaactctctacggtgggacccacgcgctcctctcacactttctcccg

SEQ ID NO: 37265 - DNA, 254 bp, Glycine max
  unsure (1)..(254): unsure at all n locations
  Clone ID: 700945947H1
ggcggaggcggaagaatgtatcggagcaacgcgcagaggagcttcaatgagtattgttttgatccggccacgcctcctcggagttacgccattaagaaaaacgccaacggttacggcgacgaagactattctcctcgtgatttcagccccggcctcttggatctccattgttttgatacggagcttcttcctcagattacgtcatacaanttgtatgattccgagccttacattttcggcaaacaaactgtcag

SEQ ID NO: 37266 - DNA, 151 bp, Glycine max
  Clone ID: 700945949H1
tctcgagccgaatcggctcgaggtttggagaatcccgaggatgctaccgagtgtgcggatgacctctccaagcagatgcttatctgtactgctgctgatttggcgattgaggacacgctttacgcgttggataaggcacttcaggttggag

SEQ ID NO: 37267 - DNA, 124 bp, Glycine max
  Clone ID: 700945951H1
ctaggcagcagtgctgctggaactggaagtgcagtttcctttagtgatgatcagtatgccatgcgactatgtagttcacagccacttcgtagatgtcgcaaacgcgtctctagagcgtctcaaa

SEQ ID NO: 37268 - DNA, 114 bp, Glycine max
  Clone ID: 700945952H1
ggctcgagccgaatcggctcgagcttaaggaatttaagcagactagaggtgctgttgcggatacgttaacagatgcatcatcggttcttggcggtgatgccacacttaagattc

SEQ ID NO: 37269 - DNA, 250 bp, Glycine max
  Clone ID: 700945955H1
ctgaccctgattgcgttggttgttgcggccctgtgcgccgttgatctaacccagagagcatcatcatcatcatcatcccctcacgcgccaggtccctccgtggactgctccaacctggttctcaccatggccgattgcttgtccttcgtcaccaacggcagcaccatcacaaagccagagggcacatgctgctctggtttgaagtctgttctcaaaaccgctccggcgtgtctctgcgaggctttcaaga

SEQ ID NO: 37270 - DNA, 242 bp, Glycine max
  Clone ID: 700945956H1
cgtcactccttgctcttagccctcctcctcttcgccgccgtgtccaccgccgcgatggcggtggccgcgtccgacgccgacgacatcctgatccgtcaggtggtgccagatgttgagcgaagcgacacaggaggacaacctgctgagcgcagctcaccacttcacctgcttcaaggccaagttcgccaagacctacgccaccaaggacgagcacgatgcctctcttcggcgtcttcaagtcc

SEQ ID NO: 37271 - DNA, 246 bp, Glycine max
  Clone ID: 700945957H1
cgagatttcaagactggttacctgaccctctcatcggcaaagtccatgtttgtgagccaattgattggaacagccatgggttgtgtaatcgctcctctcacattctggatgttttggactgcctttgatgttggctcacctgatggcccttacaaagcaccatatgccgttatattcagggaaatggccatactcggtgttcagggattctcagagcttccaaagtactgccttgaaatgtgcggt

SEQ ID NO: 37272 - DNA, 185 bp, Glycine max
  Clone ID: 700945959H1
ccaaaaataacccaaactctcctttaaaaaaaaacccggacaccttggaaccggggaaattttaattatcgcggccgtagccctaccctctcttcagataatccaattgcctttctttaactccctcacttttccagttttgaagcgcttccagtggcgaatttagggtaataccctcctggtaa

SEQ ID NO: 37273 - DNA, 245 bp, Glycine max
  Clone ID: 700945960H1
gtgaggttcatgtatttatacggcaaaagaaggttttgcggggatttgatgaagagattagagattttgttgaagaacaaatgtctgtaagagttattgaattccataccgaggagtctcttcaagctatcacgaagtcagcggatggctcattctctgtaaagaccaacaaaggtacagtggacggtttctcacatattatgtttgctacaggacgcagacctaatactcagaacttaggcctg

SEQ ID NO: 37274 - DNA, 249 bp, Glycine max
  Clone ID: 700945961H1
atgggttatgagagagtgagagtgctgtttcttctgtttctgataccactgccaacggttctgggttggggcaaggatggccactatgccacttgtaagattgcacaggagtatcttagtgaagatgctctatttgcggtcaaacaattgcttccagattctgctcaaggtgatcttgctgccgtttgctccttgggctgatgaggttggccatactcaccgctatcattggagcagcgctttacatta

SEQ ID NO: 37275 - DNA, 252 bp, Glycine max
  Clone ID: 700945928H1
gaggcattagcagagttgtatgtaatcgatgagcaatatgagaaagccttcttgttgtatgctgatcttatgaagccagaagtatttgattttattgataaacataacctacacgatgcaattcgtggaaaggttgtccaactaatgaggctagactgcaagcgtgcagttcctttgttaatccagaatagggacttaataagtccacctgaagttgtgaagcaacttctaaatgcggatgataagagtgat

SEQ ID NO: 37276 - DNA, 248 bp, Glycine max
  Clone ID: 700945963H1
gtcgtacttccaacttgcagctgaggatcatgaatggtggtggaggtctttcctttgtggtggatcaactgggctgttcatctacggctattgcttgtattactactatgcacgatcagatatgtctggttttatgcaaacttcgttcttcttcggttacatggcctgcatctgctatggcttcttcctcatgcttggtagtgtaggtttccgtgcgtctctgctctttgttcgtcacatatacaggt

SEQ ID NO: 37277 - DNA, 73 bp, Glycine max
  Clone ID: 700945964H1
gtcaacatatgagacctctttactttatgaaaattaataactagttaatatcttttcggtccgtctaaagctt

SEQ ID NO: 37278 - DNA, 245 bp, Glycine max
  Clone ID: 700945966H1
tttactagcacctagctaggactcaattctttggttacttaatagtagttcctttttaactatctttcttcaatggctgactcagcctcagcctcagcctcttcttccagaatgtggtgctccatccccgaaaggtttcagctgcatgcggccatgttggccctgcagtttggctatgccggcttccatgttgtctcaagagctgcccttaacatgggcattagcaaatttgttttcccagtcta

SEQ ID NO: 37279 - DNA, 250 bp, Glycine max
  Clone ID: 700945967H1
gtggtataggaatgatagggatcggagcccagacaagggatcaagttggagggatcgcttcaaaagcgtcaaccgggatcgcagtcgtagtcctaacagggccgcattacctcaacattcccaaggtggcagctttcacaaggcaatgatggaacgtggtggatgggatagtgatcgcaacaagagctttaaccgggaccgaagccgcagtcctagccctcatagacaggtgaagggcccagcagttcgc

SEQ ID NO: 37280 - DNA, 118 bp, Glycine max
  Clone ID: 700945969H1
gtcgtttctcatcatcagagacttacactccaatttccaaaccgaatcgaagggggatttcgatttgagtgggaatttcattttcgacttccctgtgatgccttacacggtccgcgag

SEQ ID NO: 37281 - DNA, 138 bp, Glycine max
  Clone ID: 700945970H1
aggttctcatccgctgcttgccgccccagagtagataatttgggtatgggaaactgctggattgaaggacgaagctgcagcacatcaaatagctgcgatgaagacaatgaagagtatacagcagagacattcccgtgg

SEQ ID NO: 37282 - DNA, 220 bp, Glycine max
  unsure (1)..(220): unsure at all n locations
  Clone ID: 700945891H1
ctgtggaccaaatcagcctggggacatctggatgaattttgttggatctgatagacttggtaaaaagaaaattgctgtttctctagctgagctattgtatggtagccatgaaagctttatttttgtggatctaagttctgaagaaatgaaaggatgcgatgtgaaattcagagggaagacagcccgtgagtttactggaggggagctntgcaagaaaccc

SEQ ID NO: 37283 - DNA, 214 bp, Glycine max
  Clone ID: 700945892H1
gtggtgcacatgctggcgcatgtgcgtcctttacgtctctatccacatcacttgccagtgcattgtctgatgtaaagatgttgtcgctcatcacccttattgcgtattcaggtctaccacaagcatttgtgtgggctgcattcacaaagtatgttgtaactcctgcaattggtatttctggtgtgggtagttcaatggcagcgtacggggcttt

SEQ ID NO: 37284 - DNA, 212 bp, Glycine max
  Clone ID: 700945893H1
ctgaaacttcagaggcggcttgccgctagcgttctcaagtgtggtagaggcaaagtttggcttgaccctaatgaggtcaatgaaatctccatggctaattctcgacaaaacataaggaaattggttaaggatagtttcattatcaggaagccaactaagattcattcccgttcccgtgactgcagaagtaaggaggcctagaggaagggacg

SEQ ID NO: 37285 - DNA, 102 bp, Glycine max
  Clone ID: 700945894H1
gttccattctttcaaaagccttgtgtgcttccttctgatttctctactttttcagtacacacaacacaacacagacaaaaactctctttctgttcagtttcc

SEQ ID NO: 37286 - DNA, 245 bp, Glycine max
  Clone ID: 700945895H1
tttgttctcagctacccaaacaaagaaggtcgaggatcttgcccgcttatcatttcaggcaactcctatctatattgatgtagatgatgggagataaaaaggtcacaaatgaaggattgcagcagggctatgttgttgttccctgtgctaaacgttttgttgttctctattcattcttgaggagataccaatcagaaaaagtgatggtctattactcttcatgcaactctgtcaaattccatgca

SEQ ID NO: 37287 - DNA, 246 bp, Glycine max
  Clone ID: 700945896H1
cggaacaagaaaatatctgctggcgtgcttggcggagcactgctgtttgggtcctttttgagttgcttgagtatcaccttcttactctggtgtgtcacattctgatactgttgctcgcagttctgttcttgtggtctaatgcccatacttttatccacaaatctccgcctcgcattccggaagttcatcttcctgaggagccattccagcaagttgcgtctgcaattagaattgaaatcaacgggg

SEQ ID NO: 37288 - DNA, 261 bp, Glycine max
  Clone ID: 700945901H1
tacggattctatgttaagcggagttacaccctgcgatgtcgatcaatgattatcatttatataatatgaccctcctcaagctacctatatcttgttttgtttctgtcttcaattcactgtaataatgtcctgctactcttactctctttaattttccttttctaatcagcatttatatttagacccataggagtttgagttttagaaaaggggtttgtttttccaattgaaagaatttccaagtcgcagtgtcaaaggttg

SEQ ID NO: 37289 - DNA, 250 bp, Glycine max
  Clone ID: 700945902H1
gtcttcttcttcttgaatctctctaagctaaggtaagagatatggggaattgccaagctgtggatggtgcagtgcttgtgatccaacacccttgtgggaagatagagagattgtattggccattcactgcaagtgaggtcatgaggactaaatcctggccactatgtttctttgataataccattgcctgtgccaccacaggagcagaatcaagagaagaaactgtgcgtttcacacgcgttaagctgct

SEQ ID NO: 37290 - DNA, 252 bp, Glycine max
  Clone ID: 700945904H1
agtgactctaaagaactatatgagcttgacaaggaagagtatgcaaagaaagggagctacagaattgaccacactccaacattaaagtttcttgacaaggcatgtgtgaaaacagattcgaacactagtccatggacgctatgcactgttactcaagtagaggagaccaaacaaatgataagaatgattccgatcttggttgctacatttgtgcctaataccaagatggcccagatagataccctttttgtg

SEQ ID NO: 37291 - DNA, 258 bp, Glycine max
  Clone ID: 700945905H1
gagaaaagttagggttcacaacttttccttttccttttgcttgcgaatctgaatcaaataatcaatcatccattcattattcatcatgtacgtcggcgaagaaaatcacgctgaagagttcggacggcgaggctttcgaggtggaggaggcggtggcgctggagtcgcagacgataaagcacatgatcgaggttgactgcgccgacagcggcatccctctgccgaacgtgacgagcaagatcctggcgaaggttatcg

SEQ ID NO: 37292 - DNA, 245 bp, Glycine max
  Clone ID: 700945906H1
gtgtttgtgttaaaaaggtataatgactctggttattccaacttgttcatttgaaacctgaatcaatttatgtggtgagagattgttatatgctgattgatgctcggataacttatagcgactcaataatttcaattacttgtgatcttgtgcttgaagaatcaaatgtgttagttcacattctgtaaaaaaaaaaaaaaaaaaaaaaaaaaaaaaaaaaaaaagaacggaaaaaaaaatctggg

SEQ ID NO: 37293 - DNA, 224 bp, Glycine max
  Clone ID: 700945907H1
ctccaggttggcaccatttcagtagtccttcatggaatatggcatgaattccattgccaggaacttcctctcattacaatcagcacataccacacgacccgtttgcgcatcccgtctacaggtatcctggttatggtcacccacgagacttgtatgaaatgtactatcataatgcttatggtggtcagctgtttcggatctgctggtttccagcatattgccaa

SEQ ID NO: 37294 - DNA, 258 bp, Glycine max
  Clone ID: 700945908H1
ggaagccttgttgtgagtaagagaaaaggcttcctgcaccgagcacaccaacttgatacctctgattctttctttgcttagaattccacagaatactggagaatacttcttttcaatcactccccacctttggaattcaagggtttgagcaaggaggaggaagactcattgctagggcaagtggaaatatggaggtacatgacatgcttcacggactccgtggccttgaaagctgtcatagagcttcgtatagcggac

SEQ ID NO: 37295 - DNA, 256 bp, Glycine max
  Clone ID: 700945910H1
aggaaagatactccatctataagagtggagtgacgaaaagttggattgatgttaaaattagagaagctcgaaagttaggagtagcagcaaaggagaagaagaggagcagagtagtgaagaaggacagactcagcaacttacccgatgaagtgcttcatcgcatactttcctctttggacgcaaaatcagctgttcaaacgtgcgttttgagcaagcgatggacgcacgtttggacttccctcccagtcctcaactt

SEQ ID NO: 37296 - DNA, 254 bp, Glycine max
  Clone ID: 700945911H1
ggcacatctctttgctgttttccaaggcttgctcaaagtgcttgctggaattgacaccaacttcactgtcacctccaaggcctcggatgaagacggagactttgccgaactatacatgttcaaatggaccacccttcttattcctccaacaacccttctcataataaacttggtgggggtggttgctggcatctcctatgccatcaacagtggctaccaatcttggggacccctctttggtaagcttttctttg

SEQ ID NO: 37297 - DNA, 255 bp, Glycine max
  Clone ID: 700945913H1
gtcaaatgttgcaggctacagggatgggcctagtgaggatgctaaattctcaaatgatttcgatgtggtatatgttcggcccacctgttccttgttggtcattgatagaggaaatgctgctcttcgacaaatctctcttgaccaggaggactgtgattatcagtctaattcaatttccagtacagatatacttacagttgttggtgctgttatagtaggatatgctacatgtatgcttcagcagggatttggatc

SEQ ID NO: 37298 - DNA, 256 bp, Glycine max
  Clone ID: 700945914H1
gcttttggttggactttgctgaatggagagtgcaagaatcagccaatggttaaatcttcttgtttgtgtactgctattgctcaaggcagaaggatctttagttccattgattttggtcgagaatgcagaatcaaaaggagctgtttgtttggatggaagtcccccagcttaccactttgataagggatttggggaaggtattaatagctggattgttcacattgagggaggaggatggtgcaacaatatcgagagt

SEQ ID NO: 37299 - DNA, 259 bp, Glycine max
  Clone ID: 700945915H1
cgattttcgtttcgccaattcgtgaaatcgaaagattcccacagaattgtacgaattattgttcatttttttgtctctactgtcgtgctccaacttggtaaactagaagttcatttattgttttcattcttcaatgggggatgctgagaatgcccttccacctacaaagaaaaatactgctggaagggagctcactcgagacactcccattgatgatgaggaagatgcccccgagcttgagactggcactttcaagaga

SEQ ID NO: 37300 - DNA, 260 bp, Glycine max
  Clone ID: 700945917H1
aaaatggccaaaccataaaagatgtcgccaccgggctaccggctacgccatttgattatggggccggacacgttgatccagtggctgcgtttgatcctggtcttgtgtatgatacttccgtggatgactacttgagcttcttctgtgccttaaactacagttcctatcaaataaagcttgttgcaagaagagacttcacctgcagcaaaaggaacaattacagagtggaagatctcaattacccatcttttgctgttcct

SEQ ID NO: 37301 - DNA, 193 bp, Glycine max
  Clone ID: 700945919H1
ctttacctcaacatgaaagcttcagctatgagttttctgctgaaaagtttgaaataaccccaggtcatggacaagttagtgcttctggcatgtgcagtgtatgcagatcatcgtgcgtaacatgctggatgctatcagactcacgagcagatacacaagagactagaatatcagtcgtgaggccatgagcatg

SEQ ID NO: 37302 - DNA, 254 bp, Glycine max
  Clone ID: 700945920H1
tgcggtggtaactgtggttgcggaagctcctgcaagtgcggcaacggctgcggaggctgcaagatgtacccagacttgagctacactgagtcaaccaccaccgagaccttggtcatgggagtggcacctgttaaggctcaatttgagggtgctgaaatgggtgtgcccgctgagaacgatggctgcaaatgtggaccaaactgctcctgcaacccctgcacttgcaagtgaggtgttgggagagcaagcttcaa

SEQ ID NO: 37303 - DNA, 255 bp, Glycine max
  Clone ID: 700945923H1
cgaatcgaggcctccgaggacacgtggccgccgcggaagagcgtcgtctcctgcgccggcgtcgcccgcagctggagacatatcaccaaagacattgtcaaaacgcccgaactctcctccaagatcaccttccccatttctggtagacagcctggcccaagggagaatctcctacagtgctttataaagcgcaacgggtccaccccaacatactattggtttctcagtttaaccagtacgctagctgaagatggg

SEQ ID NO: 37304 - DNA, 252 bp, Glycine max
  Clone ID: 700945924H1
gatagacagagcccatgaactgggtctgcttgttctgatggatattgtacacagccatgcatcaaataatacattggatgggctgaacatgtttgatggaactgatggtcattacttccatcctgggtcacgaggttatcattggatgtgggattctcgccttttactctacggaagctgggaatttctaaggtatctactcccgaattcgagacggtggctggatgaatacaagtttgatggatttcggtt

SEQ ID NO: 37305 - DNA, 175 bp, Glycine max
  Clone ID: 700945925H1
atttcaatcctcagtttctttcttcaacgtttccatcatacacagatcccaatcctctctcaagccctaatttcccctcatttccatggccacagaagaccccactgtcgcggtggaacccgctcccgaacctgcctccgccgatcctcccccggaggagaaggaggagaccaaa

SEQ ID NO: 37306 - DNA, 251 bp, Glycine max
  Clone ID: 700945926H1
ttcatgggcaacaaaggacatgattcaacaagccaattactttgggtcgctgacccaggcatcagctattagagttgggtctttccaaggggaggaaatatatgccccattcaagagcctgcttccaatggtaaaccctgatgatgttgtgtttgggggatgggatatcagtaacttgaacctggcagatgccatggccagggccaaggtgtttgatatcgacctgcagaaacagttgaggccttacatgg

SEQ ID NO: 37307 - DNA, 235 bp, Glycine max
  unsure (1)..(235): unsure at all n locations
  Clone ID: 700945890H1
atctctatctcatctcatagttgatttagtatttaattcctatgtagttgtttgtactttgttgtaatcatcaactcactcagttcccgtaggttgtcgtgattcatcacagcatattgtctctgaaattcagaaatgacatctgcaatgccaaggctgttgcggcgacgcantgccaacatacantcgntgagccgtgtatttggaacccaacaagccnctcaccagctaggaa

SEQ ID NO: 37308 - DNA, 248 bp, Glycine max
  Clone ID: 700945927H1
ggaaggtctccttcagctaccttctgacaaggctcttttgtctgaccctgtattccgccctctcgttgataaatatgcagcggacgaagatgccttctttgctgattacgctgaggctcaccaaaagctttccgagcttgggtttgctgatgcctaagcaacgtttaggggattgttgaagaggcatggtgcccataatatttctctaaaaaattgtatggtcatggtttttaatgccaatgtgggtt

SEQ ID NO: 37309 - DNA, 220 bp, Glycine max
  Clone ID: 700945840H1
ctcaatcatcttttgtttgttcttcagtactttagtgtgtgatttaattccaagattttgagaatgtctagctgtgggtgtggaagtagctgcaactgtggcagcaactgcggttgcaacaagtagctcttttgacttagcgacgatgagaagacaaccacagagacactagtagtgggcgttgggtcagtgaatgcccaaatggatggtgccgtaatgg

SEQ ID NO: 37310 - DNA, 77 bp, Glycine max
  Clone ID: 700945841H1
cggtggtagaagacagaggccgtcttatccgatcagcatacattcggcgatattatcacagcttttctatataacgg

SEQ ID NO: 37311 - DNA, 231 bp, Glycine max
  unsure (1)..(231): unsure at all n locations
  Clone ID: 700945842H1
ccgagtcctccaagcctcgccccggtgttcgcggaagcctcaagaagtgatctcaatcgatcgttggaatcgttatggcccctccttcattcgtagttctcaatctcttttttttctttctttttctttttctttttattttgttgcctaagattacgatgntgagtantttggaagcgtgtttttaagggaaggggtnatgaggangtcgtcgtgtatgtaggggcagag

SEQ ID NO: 37312 - DNA, 76 bp, Glycine max
  Clone ID: 700945843H1
gagtttatcctcaacatcatgtatacccttaagctcgaagttgaagcctaagcatggccttttccactctcaaatt

SEQ ID NO: 37313 - DNA, 142 bp, Glycine max
  Clone ID: 700945844H1
caggcagaaggccaaagctctgaagatgcttcatacaataaagatacggaggtagcagggattaccctgaggcctttgatcatggatgagttgcgcttggccatgtgactagttggctgtaagtttagcgtcggatggcacc

SEQ ID NO: 37314 - DNA, 164 bp, Glycine max
  Clone ID: 700945845H1
ctccggcatctcctccacgagtcactcctccgcctgcgtctcctcgttcgaattcgctattagatctgagtcaatgagcgagtgcatctcgatccacattggtcatgctggtatccaggtcggaaatgcttgctgtgaactctactgtctcgagcacggcatcg

SEQ ID NO: 37315 - DNA, 74 bp, Glycine max
  Clone ID: 700945847H1
ccaaactggacaatttggggcagatgttagacggccatgacaacgtcttggagctctcagctagtctgccggtg

SEQ ID NO: 37316 - DNA, 81 bp, Glycine max
  Clone ID: 700945848H1
ccggaagctaagagctttggtccaaatggtaagtacagaggcaagtgcttaggacaaaagccgtgatcacgcaattattgt

SEQ ID NO: 37317 - DNA, 168 bp, Glycine max
  Clone ID: 700945849H1
tggggtttgaggaaactgagttaaggcttggactgcctggaaacggaggcactgaagaagtgctcatcaggaagaggggtttctctgagactgaaactggtcatgaagatgagtctgccaccactgtggatttgatgcttaaatctttctcgaaggaggccgcaacca

SEQ ID NO: 37318 - DNA, 210 bp, Glycine max
  unsure (1)..(210): unsure at all n locations
  Clone ID: 700945850H1
caacgatatcagtcttccattcatcaacaaccactctctctcccctctctgcagcaaaaccaattctccggcgacatctccggtcaggttccggcagcctctccggcgactcggcatggcaactcaatgaatgcggaantaccgccggggcaccacangncggnatccagtcactccgacnatgaccacctctgctgcgaggacacctcc

SEQ ID NO: 37319 - DNA, 171 bp, Glycine max
  Clone ID: 700945851H1
gcttgaggcatttctggcacagttttttccacttttattttaactttaagactgcacagagagaagcatataattcctgagtcaatatagaatttgtgaagtcagtccaaacttcagtttcaaagatgccacgaggaacgcatgaagatgtactgaacagcgccaaaggaa

SEQ ID NO: 37320 - DNA, 136 bp, Glycine max
  Clone ID: 700945852H1
ctattgggcaccttttcttcttgaatcaaactccgataatgctgtcatccatagggtaactgatagaattgtgagaaaaggttcaatcaatacgcatggtcgtcattggaaaggcgctgacattgttgtattaaca

SEQ ID NO: 37321 - DNA, 150 bp, Glycine max
  unsure (1)..(150): unsure at all n locations
  Clone ID: 700945853H1
ggaaaccaagatctgcacctttcatgtcgtgcctgagcaaagttttctcgtcttgttccaccggttgaaactacccgagtgagccatggttgatggtaccctaatcctgtctaatttacttatcatctgagtcgaggaagaacangaagg

SEQ ID NO: 37322 - DNA, 77 bp, Glycine max
  Clone ID: 700945854H1
cgagaagcagaaacaatatgctgctttggtggatttctcgtcctctaaaggatgaagatattcaatgtgtttcttca

SEQ ID NO: 37323 - DNA, 183 bp, Glycine max
  Clone ID: 700945855H1
tactcattctccatacctcaacgaagaggttaaagagacggcaacactttgctgtccgccttgaccgagcagagcttcgtcttggccctcgattttgccctaaagtactctcagtcacaacagacaccgtcgtcgacgacgacgacaacaaaggcaccgaagcagaccaaggcggagaagaag

SEQ ID NO: 37324 - DNA, 189 bp, Glycine max
  unsure (1)..(189): unsure at all n locations
  Clone ID: 700945856H1
cttaaatcaatccttgttcactcttatttcttatagctccaacaacatccctcatataaaaaaatggcctctctccgttttctcttcttagcttctttcttcattgttttgtcactttccatcaacacttgtgagggtcaaggggcaaanagaaaacgattggcaccaacanttcctgaccgagggaac

SEQ ID NO: 37325 - DNA, 143 bp, Glycine max
  Clone ID: 700945857H1
cttgttaggaaggaaattgaagaacatagggacatgacttttctgttatttcctgaatatatgctttagaagttattgagtgcttgtactttaattgaattctgcattattaggtgctgtctggctttaaaatttgacttaca

SEQ ID NO: 37326 - DNA, 225 bp, Glycine max
  unsure (1)..(225): unsure at all n locations
  Clone ID: 700945858H1
ctttaaagcatgctaaagaaggaacagaaagctcagctttctggtctgcactaggaggaaaacaaagttacaccagcaagaaagttgttaatgaggttgtcagagatccacatttgttcactttataggttaacaaaggaaagtgtcaatggagaggaggcttacaacgttncgtaggacgaccatctgtcggaggatatccntatacctgtcacacatgtagaa

SEQ ID NO: 37327 - DNA, 69 bp, Glycine max
  Clone ID: 700945859H1
gtacaatcgcgtcttctcctctgtattgagacatggccgaagaagaggaagaatcagagctcagcgata

SEQ ID NO: 37328 - DNA, 63 bp, Glycine max
  Clone ID: 700945860H1
gccctgaagatgttgagaggctttactgtgaaattcatctcctgaaaacattgaagcgcagcg

SEQ ID NO: 37329 - DNA, 172 bp, Glycine max
  Clone ID: 700945861H1
cagtagaaatgaaactcttggcagaagtggatcaaccgggaagcgttattgacagctatgtgctcactggatccatgattactgaaagagaatcctctcctgattggaatgcccgcggagtacttgcggtggagggagctcggatctgcgctcatatgggaagtagtgggga

SEQ ID NO: 37330 - DNA, 145 bp, Glycine max
  Clone ID: 700945865H1
atttttattaattaaaaaaaattataactcatcagtggcaaaagcagttcaaaacaaaattacgatgccaatttgcgaaggataggaagataatttgcactaatcgatgtcctgtggctcaaaacatcgtaattttgtattgaac

SEQ ID NO: 37331 - DNA, 74 bp, Glycine max
  Clone ID: 700945866H1
ggctcagcggcatcgttggagtgttctgacacatctgtctctctctcactttcggtttcgaaaccaaaacccta

SEQ ID NO: 37332 - DNA, 64 bp, Glycine max
  Clone ID: 700945868H1
gtttgttgaaggttacagagttggtggaggaccacttggtgaaggacttgagccaatcgaccct

SEQ ID NO: 37333 - DNA, 68 bp, Glycine max
  Clone ID: 700945869H1
ggagtgagggtgctcagcacagacgcagaccagtggatgtcccatcgactacttcctgacatcctgag

SEQ ID NO: 37334 - DNA, 175 bp, Glycine max
  Clone ID: 700945870H1
ctcttctttttactctctttctgtctctctctacgctttctcgttcgagatccctcaagggatccactaactgaaggagaaatggggctgacattcaccaagcttttcagccggacttttcgccaagaaggaaagtcgaatgctgtaggcggggctcgatgcagctggtaatacc

SEQ ID NO: 37335 - DNA, 101 bp, Glycine max
  Clone ID: 700945838H1
gatgatcgcagtgggtatagtatggggcgccaccaacgctatcatgcgccggggtgcgctaatctgggacgaagctctgaaatcctccgcaaagccacatc

SEQ ID NO: 37336 - DNA, 194 bp, Glycine max
  Clone ID: 700945873H1
cgctcatcggctggctgaaagcattcagtcaaaaaatctaaactcatggaatgatccacttggagcacttattattggagtccaccagctgaagttatctggttggaagccagaagaatgtggtgctattgaaaatgagcgtcatcacctgagcaaaagaggccgttctgaaacggaaggaaatgtagatggtc

SEQ ID NO: 37337 - DNA, 156 bp, Glycine max
  Clone ID: 700945875H1
gtaaaattacttacctatcacttgcaatcctcaaaagcactaggccttcagcagcaacttgcaattgcctagagatagctggaggatgtttggtgcgccctcttccgtttcatgtctttttgctccgtatagttaaccacaacattagcccaatca

SEQ ID NO: 37338 - DNA, 243 bp, Glycine max
  Clone ID: 700945879H1
gtactacaaaggcacatatctatagcatcctagctatatctgggtgaagaagcaaaatgaaaatgaggcttgtggtaattgcactaacaatattgatgcttgcaagttcttctatggctatccatgtgaagactttggtggccaacaacatgctacaagagaaggagggagaacacagtaatggtaataataatgagcatcaaatccctctgaaccgctatagtgatatccatgaaattcctg

SEQ ID NO: 37339 - DNA, 209 bp, Glycine max
  Clone ID: 700945880H1
aatttcttcctctatgagaaaatgtgaatgataagcctaaaactgcaatgtcatatcaaccaccacagttactgtcatctccataactggccctgtgactttgatatttttatgaggagttgttgaactttgcctttttgtgaaccaagctagtaaattcccccatgtgaactaatttgatgtaaaaggtagaagttattattttccat

SEQ ID NO: 37340 - DNA, 173 bp, Glycine max
  Clone ID: 700945881H1
ggctcgaggaagaagggatacgaggctctttatatggttgatgccattgatgaatatgctgttggtcagctcaaggaatttgagggcaagaagcttgtctctgccaccaaggaagggctcaagcttgacgagagtgaagatgagaagaagaagcaagaagagtttaaggagaa

SEQ ID NO: 37341 - DNA, 134 bp, Glycine max
  Clone ID: 700945882H1
ctatgctcacatagcattagagggttcttggatacaatggaatttgctacaatgcaaagctccactgttttcgagcattatagtatagcagcccgggcattcttcaatggctgattggggattgccctcacaca

SEQ ID NO: 37342 - DNA, 221 bp, Glycine max
  Clone ID: 700945883H1
cttataaccaaacactcttcttcatattcttcttcttcttcttgttcttgttctatctgtgacgagcatcatggcctcgagagcagtgctattgttggctatgtgtgtgcttccggccatggttgtggccagtcgcccagcaaagaacccgttttgcgcgaaggggcgcgtctactgagacccatgtcgtgctggtggtgagtacctcagcaaccacctac

SEQ ID NO: 37343 - DNA, 112 bp, Glycine max
  Clone ID: 700945884H1
actattacaataaaaacactctaaagaggtgcgaataatgatgacaaccatagtgtcactagttgatgggttaggtcaggctcgctcaatccggatagtcgctaatggtaag

SEQ ID NO: 37344 - DNA, 172 bp, Glycine max
  unsure (1)..(172): unsure at all n locations
  Clone ID: 700945885H1
ctaacccatcgttcgcacggagccgtggtggttctggctctgtccttttttcctttctctcgttaccagaaccagaagaaccatttgtggccaacatggatttggaccagtggatctccaaggntaaagagggccagcatcatctagaagacgagcatcaacgtctcggcga

SEQ ID NO: 37345 - DNA, 207 bp, Glycine max
  Clone ID: 700945886H1
gtcgtcttcttcgagttgccgttgaagcgatgtcaatcggtgaaggcctggagggtgaatcacttctgatctgttctccattggaagccgtcgtccattctgagtcagatcgaaaacccacagttacacgtagttcgagccgaaagcgatggaacctcgtcgaacaaccatgcatactgagtcagacacacgtgcactgactcgccg

SEQ ID NO: 37346 - DNA, 168 bp, Glycine max
  unsure (1)..(168): unsure at all n locations
  Clone ID: 700945887H1
gtgaataaatccagcattgttctgttctctgcaacattctccactctcaaccatggcttcaaagcttttactcatcactgtcttcgtttttgattgattgcttttggacttgccgtggctgctgagcagagaagaagcaccgcaagngctgtgacggacaaggtaaag

SEQ ID NO: 37347 - DNA, 170 bp, Glycine max
  Clone ID: 700945888H1
gtataggtactgtctttcataaggacgctcatttatggaccaatataaaggaagtaagtgcacgtgaaatggcagttgcagcacgtgagggttctagacggcttcagatcctcaaatctgaagaaaggaggaaaacttttcaggcaaattccgaatcagtggagacaaga

SEQ ID NO: 37348 - DNA, 202 bp, Glycine max
  unsure (1)..(202): unsure at all n locations
  Clone ID: 700945889H1
gtaaaatctcttgactctatgaaaaaaaggcaaaattcaatcataattccaattggctctgtgcagtatggtgtatgtagacatagagctctgctttttaagtatttatgtgatcacatggagccaccagttccttgtgagcttgtcagggggtacccagaattttcaccacagtcctggaagatcaggctgacnatgaggg

SEQ ID NO: 37349 - DNA, 253 bp, Glycine max
  Clone ID: 700945795H1
gcaacgacttttcttcagagggatagaaaagggtgataacctacatttgcaccttgaaggtgtaaaggataagtcaaagcttttgcttttggagggcactagctagcaaagagaggaaacttgaggaaaccagaaaacaaaacgtaatgtctaaagcttttgaggctattgcaggtgttagagctgaggtggacaagctctcaaatagggtgacttccatagaagtagctattaatggggggaacaaagcatc

SEQ ID NO: 37350 - DNA, 249 bp, Glycine max
  Clone ID: 700945796H1
ggagtcaagtatttggtgatgatgccaagttcttggttgaggtaaaatctggtcaggtagaagcaagtttgaacccagatcaagagcttagaaggttaaaacagatgtttgaagcttggaaaaaggattatggggcaagactgcgtgaaacaaaagttattataaataaacttggaagcgaagatggcgcacttgagaaaatgaagaaaaagtggtggggaagaaggaccagtacaaggataaattgat

SEQ ID NO: 37351 - DNA, 122 bp, Glycine max
  Clone ID: 700945801H1
cacaacccttcaatgacgtccatggccactttcttcgcccaaacctccttcccctcccactctctctccaaaaccttcgatacccatttcgcccctgccccgaaagtcaacgtctttgtgaa

SEQ ID NO: 37352 - DNA, 219 bp, Glycine max
  Clone ID: 700945803H1
gagaatacttgctggagatatgtctgctgtacgcattgctaacacaatagctatgttcaggtcccagcgtattggaatggttcaaacccaggaccagtacattttctgctataatgctatcatagagtgaactgaagaccatgctcctcagcagcaatatgagtagaagggcagggatactgtttaagttgttagaatgcgattggggttacagaaggc

SEQ ID NO: 37353 - DNA, 175 bp, Glycine max
  Clone ID: 700945804H1
gcccggcatgattgtcaccggcatggaggtggcagaaattgatggctccccaaggatgggtccgacgtttggggcgatgatgatatcagggcagaaggcggctcatttggcgttgaaggcgttggggaggaacaatgcaactgaagtaacgtgtgtagaaggaagggaagaaccc

SEQ ID NO: 37354 - DNA, 168 bp, Glycine max
  unsure (1)..(168): unsure at all n locations
  Clone ID: 700945806H1
gtcaagaggtaaaaacaatggacatgggcaggaaagttgtcgaaaaggaaagttctttgtacagctccgctgctgatgttgacaaacaatcaagtttttcttctagttatccattcaatgggcgagaggaaaaaagcataacntctgtcccaanagtacagggaaagg

SEQ ID NO: 37355 - DNA, 169 bp, Glycine max
  unsure (1)..(169): unsure at all n locations
  Clone ID: 700945807H1
tggagatgacgatggtccagatcctgggtttttgtctccgttgtggttccaaagcaaggtcgacatattggtagcgacccctggaaggctagtggaccatgtcaacaagttgtcatcgaagcancttcgataactcgagtgctacgaagcagaacgaatgctacgtgag

SEQ ID NO: 37356 - DNA, 163 bp, Glycine max
  Clone ID: 700945808H1
ccacaacaactcctttttttacctcttcacattctccatttcacagggttctgatcatgttggggaagaggccccggccaatgatcggaaagttgtcggagttgttggtctcgagaggccgcacggtggcacaatttgacaccaccggaagccgcttaggccc

SEQ ID NO: 37357 - DNA, 234 bp, Glycine max
  unsure (1)..(234): unsure at all n locations
  Clone ID: 700945809H1
tgtgtcggaaaaagaagaagagaaaaaagatgagcgacggaggaaaacgacaaggtggaagagcgttgccgccgccgccaagaggccctccgcctcctcccccctctcgccctcgcctcgaacccgtcgatcgcgaaaagacatgtccgntacntcatcgagngntcacgataganntggagncaccaaaccanggaagacntntccgncagaggcaaagagcccaaagacgag

SEQ ID NO: 37358 - DNA, 199 bp, Glycine max
  unsure (1)..(199): unsure at all n locations
  Clone ID: 700945810H1
atctcttctcttcgctcctgcacttgttgtttctttgcccttcatggcatctcaggctagccttctccttcaaaagcagctcaaagatctttgcaaaaaccccgtcgacggcttctctgccggtttggtcgatgaaaccaacactttttgaatggagcgncaccagtantgggccgcccgagatactctatgagggggg

SEQ ID NO: 37359 - DNA, 220 bp, Glycine max
  Clone ID: 700945811H1
tgaaaagcggatcagttggattcaagaaggaatatctcgatcaaccggacattcccagcacatggaaagcaatggaggcactctatgactcaggcaaggcaagagccataggagttagcaatttctcttcaaaaaagcttcaagatctcatgaatatagcaagagtgccgcccgcagttaaccaaggggaattgcacccaggacggcagcagccaaagct

SEQ ID NO: 37360 - DNA, 207 bp, Glycine max
  Clone ID: 700945812H1
cattgccaatacaaatcctaccatttctactcctttccaaaagaaccagagccttcatttaccaaaactaaaatcatgatgaaaaagcaatgtctcttgtccttctcactagcactgctagtttcatttttgtatttcaccaccactttagcccaattatcaccagcgttctcccctcaaaaaccagcccaaccgtccccttcagca

SEQ ID NO: 37361 - DNA, 242 bp, Glycine max
  Clone ID: 700945813H1
ccgaaggcgtcttcataaacgcctttcttctccgtttccgtttcctcgttcgaattcgctttttgatctgcgaaaatgagagagtgcatcgcgatccacattggtcaggctggtatccaggtcggaaatgcttgctgggagctctactgcctcgagcacggcatcgggcccgatgggcaaatgccaagtgacaagacagttggcggctggtgatgatgctttcaatactttctcagcgagac

SEQ ID NO: 37362 - DNA, 79 bp, Glycine max
  Clone ID: 700945815H1
cagaagaacaagtagttgagaactaagaaggagaggcaaatggcgtcctcaatgatctcttccccagctgttaccactg

SEQ ID NO: 37363 - DNA, 62 bp, Glycine max
  Clone ID: 700945816H1
ggggcttgcggaaactgagctaaggcttggactgcctggaaacgtactcggcactggcactg

SEQ ID NO: 37364 - DNA, 196 bp, Glycine max
  Clone ID: 700945817H1
agagtacactactgaagctaatgacaggtgacttgatgcctagtgatggcatggtccgacgtcataatcatcttcgaattgcacaatatcaccagcatttggccgaaaagctagacatggaaatgtctgctctccagtttatgattaaagaatacccgtgaaacgaggaagagaagacgagggcggcgagagggaa

SEQ ID NO: 37365 - DNA, 105 bp, Glycine max
  Clone ID: 700945819H1
ggtatgtataccagtttgaggtatgtaacaaattaaggcacattgccatatctgttgttacatacctcaaactggtatacataccataacaacagcaatagatat

SEQ ID NO: 37366 - DNA, 76 bp, Glycine max
  Clone ID: 700945820H1
caccaaatcatcacacacacatactaagccgcaacacttcttcgacaatggatctcctccttctgtaaaagacccg

SEQ ID NO: 37367 - DNA, 231 bp, Glycine max
  Clone ID: 700945821H1
ggacctggaaagtggatgctgggagtagatctcttgatttagagctgacaacattatcaagtgccaatcacattgaaatgagtccgagtgatgcaggctttcaggacagatacattgttcaggaagtaatcaaagaaatggcaaagaacagaccagaggagatgatggggaagaaaggatgtatagtacttgtgctcaatgacggagataaacacgctagataagcccaac

SEQ ID NO: 37368 - DNA, 103 bp, Glycine max
  Clone ID: 700945823H1
gtctgtctcgtttacacatctctccaacctttcactttcgtttcgcagttttattcgaatccctctctcaatctcctttccaaatggccagcgttgaggttgc

SEQ ID NO: 37369 - DNA, 173 bp, Glycine max
  unsure (1)..(173): unsure at all n locations
  Clone ID: 700945824H1
cgttcttcttcttttgttgttctgtgtttgtgtttgttttttctctcacctgaaaatgtcttgctgcggtggtaactgtggttgcggaagctcctgcaagtgcggcaacggctgcggaggctgcaagacttacccagcacttagcaacacggagncaaccaccaccgagacca

SEQ ID NO: 37370 - DNA, 170 bp, Glycine max
  Clone ID: 700945825H1
taaataaggtatgagtatattgcaatgtctgattacttgttaggtgcaggcacaaatagattataggctgtcaaactttataggaatagtgaatcttctgtttttgccgtcttgcttaatgagaaacaaaatagtactagcacacttgaaggccagtccaccagagggga

SEQ ID NO: 37371 - DNA, 238 bp, Glycine max
  unsure (1)..(238): unsure at all n locations
  Clone ID: 700945826H1
gatgaaggttctgagtttgttttttataatctgagagataatagaatagaccgaattcaagattttgattcctacaagttttcatttctctctcatgattatgttccaagcttggttttgccatataaaaattaaggggatcattgctggcctgggactttggggtccaagaggctgacatcaattcntntttcgacatcagcaatgacantatccacancacacaaccggttgtgtg

SEQ ID NO: 37372 - DNA, 252 bp, Glycine max
  Clone ID: 700945793H1
accacctaaggcacctcaagatttatacgagagctattataacgcaaacaaatccaacctgaagttgtatgttagacgtgtgttcatttcagatgaatttaatgaactgttgcctaagtacctaaactttttgctgggtcttgttgattctgacacattgccacttaatgtatcgcgagaaatgcttcagcaacatagtagtctaaagacaatcaagaagaaacttattaggaaagcccttgatatgatccg

SEQ ID NO: 37373 - DNA, 241 bp, Glycine max
  Clone ID: 700945827H1
tctttcgccactcagagacaaagatgaaagagagaagaaagtgaaacgcagtatagccttgccgtttttgaaaagaacgctaaacgacgaagcaaaacgcgttcgtaacagaagaaaagaaaagaaaagagtaactgacaactgtaccagtagaaaaattcatcgacgtttctgttattcagcgacacgccgaagcggcgaattgagcaaaccaaagcgagtagagaaggttctggaagaa

SEQ ID NO: 37374 - DNA, 233 bp, Glycine max
  Clone ID: 700945828H1
accaagttctctgtctggggagttcttagcaccaccaccagcttctgcagtagctttaagctacgaaagattttccttgaccatggggcaaaagcatttagtgacggtgttctgtttatgggctttaacatgttcccttcttccatctttctcctttggaattctgagaattggtttgaagaagagacctctagatcttgatagtattaactccgcctgaaaggcaagagaag

SEQ ID NO: 37375 - DNA, 242 bp, Glycine max
  Clone ID: 700945829H1
atcgagccgaatcggctcgagaccgcacgaatatcttgttgttaggagcgatccgagaaaagctctgtaaacatgttggtgtaccaggacctccttacaggtgatgagcttctctctgactccttccgttacaaggaaattgagaatggaatgctgtgggaagttgaggggaagtgggttgttaaaggagcagttgatgtagacattggtgcaaacccttctgctgagggtggaggagaaga

SEQ ID NO: 37376 - DNA, 245 bp, Glycine max
  unsure (1)..(245): unsure at all n locations
  Clone ID: 700945830H1
attaatgtgtgtttgtcacgagacccatagtgctgccaaattatagtaactctctttctctatctgaagaagaagaagttctgaagaagcatgtgtggaggtgctatcatctcagacttcattggtgtgaagcgtggccgcaacctcgccgcgcaggaactgtggtccgagcttgaccctattctctgacctccttggctcganaccaccaccaccaccaccaaccaaccacccctttcagacaa

SEQ ID NO: 37377 - DNA, 249 bp, Glycine max
  Clone ID: 700945831H1
cataatttgtttttctcttctagcttccactatgtctaaaacacaaatgagaagacatgctcttgagaagtgcaggagtgtgaaagagccacagaaagtattgaaccacaactttttcaccagaaacctcaagaaagtgtaccctattgggcttcagaaaagcacctcatctttgtctctgtcttcaatttcattgtctttgtcacaaaactcaaatgactcttcacaggctgattctttgactccact

SEQ ID NO: 37378 - DNA, 71 bp, Glycine max
  Clone ID: 700945832H1
aagctgttgttcgagtgagcgcagcatatgtattctagagattcatggggtggaccgttggagatacacgc

SEQ ID NO: 37379 - DNA, 173 bp, Glycine max
  Clone ID: 700945833H1
ccctcgagccgaatcggctcgagcggctcgagctctgcaattcactacgtacaattcttcgttcgttctctgcagttatatccacctttgagcatcaatggcggacgctgaaaccttcgctttccaggctgagatcaaccatctttgaaggcgcaatagcaacacaatctata

SEQ ID NO: 37380 - DNA, 191 bp, Glycine max
  Clone ID: 700945834H1
cttgagaatcagattcaagctgttgccaaaagggaatatcaccaaggagattcaagcgatagtgatcccagatttagaatagctgatatcccagctgctgtatttggctcaagagctcatctagaggagaaagctttagctacaaggaagagggaccgcaaagtttttgaagaagggcctccagcatgtgg

SEQ ID NO: 37381 - DNA, 77 bp, Glycine max
  Clone ID: 700945835H1
ctcccattgttctcgccatttccaaatcacccgatctccacaactacgacctgtcttccatcagagtcttgaagtcc

SEQ ID NO: 37382 - DNA, 67 bp, Glycine max
  Clone ID: 700945836H1
gccataacttctattcaagcagtttatgtacccgcagacgatttaaccgatcctgcgcctgctacga

SEQ ID NO: 37383 - DNA, 69 bp, Glycine max
  Clone ID: 700945837H1
agacaacagcactctctcttgtcgctcttggcttttcgctctgcactcactctcattcaggcatttcca

SEQ ID NO: 37384 - DNA, 255 bp, Glycine max
  Clone ID: 700945754H1
gctcgtggcttggatgtttccattccaccattcattgatcgtacaatacttcgtgctagagatccacctcgacctgtttttgatcacattgaatacaagcccccaccagccatgaagactcaacaacctactaaaccaggctcagactcggataatgcagcagcagcagcagcggtgtctattttcagactcacacgtgagcagctcaacacactgaaagccaagtctaaagaagatggcaacacaatcagctac

SEQ ID NO: 37385 - DNA, 224 bp, Glycine max
  Clone ID: 700945755H1
ctttcgttgggcttcagttttcagagagagagaaagagaggaagaggcgatgggagtgctgtccactatgatcgatcgggaacaactgaagcccggtgatcacatttactcttggaggcaagcgtacatctatgcacaccacggaatatatgtcggtgatggaatggcgatccactttaccagaggagcaggtcaagaaattggaacaggactgtgttggacaa

SEQ ID NO: 37386 - DNA, 110 bp, Glycine max
  unsure (1)..(110): unsure at all n locations
  Clone ID: 700945756H1
ngagctgatgtgacgtgtgcagaaagtggcagaactgctcttgaaatgctgcagttgcctcacaattttgatgcttgcttcatggatattcaaatgccagagatggacgg

SEQ ID NO: 37387 - DNA, 163 bp, Glycine max
  Clone ID: 700945757H1
catggagctacatcatagctcaagagttggtagggtcgcttgtttcaattggctacatatgcggaataagtccttcaatgctagggctaacagttctggcttgggggaactcaattggggatttgatgacacatttaacaatggctttaaattggtggccagg

SEQ ID NO: 37388 - DNA, 103 bp, Glycine max
  Clone ID: 700945758H1
cgcataataggaaatcatggcagatgcgccttccgccagacgagttacggctgccaatgtctctggagctgatgagttgtcctggtataattgcttctgggca

SEQ ID NO: 37389 - DNA, 245 bp, Glycine max
  Clone ID: 700945759H1
gttctgatgggaaaaccttctactgtctagagatggcaaaatatttcaaccctggtgaagctgaagccatgaatcagagtgtagcttacctactgtcaaagttgagttacattccatccacactcttcctatcataagtttcttacgtggaattcttagacagagtgcatgtttctgagaaaaagctaagagcacaaggcttgtgggaagttccccatccttggctgaaccttctgatcccaagg

SEQ ID NO: 37390 - DNA, 256 bp, Glycine max
  Clone ID: 700945761H1
gtggttctgtcaggagcaacatggcttgagcctgaccctataagccgatgcttcactgatggaaatctagttactggagctgcatggccagggcaccctgagttcattgctcagttgatagcactacttggtattcaagtatctttctagatgcactttgtgatgtaattaattatcaatgaataaagcttggcagtctccatatgcattttgtatcaaatattatatgtatgttaatgtatcttacagtcctgta

SEQ ID NO: 37391 - DNA, 252 bp, Glycine max
  Clone ID: 700945762H1
ctgaatagaaaaatgtacagaatacaattcttgatttggagaccattactgatctgtgctattttctttcacttttttggcgttgagttcgcatctactatacagcctaggaatttgggggaaaggaggacatggcatgtaacatttttgttttgtaatttgggattattttttcaatatcaaaaaaaaaaaaaaaaaaaagggggggcccccgactattgaccccttcgccccgggatttattccgggccg

SEQ ID NO: 37392 - DNA, 256 bp, Glycine max
  Clone ID: 700945763H1
gaaagtatggagcctaatcagagtttcctgccctttgaggggggaatggagatgtccttggatacgtctgatcatacatcagatcttgagagtgaaaggacaaatggaaaaccaaagaataaacttcctcgtcctcgtaatcctctaattgatgctgttgctgctcatgacaaaagcaagcttaggaaggttactgaacgggttatgcctcaaattgcaccaaaggtagatgaaagagattctttactagaacaga

SEQ ID NO: 37393 - DNA, 256 bp, Glycine max
  Clone ID: 700945764H1
cttgtcgaaaccccttatccgatcatggctactgatgcccgtgaatcgcgtcgcaagtatcgccgatcatcctctccggaggacgtggacagatcctcgaagcgccagaagcaccgccaccacagccaccgccaccgccacgggagtagctgacgcgacggttagattaaattcgattatcgaccaatttgtgcggttccttctccagctccgcacgggcatctccctgacgacgattatgtggatgagggagaga

SEQ ID NO: 37394 - DNA, 253 bp, Glycine max
  Clone ID: 700945765H1
cacaaagcacaaagcaaagctcatccttgagttaaaaaatggcagcagcttcttccatggctctctcatccccatccttggctggcaaggccgtgaagctgggcccatcagccccagaagtgggaagggtgagcatgaggaagaccgtcaccaagcaggtctcctcaggaagcccatggtacggcccagaccgagtcaagtacttaggcccattctctggcgagcccccgtcctacctaaccggtgagttccc

SEQ ID NO: 37395 - DNA, 258 bp, Glycine max
  Clone ID: 700945766H1
cgaggacttaccctttcttttcttttttcttttttctctttcctcattctacttaaaactcccaccagtgatggcaggtttggctccagagggaacacaattcgatggtcgccaatatgatgctaagatgagtgaattgctttccactgatgggcaagaattcttcacctcttatgatgaagtgtatgacagctttgatgcaatgggattgcaagagaatcttctgcgaggcatagatgcttatggttttgagaagcc

SEQ ID NO: 37396 - DNA, 243 bp, Glycine max
  Clone ID: 700945767H1
agacatagcaaacgatccaaactcttttttcatttgcagcatcaaaatgagtggtagcaacgatggtagcggcagctggagctctaggtttttgaaggtggctagtgcagctgccgctacagccgccgttgccggcggtttatatgccattctttcatcctcaacctctgctagctctgagatggaagtgccgtttggcagcgcacggcgtgagagcaaaaaaaatgacgatggtggctccgg

SEQ ID NO: 37397 - DNA, 230 bp, Glycine max
  Clone ID: 700945770H1
gccctcagaacacctttgtcccaggactcattgatctggccatcaaaaggaatagtttgattggaggagatgactttaagagtggtcagaccaaaatgaaatcggtgttggtggatttcctagtaggggccggcatcaagccaacatctatagtgagttacaaccatttgggagacaatgatggcatgcatctctcagcccctcaaaccttccggtcgaaggaaatttcc

SEQ ID NO: 37398 - DNA, 97 bp, Glycine max
  Clone ID: 700945771H1
ccagtgtgaggcgagacgcttgaaattcctatccccatgtcgaaattccatgtgatgtcattagtgttagtggcgttgttatgggattcaggcgcat

SEQ ID NO: 37399 - DNA, 97 bp, Glycine max
  Clone ID: 700945772H1
ggagagacaacctttaacaacaccaccagcaatgcggagcgcgaaagagactctcttcttccgaacctccttcttcttctcctcccgcaacagatga

SEQ ID NO: 37400 - DNA, 155 bp, Glycine max
  Clone ID: 700945773H1
agccaaggtaggttaaacactcttcttcatcgtcgtcgcaatgggacgtgtgatccgtgcgcagcgtaagggagcaggctcggtcttcaagtcccacacgcaccaccgcaagggccctgcccgcttccggagcctggatttcggagagcgcaacg

SEQ ID NO: 37401 - DNA, 98 bp, Glycine max
  Clone ID: 700945774H1
cgagaataaatgcaactaccacaaagacttacgctacaagaaccatatttttcttgaaaagtgatggaaccttgacgccattggccattgagttaagt

SEQ ID NO: 37402 - DNA, 238 bp, Glycine max
  Clone ID: 700945776H1
cctactactcatcattgtctcaaaaaccttctctctcaacaaaacctacaacaacaacaaaaaaagagaaattttttagaacaatggaggcatcaaagatgaagtttttcttggttttggtgattgccatgttggcgatggtagcaactggggtttcagctgctgaggcacctgccccaggtccttcatccgatgcgaccaccttctttgtacccactgctctgtgttctctctttgt

SEQ ID NO: 37403 - DNA, 99 bp, Glycine max
  Clone ID: 700945777H1
gcgacacgtatcaacttcaataatcgcatcgcagaagcagtttccggtgcatctcatcgtctccgaaaatgaacgacgcagatgtctcgaagcaaatcc

SEQ ID NO: 37404 - DNA, 100 bp, Glycine max
  Clone ID: 700945778H1
ctcgagccgattcggctcgaggtcaaaatgtacacagagcttcgaagtaccattcaggaggtggaaaattaccagcgtttgagctctcagtctcaaaatg

SEQ ID NO: 37405 - DNA, 252 bp, Glycine max
  Clone ID: 700945780H1
cgtgaaacaacagctttcatggttccattggtggctggtgatggaaccaaaactcaggcacttgctatttgccactcaaatacttctggaatgaatcatcaaatgcttcatcaacttatgggagttgaacctggaactaaccctgtttgccatttccttggaagcaaggccattttatgggtacccaatttatctgtggacactgcctatcagaccaacattgttgcttaattagtccatgcatcttgagca

SEQ ID NO: 37406 - DNA, 267 bp, Glycine max
  Clone ID: 700945781H1
gctgcactagtgatgcttgaagcaattgattgtggaaaaccactagatgaagcactggcagacctggatgatgttattggttgttttaactactatgccgagcttgcagaaggattggacgcaaagcaaaatgctcctgtatcccttcctatggaaaccttcaagagttatgttctcaaggagcccatcggagttgttgcattaattactccatggaactatcctctattgatggctacatggaaagttgctcctgctctagctgct

SEQ ID NO: 37407 - DNA, 248 bp, Glycine max
  Clone ID: 700945782H1
ttaaattttgatcatcatggactgtgaaaatggcaaaaaaaggcacctattacttggcccaagggcaatgctcctgggtaaccctgacttttttccaaagggtgccggaagggagggtgccctttgcatgcgaccctaggaacgggctcacgagggggttcaagttctgcaacacgcacgtgccgatccacgtgagggtgcaggacctcatagcgaggctcacattgccggaaaaaattaggctcgtc

SEQ ID NO: 37408 - DNA, 257 bp, Glycine max
  Clone ID: 700945785H1
atgatgttgagaagatcagatgagtaactgcattcagtagttcctgtaacatacttcgcggaattcgagaactggttctgggttatgggtcattagatgcgagcgggtaacactgtcgagcgtgtcctcgatattatcaagcttctcctggaccgtcttgaggcacctgacccttgcaccctcgagatattccttggaagagtccctatggtcttcaatgttggtatcctttctcgccatgggtactttgcccaaga

SEQ ID NO: 37409 - DNA, 249 bp, Glycine max
  Clone ID: 700945786H1
agaaactttggagtcggtggtctgcagataaccactttcatgatgctgttctagctgattacaaccctgctgatggccggcatgcattggtttatgatagtaatacagtaaatgagtcttgagaatgggtcgatctcaacgagatctcacctgaggatatagaatgggaaggtgaacatcctggcattctccatagaagtggacatggtggtcaatgtggtggtggtatgagattctttggtcatcgtg

SEQ ID NO: 37410 - DNA, 93 bp, Glycine max
  Clone ID: 700945789H1
cttcagaaaaggacatagaagagttaggcatgttgaaggagcaggtcgagggacttcagaggaaattgttggggaaagatgaacttttaaagt

SEQ ID NO: 37411 - DNA, 249 bp, Glycine max
  Clone ID: 700945790H1
attctatttaattttatttttgttgttgttgttattactattattatgtaggctctaaccaaatgctcttttttatgttgtgatgacagaagttaacgctgatattttctaactcttaatttttttttgtcatgcatgtttgctttgttgttgttgttgttgttgttattattattattattccgaactgaggatgggtttttggagttagctcaccctcgccagatcgcaatcctttgtcccgtccat

SEQ ID NO: 37412 - DNA, 250 bp, Glycine max
  Clone ID: 700945791H1
cttgaaaatcctccttatcgatccaacaagcagcaaactcactgaacaaatccacaaacagaaacaaagatcctactcgtgtagatctaataacatcaccttcttcttctcctacagatcatgaattcctttcaagaatttgactcatcaaacacaaacagtaccaaagccaccaatttcccatcatcatcatcagcagcaccagcagcaacagcaccaccatgttcttcttcttcttcttcgacactct

SEQ ID NO: 37413 - DNA, 224 bp, Glycine max
  Clone ID: 700945792H1
gttgatttgaattgtgccaaattgcttgggttttgaccgaacttaaaggattgcctgacaacagcctaattagggaggaccgcctggtggaagggattttgatccaaaaggaaaaggtgccaatgagatcaggcgatttggccaaggtttcatgagggacatgtatcgctactgggggcctggcaaggaccttcggtctgaggaattggcagttggtactcggg

SEQ ID NO: 37414 - DNA, 258 bp, Glycine max
  Clone ID: 700945753H1
ggcctcacaagctctctctccctctcagccaatctgttctctctctcaaccactctcacgcacacgacgctagcgctctctctccctcccagtacactagctctctccgtagctctttccctctcagccactctcacgcaccacacgtagcgctttgtcacaacattagatgtcaattattcaagctcctcgacctttacacttgatggtgaatgtaaattaaggaatgaagaacattggtttttaatttcgttgagt

SEQ ID NO: 37415 - DNA, 112 bp, Glycine max
  Clone ID: 700945719H1
cctctgttccaagcttacagacacttgattgttaatcatcctgactttgcaaaaccctcgggaaagagccagtttcacttgggaggccgcaagcaccgaacgtaaaaacgaa

SEQ ID NO: 37416 - DNA, 264 bp, Glycine max
  Clone ID: 700945720H1
ggcagttccagtgattgatttttcaaagctgaatggtgaagaaagaaccaaaactatggcacagattgctaatgggtgtgaagagtggggattttttcagttgatcaaccatggtattccagaggaactccttgagagggtgaagaaggttgcctctgagttctataagctggaaagagaggagaatttcaagaactccacatcagtgaagctactaagcgattcagtcgaaaagaagagcagcgaaatggagcatgtggattg

SEQ ID NO: 37417 - DNA, 206 bp, Glycine max
  Clone ID: 700945721H1
ccgttttctatactccaatcaatgacctcctcaagggctgttccaccctcctcctcatcctcctcttccgtcctttcatctttttgattcccctgttgaagtaccagcagaagcatcctcataattacatcttgcttgcactcttcaccgtgtctatcagctccaccgtcggagtcacttgcgccaacaccgatgggaaaattgcg

SEQ ID NO: 37418 - DNA, 246 bp, Glycine max
  Clone ID: 700945723H1
cagtgactgacttttcgagaaagatacacacaaatgggtttccggcaatccaccatgaacgctctttccaatctccgcttcctcctcttcggttctgcattagattctgcggagaaaactggggatgttacgggtcctgcaaattgggttgaagtataacccggtttcatgggaagttccggaccccaaaggtgacggcttcaaagtacactatagggtgagtaatttcccaagtttgtcttggga

SEQ ID NO: 37419 - DNA, 254 bp, Glycine max
  Clone ID: 700945724H1
gggtctactctgctagatgcacttgaccagatctctgagcccaagaggccttctgacaagcccctcaggctaccccttcaggatgtgtacaagattggaggaattggaactgtgcctgtgggacgggttgagactggtgtcttgaagcctggaatggtggtgacttttgcaccaactggactgacaaccgaagttaagtctgtggaaatgcaccatgaagctctcacagaggctcttcccggtgataatgttgg

SEQ ID NO: 37420 - DNA, 261 bp, Glycine max
  Clone ID: 700945725H1
ggcacgaagacaatagcggtcggcgacaaggcagggaaagacaacaagtacatggagcaatggctggccctcaactgggagaagcagcacatcgtcttgtcaagaactcccttaatattaaatcaaataacatgccgtatggatcaccggagcagtttccaggccatcatgcaatgaaccggctcagatcagctggaccttctggatctgggaaatattatggtgaggacacaagcggttattacggacaacattacaatc

SEQ ID NO: 37421 - DNA, 206 bp, Glycine max
  Clone ID: 700945726H1
tattaagcaaaaacaatatggaagtaaagaaagtctgttttgttgctctagcctttgctttggttctgagagttgctgagagctttgagttcaatgaaaaggacctggaatccgaggaagggttgtgggatttgtacgagagatggaggagccaccaaacggtttctcgaagcctccatgagaagcaaaaccgcttcaacgtgttc

SEQ ID NO: 37422 - DNA, 260 bp, Glycine max
  Clone ID: 700945727H1
gtgtatctttatttggcggagtaggtgaacgtactcgtgagggaaatgatctttatatggaaatgaaagaatctggagtaattaatgaacaaaatattgcagaatcaaaagtagctctagtatatggtcaaatgaatgaaccgcccggagctcgtatgagagttggtttaactgccctgactatggcggaatattttcgagatgtcaatgaacaagatgtacttctatttatcgacaatatctttcgcttcgtccaagca

SEQ ID NO: 37423 - DNA, 259 bp, Glycine max
  Clone ID: 700945728H1
gcattgagtacagtgcaaagtatgaggctgctggggagcttgatcatgtgaaggagattatcaagtggggtactgattattttctcaagagttttaatagcactgctgataccatcaccacccttgctgctcaggttgggcttggagatacttctgggtgacagtccgaatgatcactattgctggatgcgtccggaggacatggactatgaccgtcctgtgactgaatgccacagttgttccgatctcgcggctgaga

SEQ ID NO: 37424 - DNA, 256 bp, Glycine max
  Clone ID: 700945729H1
gtcagatcaacattgtggtggttggtcatgtggaccctgaggaggtaaccaccattaacgagctgaagaagcctgttgtggagaaagaagctccagggcatgccatatgagggcatgcacgtacggcctcggaggggaaccagaaaattatgtgaacaaaataatctggaaccctaatgtatcagtgtcatcatcagtgtgtagtttaagctagctttgctatggttacggtctttgagatgagagtcttgatgaa

SEQ ID NO: 37425 - DNA, 255 bp, Glycine max
  Clone ID: 700945730H1
ggttgctaagttacaagcggctgagtcagccacaagctgtcaagaggtctcaaggagggaaaagaagacccaaatgaagtttcaatcatgggagaagcagaaatccttgtttcaggaagagctaatgaatgaaaaacacaaattagctcagttgcagcaagaataagagccagtaaaggtgcacagcagcaagtcgaggctaggtggcagcaagcagcaaaggccaaagaaggactcctcctgcaggccatttct

SEQ ID NO: 37426 - DNA, 261 bp, Glycine max
  Clone ID: 700945731H1
aatcaatcatcttttgtttgttcttcagtactttagtgtgtgatttaattccaagattttgagaatgtctagctgtgggtgtggaagtagctgcaactgtggcagcaactgcggttgcaacaagtactcttttgacttgagctatgttgagaagacaaccacagagactcttgttttgggtgttgggtctgtgaaggcccaattggagggtgctgaaatgggtgttgcagctgagaacggtggctgcaactgtggatcaag

SEQ ID NO: 37427 - DNA, 262 bp, Glycine max
  Clone ID: 700945732H1
atctatcaatcgatatctccgagttcagccgaaccaaactccgaagctatggcagagctccaaaccaaggttgaacctgttacggtcccggctccggtggatcccgagccaccgctagctgaggctccgccgctcgagaagaaagcggtggcggtgccaccacctgttccggctgcggcagaggaaaccaaagctcttgttattgtggagaaggagaaggagaatgagaagataccagaacctgtaaaaaagaacgcctcag

SEQ ID NO: 37428 - DNA, 262 bp, Glycine max
  Clone ID: 700945735H1
ggcaattatctagtgaactggaggctactcgaatcgaagctttgcactggatatcaacccttttaaacaaatatcgtaccgaggttttggaatttctgaatgacatatttgacaccctgctcaaggcactttcagatccatctgatgaggttgttcttctagttcttgatgttcatgcatgcattgcaaaagatcctcagcactttcggcaacttgttgtcttcctagtgcacaatttccgggtagacaattcccttttgga

SEQ ID NO: 37429 - DNA, 108 bp, Glycine max
  Clone ID: 700945736H1
tgcaagcagagattttttcttacgcaggcagtggacacagacaccatgtcacttattaaccagctctttaacagaggcgttttcggcagtcgatgcaaaacatgcctg

SEQ ID NO: 37430 - DNA, 217 bp, Glycine max
  Clone ID: 700945737H1
ccaagttacaaggaacatcttaacttctctctcaatcctcatcactcccctccctctcacccctcacaactattttcaccaaaagactgagaatccctcacttctttagtcatgccacagcactgcatagcaccaaaaccaggattctgcaatagtcataactctgtggaaggtcccccagagatgactgatccacataactcgactgtcctttcct

SEQ ID NO: 37431 - DNA, 250 bp, Glycine max
  Clone ID: 700945739H1
ctgaagctttggctgccttatctaatgcatttggttcatcttctgagaaagcatccggtttggcacaagatagattgaatgggttaggccaagggggaccaaggcaaagggcagaagctttagccgctttaaactctgcatttaattcatcatcctgggccgaagatttttactcctaggccatctggaagaggtcaaggatcacaaagagctgcagcagtagctgctctttcacaagttcttatggctg

SEQ ID NO: 37432 - DNA, 221 bp, Glycine max
  Clone ID: 700945740H1
gtcggggattccccctttttacggagactctgctgctgggatctttgaggctgtggttagggctaacatcatgttcccttctagaatcttccggactgtgtcccccgccgccaaggatctcttgagaaaaatgatctctagggactcttctagaaggttctccgcagaacaagccttgagacacccttggatcatgagtgcgggtgacacggctgaactag

SEQ ID NO: 37433 - DNA, 259 bp, Glycine max
  Clone ID: 700945741H1
cccttcccgatctttcttcccttttggaaatccttttcggatgatatcacctaaaggctctcgcatgtctccacaacttcttgcagtgttgcaagcttttgaggcaacattggcagagaggctgaaaaatcttatgcctaaaagcaaggatgaaatcctcaccttgtcttggatgactttagctatgaagtcactttgtgaaagtcacaatgacatacggacccttatgactgcccttgagcttcctgtgagtgattgg

SEQ ID NO: 37434 - DNA, 258 bp, Glycine max
  Clone ID: 700945742H1
attgactatgggtgtctctgggaagtggattaaagcattggttggtctaaagaaatcagaaaagccagggtcttctgagaaggatggaaatgttggcaagtttcaccatcagagaaggcatggtgttgaatttgataatggtaaatttccgaacgaattggataatgctgctactccacctgttgaatatgataatggccatgcaaaccttgatgcccactattcatcttcttcttcacaacaagcacatgatgctgc

SEQ ID NO: 37435 - DNA, 229 bp, Glycine max
  Clone ID: 700945743H1
gtaaaactcaaaatctagtttcatactttttttcttcttcttgaaatggctctccaggctgcttctcttgttcctgcttctttctcggttcttaaagagggaaagagtggtgtgtctctcaaggactccaccttgttcggtctttcattttcagaacctatcaaagctaacttcagctcttctgcattgaggtgcaatagggaattcgaacaaaagctctgtgttgtgg

SEQ ID NO: 37436 - DNA, 216 bp, Glycine max
  Clone ID: 700945744H1
cccttacaaggtaaactccaccaccggctacatctgttacgaccgcttggaagaaaaagccctagacttcaggccaaaaatcataatctgcggtggcagcgcgtaccctcgcgattgggactacaaacgtttcagggaagtcgctgataagtgcggacattgcttctctgcgacatggcgcacactagcggccttgtggccgcgcagggaagtgaa

SEQ ID NO: 37437 - DNA, 106 bp, Glycine max
  Clone ID: 700945747H1
caggttctggttccgggcagccacaattcatttccagcactggcaaccgaagcttttccaatgcgccactcattgagaactccgatactaatcaaattgttgtgcc

SEQ ID NO: 37438 - DNA, 257 bp, Glycine max
  Clone ID: 700945748H1
tcacctcatcatctatctttctttctttctttcatatcctcttccttgtagtgtacccattttgaatgtgttctctctctctctctttttctttgggtccctggtgaatatctagaaccactctctatctagtttctctcttcttgctagctagctatctatcatcgatcactctcttggtttaaccacctgaatgccggaaaacatgagcatatcagtgaatggacaatctcaagtcactcctggcttcaggtttc

SEQ ID NO: 37439 - DNA, 263 bp, Glycine max
  Clone ID: 700945749H1
gacgtggtcctttgtctttggtttctcaactcaaggaacaaagattttcttattgtttgaccccaattgatgacacaaaagaaagtgttttgttgttggggtctttgggtaaagtgaaagatgcaaaagaagtggtgacaacacctcttctcaaaaaccctttgcaaccttctttttactatctttctcttgaagctatctctgttggggacactcgattgtccattgagaagtccacttttgaagtgggggatgatgggaat

SEQ ID NO: 37440 - DNA, 268 bp, Glycine max
  Clone ID: 700945718H1
cgcaattgctgtggaaggaccacagatgtgggctgctggatggcaaacagctatgtctcaaattggaccccaattcatatggtgggtagctgctcaaagtgtattctatcatctatacaatcaagtgtcgtacatgtctctggatcagatctctcccttgacgtttagcattggaaacaccatgaaacgtatatctgtcattgtgtcttccattattatcttccacacaccagttcaacccatcaatgctcttggtgctgccattgct

SEQ ID NO: 37441 - DNA, 262 bp, Glycine max
  Clone ID: 700945750H1
gaaatggaaatatatcctgtgctggatgaactagcctcatctatcagtactctaaatctggaacgtgttcgaagatttaaaggtcacttgcttgctttgactcaacgagttcagaaggttcgtgatgaaatagaacatctcatggatgatgatggtgacatggctgagatgtgcctaactgagaaaaagagaagatcggatacttgcacttttaatgattgttttcaaactcgtgcatcaggtagactaatttcaaagtcgg

SEQ ID NO: 37442 - DNA, 107 bp, Glycine max
  Clone ID: 700945752H1
gatgagaagactgtatattccattggtccaagattgaaagcattctctgattggctactgaaaactatggtgtcgggcaaacttgatgccatcttgccagctgctac

SEQ ID NO: 37443 - DNA, 257 bp, Glycine max
  Clone ID: 700945685H1
gtgtaaatcaaatagaaatttataaaatctatgatcctagagtagttccctagacaaaatagaagtaagttcacaaacaagattcaagaataagattctctgatgaaaggagagaaatatgtctgaggatccgctgggtataaggagtgaaagaggggatcatttgtttcttgaacagttcttttaaaaaaattttctatcggatttttgagcataggagattttatgatttatgacttggaggatttttcagaata

SEQ ID NO: 37444 - DNA, 258 bp, Glycine max
  Clone ID: 700945686H1
aaggtttaattattcgttttggacctaccaacaaacaaacagtgaagcctttgtttttattaccttacttacacctctctatggtctagaccaaataaaaataaatgtctggaaggtaaaattaaatgaagaagcaagcagccagattatgatcaaatggtggcatgtgatcatttgttatacaaccggttctttgaatgattatttgtaggatggatgagatgtacttgcttctttctttgcctgggtggttcttgc

SEQ ID NO: 37445 - DNA, 258 bp, Glycine max
  Clone ID: 700945687H1
taaggatttgatctccacaacacacattatttgagagcaaggaggagtcttaagtgtcataaagtcacagtagaattatctacctacaaggaatgatttaatatatttatttcttttgttgattttcgtttggtttagagttttacagaatttttttaatggaattaattttgaattgttggatgtaattgcaagatatgtttaaattacttaagtcatatatttacattagtgccgggattaatttttcaaataaat

SEQ ID NO: 37446 - DNA, 257 bp, Glycine max
  Clone ID: 700945688H1
attctcttcactttaaagttacatagtttttcattgttttacttaatctacaatggctgcttcaacaatgactctctcttcatcatcattggctggccaagctatcaagcttgccccctccacccctgagcttggtgttggaagggttagcatgaggaaaacagcctccaagactgtttcctcaggaagcccatggtacggcccagaccgtgcaagtacttgggcccattctctggtgagcccccatcctatctcac

SEQ ID NO: 37447 - DNA, 255 bp, Glycine max
  Clone ID: 700945689H1
gcctcagcttgtggtttaatgggatacttgcaatttgatgagcttgtcgaaagaggcattattcccttccaagatgaaagtttcactactgatgggtcattggatacaaatctagactggatatctggaatgaaaaatatgcgaatcagagattgtccaagtttcgtgagaactaccactctagatgaaaccagttttatttgctttggtaagaagcaaaaacctgcatgaaatcatcttcaatcataattaaca

SEQ ID NO: 37448 - DNA, 256 bp, Glycine max
  Clone ID: 700945691H1
ttgggaaacaatgatggcatgaatctctcagcccctcaaaccttccgctcgaaggaaatttccaagagcaatgttgttgacgatatggtcaacagcaacgccatcctctatgagcctggtgaacatccggaccatgtggttgtcattaagtatgtaccttacgttggggacagcaagagggccatggatgagtactcttctgagatattcatggcggaaagcccacaattgtgttgcacaacacttgtgaggcttc

SEQ ID NO: 37449 - DNA, 257 bp, Glycine max
  Clone ID: 700945692H1
tcacgcacttacaataaatattccttgaatatagaatgatccgtcaaacaattcatgcaaattatttaatttttaactgatctgttgactgttgattcaatgcagcaaacacttcttaatttgttacttcgtaactaccttcactacaacctatatgatcaggctgagaagttgaggtcgaaggctcctcgatttgaagcacattcaaaccgcagttttgtcgttatctcttctacctagggaaaattcggacaatt

SEQ ID NO: 37450 - DNA, 257 bp, Glycine max
  Clone ID: 700945693H1
ccgggttgagtgccacgtttgagagcaaccaggtcaccattttcgccactctcacacttccaaacgggacctcctccttggtccacgtctggcaagatggtcctctctctggcactacccctcaagagcatagccacgagacttcccaccaaaactccaaagaaatcttggaccttctctctggttcctccactcaggcaaccggaaattcacccagaaaagaagaaacacccatggagtgctaaatgcggtgagct

SEQ ID NO: 37451 - DNA, 261 bp, Glycine max
  Clone ID: 700945694H1
ctcgagccgttttcatttcccgttgtacataaactcttattcctattcatacagttcttgcacttgttgaatattgcttcatcatatgtgacaatgatgataatccactgctcttaagtttcatccaatcacaggaaaaaaaaaaaaagtaattcgtataattgctgctgctatgggattttaggaatgtattttaggcctatcggttacagtatgtgaaaaaatggatttgattcatgtaaaaaatactcagcattagtt

SEQ ID NO: 37452 - DNA, 126 bp, Glycine max
  Clone ID: 700945695H1
cttcgtcgatgttcaacacagttgcaaccaaaaagatagccattctggggtttgcattcaagaaggacactggggacacaagggagacaccagcaattgatgtgtgcaaaggactactcggtgaca

SEQ ID NO: 37453 - DNA, 264 bp, Glycine max
  Clone ID: 700945696H1
actcataacacaaagcacaaagcaaagctcatccttgagttaaaaaatggcagcagcttcttccatggctctctcatccccatccttggctggcaaggccgtgaagctgggcccatcagccccagaagtgggaagggtgagcatgaggaagaccgtcaccaagcaggtctcctcaggaagcccatggtacggcccagaccgagtcaagtacttgggccattctctggcgagcccccgtcctacctaaccggtgagttccaggcg

SEQ ID NO: 37454 - DNA, 270 bp, Glycine max
  Clone ID: 700945701H1
ggatgaactaggaaagcttgaagcaattgattgtggaaaaccactagatgaagcactggcagacctggatgatgttattggttgttttaactactatgccgagcttgcagaaggattggacgcaaagcaaaatgctcctgtatcccttcctatggaaaccttcaagagttatgttctcaaggagcccatcggagttgttgcattaattactccatggaactatcctctatttgatggctacatggaaagttgctcctgctctagctgctg

SEQ ID NO: 37455 - DNA, 268 bp, Glycine max
  Clone ID: 700945703H1
ctgaaatcccccctgtcaccataccctcaccaccaccaccaccacaaccacaaccacaactattccaccaagacaccttttttaacaacactaacggtagcagcagtaccacaaccaactgtggaagactcagtagaaaaagggtcttctgtgatggctctgatttgattaccgagaccaagtcccaaaggcttgtacttcactgacttattatcacaagtcagagattcacacagtaatttctactttatatatatccaagttctta

SEQ ID NO: 37456 - DNA, 262 bp, Glycine max
  Clone ID: 700945704H1
gtgcgtgtgtgtgagaatggaagagagtggtgatgcgaaggatcttcagaaaccgttcctccacacagggagttggtacaacatgggttccaggcagtccagcatcatgggatcctccactcaggttatccgcgacggcgtcgtttccgtcctcttctgcgtcctcatcgtcgccttgggtcccattcaattcggcttcacgtgtgggtattcttctccaacccaaggggctatagttcgcgatctaaacctctctatttcg

SEQ ID NO: 37457 - DNA, 261 bp, Glycine max
  Clone ID: 700945705H1
gtttctcctccttcaaaaccccctcctcgtgactgtctacgatgcccaaattgtctcataccatgctcagaggtacattggcgggtagggtttcgacgtgcttcttcttcaagcttggtctttctctgcttctaccttttcagatctccgctgagggttcatcgtatatagagttcgtactcacattggatcactctaacttttacgacactgtcagctagcacgagttcatcgtcgtcgagttctacgctccatggtgtg

SEQ ID NO: 37458 - DNA, 192 bp, Glycine max
  Clone ID: 700945707H1
ctgaaatctccattctccaaaactgcttcaactcttctcattttctttctctctctctctgcctcgcactggagtaccctctccaatttccttcaaatcccatcaaataagtttctcttataccctctgaatattcttcatcatcatcatcattaatcatggctcttttgatgtattttgtgcgttttcttg

SEQ ID NO: 37459 - DNA, 244 bp, Glycine max
  Clone ID: 700945708H1
gttcataaatgctcgagttcgagtgtggaaaccaatggttgaggaaatacacacgcttgaaacaaaagcaacaggctccaaggacaattgtggtataaacgagggaacttcttctgccactggaggtgataccagccaccctagagctttgggcaatattggtctgaattcaatacctgaaacccaatttcagggtatagatatggggtcatccatagctgcaaatgctgaggaaagtgggtta

SEQ ID NO: 37460 - DNA, 264 bp, Glycine max
  Clone ID: 700945709H1
attcgcggttgttgaattctgagcagccaccgtgaaccggtctcacctcgttgactcattctccgtccacttgcgaaagagaagagatctgaaaccctaacctaaccctaacagaggtaatggattcagtgcctcgaagaagcagaggaggaggcgttttcgaaagcctctacaaggtcctcatgcgccgcaactccgtctacgtcaccttcatcatcgccggcgccttcctcggagagcgggctgtggattacggagttcaca

SEQ ID NO: 37461 - DNA, 240 bp, Glycine max
  Clone ID: 700945710H1
agatgctaacttcctaaaggttgtttccagtgccataattgacaagtacattggagaaagtgccaggttaatcagagagatgtttggttatgcacgtgatcaccagccgtgcatcatttttatggatgagatcgatgccattggaggttcgccgtttcagtgagggaacaagtgcagatcgtgagattcagagaacgctaatggagctgcgtaatcagctcgatggatttgatcaacttg

SEQ ID NO: 37462 - DNA, 258 bp, Glycine max
  Clone ID: 700945711H1
ttcggttcagcaacaacgtgatcggactcctgaacttcctgaccttcctcctctccatcccgatcctggtggccggagtgtggctgagcaagcagggcgccaccgagtgcgagcggtggctggagaagccggtgatcgcactcggcgtcttcctcatgctcgtctcactcgccggcctcgtcggcgcgtgctgtcgcgtgtcgtggctcctctggctctacctcctcgtcatgcttcgtctcatcgttcttctcttcg

SEQ ID NO: 37463 - DNA, 261 bp, Glycine max
  Clone ID: 700945712H1
aagtagaaggcaggagggagcaatttctgagcacagtgctattcatggagggatccatcttgatgcgtcaaaatgctccctctccatccattttccagatctagcattcttctttggatcaaaatcagacaccatttttctctcttcactcttcactctcacctctgtccctattctgcttgttagctctctcttcccatttctttcacctaatgtgacttgctccatctttatgcaaacgttaaagttaaacttgttctc

SEQ ID NO: 37464 - DNA, 259 bp, Glycine max
  Clone ID: 700945713H1
aaaatgcccactttttttcttccaacgctcctcctccttctcatagccttcgccacctctgtctccggccgccgtgacctcgtcggagactttctccggctgccctccgaaactgataacgacgacaacttcaagggcacccggtgggccgtcctcctcgccggttccaatggttactggaattacagacatcaggctgatgtttgtcacgcctatcaaatattgaggaaaggtggtctgaaagaagaaaatattattg

SEQ ID NO: 37465 - DNA, 261 bp, Glycine max
  Clone ID: 700945714H1
ggagagaaaccagctttgagacagttatggctcacggtgcttacagcaagcggcgcgtgaacgcaacgcgtagatccaactccaagcctctcggcatcgccaagaagtccaaaccctccgtttccctcaaaaaccagattcgatcccttgagcgcatgctccgcaagaacctgcctcccgaggtgcgcgaggcgcaggagcaaaagttggaggcactgaagaagcagcaggagattcacacgcgcctcgccgccgaacgca

SEQ ID NO: 37466 - DNA, 103 bp, Glycine max
  Clone ID: 700945715H1
cgaagaaccaaatttcagaagagaaaagagtcacttgaaggttcaatgggcgaggccgagatcaaattagaagacagcaaagaggagcacaactgaagcagag

SEQ ID NO: 37467 - DNA, 114 bp, Glycine max
  Clone ID: 700945717H1
catgaccgtgaccatggcggctgcgtttacaagtagcagtgcaacactgagactgtcaaatgttggagagatcagatgtttgcagctgcgtaagtgtaaccctaatcctaataa

SEQ ID NO: 37468 - DNA, 258 bp, Glycine max
  Clone ID: 700945684H1
gaaaaacttagctactaaggaaggatcaaagagaatggctcaagcaatggcatcaatggctggcttgcgtggttcctctcaggctgtgttggaaggtagccttcaggtgagtggctccacacgcttgaatgtggggagtggaagcagggtggcctcagtcacacgtgcagggttcacagttagagcacaacaacaacaagtgagtggtgaggtacaaagcagccgtcaggcagtgctttcacttgttgctgctggttt

SEQ ID NO: 37469 - DNA, 261 bp, Glycine max
  Clone ID: 700945656H1
ctctcttcttcccccaacaaactaaaccaaaccataccattaagaaacaacacatctatctcagtccccaaaccaagaaaccctaaattaaattcatgtgctcctccaggtctaccagtgctgcaccaacaagaccttgttacttggaacaaggccacggcttggcttccttaaaacacatggatgcgtgtcataatcgtgccaacaactttgtctcaggtccatgaccatgggttacggcacttcctaccacagaactag

SEQ ID NO: 37470 - DNA, 262 bp, Glycine max
  Clone ID: 700945657H1
cagcaagagaacttgacaaggaggtcaggcagattattaaggagaaagaagaagccgttcgcaaccaagattttgaaaaggctggagagctacgagatagagagatggatcttaaggcacagatctcaactcttgtagagaaaggcaaggagatgagcaaggcagagagtgaggcaggggatgcaagtcctgttgtgactgaagctgacatacagcaattgtctcatcttggactggtattcctgttgagaaagtctcaaca

SEQ ID NO: 37471 - DNA, 260 bp, Glycine max
  Clone ID: 700945659H1
cgatacctagtataacatctttaataaacaaaagtatcgaagaacttgaatcggagatggatcatcttgggagacctattgctcttgatgctggggctcaattatacaccatcctagaactttgccgagcatttgaacggatattcaaggaacatttagatggagggcgtccaggaggagataggatatataatgtctttgacaatcagcttcctctgctttacggaagcttccacttgaccggcatctttctctccaga

SEQ ID NO: 37472 - DNA, 265 bp, Glycine max
  unsure (1)..(265): unsure at all n locations
  Clone ID: 700945660H1
ggctcgagccgattcggctcgagcttcgaatctgattttcatcccataacaccaacgccaaagccaattccatttagatcagagtcgcttcgattcctgatgcaacatactgtgganagccctaaaatggaggggactgtcttcactcctgcactgcaagaaattgagcatgtaaagtctgatcaaggagaaattctgagcaagcttttcttggatgcggcaaacacatattgcctgtaatagataagtttggagctgctatggc

SEQ ID NO: 37473 - DNA, 272 bp, Glycine max
  Clone ID: 700945661H1
cggctcgcggtaacgccattaattagacaacctgtgaatggaatttgtatcattaacatcaacttaatgagtggggacactgataatattggtggttatgggcctgtatctgaattggattatcatcaagacgattttgaagcgactgaaattggtctctttgattgtgaagaggacgacaatttggctgaagttgacaccacaatcaaaggtagacgagaagacgtggcatctttttgagactcagaatagcagataaggaaggtcgaatt

SEQ ID NO: 37474 - DNA, 264 bp, Glycine max
  Clone ID: 700945662H1
gcgttgaggggtactcaactcctgggggttattctgcaagggcagtccatcccatagcacttgggaaggtgatgagcattgcaaagatgatgaagtcagagtttgatagtgagaactatacactttctgccattggtggtgttgagacaggcggtgatgctgctgagtttatccttctcggggcaaacactgttcaggtgtgcactggggttatgatgatggctatggacttgtgaagaaactatgtcttgagcttcaagactt

SEQ ID NO: 37475 - DNA, 262 bp, Glycine max
  Clone ID: 700945663H1
cgctgtggaaatacattgaattgtaatcatcctgtggtcatggagctaattcttgacagcctaagacactgggtcaccgaataccatgtggatggatttcgatttgatcttgcaagtgtcctgtgtcgaggaattgatggctcccccctcaatgcacccccacttattagggctattgctaaagatgcagtattatcaagatgtaaaattattgcagagcttgggattgtggaggtctctatcttgttgggagtttcctaat

SEQ ID NO: 37476 - DNA, 270 bp, Glycine max
  Clone ID: 700945664H1
gccgcacaaacatattcacaagaagatgaggaaaacactcttcgtcgcaccaacgtcagtgcttgtgtcacgtttaagtgttttccatttgcgtccagccccacccatcttcgaatttaacacgatttttgggtcccgtgtgaagatgaagcgtgaccttaatgctattacccttttcaagcacatgcatgttaaggggattgttggaattgttgaaccaggcttggtattttcaagatcttggtcagctgttcctgccacctgggtcat

SEQ ID NO: 37477 - DNA, 255 bp, Glycine max
  Clone ID: 700945666H1
gcgcgacgagtgcaagggcgttttcagccgcgggaggtttgtcgccgtcggcggttacccgacggagacgcagagaaggtttgtgggagtgagtttctttgcaatgagaatttgttggaggcaaatgggaatttggggcactatgtgttggaaaggatggatgcgaatagtgtgcagtattgtaacaatcactcgtcttcatcaggggctgctcatcaacataattagtaattagttattgctactctcagaatc

SEQ ID NO: 37478 - DNA, 258 bp, Glycine max
  Clone ID: 700945667H1
ctcattattactatatacacaccttctttcttctcttctccttcttcagttctcttcctctttttccttctttctttcaacatgggtggcatcagcctcgaagagatcaaaaacgagaaccccgatctggaacggattccaatagaggaagtgtttgagcagctgaaatgttcaagagcaggtctaacatcagaggaagggggcaatcggctcaagtctttggaccaaacaaattggaagagaaaaaagagagcaagt

SEQ ID NO: 37479 - DNA, 255 bp, Glycine max
  unsure (1)..(255): unsure at all n locations
  Clone ID: 700945668H1
ggtttggggttcgtgattttgattggaaggagtttacttcccgcatgaaacagaagccttacgaagaaatcaaagactatggaacccttttcttgtctcatattgctgaagatataactgattccgccacattcgcagattcangntccaaaagaaggactccgaatccaagatgtacttgttaggattgcagtcctgctcttgataagggacaggtgaagtatgcgtcacacattcctcaaactccattgtttt

SEQ ID NO: 37480 - DNA, 249 bp, Glycine max
  Clone ID: 700945669H1
gtcagatcttctcaaccaggttcttcgttgggcacttggttccattgagattgtcttttttcaccattgccctctatggtatggcttcaaggaaaagaagctaaagtggcttgagagatttgcctatgcaaacacaactgtctatccattcacctccatgcctctagttgcctactgtattcttccagcagtttgtttactcactgacgaattatcatgccaccgattagcacctgtgctgggttgtac

SEQ ID NO: 37481 - DNA, 256 bp, Glycine max
  Clone ID: 700945670H1
aaaaagccgttttgatcggaataaactacccgggcacgaaggcggagctgaaaggatgcataaacgacgtgaggaggatgcaacgctgcctcatcgatcgatacggtttctccgaagacgacatcaccgttttgatcgacacggacgagtcctacacggagcccacggggaagaacatccggtcagcgttgaccaggctggtccgatcggcgagctaggggacattctgttcgtccattacagcggacacggcacg

SEQ ID NO: 37482 - DNA, 256 bp, Glycine max
  Clone ID: 700945671H1
gcgtttcaagattcttggtaacacacaacggaacttgtgattaaacggtgcgttttagtaagaggaaggtcctcttcaatcctgtctttttcatcgtggatctgcgctagggctccgtaatcagacacctttttcctcttacttcatttaacctcacaacaatcaagtcttgcgttgaatctccgctgcttttttatgttttacttttcgattgatcattttttcatttgcgaaatgcggcttaagattttcattt

SEQ ID NO: 37483 - DNA, 259 bp, Glycine max
  Clone ID: 700945672H1
caccttttcggatacctaaggcgaagtatagctaaaaaatgggagggacacaagtggagagagaagagaaggtgtctttggaactcagcgaagaaattcttcagagtatggaagtgggaatgtccttcaaagactataacggtagaattagttcgttggattttcacagggcatccagttatctagtgaccgctagtgatgatgaatccattcgctgtatgatgttactggtggaacatgtttgaagacaattaatagc

SEQ ID NO: 37484 - DNA, 257 bp, Glycine max
  Clone ID: 700945673H1
ctaaaatcaaccatgggttcagcagctgagactcagattactccaacccatgtatctgatgaagaggcaaacctttttgccatgcaactagccagtgcctctgtactccctatggttctcaaatcagctcttgagcttgatctgttggaaatcatagccaaggctggccctggtgttcatctttcccccactgacatttcttctcagcttccacacagaaccctgatgcacccgttatgttggaccgcattttgcgg

SEQ ID NO: 37485 - DNA, 258 bp, Glycine max
  Clone ID: 700945675H1
ccgtactctccctgatggcaaggttgagaggctctatggtctcgcccccgttgctaagtacctggtcaagaccgaagatggtgtctccattgctgctcttaacctcatgaaccaggacaaagtcctcatggaaagctggtactatttgaaagatgctgtccttgaagggggtattccatttaacaaagcatatggaatgacagcctttgaatacatggaacagatccaaggtttaacaaggttttcaacaaggggatg

SEQ ID NO: 37486 - DNA, 259 bp, Glycine max
  Clone ID: 700945676H1
cgataaggagagcttgctccaggagaatgcttcgctttccaacaccgtcaaaaagctcaatcgagatgtctccaagttggaggttttcagaaagacgcttatgcaatcacttcaggaggaggatgataactctggagcagctccagacattgttgctaaaatacagagtcaagcaagtttgacttccacgtcgcagattggagataatgatgttcattgccaccgtctgtatcttcttcaacaggaaattcttttgcca

SEQ ID NO: 37487 - DNA, 261 bp, Glycine max
  Clone ID: 700945677H1
gctcaagaaaagatgagtgctctggttgaagctctattcgagggaactgagaaaggttttgctaaagaagctgataagaagaagaactactttgctgctgctgttgccgaagagggatcccagctgttattgcttcatgctattgaagaattttcttgcaagtctacttccaatgctttgaaggaggttgccctggttctaaaggcactctatgatgctgatgtgttggaggaagagcacatagtgcagtggtatcaaaag

SEQ ID NO: 37488 - DNA, 152 bp, Glycine max
  Clone ID: 700945678H1
gttggctacaccggagggttatcgaaatgatcttgcttacttgaagagcaaggttgatgctggagcagatctgattgtcacccaattattttatgatacggatatattcctcaaatttgtgaacgcctgtcgccaaattgagaatcaacgtg

SEQ ID NO: 37489 - DNA, 263 bp, Glycine max
  Clone ID: 700945679H1
agatgtactatgctaagcaaggaatcatcacggaagagatgctttactgtgccactcgtgagaaccttgacccagagtttgtgaggtcagaagttgctcgtggacgtgctatcattccttccaacaagaaacacttggagttagagcccatgatagttggaagaaactttttggtaaaagtaaatgccaacattggaaattctgcagttgcaagttcatagaagaggaagtttacaaggttcaatgggcaactatgtggggag

SEQ ID NO: 37490 - DNA, 265 bp, Glycine max
  Clone ID: 700945680H1
cagagttttgcagagaaactagtgaaggaacgcccttcaccatcatttttaatggctgcttccaatggggcatttctgcacaccgatacaccagcacctgcatcatccttgcttccttctgggctttctaattctagtagtcctgccgctgatgggccaagttccctttcggtgacactaagtctttcttcctcaatggtgatcgcgcctccattttcaggttgccacccaagagaggaccagacaatgctccttttgttttggg

SEQ ID NO: 37491 - DNA, 253 bp, Glycine max
  Clone ID: 700945681H1
ggctcgagcatcgtcccactttcttctccttttagggtttcctttttgtttctcctttccagatctgcatcttccattttttaggattaagcggtgagattcgtgaatctgagaaatgtcggattcttctcgggaggagaatgtttacatggcgaaattggcggagcaggccgagcgttacgaggagatggttgagttcatggagaaggtacaaagactgtggaggttgaggagttgacggtggaggagagaa

SEQ ID NO: 37492 - DNA, 255 bp, Glycine max
  Clone ID: 700945682H1
gcttcttcgtctccccaaagctgtcacctttctttccttttctgcttccactaaatcccccactaagtcttttcaagtgagatcaattgctggtactacagaagctgcatcggggtttgttgagatggtttctgggactaagaggaagtattacatgctaggtgggaaagggggagtagggcagacaagctgtgctgcttcacttgctggtaatttgccaataatggacaccctactctcgtggtttccaccgat

SEQ ID NO: 37493 - DNA, 262 bp, Glycine max
  Clone ID: 700945655H1
aaatctgcccagtggtgatacggaacaccaggacgagtctgccatggctgacgccagtcctagaactgatatttctacagatgttgacacgcatgatatgaatccacggtttgatagaagtcagtcccttgttgctgttgcttctgactccagtgacagatcaaaggataaatcagatcataagagtctccgcaggcttgctcagaatcgcgatgctcaagaaaaagtcggtttatatagaaagcttatgttcaacagctcg

SEQ ID NO: 37494 - DNA, 268 bp, Glycine max
  Clone ID: 700945629H1
cattaatgtgtgtttgtcacgagacccatagtgctgccaaattatagtaactctctttctctatctgaagaagaagaagttctgaagaagcatgtgtggaggtgctatcatctcagacttcattggtgtgaagcgtggccgcaacctcgccgcgcaggaactgtggtccgagcttgaccctttctctgacctccttggcttcgataccaccaccaccaccacaaccaaccaccccttccagacaaaaaagtggtgtcatcatgtgaga

SEQ ID NO: 37495 - DNA, 269 bp, Glycine max
  Clone ID: 700945630H1
aaaacaaagaaaaaaaaaaacccttagccaacacaaccatcatggccacctctgctattcagcaatcagcattcactggtcaaactgctctgaagcagctcaatgagttcgtccgcaagaccggtggcgccggcaaaggtcgcactaacatgcgccgcaccgtcaagagtgctcctcagagcatttggtatggccctgaccgtcccaagtacttgggtccattccggagcagattccatcatacctgaccggagaatccctggtgacta

SEQ ID NO: 37496 - DNA, 271 bp, Glycine max
  Clone ID: 700945631H1
tgggttcaacaggtgagactcagattactccaacccatgtatctgatgaagaggcaaaccttttcgccatgcaactagccagtgcctcagtactccctatggttctcaaatcagctcttgagcttgatctgttggaaatcatagccaaggctggccctggtgttcacctttccccctccgacattgcttctcggctcccaacacacaaccctgatgcacccgttagttggaccgtatattgcgcctcttggcttgctacaatatcctctct

SEQ ID NO: 37497 - DNA, 271 bp, Glycine max
  Clone ID: 700945632H1
taatgatcgaatgttggtggatgatcctgtccttgcagatactatttgggagtctggacttagcaaactattttctgatattaaaattcgaggaaaggttgctgtaggcctcaatccaaatattagattctataggtacaaggttggtcagcgctttggacggcatattgatgaaagtgttgatcttggagatggaaaacgcacttattatactctgctagtgtattgagtggtgggcctggtgaacttaaatcaaagcccaaaaatgatt

SEQ ID NO: 37498 - DNA, 265 bp, Glycine max
  Clone ID: 700945633H1
ctccacgcgctcgagccgaatcggctcgagcgtttcctttttcaggttttgctatccattaccaccctaaccgacggatccaaacccagatgatcccaccgtgcctgaaattgctcatatgtacaagacagacaggtccaagtatgagacaactgctaggagctggactcagaagtatgcaatgggctagcaaattggaataacgcattatattataggataggacgtgttccttccatttgttaaaagacattaatgtataatc

SEQ ID NO: 37499 - DNA, 261 bp, Glycine max
  Clone ID: 700945634H1
agaaaaccaagtcaagttctcactttgaagagaaaataacaacgtaaagatgtctgcatcaggaggcagaggaagccaagaggaagagaagaagccttctgatcaaggagcacatattaatctcaaagtcaagggccaggatggtaatgagggtttctttaggattaaaagaagcactcagctcaagaaacttatgaatgcatactgtgatcgtcgattgtagattttaactcaattgctttcttgtttgatggaaggaga

SEQ ID NO: 37500 - DNA, 263 bp, Glycine max
  Clone ID: 700945636H1
ggaagaagttgattaaatctgacttaattgcctgttacgtttttagaaacaatgattggagaaacagtctttttactatgttttatgttttttgaattttcgaaattttggaacgttggctagttaggtgccgtatgtagtagtttctttatggtaaatttgtgtccgctccctggccaatgaatttgtgctttcttcgtaaaaaaaaaaaaaaaaaaaaaaaaaaaaaaaaaaaaaaaaaaaaaaaaaaaggggggggccgg

SEQ ID NO: 37501 - DNA, 262 bp, Glycine max
  Clone ID: 700945637H1
catctccttctccaaattagtcctgcagaagaagatcatcatgaggggcttaaagacgagaacaacaccaattttgtccaagttcacgcctttgttggagccatggccaaatgatgctacaagaatggaactagaaacctgatcaggacatttgacctgaggaaacctgccctctaggcaagtctgatgcttggcttttcatccctgctgttgagaacaaataaggcatggctcatctcatgagattatttagcatattata

SEQ ID NO: 37502 - DNA, 258 bp, Glycine max
  Clone ID: 700945638H1
gccagtggaccttatttggctaaacaagtatttaaggttggattaaaaattaaaaaaatcaaaacaaccagttcataccctcagttttctgaaccagctggtctattgtttttaatctgtgcttctattggactcttccctgcagtgggcattcttccattttctccaattcccctcctgcttctcctttcttacatatgcagctcatcacttccattaggccatctttcttttggtagcataaacatgtgctatgag

SEQ ID NO: 37503 - DNA, 261 bp, Glycine max
  Clone ID: 700945639H1
ccaatttttaatgactacagctctgtggggtattcacttcttctcaagaaggagaaggcgatcattgtgcagcctgatcgggttgtgatcgcgaatggacctgcttttgggtgtgtgctgatgaaggatttcctcaaggcactcgcaaagcgcctcaagcacaacaatactgcatatgaaaattaccacaggatatttgtccctgatgggcatcctttaaggctgcacccagagagcctttgagggttaatgttctgttcc

SEQ ID NO: 37504 - DNA, 264 bp, Glycine max
  Clone ID: 700945640H1
gagttaacataactggaacacatgtagtagcagttgacccaagtacaaaacccttcttgtctcggcctgcggaattacccttaatttctctgtgttccttccaatcacatggcatagaatttaaggttttttaactagaagaagatctaattagctatctagctaggaagaagacgaagcaaattaaagactagttaattagtgagtcaaaagtgggaatggaaggagagagaggtggcgcacccaattatgagcttcaagttt

SEQ ID NO: 37505 - DNA, 264 bp, Glycine max
  Clone ID: 700945641H1
atcatattaaatattaaatagaaaaaatggcccgatcatttatcaaaggccaatcttcggtagaagagaaggttcctttggaacacttatttctatttcagtataccgggtctctttctttcatttcaaaaaatttatagaatttcgattttgaaatgaaagaaaagtgtggggataaatataaatgacaaaaagatattggaacataatcttggaaggatgatggaagcaggagttcattttggccacggtactagaaaatgg

SEQ ID NO: 37506 - DNA, 250 bp, Glycine max
  Clone ID: 700945642H1
cttggtgaagactgaaaaggatagggaagaggctatggatcctgggagtattggcttcaacactggagaacctcgaatacagttgtactttttgctgggtctagtctatgcttcagttacacctactgttcttcctttcataatagttttctttgggctcgcctatgttgtgttccgtcatcagattatcaatgtttataatcaagatacgagagtggtgcagcattctggcctgatgtccattttcgtg

SEQ ID NO: 37507 - DNA, 263 bp, Glycine max
  Clone ID: 700945643H1
cttccccttatctttctctcttctctctccccgcccaaaccctaactccctaccctattccgctttctctcatccatcatgaaaggaggaaagtccaagaccgaatctaagagagccgatgccaaacttgctgtgaataagaagggcgccgccaccaagactaggaaacccgccggaaaggggaaggcagcgaaagatcctaacaagccaaagaggccccaagtgctttcttcgttttcatggaggaattcaggaaggtgttc

SEQ ID NO: 37508 - DNA, 264 bp, Glycine max
  unsure (1)..(264): unsure at all n locations
  Clone ID: 700945644H1
caagtccctttttgtgtatctgtgcgttgatgttttttgtgatcgttaattagttaaaagatcacctcatttcatttttgatgtaccgaggagatgcttgaacaccaaggaaactaggggtggagaaggccacaaagaagaatcattctatttaaagtcagcctatcagtcaggttagttgatgcctggtcctcaaaggttcaaaacattcctttgngggtagctgatgggtgtctccttacaaattctcagcgtttaaaggga

SEQ ID NO: 37509 - DNA, 263 bp, Glycine max
  Clone ID: 700945645H1
ctcatatgaagtgtacttttggtgggatatggaatggtggagggggggatggacagaagaacctttttgttgcctctttcttctttgaccgggctgctgaggctggttttgctgatccaaacttgccagtcgcgatagttcgtcctgcagattttgaggatgcagctaagcaagcatgccaaacaaaacttgagaatgccaaatccacttttcctcgtttgatgaggggaaccttccctatctttgcatggatcttatatacc

SEQ ID NO: 37510 - DNA, 267 bp, Glycine max
  Clone ID: 700945647H1
ctgcgactgcgcttcacgatgggtgcttacaagtatgtttcggacctatggcgcaagaagcagtctgatgttatgagattcttgcagcgggtgaggtgctgggagtaccgccagcaaccttctattgtccgtttgacaaggtctactcgcccagacaaggctcgccgcttgggtttcaaggctaagcagggttatgtgatttaccgtgttcgtgtacgaagggtggccggaagagaccagttccaaaaggtattggctatggtaagc

SEQ ID NO: 37511 - DNA, 264 bp, Glycine max
  Clone ID: 700945648H1
ccaatctactaagactgaaaagccttcttcacctgtaacaatggatcaggcgaatcagaccaaccagaccaatattcatgtctatcctgattgggcagccatgcaggcatattatgggccaagagtcaccatgccaccatactacaactcagctgttgcttctggtcacgctcctcacccgtacatgtgggggccaccacagcctatgatgccaccttatgggctccttatgcagcaatttatccacatggaggggtttatact

SEQ ID NO: 37512 - DNA, 263 bp, Glycine max
  Clone ID: 700945649H1
atagaatttagagttcaaaaacatccatcttctttagaagtcttatttgacactctcttcacaagtttcaacacatacaacaatgggttttcgtctacctagaatcaggaagacatcattttctgcaaacaaatttgcatcttcaaaagtcattgatttgccgaagggcaaccttgcagtctatgttggagagaaaatgaggcggtttgtgattcctgatcatacttgaaccaaccttcattccaggacttgttaagtcaagc

SEQ ID NO: 37513 - DNA, 258 bp, Glycine max
  Clone ID: 700945650H1
ggttcgagccgaatcggctcgagcttctcttctcacaccacttactctctctctcctctccaactcttcttcacgtcaaacgtagaatatctttttctttttcccctgttttaatcttaacccaatttttactctcgcaaagtggtgtatttgaggaagtttgatttgggaaatgaacaaaggacagtcaccggagcctcttgatttcttcatctggactgttgaggatgttggcttttggctggagactataaatct

SEQ ID NO: 37514 - DNA, 258 bp, Glycine max
  Clone ID: 700945651H1
caagatcgttcatgttactgagtatcagcaataccaggatgctactgctgatgaggaggagtatgaggaagaggaggaagaagaggagattggtgcttaaggcatctctcttatttgtcaaaaattgtttcaaatatcaatatgggttggctttgaacgagtggtgtaagtttaaaattgtgatgcagtcaaattagattgactcgttaatgtgtagcttattgttgattgttgacattgtataaactgggttttgtt

SEQ ID NO: 37515 - DNA, 260 bp, Glycine max
  unsure (1)..(260): unsure at all n locations
  Clone ID: 700945653H1
ctttcgtcctcttggcgtttcaaaatggattttgtcgttttgtacctgatagtgctggtgagtgcccaactattctaccacttctacagcctcatcaacatcttcgtcacgcgtttcggtcgcaaccctcctcctcgccctcctcccancancancgccgccgccgccaagtcctccgatcaagacgcgccttcctcaaaggactcttgaagaacaaccacatccaccactttgggggtaggctttaaaataaataaaaa

SEQ ID NO: 37516 - DNA, 261 bp, Glycine max
  Clone ID: 700945654H1
cgactgcctgcagtaattggagggtcttacacctttgttccaaccacaatctcaatcatccttgctggccgattcagtgatgaaccagatcctatagagaaattcaagaggataatgagatcaatccaaggtcctcttattgttgcttcaactcttcaaatagtactgggcttcagtggtctctggcgtaatgttgcaaggttcttaagtccacttcgtcagttcctttggtatctcttgttggttttgggctgtatgagt

SEQ ID NO: 37517 - DNA, 264 bp, Glycine max
  Clone ID: 700945628H1
cggtaactccagagagaaagaaagaacaaacgaagaaaagggaagaaggagaagaagcggtgaagcgtagaacgaagaaacacgcggaaagaggaatcggcggtgctccaccgtctctcgctcatcgtcgccggcgaacttcagatcgctgctcttgcttctccgaagtttgtgccttgcggtttttttcagaggcagttgttgttggaatcttgtagtacggtttttttggctcactagtggaaaattgtcatagatgggctg

SEQ ID NO: 37518 - DNA, 262 bp, Glycine max
  Clone ID: 700945604H1
gtccaaagagagcttccaagattcgcaagctgttcaatctgtctaaggaggatgatgtgaggaagtatgtcaacacatataggagaacatttacaactaaaaatgggaaaaaggtgagcaaagctcctaagagacaacggctggtcactcccctgaccctccaaagaaagagggcaacgattgcagataagaagaagagcattgccaaagcaaaatcagagcagcagagtaccagaaacttcttgcctccagattgaaggag

SEQ ID NO: 37519 - DNA, 241 bp, Glycine max
  Clone ID: 700945605H1
cttggctccgctctttggtttgctcaaccgatctccgcagcaatggtgaacgttccgaagacaaagaagacctactgcaagagcaaggagtgcaggaagcacacgctccacaaggtcacccaatacaagaagggcaaggacagcatcgccgctcagggaaaacgccgttatgaccgcaaacagtccggttacggtggccagaccaagcccgttttccacaaaaggcgaaaaccaccaagaa

SEQ ID NO: 37520 - DNA, 260 bp, Glycine max
  Clone ID: 700945606H1
catctttggaattggagtttaaggctagtttttgaggagtgagtgagaaatggattctgttggaggggaagaggcaattcaagagcctacagaccatgatgagaggattcttgtttcggttcgtcttcgtccccttaatgaaaaggagcttgcaagaaatgatgtttcagattgggaatgcatcaatgacactaccatcatatacaggagcaacctttcagtactgacaggtcactctacccaacagcatattccttgac

SEQ ID NO: 37521 - DNA, 266 bp, Glycine max
  Clone ID: 700945607H1
gtgatggaggagctcatggaggtggatacggtggcggcgcgggtgccggtggaggaggagggtatggggctggtggagcacatggtggtggttttggaggaggtggtggaagtggtggtggccatggtggctatgttccctaagaactactcttcaatgcacaatagatgtgcaagtgtcccctttcgcgtatcaagaataataagtatgctattaataacggatcataataattaataacgtaacaatcatatcatcaccattaa

SEQ ID NO: 37522 - DNA, 266 bp, Glycine max
  Clone ID: 700945608H1
gtctggtgcaggttaagtttgtgtagtttggtaagatgggtggtggatttagagtgcttcacttagttagaccatttctctcgtttcttcctgaagttcagactgctgacaggaaagtgccatttagagagaaggtcatatatactgtgatctctctgttcattttccttgtttgcagtcagcttcctctgtatggcatacactcaacaacaggtgctgatcattctattggatgcgtgttatccttgcttcaaaccgtggaactg

SEQ ID NO: 37523 - DNA, 267 bp, Glycine max
  Clone ID: 700945609H1
atgaaattggcggatattttgcaatcagataatctgcagaatgtgcaggcattgacgcgtgcacgtgttcccatagtaaagctcatggatccagtgacaggaatatcttgtgacatatgcattaacaatctcctagctgttgtgaataccaagcttcttcgggattatgcacacatagatccaaggttgcgtcagctggctttcattattaaacattgggctagtcaagaagagtcaatgaaacttaccatgggaccttgtctagct

SEQ ID NO: 37524 - DNA, 268 bp, Glycine max
  Clone ID: 700945610H1
ttctcctctctgaattcctcttattcaggaatttggagagtattgatatatcaaggtaggataaaccagtagccaaggaagatatggagttttctatgattttcattgttagcaacattatgctgcttttcagttcagcatttgccaaaactgctagtcctccctctctgagcccaactccagcaccagccccggcaccagacttcgtgaacctcactgagtactcagtgttgctggtccgtttcacaccttccttggataccttgag

SEQ ID NO: 37525 - DNA, 253 bp, Glycine max
  Clone ID: 700945611H1
gaacgccccacgtgatttccaatgtgcctaaatcatggcctatgctatgcacaagttgcttcaatacgtgtttgctagctagttctggctttctgttgtctcttttattttataaatttcattgctcatgagtcatgatgcgattcttgtacgtgcatggatggttaacttctcgttattctgtcgctttaattggtgtttgtttttatttaacaaagtgtaaattaaataaattcccgatgctttcttatgc

SEQ ID NO: 37526 - DNA, 266 bp, Glycine max
  Clone ID: 700945612H1
agacaagcgtgaatcatgtcggacgaagagcatcacttcgattctcaggcggatgcgggagcgtccaagacgtatcctcagcaggctggtaccattcgcaagaatggctacatcgtcatcaaatccaggccttgcaaggttgtagaggtctctacgtcaaagacaggcaagcatggacatgcaaagtgtcactttgttgcaattgatatttttaatgggaaaagcttgaagatattgttccatcatcctacaactgtgatgttcca

SEQ ID NO: 37527 - DNA, 267 bp, Glycine max
  Clone ID: 700945613H1
tgatgatattgagaatatgctctcagaaacttttgatctaggcatggaagaagacttcaatgttctagagaacgagtttgagcagttggtgatgtcctctgaagctctagatcattctgatcctaatgctggaaaagtgtctcctcagggtcttaacaaagatgttaaagctattcttattaacttgacaccaaaatcaccaagggaaaggggtcccaagtcctgtctgggcttgcaaagcacctcgagaagccagcacagcatgtg

SEQ ID NO: 37528 - DNA, 267 bp, Glycine max
  Clone ID: 700945614H1
gagcgagagaacaagaacataagggaaccacagcggcggtaacagaagaacaagcagagaatgggtcgagtgagaacgaagacggtgaagaaatcctctcggcaggtgatagagcgtcactactcgcgcatgaccctggacttccacacgaacaagaagcttctggaggaagtggcgataatcccgtcgaagaggctaaggaacaagatcgcggggttctcgagcacctgatgaagcgcatccagaagggccctgtgcgcggcatct

SEQ ID NO: 37529 - DNA, 268 bp, Glycine max
  Clone ID: 700945615H1
ctctaaaccctaaacaactctttctcttcttccttcgctcgttgttctccctcgcgtagatcgacaatggcggagacagagacgtttgctttccaggctgagatcaaccagctcctcagtctcatcatcaacaccttctactccaacaaggagattttccttcgtgaactcatcagcaacgcctccgatgctttggacaagattcgatttgagagtttgacagatagagcaagctcgatgctcagccagagttgttcattcatattat

SEQ ID NO: 37530 - DNA, 255 bp, Glycine max
  Clone ID: 700945616H1
caggctcactgagaaggtgcttggaagagagaaaaatgagagtcacttggaacaggctgaaaccaacggattgcaggagccgctgcacaagtctttggttgattcagcttctgagggtgaagggtccaaagtgacctttgaggcttgtaaacaggaggacattagctcagccaagagtgacatatttgattcatcagaaagcccacaatacactgatggagttcacttgcacttctagagactggtgattcttct

SEQ ID NO: 37531 - DNA, 268 bp, Glycine max
  Clone ID: 700945617H1
tctgatacgagtaatagaaacctctcagcccctctccgatcaaatggccaccgtaatcgacggcaaagccgttgcgcaaaccatccgatctgaaatcgccgacgaggtgcgccagctctctcaaaaatacggcaaggttccgggattagcggtggtgatagtagggaccagaaaagattcacagagctatgttggaatgaagagaaaggcatgcgctgaattggaatcaaatccttcgatgtggaccttcccgaacaagtctcccaag

SEQ ID NO: 37532 - DNA, 256 bp, Glycine max
  Clone ID: 700945618H1
ctctacttatataatcccacgctctgctttaatacaaaaatttgtgttcgcggtagccattgatattctgctaatgactatggtgttcaaaaacacaaaccagttagaggaaagtatggattccacttatgacagggcggctgatgtgaaagcctttgatgattcaaaagctggtgttaacggtcttgtacagtctggcctgacgaagatccctcgcatgtccattctggcatgtgcgagatccttgagacctcag

SEQ ID NO: 37533 - DNA, 264 bp, Glycine max
  Clone ID: 700945619H1
ctctgatatggttcctgttataccaccaaatggtacaatgtcatctgtctcagaaatgcctgtgagtccgacatcagtagcatccagtggtcattttcccttcactgcatcagaaataccaggaatgggcgcagatacatcagctcttgatacagcatttacatctgatgtggcaagttcagtaggactacagcttgcagcagatggtggcaatggaattctagatcgctggatcaaattcaatggaattttagcctatctgat

SEQ ID NO: 37534 - DNA, 126 bp, Glycine max
  Clone ID: 700945620H1
ctgggttgaaaatgtatttggtggagagcaaaggaggtgccataccatgcatgttcgtggctcttttcttcttggggacatggcctgctcttttgactatgtgagaaaggcgtggtcgtcttcctc

SEQ ID NO: 37535 - DNA, 262 bp, Glycine max
  Clone ID: 700945621H1
aggaaaaccatcaatggacatgcactctcatgcctgcagaatttgttcccaatcattagttggttgagagattacaaagtctccaagttcaaagatgatctcttggctggcttaactcttgccagtctctgcatacctcagagcataggatatgctactttagcaaaagttgctcctgaatatggcctgtataccagtgttgttcctcctcttatttatgctatgatgggaagctcaagagaaattgcaattggacctgtag

SEQ ID NO: 37536 - DNA, 263 bp, Glycine max
  Clone ID: 700945622H1
ttgtaactcgttcttcttcttttgttgttctgtgtttgtgtttgttttttctctcacctgaaaatgtcttgctgcggtggtaactgtggttgcggaagctcctgcaagtgcggcaacggctgcggaggctgcaagatgtacccagacttgatctacactgagtcaaccaccaccgagaccttggtcatggagtggcacctgttaaggctcaatttgaggggctgaaatgggtgtgcccgctgagaacgatggctgcaaatgtg

SEQ ID NO: 37537 - DNA, 258 bp, Glycine max
  Clone ID: 700945623H1
ggcatggccattcaaatgtcttcttttgtctttgtttctcttacaattttattttgcttctcttccttggagaagagttttgcctttcaaacaacaaaggaggccacagaaagcaacaatcttcatcaatatactcatcttgttcacctcagctcactccttccttcatcttcctgcagctcttctgccaaaggtcccaaaagaaaagcatcattagaagtgtacacaaacatgggccatgctcccaactgaataatc

SEQ ID NO: 37538 - DNA, 266 bp, Glycine max
  Clone ID: 700945624H1
cacaaactatcatggccacggcaacagcagctgccacctcgtcctttatggggacgcgtctcctggaggctcactccggagcggggcgagtgcacgcccgattcggcttcggcaagaaaaaggctcccgccccaaagaaagcctccaggagatcgggccgagacaccgacagacccctttggtatccgggcgccaaagcgcccgaatacctcgatgggagtctgtcggctactacgggttcgatccgtttgggctagggaagcccg

SEQ ID NO: 37539 - DNA, 260 bp, Glycine max
  Clone ID: 700945625H1
caagattgaggaagtggactaaatgtagttgctttcctccagatacctgttttaaaaacttattttactttatgcttttttaattggattttaatcgcatgattgttgttggatgggattcaaactatttttcccttctgatatgaacgttgctttaagcattatgttatttgcgtcatgttcattattagatggtatactcaattgttatgcactttaccgtaggaattattctgtcttgttaaatgacatatcttgtc

SEQ ID NO: 37540 - DNA, 267 bp, Glycine max
  Clone ID: 700945626H1
gtggtttcagtgagtgatcggtgttcacttgatccttcataagtcgtcatcatcatcatcatcatcaccgttgattgaagaagatgccgatcagaaacatcgccatcggaaggcctgaagaggctactcaccccgacacgttgaaggcggggttggctgagttcatctccaccttgatcttcgtgttcgccggttcaggttccggcatcgcctacaacaagtcaccgacaacggcgccgccactcccgccggcctcatctccgcttc

SEQ ID NO: 37541 - DNA, 266 bp, Glycine max
  Clone ID: 700945627H1
caatgagtatgaaagacacaagctgcaggctttaaatcagcggcagaaattggttcttcagagaaaaactgaagaagctgcaatggccaccaagaggttaaaggagttgttagaagcacgtaaaacttccagccgagaaactttagttacaatgaatggaagtggaacaaatggtcagagcactgagaaatctttacaacggtggcttgatcatgaactagagtcatggtagaagagcatgaagttcgttttgagtatgagaaaca

SEQ ID NO: 37542 - DNA, 264 bp, Glycine max
  Clone ID: 700945603H1
gaactcaaagcaggcttcctcaactctctttctgatggacagaagctcgagctcttacagttccatgttctttcagactacgtgtctagctccaattttgatactctgacgaatccagtgagaaactgcgaggggctaagccaggaaaggtggaactgaatgtgataagttatggtgggagtgtgaacatctcaacaggtgaggttaacaccaccatcatggatttgtatatactgataagcatcttgctatatataaggtggg

SEQ ID NO: 37543 - DNA, 273 bp, Glycine max
  Clone ID: 700945563H1
tctcgagccgaatcggctcgacggctcgaggaagttttgcccaaacacgccgtttgcacctgcaatttgaaccggtccggaccaatcccggttcactacaccaaaaacccagatgaatttgatgtggaggaatacacctatgtgacatgccacgtacctaacaaaacgttcactaaggtatactatgatggtggtgaaggtgaaattcggagacattacaacaacagcaacgttggagttctcagaagaaccgcaccacaacctttgattgtt

SEQ ID NO: 37544 - DNA, 129 bp, Glycine max
  Clone ID: 700945564H1
gctgatgttcatcactgcaaggtttccgcatttgggtttctctccgattgaaaaaactttttgaatttgatgcagcaaggaaatgatgatttcatccttttaagaggaatgtgacactaggataatgct

SEQ ID NO: 37545 - DNA, 268 bp, Glycine max
  Clone ID: 700945566H1
aaccaagacatagcaaacgatccaaactcttttttcatttgcagcatcaaaatgagtggtagcaacgatggtagcggcagctggagctctaggtttttgaaggtggctagtgcagctgccgctacagccgccgttgccggcggtttatatgccattctttcatcctcaacctctgctagctctgagatggaagtgccgtttggcagcgcacggcgtgagagcaaagaacgtgacgatggtggctccgggtctcatcctcgcgagggtg

SEQ ID NO: 37546 - DNA, 270 bp, Glycine max
  Clone ID: 700945568H1
attttagttaaaacatgtccatggccatcattaacacttttggaaacgttgatgtctatattctattattatcatcatggtttctcgtatctgctgtgtgtgtttggggacgacccgccacttttctgcaagactttgaaatcacgtggtcaaagactcatatcaggcaaattgatcaaggcagatccatccaactcattctagatcaaaactctggttgtggctttgcttccaagagtaagtacatgtttggccgtgttagcatgaaga

SEQ ID NO: 37547 - DNA, 121 bp, Glycine max
  Clone ID: 700945569H1
ctcgagccgcaaatatcagagaggggaaggttgtgtatgtggaagacatagctgaggggcttgagaatggaccttcagcattggttggcctttttagcggtcgcaatgttggaaaacaagc

SEQ ID NO: 37548 - DNA, 270 bp, Glycine max
  Clone ID: 700945570H1
aagaatgttgtgtctgttgaaaaatcggaagttaataggaatattgttagaagttggtgggagcaaacaaaccagaaaggtaatctatatgatatggatgatgtaagggagctagacggtgatcgcttggaacagctgatgagcacatttggtggttttgatccaatttgttggtggcagtccatgtaataacctggctggtagcaacagggtcagccgggatggactggagggaaaagaatcttctctcttctttgattattttaggat

SEQ ID NO: 37549 - DNA, 269 bp, Glycine max
  Clone ID: 700945572H1
cttataacttccacttattgttcttttccaacccctattcaatatcaagtcgaccaagctatatggcatccatgtccaaggccatgaccccagaaatcaagacgcatatatgtcaaaagaaagacggtgttttgtatcattatgatcccacagcttgcgccgaaggagatgattataacgggaatataaattatgtttttgcatatatggaaggtgatgacgatgatgatggtggttatgattatgctcccgcagcataaattgggttt

SEQ ID NO: 37550 - DNA, 268 bp, Glycine max
  Clone ID: 700945573H1
gttaccactcatggcagagcttgagagtcctaatgttatgcctaagcttatatcatttctctcatctctcctcaaaagggtagctgaatctaatgatcttaaccagcaacaactcctacaccaaaaggtctcagttttccatggcttgactcgccccaccatctcaattcaaagctaccttgagagaattttcaagtatgccaactgcagtccatcatgcttcattgttgcatacgtctaccttgatcgcttcactcaaaggcaaccc

SEQ ID NO: 37551 - DNA, 268 bp, Glycine max
  Clone ID: 700945574H1
cacattttcccttttcagctttcattggtgtggcctagctgttttctcaatgagaaagccttcatctctgcaaagcgcacttttgcgctttggggttcccttgttgcttgttatcaccttctgttatgctacttctactgctgcagcaacaactcaagtttcagggaatgaagagctgccaaagacaaacctaaatgggcatgatgaagaagcaaaatgcggattttttcatcataaaccaatattcaagaaacatattccaattcca

SEQ ID NO: 37552 - DNA, 280 bp, Glycine max
  Clone ID: 700945576H1
ctcgagccgaatcgactcgagcgccacttctgaatctattgaatcaacaatcatgtcggacgaagagcaccatttcgagtccaaggccgacgccggagcctccaaaacctaccctcagcaagccggtaccatccgcaagaacggctacatcgtcatcaaaggccgcccctgcaaggttgtggaagtttcgacttccaaaactggaaagcacggtcacgctaagtgtcactttgttggaattgatattttcactgccaagaaacttgaggatattgtgccc

SEQ ID NO: 37553 - DNA, 137 bp, Glycine max
  Clone ID: 700945578H1
caccaccatgagggacattgctggtgtgatcaagagatttgagctcaagatgattggagacaggctacaacacaagacacggcaatgacactgccaactttttttaatttattttttaaaactatataataatttag

SEQ ID NO: 37554 - DNA, 268 bp, Glycine max
  Clone ID: 700945579H1
cggctcgagtcgtcttcaatcctttcgttattctcttattcatccttctcttctgaataatccagatctctttctgcccttttctccgtcacgcttttcgtgaccggatctgtatggatttgatccagatctacacgccgatggtggttttggccgggtctttcatagatctggtgcgtagaggctcagatctacggtaccgaggtacaacagagaatcgatgacaagaacgcagatccgacggtagatccagccgattccgcttgtt

SEQ ID NO: 37555 - DNA, 270 bp, Glycine max
  Clone ID: 700945581H1
caagggaaagcttccaaccttatgctggcggcgagactggtgtcggtatgggaacctacaaatgagcttctagttaagaattttacagcaaacatttaggtgtgactatatctggagtctggattctgcagcacatttccttgattttagtgcatttattgtatttactgtctagctactttacaagaatggtatacgttgtattttagtaattttttgttgttgttacctattgtcgtatgttatgggtgactgattcattgcctcttt

SEQ ID NO: 37556 - DNA, 269 bp, Glycine max
  Clone ID: 700945582H1
aatctccttcctctctctctctgtctctctgtctcctccatggccatctccttcagtcccaaacaccctccttacgatgagatgatatacacagcaatcggagctctgaaggagagggatggttcgagcaagcgagccataggaaagtacatagaacaagtctacaaggaccttccacccactcaccctgccttgttgactcaccatctcaaccgattgaaatcctctgccctcctcgtcctcgtcaagaaatcctacaagcttcctgg

SEQ ID NO: 37557 - DNA, 137 bp, Glycine max
  Clone ID: 700945584H1
ctctctctctctctctcgatcaatcatggctttgcccaatcagcaaaccgtcgattaccctagtttcaaactcgtcatcgtcggtgacggtggtacaggaaagacaacgttcgtgaaaaggcatcttaccggtgaat

SEQ ID NO: 37558 - DNA, 269 bp, Glycine max
  Clone ID: 700945586H1
gtttcttgtggctgaagttcaagtttcaatggcagtgacatgcagcccagtgcagctgagtgcatgtgtaagtgcaataacctcttcaacccctccatcaaacctatgctgctccaagatcaaagaacagaaaccatgcctctgccaatacctcaagaaccccaatctcaagaagtttgtggatcccctaatgtcaggagagttgctagcacttgtggaacactcccttcccaaggtgctaagtgttaataaattggaagaggttttaa

SEQ ID NO: 37559 - DNA, 266 bp, Glycine max
  Clone ID: 700945587H1
gtcacttcaagtcacaacccaagggtgccaagcaagatgataagtcctttagtgagttccaagatatccatgcatctgccatgccagctgatccagagatacttcctcaacagctactgaagaagtacattacatatgccaagttgaatatttttccaaggttacaagatgctgatatggataaactgtcacatgtctatgccgaactgcggagggaatcttcacacggacaaggagtccctattgctgtaaggcacattgaatca

SEQ ID NO: 37560 - DNA, 267 bp, Glycine max
  Clone ID: 700945588H1
agaaaccactccaccatcgtcgccttcgccatcggcaaaaagtatgtttctggaaatggattccacataatcggggtataacggatagtccttgtctcaaactcaagcctgtcaccaaggttgttaaggctgggattttggaggttggtgtccaaacctatggaggaggcttgtggcacacatggtttgatcgagacttgaccgtggcggggagggtcattgtgcaggaagagaatgccggttctgtttcgtactcgcatcgccttg

SEQ ID NO: 37561 - DNA, 266 bp, Glycine max
  Clone ID: 700945589H1
atggagtggccactggaggacctttggcctggggtctttgttacaatcatgaaatgagtcctatgcagtcatactgtgatgactacttcaaactcacatacccctgtactcctggtgctgactactatggacgtggagccattcccattttttggaactacaactatggtgctgtcggagaagctttgaagattgacctactaagccatccagaatacatagagcagaatgccacccttgctttccaggctgcaatttggagatgg

SEQ ID NO: 37562 - DNA, 265 bp, Glycine max
  Clone ID: 700945590H1
tgtttgtttctgatctatggcttccaaggagttctctggtctttgttccttggtttcttcactctccgagagcattttgtgcactactgggttgaaaatgtatttggtggagagcaaaggaggtgccataacatgcatgttcttggctcttttcttcttggggacatggcctgctcttttgactatgttagaaaggcgtggtcgtcttcctcagcatacctaccttgattactcaatcaccaatttcttgtctgctttactcatt

SEQ ID NO: 37563 - DNA, 264 bp, Glycine max
  Clone ID: 700945591H1
ggaagaacatgatggcagtacaaaaggttagcactgaggatgtggcagagaagacaacaagcagcactgctaattctggggcatttgtcaaggtttccatggatggagcaccttacctgcgcaaggtggacctcacaatgtacaaaagctacaaagagttatctgatgccttggccaaaatgttcagctccttcaccatgggtaactatggggcccaaggaatgatagacttcatgaatgagagcaagttgatggatcttctta

SEQ ID NO: 37564 - DNA, 264 bp, Glycine max
  Clone ID: 700945592H1
tggagcttgagaagcttttcttagataaggttatagcaaacttgggcctctgcattagtgtctatgatatcagatcgattgatggtgggtttatcttccctggtgatggggctccaacctatacggttgtgttcaatttgattatgtttcgtccatttgagaaggagattattactgcaaggcttctttcatctgatgctgatggcttacgattaaccattggattctatgatgatatttatattcctgcaagtcgtttgcccg

SEQ ID NO: 37565 - DNA, 266 bp, Glycine max
  Clone ID: 700945595H1
ttctcctctctccgattccttttattaattggagtttactcgctccttttcctttccctgaaaacatttcctcgtcgtattgatgtcggaaaagggccggccacttccaaaatttggtgaatgggatgtcaatgatccaacctcagctgaggggttcacagtgatttttaataaggccagggatgagaaaaagacaggtggtaacccagattcaccaggaaagactgccactgatcctcatagcaaacctgctgtagagcctggca

SEQ ID NO: 37566 - DNA, 269 bp, Glycine max
  Clone ID: 700945560H1
ggtttcatgcactagatcctcagaagagctattgggagctaggaaggcataccattccctctttgaccactccattgaagaagatgttgcctctcacatccatggcattgaaagaaagctattggttgccctactaagtgcctatagatacgaaggaacaaaggttaaagatgacactgcaaaatcagaagccaaaatcctttccaatgcaattaagaatgctcataagaagcctattaatgaggatgatgaagtgataaggatattgg

SEQ ID NO: 37567 - DNA, 266 bp, Glycine max
  Clone ID: 700945601H1
tcacaaaccaactcccccaaaatctcactttctctgtttttgctctgttttcctctgttttttcctcatcatcacacattaaaatggagggtctaattccatttgtgtacaaagctgtaatgcaatacaagaatgagaaacaagggcctattggttcatggctttgtgagtcaccttcttactcatacatgaaacttcccggcgactcaggtcggtttcaaactctgcttcttctccgtttgggtcagactatggtttttctgctt

SEQ ID NO: 37568 - DNA, 246 bp, Glycine max
  Clone ID: 700945602H1
ctgctgccgaaacccttccggaaccctaaggtaagtgagtaatccgtggttgagaatggtggcgacggcgaagggtagaaaggaggaggtggttacacgtgagtagaccattaacctccacaagcgcctccatggctgcacatttaagaagagagctcctaaagctattaaggagataaggacatttgcccaaaaggccatggggaccactgatgtgagggtgatgtgaagttgaacaagtttgtc

SEQ ID NO: 37569 - DNA, 100 bp, Glycine max
  Clone ID: 700945523H1
tgtatatcttaatggaggaccaaacaagctctaattagatgaaagttagattttaactacgtgattacatacttaatgaacaagaaaaattgttttgatt

SEQ ID NO: 37570 - DNA, 271 bp, Glycine max
  Clone ID: 700945525H1
gggagctacacttgctactcatttggacaaacctcgtgtttacatgggatgcatgaaatcaggcgaagttttctctgagctgaaccataaatggtatgaaccagagtggtggaaatttggtgacaaaaaatcatactttcgtcatgcatcgggagaaatgtatgttatatcacgagctttggctaaatttatatcaataaacagatctattcttcgtacctatgcccacgatgatgtgagtgctggatcctggtttattgggcttgatgtg

SEQ ID NO: 37571 - DNA, 274 bp, Glycine max
  Clone ID: 700945527H1
attgaatctcagaattctctaaaagagatctttttctgctctttgaagaaagaagggtctttgcttgattttggagatgtctctgctctcagatctcatcaaccttaacctctccgataccaccgagaaggtgatcgcagagtacatatggatcggtggatcaggaatggacctgaggagcaaagcaaggactctcccaggaccagttagcgacccttcagagcttcccaagtggaactatgatggttccagcacaggtcaagctcctggtgaa

SEQ ID NO: 37572 - DNA, 269 bp, Glycine max
  Clone ID: 700945528H1
tcctaactcactctagttgctttgtttgtcttcaatggaataagaacagcagaaagaaagaacacaactttggccagaagacttggtgggggcattttcttttcagccaagaagggattcggtgttgatgagcaatattgatctgttgctgcagtaggggaccgagtaagaatgccaaaccagctatggtttgcactgccaatgatttacaaggatggaaagatttcccaaagggacttagagttcttctgcttgaaggagatagtagt

SEQ ID NO: 37573 - DNA, 275 bp, Glycine max
  Clone ID: 700945530H1
ctacaagcctattccaaagccagttcccgtgtataagcctataccaaagccagttcccatttataagccaattcccatttttaagccaataccgaaaccagttcccatttataagccaattcccatttttaagccagtaccgaaaccagttcccatttataagccaattccaatttttaagccagtaccaacaccaattcctttttttaagcctataccaaagcctgttcctattgttaaacctattcctattccagtttttaaacccataccta

SEQ ID NO: 37574 - DNA, 274 bp, Glycine max
  Clone ID: 700945531H1
caccactggtgttaagaggctatatcagatgcaggcgaatgggactctactcttccctgctattaatgtcaatgactctgttaccaagagcaagtttgacaacttgtacgggtgccgtcactctctccctgatggtctgatgagggctactgatgtgatgattgctggaaaggtggctgttgtggctggatatggtgatgttggcaagggttgtgctgctgcattgaagcaggctggtgctcgtgtcatcgtgactgagattgaccccatttgt

SEQ ID NO: 37575 - DNA, 274 bp, Glycine max
  Clone ID: 700945532H1
atctcattcccgtccccggcgactgagtagcggtctcttcccaactcggaactcagtccattccgcatttcaattttctcttcacttggcaaagcccaaaccaaaccctggctgaagaagagaattgactgagaagaagaacacagaaatgggctccgaactgattttcagagggcacgagacccagcccgtggacgacgcgtactcaccaaagccccacaaaccctggctcaccgtgactcgcccgattcactacatgctccatgagcagcga

SEQ ID NO: 37576 - DNA, 277 bp, Glycine max
  Clone ID: 700945534H1
gaggttttgacgcaacacactttcactgagaaaggatctctatctaccaaggagcagaataaaacccttctctctggtaagtgaataagagaatggcttcagatcggaaacttcacactttcgaggaggtggcaaagcacgaccagaccaaggattgctggctcatcatttctggcaaggtgtatgatgtcacccctttcatggaggatcatcccggaggtgatgaggttttgttatctgcaacagggaaagatgcaaccaatgattttgaagatgt

SEQ ID NO: 37577 - DNA, 275 bp, Glycine max
  Clone ID: 700945535H1
gtgaaacactagctagggtattgggagctctcgttgtttcggagttagggaccttacgcagccatggccactgctacgaatgccgccgccgccccaccacgccagctctcccagaaggaagctgacatccagatgatgttggccgccgacgtccacctcggcaccaagaactgcgacttcacaatggaacgttacatcttcaagcgccgcaacgacgggatttacattattaaccttgggaagacgtgggagaagcttcagctagcagctagggg

SEQ ID NO: 37578 - DNA, 272 bp, Glycine max
  Clone ID: 700945536H1
cgtgcgctctcggattccacatgccttccgacagagaaacccacgcgcagtgctggatgggttggcctgaacgtgccactcactggcgtgacggcgcagatcacgcccaacgcgtgtttgcgagggtagcgtcacaatctcaagttccagtctgtaacagtttgtgttagttctgcacagtgggagaacccgcggagtcagctaccggagcatatcagggtcgttgagatgaacatgaacgattcttggttccgtgatattggcctactttt

SEQ ID NO: 37579 - DNA, 98 bp, Glycine max
  Clone ID: 700945537H1
gaactcactcactggaagccttgttgtgagtaagggaaaggcttcctgcactgagcaccaagttgaaacctcttgattctttgcttagaattccacag

SEQ ID NO: 37580 - DNA, 274 bp, Glycine max
  Clone ID: 700945538H1
gttgggtctgaagtctgaacaaacagcctgaaacgacgactttccaacacgtccggaaaagaaaataggacagaacatattgtataataataataataaaaaacaacagacaagtttgttgttcctgttctaatctctggaccatgtcatacaactgaatctaattgcaattcctgtgagccgtggcaaagcttttgaatttagtgcctctcctctctgtttacccttccagatattgcagatacagcaagatcatgagtgggacttcggaaaa

SEQ ID NO: 37581 - DNA, 128 bp, Glycine max
  Clone ID: 700945539H1
gccggatttaagcggtttgacaaatcttcaagtgattgaattggatgataatgctttcggaccacagtttcctcagctcggtcacaagttggttacactagtgctaagaaacaataggttcaggtctg

SEQ ID NO: 37582 - DNA, 271 bp, Glycine max
  Clone ID: 700945540H1
aagggattcatcgttcttcttcccaggttatttagaaaagcaaaatggtgaagatttgctgcattggtgctggatatgtggggggtcctactatggcagtcattgcacttaagtgcccatccattgaagtcgctgttgttgatatctctaaaatctcgcattgcagcctggaacagcgaccagcttcctatctatgaacctggccttgatggtgttgtgaagcaatgccgtggcaagaacctcttcttcagcactgatgttgaaaagcatg

SEQ ID NO: 37583 - DNA, 130 bp, Glycine max
  Clone ID: 700945541H1
gctgattccattgcagcatatgcactttgggagcaggtcaacgtgacccgcgattcttcagattatttgtggtatatgacagatgtctacattaatgctaatgaaggattcttaaagaatggacaatctc

SEQ ID NO: 37584 - DNA, 128 bp, Glycine max
  Clone ID: 700945542H1
cacggtgtgagagggtctctatataaccataaagaccactagttgaattacgagtgcatgcatatatatgcacaggctgtgtatccttgatagctggatagatttatagtgcaagattcatctaaaaa

SEQ ID NO: 37585 - DNA, 274 bp, Glycine max
  Clone ID: 700945545H1
gggttgggacatcaagctaagaaagggaaagagaaagatcacagaaagagaattcatctttctttgcgaacagctaaaaacctcaaagggaaagaaggcatgaatagaggtgttcttcagagctcaccagtgcaacaaatgatgactggaaaccctaactggtggaacatcaatatcaatagcatggctccacaagctcctcctttcttgtccactcctaacaactttcctatcccttgtgctcccacttctcttccctttccttcttggcatg

SEQ ID NO: 37586 - DNA, 116 bp, Glycine max
  Clone ID: 700945546H1
gtaggcacctgctgtgcaagttgtataaggaaaaacataggtaagccaatgaaagacagtttacaatgaattctgtacaatcaatgatgactaagttctggattgctacgtctgtt

SEQ ID NO: 37587 - DNA, 275 bp, Glycine max
  Clone ID: 700945547H1
agaaggggaagctgctttggttgcgaaatttcagaagttacatgaggacctgactaatggtttccgcaaccttgaggacgaaacccgatgattgatgattgaagatttggtagtttgctcaaatattgtgttatttccaattgtaagacgcagtgctagcatcgcagggttgcaacgtcccgagtgttctcatatttgactgttcgattcattcatatcacatttatttcctttcttggtgctggtttggcttttgatctagtctcatgtgtagc

SEQ ID NO: 37588 - DNA, 275 bp, Glycine max
  Clone ID: 700945549H1
tggacttgatgcggaaacaattggttttgaaatgggtgaggacatacttggtgaactgatggaggacaccattttgagccttgtgagtgaaagtccagaaagtaaatgtttctctgcttctatttgagggaaagaacaatgagaacagcttccacttgtaaaagacaactcactgccttttgatcatgcaagatgttaaaggaattcatatgtgtgaggtgaaatgaaagtagataggggatgaaaatcgatcagaaagaataatagagttatag

SEQ ID NO: 37589 - DNA, 274 bp, Glycine max
  Clone ID: 700945550H1
gaagagagtcagtgcagaaaaccctagaaacaaaacatggcggaaaaattagcccccgaaaagcgtcacagcttcgttcacaacggtcaaaaggtgttcgagtgggatcaaacccttgacgaggtcaatatttacataactcttcctcctaacgttcattccaagcaattctactgtaagattcagtccaagcacctcgaacttggcatcaaaggcaatcctccgtatctcaaccatgatcttactagcccggtgaagacagattctcgttttt

SEQ ID NO: 37590 - DNA, 269 bp, Glycine max
  Clone ID: 700945551H1
catctatcaaaacatgttgacaaaacggcaattatatttgatttttcttcaggttctactggcccagtatccaatgggttgattcacattagaaagagccatggaatagtgggtataattgggtggggcctaatcctgccagtgggggcaattattgctagatacttcaggtataaggatcccctatggttctatctccattcagtcattcaatttgtgggattttcatttgggcttggcacagtccttcttggattacaactctatag

SEQ ID NO: 37591 - DNA, 130 bp, Glycine max
  Clone ID: 700945552H1
cagaaagctaaaacagaagaagcaaagatgatattgcagttcttcgtgctttcacagagaggcgataacatcgtctaccgcgactatcgtggtgaagctcaaaaaggaagcgctgagacatttttccgaa

SEQ ID NO: 37592 - DNA, 276 bp, Glycine max
  Clone ID: 700945521H1
gcatctgattgggctaccaatgggggcaaatacagggttaactacaagtatgcaccctatgttgctgaattctctgaccttgttctgcacggttgtgcagtggatccaattgagcagcagttggccaagtgtgacaatgctcctcaaagttctgaggcaactacaacaattccttcttctggtgttacaccagcacaaagaatcaaaatggagaatttcaggaagaagcacatgacatactcctactgctatgcaaagtcagatacaaagtccctc

SEQ ID NO: 37593 - DNA, 129 bp, Glycine max
  Clone ID: 700945554H1
tggaaaacgtggagcagataaaagaggagatagagaagatggtggcaagttctagttcagaaggaacaggagtacccctattgagagcatctgataataatggaagagatcaaaacacaagatcccccc

SEQ ID NO: 37594 - DNA, 130 bp, Glycine max
  Clone ID: 700945555H1
ctcactttcattttaaaatgggttatctatacttcttgagtttcctgtttgctttatgcctctcatctcctcacaatgttttgtacagctcaaaatttaccatacaaagttgtgaatctaggaaactggc

SEQ ID NO: 37595 - DNA, 269 bp, Glycine max
  Clone ID: 700945556H1
cttcaaactcccttttggcttttctaagtgctgtgattctttctgtcatctttttcttcaggtcctaaagcatacttgtgatttcctccattatttcctttgagatttggacagtagttggtcatacacccaattctaaattagagttgggatgtctggaggagtagtttgatacagtgatgcatctccacagatacttgagtaaagctatatgctgtggtgtagatttttactatggagttaaatgcaagttatgacgtcgagcattc

SEQ ID NO: 37596 - DNA, 269 bp, Glycine max
  Clone ID: 700945558H1
cttctccctttttctctctgtctctctctctcggtctcgctcttattctcatcaagcacagagttacagactcaccgatcttccgattctctttcgtcttggtttatgagctcgaaggagagacccactcttggtggcacgcggattaagacccgcaaacgaaatattgctgcgccgctggaccctgcagcattctcggatgcagtggtccagatttatttggataatgctggtgatctggaacttattgctaagagtattgaatcttc

SEQ ID NO: 37597 - DNA, 237 bp, Glycine max
  Clone ID: 700945487H1
gacggcgcggactgagactggggcttccgggattgcagtctcccgaacgagattcagatctttgcttgagaagttcaattcagtttgatgaaaaaccactgtttcctttgcatcctgctactgatgatcaccattcctcatcaaagcctgctgttttgggtaacaaaagagggttctcagatgtcatgagtggattcgccgaggagaaattgcttgttagttctgaggtcaacacaa

SEQ ID NO: 37598 - DNA, 249 bp, Glycine max
  Clone ID: 700945488H1
gatgccatcaactttgacttgcctcatgtggttgccactgctcctaagttcgatgggatcacccatgttggaggtgacatgttcgtgtccattcctagtgctgatgctatttacatgaagtggattctgcatgactggagcgacgagcactgcatcaagatcttgaagaactgcgggaaggcattaccggagagcacaggaaaagtcataatggtggatcgcgttcttcgacccgaaggcaacgatctc

SEQ ID NO: 37599 - DNA, 185 bp, Glycine max
  Clone ID: 700945489H1
cattcactcccaatatgatggaattggaagccaccgccgctacttccccaccttctcgcgttctcctcatctccgccggtgccagccacaccgttgcccttctctctgggaatgttgtgtgttcgtggggtcgcggagaggacggacagttaggcgatggtgacaccgatgataggcccttaccc

SEQ ID NO: 37600 - DNA, 196 bp, Glycine max
  Clone ID: 700945490H1
cttttatttgattccatctcaattagtaacacagacgccattcaagccaagtactgctggaattgaagcacttgatctgagcataccaaggaagcttctcttgtgggcctatgtgctatcccatggacgttgtgcaaatatctcaattgttgtaaagcattgtgaagaaatgtcgaactcaagtatgaaaagagga

SEQ ID NO: 37601 - DNA, 236 bp, Glycine max
  Clone ID: 700945491H1
gaaatgatcagcttggcagtgcacagaaacctcctcaaactgtatggattttgcatgacaccaacagaaaggcttttggtttatccttacatgtccaatggcagtgttgcttctaggctcaagggtaagccagtgttggactggggcacaaggaagcaaattgccttaggagcagcaaggggactactataccttcatgagcagtgtgatccaaagatactccatagatatgtgag

SEQ ID NO: 37602 - DNA, 227 bp, Glycine max
  Clone ID: 700945492H1
aaaacaaagtatagagtgaaagaatgggtgagaaaagcaagattttgatcataggaggcaccggctacatcggcaaacatatagtggaagcaagcgcaaaggctggaaatcccacttttgctttggtgagggaatccacactctctgacccctccaaggcacaactcatccacaattttgaggctttgggcgttaatttggtccgcggggatctgtacgatcatgag

SEQ ID NO: 37603 - DNA, 206 bp, Glycine max
  Clone ID: 700945493H1
tcacgaatgcgataaacagtgttgaaggatctgtgcgtgagttcttggtgaaacaaaggaatcgtagatccgtttgtttgtgtagtttttttttttttgtcagagaagagaaccgatggggttgtgggaatcttttctcaattggcttcgcagcctctttttcaaccaggaaatggaattaccccggattggactccagaatcctg

SEQ ID NO: 37604 - DNA, 260 bp, Glycine max
  Clone ID: 700945495H1
tgttggaagttggcaatggaggcatgacttaccaggaatatcgtgctcacttcagcatctgggctttagcaaaggctcctctattgattggctgtgatgtaagagatttgactgctgaaacacttgagattttgagcgataaagaagtcgttgccatcaatcaagactctcttggagtccagggaaggaaagttcaagtttctggagcagatggttgcagacaggtttgggcaggtcctttgtcaggaaaccgattggct

SEQ ID NO: 37605 - DNA, 283 bp, Glycine max
  Clone ID: 700945502H1
ggcatgtcgctctgttctttcatcttctcctcacataacgaacttcatggccatcaaggagggtgtcctctccttcgcacccaaccctcctctgcttcttcgtctcccgaaagccgttacctttctctccttttctgcttccactaaaccccccacttagtcttttcaagtgagatcagttgctggtactacagaagctgcatcggggtttgatgagatgatttctgggactaagaggaagtattacatctttggtgggaaagggggagtatggaagacaagt

SEQ ID NO: 37606 - DNA, 144 bp, Glycine max
  Clone ID: 700945504H1
ctctcttatcatctttgttattacctctttccaaagtccaaattttctagttccaccaaaccaaaccaaaccaaaatggcagcagcctcagcctcatccatgatatcaacaccagccttatctccaaccatccaaaagcaccat

SEQ ID NO: 37607 - DNA, 279 bp, Glycine max
  unsure (1)..(279): unsure at all n locations
  Clone ID: 700945505H1
atatagcccaagccctatacaaccaaaccctaacacacacccatttgattcagtttccatggctagcctcaaggttgcatttttggctgcagtgctctgcatggttgtggtgagtgcacccatggcacatgcagctatcacgtgcgggcaggtgacgaatagcctngatcaattgcatcggttacctccagaacggaggaacgccgccgtcgggatgctgcaacggagtgaagagcctcaatgccgccgccaagaccaccgccgaccgccagacggcgt

SEQ ID NO: 37608 - DNA, 274 bp, Glycine max
  Clone ID: 700945506H1
ccgctcgagcggctcgagcggctcgagactgaactcatctcactacattaatattcccttgggcttcattaattgtgacatttagctttttttattgaaccgtgtcaatggccgctactatgaaggctttagcttttgttgctttgcttgttaccattaatgcaatagtgtgtgaaagtagagtggcgagaaaggaccttggattggaccttggtggggtgggaattggggtgggtgctggggttggactaggccttggtggtgggggtggtgc

SEQ ID NO: 37609 - DNA, 273 bp, Glycine max
  Clone ID: 700945507H1
gcaaaagttaagggatgagattgacagagttcttggagcagggcaccaagtgactgagccagacatccaaaagctcccatacctccaagcagtggtcaaggaaactcttcgtcttagaatggcaatccctctccttgtaccacacatgaacctccacgacgcaaagcttgggggctatgatatcccagctgagagcaagatcttggtgaatgcatggtggctggccaacaaccctgcacactggaagaagccagaggagttccggcctgagag

SEQ ID NO: 37610 - DNA, 278 bp, Glycine max
  Clone ID: 700945509H1
gcagaaacgagttcccatcgaattaatggaacaaatggctcaatttcaagattctattccacaaatctgaaattacttgatgcctttgatgatgagtatgggggagttgttgttcatccggataggttaccatccaacccatatacctttgcatctgtgttgcgtttgtctctttctcagtggaaaaagatgggaaagaagggaatttggcttaagtgcccttagaacaatctgatcttgttccaattgctgtgaaggaaggcttccaataccaccat

SEQ ID NO: 37611 - DNA, 276 bp, Glycine max
  Clone ID: 700945510H1
ggcactcagagctaagggaatcgatgaagatcctcgaaactatttgacattcttctgccttggcaaccgggaagtgaagaaaccaggagaatatgagccttctgagcaaccagatcctgattcagattatcagagagcccaagaggcccgacgattcatgatttatgtccataccaagatgatgatagttgatgacgaatacataatcgttggatctgccaatatcaaccaaaggtcaatggatggtgctagggactctgagattgccatgggtgc

SEQ ID NO: 37612 - DNA, 278 bp, Glycine max
  Clone ID: 700945511H1
ttacgctctctcactcacaaacgcacactgaattcaaaaacatcgaaagagagaggcatggccgagcaaaccttcatcatgatcaagccagatggcgttcaaagaggccttattggcgagattattagcagatttgagaggaagggtttttacttgaaagggttgaaactcgttactgtggaccgtccttttgctgagaagcactatgctgatttgtctgcaaagcctttctttagtggtttggtggattacattgtctctggccctgttgttgccat

SEQ ID NO: 37613 - DNA, 275 bp, Glycine max
  Clone ID: 700945512H1
atgctcactacttcttctcaacttcataggcctttcttattcttccttctaagaaaccacttcaaatcatcaacttccctagacttacacaccctttgggctgtaacaagcaatctgatcctcttgttatcattcagattgatttctcttctagcacctcgatcaaagggctaaaaaatttgctacttattgcacttttcttttcatggtttgatacatcttattgattttagtgctatttcaaggggtgaatttgagacatgggtttgagttct

SEQ ID NO: 37614 - DNA, 276 bp, Glycine max
  Clone ID: 700945513H1
tgctactgagtttccacactgcataccttaggtcttccgaattcgaagttaatttgcaagatggctaaggaaaaggctcagatcaacattgtggtggttggtcatgtggaccctgaggaggcaaccaccattaacgagctgaagaagcctgttgtggagaaagaagctccagggcatgccatatgagggcatgcacgtacggcctcggaggggaaccagaaaattatgttaacaaaataatctggaaccctaatgtatcagtgtcatcatcagtgt

SEQ ID NO: 37615 - DNA, 276 bp, Glycine max
  Clone ID: 700945514H1
cccaatgtgcgtctttggattctatatacacgggcagaagatctcctactttctgcgaccgctgtgggaaaaagcacccaagcctttcaatgtcatccctcattactataacgaaaacatcaccatggagaatctctgcagacttcatggctggggagtccgggagtaccctagacgtgtttatgatgccgtgttgtttagcaatgagttggaaatactaactttgcgctggagagaattgtacccttacataactgaatttgttgttcttgagtc

SEQ ID NO: 37616 - DNA, 277 bp, Glycine max
  Clone ID: 700945515H1
cctttattgccaggatctttaaaagcatctcgggtgtttcctcgtctaatattcctgagcttgaaagtggtgggactagtccaaagtccattagatgtttggctgaacctagagttgtaaggaggatcagaattgttgctgaacaaactcccattcagcacatacttcaacccccaacaatcgcctctctattggccatcatcattggcacagtgcctcagctgaaagctgtgttctttggatatgatgctccgttatctttcattactgacagttt

SEQ ID NO: 37617 - DNA, 281 bp, Glycine max
  Clone ID: 700945516H1
gtttgtttctctctatctatatggcagccttcatcctcatctccaagtccaagcttcaatccacagtacttgttcttgtcctaaacctatctttcttcttcctcttctgtctccttctaaaggcttattatctccaccctcctaactcaaattctcaatctaatggccccctcaaaaccttcaaccatgaaagattgttcagagatgttagtgttgaaggctgttgtgacctccacaagtactcagattatgagtccaaatgtttgtatgtgaagagccat

SEQ ID NO: 37618 - DNA, 148 bp, Glycine max
  Clone ID: 700945517H1
cgttctatatcactctcaactttactcctcttcaatcagttgcctattccttgctactccaatggccactgtcgaggttgtgtcagccaaggttgccctcccagaggacacaaaagaggcatcattgaaggttgacgaggagaagaac

SEQ ID NO: 37619 - DNA, 278 bp, Glycine max
  Clone ID: 700945518H1
cttagtttcaagaaggagaaagactctaaggttgtatgcaagaggaagctcacaaaggagcaagttgctcagttccgagaagcagttaagaaggactattatttccagatgtactatgatgccttgccgatctggggatttattgggacggttgacaaggaagggacaactgaccctagtgagtacaagtatattctttacaagcacattcagttcgatattcattacaacaaagatcgcgtcattgaaatcagtgcccggatggaccctcattctgt

SEQ ID NO: 37620 - DNA, 144 bp, Glycine max
  Clone ID: 700945519H1
cattttctttttttagtttcattgacgaaatataaaagtttctgaccgttcaatgcaaactcctgggcaagactaaaaggtagtttgaatgctgtgaaagtatggttggccttcaattttccaagttcctaagatgagccaaaa

SEQ ID NO: 37621 - DNA, 112 bp, Glycine max
  Clone ID: 700945520H1
agaagctccagaacattggagaaaactacatccgattttcgcgaagcaacgcaacgacggcgatgggagcgtccacttcggcggaccagcagtgtcggctgacagaaagacg

SEQ ID NO: 37622 - DNA, 256 bp, Glycine max
  Clone ID: 700945486H1
cgccctattgaaagagaagaaagagtttggcactgataatggcgggaaaggaaatctaactataaaaccctaaccctaaacccattcgaatcggaatcggaagaagataatgtcggaggcggaggagctaccccggtctattgtgcgccgcgtagtgaaggataagctgtcccgttgctccgaagacggagaaatttccgtcagcaaagacgctcttctcgcattctccgaaagcggtaggatcttcatccactac

SEQ ID NO: 37623 - DNA, 174 bp, Glycine max
  Clone ID: 700945458H1
gtaaatatgaaggatcttttggaagctgtagtcccatttgatatattgttggatcggagaaaacgggctaactatctcagtagtattgggaataatctagagacatgcacgaaaccaaaggttgttcaagatgctgggttagctttggcatcaatgttatgttccgggaatgga

SEQ ID NO: 37624 - DNA, 257 bp, Glycine max
  Clone ID: 700945460H1
aaacaattagagggtttaaattgattctttctggagaattagatggtcttcctgaacaagccttttatttggtaggtaatatcgatgaagctactgcgaaagctacgaacttagaaatggagagcaatttgaagaaatgactttaaatctttgtgtactgacccccaatcgaattgtttgggattcggaagtgaaggaaatcattttatctactaatagcggacaaattggagtattacgaaatcatgcgcctattg

SEQ ID NO: 37625 - DNA, 252 bp, Glycine max
  Clone ID: 700945461H1
cctggttccagtgaagcagatgagatctacaaaatatgcagtgtgataggtagtccaaccactgaatcttgggcagatggactcaaacttgccagggatatcaactatcagtttccacagcttgctagtgtacatctctctacactgatcccatccagaagtgatgatgcgatcagccttgtgacatcactttgttcatgggatccctgcaagagaccaacagcagcagaggctcttgaacatcctttcttt

SEQ ID NO: 37626 - DNA, 262 bp, Glycine max
  Clone ID: 700945462H1
gacgaaacttatctctcacaccgccggaaacttcgccggagtcttttgccatggcaaggcctccgctattctaccaatcgccccgccaattcttcccttctttgccgaacctctctttcgatctcgccacggtgtcttcttcgaagctctcggttctcttctctccttgctccactccggagcacgagatgcttaccgccagtttttcgtcgattccatgtcgctcattcaagatattctatacgtgtcttcactcagtgtt

SEQ ID NO: 37627 - DNA, 264 bp, Glycine max
  Clone ID: 700945463H1
gaggttttgatgcaacgctgtcactgagaaaggatctctatctacgaaggagcggaataaaacccttctctctgtgattaagagaatggcttcagatcggaaacttcacacttttgaggaggtggcaaagcacaaccagaccaaggattgctggctcatcgtttctggcaaggtgtatgatgtcacccctttcgtggaggatcatcccggaggtgatgaggttttgttatctgcaacagggaaagatgcaaccaatgactttga

SEQ ID NO: 37628 - DNA, 255 bp, Glycine max
  Clone ID: 700945465H1
ctagttcttagatcgtgtcgtgcgctgttcctctgtttctcgttgttgtgttcagaccgaaccctagctccgcatcgcaaccatgtcgaccaagcaaggtggaaaagctaagcctttgaagaaacccaagtctgataagaaggattacgacgagattgatgtggctaacattcagaagaaaaaggaagaggagaaggcgctaaaggagttgaaagccaaggcgcaacagaagggaagctttggaggtccggggcc

SEQ ID NO: 37629 - DNA, 260 bp, Glycine max
  Clone ID: 700945466H1
gagaatggctcccaagggtttaacctttctggctgtgttaatatgcgtttcagcactgtcactgagtccttctgttgcgggggaagggcaaaataatggccttgttatgaacttctacaaggaatcatgccctcaggctgaagacatcatcacagaacaagtcaagcttctctacaagcgccacaagaacactgctttctcctggctcaggaacatcttccatgactgtgctgttcagagttgtgatgcttcgactgttg

SEQ ID NO: 37630 - DNA, 257 bp, Glycine max
  Clone ID: 700945467H1
gtggactgcagcttctcaaagatggccagtgggttgatgtgcctcctatgcgccactccattgttgttaacattggtgatcagcttgaggttatcaccaatggtaagtacaagagtgtggagcaccgtgtgatagcacaaacagatgggaccagaatgtccattgcctcattctataaccctggcagtgatgctgtcatctaccctgctccagaattgttggagagggaggcagaatggaaaaaccagctctaccca

SEQ ID NO: 37631 - DNA, 255 bp, Glycine max
  Clone ID: 700945468H1
gtcgagccgagaaaatagattgtgttggacaagaagtgggccgaagcccatggatgatggtgtctggcttaaaggttaaacgaagatgattgaggatgtcatgatgcaagcgaggaagggaatcgaaggatctctctctctcatcacatgatcattcagcgagcaatagcatagtgtgaaatttgagtgagcgagcgaggaatcggaagaaaacgaaaccctaagaagaagatgccgaagaagatgggggtgaac

SEQ ID NO: 37632 - DNA, 234 bp, Glycine max
  Clone ID: 700945469H1
gcttgatgaattcgtgagtggtctatattttgaacaacgaattcttgaactccgacttcttcaagacctcgagaacaatgatgaatgtaggaaaaatgggagcctgaaaaggttaaatgaccagagtgatgtctgtggatttagaagttgcttcaaaaatcattatgattcgcttccgaatcggaggtgcttgaggagtcgagaagaagtgattggggatacgatggaaatgga

SEQ ID NO: 37633 - DNA, 255 bp, Glycine max
  Clone ID: 700945470H1
gcttctgtagttaatttgcttcccttttttcacactcactctcactagaatggcttcctctgttgctttagttttgggtctatgtctagcactcaacatggttctgccgacacgtgcagctgcccacacagtgggagacacctcaggttgggcactcggtgctgattacagtacatgggccagtggcttgaaattgaaagtcggagatagtcgtgttttcaattatggggctggtcacacagtggacgaagtgaa

SEQ ID NO: 37634 - DNA, 222 bp, Glycine max
  Clone ID: 700945471H1
actacctatgttccattgcaatgggtggaccttcacgtggggcgtggctgcacgtggtggaacaaacgtgtgccttcgcaccacagctgcacgtgacatatacaggaacatagtagtccacaatgtgacacacatgtgctgtgcccccgttgtgttcaacgtaatcttggaggcaagacaaagtcaaaggattgacataaaggtaataagtgggaagagaaa

SEQ ID NO: 37635 - DNA, 250 bp, Glycine max
  Clone ID: 700945472H1
ccacgcaccccctactacctttgttttgagtttgaggaatataagagaaatgaaaatgggtaaaggaattgtttttattgttgctctggtggccatttgccttggtgggaaatgggtggaagcgcaggtgcatcatgttgtcggagcagaccgtggttgggatcaaacctccgacctcgtttcttggtctgcaagcagagtcttcagggttggagaccaaatttggctcacttactctgtggctcaggga

SEQ ID NO: 37636 - DNA, 196 bp, Glycine max
  Clone ID: 700945473H1
gtttttcactccttctccctgtgtcggtgtactcttcttctgggggcattcgttttttggttcttcagctccaacttcaaacgcgcttttggtagaagaagcttcaccgggatcactggggtgtgtgtgagagagagggattacggattagtgagttttttgtcactaagttagagctacgtcgtttcatgattgt

SEQ ID NO: 37637 - DNA, 250 bp, Glycine max
  Clone ID: 700945474H1
ctcgagccgctcgagccgcttcgccggatgatttagagaaggcttacaagagagccgccattgagaaccaagctgacaaaggcggtgatccttagaagttcaaagagcttgctcaagcctatgaggttctgagtgaccctgagaagcgtgaaatttatgacacatatggagaagatgctcttaaggaaggaatgggtggtggtggcggtggccatgatccatttgatatcttcagttctttctttggtgg

SEQ ID NO: 37638 - DNA, 197 bp, Glycine max
  Clone ID: 700945475H1
agccttcaaacaattagagcatataacttggttgtggcaaattgtgaagcatgaggaccttacttgcagtactcttgtttttcttcatgatgacggtgaccatgctgcatgttggtgcagtcatcgtggagcatgagccaaaaacaaagacaaagcgcaatctactgagcgaaacttctcttggacgaaagggcatg

SEQ ID NO: 37639 - DNA, 254 bp, Glycine max
  Clone ID: 700945477H1
ctcgagccgtaattttttttctccattagattaccaagctctgcagctttgcttctcaacatgggagtatcgtctcctacccatttttactttactcaatattgcactggtggcaacccatgctgctttaccccctgaagtttactggaagtcggtgcttcctactacgccaatgccaaaagccgtcactgatatcctttactctgattgggtggaagagaaaagcagctcagtgcatgttggaggtggaggcg

SEQ ID NO: 37640 - DNA, 244 bp, Glycine max
  Clone ID: 700945478H1
cacacttgaacattgaggatgacacaactcaacaccctcaaagacaaggtcacaaaaaactcatgaaacgatgtgcttgcccactagcctctttacttctcctagcaatagtaatcgtagttttgatcttcacaatatttcgtgtcaagggccccatgatcacaatgaacagcatcaagatcacaaagctccaactggtcaacacgaccatggtgtcttggtgggggaggtaaaggacaactgg

SEQ ID NO: 37641 - DNA, 260 bp, Glycine max
  Clone ID: 700945479H1
taaatttcctattccccaaatgtcctccttagactgccaacccaatatagccattggatcgaattcagtctgaattcggtctaatggtttgggagttcaaattaagtctaaggaacagaattctgtacatatatatatttagaagatccacagggtgcttgatcagtggtgtatcaggatggacaaggtgacgaggttggcttctgaaaagggtgtggtgattttcacaaagagctcttgttgcctctgctatgcagtca

SEQ ID NO: 37642 - DNA, 258 bp, Glycine max
  Clone ID: 700945480H1
cactatccttgcttcttgttagacatggcaactactacactcatgaagcttgctttcatgcttctcatgaaccttgttatctgcagcgcagaatcttccatcggcagaaagtccaatcctaacccagaagagttcgtgaagtcctcgtgcagggcaacacggtaccctgttctatgcgtcaagtctctgttggcctacgcaagcgtgattcgccgaagcgaccgacaactagccacgaccgctctgtcggtaagcata

SEQ ID NO: 37643 - DNA, 258 bp, Glycine max
  Clone ID: 700945481H1
ggatctcttcgttccttcgattcgttccatttcttccaaaatggccaaagacccagttcgcgttctcgtcactggagctgcagggcaaattgggtatgctcttgtccctatgattgctaggggagtgatgttgggtcctgaccagcccgtgatgagccctctgatggataatacgatggatgaacttcattcgcaaggaaaaaccattgaagacattgtacaagttctgaacaggactccaatgcatcctcgcattgt

SEQ ID NO: 37644 - DNA, 257 bp, Glycine max
  Clone ID: 700945482H1
gaactttccaaagaaggttttgatagagctgaaacacaagagaaagatgataaacctgaggactccagtaactcattgtctagtgaagacagcaacagcaacgataaagaggggtccattgatgaggaaaggtcgtcaccaattgcacatgcggttaaggttgagcatgacactgacactggaaacagcttgaaggaaaatgaaaaccctaaagtgttgacagaagactcatgcatggacagcttggcttctgagag

SEQ ID NO: 37645 - DNA, 257 bp, Glycine max
  Clone ID: 700945483H1
tattcgtgtgtgtttgaagtggaagaaagagaacgcataacacagaacacagtgcagacagcaagtgatgacgtcgaaacagacatacagcgtgtgcttctgctggcggcggcggttcaagctggcgctggcggaggcgccgtcggaaatcaagaccctattcaatgagtactccgagaatgagctcatgacaccttcgcatcttaagagattcctggtcgatgtgcagaggcaacagaaggccactgaagaagacg

SEQ ID NO: 37646 - DNA, 254 bp, Glycine max
  Clone ID: 700945484H1
atctggagattcatactatggctctcacgtgatgcagtatggtgatgtacggcttagcagtgatgttctcttccattatttgggtacagatcctgctaatgataatttcacttttgtggacgaaaactccttatggtcaccttcaaaaccagtcaaccaacgtgatgctgatctcatccatttttgggataagttccgcaaagctcctgagggttctctcaggaaaaatgcagctcagaaacaagttttggaag

SEQ ID NO: 37647 - DNA, 197 bp, Glycine max
  Clone ID: 700945485H1
ctggacccttgggtgcctctacctcatagggcattgcttgtcctggtctgcttggcttgtgctccaagcacctgtactcaagaagtacccagctcgcctctctgtcacttcctatacgtgtttctttggactcatccaattccttgtcattgctctgatcgttgaaagagatgctcaggcttggattttcgaatctg

SEQ ID NO: 37648 - DNA, 205 bp, Glycine max
  Clone ID: 700945457H1
actacatagaaaaataaaaccaaacctttcttcctactactcccattcccacatttcgacaacatggacgaggacttcgacatgccgacggcggaggcaatgggcgaggacttcgacttcgccggcgccaccggcggcgacctcgacggcagcagcagcaaccccatcttgagggtcggcgagtataaggagattggaaaagggg

SEQ ID NO: 37649 - DNA, 223 bp, Glycine max
  Clone ID: 700945428H1
agagatgaagaattagagagagtgagaggaggaagaagaagaagaagattccagaatccagagtgagaaacattaggcttatcagaggagacatgcccgagttgaaccgacaattctattactactctttgcttctttcttcatgcctcatcaaatcccaaaggatataattgaaggttttgggaactaaggctgcaatattgtatacattctactcagggaa

SEQ ID NO: 37650 - DNA, 242 bp, Glycine max
  Clone ID: 700945429H1
cccagttgagctgaaaaattgtggaacggaacatttaggggagaaacataactgaagggagacaagatccgagaagagaaaccgtgatcgaacacttgagttactgttaccgttatttgtagttatcatagtaaattgttgttccgaatttcgtttgtgctgtcaagaggcgtttgttgaaaagggacggttcccaaagactggaagataaagagggggccttagtgggtcttcctctgttg

SEQ ID NO: 37651 - DNA, 147 bp, Glycine max
  unsure (1)..(147): unsure at all n locations
  Clone ID: 700945430H1
ttagagcaatacttcaattcatatacaccaaacacatatactatcttcataagcacattactcaaactaatagttttctacaataaaatttaactattantcnnaatctacatctccataagattaacactatccgtactctcatca

SEQ ID NO: 37652 - DNA, 267 bp, Glycine max
  Clone ID: 700945432H1
tacacacagttgaggtggttggttcgcgttctcgggtaccggccattaacaaaatattgacagagtttttcaaaaaggagcctaggcggacaatgaatgctagtgagtgtgttgctaggggctgtgcgttggaatgcgcaattcttagtccaacgttcagagtacgagaatttcaggtcaacgaaagcgttcctttctcgatttctctttcatggaaaggttctggtcgagatgcacaggacaatggatcagaaaatcagcagagtt

SEQ ID NO: 37653 - DNA, 267 bp, Glycine max
  Clone ID: 700945433H1
ctttctccgagaacaaaaaagaaaaaaaaaaaaatccgcgattggcccttcccttggaaaagtgaaacccaaaattacgaccgaaagagaagagcgttttagaagtgagaaaagatggggttgtcgtccacgaagctgttcagcgggttttttccgaaaaaggaaatggggatcctgatggtaggccccgatcctgctggaaggacaaccatctttaaaaaccccaaccttggaaaaatcgtcacgattatccccacaatgggtttt

SEQ ID NO: 37654 - DNA, 137 bp, Glycine max
  Clone ID: 700945434H1
gctttgccattcctcccaaccagcatctatcttcaggtagttggtattactagtgagtaaacctttgtattcttttgtagctgcttccaaagggttaataaccagctgcaaatcaattattgttgactatattattg

SEQ ID NO: 37655 - DNA, 249 bp, Glycine max
  unsure (1)..(249): unsure at all n locations
  Clone ID: 700945435H1
cttcatttttcaatcacacatggccatgccaaaacacaaacaccatgttcacaacactcccaacacattcaaatctaccaccaatcaacaacaacaaaaacaacaatatcaacaacttcaagctcatcaacaacaacaacaacaacaacacactcagcttcctctaaacctaccattcttcttctacccaacaataccatcaacctttnttntatctnatnctcttnaaccctattttcccatcatata

SEQ ID NO: 37656 - DNA, 264 bp, Glycine max
  Clone ID: 700945436H1
aatgatctaagggtttctggaaaaaaaggacagttacaaggaagtcaggcatatatagtttcaagaaggcccatgaaagggcatggaagggagatgattcagttgggtgttcgaattgctgatgccccagcagaaggggaaaatatgacaggagcctccaaagatatgaatgtagaatctgttccttccttgtttcaagatattattgagcgtatggtttcctcgcaagtgatgactgtgaagcctgattgctgcgttgtggat

SEQ ID NO: 37657 - DNA, 251 bp, Glycine max
  Clone ID: 700945437H1
ccatctctgatctcactcaccattcaccaacctgcttctctgttctcttctttcccttcccaagaagaagaagaagaagatgccttcttcagaatcatcaacaggcttctccgaaaccatttgtgtgaccggcgctggtggcttcatcgcctcttggatggtcaaactcctcttggagaaaggctacactgtccgaggaaccctcagaaacccagatgatcccaagaacgggcacttaggagattttgagg

SEQ ID NO: 37658 - DNA, 262 bp, Glycine max
  Clone ID: 700945438H1
cacccgccttgctagtattccgggtcgtaatgagtccttttggaaggaacttgattatgtcaagaatttatggaagaacaggaaagagctaaaggttgaagatgcaggcattgctgctttgtttggcctggaatgctttgcgtggtattgtggtggtgagattgttggaaggggatttactttcaccggttactatgtctaataataaccacttggaaagtgtagattttatcggggccatatactcctaaagccaactgct

SEQ ID NO: 37659 - DNA, 247 bp, Glycine max
  Clone ID: 700945439H1
cctaacctatcaaacttgaagaaataggggttcgggtgccaactattatggtctctccttggatcaagaaagggactgtgataagtggcgccaaaggacctgctgaaaactcagaatttgagcactcttcaattcctgcaaccataaagaagatgttcaacctttctgctaactttttgactcacagagatgcatgggctgggacctttgagcatgttgtgggggatttaggttcacccagaacaga

SEQ ID NO: 37660 - DNA, 236 bp, Glycine max
  Clone ID: 700945440H1
acaggctgctaagagcattgtggcaagtggacttgccagaaggtgcattgtgcaagtgtcttatgccattggtgtgcctgagcctttgtctgtgtttgttgacacctatggcactgggaagatccatgataaggagattctcaacattgtgaaggaaaactttgatttcaggcctggtatgatctccatcaaccttgatctcaagaggggtggaaataacgggtttttgaagactg

SEQ ID NO: 37661 - DNA, 210 bp, Glycine max
  Clone ID: 700945441H1
ttcagccgggcatcctgttctcctgagtcgtcagtttgcagagaggccaagaaagggcttgctgagagatgggccgtgatgtcaaatgagggttctcaaggacaaaggcatgtgcgtagaagctctaccgtgggtgagatgcttgctctttcgggtgtagggagatctgtaatatctgagcttgggggtattcatgaagaacgggagcca

SEQ ID NO: 37662 - DNA, 217 bp, Glycine max
  Clone ID: 700945442H1
gttttaatgtctcttcgaggcgttggagtgccttcaagcttggttgcacctccatggaccctcaagtagaattctcatcatcacttcactctgcctctgagatcattaggaaaaagaaaattactgggcggcaaaagagagaggaacttgaaaaggaggtcgctatgcttcaaaagttgttggaccaagaagaaaagtttcatgagattttggagat

SEQ ID NO: 37663 - DNA, 243 bp, Glycine max
  Clone ID: 700945443H1
tgagtggtgagggcaagatcacagaattggtgtgagagagatgggttcgttcgtgaagctttcaaggagggccttggaaactgagatgcccgttatggttcagatgcaggaattgctccgaggagctaagaatgccgtgtctttggcccagggggtggtttattggcagcctcccaagcaagctttggaaaaagtgaaagatcttgtatctgagcctttaatggatcgtgatggtagcgatga

SEQ ID NO: 37664 - DNA, 228 bp, Glycine max
  Clone ID: 700945445H1
gctcgagctttcttcttcttctgttaaaagagccgttgctttttctttaggcgtttccgaattaagtacttgtgtcattttctctcgaagcaagaaaaatgttcatcgagagtttcaaggttgagagtcctaacgtgaagtacacagagactgagattcagtccgtgtacaactatgagaccactgaacttgttcacgagagcgataatggcacttatcagtgggttt

SEQ ID NO: 37665 - DNA, 265 bp, Glycine max
  Clone ID: 700945447H1
gttgctgctttacacgatgtagtttacaatgcatacaaaaagattgagcctaagccactagtcattgcaccaggaggtttctatgatgcaaactggttcaacaaatttataagcaaatcaggaaaatctattgatgtggtcactcaccacatttataaccttggaccaggagttgatgaacaccttgtggaaagaattctggacccttcctatcttgataaagaggttagcacattcagtggcctaaaaaatatacttgcaggta

SEQ ID NO: 37666 - DNA, 264 bp, Glycine max
  Clone ID: 700945448H1
cattttctagcttccaaaccctaacactcctcttcctcttcgatcatcacctctccacaatgccgccgaagttcgacccctcccagatagtcgacgtcttcgtccgcgttaccggcggcgaagtcggcgcggcgagttccctggccccgaagatcggtcccctcggtctctcccccaagaagatcggagaagacatcgccaaagaaaccgccaaggactggaacggcctccgcgtcaccgtcaagctcaccgttcagaatcgtc

SEQ ID NO: 37667 - DNA, 259 bp, Glycine max
  Clone ID: 700945449H1
ctcatttaggcatattcacaagattagttctaatggctgggattgtggtgatttttgacttcgactcgacaatcatcgagtgtgatagtgataattgggttcttgacgagtttggtttaacagaaaagttctatcagcttcttcctaacatgctttggaaccctctgatggataagatgatgaatgaacttcgttcacaaggatgaaccatagttagataaagactcattttggcggaaaaattccggatcctgatcct

SEQ ID NO: 37668 - DNA, 258 bp, Glycine max
  Clone ID: 700945450H1
gcttttcaaagatgttggagctggtttcagttagtagacaaatttggttgctgaatttcgtgttcatgtgtcttcaatagatggtatttttgaattgaaagcatagtgacaatttcttgaatgttgtttcttgacttttgagtttatctccaagacttcaaataagttggctctctcctacaatttcttaaatgcttatgttcgatattgagaatcaaacaagacttggtctgaggcacaacacgtttttgaattttg

SEQ ID NO: 37669 - DNA, 256 bp, Glycine max
  Clone ID: 700945451H1
ttgaaatgtaagaagtagtactgagaactgaactcaactaactcgtgactcgtcagagagaagaaaagaatatcgttcgttcgctcttaccttcttcaccttccttcctctctctctctgtactatgtaaccgtgatccggaacttcgacttctcggaatccttctcagttgtcttgggtgaatctgtctatgaatttgttattagcgtatcaaagctttggtgtggtgtattgaggtctgagcattctcctctct

SEQ ID NO: 37670 - DNA, 243 bp, Glycine max
  Clone ID: 700945452H1
ctagggttatcatttctccatttccattttctctctcacttttcaagaatcgtaagctatgggaaagtcttacccaactgtgagtgctgattaccagaaggccgttgagaaggcgaagaagaagctcagaggcttcatcgctgagaagagatgcgctcctctaatgctccgtttggcatggcactctgctggaacctttgacaagggcacgaagaccggtggacccttcggaaccatcaagca

SEQ ID NO: 37671 - DNA, 260 bp, Glycine max
  Clone ID: 700945453H1
ggaccacctcaccctccccctccattactcccactgcatcttcttcaaattcctgtcctgaagatgacagcaaagtggtatctcattgtgtgtgttgtagcgatctgggccgttgatctgggttcatcatcacaccatgcccgtgccccagcaccagcaccgtcagtggagtgttcaaacctggtattgaccttatcggattgcctcaccttcgttagcaacggcagcaccgtcaccaagccacagggaacatgctgctc

SEQ ID NO: 37672 - DNA, 258 bp, Glycine max
  Clone ID: 700945455H1
caaacaaacactcccattttctctctttctctttctctccgacctagcgagaccgagcgatccgatcctaaccccgcgatgctccgccgcgcaaccacctccctcatctccggcgcctcccgccgccgcctctccaccgacgtgccggcgacgccgcggcggattccgtcttcgcggaggcgtggaacaaagtgagccccaacatcgacccgccgaagacgccgctggcgtacatgaacccccgaccacccactcctt

SEQ ID NO: 37673 - DNA, 260 bp, Glycine max
  Clone ID: 700945456H1
aggacttcttcgagctctcattggaggcttatggaatcaaacatctcaaaacatctgggagcgtttctcacttcgttgatgatcacggtgcttacaaggtgacaattgtggctatggagcattatgagccaccagtactagcttgtgctcttaatgaggttcttaataaaattactgaagataaatcttccttgatacctacacttttggtaccatttttggtggaatcgtccaaggttaaagggcacagtaaatcccta

SEQ ID NO: 37674 - DNA, 264 bp, Glycine max
  Clone ID: 700945427H1
gctgaatctctgaaagattacgaggaggattttgaaaatcctgaaaagaagcccagaaggaacaagtacgctttcgcatgtgctattttggcttcaatgacttccatcctactaggttacgatattggagtgatgagtggtgcagcactgtacatacaaagatatctcaaggtatcggaactgcaaatcgaaatcctgaacggtatcataaacctctactctcccgtgggttctttcatcgccggcagaacctccgactggata

SEQ ID NO: 37675 - DNA, 255 bp, Glycine max
  Clone ID: 700945401H1
tgaagacaatgctatgatgagacccttgaaaatcatcaagtgatgtttctcaacgaagccatagaatggaaacatgtgcagcaacttagttatactcaacgaaggaggatatgtggagataagtagataaatgttattataagctctgtcatttgtcagaacttcagatcgtggatgtgggatagagttgggtgggtgggtggtgtggtgttgggaagtagggaagggtgagtcgtggagtgggtgggggggggg

SEQ ID NO: 37676 - DNA, 282 bp, Glycine max
  Clone ID: 700945402H1
gttcggctcgatcgcggaagctactcaaggtcttacttacagggacgccggcgtggacatcgacgccggctccgaactcgtgcgcaggatagcgaagatggcgccagggattggaggcttcggtggtttattccctctcggtgactcgtacctcgttgctggtaccgatggcgtgggaacgaaggtgatgcttgccttcgaaactggaatccacgatactattgggattgacctggttgcgatgagtgtgaatgacattgttacttcgggggcgaagctttg

SEQ ID NO: 37677 - DNA, 263 bp, Glycine max
  Clone ID: 700945405H1
tcaccaacaaggttgtgcaacaataccgccatggatgggaatcggaggctgccgccgtcgtcgaggacgtcaagaaaaaccccgacgccgccgtctccggcaccgtcatccgccgccgccttcagctcatgatgtacaacaacatgtaccgcataatgttcgaccggaggttcgagaccgaggaggatcccatcttccggaggctaagacccttgaacgcagagaggtctcgcttggcgcagagctttgagtataactatggt

SEQ ID NO: 37678 - DNA, 269 bp, Glycine max
  Clone ID: 700945406H1
cagaactagatctagggtttattttccttttcattttgaatttgaacaagttttgcgtcttcaaagaaataggatgggagaattgaaagacactgaggcttacgaggaagagctcatcgactacgaagaggaagaagaaaaagctcccgattctgctaaacccgttgctgaatctggcaagaagggttatgttggcatcgatagttcgggatttcgagacttcctgttgaaaccagagcttcttcgagccattggggattcaggatttg

SEQ ID NO: 37679 - DNA, 269 bp, Glycine max
  Clone ID: 700945407H1
caaacagctggacggaatccattgacttgtgatttctcgcaaacagccatgttgtcaacgaataatccaagtaagttcctatttgatctatgcatagtatgtgttcatatctcaaaccttttttattctctagtgtgaagcatagaaactgaataattatgagagagattatttaagttatgagtttaggactctcagcaccacgctatacatgcattgcatgaaactttgatgttgtacgtcattcttcaaaatatcatttgatcttg

SEQ ID NO: 37680 - DNA, 261 bp, Glycine max
  Clone ID: 700945408H1
cctccccctcctccaccttcgtcctccaccgcgccttcggctcccgccaggtcttcacggcgaaccccaccgttgtccagcacattctggggaccggcttccctgtgtaccccaagggcctgactctgaatcgggcccttggagacttcctcggccagggtatcttcaactcagatggcgctggatggaaagttcagcgccaaatttccagccacgagttcaacactcgcgctctcggcaagttcgtcgagaccgtggtcg

SEQ ID NO: 37681 - DNA, 248 bp, Glycine max
  Clone ID: 700945409H1
ctgggtttgatgatttcaatggagcttcattttctggggctgtagttaacttgtccaccacaattattggtgctggcatcatggccttgcctgcaaccttgaaacagttggggatgatacctggtcttcttgccatcatcatcatggctttgttgacagagaagtcgattgagcttttgattcggtttacccgggcagggaagtctgtttcttatgctggtctcatgggggattcctttgggaattat

SEQ ID NO: 37682 - DNA, 212 bp, Glycine max
  Clone ID: 700945410H1
ctacccctttacatcccttcctcttgttgcatattgtactttgcgtgcaatttgccttctcacaggaaaattcatcataccaacgctttcaaaccttgcaagtgccctctttcttggacttttcctgtccgttatagtcactagtgtgctcgagctgcggtggagtggtgtgacgattgaggctttgtggcgtaatgaacaattctgggtta

SEQ ID NO: 37683 - DNA, 194 bp, Glycine max
  Clone ID: 700945411H1
atcatattatctgaacttctggtagaaaatggcagctgaagatgataggaatcttgtcgaaatcatggaaaccctgaatccaatagatgttgctaaatacatgaattttgttggtgccccccaagctggtgctatagctacattttcgggcacaactcgcgacacctttgagggaaaaacaatcgtggatttga

SEQ ID NO: 37684 - DNA, 220 bp, Glycine max
  Clone ID: 700945412H1
acagcatctgctaccagtgttcgttgtacagaaaataacttctaatagccaaattgtggatatttatcaatgaagataacaacaactgaagttatttctagccgttggagctcacagtaaattgcttttaacgtgttccatcaaaaagttggtacaaatccctgtaatcttcatttttggtaaaaatcctagtaatcttctgatggatcaaacgggggtc

SEQ ID NO: 37685 - DNA, 206 bp, Glycine max
  Clone ID: 700945413H1
gccaaaatgacaatttcaccctctctgaccttaacacccaccaccccgagaatcaccgcaacaacccacacttcccacacttcccacacttcccaccccacctatctcaaactcaatcctatttccagaccttcccctctacgcgccttcgtccccctcacatcacgcgcccccactcgccgctgcccctcaacccccgcatgcct

SEQ ID NO: 37686 - DNA, 269 bp, Glycine max
  Clone ID: 700945414H1
gcaaaattctcttccgtttcaggattagggtttcaccgttacagtgaaacatggcaagaccaaagcgaatctctctgcgtatctttgcgctgctcctcttgatttccacctcttcgtttcaggttctccgcgcttccgatgacgccgatgatgatgcgatcttctatgattcgttcgacgaggattttgaagaccgttgggttgtgtctcagaaagatgagtacagtggtgtctggaaacatgccaagagtgagggacatgatgattat

SEQ ID NO: 37687 - DNA, 263 bp, Glycine max
  Clone ID: 700945415H1
cttacttacacgagttgaattgactcactaggcaccccgagtcgagagttataactcgttcgctctttccttacactcacactctgtctctctttcttcttcaaacttccctcgtcatgattgccaattctctttactggtaaccagatcctccaaaaatgatgaatcacgattccaacaacgaacaacatgagattctccatgtctcgcaggacgacgagataatggaatcgctaatcctcgatgacgacggctcttccgtt

SEQ ID NO: 37688 - DNA, 266 bp, Glycine max
  Clone ID: 700945416H1
gactacattagtgagattattagagaaggcgctaaaggagttgaaagccaaggcgcaacagaagggaagctttggaggttctgggctcaagaaaagtggaaagaaataacggctctttatcatgattgtatacatccaatattgagccctgtagtttattaccatgataacttctgtcttattgtggccttctttattgctctaatgttagtactgaactgaggtattacgtgatgtaagctgcaacaagttacttgtttgtagct

SEQ ID NO: 37689 - DNA, 281 bp, Glycine max
  Clone ID: 700945417H1
ttcggctcgaggaggaagcagaaatgccacggggaggctgcaggatgctcattggatgttgatgatggaaggttcaaagtatgctgaaaggttgccaattggactagagagagtgattcggacagtttcgtccgagactgtgaagcatttttacaagaagtggtaccatttatgcaatatggcggttatagcagttggagatttttctgatgcacaggatgtagttgagttgataaagactcattttggccagaaaattcccgatcctgatcctccactta

SEQ ID NO: 37690 - DNA, 251 bp, Glycine max
  Clone ID: 700945418H1
tctttttctacttaccttttctcttaatccaaatacgatggcagccatggcaaccacaaccctctcttcaaaccccaaactctcattcttcaacggaaagcccgtcacatattcttcccgcgtcgcgcccaccaccaaattatcctcatccaaacaaggcacaattggcatgtccctaaccccacccccctacgacctccagtccttcaaattccagcccatcaaagactggatcgtgtcacgggaaatga

SEQ ID NO: 37691 - DNA, 257 bp, Glycine max
  Clone ID: 700945419H1
gtctctctctgtgtctctctctctccacacttagattttgtgaatggctgaagtggaagagcgacaggtcatcggcgtccacaccgttgatgagtgaaggctgcaactccagagtgcgcaagactccagaaaactgattgtggtggagtatactgcgtcctagtgtcgtcgatgccgttttatcgccccagttctcgcacagactgcagaggaaactcgtgaattgatcctcctcaaagtggatgtgcgagaagtga

SEQ ID NO: 37692 - DNA, 261 bp, Glycine max
  Clone ID: 700945420H1
caggaactttgttgctgatgctgctatcataactgttcctattggaatcctaaaagcgaatttgattgagtttgaaccaaaacttcctgattggaaggtttcagcaatttcagatcttggtgtgggcaatgaaaataagattgccctaagatttgacaaagtattttggcctaatgtagaactcttgggcactgttgctccgacctcttatacctatggcgataccctaagacgaagatgccgaacaagatgggggtgaac

SEQ ID NO: 37693 - DNA, 255 bp, Glycine max
  Clone ID: 700945421H1
atggcatgaatctctcagcccctcaaaccttccgctctaaggaaatctccaagagcaatgttgttgacgatatggtcaacagcaacgccatcctctatgagcccggtgaacatccagaccatgtggttgtcattaagtacgtgccttatgtaggggacagcaagagggccatggatgagtacacttctgagataagcatgggtggaaagaacacaattgtgttgcacaacacatgtgaggattcactgttagctg

SEQ ID NO: 37694 - DNA, 266 bp, Glycine max
  Clone ID: 700945422H1
ctcgagccgctcgagccgcgaaaagtctagaccctgtcgtgtaacataaaaaccaccgaagaaaacatcggtgcgccgcgctgccacaccgaacaaacacaaacatggatgcatccaaactcaatcaattgaagcgtttcatcgaacagtgcgagtccaacccttccctcgtctcggatccttcactctccttcttccgcgactatctcgaaagtctcggggcgaaactccctgaatctgcttattccgaatcgacgggcgtggag

SEQ ID NO: 37695 - DNA, 257 bp, Glycine max
  Clone ID: 700945423H1
actagttctagagagaatcgaaggcgacacacagcttgcatccgattccgagaagaagacgaggcttctctttcgaatacaatctttctgctacatgatgttgaacaaatgatacagaatttattctgtgcacagaaattctggtacatatgacaggacttatgcctggggagttgccacatcatggaacacctgatggcaactctggtaaaagttctcaagacaagcgagaggaatcattaggtcgctggtatatg

SEQ ID NO: 37696 - DNA, 264 bp, Glycine max
  Clone ID: 700945424H1
atttttctcactgtcttgtctctccagagaactgtatagagagagatggcagctgcaacatctggtgctgtgttaaatgggttgggatcttccttcttgagtggaggaaacaggagccaaacccttctggccactgctattggaggcaaagttggtgctgctgctgttactgttagtcctagaagactcattgtggtagctgctgctgcaccaaagaagtcatggctccctggtgtcagaggtggtggcaacctcgtcgaccca

SEQ ID NO: 37697 - DNA, 224 bp, Glycine max
  Clone ID: 700945425H1
tttcttgtttcggttgtgttgcagctctgacacggaatgggtgctgcctgagcttttattctgttttagtgttgttgttgatcttagtggagctgggatgtgcagcctttatattttttgacaaaagctggaaagaagaaattcctacggacaaaactggagattttgatatgatatatggattcctgagagagaacgggaatattgtgagatgggttgctctg

SEQ ID NO: 37698 - DNA, 183 bp, Glycine max
  Clone ID: 700945426H1
gttccaatatattccattctctctgtgtatttccctacctctcccttcaagatgcagatcttcgtcaagaccctcaccggcaagaccatcacccttgaggtggaaagctctgacaccatcgacaacgtcaaggccaagatccaggacaaggaaggaatccccccggaccagcaacgtctgatt

SEQ ID NO: 37699 - DNA, 234 bp, Glycine max
  Clone ID: 700945396H1
ccgatgttatcaccattgagaactctcgctccgacgagaagcttctgtcagtcttccgcgaaggtgtgaagtatggtgctggaattggccctggtgtctatgacatccactccccaagaataccaccaactgaagaaattgctgacagaatcaacaagatgctggcagtgctcgagaagaacatcttgtgggtgaaccctgactgtgggctcaagacccgtaagtacactgagg

SEQ ID NO: 37700 - DNA, 264 bp, Glycine max
  Clone ID: 700945363H1
gccaaaattctcttcctcggtctcgataatgcagggaagaccaccctccttcacatgctcaaagacgagagattagttcagcaccagccgacccaacaccccacttcggaggaattgagcattgggaagatcaagtttaaggcttttgatttggggggccatcaagttgcccgcagagtctggaaagactattacgcaaaggtggatgcagtacgtttacctggttgatgccttgacaaagagacggtttcagaatcaaagaag

SEQ ID NO: 37701 - DNA, 253 bp, Glycine max
  Clone ID: 700945364H1
ttctcaacctactctgacaaccagcccggtgtgttgattcaggtctatgaaggtgaacgaacgaggactcgtgacaacaatttgcttggcaaatttgagttatctggaattcctcctgctcccagaggtgttcctcagatcactgtttgcttcgacattgatgccaacggtatattgaacgtgtctgcggaggacaaaaccactggacagaagaacaagattacaattaccaacgacaagggcaggctttcta

SEQ ID NO: 37702 - DNA, 300 bp, Glycine max
  Clone ID: 700945365H1
tagtaactcggaattcggtcggcattcgagttctgcgctttatcgcatctcagaggccaattctttcgccgcttcttctctctttccaacgcttccccctgtggtgttctcgtgttgctggtaacaatatggttgttgacgctttgaatgaggatttgagaatcaacggagcagttgaaccgttgcctgaggactttgatgcaacagctgtaatcatagatcccgtgcctttggcagttgtagacaatggcattgtcaaggaggaggcgcagatcattaaaggaaaagagaaaagagaat

SEQ ID NO: 37703 - DNA, 244 bp, Glycine max
  Clone ID: 700945366H1
ttggtggatttccttgtgggggccggcatcaagccaacatctatagtgagttacaaccatctgggcaacaatgatggcatgaatctctcagcccctcaaaccttccggtctaaggaaatctccaagagcaatgttgttgacgatatggtcaacagcaacgccatcctctatgagcccggtgaacatccagaccatgtggttgtcattaagtacgtgcctaatgtaggggacaacaagagggcca

SEQ ID NO: 37704 - DNA, 190 bp, Glycine max
  Clone ID: 700945367H1
cgccaccgcagtcatcccgtccccgctgcccccgcagccgatgtctgcccatccgaccaagatttggagtctctgcgatccgaaaatcgacgtctcaggaacttactcgaccagaatctgaaattgctgcaaaacctctctgaggcgacttgcttcgataattgccctcccgatttgattgaccggtaag

SEQ ID NO: 37705 - DNA, 257 bp, Glycine max
  Clone ID: 700945368H1
gaaagggaaacttcccaaagatgctaggcaaaagctacttaactggtgggaattacattacaaatggccatatccttcggaatcagagaaggtggcattggctgaatcaactggtttggaccaaaagcaaataaataactggttcataaaccagaggaagaggcattggaaaccatctgaagacatgcaatttatggtgatggatggcctgcatccgcagagtgcaactctctatatggatggtcactacatggcag

SEQ ID NO: 37706 - DNA, 257 bp, Glycine max
  Clone ID: 700945369H1
atcctatgcacacagtgaagatgacctggcaagaatcccccatagtctagctgggaggagtacggtggagagtccttctcaagacttttcaaattctcattttggaaaaagttttgaagcagatgcagaaacacacagaagttttgatgaatcaacctggggtgcatttgacaacaacgatgatgtggactcagtgtggggttttaacaccaagaccaaggactctgacttcgagcagagagatttctttaaatctg

SEQ ID NO: 37707 - DNA, 258 bp, Glycine max
  Clone ID: 700945370H1
gctgaatctctgaaagattacgaggaggattttgaaaatcctgaaaagaagcccagaaggaacaagtacgctttcgcatgtgctattttggcttcaatgacttccatcctactaggttaatatattggagtgatgagtggtgctgcactgtacatacaaagatatctcaaggtatcggacgtgcaaatcgaaatcctgaacggtatcataaacttctactctcccgtcggttctttcatcgccggcagaacctccgac

SEQ ID NO: 37708 - DNA, 258 bp, Glycine max
  Clone ID: 700945372H1
caggtaacagcaccaatttcccaccagcgccaccaccatcatcatcttcaccgccatgttcctcttcttcttctggcaccaccaccctgagccgctacgagaaccaaaagcgccgcgactggaacacgttcgggcagtacctccgcaaccacaggcccccactctcgcttgcacggtgcagcggcgcgcacgtgctggagttcctgcggtacctggaccagttcgggaaaaccaagggtcacacgcagctttgtccat

SEQ ID NO: 37709 - DNA, 254 bp, Glycine max
  Clone ID: 700945373H1
ctcgagccgtttgcagtaatgggtgctctggatcacatatcggaactctttgactgctccagtggcagttccaagcacaagaagcgcaacaattgcagacggtggaggtgaaagtgaagatggactgcgaaggatgcgagaggaaagtgaggaaggcggtggaggggatgaaaggcgtgaaccaggtggatgtggagcgtaaggccaacaaagtcactgtggtcggctacgtcgaggcctctaaggtggtcgcc

SEQ ID NO: 37710 - DNA, 208 bp, Glycine max
  Clone ID: 700945374H1
attaatccttgatgagattggatgtttagatcactgccaacatcaattatatgctcatttgcctgaggtggctggaaatcttagcaattgtttgatttcaaaacgggatgtttgtgaagatggatgagctttgagcatctttggaatagtttactgctttctggtcacataagcacctgtacttagtgtatacttagtatattatcct

SEQ ID NO: 37711 - DNA, 254 bp, Glycine max
  Clone ID: 700945375H1
ggaaggttggtgttctcactgcggtcatcaagcatatgtcccctgatattgccaaaattcgcaagcttgtgaggcagtctaagtgtcttcaagacaaaatgactgcaaaggaaagtgcaacctggcttgccatcatcaaccaagaggaagccttggctagagagctttaccctgactattgccctccattttcctctgctggaggtaatggatccttggtgatcaatgattgcagcgagtatgatgttgatggg

SEQ ID NO: 37712 - DNA, 256 bp, Glycine max
  Clone ID: 700945378H1
tgatgattctgttacaagcagcttgaagaatgaggcacatacacagtttgctcatacttttctgcggtttggaatgctttggcaagagaaaatactactgcaatttatgaaactggatcactggaaggtacatgggtaagtcacaccacgccccatgacagaaaagccaggaaagatttgagaaagcatgagatttcagctaacgaggccattagagaagcattatctgtgtatgagtcgctcggtgaactgcgca

SEQ ID NO: 37713 - DNA, 252 bp, Glycine max
  unsure (1)..(252): unsure at all n locations
  Clone ID: 700945379H1
gtccaagaagatgttggaggagacactcaggtggagatcaacctataagccagaggaaattcgctggcatgaggttgcaatggaaggagagactgggaaattgtatagagcaagttttcatgatagacaaggaaggactgttcttattttgagacctggaatgcagaacactacttcaatggagaatcagttgcggcatcttgtgtatcttttggaaaatgccatgcttaatcttcaccgggncaagaacaa

SEQ ID NO: 37714 - DNA, 247 bp, Glycine max
  Clone ID: 700945380H1
ctcagtctctgcacacacctcagaagaacagaacagaaccaccagtgcttttcaaagacggtttcagcaatggcgttcttaaataaaattggaaatctggtcaagaattctgctgtcaagcacatcaatcaagatttttcagtgtctaccccatcacttttccaagcaattagatccatgtcatctgcaaagctttttgtcggaggtatttcttacagcactgatgatatgagtttcgggagtcttt

SEQ ID NO: 37715 - DNA, 215 bp, Glycine max
  Clone ID: 700945382H1
ctggaaactcggttgaactcggtgtgtgtagaaatggcgaaacttgaagccaagctagggatgatcttggactcggtgggtcagttcttctccggcaaggaccatcttccttattgtgactctgacgtcgtagctggatgtgaaagagaggtcttggaggcagaaaaacaatcatctcaagagtatatgcaagactggctcctgcgtttatcatg

SEQ ID NO: 37716 - DNA, 197 bp, Glycine max
  Clone ID: 700945383H1
ccactttccggcgaaacatggccgtcgccgtcgccggccgccagaagccgagctccgacgcgagcctcttcacgctctgccccttctggagctcgcgcaacgctactcaaaggtccaccaaaacggtgtcgtccgtcgccaggtcgctgctccgtccgcgccggaaactccgcctcgatccttccagttacctctat

SEQ ID NO: 37717 - DNA, 256 bp, Glycine max
  Clone ID: 700945385H1
caaagacacagagtgcgttcgttgacgacaaacacacacaaacacacaacaaaagctcgccggaaaatctttctccggcgacctggaattccgacgaaggtagttgcggctccttcgtcccgaaactgaggccctcaaagtataaactttggtggtggtgggtaggatctggcggtgtatgatgggatcttgcatacgcccgttggagactccggcgaggttgctttggaccacaagcttcttccgtcataagctt

SEQ ID NO: 37718 - DNA, 240 bp, Glycine max
  Clone ID: 700945386H1
aaaaaaatcattttcctttaaacttcaaatttagagttctctctctgattcatccccagcaatggcttgtgcattgcaagcaaccttagcagccaacgcctatgtcttttcttccaggagattctccttgaagctccaaaagaacagtaagagaaggttttctttgttcactgttagagttgattctgatgaatctgattgcaatgaggaagaatgtgccccggataaggaagtagggaa

SEQ ID NO: 37719 - DNA, 256 bp, Glycine max
  Clone ID: 700945388H1
ctcatcttctttttcttccctttaaaattattattccgttgaaacacaacaacaacttcatcaccaacacgaagaacaagattagcgttatgggtctcttcctttctaggaatttggcttgcaaattcatatacccttttcttttttccaataaggtttcaaaggatttgttccccaagcagttggagaacatgatgtctctggtctctcctcgtactggcaggcatttgcagcgctatgacaaaggctgtcgcca

SEQ ID NO: 37720 - DNA, 267 bp, Glycine max
  Clone ID: 700945389H1
ctttattttattttctttctttctttctccgatcgcatagctcgctcgcaaccaccatgccttcccgaagaagaactctcttgaaggtcatcattctcggtgacagtggggtggggaagacatctttgatgaaccaatatgtgaataagaagtttagtaatcagtacaaggcaaccattggagcggattttttaaccaaagaagtgcaattcgaagataggcttttcaccttacagatttgggatacagctggccaagaaagattcc

SEQ ID NO: 37721 - DNA, 251 bp, Glycine max
  Clone ID: 700945390H1
ctcgagccgctcgagccgttctcttcagagcaacccaggctggggatttgacaagaaatgtcatttcatggataagctggtttgggaagtgtctcagcattacaagtgacctactggcctgcttgcattttatttttattttactttgagttttgatgaaacaaactgctactactcttgtaataatgagttgttgtagcgttattgctagcaattgttacaactctcgtatactttgtaataaatgaatt

SEQ ID NO: 37722 - DNA, 251 bp, Glycine max
  Clone ID: 700945392H1
cacaaaacaagtacaaaattcagacaaaacctcatggacatggtgatgtgcatgcgcttctttattcaagtggcattctgaaagtatggtatgaagctgggttgaaatgggttctattttttcaagatacaaatgggcttctcttcaaggcaattccatcagcactgggcgtcagtgctgccaaacagtaccatgttaactctcttgcagtacctcgaaaagcaaaagaagctattggtggaattaccaga

SEQ ID NO: 37723 - DNA, 222 bp, Glycine max
  Clone ID: 700945394H1
caaaacctgaaaacctaacagaagaaagtgcaccggaaagaaagcagaaagcagaaagcagcgatggaaatccactcagaggaggagaatggcgtacgaacgagtcacaagcacttgagcagaaggagaagcgaaaggggaagcacgacaagcccaagccatgggacgacgacccaaacatcgaccactggaagatcgagaagttcgacccttcatggaacg

SEQ ID NO: 37724 - DNA, 260 bp, Glycine max
  Clone ID: 700945361H1
ggaggtttggaaaattgcagctgatctgctagtcaagcctgtccaggtgaacattgggaatgtagatgagcttgttgctaacaagtctattactcagcatgttgaagtattgccaccaatggagaaacaaagacggctggaacatattttgcggtcacaggatcaaggatcaaagataattattttgtgttctaccaagaaaatgtgtgatcaacttgctcgtaatctgacacgtcatttcggagctgctgctattcatg

SEQ ID NO: 37725 - DNA, 231 bp, Glycine max
  Clone ID: 700945395H1
aagacccacaatggctctttcaaactccgaagcatctttcacttcatcctctcttctttcagctaccctttgcaacacaaaaggtaggaagtagatattgactgcttcctgggttcacatacaatgaaatcaggtttaaaaaatggttggccctctgttgtgcgtcttcgtctccgagacaaatcagtgacacccttttgcatattctctaaagtgaaatctgctggcaac

SEQ ID NO: 37726 - DNA, 218 bp, Glycine max
  Clone ID: 700945330H1
gagaacgagttcattgagtaatactccgttccctggttcctccatcgcgaaattacggttcgctcacttgtcttcaatttcccagattcacctagcaccatccataaatccccctattaacttgtctttcggaccgatttttctacgtgacgcatcgcaattcttcaccggtttcgtttagggaacccgcgaaaccgaatcagatagtgcggcacgga

SEQ ID NO: 37727 - DNA, 228 bp, Glycine max
  Clone ID: 700945331H1
agcttctcgccggcgagagcggcatcacccccatcgaccgcttcgacgcctccaagtttcccacgcgcttcggcggccagatccgcggcttctccgccgagggctacatcgacggcaagaacgaccgccgcctcgacgactgcctccgctactgcattgtcgccggcaaaaaggccctcgaaaacgccgagcctgccccagacaaccatctccaagatgtataggagc

SEQ ID NO: 37728 - DNA, 278 bp, Glycine max
  Clone ID: 700945332H1
ttcggctcgttctcgagccgaatcggctcgagaacgggtgcgtaatgcgtgggaatctgccgaacagttcggagctgttcaaaatgagaggggcaaaaagaaggacttgtctcctcaagatgctgcattgttgatccagatcagctttagagcttacttgatccgtaggtcaaaggctcttcgtgcccttagagaactggccattgcaaaatctaaattaaaggaaatcagagcccagttcaataacttttcctaccgacgtcatgtagcttgtaatg

SEQ ID NO: 37729 - DNA, 272 bp, Glycine max
  Clone ID: 700945333H1
gtgtgatagaagattcacatcactgcatacttgtgtttaaattaacttaatcaagcaatatggtcggttgtcattgtcggggtccatattgcgttgaaaatgtttggctccttggaagaatctggttctttgtaaagttagagatgaagggaaagctagaaatttatgttgaaggtacagtatttgtagctggaaatgctttacatataacatgtctatttgcttaggctcttcaaaaaaaaaaaaagaaaaaaaaaaaaaggggggccccc

SEQ ID NO: 37730 - DNA, 265 bp, Glycine max
  Clone ID: 700945334H1
ctataattttttttctccattagattaccaagctctgcaactttgcttctcaacatggagtatcgtctcctacccatttttactttactcaatattgcactggtggcaacccatgctgctttaccccctgaagtttactggaagtcggtgcttcctactacgccaatgccaaaagccatcactgatatcctttactctgattgggtggaagagaaaagcagctcagtgcatgttggaggtggaggcgtgaacgtgcatacaggaa

SEQ ID NO: 37731 - DNA, 261 bp, Glycine max
  Clone ID: 700945336H1
gcgaaacagtaatattaggcaggaaattttgattgttaacactcacctgatatttccccatgattcaactctatcccttgtttacaagatacttcaatacgtagaatcttatcagaatgatttccaactcaagccaatgccaatcgtactttgcggtgactggaatggaagcaaacgtggacacgtctacaaagtcttgaggtctcagggcttggaacatctaatgatactgcacatcattacactgatgcagatgctcac

SEQ ID NO: 37732 - DNA, 264 bp, Glycine max
  Clone ID: 700945337H1
gcaccgcctccactaatggctatgagatcgtgggtgagtcgaggatccgtgactcgtttgatggactcagcaaatcgaggggctttcagtcgcttcttcagcgacaagggtcgcgttctcagcgaggaggaacaggccaaagaaaacgtctacatccaggtagaaatgggagagggagaggttggagaaacagaagcaacaggctgagaagaccaaggcagacaagggcaaagatgctgctgctgataagaaacctgaaggttc

SEQ ID NO: 37733 - DNA, 263 bp, Glycine max
  Clone ID: 700945338H1
atcatttctccatttccattttctctctcacttttcaagaatcgtaagctatgggaaagtcttacccaactgtgagtgctgattaccagaaggccgttgagaaggcgaagaagaagctcagaggcttcatcgctgagaagagatgcgctcctctaatgctccgtttggcatggcactctgctggaacctttgacaagggcacgaagaccggtggacccttcggaaccatcaagcaccctgccgaactggctcacagcgctaac

SEQ ID NO: 37734 - DNA, 263 bp, Glycine max
  Clone ID: 700945339H1
gcttctctctcgagcgtgatcgtgatccgttcccttccaattttaccaaaatattagagaataaacaaaatatactatttcatttccgtcccctttcattctaatacattccaatgtttcccagtgccggcgttcccaagaagcggcaacgcaccaccgccgccaaccgttcctcctccacagatggcaccatctcctccctctccgacgtaaccctaatcgagatctcccaaaaccctcgaccttcctctcccatgaccgac

SEQ ID NO: 37735 - DNA, 267 bp, Glycine max
  Clone ID: 700945340H1
ttctcgagccgattcggctcgagcaaactcattcttgcctttcttttacgttcatacttttattacttattgctacttacttttactttctatccaatcatccatggccgaggaaccccaaaaaccagcctccgctgaagaagtggtgcctgttcctgcggacacgccaccaactacccaatctgaagctgaagctgaagttgaagcaaatgcagaaagcatcgaagaagtggtggcggaagcagagaaggcccagagtggtgtaga

SEQ ID NO: 37736 - DNA, 261 bp, Glycine max
  Clone ID: 700945342H1
gcagcatcttcttctttgtctctgctttcgttagcgagtgtgaaaactaggagcaaagtcgcacagaactgtcacgtgactcaacaaagacaacgttgtaatcatgtttgtgttaagaatgcaagaagaacaagggtgactgctgtgcctgtgaatgttgatgatgtaaccacagtacttgaccctgctccagtggaagtcacatggcaaattgtggttggagctatagcctggggttaccccttttgtggtggcagggat

SEQ ID NO: 37737 - DNA, 262 bp, Glycine max
  Clone ID: 700945343H1
ggtttacagagaagcgaagaggcgcaccgttagcagtaactcgtggaattgctagcaatggcgaggatcaaggtttacgagctgaggcagaagacgaaggctgatctgttgaatcagctgaaggacctcaaggccgagcttgccttgcttcgtgttgctaaggtcaccggcggtgcacctaacaagctctctaagatcaaggtggtgaggttgaacattgcccaggttttgacggtgatttctcagaagcagaaggccgcgt

SEQ ID NO: 37738 - DNA, 261 bp, Glycine max
  Clone ID: 700945344H1
tttttcaccctcagaattcatatcatgagttttcatggtacatcaaacacggggcttggacttggtcttggtcttggacttgttagcttccatgatcaatcagagaattgcatgaagagtactaatgatcccttgagagatatccataagataaaagaggtggagaatccatcaaaatgtggcagcacatgcccttgtctgtcattaggaccaccagatgatgatgatgatgatgatgatgaagtgaataatcaaccacca

SEQ ID NO: 37739 - DNA, 258 bp, Glycine max
  Clone ID: 700945345H1
tgcacagaagagtgtgagattaatgggtatgtgatcccagagggagcattggttcttttcaatgtttggcaagtaggaagggaccccaaatactgggacagaccatcagaattccgtcccgagaggttcttagaaactggtgctgaaggggaagcagggcctcttgatcttaggggccagcatttccaactcctcccatttgggtctgggaggagaatgtgccctggtgtcaatttggctacttcaggaatggcaaca

SEQ ID NO: 37740 - DNA, 218 bp, Glycine max
  Clone ID: 700945346H1
cctacacgtatcagagagagaatatttttgttcgtgcaggtgcagaagatggctcggagctccacaagaatgaaatgggtctctatcttcacacttctattcctctcccactcgcccctcacaatctccgcagaagatgggctagtggcgaatggagattttgaggctaccccaagaaacggcgttccaaacgaggcgattgtggagggccccagcga

SEQ ID NO: 37741 - DNA, 253 bp, Glycine max
  unsure (1)..(253): unsure at all n locations
  Clone ID: 700945347H1
tctcgagccgctcgagcggctcgaggtagaattagggtttatatcgcgcatagtgtggtacacgagcagagttgtatacgtcgcgcntaggtacaacatgatcattcccgagaagaaccgtaaagagatctgcaaatacctcttccaagagggagtttgctttgcgaagaaggacttcaatctggcgaagacccggagattgatgtgccgaatctgcaggtgataaagnctgatgcagagcttcaaatcagag

SEQ ID NO: 37742 - DNA, 257 bp, Glycine max
  Clone ID: 700945348H1
ttcggctcgagcttcctcatttaccaagtttttgctttgtggtttgcagaagtaaacgaggaaaagggcatggaaaatcatagtattttgtaactaaatgcttttgttcttgtgaattaattttcattcactttcagatttctggtttcatcatctattcaaatagcttccagcataatattttgaatttgactgctaaggaaagaccccatttttctgagttgtaaagtgacttatattttttgagcctagaggaa

SEQ ID NO: 37743 - DNA, 267 bp, Glycine max
  Clone ID: 700945350H1
actttggaatggttttgatcattggaagccacttcagaagagaacctaatcaagttatagttattggaggtcgttttagcatcatgtgatcattttccttatcctttgtaaccttcgggaaatgtcacttgcaccttgaaaaagcacgagattgaaaaaatgaatgtaatatgtttgaagtttttctttctagatcttttcttgccatttaagcttttctttactcaagaaattgtaaaataaagggtcgaagacaaaatctatcag

SEQ ID NO: 37744 - DNA, 178 bp, Glycine max
  Clone ID: 700945353H1
agaagattaatctgtgtacattgacttaaaggggaaaattgggtctgattggaatgtcttcatttcaagatacaacaaaaccatatactatagccattgtcattgtttgggaaaacatgttcttagttttggtgctactggatgatttttcatctactgaaacttgattcttgagaat

SEQ ID NO: 37745 - DNA, 239 bp, Glycine max
  Clone ID: 700945354H1
tagctttttcttttcctaatttggctcttagcactttatgcagagtgataacagataatttagagatcgatacatgaagattctgatttagcccttgaggattggtctgataactagtaaaaaatgaagtttgtcagagtaaattgagagctacaccaggagccaaagtctgatgatgattaaaaagataattaagatagtgataactgtagtatatatttacatctactacatcacag

SEQ ID NO: 37746 - DNA, 257 bp, Glycine max
  Clone ID: 700945355H1
gtagccttcccgaagaattgttggtattacaagaaaagtacacgtcctcgtgccgattatatagtttgcaggaacttgtatctgcgacctccaactttgtatctgaaaatttggttggcaaaggtggctgtagttatgtttacagaggatgtcttccagatggcaaggaattggctgtgaaaattttgaagccatctgaaaacgtgataaaggagtttgttcaggaaattgagatcattacaactttgcgccacaag

SEQ ID NO: 37747 - DNA, 257 bp, Glycine max
  Clone ID: 700945357H1
tgcttccaatctggactcttgtcattcattatacctctctacaaaaatgtaatgcactgaaaatggtctgaaagcaagtacataaatgcagtgccctgaaaatggtctgaaagcaagtacataaatgtagtgccctgaaaatggtctgaaagcaagaagagataaacagcatctgacattatgtatgtcctaaattcatagttcccttggtgttgttgagaggtataatgaatgacatgcttccaatctggactctt

SEQ ID NO: 37748 - DNA, 79 bp, Glycine max
  Clone ID: 700945358H1
ggggtcattcatatgatcccgtgtttgtttgggtcttttctcaattcttcaaccaacccattccttgcacacacgatat

SEQ ID NO: 37749 - DNA, 258 bp, Glycine max
  Clone ID: 700945359H1
attccacaaaatttccctcacttatttctcaccatcatcaccccctttccttctctcaagaaaaaaaaaagttaatttcttgaacccaatggcttcagagacagaggtgccggatattatttcctctgttttcgaaaggtttcaacaaaacagagacatgtctctgtttctgcccttcctcttcggcttctctgacgccaccccaggacgaaatagcgacgacccagatcacgaaactgctcccacagaagccccaca

SEQ ID NO: 37750 - DNA, 258 bp, Glycine max
  Clone ID: 700945360H1
ctcattgttgaaaagaaaccctagcaagtggagcaatggcagacgttgaagtcgatgtggcggcacagcagcagcagggctgccgaagaagagaacgttcaagaagttcagttttcgaggcgtggatctcgatgcacttctcgacatgtccacccatgaactcgtcaagatgttcagtgcccgcgctcgtagaaggttccagagaggcctcaccagaaagcccatggccttgatcaagaagctccgtaaagcgaaaag

SEQ ID NO: 37751 - DNA, 260 bp, Glycine max
  unsure (1)..(260): unsure at all n locations
  Clone ID: 700945329H1
gacacataaacccggcggtgacattcgggttgttcctaggacgcaaggtgtcattgataagggcgttgttgtacatggtggcacagtgtgccggtgctatctgtggtactggattggccaaggggttccagaaagcatactacataangtatggaggtggtgctaactctgttgctgatggctacaacaatggtactgctttgggtgctgagattattggtaccttcgttcttgtctacactgtcttctctgccactgac

SEQ ID NO: 37752 - DNA, 254 bp, Glycine max
  Clone ID: 700945303H1
tgcattggctctaagcggattctgaaggatcttaaggacctccagttagaccctccatactcttgcagcgccggtcctgtagtcggtagatatgtttcattggcaagcgactataatgggtccccctgatagcccttatgctgggggtgtttgtctagttactattcattttcctccggattatccattcaagccacccaaggttgcatttaggactaaagttttccacccaaatatcaacagcaatggtagta

SEQ ID NO: 37753 - DNA, 245 bp, Glycine max
  Clone ID: 700945304H1
cggtattcggctcgaggaaaaacaagatgcaataaacttgtttttaggttacttccaaccacaggaagggaaacctgcgctctgggagctggattcagattattatatccatgtatctgggattggggatgatctaattcctgagaagtgttctgaaccaaatctcagttcttctggaagaggtggaatgatattcacgcctataccagcttgcagagaagacttctctcgcataaggtggacat

SEQ ID NO: 37754 - DNA, 271 bp, Glycine max
  Clone ID: 700945305H1
aaaatgcccactttttttcttccaacgctcctcctccttctcatagccttcgccacctctgtctccggccgccgtgacctcgtcggagactttctccggctgccctccgaaactgataacgacgacaacttcaagggcacccggtgggccgtcctcctcgccggttccaatggttactggaattacagacatcaggctgatgtttgtcacgcctatcaaatattgaggaaaggtggtctgaaagaagaaaatattattgtttttatgtatg

SEQ ID NO: 37755 - DNA, 272 bp, Glycine max
  Clone ID: 700945306H1
gtctaattccaatattgagtttatttgttcaatcactttttctttgtgatgataaccaccaaaatgccaaccatgaatccagatagtttcaaattcatagaagccttaataatattaatggtgggtttgatgatgatgatgatgttgcaggttgtttgtgctgaagaggaaataatgtgcattgagagggagagggaagcactcctccaattcaaagctgcccttgtggatgactatggcatgctatcatcttggaccactgctgattgctg

SEQ ID NO: 37756 - DNA, 273 bp, Glycine max
  Clone ID: 700945307H1
gccgtttgacattacgacataccaatccgcagagactccaatttccggttgccacctcaccggtgatggctataggcgtacagtttccggtatgtacacgctcactccaactctctcttcattcaagcaccccacgcgcctcttctcacgcgctgctttcactgcaaagcttccacttcaatttcgagccacttcaacgtccttcatcgacaccgaaaccaatccaagagaatccaacgtagtagtagttgaaaaggacgtaagcagtagaag

SEQ ID NO: 37757 - DNA, 270 bp, Glycine max
  Clone ID: 700945308H1
attcgctacttgttaagggctgcactataccagaatgtctcagggaagaggcagtgcatctttgcctattgtggtcactgtggtttcactactgtgccttttggaacgtgctaacgcagcaacttactccgttggaggacctgggggatggaccttcaacactaatgcttggcccaatggaaaaagattcagagctggtgatatcctaatcttcaactatgactcaacgacccacaatgtggttgctgtggacagaagtggatacaacag

SEQ ID NO: 37758 - DNA, 251 bp, Glycine max
  Clone ID: 700945309H1
attataagcctcttagtattcgggttcttcttactcacctacggaacacggggaaagcctccaaaaccaacccaccgttggcgcgatggctttcccctccagaggcgatgacgagtaggttctggtgcagcgtaaatcgaatgcgagagtgttgacactagacaggactaaacagttgaatgccctctctttttatatggttttcggctacttgaaattttttctgaagatgagaaagattctgatattaa

SEQ ID NO: 37759 - DNA, 267 bp, Glycine max
  Clone ID: 700945311H1
cctgtgagtaattcccacatggaatgaaccctatgctgatatgcattgtgcttcaataataggaggaattgtgaacaacactttacgtcctcaaatcccaacttggtgtgatcctgagtggaaatctctaatggaaagttgttgggcttctgatcctgtagaaagaccatctttttcagaaatttccaagaagctgaggagtatggctgcttcaatgaatttgaaatagtcaattgatcttgaataagttaattgaccttctcccgt

SEQ ID NO: 37760 - DNA, 269 bp, Glycine max
  Clone ID: 700945312H1
aattttcactcttttctgcaccgccagtgatgggagatgggtgcgcggttgagggcaccacggggaattccaattctaataacaataataacaataagaagaagaacaagaagaagaagaacaggggtgggagcaagaagaagatgacccacgaacaggtcttggccttcaagttagtgagtgagtgggttttcttggatcacccttctgcttcgtcttcatcttcttctgctgcttcctgtgttgtcgatgattttggtgttcagaag

SEQ ID NO: 37761 - DNA, 267 bp, Glycine max
  Clone ID: 700945313H1
ggcagcgatggaagaagacttcgacatccccggcggcgaggaaatggatctcggcgaagacgaggtcggcgaggagagggagatcggctctggcggcctcaagaagaagctcctcaaggaaggtcaaggctgggaaacccccgaagtcggtgacgaagtccaagttcattacacggggactttgctcgacgggactaagttcgattcgagccgcgacaggggatctcccttcagcgttacgcgtggacaagggcaaggtaattaagg

SEQ ID NO: 37762 - DNA, 234 bp, Glycine max
  Clone ID: 700945314H1
ctttgagagaggaccaaggtaccacgcatacgctgcgttgagggaaacaaagcttcgcatgaggcaacaagaagaagaagagggtgttgttgaagcaaaggtttcaaccccaccaagaaaaaaacaagtcaagtttcaaggtgctgtggtttcagggagaaaagggtcatcatctcttgtggctcagtctgtgccggactttttctaatgtgtagaggaaggagaataggaagc

SEQ ID NO: 37763 - DNA, 273 bp, Glycine max
  Clone ID: 700945315H1
gccacgacacaagtccaaagtttgattccaaaatgcgatcctcaagcattcgcagcttcaccatcttcaccctctttctcattgcgatcctcccccacggacacgcaacaactccaacctccaaacttcgcctcaaacctctctcttctcccttttcaaccgccctcgaaaccctccagaaacaacgcggggtacaccttaagagcgatgagccttctcggcgcgccactacacacgcgttcgtcgtcgaagaaaacaacaaagccttcgcca

SEQ ID NO: 37764 - DNA, 262 bp, Glycine max
  unsure (1)..(262): unsure at all n locations
  Clone ID: 700945316H1
gggtgatgttgtttggtgccatgattaccatcttatgtttcttccacaatgcttaaagaattataaccgcaaaatgaaagttggctggtttctgcataccccgtttccatcttctgaaattcacaggacattgccatctcgctcagagnctcttcantcatntcttgcagcnganttggnttgattttacaccnacgacnatgtacgacattttgtaagagcangtacacgcantctttgacnagtgggcacaccngtaggg

SEQ ID NO: 37765 - DNA, 272 bp, Glycine max
  Clone ID: 700945317H1
ctgatatggaggaccttatagttagattaaatcaagaaatagctgcaaaggattttctcgcaacaaagctcaaggatttggaagtagaacttgaaactaccaaacagaaaaataaggagaacttgcagcaggctattctaattgagagagaaaggtttacccaaatgcagtgggatatggaggaacttagaagaaaatcattggaaatggagatgaaattaaagtctgaatcggggagaaattcttatcaggatttgactaaggaatcaatt

SEQ ID NO: 37766 - DNA, 275 bp, Glycine max
  Clone ID: 700945318H1
cgaggaactcatcacttactggaagccttgttgtgagtaagagaaaaggcttcctgcaccgagcacaccaacttgatacctctgattctttctttgcttagaattccacagaatatggagaatagtcttgtcaatcactcaccaactttggaattcaagggtttgagagaggaggaggaagactcattgctagggcaagtggaaatatggaggtacatgacatgcttcagggactccgtggccttgaaagctgtcatagagcttcgtatagcgga

SEQ ID NO: 37767 - DNA, 234 bp, Glycine max
  Clone ID: 700945319H1
gcgcaatgtcatggatatgaggtctatctatggaggatttgctgcagctttgagagatttgaatgtttgggtcatgaatgtggttacaatagactcccctgatactcttcccattatttttgaacgaggtctgttcggtatatatcatgattggtgtgaatcatttagcacctatcctaggacctatgatctcctccatgctgatcatctgttttcaaagcttaagaaaaggtg

SEQ ID NO: 37768 - DNA, 253 bp, Glycine max
  Clone ID: 700945320H1
aaagagcctttgctttttctttaggcctttccgaattaagtacttgtttcattttctctcgaagcaagaaaaatgttcatcgagagtttcaaggttgagagtcctaacgtgaagtacacagagactgagattcagtccgtgtacaactatgaaaccactgaccttgttcacgagaccaagaatggcacttatcagtgggttgtcaagcccaaaactgccaaatatgatttaaaaaccaacacccatgtcccta

SEQ ID NO: 37769 - DNA, 268 bp, Glycine max
  Clone ID: 700945321H1
ttggtattcccaatctctctgtttctatttctctgttcgttgcttcacactatggcttcttggtgggatttaagatccttctttcgttttcagtctgttaggacccgatttcaggaattcaggacgagggaagtccaacttggttcacatactgtgagttctcatggatatgcagttgcaagaacacacaaacatgattggctcattctcttgctcctcgtgttgattgttatcagcctgtacattatccatcctttccatcgctttg

SEQ ID NO: 37770 - DNA, 255 bp, Glycine max
  Clone ID: 700945322H1
gaggctgcttaatgggattagagagaagcttgatggggtggtggtgaatgggagcttggagaggcgctatgtggggaatttgaatttgtcatttgcttatgttgaaggggagagcttgctcatgggtttgaaggaggtggctgtgtccagtggcagtgcctgcactagtgctagtttggagccttcgtatgtgttgagggcgttgggagtcgaggaggacatggctcacacttctattaggtttggaattgggag

SEQ ID NO: 37771 - DNA, 146 bp, Glycine max
  Clone ID: 700945324H1
agttcatgagtctattcattgatggaaaagctgaattatatgttgcataatcatacacgtaagtaacacaattatgattgtactataaaatacgctctgacatgtacactgtaagaatcaataattattttatcaaattcaaggag

SEQ ID NO: 37772 - DNA, 265 bp, Glycine max
  Clone ID: 700945325H1
agaaaatactctgcaaaggacaatgatgatctatgcattgtttgttgggatggtggtaatctattgctttgtgatggatgcccaagagcatttcataaagaatgtgcagctctatcaagtattccacgtggtgactggtactgccaattttgccaaaacatgttccagagagaaaagtttgtggcgcacaacgccaatgctgtggcagctggaagggttgaaggagttgatcctattgaacagattgccaatagatgcattcgca

SEQ ID NO: 37773 - DNA, 245 bp, Glycine max
  Clone ID: 700945326H1
cggctcgagcgcagagccaagacgacggcaaggactaccaggagccggcgccggcgccgctggttgacccgacggagtttacgtcatggtcgttttacagagcagggatagcagagtttgtggccacttttctgtttctctacatcaccgtcttaaccgttatgggagtcgccggggctaagtctaagtgtagtaccgttgggattcaaggaatcgcttgggccttcggtggcatgatctcgccc

SEQ ID NO: 37774 - DNA, 251 bp, Glycine max
  unsure (1)..(251): unsure at all n locations
  Clone ID: 700945327H1
gttaacatgaaaggacttgatggcattcaaggaccagtatatgtgggaactggatgtgttttcaatagacaagcactttatggctatagccctccttctatgcccagcgtaccaagatcttcatgctgttgcttcccctcaaagaagtccaccaacgatgtctcagactttcaaagaaacgcaaagagggaagaatcttaggccgccaattttaagcgtaaggaacgtgtacaattcgantagcantagag

SEQ ID NO: 37775 - DNA, 118 bp, Glycine max
  Clone ID: 700945328H1
ggaagttgcagaaaacctagagagagtgaatgatgtctgggagcacaagaagggtggagttggtgctgaagaacaggttcctgagttacttgatctggcaatccatacattcctctct

SEQ ID NO: 37776 - DNA, 270 bp, Glycine max
  unsure (1)..(270): unsure at all n locations
  Clone ID: 700945302H1
gcataactgaacaaacaaagcaaccctatgtcgaaggtggtttgtgtcaccggagccagtggcgcacttggatcatnggtggccctcctcctccaccagcgtggttatacggtccatgccaccgtccaagacatcaaggatgaaaatgagacgaaacatttggaggaaatggaaggagcaaagagtcgtctccattattttgaaatggatcttcttgacatcgactccattgccgctgccataaagggttgctccggcgtaatccacctc

SEQ ID NO: 37777 - DNA, 256 bp, Glycine max
  Clone ID: 700945266H1
gttccagtgtataagcctattccaaagccagttccagtgtataagcctattccaaaaccagtgtacaagcctattccaaagccagttcccgtgtataagcctataccaaagccagttcccatttataagccaattcccatttttaagccaataccgaaaccagttcccatttataagccaattcccatttttaagccagtaccgaaaccagttcccatttataagccaattccaatttttaagccagtaccaacac

SEQ ID NO: 37778 - DNA, 252 bp, Glycine max
  Clone ID: 700945268H1
cttgaaaggactccatccatccatccatcggtttgcaacttcatcccatccatccagaaacagatattggtggttgcattgaatcggagagggtaggtaggtgggaagacgtgtcttgttttgtagctttccccttcgctctctctctctttcccggcgcatgtgccggattagacgccaactgcttccataattcacctcctccaaccaaccaacacaatatttccctctggattggatggacgaagcatg

SEQ ID NO: 37779 - DNA, 253 bp, Glycine max
  Clone ID: 700945269H1
cttgccagaaggtgcattgtgcaagtgtcttatgccattggtgtgcctgagcctttgtctgtgtttgttgacacctatggcactggaaagatccctgacaaggagatccttaacattgtgaaggagaactttgatttcaggcctggtatgatctccatcaaccttgatctcaagaggggtggaaataacaggtttttgaagactgctgcatatggacactttggaagagaggaccctgacttcacatgggaag

SEQ ID NO: 37780 - DNA, 249 bp, Glycine max
  Clone ID: 700945271H1
gattcttaacctctctctctctctctctttctctatggcatctgcgacgcgtctggtgcactgcgagctgcgctcggcgaggcccgcggttcggccgagggaaccggccggtccggttcaggtttcgatccccaaacccacacccaaagcggcggaggcggaaagcgcgaacatcgttttgcagccgcggttgtgcactctcagatcctacggttcggatcgagacggggtgcttatcaagactcgcaa

SEQ ID NO: 37781 - DNA, 253 bp, Glycine max
  Clone ID: 700945273H1
ccccatttcgcgttggtgcaaagcatccttcgtttcaatttctctctctcagcgctttctgcaatcgaacctttcatctccaaagggatccacaggccgaaggagaaatggggctgacattcacaaagcttttcagtcggcttttcgcgaagaaggaaatgcgaattctgatggttggtcttgatgctgctggtaagaccactatcctgtacaagctcaagctcggagagatcgttaccacaattcctaccat

SEQ ID NO: 37782 - DNA, 238 bp, Glycine max
  Clone ID: 700945274H1
ctgtatctgaatctgcgtgtgtttgtgaattgttgttgagatctgcatcaaaatcagaaacgataatggctacaccggaccacctcttcaacctccgcaacaacttctaccaaggcgcttaccaagccgccatcaacagcagcgacgttgccaacctctcccacgaagataccctcgagcgcgacacccttgtccaccgctgctacatcgccctcggccagctccagttcgtcatctc

SEQ ID NO: 37783 - DNA, 239 bp, Glycine max
  Clone ID: 700945275H1
cttgtgaaaggatgggaatcgctgcagagcatggttattttgtgacgacaaatcgaaatgcagaatgggatacttgtattccagtacctgattttgagtggaaacagattgctgagccggttatgcagttatatatggaaacaactgatggttcaaacatagaggccaaagaaagtgctctagtttggaattcgagctatcagaccgagaccttgtgttcatgccaagctaaggagctt

SEQ ID NO: 37784 - DNA, 256 bp, Glycine max
  Clone ID: 700945276H1
gagagagagagcgagcagtttcagacacagagagaggggtttgggattggagggattgacgctgcgtctcttcctcttctctttcgatccatccctcattactagtgctccaatccagccagctcagcctgcacactcacatatacacatatctgaacgcgtatcgtccctcctatggcttcaaagcgcatcctcaaggagctcaaggacttgcagaaagacccatcaacttcttgcagcgctggtccagtagctg

SEQ ID NO: 37785 - DNA, 241 bp, Glycine max
  Clone ID: 700945278H1
ctaaattctagcaccctttatcctctaatgggattttgataaatcaacagtttttattttttttgtccctggatttggaaaacagctagtttccatggaaggtttggtgagttctgggatcaacacggttcgtgtttttggcattacaaaacaccaatctcgttttcttccttcatcaactctgcatctgaggaataacagtgtgtgtggatttggaattggggttgagaagaagaagaag

SEQ ID NO: 37786 - DNA, 257 bp, Glycine max
  Clone ID: 700945279H1
gcaccaacagcgagaggatgaagcagaacctggacatagatgggtgtaccaacaagggtcaagtgccatggctaaaagcaccaacagcgagaggatgaagcagaacctggacatatttgattttgtgctgagtgaagaggatttaaaccggatcagtcaggttccacaacgcaggcaatacacaggggacatatggctatctgaaaatgggtcttgcaagaccttggaagaactttgggatggagacgtttaagtat

SEQ ID NO: 37787 - DNA, 154 bp, Glycine max
  Clone ID: 700945280H1
attcggctcgaggaaaaaagagagagtgtggacggtgaaatggagatatatatccggaagtgttgttgggaaagtaaaagatagatatgatggatgagctataccccagaagtggtttctgcagctccacttcaatcttctacagcaagcgtaa

SEQ ID NO: 37788 - DNA, 254 bp, Glycine max
  Clone ID: 700945281H1
cgaggacggccgtaccctcgccgactacaacatccagaaggagtcaacccttcaccttgtccttcgtctccgtggtggcatgcagatcttcgtcaagactctcactggcaaaaccataaccctagaggtcgaaagctctgacaccattgacaacgtcaaggccaagatccaggacaaggagggaatccccccagaccagcaacgtctcatcttcgccggaaagcaacttgaggacgggcgcaccctcgccgact

SEQ ID NO: 37789 - DNA, 253 bp, Glycine max
  Clone ID: 700945282H1
ctcgtttacacatctctccaacctttcactttcgtttctcagttttattcgaatccctctctcaatctcctttccaaatggccagcgttgaggttgcacagcaaacaccaacaacagttccagaaaatgaaacaaccgaggtaagcaagacccaggaaacaaccccagtcactgaggctcctgcaacagaacaaccagcagctgaggttcctgcaacagaacaaccagccgctgaggctcctgagccagaatc

SEQ ID NO: 37790 - DNA, 253 bp, Glycine max
  Clone ID: 700945283H1
aagcaaggtattcctaaagccccatctggttggtcttcttcttccctctaaattcggcttggtcttccctcacacaaccaagccttcttcttcccttcccaccactttcttcatttcacacttctcctctgcccctctctcttcctacggaccctccctccacaagggaacaacaatcccctcccaatccctaaacgacgccgttctctgcgaagaagccttcacgcgagtcttccacctcgccgcactccgc

SEQ ID NO: 37791 - DNA, 251 bp, Glycine max
  Clone ID: 700945286H1
ggaggatgcgtatgagcagattgtattagaaatgattgaacttcgagaactggatactgcacgtgctattttaaggcaaacgcaggtgatgggtgtaatgaaacaagagcagcctgaaagatatttgcgtcttgatcatctcctagttagaacttattttgatccaaatgaggcttatcaagactcaacaaaagagaagcgacgtgcacaaatagcccaagctattgcagcagaagttactgtagtgccac

SEQ ID NO: 37792 - DNA, 250 bp, Glycine max
  Clone ID: 700945287H1
gaaagaaggtttttttagtatagttaacagcatggagagggaggaagatgttaaggttggagcacagaaattctcggagaggcaagcactgggtacaggagctaagagtgacaaggactacaaggaggcaccaccagcacccttgtttgagccaggggagttaaagtcatggtctttttacagagctgggatcgcagagtttgtggccacattcttgttcctctacatcactgtcttgactgtcatgggt

SEQ ID NO: 37793 - DNA, 251 bp, Glycine max
  Clone ID: 700945288H1
ctcttcgccgctaattaatccttttctccccagcattcaatttctattagtatccaaaccttgattgcgttcttggattttcttgtgggtagggggtttctcctctctttctctgcagtttgatggatcgggaaggaggatccaacgccggatcttgctactactccgttctcgggattcgtagggatgcctccttctctgatattcgcactgcctaccgcaaactcgctatgaggatgcacccggacaag

SEQ ID NO: 37794 - DNA, 249 bp, Glycine max
  Clone ID: 700945289H1
gtttctgcgaggcttaagaaacctcgcagaaccaaagaaaactcactctcacacactttggttcacaaaaacctttcacttctattttcaatctatctagttccttctcccatattatagtacccttttatcccaagttacttaaatttaaaacctttattactgctcatacttgtttttcgctttgttaagttttaagaaaaatggaggcacattctccagttatagccaagaagctatggaatgtgt

SEQ ID NO: 37795 - DNA, 252 bp, Glycine max
  Clone ID: 700945290H1
cttcttccataaccatgggtatctccaccatcgcttctccttttgactccatcatcttcgatttggacgacaccttgtacccctccagcaccggaattgacaagtgcgtcaagaaaaacatccaactctttctcatccagaaatgcggattctcagaatccaaagccttgacccaacgagttgagctcttcaaaacctacggaagcacccttgccggcttaagagcacaaggcctcgatatcactgcagagg

SEQ ID NO: 37796 - DNA, 250 bp, Glycine max
  Clone ID: 700945291H1
ggaacatttccttatctatcttcacctccatcttttaacagttcccctcgaaacttctgaagatgggtggcattgcattcggacgcttggatgattctttcagtttaacctcaatcaaggcctatattgctgagttccattcaaccttgctctttgtttttgccggtgttggttcagccatagcctatggtaagttgacatcagatgcagcacttgatcctgctgggttactggcagttgctatttgcca

SEQ ID NO: 37797 - DNA, 250 bp, Glycine max
  Clone ID: 700945292H1
ggaagtaggaaatagcagagtttagactttagactttagagtcagtgtacgcagaagagtaaaatcgattggcgatgatggagttgaaagagattcagagactcgaaggccacaccgataaggtttggagcttggcctggaacccgaccaccggtcacgccggtatcccactcgtcttcgcttcttgcagcggcgacaaaaccgtccgaatctgggagcagaacctctcctctggcctctgggcctgcac

SEQ ID NO: 37798 - DNA, 253 bp, Glycine max
  Clone ID: 700945293H1
aaaaccaccacctcaacgcgtgcgtgcgttctcatagattttcgctttggtcgaaaaatctggctcggacattgcagtttaaggttagagtagatatccaaagaacaaaacttaagttaacatttgagctccagaggtcaccaacggaagaagagttagtagaaagaattgggatctcacttgaaagatatcatgaagtaatgaaggcatcaaaacccattttatcccttcattcaagacatataaccacgca

SEQ ID NO: 37799 - DNA, 253 bp, Glycine max
  Clone ID: 700945294H1
aatgaagtaactaacccaaacctagtccccttacttggctcgctggttggatttgattcgactcgattctcgctgatgaagaagcatttgatgcacagctatggcgttgccgtgattgtggtgttggctttgagtttgagtgtggctgcatcagcggaacaactcagttcacgagaatgcgagaatctcggtttcaccggactcgccttgtgctccgactgcaacactctctccgagtacgtcaaggacaaag

SEQ ID NO: 37800 - DNA, 96 bp, Glycine max
  Clone ID: 700945295H1
tggaaacatggatttccgatttgcggaagagcagcctcctgatgattatgctgctgagcttgcagaaaatatgcacttttctccaccagaacatgt

SEQ ID NO: 37801 - DNA, 235 bp, Glycine max
  Clone ID: 700945265H1
tctcgagccgaatcggctcgagcttctcttctcttccccaccaaaacaaaccttttctcagactagaattttcagaatttgacgtatggggaggctgtttgtgacccatctggaggggcagatgtatacctgcaaacactgccgcacccacctcggctctctatgaagacatcgtttccaaggctttccacagcagacatgggacagcttatctcttcagtaaagtgtaagtcat

SEQ ID NO: 37802 - DNA, 252 bp, Glycine max
  unsure (1)..(252): unsure at all n locations
  Clone ID: 700945296H1
atgtgtatgtagcgtgcacccttccacattctatctcgtcccgatctctctcgatttttccttcccttttctccataaacgaggtatatcagattcgctcataataggagggaatcgaatcgaatcgaatcgaaaggaaagtgcagaatggatgacatgccgttgccggcgctctttgagcaagcccgcaagatccacgccgcagccaccgagttcggcgccgaccaggacggttntaagaaggggatcgag

SEQ ID NO: 37803 - DNA, 266 bp, Glycine max
  Clone ID: 700945229H1
gaaagaaactgcaacttcctctgttttgctcccctgtttaggccttttcataagcttagaatgacacacaaggaattttccattgctctagtgactctcattgctgttctctttgtcaacatgaacatccaaggtgccactgctgactatggtagttggcagagtgctcatgccactttttatggcgggggtgatgcttctggcacaatgggtggagcatgtgggtatggaaatttgtatagccagggctatggaactgacactgt

SEQ ID NO: 37804 - DNA, 256 bp, Glycine max
  Clone ID: 700945230H1
ggagattgctattttagctggcgggtgcgatttggacggtcatatccttgactctgctgaactgtacaattctgagaatcaaacctgggaactactccctagcatgaacaagccgaggaagatgtgctctggggtatttatggatggaaagttttctgttattggtggaattggtggataagattctaagcttcttacatgtggtgaggagtacaatatacaaactagaacatggacaggaattcctaacatgtcc

SEQ ID NO: 37805 - DNA, 249 bp, Glycine max
  Clone ID: 700945231H1
tcttgaaacaatatacaattgtagaacatagccctataaggtaccattcatgggtgtattggacatacgtgtaggttctagttgctattgtaacattatgttgtgagatatgtaatatggacatgtaatcatatgtaaggtagtgatgccaagtagtttggtcctgtgcgtgctactgtagatatgaatgtctcatcactgttatggttattgcaagttacctgaatggaaataatttgggttctccac

SEQ ID NO: 37806 - DNA, 250 bp, Glycine max
  Clone ID: 700945232H1
ctagtcagtgttaggatctgagaaaacacacgtgactacgcgtgtaatgggaacatttggatacgttgcacctgagtatgcaagctcgggtatgcttaatgagcgcagtgatgtatatagctttggagttcttctcatggagataatcacaggaagaagccccattgattattcaagaccacctggagagatgaatttggtagattggtttaaggcaatggtagcaagtcgtcgcagtgaggagctagtt

SEQ ID NO: 37807 - DNA, 223 bp, Glycine max
  Clone ID: 700945233H1
gagagagagagagagatctatctatctatcaagatggcgttgttggttgagaaaacaagcagtggaagggagtacaccgtgaaggacatgacgcaagccgatttcggaagattggaaatcgagctggcggaggttgaaatgcccggcatcatgtcctcccgcaccgagttcggcccctctcaacccttcaagggcgctaggatgaccggctccctccacatga

SEQ ID NO: 37808 - DNA, 264 bp, Glycine max
  Clone ID: 700945234H1
actctgcgaccaaatctccgatgctgtcctcgacgcttgccttgaacaggacccagacagcaaggttgcctgcgaaacatgcaccaagaccaacttggtcatggtcttcggagagatcaccaccaaggccaacgttgactacgagaagatcgtgcgtggcacctgcaggaacatcggcttcgtctcaaacgatgtgggacttgatgctgacaactgcaaggtccttgtaaacatctaccagcagagccctgatattgcccaggg

SEQ ID NO: 37809 - DNA, 265 bp, Glycine max
  unsure (1)..(265): unsure at all n locations
  Clone ID: 700945238H1
actagttctagatcgcgagcggccgctcgcgatctagaactagtcattncttcccagttctcacctcaccgctgcatcttcacgtcgtctctaacgagggaacatgagtcgaggaggtgcagcagcagcgaagggaaagaagaagggtgctacattcaccaattgactgtgcaaagccagtagaagacaagatcatggacattgcttctctcgagaagtttcttcaagagaggatcaaggttggtggcaaagctggtgctcttgg

SEQ ID NO: 37810 - DNA, 191 bp, Glycine max
  Clone ID: 700945240H1
caaagcattgaattcaaaaacttaagttcattccttgtgttttgctttcttcctcaaaaccaaacatgtcgaacacatgcggcaactgcgactgcgctgacaagactagctgcaccaagggaaacagctatggtgttattgtagagactgagaagagttacatctcgactgttgtcatggatgttccagca

SEQ ID NO: 37811 - DNA, 260 bp, Glycine max
  Clone ID: 700945241H1
caagaggccctcagacaagccactcaggcttccattgcaggatgtctacaaaattggtggtattggtaccgtgccagtgggacgtgttgagactggtgtcgtgaagcccggtatggtggtgacttttggtcccactgggctgacaactgaggttaagtctgttgagatgcaccatgaggctctcacagaggctcttccaggtgacaatgttggctttaatgtgaagaatgttgcagtcaaggatctcaagcgtggttttg

SEQ ID NO: 37812 - DNA, 261 bp, Glycine max
  Clone ID: 700945242H1
gagagaagaaaagtcaaagacaatgtcagggatcattcacaagattgaggagacccttcatgtgggaggccacaagaaggaggaggagcacaagggtgagcagcaccatggtggagaatacaaaggggagcatcatggtgaacacagtactgaatacaaaggagagcatcatgttggtgagcacaagccggagcaccatggacgagaagagcacaaagaggggttcctagacaagatcaaggacaagatccacggcgagga

SEQ ID NO: 37813 - DNA, 185 bp, Glycine max
  Clone ID: 700945243H1
accgcaagtcgctccgctcgcgtcgttgctcaacatgaagcttctcattgctctgcttctggtgttgtgcgcgccgttttcatcttcttccaaacccaaagacacgttcctcggaatctcccccgaagatgacaagtattacaaggcttccgatgtgataaggtgtaaagatggatccggaaaat

SEQ ID NO: 37814 - DNA, 256 bp, Glycine max
  Clone ID: 700945245H1
ctcttgcatcaccaagtctgagggtaaattgacatctctggatcagtatatatctataatgaaaactgggcagaaggatatcttttacataactggaaccagcaaagaacaactggaaaactctcccttccttgagcggcttaagaagagcaattttgaggtacaatttaaattgtttgatttttattacaagtatatttgctctattatttgttcttttaaaaacatttgtctttctattctgctgagagatgat

SEQ ID NO: 37815 - DNA, 240 bp, Glycine max; identical to SEQ ID NO: 28742
  Clone ID: 700945247H1

SEQ ID NO: 37816 - DNA, 264 bp, Glycine max
  Clone ID: 700945248H1
cgcgaaccagccagtggccgcggcgtatccaggtggtcgagcgtcttccatcgaaacagggactaagctctacatttccaatttggattatggcgtttccaatgatgatattaaggagttgtttcttgaagttggcgacgtgaaacggcatactgttcattatgacaggagtgggagatccaagggtacggcagaagtagtcttctcgcgccgagctgatgctgtagctgcagtgaagaggtacaacaatgttcagctggatgg

SEQ ID NO: 37817 - DNA, 260 bp, Glycine max
  Clone ID: 700945250H1
ctccttttagcaagttaacaacacttttgtcttcgttccattatctagttctcatttctcttcaccctttgcctttgaaagaaatgggtagtcttgaagcggaaagaacaacagtaggattggcagcaagagacccttcagggattctctccccatacacctacaatctaagaaacacaggccctgatgatgtttacattaaagttcactactgtggaatttgccattctgatctccaccagattaaaaatgatcttggc

SEQ ID NO: 37818 - DNA, 256 bp, Glycine max
  Clone ID: 700945251H1
tgttgctgaggtgatgaatttgattggtgatgtaaggggaaaggtagcagttatggttgatgacatgattgatactgctgggactattgccaaaggtgcagctctgttgcatcaagaaggggcaagagaagtctatgcatgcactacacatgctgttttcagtcctcctgctattgagaggttgtcaagtggtttgttccaagaagttatcataactaatacaattccagtggcagaacagaactatttccctcaa

SEQ ID NO: 37819 - DNA, 257 bp, Glycine max
  Clone ID: 700945252H1
aattattaacttctgaagatcacattccagatgtgcaaaaatcacgtccgaaacgtgaaatcaattaagctatgatgttggtgtgcctcaattctaagttgccctatacactttacatatttgaattgtaaaatggttttgattattcaggtggaggtggtttttgtgatggtcccacttgctaagggtaattgcaagagtagttgaacgtccaagccactccaatgattggaatgtttttgttgtttatgtaattg

SEQ ID NO: 37820 - DNA, 258 bp, Glycine max
  Clone ID: 700945253H1
atcaccaccaccgtacaccattccacccgcaccctcgactaatgcggctccggcaaggtcttcgtctacgacctcccccaaaccttcaacaacgaaatcctcctccattgcgacaacctcattccctggagctcccgctgcgacgccctctccaacgacgccttcggccgaagcgccgctgcgctcgccggaatcgtcccggaggatctcctcccggcgtggcactggactgaccagttcgtaaccgaaatcatattc

SEQ ID NO: 37821 - DNA, 258 bp, Glycine max
  Clone ID: 700945255H1
aagaaatgtcatgaagttgcaaaacaggaccaacaacactcaaacaaattactttttcagcagcttcagtcacattttaatcaacaacagcagcttcatgtttacactttattgtcaagacaacaggttattgacctaagagaggtaagaggtggtgatgaaatgacgataaattacctttgtgaaaagctaggagtgaaactgcgttgaagaaaaggattgggaatgaatgctgattcaatcattgattccattaaa

SEQ ID NO: 37822 - DNA, 237 bp, Glycine max
  Clone ID: 700945256H1
aagttttccttccatacttgccggcagctgcgtggtcttgatagagcgacaccgtgccaccgcgccaccacccttccttgcaacccccagtctgcgtttccgcagatccactgtccgcacataaaggtgtatactctgctcagttatatcatttgctaataattttcactatctttacgacgctgccaccgtgtcgaaggtcggtgcgtcgtcgcgcactccgacgccgcggcggcc

SEQ ID NO: 37823 - DNA, 253 bp, Glycine max
  Clone ID: 700945257H1
caagaggccctcagacaagccactcaggcttccattgcaggatgtctacaaaattggtggtattggtaccgtgccagtgggacgtgttgagactggtgtcgtgaagcccggtatggtggtgacttttggtcccactgggctgacaactgaggttaagtctgttgagatgcaccatgaggctctcacagaggctcttccaggtgacaatgttggctttaatgtgaagaatgttgcagtcaaggatctcaagcgt

SEQ ID NO: 37824 - DNA, 213 bp, Glycine max
  Clone ID: 700945258H1
gagagaagaaaagtcaaagacaatgtcagggatcattcacaagattgaggagacccttcatgtgggaggccacaagaaggaggaggagcacaagggtgagcagcaccatggtggagaatacaaaggggagcatcatggtgaacacagtactgaatacaaaggagagcatcatgttggtgagcacaagccggagcaccatggaggagaagagca

SEQ ID NO: 37825 - DNA, 258 bp, Glycine max
  Clone ID: 700945259H1
accgcaaggtcgctccgctcgcgtcgttgctcaacatgaagcttctcattgctctgcttctggtgttgtgcgcgccgttttcatcttcttccaaacccaaagactcgtccctcggaatctcccccgaagatgacaagtattacaaggcttccgatgtaataaggtgtaaagatggatccggaaaattcaccaaggcgcagctcaacgtcgatatctacttttgcgcttatggcaccgatgaacctggcacatcggcat

SEQ ID NO: 37826 - DNA, 259 bp, Glycine max
  Clone ID: 700945261H1
ctcttgcgacaccaagtctgagggtaaattgacatctctggatcagtacatatctataatgaaaactgggcagaaggatatcttttacataactggaaccatcaaagaacaactggaaaactctcccttccttgagcggcttaagaagaacaattttgaggtacaatttaaattgtttgatttttattacaagtatatttgctctattatatgttcttttagaaacatttgtacttctattctgctgagagcatgatga

SEQ ID NO: 37827 - DNA, 259 bp, Glycine max
  Clone ID: 700945264H1
cgcgaaccagccagtggccgcggcgtatccaggtggtcgagcgtcttccatcgaaacagggactaagctctacatttccaatttggattatggcgtatccaatgatgatattaaggagttgtttcttgaagttggcgacgtgaaacggcatactgttcattatgacaggagtgggagatccaagggtacggcagaagtagtcttctcgcgccgagctgatgctgtagctgcagtgaagaggtacaacaatgttcagctg

SEQ ID NO: 37828 - DNA, 265 bp, Glycine max
  Clone ID: 700945228H1
ctctcaatgagatttggggttgaaaggcaaggcagaaatgagtcctctttcatgggaaaccaaacaaacttcattggtgggtttggacagtacccaattggggatattggaaggtttgatgcagagcaatttacaccaaggttttcaggtaatggtgtttccctcactcttggtcttgactcattaccaggaactcatcaaacatttctaccaaaccaaaacattcaacttggaagaagcttggacattggtgaaccaaatgagt

SEQ ID NO: 37829 - DNA, 276 bp, Glycine max
  Clone ID: 700945201H1
gtggaggtgaaagtgaagatggactgcgaaggatgcgagaggaaagtgaggaaggcggtggaggggatgaaaggcgtgaaccaggtggatgtggaacgtaaggccaacaaagtcactgtggtcggctacgtcgaggcctctaaggtggtcgcccgcatcgctcaccgcaccggcaagaaagccagagctctggccctacgtcccctacgacgtcgttgctcacccctacgcacacggagtctacgacaagaaagccccctccggttatgtccgcaa

SEQ ID NO: 37830 - DNA, 270 bp, Glycine max
  Clone ID: 700945202H1
aagatacttagaatcaattgagtggcgaggatggcaaacacaaacagcgacaccaaagaagaaagcaaaaaaatggatgaaagagagacaatacctctcctcacctcatacaagatgggaaattttaatctatcccacaggattgtgttggcaccgttaacacgatcaaggtcttacaacttcgttcctcagacgcatgctgctctgtattattctcagaagaactaataagggtggcttcttgatcggggaagctaatggtgtatctga

SEQ ID NO: 37831 - DNA, 270 bp, Glycine max
  Clone ID: 700945203H1
caccctggcatgattcaggttttccttggacacagtggtgcccatgacgtagagggaaatgaacttcccaggttggtgtatgtttccagagagaaaaggccaggttaccaacaccacaaaaaggctggtgctgaaaatgcactggtgagggtgtctgcagttctcacaaatgctcccttcattctcaatcttgactgtgatcattatgtgaacaatagcaaggctgtacgagaagcaatgtgttttctgatggatccagtagttggcaga

SEQ ID NO: 37832 - DNA, 263 bp, Glycine max
  Clone ID: 700945204H1
ggttgcgtgggccccgcatagctcgtgccatatatgcaccgccggggatgattcgcaggcgctgatttgggacctttcttccatgggtcaacccgtggagggcgggcttgacccgattcttgcgtacactgcgggtgcggagattgagcagcttcagtggtcgtcttcgcagcctgattgggtcgctattgctttctccaccaagcttcagattcttaggatttgaaattttattaatgcagtatcatcacttctgcttctgt

SEQ ID NO: 37833 - DNA, 259 bp, Glycine max
  Clone ID: 700945205H1
tgccattttattttgctctacctcctcacttctagggttcgcagcttgtctctcaaacaatggcgctgttccttctctacgaatccgcttcgggctacgccctgttcgaggttcacggctccgataaaatcggccagaacaccgaagcggttcggaactccgtttcggacctcaacaggttcggcaaagtcgttaagcttcgctcctacaaccctttcacttccgctctcgatgctctcaagcagtgcaacgccgtctc

SEQ ID NO: 37834 - DNA, 201 bp, Glycine max
  Clone ID: 700945207H1
cactcactcactcttcgtttcgattctctttctcactctagatctgtgtttctctctccaaccttcgtttcaccacacttccatcactcgtcgagtgtagaaatggctccaccaattgagaccccaaccaaagtttccagctatcagaactacccaaaccctagtcttaacgagaggcttctttcatcgatttcccgggaa

SEQ ID NO: 37835 - DNA, 258 bp, Glycine max
  Clone ID: 700945208H1
ctgtgttcttggttcacttggcaaccatccccatcaccggaactggtatcaaccctgctcgtagtcttggtgctgctatcatcttcaacaaggaccttggttgggatgaacactggatcttctgggtgggaccattcatcggtgcagctcttgcagcactctaccaccaggtcgtaatcagggccattcccttcaagtccaagtgattcaatcaaacggattcatgcattaataaggttgagaacaacaaccacaaca

SEQ ID NO: 37836 - DNA, 201 bp, Glycine max
  Clone ID: 700945209H1
caaaagggcagttactaattttcacaactggattcaagctggtttctcttcctcttcttcatgttcatttattgaatcccaccccaaatttctaattctttctctttcactctcccacgtgcaccttcctcttccccgctctaaataattctccgttcccatcattctctctctctctctcccaatacattattattatat

SEQ ID NO: 37837 - DNA, 265 bp, Glycine max
  Clone ID: 700945210H1
caaaattatattacccggcatggacctttcggatgcaaaccaaccagaggaaaaccattcaagccctgagttgctacttgcacaagttatggcagcttgcaaaaagtatgaggtgaaggtttcaggtcaaaattcttctgagtctggtgttccaggtggttttgaacaaataaagaagaatctatctggagataatgtattggatttgttcacatatcatagaatgggagcatctttcttttctccagagcattttcctttgttc

SEQ ID NO: 37838 - DNA, 231 bp, Glycine max
  Clone ID: 700945211H1
agagggagtcagagaaaccctaggtaagaagaaaagatgcaggctggtcatggtttgagatcccgcaccagagattccttctctcgtcctttcaggaagaaggcgagcatcgccctcaccacataccttagaagctaccacgtcggcgactatgatgacgctcaaggttaacgttgccgttcacaagggaattccccacaagattctaccatggccgaaccggacgcgtct

SEQ ID NO: 37839 - DNA, 269 bp, Glycine max
  Clone ID: 700945212H1
aaagcattgaattcaaaaacttaagttcattccttgtgttttgctttcttcctcaaaaccaaacatgtcgaacacatgcggcaactgcgactgcgctgacaagactagctgcaccaagggaaacagctatggtgttattgtagagactgagaagagttacatcgagactgttgtcatggatgttccagcagctgagcatgatgggaagtgcaagtgtggcactaactgcacttgcacggactgcacctgtggccattaaggaatatgta

SEQ ID NO: 37840 - DNA, 264 bp, Glycine max
  Clone ID: 700945213H1
tcaggaagaccagaaggcgtttagctcggcagaagaaggctgtcaagattttcccaaggcatactgctggacctctcaggccaattgttcatggccagactctgaaatacaacatgaaagtcagatctgggcgaggattttctctcgaagagttgaaggctgtgggaattcccaggaaacttggtccaactattgggatttctgttgatcacggagaaagaatcgttctttgagagtctgcagccaatgtgcagaggctaaaac

SEQ ID NO: 37841 - DNA, 268 bp, Glycine max
  Clone ID: 700945214H1
gttcctgcgcgtgaacaagcctcaggtaagccaaagccatggttaacgcataacaatgttatccccaacggagcacttccgtaagcactggcagaactatgtgaagacctggttcactcagccagcacggaagacaagaagacggttggctccgtagcagcaagctgtgaagattttcaccaggcctacgagctggacctcttagacccattgtacatggtcaaactttgaaatacacactgaagtgagaacttgaaagcggatttcc

SEQ ID NO: 37842 - DNA, 255 bp, Glycine max
  Clone ID: 700945215H1
cgtgttttctctctagattctgctcttaaacgccgtcgttttcaaactctttttttccccttcgcttctctgtctttgtaaccgaaaggggggaaaatataattaacaccgatttcgcgaccaattcttcttctgcgttgaattgggacaacgagaaattggatctcagtttttggcaggaaataaaaattgcatttgagtgtaaaataacagagtatagtgtagggccttgttcttgatactgtgctaaatttg

SEQ ID NO: 37843 - DNA, 271 bp, Glycine max
  Clone ID: 700945216H1
cgagcagtccgtgatccccggcggcggcgcgtggctcggcggacaactcttctccgccatggtggttcgcaagccggcgcacctcttcctggacgagctcggcgtggcgtacgacgagcaagaggactacgttgtgataaagcacgcggctttgttcacgtccaccatcatgagcaggcttctagcgaggcccaacgtgaacctcttcaacgcggtggcggcggaggacttgatcgtgaaggaagggagggttgcaggggttgtgaccaac

SEQ ID NO: 37844 - DNA, 77 bp, Glycine max
  Clone ID: 700945217H1
ttaactgaacccttctttttaaggatggaatatgtatattgttccatataatggaagttaaagtggtgttgttgacc

SEQ ID NO: 37845 - DNA, 268 bp, Glycine max
  Clone ID: 700945218H1
cttcttcttcttcctattctggcttcaacatcttcaagggtgaacaaggaataagccaagttttgtcgctctctgcgtacccctttgaggcaaggagctccattgaggaattgcatgagctttgcaaacctttcttctccaaatctcagcctctaacgttgcaagcctcttcacctttgtcctcactctcttcatattcctctgagccacccaaatctgtttcaacgccagagaaacaacaacagatgagcaagcaagcacatgctgt

SEQ ID NO: 37846 - DNA, 196 bp, Glycine max
  Clone ID: 700945220H1
atcccttttctcattctcttcttattcttctttttttcttttattcttcactctcatgtcatcttcttccattccctcctcccctgatcacttcccccacctcggcctcggctactccatcgccatagccctagccttcctcttcctcctctccacccttctcctctcctcctacctctgctgccgccacaaccgc

SEQ ID NO: 37847 - DNA, 247 bp, Glycine max
  Clone ID: 700945221H1
gggtgttgtttgtatatgccggtgcctggtactagaaagtggctgctgtaattgacgagcttccccttggattacatgagagataccttttctgtatcagcccagctgacatggatgatgaaatttcatctcaaggcctagcacagtttgcagagaattatgcaaagcaaggtcttgtccggcttcgagagatatttacaccagggtcactcaaagtgcccatgacgccagctgctctgaaggagtt

SEQ ID NO: 37848 - DNA, 264 bp, Glycine max
  Clone ID: 700945222H1
gacccaggcaggtgtcgcagtacgcggagaaaggacgctatataaatatatttgtccccgatgctctctatttcagccactcgtatattcttcctccgctcaacaactataagattatcttcttcttcttcttctcttcaattcttctccaatcccaaccgcaccctcttccgtccctttcttcacacttccttcaaaccacttccttcgtctttctctttccgaacagatcacactatggccacctcaaacgccaaatcagtc

SEQ ID NO: 37849 - DNA, 264 bp, Glycine max
  Clone ID: 700945223H1
tgtttgttcattgggaaaaaggacgagatgtcttcgagaggcttctgattgattcagattgggcaattaataatggaaactggatgtggctttcttgttcatctttcttttatcagtataatcgtatttattctccaactacatttggtaagaagtatgaccctaatggcgactatattaggcattttctcccagtcttaaaagatatgcccagggagtacatttatgaaccctggacggctcctaaaagcattcagaccaaag

SEQ ID NO: 37850 - DNA, 150 bp, Glycine max
  Clone ID: 700945224H1
ggaaatgtcgggatcggaggacgagggaggagaagagtacctcttcaagatcgtcataatcggagactctgcggtgggcaaatccaaccttctctcccgctacgcccggaacgagttcaacatggactccaaggccaccataggtgccga

SEQ ID NO: 37851 - DNA, 263 bp, Glycine max
  Clone ID: 700945225H1
gaattccataaaaaccatggaggagaggcttccataatggtaaccaaggttgacgagccatcaaagtacggcgtggttgtgatggaagagagcacagggcaggttgataaatttgttgaaaaaccgaaattgtttgttggtaacaaaatcaatgctggaatttacctgctgaacccctctgttttggatcgaattgaactgaggcccacttctatcgagaaagaggtgtttccaaagattgcttccgagaaaaagctatatgc

SEQ ID NO: 37852 - DNA, 213 bp, Glycine max
  Clone ID: 700945226H1
aaaaaagacaacacagagagaagcgtcttaataaacgctcttctctgaaaaacctgatttcttctcttcttctcttctctttcgtttcgatcttcgatctctgaaaatgagagagtgcatttcaatccacatcggtcatgccgctattcaggtcggaaacgcctgctgggagctctactgcctcgaacacggcattcagcctgatgggcagat

SEQ ID NO: 37853 - DNA, 265 bp, Glycine max
  Clone ID: 700945227H1
gggagcccttgacaatttgggcaacttgagacaacaatatggattggccaagtcaaccaatgaagtattgttggtcattgaggcttacaaagcattgcgtgacagagcaccctaccctgctaatcacgttgttggccatctcagtgggagctttgctttcatagtttttgacaaatctacttctaccctctttgtggcctctgatcaatatggtaaggtacctctatattggggaattactgctgatggctacgtagcatttgcc

SEQ ID NO: 37854 - DNA, 243 bp, Glycine max
  Clone ID: 700945196H1
ttgatggtggaaactgtaagagtggggagagaaactagtgactgacttttcgagaaaggaaaaaaaaagagtttccggcattattccatcatgaacgctcttcccattcttctcttcttcctcttcgtttcggcattagtttatgcgaagaaaactggcgatgtgacggagttgcaaattggcgtgaagcataaaccagcatcatgtgaagttctggcacacaaaggtgacagagtcaaagta

SEQ ID NO: 37855 - DNA, 244 bp, Glycine max
  Clone ID: 700945158H1
caaccctttataaattgcacttgggtgaggttgtcacaaccaaccctactgtaggaagcaacgtggaagagctcgtctacaaaaatatacgatttgaggtctgggatcttggcggacaagaaagctgaggacatcatgggcaacatattaccgaggaacgcatgctgttattgcggtgattgacagcagtgatagagccaggatctctatcataaaggatgaactttttaggttgctggggcat

SEQ ID NO: 37856 - DNA, 245 bp, Glycine max
  Clone ID: 700945159H1
ctcatttttcagtttctccgtttcttattcgttagatctcatcttacactcgccatcaagttcgtctcgcgccaccgtcgacgcagctccgaccatctcctttggttccctcactttctcgctctcttcttctcagaaatatgccttctcagaaggttgaaacgggtcatcaagacacggtccatgatgttgcgatggattactatggtaagaggctggccacggcttcatcagatcacacaatt

SEQ ID NO: 37857 - DNA, 246 bp, Glycine max
  unsure (1)..(246): unsure at all n locations
  Clone ID: 700945160H1
tctttcttctagcatttaagagaaagaacaagaaggacataagtgggaagcccagagcacttagaaggttgaggactgcttgtgagagggccaagagaacattgtcatccactgcccagaccacactngaaattgattctctctatgatggaattgatttctactccactgttactcgtgcttaattcgaggaactgaacatggatctctttaggcagtgtatggagccggtggagaaatgtttga

SEQ ID NO: 37858 - DNA, 245 bp, Glycine max
  Clone ID: 700945161H1
ctcctgttaacagggacttaatcagcaacttcctgtcagacccacgtgcacggagccattaaagtttgcgctgaactgagacccacagtagacatttctgtgccaccagatgcagactttgttctccggagttgcgttctagcaattagaacttaaaagcaattatggctttcacttcgaatctttttcagatttctcagaactgcagttatcttgttagtttgggttttcatgattggatgcta

SEQ ID NO: 37859 - DNA, 243 bp, Glycine max
  Clone ID: 700945162H1
gaacgctgctgccgaaacccttccggaaccctaaggtaagtgagtaatcagtggttgagaatggtggagaaggcgaagggtagaaaggaggaggtggttacacgtgagtacaccattaacctcccaagcgcctccatggctgcacatttaagaagaaagctcctaaagctattaaggagataaggaaatttgcccaaaaggccatggggaccaatgatgtgagggtggatgtgaagttgaaca

SEQ ID NO: 37860 - DNA, 248 bp, Glycine max
  Clone ID: 700945163H1
agaaaatcctcaattttctgagcagccaaacactctctctctgtctctcgaaaattctcagtttgcagagaaaatctgaatcatgtcgtggcaagcgtatgtcgacgatcaccttctgtgtgacatcgaaggtaaccacctcactcacgctgctatcatcggccaagacggcagcgtttgggctcagagtaccgacttccctcagttcaaacctgaggagataactgccatcatgaatgactttaatg

SEQ ID NO: 37861 - DNA, 251 bp, Glycine max
  Clone ID: 700945164H1
cttcactccgacattgctcgccttcacacccccacaaacacaaaccgttctgagacgtatttatagttatccccattgtcgttattttctttcttactccctctcaattaaacggtgttagggttagagtaggattagggttagggttcctctttacccgcgtaattctaccttccttccaacaataacaacaataatgttcggctccatcaaccagatcgtctccgccgaagacaccgacggccccgtct

SEQ ID NO: 37862 - DNA, 227 bp, Glycine max
  Clone ID: 700945165H1
ctgtgactctgtgcttagttaacgttaacagtgacttaagatggcggattctgcagatgtcacccacgatgttgtgtccctcctctcttctcctcaaagggactttcttcttcgaaacaacggcgtcaggttaaaattgacagcttgaagggtaagaaacttggtttgtatttttcggcatcctggtgtggtccatgtcaaacatttacgccaactttggtggatgt

SEQ ID NO: 37863 - DNA, 247 bp, Glycine max
  Clone ID: 700945166H1
gcgagtgcgagtgaaaaaaaatgggtgggggaggagctatgaggtcggcggcgaagatagccggaattggcgtgtccaaggcggcgctccggccttcggcgctccctacggagcagacggtccgcaacgcgtcgcgaccaacggcggtctccggagtgtcgtcgcagtcggcgaaatccgcggaggtggcgccgctgcacacggcagctgcctgggacgattgggacttcgccgaggatggcgaatt

SEQ ID NO: 37864 - DNA, 246 bp, Glycine max
  Clone ID: 700945167H1
aaaacgcattgtgtttctctctttccgcggcgtaggtctgagcagtttgggaaaccctaactgctctcaccactctctttgctttttttcctctccgatcaacgacctctttcgtcgccctaagcatggcaggacttgcacccgagggatcacagtttgatgctcgtcaatatgataccaagatgaatgagttgcttacatctgatggacaggattttttcacatcttatgatgaggtttatgaca

SEQ ID NO: 37865 - DNA, 67 bp, Glycine max
  Clone ID: 700945168H1
aaatttgcatcccttaattcttgtagaattgatgtctggtttgtacaatcaggtttccacacaacat

SEQ ID NO: 37866 - DNA, 231 bp, Glycine max
  Clone ID: 700945169H1
gtttatctttcacacaacccgtcaaggtcactttgtgggaaataagcatggagaataaaacacattgaccctgagtgaactttggtctttgtatagattgtgtttcttgtttatttgtagtttgtgacggatgaaaccatgccattgcatccaccaaacttggtacgtttgttatgaacttgtgatgtaatcctttccagtaaattttctcttctgtgagttgtcagtgcc

SEQ ID NO: 37867 - DNA, 246 bp, Glycine max
  Clone ID: 700945170H1
gttttacaaaaggctctggaagtgtgggacctacaagttatccctcttgactctccagttgctgagcctgcccagattgaccctgagctggaaaatgccttcatttgtcatttgcaagaccattggttttgtatccgtaaagtgaacagggagtggtataattttgacagtctctatgcagccccacagcacctttccaagttttacctctctgcctatcttgactctttgaaaggctttgggtgg

SEQ ID NO: 37868 - DNA, 246 bp, Glycine max
  Clone ID: 700945173H1
ctttctacctgaggccatgcaatcaggtcctaaatcccttgcctcttaggccctcctctttgaaagtaagaacaagagaggaggaaagttgttgcactggttccaacactgaatcagtctgtgaatggaaaaccaaggcaagaactcagatgctgttgattctaagtttcaaaaatatcacgaggaaggagctgcaccccagaagaagccaccagtgtacaagcctccagtgtacaagccaccagt

SEQ ID NO: 37869 - DNA, 242 bp, Glycine max
  Clone ID: 700945176H1
cttggtgagaagaacatcaccttaacaagttggagagaaggagcttcaatgatacgacataggctccgacaaaagaaggttctcttgattttagacgatgttgacaagcacaaacaattaagggctatggttggaagatctggttggtttggtgccggtagcagagtcatcattaccactcgggacaaacatctactaaaatatcatggcgttgaaagaacttatgaggtggaggttttgaa

SEQ ID NO: 37870 - DNA, 243 bp, Glycine max
  Clone ID: 700945178H1
attcaattttgcgtttctctgcctaaaaggattgaaagatgggtcaagcattcggttgctaccaagtcgatcagtcaaatgtggctatcaaggagcattttggaaaatttgatgatgtcctagagcctggatgtcactgcctgccttggtgtcttgggtaccagattgctggtagtctgtcgctgcgagtgcagcaacttgatgttcgatgtgagacgaaaaccaaggacaatgtctttgtca

SEQ ID NO: 37871 - DNA, 247 bp, Glycine max
  Clone ID: 700945179H1
atgatcaccacgaagatgtcttgagggatgattctcttcctgtctgttcacctgacaaagtacacgatgtgaaattaggcgacttagcggaggagagtaatgttgctcctgcaacaagtgatggccaggctaatgctgcctcaggttctagtagcaaagctggtacagtcaggggatcagactctcactgattttaggagtggctataactcaagctcaagaggtgcaatgtcatttgctgctgctg

SEQ ID NO: 37872 - DNA, 244 bp, Glycine max
  Clone ID: 700945180H1
atcctcgatggtaaataatacttttctccacagcaatcaatttatatgagtattcaaagctagactgcgttcttggaacttcttatgggtatgtggaatataactagttactctgcagtgtaatggatcgggaaggaggatctatcgtcggatcttgatactactcggagctcgggattcgtaaggatggctcttactatgatattcgcactgactagcgcaaaatcgatatgaggtggtaccc

SEQ ID NO: 37873 - DNA, 244 bp, Glycine max
  Clone ID: 700945181H1
aacttgctgaatttattgatagtttcttcctttgctgaattgattttctcctatctgttgtatgttactgggcagcgcgtgctgtatgttgacattgatgttcaccatggtgatggtgttgagaggccttttacaccactgatagagtgatgacagtgtctttccataagtttggggactttttccctggcacaggacacgtcaaggacattggggtgggatcaggaaagaattatgcagtcaa

SEQ ID NO: 37874 - DNA, 244 bp, Glycine max
  Clone ID: 700945182H1
ggtgaagaaggagaagtggtgagaaagcaaggacaaaggggtgttggtggagataagtggtacttgtatagctgcttacaagactgtaaatattggtgctgtttaatacacgagactagttctctttcgatggtcccttttgagtgaaaaaccttgtcttctcagctttctttcgagagatcttaaagacattgactaacaacaataaagtggatcaatcaaaagacttacttcttcttctaac

SEQ ID NO: 37875 - DNA, 230 bp, Glycine max
  Clone ID: 700945183H1
catgcacagttttgatcctccttatgcacataatgatgtcaaacctggtaatgttctcataacacacagaaaaggacaaccacctcttgccatactgatggattttggcagtgctcgtcctgcaaggaagcaaattagctccaggtcagaggcccttcagttgcaggattgggcatctgaacattgctctgctcctttcggagctcctgagcggtgggcttccccaagcc

SEQ ID NO: 37876 - DNA, 244 bp, Glycine max
  unsure (1)..(244): unsure at all n locations
  Clone ID: 700945185H1
cctgaaacttgggtgcgattccttcactcacaacaacaacatctcactatggctcttctgagtcgagcctcttcacgcttccctcagctggtttcccctcaaagggtagtttcactccacacacgctcccatcactgaacgcatccccatccacagccacgcctacaccatatgccccgccaccgcctccgtccgcttcctctcccgccggcgtttcgaaggcggcncgagttcgtgatctcga

SEQ ID NO: 37877 - DNA, 241 bp, Glycine max
  Clone ID: 700945186H1
gtggcggctaaggttggtgtgcttcctctctctccggttagggaaagaaacgcactttttggttttggttttggatttcgatctcactgcattgccttctgctactgctagttgcatgatggtgtgcagaactttgtagttgatttgaataaggcccttgttttccaggttgggcatcttggagaagcttatgaagagtgggttcaccagcccattgtcagcaaggaaggcccccgtttct

SEQ ID NO: 37878 - DNA, 65 bp, Glycine max
  Clone ID: 700945187H1
tgaaggagtaacagggattatcatggttgcctctaatcggcaatacgcctgtcactcttacgcca

SEQ ID NO: 37879 - DNA, 244 bp, Glycine max
  Clone ID: 700945188H1
atcctcattggcacagcctactcagtcaaatcctgaatctgctgaaggagaagtaaaagctaatgttccttctggaaacaggggaggtgaattctctgcttctgcaggtggacacggtggcaaccttcaattgagaatggttctcaaagaaattttattcatcatggagcttcctatgtagtgaaggatgatggtgcagtcagtagtataagcaaagggaaaccttccaagaaaagtgttgggc

SEQ ID NO: 37880 - DNA, 242 bp, Glycine max
  Clone ID: 700945190H1
gtttgcatcaaagggagaaactgggagacacagaagatgagagagataattagtattcatattggacaagctggaattcagtgacacctctgttggcattgcacacgatgctttcaacaccttcttcagcgagaccggattcggcaagcatgtgccaagggctttatttgttgatttggaacctagtgttattgatgaagtaagaactggtccttacagacaactctttcaccctgagcaat

SEQ ID NO: 37881 - DNA, 243 bp, Glycine max
  Clone ID: 700945192H1
acttctgctttacatgaagtatccgcagaagctagagattccaaagaaaagctattggccaaccatgtggaacatgaaaactatgagacccagattgaagatttaaagttggtcttaaaggcactaatgaaaaatatgagtccatgcttaatgatgcacggcatgagattgacactcttacatgtagtgttgaaaattctaagagcaacatcgaaaactccaaggcagaatgggagcagagag

SEQ ID NO: 37882 - DNA, 245 bp, Glycine max
  Clone ID: 700945157H1
cacggctttggtgagagagagggtatattctgggtttcgatactctttggtaacgaaaatcgtcaccatttataaatcctttctgcttaactattgtgacgtacttctcttatatattcgttgctagttttgggtttgtttctcaccacgtcatcggctaaggtttctctgtagcctgtgaaccatactgggatttaccaatgcttgctgccagttgacaatatagtaaagggacaattccttgt

SEQ ID NO: 37883 - DNA, 247 bp, Glycine max
  unsure (1)..(247): unsure at all n locations
  Clone ID: 700945121H1
atctggggcctcaccaattgagagtcaaaaacttattgcacattatatgtcagctttggatgctgaagttacttttcacaagttttaccctcaattcaatcagttccatccactgcacttcattactatcccaattcaggtataatctcagaaaatgcaacttgttcttcgtttggaatcaacactgttggaatcatcagggcaccgcgcggggatngcaaggaagctattgtcttggtaacgcctt

SEQ ID NO: 37884 - DNA, 249 bp, Glycine max
  Clone ID: 700945122H1
gtaaagaagggtgacatgaatctgcgcaaggatgtgaaatcagaagaaggtgagagaatgtgtcccatacctgatggattgccaaaatctgctgatgaacttagggaagaggagcaagcaagaatgccgattcaccatacactaagcttcttaggaccatgggcaggcaccctgcatggtactctcctgcccctgaccatgaaacagattgatgaatgatgattcccatacatactaagctcaaaggga

SEQ ID NO: 37885 - DNA, 247 bp, Glycine max
  Clone ID: 700945123H1
ctcgagcgaatcggctcgagggaggagaagacggagaaggtggtgtctgaggcagttcggataattgaagcgtttgaagttctgccaaagctcgtggttttcgatctcgattacactctctggccttctactgtgagtgtcgatcgaagcgcgagattccttctctgtatccccacgccaaaggcatattgttagctctcaaagagaaaggcatcgacattgccatcgcttctcgctcgccaacggc

SEQ ID NO: 37886 - DNA, 251 bp, Glycine max
  Clone ID: 700945124H1
ctttaatatccattatgaaaaagcacttttttttagcaaagacgagtgctttttcataatggatattaaagaatcaaacagaaatgaaatagcacttttctttgctaaaaaaaaaaaaaaaaaaaaaccgaaaaagggggcccccccgcctaggggcccccccccccggggaattattccgggctcggccccggcgggggccccgcgttccccaaaggggggccgtttaaggcctggggggaaccggggcc

SEQ ID NO: 37887 - DNA, 248 bp, Glycine max
  Clone ID: 700945126H1
tcttcatccagggagggcaaatgtttccaaggctgaacttaaggagaagctagctaggatgtatgatgtgaaagaccctaatactgtatttgtcttcaaattccgaacacattttggaggtggcaaaccactggatttggtttgatttatgacacagtggaaaatgctaaaaagtatgagcccaaatacaggcttatcaggaacggccttgacactaaggtagaaaagtcaaggaagcaaatgaagga

SEQ ID NO: 37888 - DNA, 238 bp, Glycine max
  Clone ID: 700945129H1
ttggttttcgaatacggcgaggtgtattaacagatattcctgccattctagtgttcgtttccaggaaagttcacaagcagtggctcagtccaatccagtgtctacctattgttcttaaggggcttgtgagtatggtgtgatgtggatgtggtggaattctcggatattggtgcaccagagtcagtttccaaagagcaagctgtacacagagattgtagatgacttgcggtggggcgat

SEQ ID NO: 37889 - DNA, 249 bp, Glycine max
  Clone ID: 700945130H1
cttcaaaacactcataacacaaagcacaaagcaaagctcatccttgagttaaaaaatggcagcagcttcttccatggctctctcatccccatccttggctggcaaggccgtgaagctgggcccatcagcccagaagtgggaagggtgagcatgaggaagaccgtcaccaagcaggtctcctcaggaagcccatggtacggcccagaccgagtcaagtacttgggcccattctctggcgagcccccgtcc

SEQ ID NO: 37890 - DNA, 251 bp, Glycine max
  Clone ID: 700945131H1
gtaaaactgtgccttcagtttgtaaaccagtgaatctcaagggcaataaaaaggcattgagtaataataagatacgacaggcgagatctcgaaacagtaagaatatcccatcaagtatacctcttcgcgttctactaggaaggccaaatccttgtatatgcaaagtcaattgaatggaggacataaaaaaggaaaaaagaatgtgggacgtaaaaagggaaagcaaggtaaaaccaagaaggtgattcctc

SEQ ID NO: 37891 - DNA, 253 bp, Glycine max
  Clone ID: 700945132H1
tgaagctgtcttgttgatgattgaaaaccctgccagggccaatggccacatatttaatgtgggcaaccctaacaatgaggtcactgttaggcagcttgctgaaatgctgattcaggtttactcaaaggtagtggagaacaaactgctgaaacacctaccattgatgtgagctcaaaagaattttatggtgagggatatgatgacagtgacaagagaatccctgacatgaccataataaacaagcagcttggat

SEQ ID NO: 37892 - DNA, 251 bp, Glycine max
  Clone ID: 700945133H1
cgctttcactttactgaacaacgacttcatcttcactcttccttcaaatttccaacaagggttcaagggtattatgcttgctggattcattctcttgctgaaatgcagtctttctagaaagtttgttcactgtccctttattggcgttactatgctacctactggagcaaaagagacccaattacgtgagaacaacagccagaaggtccatcctcaaccaatggaagaggccatgaatcagaatccagaag

SEQ ID NO: 37893 - DNA, 247 bp, Glycine max
  Clone ID: 700945134H1
gaaagagaggaaaaatgccgctcaagttggcgggaggagccactgtcggttcccttctcctatgtgttgctatttctctctttcacatcgctggggccgaagatccctacaggttcttcaactggaagttacttatggtgacatttaccctcttggtgttcgccaaacgggaatattgatcaacgggcaattcccaggtccagatattcattctgttaccaacgacaacctcatcatcaatgtcttc

SEQ ID NO: 37894 - DNA, 197 bp, Glycine max
  Clone ID: 700945136H1
cgaacggcgaacgttcgcaagagacgcaacacaaagttgaacgaggaataggcgtgtagggaaaccgtttcattttctagcgcgtgactttcaaatccaatcttccataccaatggccttcagcacgctctcagatctgccgcgaacttgtcgcttcttccgaatcctccctctctacttcagtgagcagagggttt

SEQ ID NO: 37895 - DNA, 247 bp, Glycine max
  Clone ID: 700945139H1
ttgtgaaccaattttctgtgggtggcttggctaggttctgcagagtaagtaattgtcttctatatcagtcctattggggcattttctctctctttcctttttgtcttttggtagctaatcatcagctcaatggcgcggtgatatacttgaaaactttgtgctgagatattctatatgttttagttttgataatatagacaaaatttttatgtaaatgattatgaaacgtggtgaaaattggggttgg

SEQ ID NO: 37896 - DNA, 249 bp, Glycine max
  Clone ID: 700945140H1
agaggagctgctccttcgtgcagctaaaaaagctggaatggatttccatgagttgctggatatccctcaaggagatcggaggaagtaccatgatgatgttaccgttatggtggtatcactcgaaggaagaatctggaaatcatcagggaagtatccgtgagatcttattcaactccctgttgtctgtatacatatttgaggtgccttgaagccagtgccaaactttccaacttgacccatttttcatgg

SEQ ID NO: 37897 - DNA, 249 bp, Glycine max
  Clone ID: 700945141H1
atcagctttacgtgaaactgttgttgaagtgcctaatgtcagctgggaagacattggaggccttgaaaatgtcaagcgtgaactgcaagagactgtacaatatccagttgagcacccagaaaagtttgagaagtttggtatgtctccatctaaaggagtacttttctatggtcctccaggatgtgggaaaactttgttagccaaagcaattgctaatgaatgtcaagctaacttcatcagtgtgaaagg

SEQ ID NO: 37898 - DNA, 248 bp, Glycine max
  Clone ID: 700945142H1
catgtcgactcctatgttctgtctgagtccagtctctttgtttatgcctacaagatcatcatcaaaacctgtggtactacaaagctactgcttgcaatcccacccatattgaaatttgctgaaatgctttccctcaatgttagatctgtgaattacaccaggggaagtttcatctttcccggtgctcagccctatccccatcgcaacttttctgaggaagttgctattcttgatggctactttggcaa

SEQ ID NO: 37899 - DNA, 246 bp, Glycine max
  Clone ID: 700945143H1
aaccccccaaaaagcacaagcctggtaaaacaccaaagacacccaaaacacccgttgttaagccaccagtcaccatccctcccattaatgttcctcccgttgttcttccaccaatagtgaagccccaggtattctccctccaattccaattattaacccaccaaccacaccagggaagggagggaacactccatgcccaccaccaaagtctcctgcgcaggctacgtgccccattgacacgctcaa

SEQ ID NO: 37900 - DNA, 234 bp, Glycine max
  Clone ID: 700945144H1
caagaagataaaaccgacacaaagatctagtcctagctagaatcaaacaggggcgatctcaccttcaagaacacatcgccatggcaaggaacttgcttcttgtgctttttgcagtagccaccctctccatggctcagcagcccaaaccagacacatggtcggtgatgccacgggctggatcatccctgctggcggcgctgccacctacaccgcctgggcttccaacaaaacctt

SEQ ID NO: 37901 - DNA, 245 bp, Glycine max
  Clone ID: 700945145H1
cgaacggcgaacgttcgcaagagacgcaacacaaagttgaacgaggaataggcgtgtagggaaaccgtttcattttcaagcgcgtgactttcaaatccaatcttccataccaatggccttcagcacgctctcagatctgccgcgaagttgtcgcttcttccgaatcctccctctctaactcagtgagcagaggttttcattcaactggcatgaagaggatgggaggtggacatggccatgatgag

SEQ ID NO: 37902 - DNA, 230 bp, Glycine max
  Clone ID: 700945146H1
cggcaaggcaaatctgcattgcgatggcgcctccgaagctcttcgtctttgcgctttctgtaaccctaattttcgccatcgatggggccgacgccgatatttccatcgaaggaatgcacttgcagacctgatacctccgacatcatgatccaattagatcaactcaattccacgatccaaattctctcagtctcaaatcagcgataagttggcacgaagtaccgaagaag

SEQ ID NO: 37903 - DNA, 248 bp, Glycine max
  Clone ID: 700945147H1
agcctatctaccatatcggttgtgcttctccttatgcgaaattaggattacgggtatcatctatctatgtatctatcttgttccacgcttcacagatgataatacatggctacacaaatacgcaccttgcgggttcccgaaccctatccttacagcagaggctacgtaaagtccgtgggcgaggccacggtgaacctggagaaggataacactttcttctccaagttggaccaagagtcgaagccggt

SEQ ID NO: 37904 - DNA, 252 bp, Glycine max
  Clone ID: 700945148H1
gttcagacagcactctccctctccctgaaccgcacccaagccaccaaaaccttcgtggctaactgcaacaaattcagaggcctgaaacccagagagcacgctgcgctcaaggactgcgccgaggaaatagcgacagcgttgaccgcctcagccggtcgctgaaggagctcaagctatgtaaggttaagggtgaggacttcacgtggcacattagcaacgtggagacatgggtcagttctgctttgaccgatg

SEQ ID NO: 37905 - DNA, 243 bp, Glycine max
  Clone ID: 700945151H1
cgaaatatggcttcaactcatctgcttcccctagcaaccttcttcttacttctctccgcttcttatctccagattgctggggcggaagcacaaccgttgactagtctcaagcttaactctcatatcttcaggagtctactgctaaagagattaatgaaaatcccgaggcaggatgggaggctgctataaatcctcgtttctccaattatacagttgaacaatttaagcgccttcttggagtca

SEQ ID NO: 37906 - DNA, 248 bp, Glycine max
  Clone ID: 700945153H1
gcagaaaccagagaacattccgcccgaaaaaaagtactccttctggaagtaagggagctcaacttcgaaaacatattgatgccacgttaggtagtggaaatctgagggaagcagtaaagctacctcctggggaggatttaaatgagtggctagctgtcaacactgttgatttcttcaatcaggtgaatcttgctttatggtacccttacagagttctgtactcctgagaattgtcggacaatgtctgc

SEQ ID NO: 37907 - DNA, 250 bp, Glycine max
  Clone ID: 700945120H1
caagaggaagcatcaagcatatcattttacaacacaaaaaacagacaaaacaaaacccccaaaccccaaactcatcattcatcataattgtttgttgctcgaaagaacaatgctccacatcacctgcatcttttaatgtgccttctaagttccttctcacccccaatcaacgctcttctcaacctcactttaccccaccaacaccctcaccccgaatccgtcgtccacgatctccaacggaaggtgaatg

SEQ ID NO: 37908 - DNA, 246 bp, Glycine max
  Clone ID: 700945156H1
gctcgagcggctcgaggcttttcactgctcctggtgttcttcaatatctcagtggtgtcatcctctttgaggaaaccctctaccagagcacagctgcaggcaagccctttgtgaatgtcttgaaggagctggtgtgcttcctggcatcaaggttgacaagggcacagtcgagcttgctggactcaatggagaaaccaccactcagggtctagatggccttggtcagcgttgtgccaagtactacga

SEQ ID NO: 37909 - DNA, 131 bp, Glycine max
  Clone ID: 700945084H1
caatcttctcttctcacacaatctctgttgaacaacgctagagaataatatctcaagtatcatgtgatgagatgaaccaagcacaacaacttcaagaagcttgaagtttgaactgtctcaaacatgttctc

SEQ ID NO: 37910 - DNA, 220 bp, Glycine max
  Clone ID: 700945085H1
caaaaaacacagtaaatagtaaatataaataccaacgctggcgtgatggtagtttagggcggatgtactgctactctcgaggattggggtctcgagtctcgtatcactcttcagttctcgttgttatgcttcgcttgctgggactagggttttcagtttcgattcattcggtaataattagagatgtttgggagggcaccgaagaagagcgataatacga

SEQ ID NO: 37911 - DNA, 267 bp, Glycine max
  Clone ID: 700945086H1
atttctcaaatcggaatctttcactccaccgctctaatccctaattccgatcaacgcttttgctttcgtcgctcgccagtttgttagcgggagctcagttattctgttttattgacgaagtgataacaaatggatgatgggaggatgagcatattgcccctattgatcttacattgaaagatccagttaaaagtaattgggatgatgaagatgtggatgacaatgatgtgaaggaatcatgggaggatgaagacgagcctgctccgg

SEQ ID NO: 37912 - DNA, 266 bp, Glycine max
  Clone ID: 700945087H1
agcttttatttggcattgaaaagggtccagagtactcaacgctgatagaccggctggatcgagcattgttgatgactgggactgcctgaaacccatggtcaggacttttgagacacattgtggatccttgtctcaatcgggatgaacaacatgaggtgctttgcagacatctgcaatgtcgggataaagaatgaacaaatggctgaggcttccagcacgagcttgtgtcagtgttccttacaatccctggagttctctagcaaggg

SEQ ID NO: 37913 - DNA, 56 bp, Glycine max
  Clone ID: 700945088H1
cgacgacgcttcattcattaggctaagagaatatcttcatcttccacacaacatac

SEQ ID NO: 37914 - DNA, 265 bp, Glycine max
  Clone ID: 700945089H1
gaactgcaacatactatcgtcatgttagagatccttcctctgatggttttgctgagataatgatgcttcaagggagtctactaatgggtggacaactaaattcacatgatcatttcaaagactggagacttgatgtgataacatgtcctatgagcaattgctagagcttggtgagagaattggtcatgtgaacactgggcttaaggaagatgagatgggacggaacataaggaagactaggcttcaattttgggatgatacatca

SEQ ID NO: 37915 - DNA, 261 bp, Glycine max
  Clone ID: 700945090H1
cgcaagggagagatagaagaggcagaggaaattttgaggcagtccaaaactttggaagcccaaatagaagattttgctaaccagaacaagtacttgtcacttaatgtttccatggatgaacaatctgttctgtctaatcatcagtcttccaggaaaggcttgggagtttgggagttgctactgaagttgataatgcttcagcctcatctgtggtttggtcaagtaagaatagttctgaatcaacattggtttagaaagaat

SEQ ID NO: 37916 - DNA, 261 bp, Glycine max
  unsure (1)..(261): unsure at all n locations
  Clone ID: 700945091H1
ggagaacacacattctcagcagggttgttctcattcaaaccattacaaaagcccaacgtttgtaaccaaaatcaaaatgaattttctccaaatacatacccatcgaaacctaccccagataagactacagtgttcaaaccaatccaacaaccaaaagttcagacaactctaaatcagctaacaaaaatttagctgaagatttcttttttccaccaaacccagcttccacggcancattggtccccaacccatttcagcctc

SEQ ID NO: 37917 - DNA, 263 bp, Glycine max
  Clone ID: 700945092H1
caaaagggagaagaaaaggaaagaaaactctcaaaaaactattatagcaatggcagaacaaaaccaaaaccaaacaactgaagctggaaggcaccaagaggttggtcacaagagccttctccagagtgatgctcttaccagtatattctggagacaagtgtctacccaagagaacctgaatccatgaaagaactgagagagttgacagcaaaacacccatggaacatcatgacaacctctgcagacgaagggcagttcttgaa

SEQ ID NO: 37918 - DNA, 261 bp, Glycine max
  Clone ID: 700945093H1
cacacctactgccaccacttcctgcttagtgcgaaagccatttcagcacattaaatggcagttcacggtgacgatgaccctgtggtgatggtggttcccaacctctccccgcccaacacctacgaagctgtcgtcacggtggcaccttcgaccgattgcacaatggccaccgcctcttcctcactgcttcagcggagttggctaggtgccggattgtaattggagtttgtgacggacctatgctggcaaaaaaacagtttg

SEQ ID NO: 37919 - DNA, 244 bp, Glycine max
  Clone ID: 700945095H1
cattaatgtgtgtttgtcacgagacccatagtgctgccaaattatagtaactctctttctctatctgaagaagaagaagttctgaagaagcatgtgtggaggtgctatcatctcagacttcattggtgtgaagcgtgccgcaacctcgccgcgcaggaactgtggtccgagcttgaccctttctctgacctccttggcttcgataccaccaccaccaccaccaaccaaccaccccatacagaca

SEQ ID NO: 37920 - DNA, 186 bp, Glycine max
  Clone ID: 700945096H1
gaaacccttcttccattaccggcgaacgacatcggtgacagaaaagcaacaagcaatctcgatccccaaatcgtgaaatccgatgacgaccgctgcaagacccacctgggcatctgctagaggttgcaacgaacaagtggtactcgaattttcggtccctcacaaaagtactcttctagggacatc

SEQ ID NO: 37921 - DNA, 254 bp, Glycine max
  Clone ID: 700945102H1
gattcctcgtcttcgtcggattccgacaacgacaaaaccagcgccactgattccttcaagtctaatgttttcaggcttttcggcagagaaaagcccattcatcatgttcttggcggtggaaaaccggctgatgtttttctatggagaaacaagaagatatccgcatcgacactcggagttgcgaccgctatatgggttctgtttgaattgcttgagtaccacctcctgactttggtttgccacttcctgatcct

SEQ ID NO: 37922 - DNA, 239 bp, Glycine max
  Clone ID: 700945103H1
ttcgagcgaatcggctcgagctgctgtacatattttaagtgattcgcacaagcagggatgatggatcattgttggcgaggatttcgtcttttggatagtttggctaaccagccgttttatttagagggtgggatgaggatcactgattaaatgaacaaagtctgtaaaattagctagtttcaattcgtaagaactatttcatctttcttaagcctgttataaacatctcaaggttttct

SEQ ID NO: 37923 - DNA, 248 bp, Glycine max
  Clone ID: 700945105H1
atcatatttgcctggcaaggtgaggaaggttggtagggttgcaagggcgatagcatcatgagccacccaatccccagcactgatgattcccattcagtgcaaattattttaccacagaaacagttgggtggaagtcagacatgtacctattttgttgttcgtatactcacaatgttgctccaaagggaaaatttattgcatttgtatcaactgaggcagagacagatcagccggcaattgaactgaaa

SEQ ID NO: 37924 - DNA, 252 bp, Glycine max
  Clone ID: 700945106H1
aaggcaagtggcgagtgaggaatgcagagaaatgagaattcgtcattggctgagtccttctgaggcaggtggccctgccaaacgcagaagctccggcagaaattgccaccgcaaacacgtcgaagagggtagtaatagcactcggtttcattctcccacattcccaattctgagcgttaagatgagtgagaaagagaaaggcaataatagtgagggacagtcgacgttgctgcacggcaagtacgagcttgg

SEQ ID NO: 37925 - DNA, 252 bp, Glycine max
  Clone ID: 700945107H1
gtgacgtgccctagccccatatctagtctccctctctcaatctcacatctctcgtcgccaccgccgcgccgcacggaggcacccacggaaccaatctagccatcagttgaaacagtgagcttacaaaaaatgcaactgcacctgcacaaattcctacaagctttggccatgagttgagggcttgtcttcgttgccgccttgtcaaaacctatgatcagttcagagagtcaggctgtgagaactgctcattct

SEQ ID NO: 37926 - DNA, 249 bp, Glycine max
  Clone ID: 700945108H1
cttcacttgcatttggttacatgctggggttattcatttgctagctaatatgttgagtctggtcttcattggcattcgccttgaacagcaattcggatttattaagattggaatcatatacttggtgtcgggtttggtggaagtgtactgtcgtctctatttatcagagaccacatctctgttggtgcttctggtgccctttttggacttcttggcgcaatgctgtctgaacttatcacaaactggact

SEQ ID NO: 37927 - DNA, 250 bp, Glycine max
  Clone ID: 700945109H1
ctcagagagtcttcccgtctcttcctcttcacttcttatatcgtcgcccccaaacgacgccgttttctgttctcttatgtaaacgccgttcgagaacaaaccaaaaaaagaaaagaaaatcagttattgccttgttgttttgtttccggttcggtttatttcaatggatcgggcggcgttgacggttggaccgggcatggacatgccgatcatgcacgacagcgaccgttacgatctggtacgcgacatc

SEQ ID NO: 37928 - DNA, 267 bp, Glycine max
  Clone ID: 700945110H1
agctcggaatcggctcagtccagcgaatcggctcgaggcttgttcaacatcataggcaacttgctcttccccttactcgcattcgcgggcctgtacttcctcttccgcagagcccaaggcgggcccggcgggcatggcgggctgggagggcccatggacttcgggcggaacaagtccaagttccaggaagtccccgagaccggcgtgagcttcgctgacgtggcaggcgcggaccaagcgaagcttgaattacaagaggttgttgat

SEQ ID NO: 37929 - DNA, 251 bp, Glycine max
  Clone ID: 700945112H1
ctcgagccggaaaatttcacagtgtagccaaggtcattggaactgttataacagtttcacgagctatggttatgactctgtacaaaggccctgccttccaaatcataaagggtggaggagccatgagccacatagcaactctagcagtaccagtaccaccgaaccctctgaccagcactggatagttggaactgtttatctcatatcaagttgtgctagttgggctggcttcttcattttgcaatcattca

SEQ ID NO: 37930 - DNA, 250 bp, Glycine max
  unsure (1)..(250): unsure at all n locations
  Clone ID: 700945113H1
tccatctcaaaatctcatcacttttcaaacatgaaagacaccattgttctataccctaatgttctaaggggacacctagtttccatggtggagctaggcaaactcatactaactcaccacccttcactttccatcactatcctcatcctcactccaaccaccacctcttccaccaccagcgtcaagcanaactctaatgctcgatacatcgccancgtcacagccacgggncccgccatcacattccacc

SEQ ID NO: 37931 - DNA, 249 bp, Glycine max
  Clone ID: 700945114H1
tggtggatgatgtgttttatgtattgcagagttgcctgcggagggcaatatccacttccaatatcagttctgttgtcgcagttttgagtggtgctagtagtttgctcggtaatgaatatcatgaagcttgcagcacaaaactagagagccaaaccttggtgcaaagttgttctttggtggtgttggcgtgcaaaaaacagggaccgaaattgcaacagctttgaataatatggatgttagcagtgaata

SEQ ID NO: 37932 - DNA, 255 bp, Glycine max
  Clone ID: 700945116H1
caataccagcaagttatagaaagtgtttactcagtatttgaaaagaggttctgaatggcacaccctctgagttttgctcctatttgttccttcaaatcctcgtccacaccaggggcacttacagttaccggaattcagttgtttcggcttttattaggataaacgaagcatgtcacgattctaaagctcgaaactttcaatctttgaaggttaaggctgcggatgataatccaagcaccaaaacaaagagtattg

SEQ ID NO: 37933 - DNA, 251 bp, Glycine max
  Clone ID: 700945118H1
atcgctacttgcaccaaagctaactatttggtcaccttctgcccccatcgccgctagctcatccatccatcactttctactctctctacttaccttagctagccttattttattgtcatacctcctttatgttgatgggtactactactatatatgccagtccccattcatattatatggttcttcaactttattagttcttgcacgacattggatctatgtaacccaagatggcataatgggaagatata

SEQ ID NO: 37934 - DNA, 118 bp, Glycine max
  Clone ID: 700945083H1
cagtttttgagatgttgtcaccccttcttctatttctatgcctaactcttcctttgtttttgttgtccttcttcaaataccgtaaaaccttcaagcatccaccacttccacagaacat

SEQ ID NO: 37935 - DNA, 248 bp, Glycine max
  Clone ID: 700945119H1
atccttgtggcgtgtgtggccactatcacaaatacgaagaaggggaagtgtgttcaatttgcggtcaccggattccggttggatcggagaaaacttcgatacaagtcagtgcttttccttccgttgtctgccggaatttctttacctaggaagctacgacaatgcgtcccgctccgagcttctcaagactcaggggatttctcgtatcctcaatactgttccttcttgtcaaaatctctacaagaact

SEQ ID NO: 37936 - DNA, 144 bp, Glycine max
  Clone ID: 700945052H1
gatttaatattcaaaggtatctgattctagcttgagttccattttgtatgattttgggtgcagatttccttaccggtttggtcagtgtaagctaccaacttggctatttaaagtgttatgtgtaattgctttaattaacttatg

SEQ ID NO: 37937 - DNA, 225 bp, Glycine max
  Clone ID: 700945053H1
cttgtttatcggaacgttgctataaacgttgttgttttcagataaccacgtgactcactatctatctatcaatcgatatctccgagttcagccgaaccaaactccgaagctatggcagagctccaaaccaaggttgaacctgtacggtcccggctccggtggatcccgagccaccgctagctgaggctccgccgctcgagaagaaagcggtggcggtgccacaac

SEQ ID NO: 37938 - DNA, 273 bp, Glycine max
  Clone ID: 700945054H1
atcaaatgcaaattcaaaacttttgttttgagctgtctctttattgaaatggtaaacatgaattagacgatcatgagaaccaagattgttctcttcttctggaatctcctctgctcgtagtgtccagtattgatcattaatgtttcaatcaagagacagctcaaaaccaaatgcaaattcaaaactttggggaacctttttttctggttatacatgaaggtgaaactcttgacgaaattaaagtgcgaatacaaaactaacttcaagttcctg

SEQ ID NO: 37939 - DNA, 272 bp, Glycine max
  Clone ID: 700945057H1
gtttgtgctcatgacaaacccacatattgggaatactggcataaattttgatgatgaggaatcaatacagtgtttccttactggacttgtaattagaagtttgagtatcagtacctctaactggagatgtaagaagcctctggggattacctagctgaaaggaatatcatgggaatttatgatgttgatactcgtgcaatcacgcggcgattgcggcaagatggcagtcttattggtgttttgagcactgacaattccaaaaaggatgagga

SEQ ID NO: 37940 - DNA, 263 bp, Glycine max
  Clone ID: 700945058H1
cacacacttcggttaatcagaaagaagctaatcggaatcgcaagacaccgccgacgacgacatggccgccgccgtgacagatatggcccgccgccacacgattagccaaatactggtggacctcctcaagtttgccgtcggtccgccatcgacggctctcgcaaaatcatccctggtaggaagcaggtagataagatggtgccagaaggattgataaacatacccttgccaacccctgtaaatgccaagatacaccctgattt

SEQ ID NO: 37941 - DNA, 271 bp, Glycine max
  Clone ID: 700945059H1
gggcacaaagaaagaacaagttcaacaaatcatcaaagatcttaaggtgtttaaggaaagcactaaggttgacaaggtggttgtcctgtggacagccaacacagagaggtacagcaacctagttgtgggactaaacgacacatggaaaacctctttgcttccttggacaggaacgaggctgagatttccccttccaccttgtatgccattgcttgtgttatggaaaatgttcctttcatcaatggaagccctcagaacacctttgtcccag

SEQ ID NO: 37942 - DNA, 273 bp, Glycine max
  unsure (1)..(273): unsure at all n locations
  Clone ID: 700945060H1
tcccgcctctcctcctccttctttttcttncccttcctcttcccctcctttttcaccacctcctgccactcctccccccgccactcctccccccgcagttccaccaccctcattgaccccaacagttacacctctttcttctcacctgtctcttctccagctccgtctccttccaaggtgtttgctcctgcactctctccttcccttgctcccggtcccagcctctccaccatctctccctccggcgatgacagtggggctcaaaacttgtgg

SEQ ID NO: 37943 - DNA, 263 bp, Glycine max
  Clone ID: 700945061H1
caaacctctttcgattgctgattgcaaagattgccaaaaatgagtgaagataagatgttatatatataaccaagcgtgatgtgtttattactttattgagtgttttgacatggaagagggaaaaaaaaaaaagaaggaataataataaaggcgattgtaacccgaaggaaagtttgattttgaagatatatatggaaagcatcttcaatttgcttgttttttgactgtatatttggtgggttttgaatgagaataaataatgg

SEQ ID NO: 37944 - DNA, 270 bp, Glycine max
  Clone ID: 700945062H1
gaggagcttgagaatgatgatgaagtctgctatgtgtgcagtggtggttgtagcacttcttcttctggcggaggtggggcccatggctgaggctgtgacatgcaccccaacagagttgatgtccgtgtcttccagcaatcattccggtgctaaaccttccaatgcttgttgcacgaagctgaagcagcaaaaaccatgcttatgtggctacctcaaaaacgctagcttgaagcagtatgttaactctcctaatgcccgaaaaaccgttgc

SEQ ID NO: 37945 - DNA, 238 bp, Glycine max
  Clone ID: 700945064H1
attgattataaataaaggattacttgtgtgtcaacagatacaattaacaataaacacataatatagtacaattacttgtagattaattaaagggtatgggacaggattttctgtaaattaaaaagtgaatggttgttgtttaaggagagaaaagaataactgaagagcaaagaattcaattcaaagatttgcttgggtcaaaaactaaatttgtttaatgtgtctaattgtattggtg

SEQ ID NO: 37946 - DNA, 258 bp, Glycine max
  Clone ID: 700945065H1
attgtcgtcattggacatgtcgactctgggaagtcaactaccactggtcatttgatctacaagcttggaggtattgacaagcgtgtgattgagaggttcgagaaggaggctgctgagatgaacaagaggtcattcaagtatcctgggtgcttgacaagctcaaggctgagcgcgaaagaggaattaccattgatattgcttcgtggaagtttgaaaccaccaagtactactgcacagtcatcgatgcccccggacatc

SEQ ID NO: 37947 - DNA, 218 bp, Glycine max
  Clone ID: 700945066H1
gaaaaagacgggccaccaaatgttttcttgcatgcattctatgtcattgatgcagcaaagaaagcactagaagcttcatgccctggtgtggtctcttgtgctgacatccttgctctggcagcaaggacgcagtttttcttcaggcggacctacatgggatgttcccaaaggaagaaaggatggtagaacatctaaagcccgtgaaaccagacaattgc

SEQ ID NO: 37948 - DNA, 268 bp, Glycine max
  Clone ID: 700945067H1
aaaagaaaatcctcacccattttcttcgtagccaaacactctgaaattctcagttatgtcgtggcaagcgtatgtggatgatcacctactgtgtgaaatcgaaggtaaccacctcactcacgccgctatcatcggccaagcggaagcgtttgggctcagagcaccaacttccctcagttcaaacctgaggaaataactgccatcaataatgactttaatgagcctggatcacttgctccaactggatggtatatcggtggcaccaaat

SEQ ID NO: 37949 - DNA, 266 bp, Glycine max
  unsure (1)..(266): unsure at all n locations
  Clone ID: 700945070H1
tctctttctctctttgtgtcgcctggtcttggcatctccgcagcaccaaccaccctggcccangtcttcaacagagagaaagagaaggaagaacacacacacacacacacacacgttaaactaacattttttattagtaagagacatggctcaacccagttccaacggggatctgaataataaccagcagggtcaggttcagcaacagcagcagcagtgggcggcggcgcacgaatactgtatcagcaacagtgggtggccatgca

SEQ ID NO: 37950 - DNA, 220 bp, Glycine max
  Clone ID: 700945071H1
gacagaagaaactaatttgctacagcagttgtctgatgcctgcctggttgttgatgcattagagccttctgtaagggaagaattggtaaataatttctgcaatagggagcttacatcgtatgagcaaatttttgaaggagtgaacttgcaaagttggttaaaactgaacgaagatatgcatggattaagcgccgaatgagatcaaatgaagaaatttgga

SEQ ID NO: 37951 - DNA, 268 bp, Glycine max
  Clone ID: 700945072H1
gtccttgactctgtgaatatcaccttgggtgctgaagatgaactaaaacatgcagttgcatttgttcggccagttagtgtggcctttcaggtggtgaatgggttccatttctacgagaatggagttttcactagtgacactgtggtagcacttcccaggatgtgaaccatgccgttcttgctgttggatatggagttgaaaatggtgtcccatattggctcataaaaaattcatggggagaaagctggggtgaaaatggctacttcaa

SEQ ID NO: 37952 - DNA, 270 bp, Glycine max
  Clone ID: 700945073H1
tgctagttgtagccaagatgcaaagccatgttcttctcttatccggattcgtgacactgtggataaagaaagtagtggtgatagagtgctaaaccgtactgaaagacaaaatgagggtcatcgagttcttatggattttggtggaactacttttctcataaagacacagttcaatttggccagaggcgtgttcttattagtgacaaaacgcccttgtactttcaacatgatgggcattcaagaacaatagttggaattcaagtccaatat

SEQ ID NO: 37953 - DNA, 268 bp, Glycine max
  Clone ID: 700945074H1
actagctataggcctcaattagttattatattaatttggtctaagtagttgttattacttgtgtagtagttcttctccaatggctgatttaggttcagcctcttccaagagaatgtggtgttccgttccagaaagaatcagcttcacttggccatgttggccttgcagtttggctatgctggattccatgttgtctcaagagctgcacttaacatgggcgttagcaagcttgttttcccagtctatcggaacatcattgccttgcttc

SEQ ID NO: 37954 - DNA, 266 bp, Glycine max
  Clone ID: 700945076H1
aatacaggtcctctcggatgcttgcctcagaatattgccaaatttggaactgattcatcaaagcttgacgaactagggtgtgttagttcacacaaccaagctgctaaaacctttaacctacagctacatgctctctgactaaattgcagggccaatatccagattcaaatgtcacatacgttgatatcttcactataaaatcaaacctcatttcaaacttttctagatacgggtttgaacacctattatggcttgttgtggatacg

SEQ ID NO: 37955 - DNA, 267 bp, Glycine max
  Clone ID: 700945077H1
gttctagatcgcgagctgccattcctttattttttttttctttttctttttcattttgggtttaccgtattctccaagcttcatttttttgctccgtcgacttgtgggggaaaacaaacaaaaacagcaccgatagcaaaatggttgatagtaagatctctgcagtatataatcaatttatgtacagggttttcgcttctattattagttagttagatatttattcacatattgtaacaattggatgtaattattaaatattatttt

SEQ ID NO: 37956 - DNA, 270 bp, Glycine max
  Clone ID: 700945078H1
gtgaatgaacagtggattcaagttcagcatcttgagcaggctcttcacattaccaaaatgaggactctaaaggctcaaaggctaacaagtgtaacaagatgcacattcatgaagtttatcaacgtccttcttgatgacttcgggcacttcattcatatgtatttggtgaaaggactatagtcagttcactcatctcacagactttggatcagttgaagagatgctcttcattgaccaaaaaatatcaccatcagcttcaaggttttatca

SEQ ID NO: 37957 - DNA, 269 bp, Glycine max
  Clone ID: 700945079H1
ggttcacttgagcctgttactgatggtgcaaaccttcagattttaactggttttgccaatgcatttcatgctttgcagcccctcaaagttcctgcattcagttttgcatggcttgagttgattagtcacaggagcttatgccaaaaatgttgactggtaatggtcaaaaaggttggccttatatccaaaggttgcttgtagatctgttccaatttatggagccttttctgaggcatgctgaacttggagaaccggttcgtgtcctctat

SEQ ID NO: 37958 - DNA, 268 bp, Glycine max
  Clone ID: 700945080H1
catgcctaaagaattggtagcaaccaagattgctgtctggactacggtggttaatccatttaccaagtatgcgttgactatatccccagtggcaatgagtctggaggagttgataccatcaaaccatgccaagtcttactatattccatcttcatcagaacagggttggtactttctaccctggttattggtctctcagttcccttttttggtctggtgatgtcattgattggatcattactcacaatgcttgttactttgatactac

SEQ ID NO: 37959 - DNA, 266 bp, Glycine max
  Clone ID: 700945082H1
gctagttgtagccaagatgcaaagccatgttcttctcttatccggattcgtgacactgtggataaagaaagtagtggtgatagagtgctaaacagtactgaaagacaaaatgagggtcatcgagttcttatggatttgtgtggaactacttttctcataaagacacagttcaatttggccagaggcgtgttcttattagtgacaaaacgcccttgtactttcaacatgatgggcattcaagaacaatagttggaattcaagtcaaa

SEQ ID NO: 37960 - DNA, 246 bp, Glycine max
  Clone ID: 700945051H1
gcaaaacgttcgaaatgggtcgcacactcacaactgcagcaacgtgtcttcttctctcattattattagtgtccctctgtgtgaccaccaccaccaacgccctaatgccatacacacgtagcagcaccctctgggacacgatgtctcatcagaggacccgttcagaatcctggaacacaccccattcagcgacattcccacgaccacccaaggggtggacgatctcgccctggcacgtgcggactg

SEQ ID NO: 37961 - DNA, 279 bp, Glycine max
  unsure (1)..(279): unsure at all n locations
  Clone ID: 700945024H1
acaaggattgagtgttggatctagtcatctagatactcgtactaccgatgatgatcattgagaaagtacgtgcaggttctgctgatctaaacatggtggtgctcacaagtgagtgcttccatcataatactgaggatggtgtggatatctggttgtgaggttagaatgtctggtggcatacgacccctcgnttgnganatcanttggggcgctggaggganaacgggtgatcttacattggaaattgncaacaagatgcagaacattgtctgtgtgaga

SEQ ID NO: 37962 - DNA, 273 bp, Glycine max
  Clone ID: 700945025H1
gcgacgagcgcgacaagaagcggcggcgttacccaaaccttgggcttcaagccgtaccgtcacctgaaaactctaaccgaccatgaaaacgcggtgtcgtgcgtgaagttctcgaacgatggaaccctcctagcctcggcctccctgacaaaaccctaatcatatggtcctccgccaccctcaccctctgccaccgcctcgtgggccactccgagggcatctccgacctagcctggtcctccgactcccactacatctgctccgcctccgacg

SEQ ID NO: 37963 - DNA, 276 bp, Glycine max
  Clone ID: 700945026H1
ctcagagactgaagctgcaggtgtggttcgccagatagcttcaggattagaggctattcatagagctaacattgtccacagagatttgaagcctgagaattgccttttcttggatgtgaggagggactctcctcttaagatcatgactttgggttgagttctgttgaggaattcactgacccagttgttggtttgtttggatccattgattacgtttcaccagaggctctttctcaagggaagataactaccaagagtgacatgtggtctctgggg

SEQ ID NO: 37964 - DNA, 279 bp, Glycine max
  unsure (1)..(279): unsure at all n locations
  Clone ID: 700945027H1
ttctcgagccgattcggctcgagctcgtgcttcaatccttaacgttatatctcaatntcatccttcgtcttctgaataatccagaactctttctgcccttttctccgtcacgcttttcgtgaccggatctgtatggatttgatccagatcacacgccgatggtggttttggccgggtctttcatagatctggtgcgtagaggctcagatctacggtaccgaggtacaacagagaatcgatgacaagaacgcagatccgacggtagatccagccgattcc

SEQ ID NO: 37965 - DNA, 273 bp, Glycine max
  Clone ID: 700945028H1
gaagaataggttcctagtatacgaatatatgcataatggtaacctgcaagatcatctgaatggaattggggaaagaaagatggattggcctttaagacttaaagtggcactgggagcagcaaaaggacttgcttatcttcattcagttcttgtcttggaattcctattgttcatagagatttcaaatccaccaatgttcttctagatgccaaatttgaagcaaagatatctgattttgggcttgccaaactaatgtcagaaggacaggagaca

SEQ ID NO: 37966 - DNA, 278 bp, Glycine max
  Clone ID: 700945029H1
ctcgagccgaaacttttttcatctaataatggctgcaacaacacgttcacgtgcatccatctacgatgtgttcctcaacttcagaggggtagacacacgctatggtttcaccggcaatctctacagggctctttctgacaagggattcgtaccttctttgacgaagagaagcttcacagcggagaggaaataacacctgcacttttgaaggcaattaaagattccagaattgccatcactgtgctctctgaagactttgcttcttcctcattttgctt

SEQ ID NO: 37967 - DNA, 121 bp, Glycine max
  Clone ID: 700945030H1
cagcaaagcaacgctctctttttctccgtcactgccacttctcttctctagggtttatcgtcatttgatctcaacctctcttcctcccaaaatgccgtccccaccgcttccacacaacata

SEQ ID NO: 37968 - DNA, 277 bp, Glycine max
  Clone ID: 700945031H1
ctcttaaaagttattaagagcttttgcttttctttctgcgcgcttttcccaattaagtagttcttccttttctcaaagcaaaaaaaatgttcatcgagagtttcaaggttgagagtcctaacgtgaagtacacagagactgagatcagtccgtgtacaactatgaaaccactgaacttgttcacgagaacaataatggcacttatcagtgggttgtcaagcccaaaactgtcaaatatgaatttaaaaccaacacccatgtccctaaactaggggta

SEQ ID NO: 37969 - DNA, 281 bp, Glycine max
  Clone ID: 700945032H1
cctctgcgctctctctctctgtctcctacgattcgttttgccccttttgttgccctaatttcaaccatgcctcgccgtagctccggtggaagatctgcccgtcctgctcctcgggcagctcctcgtcctgctccagttcaccatgccctcctccagcccctgctcagagtggtggtggatctatgcttggtggcattggttcaaccatagctcaaggtatggcttttggcaccggaagtgcagtggcacacagggctgtggatgcagtcatgggtcctcgt

SEQ ID NO: 37970 - DNA, 278 bp, Glycine max
  Clone ID: 700945033H1
aggacattcattcatctatggctacccttattgctcccagcaaccactctccccaagaagatgctgaagctctcagaaaggcttttgaaggatggggaactgatgagaacactgtcatagtaattttgggtcatagaactgtgtatagaggcagcaaatcagaagagtttatgaggaaatttaccaggaggatcttgtgaagcgcctagagtctgagatcaaaggagactttgagaaagccgtgtaccgatggatactggaacctgcagatcgtgatg

SEQ ID NO: 37971 - DNA, 278 bp, Glycine max
  Clone ID: 700945034H1
gtatctgaactctccacctccaaggttatggtctttccggtcaaagaaggtatcccaccagaccaacagaggcttatctttgccgggaaacagcttgaagatggaagaacccttgctgactataacatccagaaggaatctacccgcacttggtgttgcggcttcgtggtggcatgcaaatctttgttaagactttgactggaaaaaccataactttggaggttgaaagttctgataccattgataatgtgaaggcaaagattcaggacaaggagggc

SEQ ID NO: 37972 - DNA, 252 bp, Glycine max
  Clone ID: 700945035H1
cattgataaaggtgttgctgctgctgcaaaagttgtccgtaaggcgtatccacaagaaaaggttggtgtgtttgtaagacgaggtaaaggtggtcctcttactgtagttgaatacagtgagttggaccagtcactagcttctgcatcaatcaagcaactggccgtcttcgtttttgttggagtaatgtctgcttacacatgttcactctggattttctgaaccaagtggcaaattggcttgaaaaaagacag

SEQ ID NO: 37973 - DNA, 177 bp, Glycine max
  Clone ID: 700945037H1
tagttcattctctttgcgcagttccctacctctcctttcatgatgcagattctcgtcaagaccctcaccggaataaccatcacccttgaggtggaaagctctgacaccatcgacaacgtcaaggccaagatccatgacaaggaagaattcccccggatcagcaacgtctcatcttcg

SEQ ID NO: 37974 - DNA, 274 bp, Glycine max
  Clone ID: 700945038H1
ctacggcgtgcaattttccatagtgattcccactgtttcggagctctttggtttgaaagacttcggtctattgagcaacttcatggctttggggaacccacttggtgcatttcttttctctgctcttctagcaggacatatatagacaatgaggcagcaaaacaacacggtgtaggcctcattgcttcaagtgttgcatgcatgggtccaaattgtttcaagctaactttttttactctggctggtgtctgtattgcggaaccatctccagcat

SEQ ID NO: 37975 - DNA, 276 bp, Glycine max
  Clone ID: 700945039H1
agcttaaagaatatattgagaaatgggagggtccagtggtagcaccatcacgccacaacctcaagctttttgctgacaaggagacatatgaatcaatggatgcattagcaaagcttcaaaacaagactgctcatcagttggccatgaagttatccgtaattatgttgcttccaaccaaaatggaaaaggcgaatgatttcatttttacttaacgaaggaagatgtatgtgatgttgctttatggttgacaggaatggtggataggcaactgaacac

SEQ ID NO: 37976 - DNA, 277 bp, Glycine max
  Clone ID: 700945040H1
ctcttctctgttctccattattctatgtatgattggttgtttaaaaacccttctagcttattatacatgaatcatgaattgccacctaaatagatataattggatgtttcacagacaaaagatgtactcaaagacaagttctatacaagactaaagtaagtaacatggtatagtatatataccaaatagtatgtaaatttcgacagtatgtaaatttcttatttcaaatttggtgagccatttttctttatgtctaggcttcacgaaggtctccacc

SEQ ID NO: 37977 - DNA, 275 bp, Glycine max
  Clone ID: 700945041H1
caaagttgaagtcttcaagcacttagtttcttaaagttaactcctttaaggttcattcacaatcttctcagagagaaagagagtgatccattcgttctgatcatttggggtgtcagaaacgttcacattcacatctgggtctgagttgtgaattcagcaaccttcatctggtgccactaacaaagtgaccctttggataagaatccaaaagggtatctgaggatctcacaaatttgttgaatttctctggttctatgttgcataaggtgtgcaag

SEQ ID NO: 37978 - DNA, 274 bp, Glycine max
  Clone ID: 700945042H1
tgtagatgtattagctaaatggattgcagataaatcacaagtctatactcaacatgcttatatgagaccactcggagtagttgctatggttttgggtattgatgatgaatatggacctcagctatacaaatgtgatccagctgtcattactttggtcacaaggcaacaagtgctggattgaaggaccaagaggcaattaatttcttggaaaagaagatgaagaatgacccttcatttacatatgaggagacggttcagactgccatttctgccc

SEQ ID NO: 37979 - DNA, 273 bp, Glycine max
  Clone ID: 700945043H1
cgggcgcaccctcgccgactacaacatccagaaggaatcaaccctttccctcgtcctccgtctccgtggtggcatgcagatcttcgttaagaccctcaccggcaagactataaccctagaagtcgagagctccgacaccatcacaacgtcaaggctaagatccaggacaaggagggtatccccccagaccagcagatgctgatcttcgccggcaagcagctcgaggacggacgtacccttgctgactacaacatccagaaggagtcaactctc

SEQ ID NO: 37980 - DNA, 273 bp, Glycine max
  Clone ID: 700945044H1
acataatctatgaaatgggctatgcgactaagagttgttctacatcttgcacaagctctagagtattgcacaagcaaagggcgtgctctctatcatgaccttaatgcatatagagttctttttgatgaggatggtaatcctagctttcgagttttggtcttatgaaaaatagcagggatgggaaaagttatagcacaaatttggcatttacccctccagagtatctcagaactgggagagtaacaccagaaagtgtaatatatagttttggca

SEQ ID NO: 37981 - DNA, 272 bp, Glycine max
  Clone ID: 700945045H1
caaacaacaaggttggttcaacttgtgtgaagggattggaacatggaaaatcttggtggttctagtcgtaggaaagcaattgaggagcttcttagagggcgtgattctgcccaacaacttaagagtgtcatcaatgggactatgatgatggatcagccaccccatttgctcaacaacttgtgaaagaggtgctcatgtccttcacaaactccctcttgttcttgcacaacaaccccacttctgaatcacatcatgtcttcaatgttcaagta

SEQ ID NO: 37982 - DNA, 273 bp, Glycine max
  Clone ID: 700945049H1
gagcttgtgtttttctgatcccttatcttaattaatttaatcaccaatggctcgttctatcgctaacgccaagactttctccgctctcgtgctagacggattctccaacactctcaccagacgtggctactctcaaagcgcaaaaggggaggagttgcctccatagcacccaaatcaggggaagacaaaggtgtctcatcatacaaggtttcctgggtgccagatcccgtcaccggttactacaaaccggaaaacatcaaggaggttcatgtt

SEQ ID NO: 37983 - DNA, 213 bp, Glycine max
  Clone ID: 700945050H1
atgatgcttgtaggcgatgatccatggcaggaattctgtgccatggttcgcaaaatttatatctaccctaaagaggagatccagaaaatgagcccaggtaccttgagctcgaaaaatgaagagaatcattcggtgacggctaggaaggtgcagatacaaaagatgttaaatgtcagccgcatcaaaagttcaattcagaaaatggtcttgacg

SEQ ID NO: 37984 - DNA, 276 bp, Glycine max
  Clone ID: 700945023H1
ggtggccatatgctgaggcatttcttcgatgattggccacgatcactgcaagactctgacaacgttgaaaacaatgctgctggccctagcctctctatttcaatgcccggaaatgctgctgctgcttcctcggatgtgtcattgaaatgtccacgggctatggagaggacccaggcccaagaaatgagaatgtgggcctcgtggcagagcagctgcagttgaattgggccggaggatgggcctcgtctaatcaagtggcttccatgggaggaccac

SEQ ID NO: 37985 - DNA, 246 bp, Glycine max
  Clone ID: 700944991H1
aacggtcataaaaaatggaagaattatgggaagcttgacaggaataccaactgataaaattgctgacaaattttggttagtcttccaagcacttggtgacattgcctttgcctatccatactccattctccttcttgagatccaggacactctagagtctcctccaccagaaaatcaaaccatgaaaaaggcctccatggttgcaatcttcattacaacattcttctacctgtgctgtggatgctt

SEQ ID NO: 37986 - DNA, 231 bp, Glycine max
  Clone ID: 700944992H1
gaacttgagaaaatttcacagtgtagccaaagtcattggaacccttataacagtttcaggagctatggttatgactctgtacaaaggccctgccttccaaatcataaagggtggaggagccatcagcaaccatagcaactctagcagtactagtaccaccgaacaatctgaccagcactggatagttggaactgtttatctcatatcaagttgtgctagttgggctggctt

SEQ ID NO: 37987 - DNA, 247 bp, Glycine max
  Clone ID: 700944993H1
gaagaaatccttttatgtgggagtaacagcagaagcaaaacaaaacatcatctccagacactcacattatctttcaactgttgctctgcctctgcacagagtatggtgtgggaggggaaacagacatgatctatctgtgttcacagcaccactgtttccctgcctcacacccttatctagaagaacaagaatcagcacatacacccgccacaacgccatagtcatcatcacttagaagaacttcaca

SEQ ID NO: 37988 - DNA, 247 bp, Glycine max
  Clone ID: 700944994H1
cctaccctgacatacaatgggtaggtgtgtcttaatgtgttctctgtaccgaaatacaattcagattgtgtttggtgggttcatatctggatttgaggaggtttgaatctccttaagaaataaagttacgatgttctgatatgaatgtgaaataggttctacttgaaatgtgtttctcaattcttatttgttgagatctattcttccagtcgttatattctactaggggaacggagatccgtctctc

SEQ ID NO: 37989 - DNA, 246 bp, Glycine max
  Clone ID: 700944995H1
aagaggtgcctcttactccgttacgagttcgacccctcgtctcgctcttctcttctcttctcttctcttcatagcaaagcaataatcctattagaatatggaagagagcttcgttttccagtggagcgttatcagatctctcttgtccatccttcagtggtgggccttcaatgtcgctgtcatcatcgtcaacaagtggatctttcagaaattggatttcaagtttcccttatcagtttcctgtgt

SEQ ID NO: 37990 - DNA, 199 bp, Glycine max
  Clone ID: 700944996H1
agacaatcctcacccattttcttcgtagccaaacactctgaaattctcagttatgtcgtggcaagcgtatgtggatgatcacctactgtgtgaaatcgaaggtaaccacctcactcacgccgctatcatcggccaagacggaagcgtttgggctcagagcaccaacttccctcagttcaacctgaggaaataactgcca

SEQ ID NO: 37991 - DNA, 287 bp, Glycine max
  Clone ID: 700945001H1
catccatctctgatctcactcaccattcaccaacctgcttctctggtctcttctttcccttcccaagaagaagaagaagaagatgccttcttcagaatcatcaacaggcttctccgaaaccatttgtgtgaccggcgctggtggcttcatcgctcttggatggtcaaactcctcttggagaaaggctacactgtccgaggaaccctcagaaacccagatgatcccaagaacgggcacttaaaagagtttgaaggagcttcccagagactaactctgcataaggttga

SEQ ID NO: 37992 - DNA, 285 bp, Glycine max
  Clone ID: 700945002H1
ttcggctcgagctgatctccaattcttccatcagcttagagatattgaggtctttggaacatggccaacagctttgttagctgcacacaggaagaaagtgagaatcgaaggacctgtatgtgattcatcacaagtcattggttggcatcttaggaatatgccaatgaaactgatactatcactcccccaattcatatttcacgttttgcttttaatagctccatcctttgcgcgtctgagagatggggtcgcacttcctctgttcaagacacttctcagaattcg

SEQ ID NO: 37993 - DNA, 135 bp, Glycine max
  Clone ID: 700945003H1
aacaaccaactgcagaagaaaacctgcaaaatttggcagctgacacaactgacacagatctgaaagaagaacaagatattaattttattaatggaaagagcgaatctgaacttagacaacccaaatacaccaacc

SEQ ID NO: 37994 - DNA, 185 bp, Glycine max
  Clone ID: 700945005H1
ttctcgagccgaatcggctcgagctatggagtattttaattttgaatattacgaaatttctttatcagtcaagtattttaattatgaagtgaaacttttctcttctttaaatgaccaaataacttgtggagagggttagatatgactgacacgtcagtgaggactgagttccttaacccccaaaa

SEQ ID NO: 37995 - DNA, 267 bp, Glycine max
  Clone ID: 700945006H1
tgaagctggtatttccaaggatggacagactcgtgaacatgctctgctttcattcacccttggtgtgacacagatgatttgctgctgtaacaaaatggatgctactacacccaagtattccaaggccaggtatgatgaaattgtgcaggagtctcttcctacttgaagaaagtaggatacaaccctgacaagattccgtttgttcctatctctggttttgagggagactacatgattgagaggtccaccaaccttgactggtacaag

SEQ ID NO: 37996 - DNA, 249 bp, Glycine max
  Clone ID: 700945007H1
gcgtggaacctctctctctctctctctctctctgcggaaaccggaatatctcagttctctgatcagatccatccgacgtcgtttcagtgataatggctccgttcagcggcgatgagacggcaccgtttttcggcttccttggagccgcagtgccctcgtcttctcctgtatgggagctgcctatggcacagcgaagagtggcgttagcgtggcttcgctgggtgtgatgagaccagagctggtgatgaa

SEQ ID NO: 37997 - DNA, 281 bp, Glycine max
  Clone ID: 700945008H1
tgtcagtgttgcatcgcgtctggtggtagactaagggaaaagacaaggaccacaacatctgctcaagtgttactgcgtgcggcacttccatgcctctcttcatcatcgcatcttatcttcgctgccactgcaacagggtaggaagatgcagagttctccattgttgatggttttgtggagataagtgaatgcatggcagagatgaccaagtacgtggctaatgaaccatccgatgggcttttctttatccaacagcatgctcaaaatgcaatatcaatatc

SEQ ID NO: 37998 - DNA, 280 bp, Glycine max
  Clone ID: 700945009H1
ctcgagccgatttcaacatctaatccttttaggaggatagtatatttgagctttacagttatcgtcatggaattagaccatgggccgcatattgaattttggatcagtcctctaattttatgtgttagtgccccttttttatggctagactttttgctgtgtttgtggtggctgtacaagatttcttgatgtatgtgggatgcacaagcgtgcaaactcatacgtagagtattatgcactgctattacgcaataaggtcatcatggattatttttaaaaa

SEQ ID NO: 37999 - DNA, 280 bp, Glycine max
  Clone ID: 700945010H1
ctttagctttactttccttttgatccttaaaattcccattttgaacagttattttgtttctgatcctcaaaaagctccaggatttgatttgtaataagaaatctagcaactagttcatgggttaatgtacattttaaatggagattgtccacatttatcttctgctatctcgattggatgagtcttacctctttttattttttgctcacatatttgatctctcctttctggttggcttctgcttgcaggcaagttctactgacatcagaaatcatggttt

SEQ ID NO: 38000 - DNA, 278 bp, Glycine max
  Clone ID: 700945011H1
caatgacactggcaaccttgtgcttcttgatggtgcctccagcagtacttgggagagttttgatgattatagagacaccttgctgccttctcagactatggaaaggggtcagaagctttcttctaaacttaggaggaatgacttcaaattggcaggtttgagctctttttccaaaatgatggtaatcttgtgatgcactctataaatttgccatctgagtatgttaatgctaactactatgcaagtggaaccattgagtccaacacatcaagtgctgg

SEQ ID NO: 38001 - DNA, 268 bp, Glycine max
  Clone ID: 700945012H1
gttttcgattcgatcaactcactcacgcgcacgcctttcattccattccattccgatgctatgacgacgacgaattccctcttcttctcccttgactggcacaatgaattctatcctacctatcatgatttctaccttctccccctttcgctctcttcttcccttcccttcgcttctttctcgaccgattcatattcgagaaagtggcgagacggttgattttcggaaaggggcatgcgccgctggactaccattcagacgagagaag

SEQ ID NO: 38002 - DNA, 279 bp, Glycine max
  Clone ID: 700945013H1
gcgctacgaagagatggtggagttcatggagaaggtctccgccgccgccgacaacgaggaacttaccgtggaggagaggaacctcctctccgtcgcctacaagaacgtgatcggagcgcgccgcgcctcgtggcgcatcatctcctcgtcgagcagaaggaggagagccgcggcaacgaggatcacgtctccgtcatccgcgactaccgatccaagatcgagtccgagctctccaacatctgcgacggtatcctcaagctcctcgactctcgcctcatt

SEQ ID NO: 38003 - DNA, 279 bp, Glycine max
  Clone ID: 700945014H1
agccaagtgaaagagagaagaaaagtcaaagacaatgtcagggatcattcacaagattgaggagacccttcatgtgggaggccacaagaaggaggaggagcacaagggtgagcagcaccatggtggagaatacaaaggggagcatcatgtgaacacagtactgaatacaaaggagagcatcatgttggtgagcacaagccggagcaccatggaggagaagagcacaaagaggggttcctagacaagatcaaggacaagatccacggcgaggagggtggc

SEQ ID NO: 38004 - DNA, 283 bp, Glycine max
  Clone ID: 700945017H1
gcttcaccccaatccaacgctccataatcctcgacttcattaactcgttaagttccaccgcgggggccccacttccctccgtagcatcgtggtggaagaccacggacaagtacagggggggatccactacaatcgtcctagggaaacaatcctagaacaaacttattccctcggaaactacctcaacggaacacaactagtctctctctcctcacgcttcgaccacctcaacgccatcaacgtcgttctcacatctagcgacgtaggggttgacggcttctgc

SEQ ID NO: 38005 - DNA, 295 bp, Glycine max
  unsure (1)..(295): unsure at all n locations
  Clone ID: 700945018H1
ctcagtctcaactctgctccgaacaaccatcacttgttccncntngagangaccgctacctacctaccgctacgacatcatatccctgccgtcgtcactctccntcctcttctcgctccttcttctcactctcatcctcttcttccaaactccaatgcttctgtcctctcctcgtatttcgcacctctttctcaatcagcgaagagcggaggttcgcgtttcgagtggaggatacggaactgtgtcggcaccgatgtcagttgcgtctgatcctgatcagttgaagagcgccaga

SEQ ID NO: 38006 - DNA, 252 bp, Glycine max
  Clone ID: 700945019H1
ccaacccttggtgaatttctgagcagtgagcagcatgttgtcattattccctaacttgttcctcttcctatcactgttaattggtctatgcaattgcagggtgcaaaccctaaacactaacccaactcacttcaacccacaggtcccaccctaccgaaccctctcgtcctcgaagcgcttcgaggggtcctcggagttcgtcaagctgaaataccacatggggccggtgctttcatctccgatcaatatcta

SEQ ID NO: 38007 - DNA, 130 bp, Glycine max
  Clone ID: 700945020H1
cttccaggtgcttattaaccgagtcaaggatgttgctcgaaccatgacagaagtcgatattgcggtgtacagaaaaggttaactgtataagctccaatttacatccaaggaacagacctagtggtgggta

SEQ ID NO: 38008 - DNA, 277 bp, Glycine max
  Clone ID: 700945022H1
ctttaactggaatagagttaaattacggtactgtgatggagcatctttcagtggagatagtgaagatgagtctgcacagctccagtttcgaggacaaaaaatatggctagctgcaatggaggaattaatgtccaaaggaatgcagaagccgatcaggcacttctctctggatgctctgcgggtggtctggcatccataatacactgtgatgagttcgggagcttgtttggaaaatcttccaaagttaaatgtttgagcgatggaggtttttttcttg

SEQ ID NO: 38009 - DNA, 250 bp, Glycine max
  Clone ID: 700944990H1
cttttatgattttggaatgatgggaagtatcagtcaaaatatccgacgaaggtttacttgaagctttttatggaatttatgagaagaatccagataaggtccttcaatcaatgattcaaatgggtgttcttgtcccaactggagatatgactgctgttaaacgaacagcacagttcttcctcaacagttatgaagagcgtttggctgcacaaaggagagagagagagatggaaacagctgaacttggatt

SEQ ID NO: 38010 - DNA, 255 bp, Glycine max
  Clone ID: 700944955H1
atcccacctgaccagcagattcttatctttgcgggtaaacagcttgaggatggtcgaaccctcgccgactacaacatctagaaggaatccactctccattccgagtttcgcctcagtggtgccagttctatctgagcatagactttgtctggtccgcagatcaccctcgatgtcgaatcctcggacactattgataatgtctaggccaagatgcaagactcggaggctgtacctccagatgaaccgttgcttata

SEQ ID NO: 38011 - DNA, 68 bp, Glycine max
  Clone ID: 700944956H1
ttgaatccaagttgttaccgtattctgttattattgacttagaatccttaaccttttctgctgtttag

SEQ ID NO: 38012 - DNA, 246 bp, Glycine max
  Clone ID: 700944960H1
ctttaaacgccgaaggttcatccaatctccgaaggccttcatcggattgcaaccatgtcgacgagaaatgttagagagcctcaggaggaaaacgtgactctgggcccagctgttagagatggtgaacatgttttcggagtcgctcgaatctttgcactcttcaatgacaccttgattcatgtcactgatctgtctgggagggacacacttgtccgcatcactggcgggatgactgctacagctgac

SEQ ID NO: 38013 - DNA, 252 bp, Glycine max
  Clone ID: 700944962H1
atgtgctaaagttggttttgtctgctatggagcaaaataatggcagatgcaagaagtcagtgttgctggcaatttagattttgtttctgaagaaggaatttaaaaaatgaaaattcagatcaatggagtctgtctcatctaatatgcttttctttcataagaccttagccttgaagtataattgttaacccatttctctgctttctgttatcagttagcaccaccatgttatgcacctccaattgtacttgt

SEQ ID NO: 38014 - DNA, 249 bp, Glycine max
  Clone ID: 700944963H1
ctggatttcactaataaagggaagcttatttgaatgtaacttcggtgttaaaagtccaaatattgtttcactaattaactagaaaataagcttccctttataagtgaaatccagagccactaccactacagtatatacatattaattagtgaaacaatatgtggacttttaacaccgaacttacattcaaatttactccatcagtcagtaccaacacactataaactatgccttgtgatgtatgagagc

SEQ ID NO: 38015 - DNA, 253 bp, Glycine max
  Clone ID: 700944964H1
aatcaatggccactcctacttcaacttggtcctcataacaaacgtaggaggtgctggggatgttcatggtgtggccatcaaggggtcaagaacagggtggatgccaatgtccagaaactggggtcaaaattggcaaagcaacaactatctcaatggccaaagcctctcattcaaggtcacaaccagtgatggccgtacagctgtgtcctacaatgttgcccctgctggttggtcctttggccaaacctacact

SEQ ID NO: 38016 - DNA, 260 bp, Glycine max
  Clone ID: 700944965H1
ttcagatctagagaggaggtcgtacattgaaaccatcgatcactccccggaatctatgatccggatttcattgctgccaaccaaggagaccgtgccactaacgtaatcaggggcatgaagtaagaacaagttctacaaatcatcaaagacattaatgagttcaaggacagcactaaggttgacaaggtggttgtcctgtggacagccaacacagagaggtacagcaacgtatttgtgggactaaacgacaccagggaaaa

SEQ ID NO: 38017 - DNA, 214 bp, Glycine max
  Clone ID: 700944966H1
caggggtggtggagactctttgagtattgtgccgaatacgaggcttcaattgtactcctcgatggttccttgtgagtacccaaatcctataaaatccgatgataataaccatgcaaaatggagatgagtacatccgtccttgttccggccagttgccatacctggtcccaacccctttcatttttgaatttttctcggcgccaaaaacgcggtc

SEQ ID NO: 38018 - DNA, 228 bp, Glycine max
  Clone ID: 700944967H1
agataaggtagcgtctaccacctcagcgacaacccatgccaataccccatcacgctcttcctactccaggtgcaagtgcaactcattagaggaattaattctcacactccatgccaatttctaaccgccctctctctcaggctatcttttgccgtcaaaactcgggaaaccttcgtctcgaagtgggatctcttcttttaatcccaatatgcatttagagttatgatc

SEQ ID NO: 38019 - DNA, 247 bp, Glycine max
  Clone ID: 700944968H1
gtgttttttcttcagtaaagaagaaacctttctctttgcgcgtgtcccgttctcttctccaatcctcctccatccccactgtgtgatctgatcctaaaccttatagccatgactaccatggagattaagctatggaatgacaagcgcgaaagagaaatgtatgacatctttggggagctttatgccattatcaaagctactgagaggcttgagaaggcctatgttagagatataatttcaccgcagg

SEQ ID NO: 38020 - DNA, 250 bp, Glycine max
  Clone ID: 700944970H1
caattctgactttgacaaagtcaagtgcacccttaaagggtccatgaaactcaggtttgagggaagtgatgatcctttggacaggatcactacagcggaagctatcagaactcttattgacttctaccgcacttctcagcactcttatgctgcaagacaaaaagtggacgagatatccagagttaaaggaactgtgcttgaagctggaggaagtgaggctcattttctgatgcagtcgtacaccttaacc

SEQ ID NO: 38021 - DNA, 249 bp, Glycine max
  Clone ID: 700944972H1
gaacttctacaaggaatcatgccctcaggctgaagacatcatcacagaacaagtcaagcttctctacaagcgccacaagaacactgctttctcctggctcaggaacatcttccatgactgtgctgttcagagttgtgatgcttcactgttgctggactccacaagaaggagcttgtctgagaaggaaacagctcgaagctttgggttgagaaatttcaggtacattgagaccatcatggaagctttgga

SEQ ID NO: 38022 - DNA, 252 bp, Glycine max
  Clone ID: 700944973H1
ggtatattggcatatgatttcccagccacatatgtcagcaatgatcatggagcatcagaaacatttcaggttgggttctctgtaaattttgtggaagctgttgagagccattctcattcaagaacatctactggtgtatcctggatcccatcgaatacagctactcatgaagaccagcctcttgagaaaatcgaagagtccagcattcctgataagacagcgcttgagtatttatcaacctcagtctctggt

SEQ ID NO: 38023 - DNA, 253 bp, Glycine max
  Clone ID: 700944974H1
tgtgagagatagtgactgcaaaaccgctccagccttgtttcttctcagatcttcttccatggaacagtacgagaaggtggagaagataggcgagggaacatacggcgtcgtttacaaggctcgcgaccgcgtcaccaatgagaccatcgctctcaagaagattcgcctcgagcaggaggacgaaggcgttcccagcaccgccattcgcgagatttctctcctcaaagagatgcagcataggaacattgttagg

SEQ ID NO: 38024 - DNA, 248 bp, Glycine max
  Clone ID: 700944975H1
gtggaaatatggaggtacatgacatgcttcacggactccgtggccttgaaagctgtcatagagcttcgtatagcggacatactagaccgttatggtaaaccactatccttgtcgcaaattgtggagaacatagaagacgcaccctccccagatgcctctcttctccagagagtcctgagagtgatggtccgcagaaagatcttcagtgcacaagaatcagagacaggagaaaccctcttcggcttgac

SEQ ID NO: 38025 - DNA, 246 bp, Glycine max
  Clone ID: 700944976H1
gtgaataagaagtttagtaatcagtacaaggcaaccattggagcggattttttaaccaaagaagtgcaattcgaagataggcttttcaccttacagatttgggatacagctggccaagaaagattccaaagccttggagttgctttctatcgtggtgctgattgttgtgttcttgtatatgatgttaattcgatgaaatcatttgacaaccttaataactggagggaggatttctgattcaagcaa

SEQ ID NO: 38026 - DNA, 244 bp, Glycine max
  Clone ID: 700944977H1
gcagatttaagttcaaagttggaagactatgcacaaaaattcaatgatagaacagtattgaatgacaaggttgcagaacttgagaaagagttgcaacttgcacgggatgctattgctaaccagaaaggagcagagtcccagaagttggaactagaggcagcattacagaattctcttgaagaacttgaaactaagaaaaatgatatctctcttttacagaaacaagtgacagctctagagcaga

SEQ ID NO: 38027 - DNA, 247 bp, Glycine max
  Clone ID: 700944978H1
ctacccactcctttctctgtctccatcgtttcgcattgcacaagcactctctctttcccttaccctttttcaggtttcaacgctccaactatccatggcaaaccgctggctcagacccgaggtgtatccactgttcgctgcggttggtgctgctgttgggatctgtggattccaactggttcgtaatatctgcatcaaccctgaagtcagggtgaacaaggagggaaggaaggcaggagttttggag

SEQ ID NO: 38028 - DNA, 228 bp, Glycine max
  Clone ID: 700944979H1
ggggatagatagagtgatacgcgtcacattttcataataataaaaaaatggcagcggcggcggcagtgacggtgctactcccacctaggattccgaccaccaccaacgttacccgctgctctgctttgccttctctccctcctcgcgtctccaacaccaaaaccactttgttctcaccttccctcaacaacttttcagtgtcccgaaaatcttctctgcttcagacca

SEQ ID NO: 38029 - DNA, 247 bp, Glycine max
  Clone ID: 700944980H1
gtgatagacaggccaggccatctaacatggttagttagctagccctctatatatgaatatagtatatgatttggttcacactccttctgtcccttttaactcctccatcaagcttctcaaatcttctgcatcaaactccagttcagtccttggagttggagaaggcatcaggaaacatggcaagcgaactaccaagttgggctgatcaatggggtgctggtggtattggtgccatggaagctgatga

SEQ ID NO: 38030 - DNA, 191 bp, Glycine max
  Clone ID: 700944981H1
ggtcattgctaattgattgcgtcactctttcactgacgatcacaagaatcacaagtgtgaatccctttcccatatagaccccttcattctccccaagatgcgactgtcatgacatctctggtcattattcaacctgaaagtatggaggcagatccatcgtttccctcagattcactccgggcccagatttc

SEQ ID NO: 38031 - DNA, 255 bp, Glycine max
  Clone ID: 700944982H1
ggcgaagagaagagaaaaattaagatggaggggaaggagcaggatgtgtcgctgggagcgaacaagttcccggagagacagccgattgggacggcggcgcagagccaagacgacggcaaggactagcaggagccggcgccggcgccactggttgacccgaaggagtttacgtcatggtccttttacagagcagggatagcagagtttgtggccattttctgtttctatacatcactgtcttaaccgtcatgggag

SEQ ID NO: 38032 - DNA, 225 bp, Glycine max
  Clone ID: 700944983H1
tgagaagttgagtgctcttggtgttaaggatgatgatttgctaatgatggtgtctggtgctggcgctactgcttctagtggatctacgaatgatttgagcttaaatgctgatggatctgctgtcaaccctggttctttccagcagcacattagacatgattctaatttgatgagtcagctctttcagagtgatccagagttggcacaagctagtttagggaggga

SEQ ID NO: 38033 - DNA, 249 bp, Glycine max
  Clone ID: 700944985H1
gttaaaatggaattggtggatgctgcattccctcttcttaaaggtgttgttgctacaaccgatgtggttgaggcatgcactggggtcaatattgcagtgatggttggtggattccctagaaaagaaggtatggagaggaaggatgtgatgactaagaacgtctccatttacaagtcccaggcttctgcccttgaaaagcatgctgatgccaactgcaaggctcttgttgttgctaacccagcaaacacc

SEQ ID NO: 38034 - DNA, 252 bp, Glycine max
  Clone ID: 700944987H1
cagcaacacgcggctggtggttgcactgtatgacgccctaaactccggcgactccaacgccgtcgtcaagatcgtcgccgccgatctcgagtggtcgttccatggtccgccctctcaccagtttttgatgcgcatgctcaccggcgactccgccgccgacaactccttccgattcgttccgcagtccatcgccgccttcggctccaccgtcatcgtcgagggctgcgactccgcccgcaacattgcctgggt

SEQ ID NO: 38035 - DNA, 254 bp, Glycine max
  Clone ID: 700944952H1
gttttgtcctttcgtcttgaggatgagatgtttggagaggttatgctgcctgagagcttggctcatgtatcctcggttgcagttatggtgaaggttgtcagaggtgcaaacgggaagactctcactgtgtaccatggagagatctgtaagtaatcatggaggtgtttaggtagtcaagagactgatcctacaacattgagcaagctaatcagtttgatgggtggtgtcttggggcaacataattatttactgct

SEQ ID NO: 38036 - DNA, 252 bp, Glycine max
  Clone ID: 700944989H1
ctcgagccgatcgagccgcacagagcgtattttgctgcaaagcctagcccccatttctggaagaacgtctccgtactggtatacatcatcctctctgtgtctgagtacaaaatgctgactttagctgcgaactaagtttgagtataatgtagttgtaatctaactgaaatttgcgagtatgggattcgattgtgcagatattcgaagatgtctgtcgaagtggttcgacatttacgagtctgacatggttga

SEQ ID NO: 38037 - DNA, 260 bp, Glycine max
  Clone ID: 700944924H1
gagagaagatactttattgaagcttgcccacttcaggcggcacaagaggaaaacattgaagaaaacacccggaaaggctatgagttacccttttcacaagcctgaggaaaaccatcctccagggaaggactcaaccaaaaaaatttcaaacataattggaaaagcagcaaattatgctggttccgcaaaatctaagaagcaccttccttacgttcccaccataaccaactacactcaagtttggtgggttcctaatgttg

SEQ ID NO: 38038 - DNA, 259 bp, Glycine max
  Clone ID: 700944925H1
cttcaagatgcagatcttcgtcaagaccctcaccggcaagaccatcacccttgaggtggaaagctctgacaccatcgacaacgtcaaggccaagatccaggacaaggaaggaatccccccggaccagcaacgtctcattttcgccggaaagcaacttgaggacggccgtacccttgctgactacaacattcagaaggagagtactcttcacctcgtcctccgtctccgtggtggcatgcagatcttcgttaagacactc

SEQ ID NO: 38039 - DNA, 258 bp, Glycine max
  Clone ID: 700944926H1
tcgcggagcttgctagcgatcggcgagaacctggttcagagccgggatctgagcagctccgcggactttggcaaccttggccagggaacccgaccggttctcggaaggtccggacaagatcctggcaatcgtcgaagtcctcatcgccgccgagaagccaatcaccaacgaccacctcgattggtacgctattctccaggtcgatcgcacgtgccaggacctcgatctcatcccgtaacagtaccgtagactcggtct

SEQ ID NO: 38040 - DNA, 255 bp, Glycine max
  Clone ID: 700944927H1
tctcgaaccgaatcggctcgagattccaatatattccattctctatgtgtatttccctacctctcccttcaagatgcagatgctcgtcaagaccctcaccggcaagaccatcacccttgaggtggaaagctctgacaccatcgacaacgtcaaggccaagatccaggacaaggaaggaatccccccggaccagcaacgtctcattttcgccggaaagcaacttgaggacggccgtacccttgctgactacaacat

SEQ ID NO: 38041 - DNA, 253 bp, Glycine max
  Clone ID: 700944928H1
gtgaaatcttcaacatggtttcgtgattattggttgagccaacataaggaggaagaatttgaagttgccaatgactctagtaatgatgatattgagaatatgctctcagaaacttttgatctaggcatggaagaagacttcaatgttctagagaacgagtttgagcagttggtgatgtcctctgaagctctagatcattctgatcctaatgctggaaaagtgtctcctcagggtcttaacaaagatgttaaag

SEQ ID NO: 38042 - DNA, 251 bp, Glycine max
  Clone ID: 700944929H1
gccgaaggaatatggaggtttctattacagatgaaattgcaggcactatggagctcaatatagataggtcgggtgagctcaaagcatttgatgacacaaaagctggtttgaaaggccttgttgatgaaggggtcgcaaagatcccaagattatttcatcatccacctgatgaatttgtcatggcttcaaagttaggcaacacagaatacactatacctgttatagaccttgcagaagttggcaaagatcca

SEQ ID NO: 38043 - DNA, 252 bp, Glycine max
  Clone ID: 700944930H1
tatctccatttccatttcctctctctcagtttccaagaatcttaagctatgggaaagtcttacccaaccgtgagcgctgattaccagaaggccgttgagaaggcgaagaagaagctcagaggcttcatcgctgagaagagatgcgctcctctaatgctccgtttggcatggcactctgctggaacttacgacgtgagctcgaagaccggtggtcccttcggaaccataaagcacccctccgaactcgctcac

SEQ ID NO: 38044 - DNA, 254 bp, Glycine max
  Clone ID: 700944931H1
tgttgtggataaaacctacactggggtttaccatgttgatgtcactatgcacttttaccctttgggatattttgatggggagagctcaaagattggagttttagcatttgggggaggtgttcatgctgatttggtcctacccatttctagaaaccttccattgaatgatgggttgtggtttgctattcagaattccagtgatgagggtttgaaggagtttagggtgcctcagaatacctatagggctgttttgg

SEQ ID NO: 38045 - DNA, 266 bp, Glycine max
  Clone ID: 700944932H1
tcagctcgaggtgtgaaactgtgaaagagagttatggcatgaggtggtggagctccagtacctaaggatgatgagccacaacctcatcccccgaaggatcagttaccgaatgtttcttactgcattacgagtcctcctccatggcctgaggccatacttcttggttttcaacattatcttgtgatgctcggtacaactgtgctaattcccactgctcttgttccccagatgggaggtgtcaatgaggagaaggcacaagttatcca

SEQ ID NO: 38046 - DNA, 263 bp, Glycine max
  Clone ID: 700944933H1
attttataagtacataaatttatgagaatctcaattatttttttagtataattataattacaccataaccacatccaaattcgatcaggacaaaaaaaattaataacacttgacctatcacatagaaattggtcaagtttatggactagatggtggttcgaacaacctaataatttctattcgacaagatggtggtaaaatatagtacacagtagacaatacaattccagcatgtgacatgttatgtagaataaacggtccca

SEQ ID NO: 38047 - DNA, 260 bp, Glycine max
  Clone ID: 700944934H1
ttccattttatcattttccgtccttgcaattttcatgcaaattctagacttccctcatttccactatgcctttaagcttgacaactttgagcatgcaactatgttcatacaccttgctttgtttgctggtttctccctctccactgagttgactgattcacttgacctcttctccggctttgttgggatacttgcttcctcggtgtttagtcaagaactattccttctccattttcactccacagaccatgttggacttg

SEQ ID NO: 38048 - DNA, 259 bp, Glycine max
  Clone ID: 700944935H1
cagtgattcaacactgatcttgttcgtttcatttttttttcttttcctacctttttcatattccttaactttttcctgcttaattacctccacgaccattagggaagattgaaccaatgttttagattagacgctatagtttgggcaagaagaagtgttttacttaattttttccaagctattgctgatcttgggaagaaaatgaatcaggaaatgaatggggttgaggcagagagggtgaaagtgaatgtgcatgaca

SEQ ID NO: 38049 - DNA, 256 bp, Glycine max
  Clone ID: 700944936H1
gcaacaattgtttctgttgataggctagtggggccaaaggctcctggggaaacttgtcatattgtgattgatcacggtggaaatgttccctactgggaaggacagagttatggtgttattccaccaggtgaaaatcctaagaaacctggggctcctcataatgttcgactatattcaattgcttccacaaggtatggggacttttttgatggaaaaactgccagcttgtgtgtgcgtcgtgctgtttattatgatc

SEQ ID NO: 38050 - DNA, 255 bp, Glycine max
  Clone ID: 700944937H1
gctaatacacttaaggaagttcccaatatggaattgattttcagagcttacattccaccaagcttgaggtctgagaagatagatgatgatcgggttgaagatgcattgtctcaatgttcgagaacagcacctgtcagatgtaattatctgaatttcaacttgtttttacgtgttagatgtagtcttgtagagatacttttagatattttattaattgttcagaatacgtcataggaaccagaggtgttgagtgtt

SEQ ID NO: 38051 - DNA, 248 bp, Glycine max
  Clone ID: 700944939H1
gcttctcagcactgtcactgagtcgttgtcttgcggaggataatggacttgttatgaatctctacaaggaatcatgccttcaggctgaagacatcatcaaagaacaagtcaagcttctctacaagcgccacaagaacactgctttctcctggctcagaaaaatatccatgactgtgctgttcagagttgtgatgcttcactgttgctggactccacaagaaggagcttgtatgagaaggaaacagata

SEQ ID NO: 38052 - DNA, 256 bp, Glycine max
  Clone ID: 700944940H1
ctcgagccggcccaggatctcttcctctggttccaggtcatgagcatccgcgtcgacgtcaccagcaccggcctcatctacttcgacgtcggcgccgcctccaagcgcttccccctctccctcttcgaaacgccgcccgaatgcgtcgccgttagctcccaacaacaagacgccccttcccaccaccagggtcaggttcaatctggaaggattcggcataagctcaatcagggaacctctggaagagatgttctat

SEQ ID NO: 38053 - DNA, 256 bp, Glycine max
  Clone ID: 700944942H1
ataaaaataaaacaaaacaaaaacacttcctcttcctcctttcccccgaaaaacccttaaaccacgaccttcatatttgcagtgctagtctgtttatttcttcagctatgtttttgtcaagaacacttggacgaacactctttgctgctgctgccagatcaaaacaatatgccactacagcagctgctgctagcagagaaggacacaacccccttcaggagttttttgaggcagacaggagccctgaagatgacaa

SEQ ID NO: 38054 - DNA, 170 bp, Glycine max
  Clone ID: 700944943H1
taacaatcaaaatcacgccacagatctacacacaccacatcaccccacaatagatctgtgttagtcctttggttttatcaaaccacacttgcaccaatcaaaaccacaaaacacaactcgtcacatcacatcacatcacatctattttcattacttcatcattttcactg

SEQ ID NO: 38055 - DNA, 250 bp, Glycine max
  Clone ID: 700944944H1
ctcatttgtgcgatgatcttgaggcagctgaaaaataggggaaaagttggcgaggatataagatcagattcagatgatgactgaatagacgaagaagggttttgttgagttttctttgctcccgctagttggtggtggtagctctgatggatactgtttttgacttgtctatagatttctaggagttcagttggttaatacaaccagtggaggagatctgaattttcgttagtttcaaaattttcattga

SEQ ID NO: 38056 - DNA, 147 bp, Glycine max
  Clone ID: 700944945H1
cgaacgaaagacctcgacaattcttctgatccgattcgttcagatcaaaacttgcctctttgcaacgctgcttctgacaaaaaacgttgtaccatccgaaatgtcggacacagtggaacatacagatcaaagagctgaagctattcc

SEQ ID NO: 38057 - DNA, 249 bp, Glycine max
  Clone ID: 700944947H1
gcttattgatggttatttggcagaggttgccccagatattaatttaaaacttcccaagtttcaagcccttgccgctgctgttccagagtatgccaggcctttggatgatggtttatatcgtgccatagatatttatttgaagtctcacccatggttggtggagtcagagagagagcaactatgtaggctgatggattgccagaagctctcattagaagcatgcactcatgctgcgcagaatgacaggct

SEQ ID NO: 38058 - DNA, 250 bp, Glycine max
  Clone ID: 700944948H1
gttaggactgggacataccgccaactattccatcctgagcagctcattagtggaaaggaggatgcagcaaacaactttgcccgtggccactataccattggaaaggagattgttgagctttgcttggaccgcatcagaaagcttgctgacaactgcacaggtctccaaggttttctggttttcaatgctgtgggtgggggaactggctctggacttggttcccttttgctggaaccctttcagtggacta

SEQ ID NO: 38059 - DNA, 261 bp, Glycine max
  Clone ID: 700944949H1
ccttccaatccttccaaccaccactattggatccttccctcagactgtagaactgaggagggtacgccgtgagttcaaggctaacaagatctccgaggaagagtatgttaagtcaattaaggaggaaattcgcaaagttgttgaacttcaagaagagcttgatattgatgttcttgttcatggagaaccagagagaaatgatatggttgagtacttcggtgagcaattgtcaggctttgccttcactgttaatgggtgggt

SEQ ID NO: 38060 - DNA, 183 bp, Glycine max
  Clone ID: 700944923H1
agattattaggacctaaattccctattagagtttaaagttgggggtcggggatgatggttctttgctttccatgaagtgctttgttgtttgcattcccttgttttgatttctgttacatttcgtcttgttctacaagatcatttaccaagtaattgccacattcccacttcgaagttttaacc

SEQ ID NO: 38061 - DNA, 198 bp, Glycine max
  Clone ID: 700944950H1
attcaaaacatatctttcctagatgctgcatgatctgctgggtattcaaaaaatgacgatgacttatccagtgcatgtttaaagaaaggaacatgttctgcttttgtagaactgcacatagacacgggtgcaattctggaagatggaggtatatctataggcatagtcactgccattgtaggtccagcaagtctaaca

SEQ ID NO: 38062 - DNA, 248 bp, Glycine max
  Clone ID: 700944951H1
cttgaattcacatttcaacaaccatagccatgtcattctccttctccaaagcacttgtccttgcctgctccttctgcttatttgcgtctttggcatatggacgcgatttctccattgtgggctattcatcggaggacttaaagtccatagctaagctcaatgaactctatgaatcatggatgtcacagcatgacaagatttacctaagcaatgaggagaagcatcttaggtacgagattttcagggat

SEQ ID NO: 38063 - DNA, 255 bp, Glycine max
  Clone ID: 700944890H1
caaaaacattatttccctccttggattctgctttgaagatggcaatcttcttttggtctatgatttcttatcaagaggaagccttgaagagaatctccatggtaataagaaaaatccacttgtgtttggttggactgagagatacaaggtggcaatgggtgttgctgaggctttggagtatctgcataataatgaaggccaatctgtgatccatcgcgatgtaaaatcatcaaatgtgttgctatctgaggattt

SEQ ID NO: 38064 - DNA, 256 bp, Glycine max
  Clone ID: 700944891H1
gcatctctggaggggctatctccacatgtaccactatataaagtaacagaagggaatgaaccttgctttttcacaacatacttttcatgggatcatgcaaaagctatggttatggggaactcatttcagaaaaaggtgtcactactctttggacttggccatgctgtggaggaaaagttgaatgggtcaagtccagggggaccaagacaaagagcagaagctttggctgccttatctaatgcatttggttcatctt

SEQ ID NO: 38065 - DNA, 211 bp, Glycine max
  Clone ID: 700944892H1
ctggtggcatagatccggttgctctagacttcaaaagcatgggaaaaggtcaggcttgggtgaatggtcaacatataggaagatactggactcgggtttccccaaaaagtggatgtcaacaagtctgtgattatcgtggagcatataattccgacaagtgttcaacaaattgtggaaaaccaacccaaaccttgtacaatgtcccacgatc

SEQ ID NO: 38066 - DNA, 218 bp, Glycine max
  Clone ID: 700944893H1
ccagacttttcaaatttgcctaatctggaaaagctagtgctgatagattgtccaaggttgtttgaggtctcccataccgttggacatctcaataaaattcttatgataaatttgaaagattgtattagccttcatagccttccaagaagcatctacaaattgaaatctcttaaaacactcattctctctggatgtttgaagattgacaagttggaaga

SEQ ID NO: 38067 - DNA, 258 bp, Glycine max
  Clone ID: 700944894H1
cgtcatcggcacaccaaaatatacttgacaattaagtgaacggagaaactgtgctctgcattttacttccattttcctccgctagttaccagcaccggtcgccgaatccgaaaagtgacttcaatcctttccactaagggtgtgttttgacttcagagcaaacctaaagtggaaaaggggatttttattttttttttctttttcattttggccattcagttctctctggggacatttttgttctctctgcaactatgg

SEQ ID NO: 38068 - DNA, 256 bp, Glycine max
  Clone ID: 700944895H1
ggacaatagttcaaggacttcccattgatgagttctcaaggacccaatctctaatatggtcacaagcagcactagcagctgatagtgcacttgaaagctttctagctttgataattgcagcaccacgttgttgaacagtagtaatgaattcaccattcaaccaggcatcatcagctataagctcgcggacgggcttctccccaacagttgcatggttaacatcaggatattgggttgatgagtgattgccccagat

SEQ ID NO: 38069 - DNA, 257 bp, Glycine max
  Clone ID: 700944896H1
gggcattcgtgggcgtctaagtacagcatgcaattttcttagtttcttttgtagagtttaagattggtgggctgtctcggttgaaagtaatgtccttggctaagaaattgtccatctgacagttagctatggtatggcctgcctccccacacagatcacaaatagggggtgatggagcaggctacatgagctgtgtctgagccttcatcagagtctctatctatttggccatgacatcgagcttgccggggcagtga

SEQ ID NO: 38070 - DNA, 264 bp, Glycine max
  Clone ID: 700944902H1
ggtgaacatccagaccatgtggttgtcattaagtacgtgccttatgtaggggacagcaagagggccatggatgagtacactctctgagatattcatgggtggaaagaacacaattgtgttgcacaacacatgtgaggactcactgttagctgctcctattatcttggacttggtccttcttgctgagctcagcactcgaatcgagtttaaagctgaaaatgagggaaaattccactcattccacccagttgcgaccatccttag

SEQ ID NO: 38071 - DNA, 261 bp, Glycine max
  Clone ID: 700944903H1
ccttttcgcctggtttagatgcagaagctcttagaaaagctttccaaggatgggggactgatgagaagaccgttatagcaatattgggtcacagaaatgttcatcagaggcaacaaatcagaaagatttatgaggaaatttaccaagaggacctcatcaaacgcctagagtctgagctctctggtgactttgagagagctgtgtaccgttggatgctggaacctgcagatcgtgatgctgttttggccaatgttgccatca

SEQ ID NO: 38072 - DNA, 258 bp, Glycine max
  Clone ID: 700944904H1
gtctatgaatggcaaagccaagatcttggactcagatatggtcttctattgtcggagtgtgtgttctgaattttgttctgaacttcaagatcgtggcagtagcagatgacactggaagcaacagtattgtatcagaaggtgactgcaagaacacatattatcagattttcctctctccaccttatcagaatatatcctctaccatatgcaaacctgtttggcattcatacgaattgaggtacaccaagacgggtgaca

SEQ ID NO: 38073 - DNA, 250 bp, Glycine max
  Clone ID: 700944905H1
gtcttttttttatatgaagctgttatatatattaattactatagtttgtgaagcaagtgggagtgagctggcttggtagatcaattgttcctgtatttggtatgtgttgtgtggtgggagtatgataatggtccattagtcacgggctcttcttattagacattggatctgcatattttgaaattattcaagtctgagccaattatctgtatctagtgtctcggtgtcacagtgtgtggttgtattactg

SEQ ID NO: 38074 - DNA, 254 bp, Glycine max
  Clone ID: 700944906H1
cactaatgaaaatcttccaccaaatgtaattaagcaacttgccaaggagttgaaaagtcttgatgaatcccctcctgagggcattaaggttgtggtaaatgatgatgatttttcgacaatattttctgacattgaaggcccagctggaactccttatgagaatggagttttccgaatgaagctgttgctgtctcatgatttcccgcattctccacctaaaggttttttcttgactaagattttccatccaaaca

SEQ ID NO: 38075 - DNA, 255 bp, Glycine max
  Clone ID: 700944907H1
attccagccacacgcttcagaagacatggcctcattgggtgggttacaaaatgtgagcggcatcaattttcttatcaaagagggtccaaaagtcaatgcaaagttcgagctgaagccgccaccatatccactgaatggtttggagccggtgatgagccagcagacacttgagtttcactgggggaagcaccacaagacttatgtggaaaatctgaaaaaacaagttgttgggacagagcttgatgggaagtcact

SEQ ID NO: 38076 - DNA, 256 bp, Glycine max
  Clone ID: 700944908H1
cggttttgaatcttttgagcgaaaatgcagtcgagtcctttgcttctggaggaacccataaggatggcctccatcctcgagccatccaagcctagtttctttccagcgatgacaaagattgttggcacacttggcccaaagtcacgatcggttgacgtgatttcccaatgtcttgaggcaggaatgtctgtggcaaggttcgatttttcatggggtgatcctgaataccaccaagagacgttggaaaatttaatgg

SEQ ID NO: 38077 - DNA, 259 bp, Glycine max
  Clone ID: 700944909H1
agctgttacctcagtatcctataatccatcggcacccaatctccttgccactggatccatggacaaaacggtaaaactttgggatttgtcgaacaaccaaccctcttgtgtagcatctaaatctccgagagcaggggttatctttagaatttctttctcagaggacaaccccttcttgttggctataggaggctcaaagggaaaattgcaagtttgggataccttatctgatgctggcatttctcgaagatatgggaat

SEQ ID NO: 38078 - DNA, 258 bp, Glycine max
  Clone ID: 700944910H1
cagatttcggaatccctaattcgcaaatcgcaaccctagttgtgctgtgcgtagttgtagtggcttctggaagaggaggcttgagctaaacgctgcgtttcgacgacgatgatcgtgagccagaccatggtgacggaggcggaaattatttgcaagcagaacattccgatgttggacgtgaagaagtaccatcttcgcgtggcgcaagagctcggcgttaacgttaaggtcgtcgaggtgtctcccacctctaacggc

SEQ ID NO: 38079 - DNA, 254 bp, Glycine max
  Clone ID: 700944911H1
taattgcaagaatggcacttcgttgcttggtgatgtccctttctgttctcttcactcttggtcttgcgagagaaagccatgccagagacgaagatttttggcatgctgtttggccaaacactcccattccaagttcattgcgagatcttctaaagcctggccctgcaagtgttgaaatcgatgatcaccctatgacaattgaagaaacacagtacccgaaaaccttcttctatgaagaagaccttcatccaggc

SEQ ID NO: 38080 - DNA, 253 bp, Glycine max
  Clone ID: 700944912H1
ctttcttcttttttagctatccctctcttgaaaaatctagatcccgttcttccttgatctacgttacgcttttagtgaccggatctgtatggatctgaaccagatctacacgccgatggtggttttggcctggtctttcatagatctgatgcatggaggctcagatctactgtacagaggtgtgcgattcatgttcgtctctcttttggaatctgtttcgtagaaagtcgtttggtcttccatgtcgcatggc

SEQ ID NO: 38081 - DNA, 251 bp, Glycine max
  Clone ID: 700944915H1
gtcaattgagagggagattaactcagtcaatgacaaccctttgattgatgtgtcaaggaacaaggcacttcatggtggtaacttccaaggaactcctattggagtctccatggataatacacgtttggctcttgcttcaattggtaaactcatgtttgctcaattctctgagcttgtcaatgattattacaacaatggtttgccttcaaatctcactgccagcagaaaccccagcttggattatggattca

SEQ ID NO: 38082 - DNA, 245 bp, Glycine max
  Clone ID: 700944916H1
cggctcgagcccaggcatattgtgctgtccttatcattgactccaccactggtggtttttaatctggtatttcttaggatggacagactcgtgagcatgctctacatgctttcacccttggtgtgaagcagatgatctgctgctgtaacaagctggatgccacttccccgagttactctagggctatgtatgttgaaactgtgactgaagtctcttcctacgggaatagggctggttacatccca

SEQ ID NO: 38083 - DNA, 261 bp, Glycine max
  Clone ID: 700944917H1
ttagaattgtagagatgctgttccgctgcaatattctaaggcttgttggtgctgtagctaattctcactatccaccaaataaagttttgatatgggatgatcatcagagcaggtgcattggtgaatttacatttaggtctgatgtgcgtggagtgaaattaagacgtgatcgaattgtagttgttcttgagcacaagatatatgtttataacttcacagatttgaagcttcttcatcagattgcgactctggcaaatccta

SEQ ID NO: 38084 - DNA, 248 bp, Glycine max
  Clone ID: 700944918H1
agtgttcattcaatcatcactgatctaagatatgtctacatctgataagtcagaagtggtggaaaggggtgctaaggatgatgaaaagccaaaggaagaacatgagaagggtggatttcttgatacagtgaagtatttcattcaagacattggtgagaagattgaaggagcagttgggtttgggaagccaactgcagatgtcactgggatacacattccatcaattaatcttgagaaggcagagctag

SEQ ID NO: 38085 - DNA, 262 bp, Glycine max
  Clone ID: 700944919H1
tctctctgtgtatttccctacctctcccttcaagatgcagatcttcgtcaagaccctcaccggcaagaccatcacccttgaggtggaaagctctgacaccatcgacaacgtcaaggccaagatccaggacaaggaaggaatccccccggaccagcaacgtctcattttcgccggaaagcaacttgaggacggccgtacccttgctgactacaacattcagaaggagagtactcttcacctcgtcctccgtctccgtggtggc

SEQ ID NO: 38086 - DNA, 257 bp, Glycine max
  Clone ID: 700944889H1
gaatttgtggccactttcttgtttctttatgtcactgttttgactgtgatgggtgttgcaaaatctcccagcaagtgctccactgttggtgtccaaggcattgcttggtcatttggtggaatgatctttgcccttgtctattgtactgctggtatctcagggggtcacattaacccagctgtgacatttgggctgtttttggcacgcaagttatctctcactaggacagtgttctacatgatcatgcagtgcttggg

SEQ ID NO: 38087 - DNA, 257 bp, Glycine max
  Clone ID: 700944921H1
atacaaagcattgaattcaaaaacttaagttcattccttgtgttttgctttcttcctcaaaaccaaacatgtcgaacacatgcggcaactgcgactgcgctgacaagactagctgcacgtaagtgcttcatttcttttctgcatttgtgtgcaagacaatctttacacatatgtagttcatgttacaatcaccatatttgatcgctaaaggattaatctgtataggagtatattatgcatacagtatactgagatct

SEQ ID NO: 38088 - DNA, 257 bp, Glycine max
  Clone ID: 700944857H1
ctcgagccgaatcggctcgagggcggtcatcgtgtcggcggcgacggcggagacgccgaagcagaagggcgaatcgaaagggttcgtggaagagatgaggttcgtggcgatgaggctgcacacgagggaccaggccagggagggcgagaaggaggtcaagcagcccgaggagaaagccgttaccaagtgggacccatccgtcgaagggtacctgaaatttcttgtggacagtaagctcgtttatgacacgctggaga

SEQ ID NO: 38089 - DNA, 264 bp, Glycine max
  Clone ID: 700944858H1
caattaagcccctctggtctctcactcggactttctctctttgcttgggacacggccataggtcaaaccaactcagctagctgcatactcttctttttctttcctcacaccttaagaaagaaaaaacaccaaaaaacacactgtgatagaattcctaaaaaatggtttcagaaaaacagggttagcaaaaagcaccttgcatcactacgcttccaagtattctaggagttatcaaaaaacaaaagggcttgaaggtagcctagt

SEQ ID NO: 38090 - DNA, 260 bp, Glycine max
  Clone ID: 700944859H1
gatgattctagtccaaaggatcatgtttttgttgatgaattcagctgcataggctgcaaaaactgtgccaatgtagcttgtgatgtgtttggaatagaggaagagtttggaagagccagagtgtacagccaatgcgggaagcctgaattggttcaacaggctattgatagttgccctgttgactgcattcattggacatcagctgcacaactatcattgcttgaagacgaaatgcgccgcgtagaaagagtcaatgttgc

SEQ ID NO: 38091 - DNA, 218 bp, Glycine max
  Clone ID: 700944861H1
gttgtttggagcgatccgagaaaaactctgtaaacatgttggtttaccaggacctccttacaggtgatgagcttctctctgactccttccgttacaaggaaattgagaatggaatgctgtgggaagttgaggggaagtgggttgttaaaggagcagttgatgtagacattggtgcaaacccttctgctgagggtggaggagaagttgagggagttgat

SEQ ID NO: 38092 - DNA, 261 bp, Glycine max
  Clone ID: 700944863H1
atgaaatagccaagaggttaccaagggctcagccagctcagaacccagcaggaatggttcttgttgacagacccgccgaaggaactagggctgcatcatgttgttcataagtatttgagctgtatttgcaccccccaatcctttttaattaatcatgttttctttgggttgtatgtactacacactttgatgtcactgttatgtggagctccaacaagtggtatgggctgcaatttacaaaacacaacaacttgatggtgc

SEQ ID NO: 38093 - DNA, 283 bp, Glycine max
  Clone ID: 700944864H1
cggctacgcgcttcgagggctatttgagaaacgccgggcacgcaagtttgtcatttatgtgcaaaactacaacgagagcgatcccaagacccacgaggggatggacttgacaagagtgagctactaaagagttgatagcaaaatacggccttgatgataacactatagacttcattggtcatgctttggcgcttcatagcgatgatcgctacttggctgagccagcactggacaccgtgaagagaatgaagttatatgcagagtctcttgcacgctttcaagg

SEQ ID NO: 38094 - DNA, 274 bp, Glycine max
  Clone ID: 700944865H1
actcggctcgagcaaattctctgtgttgtgttgtgtacttgtgttaattgtgttgttgttgtaggaaatttaagtgaagagagaatgatgatgaagtctgctatgtgtgcattggtgcttgtggcactggttgtggttgaagtggggcccatggctgaggctgcggtgacttgcaacccaacacagttgactccttgtcttccggcaattaattcaggttctgcaccttcgagtgcttgttgccagaagctgaaggagcaaaagccatgcttct

SEQ ID NO: 38095 - DNA, 264 bp, Glycine max
  Clone ID: 700944866H1
aattccagaaaggcgacgtggtcctcgtgctccactacgcctacggcgccgtcaagaaagccatcgaggcctacgtggtgcgcgccggaggcaccgttatcgaagtccccctccccttccccgtcacctccaacgacgacgtagtcaacgaattccgaaaagcccttgagaggggcaagtcccgaggcaacagaattcgcttagcggttatcgaccacgtgacttccatgcccagcgtggtcatccccgttaaggacttggtta

SEQ ID NO: 38096 - DNA, 261 bp, Glycine max
  Clone ID: 700944867H1
agaaaagggtcgaacaactggtgaagtcattgatggctacagaggaagagagtgcggtgaaggagcctttggatctcattaggctcagcctcgacgagcgtatctatgtcaaactccgttccgacagagagcttcgtggcaaacttcacgcttatgatcagcatcttaatatgattcttggtgatgttgaagaaattgttactacagtggaaatcgatgatgagacatacgaagaaattgtgaggactacaaagcggacag

SEQ ID NO: 38097 - DNA, 261 bp, Glycine max
  Clone ID: 700944869H1
gagatgctcttgttgcatggaccaacccattctactagaggagatagcaagtacctgagtcaaatgctaagcttaaagcttaagcctatagatgaagacaatcctattaagaggtggtacaaaagcaccaagtacttcctgcaggataattggcagagaacttgggtattgctactgtggattggcgtgatgttaggtctatttgcctacaaatttgtgcagtatagaagacaacctgcatatgaggtgatgggccattgt

SEQ ID NO: 38098 - DNA, 262 bp, Glycine max
  Clone ID: 700944870H1
aaaaaattttactccggatgtgccaaatagcatttcaggaagaccaagacaggaagatgctcaggaatttctgagctttgtaatggatcaaatgcatgatgaattactgaagcttgaaggacagtcttcaagtcttaatggtagcaaatcttctctggtttcttcggtggaagatgatgaatgggaaacagtggggccgaagaataaatctgctgttacaaggactcaaagctttctcccatcagaattaagtggtattttt

SEQ ID NO: 38099 - DNA, 203 bp, Glycine max
  Clone ID: 700944871H1
cacaaatctcggcagtataccgacactgaaaaccagagaaaagaaaagcatcttttttccgccattattggcccttcttgaaacttggtcatcaattgcgatgaaggactcaacatcttgacaccaccccatttcctaattgatttggattagtcgtgttggacctggatgctgctgctaatacagttgatccacaaatgaga

SEQ ID NO: 38100 - DNA, 264 bp, Glycine max
  Clone ID: 700944872H1
cacaaaaaaaagaaaaaagaaaaaagaaaagcactaaaaaaaaatgaagaagggtttctcccttgtgctgctgattcttctgatccagtacaacaacgttgtcaacgcctacaacaacaaaaactgtgtcacagaggattgcctcatcggcaacaaggatttggaatcagagttctactttggatcccatgtggccagaatgctctacgatgtgagccaatctgtgagtggcaaaacaggcaataaaaataacaaagctgttaa

SEQ ID NO: 38101 - DNA, 260 bp, Glycine max
  Clone ID: 700944873H1
tgagagtgttggtggctggtggaggaattggtggccttgtgttggctctggctgcaaagcatagagggtatgaagtgaaggtgtttgagaaggatttgagtgctgttagaggagaaggtaggcaccgtggcccaattcaactattgagtggtgctcttgctgtgttggaaaccatcgatcagagtgttgcaaggcagataatggaggctggttgtgttactgccaataggactaatggccttgctgatggtctatctggg

SEQ ID NO: 38102 - DNA, 259 bp, Glycine max
  Clone ID: 700944874H1
cgaagagagagaagactctgttatgcgtgatgatgggaaaagtattgaagtgggatctctgaaaggtgacagtgaggccaagtttctcaaagctggtggtaccttagcaaggacccctcttgagaaatcccaccttgatggtcaacctttcaatccctcaactcctgtaaaatgttgcgaggaagggggggagagaactgattccttggagcaaacaccaagcagctgtatctccaatgcgcaaagtactcaatgtgac

SEQ ID NO: 38103 - DNA, 235 bp, Glycine max
  Clone ID: 700944877H1
aaagaaggcgtcttcataaacgcctttcttctccgtttccgtttcctcgttcgaattcgctttttgatctgcgaaaatgagagagtgcatctcgatccacattggtcaggctggtatccaggtcggaaatgcttgctgggagctctactgcctcgagcacggcatcgggcccgatgggcaaatgccaagtgacaagacagttggcggtggtgatgatgctttcaatactttcttc

SEQ ID NO: 38104 - DNA, 230 bp, Glycine max
  Clone ID: 700944878H1
gtcaatggcaacaacatcccctcacaccgccctcttccaaaaccgcaccaaccctttcactctctcctccttcaaacccacatccatcaaatgcgccacccaactccatacccaagccccgcccctcacccactcccaagatcgcgtcttcaacttcgccgccggtcccgccaccctcccggaaaacgtcctcctccgtgcccaatccgagctctacaactggcgcggat

SEQ ID NO: 38105 - DNA, 259 bp, Glycine max
  unsure (1)..(259): unsure at all n locations
  Clone ID: 700944879H1
gatgtccgtcagagatatgctcatgtgaaggactacatccacgttactttaattgaggccaatgagatattgtcttcctttgatgtccgactcaggcagtatgccaccaatcaattgacaaagtcaggagttcgacttgtcnctggcattgtgaaagatgttgaagagaagaagattatcctaaatgatggtactgaggttccgtatgggttgctggtatggtctactggagttggtccatctgctattattcaatctt

SEQ ID NO: 38106 - DNA, 253 bp, Glycine max
  unsure (1)..(253): unsure at all n locations
  Clone ID: 700944882H1
gctttgtgaagaagcattgatagctactgatccaacaattacatcccttggtccaaacctagaggcggcagtttacaagacaggatctgtatgtgcggccttccttgctaacgtagacaccaaatctgatgtaacagtanactttagtggcaattcatatcacttgcctgcatggtctgtgagcatcttaccagactgcaagaatgtagtgcttaatactgcaaagattaattctgcatctgcaatttcaagc

SEQ ID NO: 38107 - DNA, 260 bp, Glycine max
  Clone ID: 700944883H1
agaaaaatgagagaaatcatcagcattcacataggtcaggccgggatccaggtcggaaactcctgctgggaactctactgcctcgaacatggcatccagcccgacggcatgatgccttctgactccaccttcggtgtagcccacgacgccttcaacaccttcttcagcgaaaccggatctggcaagcacgtcccccgtgctgtcttcgtcgacctcgaacccaccgtcatcgacgaggtccgctgcggcacctaccgtca

SEQ ID NO: 38108 - DNA, 258 bp, Glycine max
  Clone ID: 700944884H1
atggccgcaaattctgggaatatctcgtttgtgtcgtctcagtctagttcacagattcatgggactactgatactgtccaggttgcagtgtgttctctaggtcaaaaggcgctatcacctgataatgagatggcaagcgatcttgctagcagtggtgtgtgtggtgattgtaaatttttgttacttgaagactttgggaatcatacagttacccaaagctcacgaaggaggcttagaggaagattcaggcacaatagt

SEQ ID NO: 38109 - DNA, 259 bp, Glycine max
  Clone ID: 700944885H1
agataagtggaagaggccagtctcaaacagtatttgtaaggggtttcgatacatcccttggagaagatgagatacgagggagtttgcaagaacattttggatcttgtggggacattaccagggtgtcgattcctaaagattatgagtctggtgctgtcaaggggtttgcttacgtagacttcagtgacgttgatagcatgggcaaagctctagaactccatgaaactgaacttggaggttataccttaacagtggatga

SEQ ID NO: 38110 - DNA, 259 bp, Glycine max
  Clone ID: 700944886H1
aaaattgtaacaaacgaagactccatagccaactgcttcagctacgtttgcaatttggcgatgacatcatccgttctgaaacgcctcgtctattccaattccatttggcaacgcttcttaaggtcaccaatcaacatccctctttctctctctgttactgaatcgaatttaaacttcacagggagggttcaagtttctcgactttgatgcacacgcttgcttctccagaaactcacaggtggttgtttccccttaatga

SEQ ID NO: 38111 - DNA, 268 bp, Glycine max
  Clone ID: 700944856H1
tagaaaagaaaagaaaggaaaagaaaagaaaagaaaaagaagggagtgcaggtaaagagaagcacacacttcacacacaaaccaaaaatcaggttcaaacacagatctgggagaagaagaagaagatggggcaggaccagaaccagagatcgctgatctatgcgttcgtgtctcgcggcacagtgattctcgccgagtacaccgaattcagcggcaactttaacacaatcgcgttccagtgcctccagaagctccctgcctccaacaa

SEQ ID NO: 38112 - DNA, 267 bp, Glycine max
  Clone ID: 700944887H1
gatgtagtatcatctgtagctactgttcgttctgatctctgtggtcctggagagtggatgcctatggagaaacttcatacggagctcttggagcaatatagcagtggttggcaccacaacagagtgaggaggtatcttagatcagaagattggtccttgtcctgaatccaaagggaagccttggtatggcttgcttatgctgttaaggaagtacgctgagcatttttgcatcaacacaaggtccaagggccgtgtcaccctccagtt

SEQ ID NO: 38113 - DNA, 265 bp, Glycine max
  Clone ID: 700944827H1
cagatatatgatgtggttaggtacagaatacatcgcatgaagaagctgctgaaagatgaattggacaacaagaacacaattgaggaatatatctgtagaaaatgtggaaaaagatataatgctctggatgcattgcgattagtatcttttgaagatgatgacttccattgtgaaagttgtaatggaaaacttgaggtagaaagtgacaaatttgttgctcaagaagggggtgatggagatgaaaatgcaagaagatggcggcatg

SEQ ID NO: 38114 - DNA, 262 bp, Glycine max
  Clone ID: 700944828H1
tatcactgtttcgaggagaaagccttactctaaagttgggtatcgcccatttgttgtcagcgccacggggaagaagaatcatggcaactcctcttcttctggcaatgaagaacggtccattcccgaaggagatggtactagagggaacaattcttctgatggcaacaaatcagaaaacaactctgagaaatgccaccatactaatctggattggcgcgagttcagggaaaagctatatagagatgagctgaaagaattatca

SEQ ID NO: 38115 - DNA, 268 bp, Glycine max
  Clone ID: 700944829H1
ccggtctgtttcaatcgtgcctcctgcatactatgctcaccttgctgcattccgcgcaaggttttacatggaaccagagacgtcggatagtggctctatgacaagtggtgctgttgcaggccgtgggatgggcggtgtagggcgtacacgcaagtacctggtgccaatgctgctgtgagaccattgcctgcactcaaggagaacgtcaagagagttatgttttattgttaagacatgaatgccaaagattactgttaaaaccttgttt

SEQ ID NO: 38116 - DNA, 212 bp, Glycine max
  Clone ID: 700944830H1
aggacattctccaaaagtcagggagcattggaagctggtgatttgactcattgggacattaccttttggagtgagaggctacgtgagtcaaaatatgatattaatgaggaagaactgcgtccctttttctctctgccaaaggttatggatggactctttaaccttgcaaaatcactttttggcattgaaattgagccagctgatggtctagc

SEQ ID NO: 38117 - DNA, 264 bp, Glycine max
  Clone ID: 700944833H1
atggcttcagagaagaaactttcgaacccaatgagggagataaaagtgcagaagctcgtcctcaatatctctgttggcgagagtggagatcgtctcaccagagccgccaaggtgttggaacaacttagtggccaaaccccagtgttttccaaagcaaggtacactgttcgttcctttgggattagaagaaatgagaagattgcatgctatgtcactgtcagaggtgacaaggcaatgcaacttttggagagtggtttgaaggtg

SEQ ID NO: 38118 - DNA, 269 bp, Glycine max
  Clone ID: 700944834H1
agcaatcgagaactgagaacacaacaatctctcatctctctctccctctctctgtgacatattgatatggctgcttctgcttcaaactcaacccttcactcacccaccactcccaacaccaccttcgtccaagccgacccttccaacttccgcgccgtcgttcagaaactcaccggcgcctccgacgacccctccgcccctaaactccccctcactctcccctcgcgcctcgcggcggcgcagtcccaccaccgccccgccgtcggcgc

SEQ ID NO: 38119 - DNA, 267 bp, Glycine max
  Clone ID: 700944835H1
tttggtccatacttttgtcagcctgtaattgctggattaggggatgaagacaaaccattcatctgcacaatggattgtcttggggcaaaggagcttgcaaaagattttgttgtttctgggactgcatctgagtctctgtatggtgcttgtgaggcgatgtttaagcctgacatggaaccagaggaattgtttgagaccatctcccaagcactgctatcatctgtagatcgtgattgtttgagtggctggggaggacatgtctatgtt

SEQ ID NO: 38120 - DNA, 266 bp, Glycine max
  Clone ID: 700944837H1
aggaaatctcgagacctttgacttcgcacagatttgtgtcccctgatatggatgacgctgaagatgaggctggatcatatttcatcagcgctgtttgctggaagagtgatcgccccactattctaacagcaaatagtcaaggcaccatcaaagtgctggtgcttgcagcttgaacacgagaaaaaaaatgaaatagaatgtggaattggtattatcttttcccatatgctatgattgattgtatcatttattaaattgtacatagt

SEQ ID NO: 38121 - DNA, 260 bp, Glycine max
  Clone ID: 700944838H1
gctgaaactcctcttcgagttagatctcagcaacaaccgtttcgccgggaagttccccgacgtggtgctgcttttgccgcagctcaagtttctagatctgagattcaacgaattcgaaggcacggttccgaaggagctcttcgacaaggacctggacgcgattttcatcaatgacaaccgcttcgtcttcgacttgccggaaaatttcggaaactcgccggtgtcggtgatcgtgctggcgaacaaccgcttccacggat

SEQ ID NO: 38122 - DNA, 268 bp, Glycine max
  Clone ID: 700944839H1
ctgttctgttattgagtcaaagggtgtgagtgagtgtgagcaagatgggttctttggcaaagaagggactcaacaattacgtcaaacagctccagcaacaccctttgagaaccaaggtaatcactgcaggggtactatcagcgatcagcgatgttgtgtctcagaaacttactgggatacagaaacttcaactcaaacgtcttcttttcaaagtgattttcggagctgcttatcttggaccctttggacacttttttcatttaatact

SEQ ID NO: 38123 - DNA, 267 bp, Glycine max
  Clone ID: 700944840H1
ggtttcggagagtgatagctttgatccgtatcaggagtttttgaaggcattaataggctttatagatgttgctgggctttattttgccttgacccagttgactcacaggaacatctctcagaatcataaatttcaagctgttggacttggctgggcgtttgctgattctgtactgcatcgattggctcctctttgggttggtgccagaggattagaatttacttgggattacattcttcagggccttgaagctaatgcaaatttggt

SEQ ID NO: 38124 - DNA, 266 bp, Glycine max
  Clone ID: 700944841H1
acctctaaaatcaaaccatgaaaagcgtagaggtggcgaagacggtgctcgaggtcgccgacgtggcttggaccgccgttgaacacacccaccacctccgccaccgcagtcatcccgtccccgctgcccccgcagccgatgtctgcccatccgaccaagatttggagtctctgcgatccgaaaatcgacgtctcaggaacttactcgaccagaatctgaaattgctgcaaaacctctctgaggcgacttgcttcgataattgcctc

SEQ ID NO: 38125 - DNA, 259 bp, Glycine max
  Clone ID: 700944842H1
gctttgctttttttaatttttaattttaatttttaatttttaatttctgtttctcttcttgcaggtgttggaacaacttagtggccaaaccccagtgttttccaaagcaaggtacactgttcgttcctttgggattagaagaaatgagaagattgcatgctatgtcactgtcagaggtgacaaggcaatgcaacttttggagagtggtttgaaggtgaaggaatatgaacttctcagaaggaacttcagtgatactggt

SEQ ID NO: 38126 - DNA, 263 bp, Glycine max
  Clone ID: 700944843H1
ggattttctttgggaagaagttgagtctgatcgactcaacctcaaccttctcctggttcctgcattgcgttgctctctctataccttctaattcccaaatttctagggtttggtacagagagaaaaaggaacataagatgtctcagaacgggaagctgatgccaaatctagaccagcatagcaccaagcttctcaatctcactgttcttcaacgaatcgacccttttgtcgaggaaatctcatcaccgctgcgcatgtcacct

SEQ ID NO: 38127 - DNA, 257 bp, Glycine max
  Clone ID: 700944844H1
catccctcttgatttgaaggttgttttgtgcttatagataaaagttctgccaaatcaagaggggttttcagatcatagtgtgtgtgtgtgtgtgttaaacaatggctaagttctttgctgctatgatcttggcactcattgccatttccatgcttcaaacagtggttatggctgctaatgagcaaggaggccacttgtatgacaacaagagcaaatatggaagtgggagtgtcaagagataccaatgcccatcacaa

SEQ ID NO: 38128 - DNA, 228 bp, Glycine max
  Clone ID: 700944845H1
atctgcacaagaaagatgaggattttgagaaaaagcttttccacaacctctttgtgtatgtcaagctagagtccatgatggaagggtgctcagattcagatgactacagcttatatgatgagcagactgagaggtcaacacaaggcctattgaacaataacacaaacacagctgcattgaatatggatccaacagtttcatcagtggattcaattgtatcagtctcat

SEQ ID NO: 38129 - DNA, 264 bp, Glycine max
  Clone ID: 700944847H1
gttctccaagcggaactcgccggtggcgcacgcggtcggattttgggactaccactccttcatcgccgccgccgcgctttttgagccggaagggttcggcaccaccgggaacaagacgatgcagatgatggagatcgccgccttcttcggacacgtcggcagcaagacctcttgtggttatggagtggccactggaggacctttggcctggggtctttgttacaatcatgaaatgagtcctatgtagtcatactgtgatgacta

SEQ ID NO: 38130 - DNA, 265 bp, Glycine max
  Clone ID: 700944848H1
cgcaaacttgctgtgaatctcattcccttccctcgtctgcactttttcatggtgggttttgccccactcacatctcgtggttcccaacagtacagagctcttactgtacccgaattgacccaacaaatgtgggatgctaagaacatgatgtgtgcagctgatcctcgccatggtcgatacttgacagcttctgcgatgttccgtggtaagatgagcacaaaggaggttgacgaacagatgatcaatgttcagaacaagaactcat

SEQ ID NO: 38131 - DNA, 262 bp, Glycine max
  Clone ID: 700944849H1
cgaggagaaacgcgcttctgatgcaacagcgagaagaggcagctaactatgaaattcgcctccctcaagagtggacttactgacaaaagaaggcacaagttttctcctaaagaaatttgaagtagttttattttggttgttttgacagaagaagaaattggcagaatgtgtttggctaggttaggaagaaaggggttgcattgcagcttttgggacctggtttttagcggaaggaaatattgaaaggatagcagttttaggc

SEQ ID NO: 38132 - DNA, 267 bp, Glycine max
  Clone ID: 700944851H1
aaaaacatccaactctttctcatccagaaatgcggattctcagaatccgaagccttcaccctccgagttgatctcttcaaaacctacggaagcacccttgccggtttaagagcactaggccatgatatcaccgcagaggagtaccatggtttcgtgcacggaaggctaccttacgactccatcaaccctgatcatcacttacggaaccttctctgcaccatcaaacagagaaaaattgtttttactaattcggacaggattcacgcg

SEQ ID NO: 38133 - DNA, 68 bp, Glycine max
  Clone ID: 700944852H1
agcagcgtgtctcgcgcgttccacacaacatacgagatagcgatatggggaagtgcggatatgatgtg

SEQ ID NO: 38134 - DNA, 264 bp, Glycine max
  Clone ID: 700944853H1
gccagttccagtgtacaagcctattgcaaagccagttccagttccagtgtataagcctattccaaagccagtgtacaagcctattccgaagccagtgtataagcctattccaaagccagttccagtgtacaagcctataccaaagccagttccagttccagtgtataagcctattccaaagccagtgtacaagcctattccgaagccagtgtataagcctattccaaagccagttccagtgtataagcctattccaaagccagt

SEQ ID NO: 38135 - DNA, 266 bp, Glycine max
  Clone ID: 700944854H1
gatgtagccattcaagaaagaaatctggccatttccgagaaaaaagcagcatatgctgagcgcgatatggcattcatgcagcgagatgctgcaattgctgaacgtaataatgcaattttggaacgagataatgcaattgcaactcttcagtatcgcgaaacctctttaagtagtggcagtatgccatcatgccctccaggatgccaaatttcacgtggtgtgaagcatatacatcatccccagcaacaggtacaccatatacctaa

SEQ ID NO: 38136 - DNA, 264 bp, Glycine max
  Clone ID: 700944855H1
cccaaatgtattatcagctacagatactgatctttctctttctttgtcttcaaatagtaagtctcctacaacaactgtccatagcaataatgaggcacctaatagtagttgtatggggatacctcatgacaggtccctggggaagtggataccccaagatagaaaggatgagatgattttgaagctagttccaagggttcgggagctgcaaaatcagcttcaagaatggacagagtgggcaaatcagaaggttatgcaggctgc

SEQ ID NO: 38137 - DNA, 264 bp, Glycine max
  Clone ID: 700944826H1
aacacaattaacacaagtacacaacacaacacagagaatgatgatgaagtctgctatgtgtgcattggtgcttgtggcactggttgtggttgaagtggggcccatggctgaggctgcggtgacttgcaacccaacacagttgactcgttgtcttccggcaattaattcaggttctgcaccttcgagtgcttgttgccagaagctgaaggagcaaaagccatgcttctgtggctacctcaaaaaccctagcttgaagcagtatgt

SEQ ID NO: 38138 - DNA, 253 bp, Glycine max
  Clone ID: 700944785H1
ggacaattgatatgcactggggtgaatatcatcagaattttatagaaggtttgaacaaacagctggagaaggatgatatactgtatggttacactttggatgaactagtcaaagtgacatacaacaatgggaatcctctgcctgaattcaacaatgcagctgaggtttggaatcatgacttcatctgggaatccatgcaaccaggagggggtgatatgcccaaactaggtctccttcaacagattgaaaagga

SEQ ID NO: 38139 - DNA, 220 bp, Glycine max
  Clone ID: 700944786H1
ctcttcccagttctcacctcaccgctgcatcttcacgtcgtctataacgagggaaaatgagtcgaggaggtgcagcagcagcgaagggaaagaagaagggtgctacattcaccattgactgtgcaaagcagtagaagacaagatcatggacattgcttctctcgagaagtttcttcaagagaggatcaaggttggtggcaaagctggtgctcttgggtga

SEQ ID NO: 38140 - DNA, 248 bp, Glycine max
  Clone ID: 700944787H1
cttttgagtgccacagagttctgagtttcataggagaaacaaaatgacagaagaacaaaccaaaacggttgagtcagaatcagtaacaccaccacctgctgctgctgctccttcacaggttcctcctgtgctgaggctgaacatgttcctgaggctccaaaggatgtgactgaggagaaatctgtaattccagtgccttcttctgatgacaagcctgatgaatccaaggctcatgtcttggttgagaa

SEQ ID NO: 38141 - DNA, 247 bp, Glycine max
  Clone ID: 700944788H1
caaggaacgatcctgttttcgcaatgcgtggatcaatgcattctattcagagagacatgatcatgctagaaaaccagcttcccttgtttgttctagacagactttgggaactcaattgggaaaaccagaatgaaaggactagtttcaagtctagtactcaggttctttgaccctttaatgccaacagatgaacccttgacgaaaagtgacagaaacaaattggaatcatcacttggaggcactaaca

SEQ ID NO: 38142 - DNA, 247 bp, Glycine max
  Clone ID: 700944789H1
gcacttttcctccctctgacttttgctacaactactaccagtacaagcatatagttggaatggctcgattttcattggatgagatatcagacactggtgcctttgtgagatctgcttcaacattcaaaattggatttcgagggacccgaattcgctgtttccaccggaatcagggaggtatcatctctatgtatcatatgcttgtccttgggcttccaggtgccatgcttacttgaatatcaaagga

SEQ ID NO: 38143 - DNA, 236 bp, Glycine max
  Clone ID: 700944790H1
tctcgagccgaatcggctcgagcacaactccactcttagctgccactggtttttcttcttacatttctcttcctttctaagcttttttcgattacccatttggagattctgtcctaatggctcttgctcttccaaagtttcctccttttccgggttttctcccaaacccagtgttggggatgctctgaaaaacccaacttgctctgtttctctgagctttgcgaatgtgaaattgg

SEQ ID NO: 38144 - DNA, 252 bp, Glycine max
  Clone ID: 700944791H1
acaaggcacaatctccatgtccctaacccaacccccatacgacctccaatccttcaaattccaacccatcaaagaatccatcgtctcacgcgaaatgacgcgccgctacatgaccgacatgataacctcgccgacaccgacgtcgtaatcgtcggagccggctcggcggggctcacctgtgcgtacgagatcagcaagaaccccgccgtgagcgtcgccatagtcgcgcagtccgtgagcaacagcggcggc

SEQ ID NO: 38145 - DNA, 252 bp, Glycine max
  Clone ID: 700944792H1
agtccttcaacttgaggcctgctgcagttcaacgaccacccagcattcagggtccaaaaacgaacttgagggtcgcggccatcctggaaaaagcaaatgcaatccgtcaggcattcgctggaagcgatgaagatgatgatgcagatagttggagtgattcttgatctgactatggaatgaaaagtaccggaacgagtcattcatccctgtaacgaataggaaaactacgtgatagtcatacaaaagattctt

SEQ ID NO: 38146 - DNA, 130 bp, Glycine max
  Clone ID: 700944793H1
ctttttgtcatcgtctatgtgcttttcatcattcacggttacttcctatacctcagcaagaaatggtacaagaaaacgacatggatgtatctcgccgttcccatgatactatacggatgcgaaaggctat

SEQ ID NO: 38147 - DNA, 221 bp, Glycine max
  Clone ID: 700944794H1
ctttcacttcttctctctcaccctccaactatgagttactacaaccagcagcagccacccgtcggtgttcctcctccccaaggttacccaccgccggaatcttacggaaaggacgcgtaccctccgccaggtaccctccacagagaggataccctccgcaggcgtatccagcacaggggtaccctccaccctacgcgcctcctcagtacgctcagcctccg

SEQ ID NO: 38148 - DNA, 83 bp, Glycine max
  Clone ID: 700944795H1
aatagatcaagatgttaggtccatttttggattatcaatacacagtctctgatatgaaatttagattttcagctgctggaacc

SEQ ID NO: 38149 - DNA, 214 bp, Glycine max
  Clone ID: 700944796H1
ttcagaaaacctattcctaaacttcacccaaatctgataaagcacggtcttctacattttccaattcacaatacaattcctacaatttcaactccataagatgatttggccgtgtcctataaaattattgtattagaacgttatcccattctatttccaatatagctacgtttgttctaaaacatcaacggggtttctgtagaaatcctatcgt

SEQ ID NO: 38150 - DNA, 283 bp, Glycine max
  Clone ID: 700944802H1
tcggctcgaggaaggcccttatgagggaacccagaagtgttgcctctgttatgcgcttccagttccatgattgctttgtcaacgggtgtgatggttctatgttgcttgatgatacaccaacgatgctgggggagaaattggccctctcaaatataaattcgctgagatcgtatgaagttgtcgatcaagtgaaggaagcgctcgagaaggactgccccggagtggtttcctgtgctgacatcataattatggcatctagagatgctgtctctctgacaggtgg

SEQ ID NO: 38151 - DNA, 273 bp, Glycine max
  Clone ID: 700944806H1
cttttattcttagctttcctttccagttcatacttcatcctagtattactttccctctttgcattccaaatggccactgttgaggttgcacagcaaacaccaacaactgtgacagagaatgaaacaacgactgaggtaaccaagattgaggaaactaccccagaacagccagccaccgaggttactgccccagaaacagtcaacgaagaagcaaaagaggaagcagcagttgagactaatgaggcaacagaagttacagaggaagggaaggct

SEQ ID NO: 38152 - DNA, 275 bp, Glycine max
  Clone ID: 700944807H1
cggctcgagggctcgagtgatgtgcagcatcagtgagaaagccaaaaggaagcgccaatctgcattccgacggagtgcgcaaacgcagctggggacgctacgtctctgagataaggctcccgggccagaaaacacgcatatggctcggctccttcggctcgcctgagatggcggctcgcgcttatgactccgctgctttcttcctcaaaggaacatctgccactcttaatttccccgacctcgtacactccctgcctcgacctctctcatcttcc

SEQ ID NO: 38153 - DNA, 271 bp, Glycine max
  Clone ID: 700944808H1
aaaagatgtagtatcatctgtagctactgttctttctgatctctgtggtcctggagagtggatgcctatggagaaacttcatacggagctgttggagcaatatagcagtgtttggcaccacaacagagtgaggaggtatcttacatcagaagattggcctggtcctgaatccaaagggaagccttggtatggcttgcttatgctgttaaggaagtaccctgagcattttgtcatcaacacaaggtccaagggccgtgtcaccctcgagttt

SEQ ID NO: 38154 - DNA, 274 bp, Glycine max
  Clone ID: 700944809H1
tctcaaacacctcaacttcatttctctgctccaaagtctcaatcttttatccaaaaactcaaatgggcatggccacaatcacaatgggaggaaaccacaattcctccatcactccacgccactacaacacccacaaggtgttccttttctgcaactacattctcttgggtgcagcttctagctgcatcttcctcaccctctctctgcgcctcattccctctctctgcggcttcttcttcatccttcttcaggtctttacgattgcgggcgcggt

SEQ ID NO: 38155 - DNA, 269 bp, Glycine max
  unsure (1)..(269): unsure at all n locations
  Clone ID: 700944810H1
gatccagcgtaccataaccccaaacaactcttttcctttctgtgacattcagatctcagaagaaaaaaatgaatgactcaaactccagcagtatcagccacagaaccgaacccattgcccaaaacatcatcaacctcattagcaacctctgcttctccctcttcgtcttctctgtcttaatcttcaacgtcatagccataacctaccagnncccagacccatggctccagtccaccccagccctaaccaacctcttcacccaatcagaa

SEQ ID NO: 38156 - DNA, 265 bp, Glycine max
  Clone ID: 700944812H1
ctttcgaaagattttatccaattgaaattttaaaaatgactgggataaacttaagaattcaattattgaaattgaataagtaaacaatttaattggattggtcgaatggtatcaaaaaaatggagtactaactcccatttcttatttattattgaattaaccgatcaacttgctttgttatcgaacatttctttttgatttcaaaaattttccggaaaaaatttgaatctatttttatatgcgaatcaatcctactacttctggt

SEQ ID NO: 38157 - DNA, 109 bp, Glycine max
  Clone ID: 700944814H1
gtatcagcagtctatggcttttgatactagtaacgcttcccaagacttatgctctagacgatggacacaagagctactcccaagaacaacttgtgtccattcgtctttg

SEQ ID NO: 38158 - DNA, 257 bp, Glycine max
  Clone ID: 700944815H1
cttcaccctttgcctctgaaagaaatgggtagtcttgaagcggcaagaacaacagtaggattggcagcaagagacccttcagggattctctccccatacacctacaatctaagaaacacaggccctgatgatgtttacattaaagttcactactgtggaatttgccattctgatctccaccagattaaaaatgatcttggcatgtccaactatcccatggtcccaggacatgaagtggttggtgaggtactggaggt

SEQ ID NO: 38159 - DNA, 269 bp, Glycine max
  Clone ID: 700944817H1
ataggttcgaatcgagcgctgaattgaaacccaccatgttgattaaagggcatcaaattaaggcaccaattttggtcctcaatttgttccttgtcctaatttgttccacagcttcttccgtcaacgttgttgaatcaaggaaacttgatgagaccactccagtgcctgccacaaacggtactgaagaaaagtgtggatcatgtggtggtaccacttatccgtcgccaccgccaccgttactaccaccaccgtcgccaccaccgccttca

SEQ ID NO: 38160 - DNA, 275 bp, Glycine max
  Clone ID: 700944818H1
gatccatcccagtgactgagaatgcgagtgctgtagaaaatggtgttgtcaaggacgcaagctcagcctatatcgacaaagccaacatccaatgggtgcaatgaagatcattctccacaattaggcggacgtgtacaagacactcagaggtcacagagctggtgaggctgccattgtatatgctacatggagctgacgttgaggcactaatgccaaaactgcggcgatctgattactacagactgcctcggatacatgaactggcagccaaagaa

SEQ ID NO: 38161 - DNA, 254 bp, Glycine max
  Clone ID: 700944784H1
gtttctgcgaggcttaagaaacctcgcagaaccaaagaaaactcactctcacacactttggttcacaaaaacctttcacttctattttcaatagttctagttccatctcccatattatagtacccttttatcccaagttacttaaatttaaaacctttattactgctcatacttgtttttcgctttgttaagttttaagaaaaatggaggcacattctccagttatagccaagaagctatggaatgtgttgagg

SEQ ID NO: 38162 - DNA, 284 bp, Glycine max
  Clone ID: 700944822H1
caaaataataaaataatcaatgaattgctagatcatgttatgcatattgatgataaagagttgcgcaaatccatgcatgcattgcatgacttaaagccatttactgttcatcatatgatatgaatcggtggctggctgaattgtatctaattgtgtgattagagttgcaaatagtgtgactctaacaactaggaatttggggtaaactgcatgacagcaacctgtaatttccatttgataatattaaccaagtacagaacaagcatttgatttcttcgacaatc

SEQ ID NO: 38163 - DNA, 271 bp, Glycine max
  Clone ID: 700944825H1
atcaaagcagtgctcttgaacttacttgtaggagctacaggtacaactgaagtcacaacaatctgggccatgactgaactaataaaaaatccaagcattatgaagaaagtgcaagaagaaattagaggcttaagtggtaagaaagatttcttggatgaagatgatattcaaaagttttcctacttaagggcagtgataaaagagacacttagattgcacttaccagcaccactacttataccaagagaaacaaataaaaaatgcatgttag

SEQ ID NO: 38164 - DNA, 84 bp, Glycine max
  Clone ID: 700944752H1
gaagatggcttcacgcaggctcgtatcttctctgattcgatcctcccttcgtagatctcaatcgaagccctcaatttccgcata

SEQ ID NO: 38165 - DNA, 254 bp, Glycine max
  Clone ID: 700944753H1
gattttcagaatacactgcagaggactttgtcttccttggagatgcccagagctgttccccttacatgtggaccttcaaatacgtcagttgatgaatccattttgattgagaaccaagaaagggctgatatggtgccaatgatggaagatttagtgttaatcagttccacgggaagccaagacatatagtagatcctgctcgagacctctctattcaagttttagagaagtcttctcttgtcacaagatttgcc

SEQ ID NO: 38166 - DNA, 252 bp, Glycine max
  Clone ID: 700944754H1
aattgcctctagttctctcactttaactattttcacaaaccatagaaaaataataattttttttttcattgtaacatgtcttcctcagagggtgtctttgaacagggaattgagttctcagaagccaaaatgttcttctcatgtctctaatggaagaagaacaagaagaagagtactatggcgatgatagacttgtgagcatgattcaatcattggaggcagagatcactgacactgaaatgggtcaaatgt

SEQ ID NO: 38167 - DNA, 252 bp, Glycine max
  Clone ID: 700944755H1
ggtgtgaacatgaatattattttgattgcagttatcctaattcataaatcacattgacatattgttctttttgtcttagatgtgtatttaactcaaataacaagattttctcaggatattctcaaatggaaagggaatctctgatttcagtttattctttcagacctctaagaacaggaagtcatatgcttggattctgctttaactccagaagaactagtgcatcttgcgatagagtgcttacctacatct

SEQ ID NO: 38168 - DNA, 252 bp, Glycine max
  Clone ID: 700944756H1
tcaagattcaaactaatctgaaagatgaactttgcaaggagaatttacagcttgcagaggaaaatcttcaaaaggaacctcgtatcatggaacttaggaatcaatgtagaataattcggacaaccgagtagctgctgctaaggagaaactaaatgagcttgagaagcagaaagaagacatgatgaaattgaattccgcagcatcccatctccaaaggattcaagagtctgtgaataagaccgacgaggaatc

SEQ ID NO: 38169 - DNA, 253 bp, Glycine max
  Clone ID: 700944757H1
atctcaactctcacaacccatctttcatatccaaattccaatgattcttcttccttcttatttcaatttcaatcactactattattactcatttcacgcttttgcttctcgatttttaaaccctaaatcatctatctgtctaatagataagatagggcaaaaacaaaacaaaacaaaataaaaccctagccaaagaaagaccttgttgagcagcagcagcagagagagagaggcatatggaaggagtaccgca

SEQ ID NO: 38170 - DNA, 162 bp, Glycine max
  Clone ID: 700944758H1
tagatgagcttggtgaaatatctagatactataaaaggatccatcatacaaaacattttgatgatagagaggctgattgcagattcagctacaatatgtcaaggaatgccagccaacattgctgtagataagtcttgcaaatattggatttaattttgatgt

SEQ ID NO: 38171 - DNA, 254 bp, Glycine max
  Clone ID: 700944759H1
cagcttctactcgtgtaatctctgcgtgggctacaatggattccggtgtccaaggttgcatcttagccactttaattctccacgacgaggaaatcccagtcaccgctgagaagatcaacgctctgttgaaggcttctaatgtctccgccgagtcttactggcccagcctcttcgccaagctcgcccagaataagaacatcgaagacctcattttgaacgccggcggtggtggggccgccgttgcagttgccgct

SEQ ID NO: 38172 - DNA, 101 bp, Glycine max
  Clone ID: 700944761H1
gtgggttcaagtactgatttaattgtccaaagagttgagtatgttcaagagtctgacaagagaagtcacctaatggaccttcttcatgcacagagggcaaa

SEQ ID NO: 38173 - DNA, 222 bp, Glycine max
  Clone ID: 700944762H1
aaagcctcttcttgctttcgtcaactccatcctcctccttttttcctttactttcttctggtattccccttagtgcgattcaacctccaccttctccctaaagacccatcaaactttacaaaaaaaaaaaaaaggaggaaaaaaacaaaaacaaacacaaagggattgaggcaccagggtttacccttctattccagtctattcagatccccccaattggca

SEQ ID NO: 38174 - DNA, 257 bp, Glycine max
  Clone ID: 700944764H1
catgcaccaagaccaacatggtcatggtctttggagagatcacaaccaaggccaacgtagactatgagaagattgtccgtgacacatgccgagaaattggattcatctctgatgatgttggtcttgatgctgaaaatgcaaggtgttggtcaacattgagcagcagagccctgatatcgcccagggtgtgcacggtcacttcaccaagcgcccagaggaggttggtgctggtgaccagggtcacatgtttggctatg

SEQ ID NO: 38175 - DNA, 260 bp, Glycine max
  Clone ID: 700944765H1
caaccgggtgctctcttcttcagcatgttggttggctgtctcatagtcgtgatgggggttatatttgtcacccagcacttgaattccacaaaggggaagcctcgcccctcatccggttcacggtaaaaagccgaattgaaattatactcgcttaactttgcaggcactattgaagaaacagaaaacagtgagctctgcgcaaccagtggagagtcaaaagtattcaaaatgcgtagaatttaaggaaattttgaggaggt

SEQ ID NO: 38176 - DNA, 254 bp, Glycine max
  Clone ID: 700944766H1
gttatggcaatggccacaggagaggcaccagctgaagctaccccaactgaggtgccagagattgtcaagactcttcaagaaacttgggacaaagttgatgataagtatgcagtgagttcacttgccttggtggggtgattgcattgtggggctcagttggattgatctcagcaattgataggcttcctttgattcctgggattcttgagattgtaggcattggatacactgggtggtttgtatacaagaacata

SEQ ID NO: 38177 - DNA, 252 bp, Glycine max
  Clone ID: 700944767H1
gtggtgataatgcactgggcatgttcaaagataactgcttcactggcaattcctgatgcgactcttctggagattctgctggataagttaaaactgtgcaaaggcatatcctatgcagcagttgctgctatgcagacaaaaatggccgacgaaagttatctgccttgcttgttgaacatgtgcctcgttcatcgaaacaggttcctctcctgttaagcattggagaagaagatatagccttgatgaaggcaa

SEQ ID NO: 38178 - DNA, 254 bp, Glycine max
  Clone ID: 700944768H1
aaagtatagagtgaaagaatgggtgagaaaagcaagattttgatcataggaggcaccggctacatcggcaaacatatagtggaagcaagcgcaaaggctggaaatcccacttttgctttggtgagggaaccacactctctgacccctccaaggcacaactcatccacaattttgaggctttgggcgttaatttggtccgcggggatctgtacgatcatgagaagttggtgaaagctatcaagcaagtagatgtc

SEQ ID NO: 38179 - DNA, 253 bp, Glycine max
  Clone ID: 700944769H1
tagccctgctctttttcttctctgttttctggggattctaccctctctacaatgctgttttcacatttccacaagagagaagaatgctgatcaaggaacgttcgtccggaatgtaccgtctttcttccactttctggccagaacagtaggagacttgccaatagagcttgcacttccaactgcatttgtcatcataatctattggatgggagggctcaagcctcatccagttaccttcctcctttccctcctt

SEQ ID NO: 38180 - DNA, 252 bp, Glycine max
  Clone ID: 700944772H1
atctccccaattccttgtccaactattatgtaatctgctttttgtttcaatcatttcttcgtattccttcaacacccatcagattaatggcaaaagctatcctcttgagcaacaaatggtacggatatgagcaattctgggtcacacgttcttaccccacaatacagaaattcagccctaggatcatggatctcaaggtgaaggcagcaacttccttgaattcaaatgccaaaaagaaggcaaatttgtttg

SEQ ID NO: 38181 - DNA, 251 bp, Glycine max
  Clone ID: 700944773H1
atccagggacagttaccaattgttctacacaggatgtttacaacctgcccgtggagagtggaaagacctaccttttgagaattgtcaatgctgcactcaatgaggagctattcttcaaaattgctggccacaagctcactgtggtagaagttgatgccacatatgtaaagccattcaagattgaaacaattgtgatagcccctggccaaaccaccaatgtgcttctaaatgcaaaccaaaaatctggcaag

SEQ ID NO: 38182 - DNA, 237 bp, Glycine max
  Clone ID: 700944774H1
tctaattgtagattaatgatgattgattacgatgtatttaggagttcatatacaagtgcataaattgaaaattcgtgaatgtttgtaatctctttcactctttgttttgctcggttcttgagattgcctaagcttcattacttcaagtcatccattttaaaaaaaaaaaaaaaaaaaaaaaaaaaaaaaaaaaaaaaaaaacaaaaaaaaaaaaaacaatcaaaaaaaaagaaaggg

SEQ ID NO: 38183 - DNA, 252 bp, Glycine max
  Clone ID: 700944776H1
ccaagatcaaagaacagaaaccatgcctctgccaatacctcaagaaccccaatctcaagaagtttgttgactctcctaatgcaaggagagttgctagcacttgtggaactcccttcccaaggtgctaatgttaataaattggaagaggttttaatttctctgcctgattatgcatcttgatatctatccaagtgtttggccagagactagagagtgaaagaaaattatgtgttaattgttatcatatatata

SEQ ID NO: 38184 - DNA, 250 bp, Glycine max
  Clone ID: 700944777H1
tgcttcgttgttgcagtcctcttcgctctccgctcacgaaaaacacaaatctcgcgccgattggataaagcagctcaacgatcatctcgaggccatcgatcccgagatcgccgacataatcgaactcgaaaggcgcgtcaatggaaggggttcgaacttataccttcggaaaatttcacgtcgctgtcggtgatgcaagcagttggatcggtgatgacgaataaatacagtgaaggatatcctggtgcta

SEQ ID NO: 38185 - DNA, 98 bp, Glycine max
  Clone ID: 700944778H1
ctagttctagatcgcgagcggcccgccctttttgtttttttttacgggggtttgtgttttttttttttgaacaggtggttgtgagtgcaatgtgccca

SEQ ID NO: 38186 - DNA, 122 bp, Glycine max
  Clone ID: 700944779H1
caccatcaacttcttctttcgttcttcattgttcattcaatttcttctctcttcatctcaccgaacaaatcattcaattgcaatcatctatggcgtctttcgacccgagcgtagattctagt

SEQ ID NO: 38187 - DNA, 257 bp, Glycine max
  Clone ID: 700944780H1
actacgttcaatatgtcgctggtggcaaacgaggatttccagcacatacttcgtgttttgaacacgaacgtagatgggaagcagaagataatgttcgctcttacctcaatcaaaggtattgggaggcgatttgctaacatttgctgcaagaaggctgatgttgacatgaacaaaagagctggtgaactgagtgtgctgagttggatagtgtgattaactgtggttgccaaccccggcaattcaagattccggactgg

SEQ ID NO: 38188 - DNA, 261 bp, Glycine max
  Clone ID: 700944781H1
caccaacccaaatggcgcgttgggctcattaaactacaagaaagaagacaggtgtgccttggccactaaatcccaggaagcacctccaaaatttggaactcctgaacgtcaaagactgattgatgagatacacgagtatatgctaagcaagtcatcccctcttccacaacttgccccctcacaagcttctgaagaacaatccaaaactgaggaggccaaggcccaggttaatttggaaaatcccgaggctttacccgtggg

SEQ ID NO: 38189 - DNA, 136 bp, Glycine max
  Clone ID: 700944782H1
ggcttctatgatgacacttggttttttgtaatgacaagctgtttttggtagggaagggttatgcttgtacaaaattaatacatgtacatgttacttctctatgtccaaataaacactgattttgccttgtgtgttc

SEQ ID NO: 38190 - DNA, 274 bp, Glycine max
  Clone ID: 700944751H1
tctctgaactgcgctcgagccttatgtcacagccagtcgcacttttgacaaattcactactgcagctaccctaatctacaagcaacccttgaaaaattccagtgtaaaaaatctcacccttctcaagccaactttgccaccaataaatgccacacgctttgtggcaaacttcacagcaaaattcagaagcttggctagtgccaaattccctgccacggtacctcaaaaagtggacagaaaatttttcatccatgtggggctagggactagtcct

SEQ ID NO: 38191 - DNA, 255 bp, Glycine max
  Clone ID: 700944783H1
ccttatttcacaggccgtggcacttttgacaactccacaactgcaggtaccctaatctacaagcaacccttgaaaaattccagtgtaaaaaatctcacccttctcaaaccaactttgccaccaataaatgcacaagctttgtggcaaacttcacagcaaaattcagaagcttggctagtgccaaattccctgccaaggtacctcaaaaagtggacagaaaatttttcatcactgtggggctagggactagtcctt

SEQ ID NO: 38192 - DNA, 261 bp, Glycine max
  Clone ID: 700944718H1
tctctctcttcacctcactcgtctttctcttttcactctcccagcatgtaacccacgccctcatgcatcgccctcttcccttccctttcaagtgagtctcatcaccttacttcaacaccgcggcgaacgacaatatccgtattcagatttgctcaccgtggacaatagtcatcatcgatccagattcagatctgctcataacgcacaacgactatcgatctagattggttcgtgcggttgttctgtgatattggatcagat

SEQ ID NO: 38193 - DNA, 258 bp, Glycine max
  Clone ID: 700944720H1
atataattgtgctatccagctattcaccatttgtgaaatacactcctcaatacatgtggcttaaagaagagctgaagcgagttgagagggagaagtatccttggctcattgtgctcatgcacgtgccgctctacaatagtaatggagctcactatatggagggtgaaagcatgcgatctgtttttgagagctggttcatcgagtacaaagttgatgtgatctttgctggccatgtccatgcttatgaaagatcatatc

SEQ ID NO: 38194 - DNA, 253 bp, Glycine max
  Clone ID: 700944721H1
gctggattgaaagaacgaaattacttagggttatctgattgctcatcagttgatagcagtgcctctactgtgccaagcttgtgtgatgagaaaaaggagaacatgaatttgaaggctacagagttgaggctggtcttcccggatcccaatcgcctgaaagggagccggatcttttctctttaagcccagcaaagcttgatgagaagccactgttcccgtctttagtaggaagcaaagggaacagtggcttcct

SEQ ID NO: 38195 - DNA, 253 bp, Glycine max
  Clone ID: 700944724H1
attaaattcttatcatttacagaatatggagtcccagacttccacacgagagaaggagtctctcaatctcagggaagtcccagaagcagataaaaccttgggcttggacatggccaagggcagcgcattctcaagatgggtgaaggttggacatgcatcataactaaaactgaggggcctgatgctggcaaagttttcgttaaatgtggtgaaaattgcacctgtaccattgagggcgaacagtgtcccaaga

SEQ ID NO: 38196 - DNA, 253 bp, Glycine max
  Clone ID: 700944725H1
atctcttcttgccatgccttacaacaacaacaacaacaacaacattattttgggtgttggtggagttggtctcaatggaggcttcaacaagggaatttactccaagcctgcctttgccaatctcaacaaaatattaatctcaatatcaatcctaagggacacaagggcaaggttgaagatgagctttttcacccatccaaatcttccaagaaaaacaacaacctcaacaaaaaacatggggacaacaacaaca

SEQ ID NO: 38197 - DNA, 246 bp, Glycine max
  unsure (1)..(246): unsure at all n locations
  Clone ID: 700944726H1
ctagattctctgtctctctctctctctctcgatcaatcatggctttgcccaatcagcaaaccgtcgattaccctagtttcaaactcgtcatcgtcggtgacggtggtacaggaaagacaacgttcgagnaaaggcatcttaccggtgaatttgagaagaaatacgaaccgaccattggagtggaggttcacccattggatttcttcacaaactgtggaaagattcgcttctactgtagggatactg

SEQ ID NO: 38198 - DNA, 255 bp, Glycine max
  Clone ID: 700944727H1
ctaattaagcaacacacacttcaatttatcagcatggcctccgttcagtgccacaaaacctgcaaagtgagctgccaacaggaaaaccagcacgcctcgtttgggcagaaagtttctgacttgttcaaaggcatcaacataatgaccacagctccaattatgccacccaaaccaaagtgctttcccagtcagggtcagggttaggccccttcaccaccagaactcaaacacaatgcggttgcccccaaacacatc

SEQ ID NO: 38199 - DNA, 254 bp, Glycine max
  Clone ID: 700944728H1
atctcagaggccgattctttcgacgcttctctctttccttgtggtgttctcgtgttgctcgtaacaaaatggttggaagtgttgacgctttgaatgagggtttgagaatcaacggagcagttgaaccgttcctgaggactttgatgcaacagctgtaatcatagatcccgtgccatctgcagtagtagacaatggcattctgaaggaggtggcgcatatcaataaaggataagttaatagagatctagtactgg

SEQ ID NO: 38200 - DNA, 252 bp, Glycine max
  Clone ID: 700944729H1
caccaacgcgtccctcctacgcgccacaatctccagcacattcccctacctgaatttccaactctaccccttccacgacgccgtcgtttcgggcctcatctccacctccatccgcgccccactcgattgcccctcaactacgcgcgcgctacttggccaacctcatcccgccctgcgtgcagcgcgtggtgtacctcgactccgacctcgtcatcgtcgacgacatcgtcaagctcgcgacatcctcgttgg

SEQ ID NO: 38201 - DNA, 243 bp, Glycine max
  Clone ID: 700944730H1
cctacgtaagagggcaagcaagaagtataacacttttgtccaggattcaattgtggatgatcttaccgatgtggagtccttgcaatttgatttggctacaattgaagctgccacgaatggattctcggatgagaacaagattggccaaggtggatttggtgtggtttataagggtatcctccctaacagacaggagatagctgtgaagaggttgtcagtaacctccttgcagggtgcagtaga

SEQ ID NO: 38202 - DNA, 242 bp, Glycine max
  Clone ID: 700944731H1
agctgaacctcaaaaccctagctgccggcttgtctgcaacggcatcgtttcagtatctcgttatgattagttgagaatccaaaggaatcgaatcgaatcatctcgacgagaagcaaaacaccggctatagttagtacagagagcgaggaggcgtcggatccaaatcggaggtaacttccgttgatcggaagcgaatcaatgacgtcctcgataaacagctcgaacgatcctcgccgtcacat

SEQ ID NO: 38203 - DNA, 238 bp, Glycine max
  Clone ID: 700944732H1
ccgagatcaattggctattgatgatattgtgtttggtagtaactatttgtttcagagacacaaagcatctgggtaatgcctcaggtttggcagttatcacagtgatgctggtgaccacttgtttgatgtcactggtattgtactttgctggcaccagaatgttctccttgcacttgggtttgttttcatatttggctacattgaggttctcttcttctctgcttctcttatcaagttc

SEQ ID NO: 38204 - DNA, 261 bp, Glycine max
  Clone ID: 700944734H1
attgcttttgttcccaattttctcaaattgctttcggttttcgatctgattctgcaaaatcatggagatggagcgcatcgttgaattccctcacacatacatggagacgacccccgagaaagagagcgcgtttgggctgggacatcgctgaggtccccaaggctcaggtaggattgttttgtggacaagaggttgagaatatttcaagctttgctccttcagaacatccccctagttctctgtttaagggagttgctcgaa

SEQ ID NO: 38205 - DNA, 262 bp, Glycine max
  Clone ID: 700944735H1
ctcgaggtcttacttaaatcaataaaattgcagaatagatcactagagacccagccatatttaaatggacgctgcatttatcttgtctgaatgatgtgctctgggataacaacagaggggaagatacagtcgctactcttcgttattcattttgcgatagagggtactgaagtcatgtcatagatgtctgtgtgtgtgatcgtattcagttgatgacagcagggtgtgtctcagttaagcttgggaatttgatcgactctgc

SEQ ID NO: 38206 - DNA, 256 bp, Glycine max
  Clone ID: 700944736H1
gaattttctatccgctcatccccctcacaaattagggtttatgcgaatcttttatcgtctgaaatcgaatccaacgtttcagccatggtttccgattcaatcgccgccgtaccgattccctccgccgcaacaccaagaacccggggaagaagaagaggactaacaggtccgcgaaattgaagcagtacaaaatcgatgcgcgccggagcaatggttatctcaaggtgcggtgaagagcaaggggtgcaaggacgga

SEQ ID NO: 38207 - DNA, 255 bp, Glycine max
  Clone ID: 700944738H1
ctctcttgatcctaattcatcattattccacaatttccacaatgcccagcagtagtagtcacggtgcagaaggctcatcaagcaacattcccatagaatatcagcagcagcaacagcagagtccagtgaacttagccgctatgagtcacagaagagaagggactggaacacttttgggcaatacttgaagaaccagagacccccagttcctctctctcagtgtaattgcaaccaggtgcttgatttcctccgtta

SEQ ID NO: 38208 - DNA, 250 bp, Glycine max
  Clone ID: 700944739H1
gaagattctggtgaatgcgtagaaaaggaaaataaagaaattagcgtgaaaaatgttgggtgtgttcagcagctccatagtgtcgccgccggaggagctcgttgccgccggcagccgtacaccgtcgccaagatgacggcggcggcgctgcggaagtggttcgaggagaagaacccctccgcagtgtcggtggaggtcggagagcatgtccagctcgcttatacccaccagaacgagtcgccgtttcagc

SEQ ID NO: 38209 - DNA, 251 bp, Glycine max
  Clone ID: 700944742H1
aattaacacaattccaactcatccaggatgatgcccaagagaagagatcggagtacaatggaagtctagtaccggcagaatttttggaaacagagtactaccaagatctcaacagcgtggacaaacacaccagacgactggaacaggatctatcaaagtagagaaaaatggaaatgactttcacatagaaccagataatgacactggttgccatcactcttgcaagggcaatccagcaaccaatgattggg

SEQ ID NO: 38210 - DNA, 251 bp, Glycine max
  Clone ID: 700944744H1
acgacatttcataaaatggggagagaaaaagttattctgatagactcaatactgccttttggtttcgagctgttgatgtgtgatactgacatggaaattagaaacccccagatctctcaattgtttaaccacgtcagaataaaatccatgaatgcatagttaccaaaggtcactattacagcattatccttcaccctttgctgaaccagtttcttggtcagcctgatatcctccaaaggtggcatcttttt

SEQ ID NO: 38211 - DNA, 254 bp, Glycine max
  Clone ID: 700944745H1
atttaaacccttttcgatccaccattctcaccttgttgagctttgcctagctagctttgcttcccactcctcactagttaactcttttttattatttttctgacaccaagcttgatcaaaacgtacggttcaatggatcgcttttcttccagtaccattctccccttagcgtttcaaggtgccaaagatgacttcaccatgcagcttgcactggtgtggaaccaaatcaaagcgccactgattgtgccgttgct

SEQ ID NO: 38212 - DNA, 255 bp, Glycine max
  Clone ID: 700944746H1
gcggaacatgtcatgtttggctccttggacaacctcttccaaagcaccaacataataccaaaggatattggtatccttattgtgaattgcagcttgtttaaccctaccccctcactgtcttccatgattgttaacaagtacaaattaaggggtaacattaggagctttaatttgggagggatggggtgcagtgctggagtcattgctgttgatcttgctaagggacttttgcaggtccataggaacacatatgct

SEQ ID NO: 38213 - DNA, 241 bp, Glycine max
  Clone ID: 700944748H1
aagagaagggttttaagttaagaagcaaaagatagaggtgggtgtatgtttgagaagtaagaagcatggctcagtatggttacgcataccgaagcgctcaaatatccacctacaacactagcactgtgagaacattgaaactggtgcaaagccatttgctccctacgtccccaaatttagtaacggtaatggttactcagacgggatcgttaccatgaaaaaaataattccagttgctagc

SEQ ID NO: 38214 - DNA, 259 bp, Glycine max
  Clone ID: 700944749H1
gcgattgacttcattgctaggagatctcgtcttgctttcctggacacggatgcagcaggacgggcattacctcgtgtgattcaaatattggcagctgagcacaaatgggacaagtcaaggcagaaggaagagagtttaaagctaaagaatttttggagacttttaaatcctccagaaatgctcaattctatgatgggaagcacaattagctctggatttgaccaagaagggagtgaccttccaaacatggtattattgc

SEQ ID NO: 38215 - DNA, 253 bp, Glycine max
  unsure (1)..(253): unsure at all n locations
  Clone ID: 700944750H1
ataatttcctcttcttctctcgtttctctctctttctttctctcaaagtgttgaacttgaagttgcagagagaaaatggattgagaattctctctcttttctctttctcttcccaactttccttccttgggacattctgcttctttgctatggaagactcagattcagttgctacgctgatagattccacaacttctaagatctannagctgcaaaaggcatttgctgaacttgaaagttaccgagctgttac

SEQ ID NO: 38216 - DNA, 261 bp, Glycine max
  Clone ID: 700944717H1
atcgagcgattcggctcgagtgatttgtttccacatattctaagagaagagccagtggcaaggctttatgagcttgggcaggtacttaatctaaacacagctttacttttgtctgataattttttatttataatatatttctattcatagtcaaaatagttcgaatgaatctctgttcttgacctgaatgatccaaatccttccaggaaaatgcacataacttcatagtcaaaattcactgtgcttattattctcattcag

SEQ ID NO: 38217 - DNA, 247 bp, Glycine max
  Clone ID: 700944685H1
tccttatctatcttcacctccatcttttaacagttcccctcgaaacttctgaagatgggtggcattgcattcggacgcttggatgattctttcagtttaacctcaatcaaggcctatattgctgagttccattcaaccttgctctttgtttttgccggtgttggttcagccatagcctatggtaagttgacatcagatgcagcacttgaccctgctgggacactggcatttgctatgtcacggggtt

SEQ ID NO: 38218 - DNA, 246 bp, Glycine max
  Clone ID: 700944686H1
gttttctattatgagatcttgaactcccctgaaagagcctgtcatcttgcgaacaagcttttgatgaagctatttctgagcttgacaccttgaatgaggagtcatacaaagatagcaccttaatcatgcaacttctcagggacaacctaactttgtggacttctgacatcccagaagatggagaagatgcccagaaagtgaatggcactgccaagcttggtggaggtgaggatgcagagtgagtcc

SEQ ID NO: 38219 - DNA, 247 bp, Glycine max
  Clone ID: 700944687H1
attaacactaataacagcaaactaaaggtgaagtttgccagaaacaagatgggaaggaaccattttcagcagcaacactgtgctgatgggagcatgtggatggagagtcagggtcagcaacagagctatgccttccaagaagagtcttggagccctgataacaactatggccacaaccacaagcaattcccaggcatgcacatgaacatgaacaacaacaacaacaacaaaaggcttggtgcttttg

SEQ ID NO: 38220 - DNA, 244 bp, Glycine max
  Clone ID: 700944689H1
attcctctctctctctctctgttcctgtcgctgtgtgtcatttcgttttttccccacttccatccatcttcgtttttcttcttcttcttctcccttcgattttcatttctcttttcttttttttttctctttatttatcactattattattcatcttcgtttctttgccttaagcttccttcgatttttttctctcccgttttcgctgtgtcccctcttagatccctctctggatcacagtgag

SEQ ID NO: 38221 - DNA, 245 bp, Glycine max
  Clone ID: 700944690H1
tgtaagagtaggaaatcgacaaaccctacgctgaaagaagaaaaaatgtccggcgtaaagagagcactgaggcagttcaccttcggaaccggcaagaccgccggtcgcaactcggcggggcgcataacttccttccaccgcggcggcggagccaagcgcttgcaacgaaccgtcgatcacaaacggaatactgcttcttctctcggcgtcgtcgaaaggatcgagtacgaccctaaccgctcctc

SEQ ID NO: 38222 - DNA, 245 bp, Glycine max
  Clone ID: 700944692H1
ggaaaatcttgggagagttgattaagcagctagatatggcaagatttggtctttccctttgggcagctatataagcgtttgtttgctaccgtgattaaagggaattcaagcaacaacctttcttatacagattccatcagcacagaactttgtcgatgttacgaataactgctcactgaagatcttgaagcactactataatcactcaggttaattgcaagggaaacaaaatggaacgccaactg

SEQ ID NO: 38223 - DNA, 246 bp, Glycine max
  Clone ID: 700944693H1
aaattcccaatccctttcccagtttccaccaaaacctaaacctcaacctaaacctaaacctaaacataaactgaatttgccaaatccccttcccaattttcaccaaaacctaatactcccaaaccaatcttcgatcatggccgccgaatcacaacctcaactaatcgaagagagaagagaggagcaagaacttaagtacctggaatttgtgcaattcgcgaccatccaggccctgatgcgctgcgc

SEQ ID NO: 38224 - DNA, 242 bp, Glycine max
  Clone ID: 700944694H1
atcgaacccgtcgtcacagaaaaacttgtcaccatggtttcttccgacaaggatccacgagaggatgtccttcaagcctggtacatggatgatagtgatgaagatcaaagactcccccaccacaaagaacccaaggagtttgtctcgttggaccaacttgctgaacttggagtccttagctggaaactagatgctgataaccatgaaaatgatccagagctgaagaagattcgtgaagagcg

SEQ ID NO: 38225 - DNA, 242 bp, Glycine max
  Clone ID: 700944695H1
attcgagagtgctgaaatgggtgttcccgctgagaacgatggctgcaaatgtggagctaactgcacctgcaacccctgcacttgcaagtgaggtgttggagagctaaagcttcaagcagaaatggcccttagaaataatgataaaaactatatgtagtttcaaaacttcaaaattatgtagtatgtattatgttgcactctggtgttttgtgtctaaacaaacacccttagaataaagtggt

SEQ ID NO: 38226 - DNA, 245 bp, Glycine max
  Clone ID: 700944696H1
tgacagtatcagagacgaggttcggcttctgcaatcaatctacgagggattgcaggaagatccaagggaagtgaagggatacagaaaagaggacttcaggattctgtgggtcccagttgtggatgagtggaatcttctgcacaaggccgagtatgataacctgaagcttgaaatgccgtggtatgtggcggaatacttctaccccttggccggaataaggctcataagggaggacttgaattaca

SEQ ID NO: 38227 - DNA, 245 bp, Glycine max
  Clone ID: 700944701H1
gcagcagaggagaatgtaagaagtataagagcatatgtgacagaattgaaagaacgtgtagccaaactgcagtaccaaaagcagttacttgtttgccaggtgcttgaacttgaagcaaacgaagcaaatggccacacatagacaatgaagagtactcatgtgaaccggaggagccccagatttcgtggcaaatagcatttaaagagcagcggcagcagattcttgaattatgggatctatgttat

SEQ ID NO: 38228 - DNA, 249 bp, Glycine max
  Clone ID: 700944702H1
ctttgttgttgtaactcgttcttcttcttttgttgttctgtgtttgtgtttgttttttctctcacctgaaaatgtcttgctgcggtggtaactgtggttgcggaaactcctgcaagtgcggcaacggctgcggagctgcaagatgtacccagacttgagctacactgagtcatccaccaccgagaccttggtcatgggagtcgcacctgttaaggctcaatttgagggtgctgaaatgggtgtgcccgc

SEQ ID NO: 38229 - DNA, 261 bp, Glycine max
  Clone ID: 700944703H1
caaaggccaagcatgaaaaattcccaagccaaggcggcttaccagatcgatcagaagaaggaagcaagggactctgtgagtcatcaccagaaatatctactactgagagtgacatctcattttcaaggtacactcctcaatgcctcggagacagctctttggagatatgcaaagagagcgctgccttgaaagtgaacatatttactattctgatcacggggattccttcagctgctccaactttgttgacctggattggct

SEQ ID NO: 38230 - DNA, 259 bp, Glycine max
  Clone ID: 700944704H1
tgtcttctctccattgaccatgtctgctactttcaaataccaacctacgggacttcacggttggggcgcgccgagatcttcttctagaaatctcgcaaggttcttctcaatgcgattcgcgtgcaactctcgccaccataaaatattgcatgcttccgtttctcacccttcatcactctccatttctcacgactcatctaccgagactgagagtactttgatattgattcgtcatggggagtctttgtggaatgagaag

SEQ ID NO: 38231 - DNA, 255 bp, Glycine max
  Clone ID: 700944705H1
catattcaaatggaaacaattccagtgaaatatagtagaatgcaccctattttatttttgaatattctaagatacaatgtagcattgccgccacaaaggatactaccatgtaggcttaaattataagagatacagatactttatctcagttgatgctcaacattctcttgggatttcatgattcggttaactcatgttctattgtttggtaagtaattgtctatatgtgcatattgtgatagattatccatgtgg

SEQ ID NO: 38232 - DNA, 253 bp, Glycine max
  Clone ID: 700944707H1
gtcgaagatcccgagaaacagatattggaaccggcgataaaaggaacggttaatgtgttgaaggcggcgaaggaagcaggggtggagcgcgtggtggcgacttcatcgatttcgtcgattatgccaagtctaattggccagctgataagattaagggagaagagtgttggacggaccttgaatactgcaagcaaaaggggttgtattatcccattgcaaagactctagcagagaaagcgggttgggactttgc

SEQ ID NO: 38233 - DNA, 254 bp, Glycine max
  Clone ID: 700944708H1
caaaatcagcctctaatatttttctcactgtctctccagagaacttgatagagagatggcagctgcaacatctggtgctgtgttaaatgggttgggatcttccttcttgagtggaggaaacaggagccaacccttctggcctctgctattggaggcaaagttggtgctgctgttactgttaatcccagaagactcattgtggtagctgctgctgcaccaaagaagtcatggctccctggtgttagaggtggtgg

SEQ ID NO: 38234 - DNA, 245 bp, Glycine max
  Clone ID: 700944709H1
ataaaatttaaaatttgtaagaaacggaaaagaattgatttgaattgaaatggtcaggaccaggaattaactttaaacaatatgaaataaaaaaaagttatttttttaaaaaattcactcccctcctttttttaatccttttaaaaatttgtgtgattattatgctaagtaggaagtgtgaaaagcaaagccaaaaaagctgtttctttcaaatgtttcatcttctcttcttctccatacattgt

SEQ ID NO: 38235 - DNA, 254 bp, Glycine max
  Clone ID: 700944710H1
ctgaggtctaattttctgggcaccaagttcacaatcttggatggcgagcccgcgcatgaaacttcacttccactgaattgcaagttgcagcaaagagtccatctgaagcaggtacttcctaacaaggttgctgctgctgctaactacaaagtggccacagtatcttatgaactcaatgtcctccgaacaagaggtccaaggcgaatgcggtgtatgatgcacttaatccccatatttgcaatccaagaaggagg

SEQ ID NO: 38236 - DNA, 227 bp, Glycine max
  Clone ID: 700944711H1
caaagctataacaaggttggggtgtcctacacctgttcctgcagtcttcatcggagggaagctggtggggtccaccaatgaagtcatgtccctccaccttagtggttcactcactcaactgctgaaaccaatcgagctttgtcttaaagaagggtgcacatgcaaattaaattaaaacatgttcctgctaccttaattggaagaataaacatgcagtatagtagtgt

SEQ ID NO: 38237 - DNA, 252 bp, Glycine max
  Clone ID: 700944712H1
gcgtggttgggtttccgcttagaattgcttggaagcttagttttttgcctttctgcaatgttcatgatcatgttacccagcagtatcataaagccagaaaatgttggtttgtctctctcatatggcttgtcattaaatgccgtgatgttctgggctatatacatgagctgtttcattgaaaacaaaatggtatctgttgagaggatcaaacagttcacaaatattccatcggaagcttcatggaacattaag

SEQ ID NO: 38238 - DNA, 247 bp, Glycine max
  Clone ID: 700944713H1
atgattttcaggttaaatgtttcaatgctcctttgcaaccatctgaaattgtgggtgtaaagaaggttgtacaagaaaaattgtctgaaggggtgaatgaacgtggacttactttgactggattcctatttcttcatgccctcttcatagaaaaagggcgtcttgagacaacatggactgtgctcaggaagtttggatataatgatgatatcaagcttgctgatgatctaattccacctataaagtg

SEQ ID NO: 38239 - DNA, 247 bp, Glycine max
  Clone ID: 700944714H1
ctttctctctctaactcaatctctctctctctctctctctgaattttctcctctctccgattccttttattaattggagtttactcgctccttttcctttccctgaaaacatttcctcgtcgtattgatgtcgaaaagggccggccacttccaaaatttggtgaatgggatgtcaatgatccaacctcagctgaggggttcacagtgatttttaataaggccagggatgagaaaaagacaggtggta

SEQ ID NO: 38240 - DNA, 248 bp, Glycine max
  Clone ID: 700944683H1
ctcatcgtcatcgtactactactacccacgttctgctcctttgcggatcgtgtccttgaacaatgctaactgatgtttttttgcactcatcattatcaaccctttcaatgactctgcgcatggttgttgttttttatcggggtgacggttttcttgtagattatttgtttattaaatcgactcccttgttcgcccatacaaaagatggcagacaatgaggatggaagggataagactactcgtgggaa

SEQ ID NO: 38241 - DNA, 258 bp, Glycine max
  Clone ID: 700944715H1
cggctcgagccgcccaaatcaataccacaatgggttttcatttgcctggtatcagaaaggcattgtttgcagtgaatcaagcatcttcaaaagccattcatgtgccaaagggctatcttgcagtatatgtcgggagaacatgaagaggtttgtgatccctgtgtcatacttgaaccaaccttccttccaagacttgttgagtcaagctgaggaagaatttgggtatgatcatcccatgggtggccttgcaattcctta

SEQ ID NO: 38242 - DNA, 258 bp, Glycine max
  Clone ID: 700944716H1
gctgaaggaagttatacgagaatgtgacactctgtgccttgtttttgagtacatggaatacaacctgtaccaacttatgaaaaacagggaaaagctgttttctgaaaatgaagttagaaattggtgttttcaagtttccaaggtttagcttacatgcaccagcgtggatactttcatcgtgatcttaagcctgaaaacttgctggtcaccaaagatgtcatcaagattgctcgatttggcctagccagagagatcagt

SEQ ID NO: 38243 - DNA, 251 bp, Glycine max
  Clone ID: 700944654H1
tgaagatcatgtcgactcttttggtgagaaagcaattgccgagattaagaagcaatatgcagtgtttgatgcgaaggtattgagcaagatacccagaggacctctgaaagataaaaagaaagattgaagtgggcactagattctgacaaatatgttgtagtggggtttcaggaaccctatgatgtcatattttatttttttagggtccttttactagagacactgtggaagaaaagtatcttatatatttt

SEQ ID NO: 38244 - DNA, 250 bp, Glycine max
  Clone ID: 700944655H1
cggctcgagctcgagccgaatcggctcgaggcttaggggatggaaattagaagacataaatccagtactattgcgatactttgcctttggttctagggctgtattgaatcctatggctgccgtgtttggtggaatagttggacaagaggttgtcaaagcatgctccgggaagtttcatccactttttcagttcttctacttcgactctgtggtatcactgccttcagaaccattggacccaaatgatttc

SEQ ID NO: 38245 - DNA, 249 bp, Glycine max
  Clone ID: 700944656H1
tcattgggtactgcaggcagcattgataccataaagcctctcctcgtggccctgtctttccatcaattttttgagggtatggggcttggtggttgcatatctcaggcaaagtttgagtccaagtctatggcaattatggcaacctttttctcactgacaaccccaattgggatagcaattggaatgggggtgtcaagtgtgttcaaagagaatagccctactgctttaactgttgaagggattttcaat

SEQ ID NO: 38246 - DNA, 247 bp, Glycine max
  Clone ID: 700944657H1
ctatatctggagattcatactatggctctcacgtgatgcagtatggtgatgtagggcttagcagagatgttctcttccattatttgggtacagatcctgctaatgataatttcacttttgtggatgaaaactccttatggtcaccttcaaaaccagtcaaccaacgtgatgctgatctcatccatttttgggataagttccgcaaagctcctgagggttctctcaggaaaaatacagctcagaaaca

SEQ ID NO: 38247 - DNA, 248 bp, Glycine max
  Clone ID: 700944658H1
accagatggaggtgatgtttataaaggagttccaaaggattacaccggcgaagatgttactgttgataacttttttgctgctttacttggaaataagtcagcactgactggtggcagtgggaaggttgtggacagtggtcctgatgatcatatatttgtatactatactgaccatggaggtcctggggtgctcgggatgcctgctggtccttacttatacgcggatgatctgattgaagtcttgaaga

SEQ ID NO: 38248 - DNA, 247 bp, Glycine max
  Clone ID: 700944659H1
aaagaatcttccttttgtttctttgtagtgttagtatgaatagactgttttccaagatagtttgtctgtccagaatctacgactgtcttggaaaacagtctattcatactaacactacaaagaaacaaaaggaagattcttttgtcaagtcttgggaagcttattttgtagtttattgcttattgcaagctcttacggtcctattgactttaagcaaattgattttgttgataggctatatgttgta

SEQ ID NO: 38249 - DNA, 248 bp, Glycine max
  Clone ID: 700944660H1
ctcgcaaatctcatcgaggaatacgaccgtgtttcgtcgctgaaaatcagagccttcctctcgccgcccacgccgcccacgccgcccacgccgccgagatcgccgaacaagttttccactgctccgtcgaaatcggcgtccatctcctcctcctccgcttcgtcatcgtcgtcgtcttcatcgtattacagccctaccggctccggtgaatctggccggagatacagggctccggcgctggtgtcaga

SEQ ID NO: 38250 - DNA, 231 bp, Glycine max
  Clone ID: 700944661H1
ctcgagccggggggaattcaacctcgatgatgttgaagttgccttaaaggattctgaggagatcagttgccggggaaaaaggaggagcagcctacagccatgaatgcatttgagttaatctcaatgtcaaaaggattgaaccttgaaaccttgtttgatactgacaggggttttaaaggggacacaggtttcccctaaatatcctgtggggatgagatactcaacaagttt

SEQ ID NO: 38251 - DNA, 247 bp, Glycine max
  Clone ID: 700944662H1
gtccacaccgctgaaaagatagatgtggaatcgcttttcaacgttactacaaacatcatcaagcatgctactgcacttgctgacagtgttgctgttaagactggcacacccgttggtcttattgaagacaaggttcctttgtccactttcgacccaccgttccttaaacttaagcatattgcttctcagatgatgaacacacctcacggtgagcatcacgcacacaacacagcaatctcgatcctcg

SEQ ID NO: 38252 - DNA, 247 bp, Glycine max
  Clone ID: 700944663H1
atgaaatagccaagaggttaccaagggctcagccagctcagaacccagcaggaatggttcttgttgacagacccgccgaaggaactagggctgcatcatgttgttcataagtatttgagctgtatttgcaccccccaatcctttttaattaatcatgttttctttgggttgtatgtactacacactttgatgtcactgttatgtggagctccaacaagtggtatgggctgcaatttacaaaacacaa

SEQ ID NO: 38253 - DNA, 263 bp, Glycine max
  Clone ID: 700944664H1
cggaattcgggtcgagacttattctgcttctgattcctcattcaacggtttgaaattcaagataccacagagatattacagagagagtaccctttgaatctgctgtgctgaaaggagactaggagatttggattaaaataagggtacatggaaatgtgggatctcttttggagcagtgtttctatagttgtgggaaatagtatcctcgatggcggcatcaaatataaacgttgagtgttggtttgcatcggaggttggcagat

SEQ ID NO: 38254 - DNA, 256 bp, Glycine max
  Clone ID: 700944665H1
ctcaccattcaaatattttgtcaataaactcactgactccagtcaatggtgctgctgttccagctggccatgcagcaatgaactcagccttacacagaaacttggactttaattattgtgatcccttacaaatgaagcatgagggatttgtggagttaactgacgaggccttatcgaaacaacatcaggggaatatcatgaacctaccgaaatctcaacaaagtcatttctctaataatcttggttcactggaaga

SEQ ID NO: 38255 - DNA, 254 bp, Glycine max
  Clone ID: 700944666H1
tattgctggtgaggaggataaaggtgctaaaacctcaaggcagctgagaaaacaagcagctcgtaaacctgtaaacagttcactcaatgaggatgttgaagataataatgaccttgacccttcttataattctaatggagatgaacttcaagaaaatgatgacgagtatgaagttgattatccatccaggtagagaagagtatcaaatagttcacagaagaaacctgtggctaaaagtggaaaaacatctcaaa

SEQ ID NO: 38256 - DNA, 251 bp, Glycine max
  Clone ID: 700944668H1
aattaatattctccatacacatcaaactagacatacactacctagcttgttcttaaattccacacaaacacaacaataactattagcatcatctactttctagcttattgttcaagagttgtgatcaagaatgagttcaacaagccgtgcttggacttggaccgtggcggcaagtgttggagtggtggaggccttgaaggaccaaggtatatgcaggtggaacagtgtgatgagatcagcacaacaacatg

SEQ ID NO: 38257 - DNA, 249 bp, Glycine max
  Clone ID: 700944669H1
cttcgagcttcggcggagatgctcggaaaaggaagcttggggactgtttacagagcggtgctcgatgacggctgcaccgtggctgtgaagagactcaaagacgctaacccctgcgagagaaatgagtttgaacagtacatggatgttgtagggaagctcaagcaccccaacattgttagactcagagcttattattacgctaaggaagaaaagcttcttgtctatgattatctccccaatggaagcttg

SEQ ID NO: 38258 - DNA, 247 bp, Glycine max
  Clone ID: 700944670H1
gtgatgtgatgttgaactcatactaaaggatggacatttccaattctgaatattgaccgcagtgtgtttcaacacaggttgacaagaggacagttgattgcaggtacgatgtaaattggacagtttcctgggatttgtcagggtcgttttgctggagaaagtttggatgttggagaaagttgtcataattctgtgtagcttgtaagttgtaacaacacatggtaggcgtacgcgacatggacagtat

SEQ ID NO: 38259 - DNA, 249 bp, Glycine max
  Clone ID: 700944672H1
ttcacccaatcactgggttagtacggacacaaactaagaagccatactcacatcatacaacacaaccatcctcaagccaacaacaccttctcagatcttacaatgatatttcaatcgtgttttatgatgactgcaactctgctattatttgttatagcacaatgtgttgtgggagttaattcactttcacaagctgataagataagcactttgccagggcatccaccagtcaaattccagcaatatgct

SEQ ID NO: 38260 - DNA, 248 bp, Glycine max
  Clone ID: 700944673H1
cgccgacaccgacgtcgtaatcgtcggagccggctcggcggggctctcctgtgcgtacgagatcagcaagaaccccgccgtgagcgtcgccataatcgagcagtccgtgagccccggcggcggcgcgtggctcggcggacaactcttctccgccatggtggttcgcaagccggcgcacctcttcctggacgagctcggcgtggcgtacgacgagcaagaggactacgttgtgataaagcacgcggctt

SEQ ID NO: 38261 - DNA, 246 bp, Glycine max
  Clone ID: 700944674H1
caaataccatagtcttctctttgtctgagaaaatagttccccccaaaaataaaatgaacaagggtctctcctttgtgctgctgattcttctgatccactacaacaacgttgtcaacgccaacaacaaaaactgtgtcacagaggattgcctcatcggcaacaatgatttggaatcagaattctacttcggttcccatgtggccagaatgctctacgatgtgagccaatctgtgtctggccaaacag

SEQ ID NO: 38262 - DNA, 247 bp, Glycine max
  Clone ID: 700944675H1
gtgccttatcgctgtggttatcatcttcttcttcctctttcttagatctcttctttctctacgccgcacgccgaaaccatggccggaaaaggagagggtcctgctatcggaatcgatctcggaaccacctactcttgcgtcggtgtgtggcaacatgaccgcgttgaaatcatcgccaacgaccaagggaacagaaccacgccgtcttacgtcggattcactgacaccgagcgtctcatcggtgatg

SEQ ID NO: 38263 - DNA, 244 bp, Glycine max
  Clone ID: 700944676H1
gtgaatatgaaagccctagagtgtagagtagataagcgtatccagcaaaacagaaatggaagcaacgaacatagaattacaaattaaacggctccaattcctttctctctgcctctgaacaaatttcatttttcatttctcttacttacactacacagagacagggatacgcaatgataggatcttttattaccagggcacttgtgatggtttttggttatgccttcccagcctatgaatgcta

SEQ ID NO: 38264 - DNA, 246 bp, Glycine max
  Clone ID: 700944677H1
aaaaaatgttcatcgagagtttcaaggttgagagtcctaacgtgaagtacacagagactgagattcagtccgtgtacaactatgaaaccactgaacttgttcacgagaacaataatggcacttatcagtgggttgtcaagcccaaaactgtcaaatatgaatttaaaaccaacacccatgtccctaaactaggggtaatgcttgtggggtgggggggaaacaatggctcaaccctcactggtggtg

SEQ ID NO: 38265 - DNA, 183 bp, Glycine max
  Clone ID: 700944679H1
atggatttgtaagttgagtatgttataagtttctccgttaggtcaccttggaagccagactttttatgcaattggcggatggtattggaactttgtaggttctgcttatatttattatatgcataattggtttttatgtttgcagtacactcagaaatcagaatgtttttattgtttgaggtg

SEQ ID NO: 38266 - DNA, 246 bp, Glycine max
  Clone ID: 700944680H1
tcaagaaccgtctttctaaagcatttggaggccgagcttgttttgactgatgcagcaaagggcatgaatggagcagtacaaaaagctgaagaaattttaaaaagtacccccaattcatacatgcttcaacaatttgataatccttcaaatcctaaggttcattatgagacaactggcccggagatatgggaagatactagaggaaagatagatattttagttgcaggaattggaaccggtggaact

SEQ ID NO: 38267 - DNA, 250 bp, Glycine max
  Clone ID: 700944681H1
cccttttctgaggaggagagaatttcaccaaatcaaggggaaactctctgaagaatatgggtttaatggagtgcaatgtggaggacaataagaatctataccttcatgctcctactttcattgagtggcttaaaccatgttcttctcctaattattcatatctaaacaattccaacacaatattatcatttacttcttctccttcttcttctttttcttttactcataatcagtttgttcaggaaactat

SEQ ID NO: 38268 - DNA, 250 bp, Glycine max
  Clone ID: 700944652H1
ctcacatatacacatatctgaacgcgtatcgtccccgctatcgcttataatcgctcctcaacgagctcaaggacttgcagaaagacccacacaacttcttgcagcgctggtccagtagctgaggacatgttccattggcaagcaacaataatgggtcctgctgatagtccttatgctggaggtgtattcctagtcactattcacttccctccggattatcctttcaagcctcctaaggttgcctttagga

SEQ ID NO: 38269 - DNA, 253 bp, Glycine max
  Clone ID: 700944623H1
ggcttctggaagcagcaagtttggtctagaaagatcccaaggagtcggtccgaacgaggatccacccccttccttgacgaacacagagacgtgtgttttggattctatttgtgccgtggtttgagatttagatgcaaataaatatataccctgtcttgtgccgtgtcccctttaagccaattgcaatcaaacaaagtttcggttattggtgttcatttttcttcctccatctttctctaaaacattaattgaa

SEQ ID NO: 38270 - DNA, 147 bp, Glycine max
  Clone ID: 700944624H1
ggaaaagagattagacagaggattttcccctatccgagttcatgagctccttgactcggtcaggcaactcggtggaactcagtaacccattatcgagttccaccgagttgggtgaccgagtcaaggagctcatgaactcgggtaggg

SEQ ID NO: 38271 - DNA, 251 bp, Glycine max
  Clone ID: 700944625H1
cacactctctgcttcgcgtgtaccaacaagtgcaagttcgaatcaatggccagcgctcagctcacagcaatagcgtcatcgatctctacggcgtcgtttgaagggcttcgaccttccgctgttcagtttgcttccacgggcagaattagaattggcaatctctcccaaaggtccttccggggcttggttgtcaaagccgccaccgttgttgcccccaaatacactgcgataaagcctctgggagatagagt

SEQ ID NO: 38272 - DNA, 254 bp, Glycine max
  Clone ID: 700944626H1
tgcagacaataagttcgaacaagttcaggagcggcatggatttcttccaccgcgcgaaggcggtgcgcctccgcagccaccacgacaagtacctcctcgcggaggaggacgaggagtcggtgacgcaggaccgcaacggctcctccaaaagcgcacggtggacggtagaatacgtggccgaatacgacaacataattcgcctgaagagctgttacggcaagtacctcaccgcttccaaccacctcttcctcttg

SEQ ID NO: 38273 - DNA, 249 bp, Glycine max
  Clone ID: 700944627H1
ctacagttgtcgttggatccctagcctttgcggtcttctgggtactagcggatctcccagctgtgcctagtctactcattgggagaactgtagggtccctgctaggtgcgatgcgtatggtaatgttcaaagttcttagtccagaccgagcttatgctgcaattgatcttccagttacttagtctactatatgggactatggctgtcgctactttgcttgacatatcgaacgtgttcaagtacttgggg

SEQ ID NO: 38274 - DNA, 252 bp, Glycine max
  Clone ID: 700944628H1
gcttatctgaaaaaaagggatggtctcattagaaacaagaccattgagattgatcttggttcaagctttcccagattgtttggtccagaagtagcaaaccgggtactggaagctatcaaggagtactttactgtctgaaatgcaaatttatttggaattgttggatattctatgtattacatacatgtacctaatttgctgtgtaatctaatgaggcctcagtattttctgaaaaaaaaaaaaaaagggggg

SEQ ID NO: 38275 - DNA, 250 bp, Glycine max
  Clone ID: 700944629H1
ccacatttcatttacacaaatcatcaatggcctctcttgtatcctcaagtgttcttttacacctctttctcataatttccgcgctccatttgggcgcacagcaagaattctgagtgaaaaggaccaacaacaacaattgcagttccaataccacaaaggccctcttctcagtggcaaaatctccgtcaatctcatctggtacggtaacttcaagccttcccagcgagccatcatctccgatttcatcacc

SEQ ID NO: 38276 - DNA, 254 bp, Glycine max
  Clone ID: 700944631H1
gtcaaactcaaacttcccaaaagatggatgatagatctgtccacatcattaaagaagagaacactaacacatgtgaggaggcaccaaagcagtctagtggtaaaccagaagatgcttcttcttatatgaagaatgcatctcaagtagatattccctttcctggaccattgcaagtttcaaaatcaagtggcttcgcatgggcaaaaaggcgtagagatgacacttcagttagatcccacagtcggtctatttct

SEQ ID NO: 38277 - DNA, 256 bp, Glycine max
  Clone ID: 700944632H1
gctagaagggaacaaacccgcaaagagaaaacccgtgttcaccaaagtggatcagctcaaacctggtaccaacggtcacacgttggtggctaaggtcttgtcctccgacaccgtcgtacacaaaccgcgatcctcttccgcccacaacctcaaacccactgtcatcgccgagtgcctcatcggcgacgacaccggcaccatcgtcttcaccgctcgcaacgaacaagttgatatgatgaaggctggagctacagta

SEQ ID NO: 38278 - DNA, 134 bp, Glycine max
  Clone ID: 700944634H1
aaaactcatacctcttctccaacatgaaagacaccattgttctataccctaatcttggtaggggacacctagtttccatggtggagttgggaaaactcatactgacccaccacccttcactttccatcactatt

SEQ ID NO: 38279 - DNA, 255 bp, Glycine max
  Clone ID: 700944637H1
aaaaaaaaaaaactgtgaacggaaattagggctcgtaagtttcgatttcggttgcagattggggtggtagcgttgcaattgcaacaattcttgaagaggaaaaaaaaaagattcggaatactttagtcatttgcatcctccaattttgatggaatatatgaaatctaggattccgttctttaaattcttcgaagttcatctggggtttgcttttgcaatttggtatcaatcagatcgattaacctgcatctatgg

SEQ ID NO: 38280 - DNA, 253 bp, Glycine max
  Clone ID: 700944638H1
aattagaaatatagtgcgcaattatcaacagacgggatttttgtgggaacagtacgaacagacgaagggtaagggaaaaggggctcatccatttactggttggacatcgcttgtagtattaatcatggcagaagcatatggaaatatttaggataaacacagcttggtggaggctattgtaacaaacattccttgcttccttctcattttccgtccatgaataccaaggcagtaagtgtgcatgtaacgttgt

SEQ ID NO: 38281 - DNA, 253 bp, Glycine max
  Clone ID: 700944639H1
gcattattcaatggccaccacagcagctctatccggaaccatggtgagcacctccttcatgaggaagcaacctatgacgaccaagagcctaaagacattccccaacgctctttttggtctgaaaggtggacgaggtggtcgtgtaacttgcatggcctcgtacaaggtgaagctcataaccccagaaggagaagtggagtttgaatgcccagatgatgttttcattgttgacaaggctgaggaagaaggcatt

SEQ ID NO: 38282 - DNA, 251 bp, Glycine max
  Clone ID: 700944640H1
agaggatattgcatcagatgaccaattggagggccattatcgtagatatcaaagaaagaatcctaaaggcagacaggccacatgtgtagcaggggaagatcaaatgtctgatgaccaattggagaatcattgtcagaagcagcaaacaagtttctataggaaaaggcaaaacaaaggcattgaaagagaggttaaaaatgaaatggctgatgaccacttggaggaccattttctgaagcagcagcaaagat

SEQ ID NO: 38283 - DNA, 253 bp, Glycine max
  Clone ID: 700944641H1
acaatatcaagacaacttcatctaattaaccatgaatcaccaacaacaatctcctgtgactgcatatccagcagtgagtcagagcaacccagcagctccaccaccacctgtgggttatcccacaaaggatgatgttccttcccaacaaaatgttccaatcaaaacctctactaggggtgatggcttttggaagggatgttgtgctggattgtgctgttgctgtgccctggattgttgtctctgattgaagtta

SEQ ID NO: 38284 - DNA, 250 bp, Glycine max
  Clone ID: 700944642H1
gtctaaactgaaaaatatgccaaagttttattttgaatcaccaatggtcatgccaagtagagcaatgctaattcatttcacagtcttctaattatgcatttatttcaatcttgatccttccaggcatgggtcacacttggcagagcacaacttaattttggtgagcctgataatgctattgaaagctttgaccgtgctctagctctcaagcctgattatgaggaagctcaagatgataggaaaactgcat

SEQ ID NO: 38285 - DNA, 248 bp, Glycine max
  Clone ID: 700944643H1
ggaaggttctacttttctggagtttctttggcatggcaatagcaatgatccttcaagccacaggagcaacttcacttgtatcaaacatgggagctcagtacttttctgttggtggcatgttcctgtttgtcttaacatttgctctcggagctggcccagttccaggtctccttctaccagaaatctttcctagtcgaataagagccaaagccatggcagtctgtatgtcagtgcattgggtgataaat

SEQ ID NO: 38286 - DNA, 251 bp, Glycine max
  Clone ID: 700944644H1
aaaaacactaccaggaaaaagtccactttagctttcacaggcacaaactcgaagggtttaattgtgttgtccttctcagaaatcaagagcctcacaggggatttcaagaatcaaattgggccaaaggtgttcaagggtttgctacccaacaatcatctgattgcagttaaagacctgaatgcgtccatagaggaaaggaagtccgaagtgctgttatgaagatgggttgcatccaccacaagaaccttgtg

SEQ ID NO: 38287 - DNA, 250 bp, Glycine max
  Clone ID: 700944645H1
gttaaacagtagttcttattcatttttgaaatccgatgcaagcaaaacgattcatgccgctgaaagactgggtaggggtattgagactgatggaattaccacccctgtgctgaacacttctgcctacttttttaagaaaaccgctgatctcattgatttcaaggagaatcgtcaagtgagttatgaatacgggcgctatggaaacccaacgactgtggttctggaggagaagataagtatattggagggg

SEQ ID NO: 38288 - DNA, 253 bp, Glycine max
  Clone ID: 700944646H1
taaaaatctcacccttttctgcaactttctctctgacacacaccgaacactcaaacacacacagtgtgcagcagcagcagcaacaacaagagaagaagatggctctgcaactatgggagacattgaaggaggccatagttgcctacacggggctctccccgcccaccttcttcacccttctggccctgatcctagccctatactacgtcgtttctgggctcttcccctcttccgaccaccgccacaacaccgc

SEQ ID NO: 38289 - DNA, 251 bp, Glycine max
  Clone ID: 700944647H1
cgcagtaccgagaatatttggcgaatcttttggagtatctgttatactttttccagcggacagaacccctgcaagatcttgatcgaattttgtcaaaggtaaccactggatttggaggaagtttgggtgtttggaaaggtacagcgatgggaaattgccatctcggaaattggccttgacatcgctgagcatgctcccattgatcttgattattatagtacaattgaagaattgatggaagtcggccctga

SEQ ID NO: 38290 - DNA, 250 bp, Glycine max
  Clone ID: 700944648H1
caaatctttgtcaagactttgaccgggaagaccatcacccttgaggtggaatcctcggacaccattgataatgttaaggccaagatccaggacaaagagggcatccccccagatcagcagaggctgatttttgccggtaaacaacttgaggatggaagaacccttgctgattacaacattcagaaggaatccacccttcacttggtgcttcgtttgagaggtggtatgcagattttcgttaaaactttga

SEQ ID NO: 38291 - DNA, 257 bp, Glycine max
  Clone ID: 700944649H1
ccttcacaagattctcacaaacaactcttgagaaagaaagaatggctgccaacacattgatgagttctgccatctcagccttcccatctctcctttcctcctcaaaatccagatttgccgcagcagttcctctttccagctttgttgtcaccaatgcctcttcttctcgcttttccatgagtgctgactggattcctggccagcctagacccccctaccttgatggttcagcacctggtgactttggattcgaccct

SEQ ID NO: 38292 - DNA, 254 bp, Glycine max
  Clone ID: 700944650H1
aaacaagtaaatcatgttgttgatgattcgcttgatgcaacagactttcattacatcccgccattgaatatagtcatgcttattgttggtacacgaggagatgtgcaaccctttattgcaataggcaaacgcatgcaggactatgggcatcgtgttagattagcaacccattcaaattttaaggagtttgttttgacagctgggttggagttttatccattaggcggtgatccaaaagtcttgctggttatatg

SEQ ID NO: 38293 - DNA, 253 bp, Glycine max
  Clone ID: 700944651H1
agaagattgaagatctcgcgcttaagtttcagctctcagatgacgccaccaccaatgcgaacgatttggaatcggaggattttcaggagatttcgtcgacggtgaatttcgcggaagagttcgagccgccggaggagattattccggcgaacatcgaacggaaagcgaacagcgtggagcttccgttttcgctgaggataatcaagaagaagctgcagtggaaggaagggttcagggaggcaggggactccgt

SEQ ID NO: 38294 - DNA, 256 bp, Glycine max
  Clone ID: 700944622H1
gagtactctgaagtaactttgcaatttgctctagttctttgcttttgaggggatatttggattgtttatgattgaatttttcttcttaggagtttccttaagtaccacaagcagacaaaggacgtcgttactgtagaaaagtgaagtagaaattaatgcagaggaaaaaaaagaaagagccttactgtgcatagcttctgtgtgtctttggggctgtggctaagtagtaatttttactttcatgggtgaatttctt

SEQ ID NO: 38295 - DNA, 253 bp, Glycine max
  Clone ID: 700944590H1
tttcattttccctcactttctcgctccccaaacgcccctctctctcctccaatggccgaccagctcaccgacgaccagatcgccgagttcaaggaggccttcagcctcttcgacaaggacggcgatggttgcattactaccaaggaacttgggactgttatgaggtcacttggtcaaaacccaactgaggcagaactgcaggatatgataaacgaggttgatgctgatggcaacggaaccatcgatttcccag

SEQ ID NO: 38296 - DNA, 251 bp, Glycine max
  Clone ID: 700944591H1
gctgactggcggaacatcaaacagcaacataatcctcaactgggaaaatttctctgcacgacatgtctgatgaacgagcagtgcatcctgattgccggaatgctagtaacccttatcatgaatgtagtgattactgttttagagtaatagctgaagccaaaattaggtcacaacaacaggaatcagaagttggacaagctagtggtggaaacaactctaagcgagcgatcccagatgattcctatgtggaa

SEQ ID NO: 38297 - DNA, 254 bp, Glycine max
  Clone ID: 700944592H1
attctatttccatcattaactttcaattcggctaatggacacatcattggtgtttaccgtgaggaggcgtgaaccagagctgatagctccggcgaaacccacccctcgcgaagtgaagctactatccgacatagatgaccaagatgggttacggttccaaattccggtgatacagatctatcgccacgacccatccatggcagggaaagaccctgttgaggttatcagaaaggctttggccagaacgcttgtgt

SEQ ID NO: 38298 - DNA, 250 bp, Glycine max
  Clone ID: 700944593H1
tctagttacatggaggagaaagacaactttgctatatactatgtggtgataccatgtgctgtgttagccttgtttattcatccatcaacttcacatcatttattgaacaggatttcctgggcattctgtgtatatctcgaagctgtgtcagtactgccccaactgcgagtcatgcagaacacccaaattgttgagccattcacagctcattatgtatttgccctgggtgtggcaagattcttgagctgtg

SEQ ID NO: 38299 - DNA, 223 bp, Glycine max
  Clone ID: 700944594H1
ttggagggaaaaagttaaaacttgctatttgggacacagctgggcaggaaaggtttagaacacttactagttcatattacagaggagcacaaggaataattatggtatatgatgtaacaaggcgggaaacctttacaaatctatctgatatatgggctaaagaaattgacttatactcaacaaatcaagattgcatcaagatgcttgttggaaacaagttgat

SEQ ID NO: 38300 - DNA, 212 bp, Glycine max
  Clone ID: 700944595H1
ctctctcactcacaaacacacactgaactaaaaaacatcaaaagagacatggctgagcaaaccttcatcatgatcaagcctgatggcgtccaaagaggccttattggcgagatcattagcagatttgagaagaaaggtttctacttgaaaggtttgaaacttgttactgtggaccgtccttttgctgagaagcactatgctgattggtctgc

SEQ ID NO: 38301 - DNA, 251 bp, Glycine max
  Clone ID: 700944596H1
gtgcgagagcttatataccgagagattctggagtaccatccgaagatgttaaaagaacatctagagggagccgagccaacaggattcatgtatccaagtgcggtggatcacttcaagaagcaatttgcatatcttgaggagcattatggaaaaggtggaactgttactccacccgagaggcaacatgcatcattacccaggtcatgtgtgttgtattcagataactcaggaccaaatatggctgaggttgc

SEQ ID NO: 38302 - DNA, 265 bp, Glycine max
  Clone ID: 700944601H1
gttggtacgtattatatataatcctccttgcattgcattttattgtcattggctcagggtctcttccattcacaaccttaaacctttctttcttgtaaactttattgattgattctgagaatagaactaagagggtatagacatggctagcgcaattgcagcttcttttttggttctgcttctggctttccccactgtatttggagctgaccatgaagttggtgacactagtggatgggccctcggagttaattacaacacctgg

SEQ ID NO: 38303 - DNA, 265 bp, Glycine max
  Clone ID: 700944602H1
gaagatagaatgtgcacagccctaaagacgaattaccagcttagcgaggagatcggtcgcggtcgtttcggcaccatcttccgctgcttccacccactctccaacgcaccctacgcctgcaaactcatcgacaaatccctcctccatgactccaccgaccgcgactgcctccagaacgaacccaaattcatgaccctcctttcacctcacccaaacatccttcaaatcttccatgttttcgaggacgaccaatatctctccatag

SEQ ID NO: 38304 - DNA, 260 bp, Glycine max
  Clone ID: 700944603H1
ctgccgcttacaaggaaatgaccaaccttattgagaaggcaagaaacaatgcatcagcatatgagaagaggtctgagtatggtgatcgtgaaatcacaaaggcagatctggagatggtgactagattagatccacttcgggtgtatccttacagatatcgagcagcagttctgatggacagccataaggaagaggaagccattgcggaactctctagagcaattgcattcaaagctgatttgcacctcttgcatctacgt

SEQ ID NO: 38305 - DNA, 258 bp, Glycine max
  Clone ID: 700944605H1
taacgaacgaaagacctcgacaattcttctgatccgtttcgttcagatcaaaacttgcctctttgcaacgctgcttctgacaaaaaacgttgtaccatccgaaatgtcggacacagtggaacatacagatcaaagagctgaagctattccccaatccacagctacaccaaattggactattcatgtgtcagacataagaacagttaaggttagcaacatatcattggttacttccaagaaggacattgaagaattctt

SEQ ID NO: 38306 - DNA, 261 bp, Glycine max
  Clone ID: 700944606H1
caacgatggcgactcagatcctctctcgcatcttccccaaaaccctaaccccagcccccttcctcttccgctccctcaccaccgctccctctcgtccttccctccccgcgctctccttcctccgccgtatctccgttgcagccaacccctccctccgccgcgtcctcctcccaaacgccccctccctccgcgccctctccacacgcgccaccacctcctccctcaacgaccccaaccctaactggtccaaccgtcccccga

SEQ ID NO: 38307 - DNA, 257 bp, Glycine max
  Clone ID: 700944607H1
ctcgagccgattcggctcgagccgtaagctcccaagcagtgggacgaggctcgggactcagaccgcgtgcctgttgaaacatgagccggcgactcataggcagtggcttggttaagggaaaccaccggagccgtagcgaaagcgagtcttcacagggcaattgtcactgcttatggacccgaacctgggtgatctatccatgaccaggatgaagcttgggtgaaactaagtggaggtccgaaccgactgatgttgaa

SEQ ID NO: 38308 - DNA, 259 bp, Glycine max
  Clone ID: 700944608H1
tgtttttccgttcgtcgttatcgcggacacattttcacccgttcttaaatcctcttccatttatgtgtacgtattccaccactgcgccacaacacgcgtgagattttcactcgccgcttccctctctagcctcttcgaaacatcaacacctcctcttcttctgattctgattctgattccgattccgtttcattccaaacaatggagagaccactcctcaagaatttcgagctcgagcacaaaaatccctccgtcgaag

SEQ ID NO: 38309 - DNA, 256 bp, Glycine max
  Clone ID: 700944609H1
gcaagaagcttgtctctgccaccaaggaagggctcaagcttgacgagagtgaagatgagaagaagaagcaagaagagttgaaggagaagtttgacaacctctgcaaggtgatcaaggatgttttgggtgacaaggttgagaaggttgtggtctctgaccgcgttgtagattcaccatgctgtcttgtgactggcgaatacggttggaccgcaaacatggaaaggataatgaaggcccaagctctaagggacaacag

SEQ ID NO: 38310 - DNA, 258 bp, Glycine max
  Clone ID: 700944610H1
ggtatgatgaaattgtgaaggaagtctcttcctacttgaagaaagtaggatacaaccctgacaagattccttttgttcctatctctggttttgagggagacaacatgattgagaggtccacaaaccttgactggtacaagggtccaactctgcttgatgcacttgaccagattagtgagcccaagaggccctctgacaagcccctcaggcttccccttcaggatgtgtacaagattggaggtattggaactgtgccag

SEQ ID NO: 38311 - DNA, 254 bp, Glycine max
  unsure (1)..(254): unsure at all n locations
  Clone ID: 700944611H1
cctcagtcactctccctcacctataccttcacccacactggaccaccacaaacttctcctcctcagcatcatatcttctgagttctgagtgttccattccaattccaagttacaacttggctgtgtctatggatcgcgctcagcttctgttgctgggtgtacccctcttcctcttctgctctgacctcttctcccttttcactcatcatccttcgccgncaccccaccaccaccaccaccaccaccatcctcac

SEQ ID NO: 38312 - DNA, 254 bp, Glycine max
  Clone ID: 700944612H1
ctaatcttgataacccaccctacaaaattaacaatggtgaagttcaacaatccattaattacagaacagtcccagcaacatctttacactttggtaatatcactgagtataatgcccacaatttgtatggactactagaatccaaagtcactaacaaggcattggtggatataactggtaaaaggccattcatcctaagtagatcaacttttgtaagttctggtaagtatgcgtctcactggacaggagataat

SEQ ID NO: 38313 - DNA, 257 bp, Glycine max
  Clone ID: 700944614H1
gagcgagcgagcgagcagtttcaaagagaggatttgggattgggaaggcgagggattgcgctgcgtctcttcctcttctctttcgattcatccctcattcataatcttccaatccaacaacctcagcctcacactcacacatacacacatctgaacgcgtatcgtccctcccatggcttcaaagcgcatcctctaggagctcaaggacttgcagaaagacccaccaacttcttgcagcgctggtccagtagctgagg

SEQ ID NO: 38314 - DNA, 259 bp, Glycine max
  Clone ID: 700944615H1
atttacgatttaacaattgtaagtgtaacttaacattttttgtatgggtaaataacctcatacatttacttcttgtatatcagactccaaggttgatgggtgtagttaagcagtaccaatatctgctaaaagcatcttcaacgtctcataagtcataaaacaagtacctacaccgggcaccaccttgtagtctgatatacaagaagtaaatgtatgaggttatttacccatacaaaaaatgttaagttacatttacgat

SEQ ID NO: 38315 - DNA, 216 bp, Glycine max
  Clone ID: 700944616H1
attgtattgtagtagtagccatggggactttcaatcactatgtgattgttaagttcaaagatggtgtggcagttgatgatctcattcaagggttggagaagatggtctttgggattgaccatgtcaagtcctttgaatggggaaaggacattgaaagtcatgatatgctaagacaaggtttcactcatgctttcttgatgacattcagtgggaaag

SEQ ID NO: 38316 - DNA, 264 bp, Glycine max
  Clone ID: 700944617H1
cttgaggcatttctggcacagttttttccacttttattttaactttaagactgcacagagagaagcatataattcctgagtcaatatagaatttgtgaagtcagtccaaacttcagtttcaaagatgcctcgtggaacgcttgaagttgttctgatcagcgccaaaggaatcgatgacaatgattttctctccagcattgatccttatgtgattctcacatacagggcacaggagaaaaagagcactgtgcaagaagatgctgg

SEQ ID NO: 38317 - DNA, 261 bp, Glycine max
  Clone ID: 700944618H1
ctcgagccgatctcaattctcccctcacagttgcaggttggagtgtcaaagcaattgtcagcaggatattgtttgagtgtttagagaatgaaaatgtctcaattgtaactgaaaaagaggttcagacactatccagtactgatgcatctgaactattggaagctgtggttaaaattgtgaatgaatgtctagctgaagtgcctcgatttggatttgaagaaccaaaatcagctcttggaacttcagaggttctcgaaatca

SEQ ID NO: 38318 - DNA, 256 bp, Glycine max
  Clone ID: 700944620H1
ctcgagccgattcggctcgaggatgaatttgaggacaaaatgaaggaattggaaagcatacgcaatcctatcattgccaagatgtaccaaggtggtgctggtcctgacatgggtggtgctggtgctggggcagccgaggatgattatgctgctccttctggtggaagtggtgctggccccaagattgaggaagtggactaaatgtgtagttgctttcatccatttatctgtttaaaacttatttgatgctttttta

SEQ ID NO: 38319 - DNA, 200 bp, Glycine max
  Clone ID: 700944589H1
gctaatttggaaggcctcaacgtacggggttatcagtttgctgacaagatcaaggagagattgaagttaattgttgcagggggtgatggaacagcaggttggcttcttggagttgtttgtgatctcaaattatctcatcctccaccaatagccacggtccctttgggcacagggaataatctacctttggcattgggttg

SEQ ID NO: 38320 - DNA, 257 bp, Glycine max
  Clone ID: 700944560H1
ggtagatctaagagattatacaatgtaccaggaactgtcttctgcccttgagaaaatgttcagctgtttcactctaggtcaatgtggttcccatggagctccaggaagagaaatgttgagtgagagcaagctgaaggacctcctgcatggttcagaatatgtactcacttatgaagataaagatggtgactggatgcttgtcggagatgtaccatgggatatgttcattgacacatgcaaaagactgaaaatcatga

SEQ ID NO: 38321 - DNA, 260 bp, Glycine max
  Clone ID: 700944561H1
gttgtactcacatcatatctgtgatagaatcattctgctgaaacgtaagggccactgagggggtgcaaatttcactgagacacaggttgaccagctggcattctgaaattcaagggaacactgttgaagaataagttatgttgaacttgttgcataatttatcttttgcacttgagttgtcaatttgtagatatgtgttcttatgttatcttgagaatatttggttttttccttccatgtttctctctgactttggcatg

SEQ ID NO: 38322 - DNA, 159 bp, Glycine max
  Clone ID: 700944562H1
cagcgttggatctgttctcgtctccgctctcatgcttggcgtcgccgtcgtctgcctccacggcgcgttccgcgtgccggaggatctgtttcttgacgaccaggacaactctcaggccaccggattcctctccttcctccgcggccctgccgcgtcggc

SEQ ID NO: 38323 - DNA, 260 bp, Glycine max
  Clone ID: 700944563H1
aaacaggagattgagcttcaaaaatacagactcttcaatacagaaaatttggaggctggttttgagtcatcactaacgagaaaacacatcaatgaaggaggggaagcacacaagatgatagaggttgagggaagcattgatggtgtggataaggaattgtttgaccaaaatggtgagatcgagacgcttgcgagggagctaagaattaccaaagaaaatctcaaagcttcggaaatgcaaattacttcactgaaatttgg

SEQ ID NO: 38324 - DNA, 252 bp, Glycine max
  Clone ID: 700944564H1
gaagattctggtgaatgcgtagaaaaggaaaataaagaaattagcgtgaaaaatgttgggtgtgttcagcagctccatagtgtcgccgccggaggagctcgttgccgccggcagccgtacaccgtcgccgaagatgacggcggcggcgctgcggaagtggttcgaggagaagaacccctccgcagtgtcggtggaggtcggagagcatgtccagctcgcttatacgcaccagaacgagtcgccgtttcagcc

SEQ ID NO: 38325 - DNA, 200 bp, Glycine max
  Clone ID: 700944565H1
ctttcttgtttgcttcccaagtctctcgaagcatctttctttctcttcctgcagaagctatccgtgttacttgttcccaagtctccaacaagcaaagtacatggttgatttggaaatccaggtccccagcgcattcgacccgtttgccgaggcgagagaatcagatgcccccggggcaaaggagtatgtgcacatacgaa

SEQ ID NO: 38326 - DNA, 250 bp, Glycine max
  Clone ID: 700944566H1
cactcgcaagcaaaaagaaagaatcccaggcgaggagaaagatggaggggaaggagcaggatgtcgttgggagcgaacaagttccccgagagacagccgattgggacggcggcgcagagccaagacgacggcaaggactaccaggagccggcgccggcgccgctggttgacccgacggagtttacgtcatggtcgttttacagagcggggatagcagagtttgtggccacttttctgtttctctacatca

SEQ ID NO: 38327 - DNA, 230 bp, Glycine max
  Clone ID: 700944567H1
aaatgtgttattgagaggatattgtttttaaacatatctgataaagtaagggtgttaaagcaatggcagagacgatatattggtgctgtgttgttgtgtttgtggaactagtgctagtgttgagcggctgcgagtcaagcacaaacgagttcagtgttccaatgttgatgcagatgaatatcaacaaagcgtgtgatgagatatacgtggttcgtgacggagagactctg

SEQ ID NO: 38328 - DNA, 228 bp, Glycine max
  unsure (1)..(228): unsure at all n locations
  Clone ID: 700944568H1
tcttcttcctcctctaaccttacatttggcctttctttcttttctatgttctctctatctctcattctcatctcactttcttttcttattcttttcttttcccgaatctgaatttttccctacaaaatccatcagcntgtctcacggacagatccgaaagtggatgccaaatctatcacccctcgtcgcccgagattatcgtacccattagattcttcttccctcttc

SEQ ID NO: 38329 - DNA, 104 bp, Glycine max
  Clone ID: 700944569H1
cgcaataactgaagatatacatgatgtttataatctggggaaagaggcagctgctatccacctttctcttatggaaggcctttcgaaggcaaatgcaatccttt

SEQ ID NO: 38330 - DNA, 230 bp, Glycine max
  Clone ID: 700944570H1
ctaaaatataaatttatattttaaaatgaactttacgagatatattaaaggatgcaacatttgagagtgcaggattcaatagtcctcacttattcaggagaacacttcgatatatcgatatatggggaataataattgtacatacaaagaggtaatggtgcatctgtatgtatgtatgtatgataatgggtttcgatatgaatgattcgcaggcaacataaaaggggccc

SEQ ID NO: 38331 - DNA, 206 bp, Glycine max
  Clone ID: 700944572H1
gaagaacctctggtgcccgaagatatgtggtactgtcctaaatgcaaagagagacgacaagcaagcaagaagcttgatttgtggagactcccagaggttttggtcattcatttgaagaggttctcatacagcaggtcgatggagcataaactggagacttttgttaactttcccattcatgattttgatttaaactaattacatag

SEQ ID NO: 38332 - DNA, 259 bp, Glycine max
  Clone ID: 700944573H1
gcagtcctttcattaagtcattcattcaaggttttctaccgggtattgcattgaagctttttctcatctttttgccaacaatattgatgatcatgtcaaaatttgaaggcttcggatctatttcatctctggagagaagagcagcatctagatactatcttttcaattttgtgaatatatttcttgggaacatacttaccgggacagcatttgaacagctggactctttcattcaccaagcagccaatgagtaagtcat

SEQ ID NO: 38333 - DNA, 238 bp, Glycine max
  Clone ID: 700944574H1
taatggtgtcattgttttaatcgataatgtgaaagatggatttataaatgttaaaagtacgtatataaacttgtgggccatggtggcatggaattttaatttatctcggttgtattcacctaattcgaagcaagtttgtccctgattgagctggttacgaggcagaggaggggcatgcatatgcttttcgtgtaatattaaatgtacgtgtatatcaatgatatttttttttccttgt

SEQ ID NO: 38334 - DNA, 256 bp, Glycine max
  Clone ID: 700944575H1
ctttcttctgcatcactttccattctcttcaacctaacgcagcatcgctatactcttcattccatggctttgcccaatcagcaaaccgtggattaccctagtttcaaactcgttatcgtcggtgatggtggcacaggaaagacaacctttgtgaaaaggcatctcaccggagaattcgagaagaaatatgagccaaccatcggtgtggaggttcacccattggattttttcacaaactgtggaaagattcgattct

SEQ ID NO: 38335 - DNA, 250 bp, Glycine max
  Clone ID: 700944576H1
cctggccctgtgttaattgatatacctaaagatattcagcaacagcttgcgattgctaattgggatcaaccaattaggttacctggttacacgtctaggttgcctaagtctcctaatgagaaacatttggagcttattgtgaggttggttatggaatctaagaaaccggttttgtatgttggtggtggttgtttgaattctagtgaggaattgcggcgttttgtcgagctcaccggtgttcctgttgcta

SEQ ID NO: 38336 - DNA, 245 bp, Glycine max
  Clone ID: 700944577H1
ttgatacctatggtggctggggtgctcatggtggaggtgccttttcagggaaggaccctaccaaggttgacagaagtggtgcctatattgtaaggcaggctgcaaagagtgtcgtggcaaatggccttgctagaaggtgcattgtgcaagtttcctatgccattggtgtccctgagcccttgtcagtgtttgtggacacttatggaactgggaagattcctgacaaggagattctgcaaattgtg

SEQ ID NO: 38337 - DNA, 258 bp, Glycine max
  Clone ID: 700944578H1
tgagttgctgcacagaatggggaaaacggcttacaagaggctgaagggaagccagagcttcaggcaacgccttcttctctctactctctcctccactcccattctcatcgaggacattcgcgccgacgagacatggcccggcctccgcaaccacgaaatttctctcctccgactcttcgaaaccgtctgcgacgattgccacgtcgaaatcaacgaaaccggtaccacattaaagtacaaaccgggaactattatggg

SEQ ID NO: 38338 - DNA, 90 bp, Glycine max
  Clone ID: 700944579H1
caagaatggtatggaataactagaattatgcatgagatgactttgttctcagatccataattaataatattcagaatttctgtttgatct

SEQ ID NO: 38339 - DNA, 199 bp, Glycine max
  Clone ID: 700944580H1
gatggcaggaaagaaaatcccagatgtgttgctgaattcaggacacaaaatgccagttataggcatgggaacttcagtggagaatcgtccatcaaatgagacccttgcttctatctatgttgaagccattgaggtgggttaccgtcattttgacactgctgcagtgtatggaacagaggaacccataggcctaccgtgg

SEQ ID NO: 38340 - DNA, 252 bp, Glycine max
  Clone ID: 700944581H1
ctcttcgagggtttggtgttctcttcctcccttggagaaaaagaagagccagcgctgcgacgccgttcgtgcatttttgaggtgccgctgtcatgtttgggcgtggtggaccaaggaggagtgataactccaaatattatgatattctcgggatttccaaaaatgccagtgaagatgaaatcaagaaggctatagaaaggcggctatgaagaaccatccagataagggaggagatcttgaaaagtttaagga

SEQ ID NO: 38341 - DNA, 255 bp, Glycine max
  Clone ID: 700944582H1
cttttctaaggcccaaatgggagggtggtatgtatgatggtgatgagaataaacggctggatgcacttcggttagccatggagttgggagctgattacattgacattgaacttcaggtagcacatgagttctatgactctatacgtgggaagacattcaataaacccaaggtcattgtttcatctcacaactatcagcttactccttcaattgaggatcttggtaaccttgtagcaagaatacaagcaacgggag

SEQ ID NO: 38342 - DNA, 244 bp, Glycine max
  Clone ID: 700944583H1
cacaaccactcttaatttctctctgccttgctcatttacacacctctccaacctttcactttcagctttatttgaatccctctctctcctttccaaatggccagcgttgaggttgcacatcaaacaccaacaacagttccagaaaatgaaacaaccgaggtaatcaagacccaggaaacaaccccggaaccagtaccagccactgaggctcctgcaccagacaagcagcactgaggttctgctc

SEQ ID NO: 38343 - DNA, 254 bp, Glycine max
  Clone ID: 700944584H1
gggtgattccagtggggtggcagtgaacaaattggaaagtattagccaaggagagaaacagttccgaacagaagttagcacaatagggacagtgcaacatgttaatctcgttaggctccgcggattctgctccgaagtgccaaaaggttactagtttatgattacatgccaaatggctccttggatttccatttgttccataacaagaactctaaggtgttggactggaaaatgagataccaaattgcgttggg

SEQ ID NO: 38344 - DNA, 248 bp, Glycine max
  Clone ID: 700944585H1
gctcttacgtgaaagctgctaagaagttgcatgagattgatcctttacaaaagcctaaacaggaccgttatgctcttaggacttcaccacaatggcttggtcctctaattgaagtgattagattctctaccaagtcaattgagagggagattaactcagtcaatgacaaccctttgattgatgtgtcaaggaacaaggcacttcatggtggtaacttccaaggagctcctattggagtctccatggat

SEQ ID NO: 38345 - DNA, 219 bp, Glycine max
  Clone ID: 700944559H1
aagaaaagaaaatcctcacccattttcttcgtagccaaacactctgaaattctcagttatgtcgtggcaagcgtatgtggatgatcacctactgtgtgaaatcgaaggtaaccacctcactcacgccgctatcatcggccaagacggaagcgtttgggctcagagcaccaacttccctcagttcaaacctgaggaaataactgccatcaataatgactt

SEQ ID NO: 38346 - DNA, 253 bp, Glycine max
  Clone ID: 700944586H1
gctctcccttccatcattgaggcgtttccaatctgaagaagatgccactaccacaactgcatgtggtttttatgttgcatgtgttgttgttattattaacagctatatgatcttcgttttaattttgtggttttccttcctgcccttgttatgtttgtgcattaaataaaagtaagaaatgccccaccactaagtaatgctatatggattatgtatgtgttccatatatgtcaagtgagtggtgtgtggttgt

SEQ ID NO: 38347 - DNA, 253 bp, Glycine max
  Clone ID: 700944588H1
gtgtggaaccaaatcaaagcgccactgattgtcccgttgctgagactagcactgtttctgtgcttgatcatgtcggtgatgatgttcattgagagagtctacatgggcattgtcatcactctggtgaagttgtttgggagaaagccagagaaacgttacaactgggagccaatgaaggacgacattgagttgggatactcttgttacgcggtgtgatcttgttcaagtccccatgtacaacgacagagaggtt

SEQ ID NO: 38348 - DNA, 267 bp, Glycine max
  Clone ID: 700944527H1
gcctacatatacaacactactttcagttttttctgtctctgaatctcaaactcttcggaaagattaacattaatggctccaagggatatcaatagatccaacgttgttgttgttgccggagtatccaacccgacccataaagagatccgttaccgcggcgtgaggaagcggccgtggggccgctacgccgccgagatccgcgacccaggcaagaagacacgcgtgtggctaggaacgtttgacacggcggaggaggcgtcgcgtgcg

SEQ ID NO: 38349 - DNA, 258 bp, Glycine max
  Clone ID: 700944528H1
aaaagacctatatttggtaagccaatcaaattggacattaataaaggaatggagagggcagaacaaattggaggaggcaaagctgtggccacagtcctagccattggcacagcaaatccacccaatttcatccttcaggaggattatcctgacttctactttcgggtcaccaatagcgaccatttgcaccgcttgaagcaaaagttcaagcgcatttgcgagaattcaaagatagaaaagcgacacatagtccacacg

SEQ ID NO: 38350 - DNA, 251 bp, Glycine max
  Clone ID: 700944529H1
ctttgcgaggtgggcccaagcttcggggactttgagtctcacggagacaacctacgacaacgccgacatccaggtagggttctacaacttcactgccttgagaattgaagtggaggtgtatggtggcagccttatatttttgcaaccggattctagtaagaaaggggtggtacttatggacggtaacatgggctggttacttccaagtgaaaacgccacactgtctaaagatgatggagtttggacttgga

SEQ ID NO: 38351 - DNA, 218 bp, Glycine max
  Clone ID: 700944530H1
caaacaaatagctggccaaaagaactggtcacaaagtctcttcagagcgatgcactctatcagtatatacttgaaatcagtgtgtaccaagagagcatgagagcttgaaggagctacgagagttgaccgataaacacccttgggaactgatggctacaccacctgacgaagggcaacttctaggcatgctccctaagcttatcaatgccaagaacaca

SEQ ID NO: 38352 - DNA, 270 bp, Glycine max
  Clone ID: 700944535H1
aagaaattgaaagcgcgcgcgagaatttggagtggaaactgacgatggagaacggattcgctcgcatggacgacgaggttcatcgccggagccagagcaaccagaccttcacctgcaggtgtgagctccagactcctcactgcgacgccgtcggatccaccgccgtcgtcgccgtcgtcacgccggacaaaatcgtcgtctctaactgcggcgactcccgcgccgtcctctgccgcaacggcgtacgcatcgctctctcctccgatcaaa

SEQ ID NO: 38353 - DNA, 264 bp, Glycine max
  Clone ID: 700944536H1
tgagacattgatgtttgattaccataggcagcatggaattgaaatacgcattgcaagaatctttaacacatatggaccacgcatgaatattgatgatgggcgtgttgtcagcaacttcattgctcaagcactgcggggggaaccattgacatcccaatgtccgggaacacaaactcgaagtttctgttatgtctctgacctggttgatggccttatccgtctcatggaaggatcaaacaccggaccaatcaactgtggaaaccc

SEQ ID NO: 38354 - DNA, 260 bp, Glycine max
  unsure (1)..(260): unsure at all n locations
  Clone ID: 700944537H1
ggagngaggagccattaaacaacttgtaggtgttacgaaggacacaagaaaaggtggtcctttagaaggagctcatgttcacattgttcacttgtctgattcaagtgcttccttggatctgattaaggaaacaaaaagtcgtggtgacagcataagtgttgagacttgtccccattacttagctttctcatctgaagagataccaaatggagatactcgttttaagtgttccccgcccattcgtgatgcttataacagag

SEQ ID NO: 38355 - DNA, 239 bp, Glycine max
  Clone ID: 700944538H1
aaattacatagcctcagtaatctgagagagaaacaaaaacaatgaaggtttccattgccaagttccactcccttcccctatgttttttccttctcttggccttcaacacaaaacccctcctagcagcagaaccagagccagtggttgataagcaagggaaccctttggagccaggagtagggtactacgtgtggccactttgggctgatgaaggaggcctcacactaggccaaacaagg

SEQ ID NO: 38356 - DNA, 265 bp, Glycine max
  Clone ID: 700944539H1
atcctggggagtattgtgttgttgctccagacactgaaattttctgtgagggggagcctttgaaaagagaggatgaagaaagactggacgaagttgggtatgatgatgtgggtggtgtcaggaaacaaatggctcagattcgtgagttggttgagcttccattgaggcatccacagctttttaaatcaattggtgtgaagcctcccaagggaattttactttatggacccccaggttctgggaagacattaatagcaagagctgt

SEQ ID NO: 38357 - DNA, 267 bp, Glycine max
  Clone ID: 700944540H1
tagtcgagccgaatcggctcgagggtgggtcaaaccgcaggagataaagttaaggagtatatgatagctgagtcagtacccaacagcaacgattgagtttagaggaactgtgattggtggttctccttctgctcctcaaattgcttccttttctagccgtggaccgaaccatcttacatcgcagattctgaaacctgatgttattgctcctggtgttaacattttagcagggtggactgggcgtgtgggtcccacagattttgacat

SEQ ID NO: 38358 - DNA, 267 bp, Glycine max
  Clone ID: 700944541H1
gatggcgaacgaaacgctgtcgttgcggcactcgcggcgttggtgctactcgcggcgagtgtggcggtggatgctcaggagaactcggacgtgaagacgctggtgaagtacaagcacgggaagaagtactgcgacaaaggatgggaatgtaagggctggtcaatttactgttgtaacctcaccattaccgattatttccagacctaccagttcgagaatctgttctccaagcggaactcgccggtggcgcacgcggtcggattttgg

SEQ ID NO: 38359 - DNA, 261 bp, Glycine max
  Clone ID: 700944542H1
gagacagagcagcactcacattcacaacgaagggtttcctattcatcagacatggtggaaggcaatcaagagtcacgaactcggtggccctcaagttctgaagtgggaagatgtgggaaatgggagatccaaaagaaagcgaggtccggtgtgaggaacagagccattgggggttaatttcattgatgtctactttcgcaaagagtttacaaagccgcttcttttcgcttcactccaggtatggaagctgttgggggtgtg

SEQ ID NO: 38360 - DNA, 263 bp, Glycine max
  Clone ID: 700944543H1
ctcaatgaacaatattgtttcccattacctgtattatcttgaccttcttggtgttggtcgagaacaggctgggccccatgacatccttacatgcgctgagcaggttcctttcaacccatcttccaaacctgcttcatcatcttaagattattatatttattagcatataatattgttgtgccaatccctttgaaagtgtaagttaataagggttcttgaaattattggtatgcaataactttgaactgtgtggcagtgtggga

SEQ ID NO: 38361 - DNA, 266 bp, Glycine max
  Clone ID: 700944547H1
cttcactgttcaggatggaatagatgccattgaagatgttatctaccatattgaaacatatgatgtgactacaattagagcaagcacacctatgtttctcatgtctcggaagattaaatcacttggtgtcaaatgggttatctcaggagaaggatctgatgagatctttggagggtatttgtacttccacaaggcacccaacaaggaggagttccacagagaaacatgccgcaagatcaaagcacttcaccaatatgattgcttgc

SEQ ID NO: 38362 - DNA, 261 bp, Glycine max
  Clone ID: 700944548H1
tgtgaaacagatgatttgttgctgtaacaagatggatgctactacaccaaagtactccaaggccaggtatgatgaaattgtgaaggaagtttcttcctatttgaagaaagtaggatacaaccctgacaagattccttttgttcctatatctggtattgagggagacaacatgattgagaggtccacaaaccttgactggtacaagggtcctactctgctagatgcacttgaccagatctctgagcccaagaggccttctga

SEQ ID NO: 38363 - DNA, 216 bp, Glycine max
  Clone ID: 700944549H1
gctcgaaacaacaacatttgcggttctgcctgcaaattttcttcccctcaatctatattatacaggtggtgttcctgttcccctcaagcacccctgagattcattcccaaaaagcttaaaaaattctattcaattcaaattctaaatttaatttccatttcgttttcgttttctgttttgatttgatcttccaatggcgtccgatggtttcaccga

SEQ ID NO: 38364 - DNA, 262 bp, Glycine max
  Clone ID: 700944550H1
cagtgaaagagaatccgaggcgaagagaagagaaaaattaagatggaggggaaggagcaggatgtgtcgctgggagcgaacaagttcccggagagacagccgattgggacggcggcgcagagccaagacgacggcaaggactaccaggagccggcgccggcgccactggttgacccgacggagtttacgtcatggtccttttacagagcagggatagcagagtttgtggccacttttctgtttctatacatcactgtcttaa

SEQ ID NO: 38365 - DNA, 242 bp, Glycine max
  Clone ID: 700944551H1
ctttgtcgcaaagagaagagatctgcctcctttttatcaaatctatctcttcttcaagttgaaaatggggctgtctttcaccaagttgttcagccgactgtttgccaagaaagagatgcgtatactgatggtgggtctcgatgctgcgggtaagacaaccattctgtacaaagctcaagcttggagagattgtcacaacaattcccaccattgggtttaatgtggaaactgtggatatagga

SEQ ID NO: 38366 - DNA, 261 bp, Glycine max
  Clone ID: 700944552H1
ctgagaatcgcgtgcgccatgaatagaggtgaaagttcaggtggtggacagagctcgttggggtacctatttgggtcagaagagaagccaaatcagcctctgcccacaaggacagctccattaccaccctatggcattgacatcgataactccatgccccatcacggttctaactgccaacttgttgtctcaaacaaccgatctcaaggccaccacttgggaaacattgtaactgatcgtccgtcaacaaaagtcaaatcg

SEQ ID NO: 38367 - DNA, 261 bp, Glycine max
  Clone ID: 700944553H1
gaagaaaatatgagtgatgaggctatatgggaaactctccctcatttttgggttgctatctctatggtgttcttcattgctgctacagtcttcacactcctaaaactttgtggtgatgtaggtgctctgggctggtgggacttgtttattaattttgctattgccgagtgctttgctttccttgtatgtacaaagtggtccaatccagtcattcatagaaattcaagagaagccagtagttcatcttcaactacgattaca

SEQ ID NO: 38368 - DNA, 260 bp, Glycine max
  Clone ID: 700944554H1
gtcgagccgaatcggctcgagggctccggccatgccgcgagcttcgcgatcaactaggaggagggctaaatttcgaagagcagaagacaatcaaaagtgtgcatttgacttattggccaccgtagctggtaaactattgcaagagagagagaatccaaccatgtctagtgatacatcattagaaaaggatcagtgtggatttgtcaaagagtgccaagatgcaaataaaccatccaaatctgagatttctgatgaaggaa

SEQ ID NO: 38369 - DNA, 263 bp, Glycine max
  Clone ID: 700944555H1
tttacattcatctcaagccatttgtctctcacatcaattcatgcttctcctctcttttgaacacacaacaaaaccagggttaccaacagatccaattctaatcctttgaaattcactaaccccctatttctattctctcttagttccagtttttcactttgctagtgtcttctgcatttgcttccacagttgcttcgccaggaagaaataacaaaaggaaacaccttcttgcttttcctacctgattgtaaagaatctctctt

SEQ ID NO: 38370 - DNA, 263 bp, Glycine max
  Clone ID: 700944556H1
cgcgagtgaccggagcggcgaagatagagtcagatcggaagcggaagaaggcgtcgacctcggcggcggagaaggagaaccggaataagcataagaagtcgaagatgtcgtcgtcgtcgtcgaagggtggtggcggtattgaggttagggcttcgcacatattgataaagcacgaaggttctagaaggaaggcctcgtggaaggatcctgaaggtcgcatcatcaagagcacaaccagagaaaacgcggtttctcagctcaag

SEQ ID NO: 38371 - DNA, 257 bp, Glycine max
  Clone ID: 700944557H1
gagagagagagcgagcagtttcagacacagagagaggggtttgggattggagggattgacgctgcgtctcttcctcttctctttcgatccatccctcattcctaatcctccaatccaaccacctcagcctcacactcacatatacacatatctgaacgcgtatcgtccctcctatggcttcaaagcgcatcctcaaggagctcaaggacttgcagaaagaccaccaacttcttgcagcgctggtcaagtagctgagg

SEQ ID NO: 38372 - DNA, 220 bp, Glycine max
  Clone ID: 700944526H1
tgctgcgcaagaacaagcttggcaccgttcccgttcacctcaacgtctatgatctcaccccaattaatgcgtagcctattggtttggccttggactctaccattctggggttcaagttcatgggctggaatatggatttggtgcgaacgagcacgacacaacggggattttccaagttcaaccgaaacactgccctgggttcaccttcagaaagtcaatt

SEQ ID NO: 38373 - DNA, 186 bp, Glycine max
  Clone ID: 700944486H1
gttgaatgagatcaaaacttaactcatatcccataccctcttttctgttatatatttatggcaaatgtgaaatttaaagatcgttggatctctctatctttgttcctgctgactaatttgagagcaggctatctatgctatgcatgcatgtaaaataatataaagttatcgaagtattttgtgctt

SEQ ID NO: 38374 - DNA, 257 bp, Glycine max
  Clone ID: 700944487H1
aaggaaccttcagaactggcatcaaaatatggcatgtcaattgagacatatcaagaaattcttggagagtgcaggcataagttgtttgaagtaaggtcaaggcgtccaaagccacatttggatgataaggttattgtatcatggaatggactggcaatctcatcttttgctagggcttctaagattctcaagggtgaagttgaagggaccaaattctactttcctgtcgttggcactgaagcaaaggggtacttgag

SEQ ID NO: 38375 - DNA, 205 bp, Glycine max
  Clone ID: 700944488H1
aatagatcaatgactagttgtatgtttgtgatacttattagataaagtttttccccctaatgataatatggaaaatggcatttgtgaacatgaacattgtagagggaaatctaagtgaacatggctgttgaatattagcagctgcccttaatgtggagtatcttgagctaggaaaaaaaattggcacaaaatcaatttatgttct

SEQ ID NO: 38376 - DNA, 259 bp, Glycine max
  Clone ID: 700944490H1
gaagcccatacttgtgggagatagatggcacgcttgtcactgctcattttcgcgttctgcgccgtcgccgtcgccgtcgccgtcgcgggctcctccttcgatgatgccaaccctatccgtttagcgtcggacttggagtcgcaggtgctggacgtgatcggacagagccgccacgctctctccttcgcccgcttcgctcgccgccacggcaagcgctaccgttccgtcgacgagatccgcaaccgcttccggatcttct

SEQ ID NO: 38377 - DNA, 119 bp, Glycine max
  Clone ID: 700944493H1
ccagaatttcctcctcccactgcttctttcttccttgcagcgcgattgctgcatcctcctccacataagagctcgctgctagcgatacccctaacatcgagcggcaacgatgatggtgt

SEQ ID NO: 38378 - DNA, 260 bp, Glycine max
  Clone ID: 700944494H1
aaggcgatgaaccaagaagcttgaggaatgggttttagcttccagaatagcagtggctgactgcctgggtcttcgaatgcgcgggaggaccatggtccggccagatccaccatccaacaaacgagaattatcgtgggtcggtgatgttggttttgttgttgatgcttggtggcatgatggatggtgggaaggcattgttgttcaaaaggactccgaagctaattatcatgtttatttcccaggggaaaaagtggtgtcag

SEQ ID NO: 38379 - DNA, 263 bp, Glycine max
  Clone ID: 700944495H1
cggctcgagagcgagtatccatttctaggtgccatcataataactaataacccaacctctcgagagtttgttatattattactgataaattgttggtgggggtggcatagttgcagttggaaatcgaaagaagagaaaagaaattggatagtgattatttgggttcgttatcgttgaaacgtcttctcaaatctggtgtggtgaataacatcacccctcacactcactcaacctaaacaaaatgcagagccagagaaccacgc

SEQ ID NO: 38380 - DNA, 192 bp, Glycine max
  Clone ID: 700944502H1
ctatttgacgacttaaccccaaacgaagaaaaaagactgagagcaattgcatcaacaacaaattgaaaggatgtcgatcttcgagtacaacggaagcgccgtggtggctatggtcggcaagaactgcttcgccattgccagcgaccgagagctcggcgttcagctccaaaccatagcaacggatttccaacg

SEQ ID NO: 38381 - DNA, 59 bp, Glycine max
  Clone ID: 700944504H1
tggaacagatggcgggtagaggtttcagacgtgacttgcttcttacgtgatttggctct

SEQ ID NO: 38382 - DNA, 267 bp, Glycine max
  Clone ID: 700944505H1
gtgattctgtttggagagtacaggaaatcatcaagaagaacatatatactgctagggagtatgtcgtttatgtttatagtggctgatgctgtgctaatggcatcatcagggcaaagaaacagcactgccaaggaataattggacaacacacaagttgtttatagattgcctagtgcaaagggagaaaaattctcattgttcattggtgtgaataagagaagacgaaaaaatctattaagaaaagagtgcagaaaaagaaataaagca

SEQ ID NO: 38383 - DNA, 108 bp, Glycine max
  Clone ID: 700944506H1
gaggaatctaaacgatggcaaatgagcttaagtgttacattgttcaattaattattttattttgcagtgtctagctgcggctctgtatttcaatacttttagtacaac

SEQ ID NO: 38384 - DNA, 273 bp, Glycine max
  Clone ID: 700944508H1
cccaaagagaatcaaatcaaaacagagtggaagaggcatggagtcagtgactacaaggctttccccaaaggtagttggaggggcaaactcccaacatggcatggagtggtgtaggcactttcagatgccactgcactatccaaggtacacccaagctgactatgaggcaatgccagagtggaggcttgactgtttgctcaaagagtatggcctaccaatctttggggatgtcgaaaacaagataaactttgccatgggtgcctttctatggat

SEQ ID NO: 38385 - DNA, 250 bp, Glycine max
  Clone ID: 700944509H1
ctttgtgttagaatcatcatgggtttgcaaaaccaattaaacgacgtgtcgtcgggttcgattccgcttctggtgttggcgcagatagccacctgcgtcaactacctccgctccatgcttttcgcgcttttgcaaaccctaggtctcagccgattccactccgaccagatcgtcgacgagcgcttcctcgcagccgtcggatccggcctcgccggacttatcaggctctcagatcagctcaccctcagca

SEQ ID NO: 38386 - DNA, 271 bp, Glycine max
  Clone ID: 700944511H1
ctgatttacattcttgccattcgtgttgaactgaaaaccaaattgaaagaaagaagcctacggtctgaaaaatccacttgtcctgatgagttatgtaagtccagtaatggcagcagcaactgcccttctttctcttgcattagatccatgggatgaattccgagaaaacaagtactttgataattcattgcatattactcgaagttgcttgctgatgcttcttggtggcacattgccttttttatggtactaacagaatatgttctggtct

SEQ ID NO: 38387 - DNA, 271 bp, Glycine max
  Clone ID: 700944512H1
atttcagctttcgaagcatttctgctttccttggccagtaaatcatacttcattgagccctgatgggaaactagttgtcattgttggagactacccagaagggttactggtggattctcaaacaggaaagactatcacaccttttcgtggacacttggatttctcatttgcatctgcatggcatcctgatggccacatatttgctactgggaaccaagacaaaacatgtcgtgtttgggatgttcggaacttgtcaaaatccgttgctgtt

SEQ ID NO: 38388 - DNA, 273 bp, Glycine max
  Clone ID: 700944513H1
gcaaaaaaccaattcaagatgaagataaagtctcatttttccttctccctaatgtttcttataggcatagccattagccacacacatgtttctttagcagaatgtgacaatgtgaaggactattgccctacaattcctccccaaaagcaaaccatattcctcaatggcttcccctgcgagaacccaaataacacaattgcacatgatttcaagagcatggaactaagcaagccaggttcaagagacaagttaggttcattagttaaaattgtt

SEQ ID NO: 38389 - DNA, 272 bp, Glycine max
  Clone ID: 700944515H1
cttaatttctctctgccttgctcatttacacacctctccaacctttcactttcagctttatttgaatccctctctctcctttccaaatggccagcgttgaggttgcacatcaaacaccatcaacagttccagaaaatgaaacaaccgaggtaatcaagacccaggaaacaaccccggaaccagtaccagctactgaggctcctgcaacagaacaagcagcagctgaggttcctgctgcagaagaacaacaagcaactgatgttcctgcccca

SEQ ID NO: 38390 - DNA, 270 bp, Glycine max
  Clone ID: 700944516H1
ctcgagccggatagatagagtgatacacatcacattttctcaaagtaatttataaataaatggcggcggcggcggcagtgacggtgctactcccacctaggattccgaccgccaccaacgttacccgctgctctgctttgccttctctgcctcctcgcggcaccaacactaaaaccactttgctcttatcttccctcaaccacttctcagtgtcccgaaaatcttctctgcttcagaccagagcttcttcagaggaatcatcctcagtag

SEQ ID NO: 38391 - DNA, 289 bp, Glycine max
  Clone ID: 700944517H1
gcgtattcggctcgagggctgagacctgatggcaagacccaagtcactgttgagtactacaatgacaagggtgccatggttccaatccgcgtccacactgtgctcatctccaaacagcatgattaaattgtcacaaatgatgagattgcagctgatcttaaagaacacgtgattaagcctgtgattcctgagaagtaccttgatgagaagaccattttccatttgaacccttctggcaggtttgtcacttggatgccgaatgtcgatgctggtctcaccggccgcaaga

SEQ ID NO: 38392 - DNA, 274 bp, Glycine max
  Clone ID: 700944518H1
cagagaccgaaatacttcgagatggcccgtacaaagcaaactgctcgtaagtcaactggaggaaaagctcccaggaatcagcttgcaaacaatgctgcacgtaagtctgaaccaacaactggtgctgtgaagaagcctcatcgttatcgacctggaactgtgcccctccgtgagattaggacataccagattagcgctgtgctcctaatcaggaaccttcatatccaaatgttggttcgcgaaattgcccaggatttcaagactgatctgcgtt

SEQ ID NO: 38393 - DNA, 173 bp, Glycine max
  Clone ID: 700944519H1
ccacaacaaggcagcagtgcgaagagaaagatagagaagaagcgcttatcgaactcggacgggagcactgagttagctcagagcgagtgaaagtggttctgcgtgatgtctggtggtatcgcccgtggacgcttcaccgaggagcgcaagtcgtggctgaagaaacatcccca

SEQ ID NO: 38394 - DNA, 124 bp, Glycine max
  Clone ID: 700944520H1
gacaatatctaaggtgttgctctccatttgctccctattgaccgatccgtaccctgatgaccccgttggggctgtaattgctcatatgtacaagccagatcggtctatgtacgcaacgactgct

SEQ ID NO: 38395 - DNA, 245 bp, Glycine max
  Clone ID: 700944521H1
atcacaaccattggtaagggtatgcgttgggaatgccgtaaactcgatactgagaatggcagtggcattcagaagatattagtatgccagaacaagctatggtattcatccaaccgcagggttcaagatgataaactatggaactaaagcagtggtgaaatggtgtatgagaggcaaacgaaagcaaatgcagagtatgttgactcgaattctataatataatgagccatgaatcagccacgttc

SEQ ID NO: 38396 - DNA, 256 bp, Glycine max
  Clone ID: 700944522H1
cgcaacaaaaagaaagaatcccaggcgaggagaaagatggaggggaaggagcaggatgtgtcgttgggagcgaacaagttccccgagagacagccgattgggacggcggcgcagagccaagacgacggcaacgactaccaggagccggcgccggcgccgctggttgacccgacggagtttacgtcatggtcgttttacagagcagggatagcagagtttgtggccacttttctgtttctctacatcaccgtcttaa

SEQ ID NO: 38397 - DNA, 263 bp, Glycine max
  Clone ID: 700944523H1
ttgaacgggaatttttaatttgttatcctattcatcatttgtagcttgttatttcgaaattttgagaacaatggatcacttcgtctgtacgattgattgattagccactagcaactcatcatcctaaccatgcttttgcagttttgcgttcccaattttctttgaatctagtaatttagggattagaatgaagtgaactgaaaacattctgtctgagactgacctttgattttcttgctcctatctttttagtttgtacaaat

SEQ ID NO: 38398 - DNA, 261 bp, Glycine max
  Clone ID: 700944485H1
gctaaatataggcaagctaagttcggataagagccattcaaattttcagtccagtgtattaacaataaggaaaatatgaggagctgcaacattagaaagcacctccacataatgcatgtgagcaattagtgacagcaagctaatttttggataagtccacaaatgatcaagcacacaacaaagcctacaaagagatattctgcttcaaggataggatttatatatatatatatatatatggcattgatcacgtatatatgt

SEQ ID NO: 38399 - DNA, 271 bp, Glycine max
  Clone ID: 700944524H1
taggctcgatcgaaatgaaagcagcggcgaagatagagtcagatcggaagcggaagaaggcgtcgacctcggcggcggagaaggagaaccggaataagcataagaagtcgaagatgtcgtcgtcgtcgtcgaagggtggtggcggtattgaggttagggcttcgcacatattgataaagcacgaaggttctagaaggaaggcctcgtggaaggatcctgaaggtcgcatcatcaagagcacaaccagagaaaacgcggtttctcagctcaa

SEQ ID NO: 38400 - DNA, 271 bp, Glycine max
  Clone ID: 700944449H1
cggatctagagtcttcagtttctcctcgttgttcttcgctttcctgttttcaatttcgattctttcgttaatttaataagatgtttgggagggcaccgaagaagagcgataatacgaggtactacgaaatcctcggcgtctccaagaacgcttcgcaggatgatctgaagaaggcttacaagaaagccgccattaagaatcaccccgacaagggcggtgatcccgagaagtttaaagagctggcgcaagcttatgaggttctgagtgaccc

SEQ ID NO: 38401 - DNA, 268 bp, Glycine max
  Clone ID: 700944450H1
cagaaacaggtcaaataattacaactgccattggcggtcgagatggacaaccaaagcagacaatctcttacatggctgaacgtgtggttggtactggttcttttggtattgtttttcaggctaagtgccttgaaactggggaatctgttgccataaagaaggtgttgcaagacaggagatataagaatagggaactccaggttatgcgcacagttgacaattctaatgttgtcaaactaaagcactacttcttttcaacccccgataa

SEQ ID NO: 38402 - DNA, 262 bp, Glycine max
  Clone ID: 700944454H1
cggctcgagggtatggtgaaaacttgaagaaagtgagtgcgaagttcttgaccatctcacaaaagagaaatatcaggagacaagcttacctcaatgaagtgtctcaaaggaatgattcagttttctttgcaaccataggagcatttgtgattcttccaccttttataatactaggaatagctatattaactggctatgtacagctttttccttgaaatactatagttagcgatacttaagtgatatatcaatgtgatattaa

SEQ ID NO: 38403 - DNA, 264 bp, Glycine max
  Clone ID: 700944456H1
ccaagaactcgatgattacttcaacactcctggggttgcgacccgggtccctcactttggttccaccaactctcttctctatctcaatcctcgtctcaagcatatcaccggatacatggcacccctggtagattcattacaaaagcttggctacgctgatggtgagactctgttgtggagccccttatgactttagatatggtctagctgctgaaggtcacccttcacaagtgggttccacgttcctcaaagatctaaagaatt

SEQ ID NO: 38404 - DNA, 261 bp, Glycine max
  Clone ID: 700944457H1
ggtggtggaaacaatcagaaccaaggtggaggtaacaaaaacaatggtggtaaaaatggaggtggtgcaccggagggtaaacatggtggtggtggtggaggaggaaacaagaatggtaacggtaacaatggagcgggtaacaacaataacaacgggggtaaaaaaggaaatccaatgggtggagttggtgttcaacctatgaacggtggatttcaaaacatgggtggtgatggtggtccccaggttatgatgtctgggcgt

SEQ ID NO: 38405 - DNA, 260 bp, Glycine max
  Clone ID: 700944458H1
attgttttatctcagaatgatccgttcagatgcttgagtgttattgtccctctactggttactgaggatgagaaaactcttatcacttgcataaattgcttgacaaagcttgtggggaggctccctcaggaggaactgatggctcagttaccctctttcctgcctgctttgtttgaagcttttggaaaccagagtgctgatgttcgcaagaccgttgttttctgtctagtggatatttatatcatgcttgggaaagcatt

SEQ ID NO: 38406 - DNA, 261 bp, Glycine max
  Clone ID: 700944459H1
gggatggagtgcactacacagaagctgcaaatcactggattgcaaatcgaatacttaatggttccttttcagatccaccactttccattgcacactcgtgccgtgcccaataactctcactagtactgttcaattaccacctttacaaaatctaatgcttggtgtttgcttaatcataaataatttaattcttttgcatttggcttttaccttggaccaattgagtcactttcgcccaagatttgttattgtgttcactat

SEQ ID NO: 38407 - DNA, 164 bp, Glycine max
  Clone ID: 700944460H1
cttaccaactttgagatagacgatggataactttatgagcttcataagtgactgataatgctgtgagttgagggtttagggacgagcatccagtgtgtattgtaggtctgcgataattagcctgctgaggatacggtaatattcgtcgaattcgtggacatatg

SEQ ID NO: 38408 - DNA, 263 bp, Glycine max
  Clone ID: 700944461H1
ctcgagccggtccctttgtgattcctgggaaactcatttcattagagtgagagagagagagagagagagagagaggtatcacagtgagacggagaagccctaactacgcacgcactcattcttgagaaagctcaatattcattcgtccatggcactctcttctcgtctcttttccaaatccaaattgatctatggctgtcaaatacttctgcaaaaggagcatgctattccagttcgtcactttgctaaagagtctgcccctc

SEQ ID NO: 38409 - DNA, 264 bp, Glycine max
  Clone ID: 700944462H1
atttgaggccaggcaagccccactcaaccaccacacctctcctcgttcacgctacccctttctgctcttcttctacctttcaagttttaaaagtataaagatggcagagacattcctatttacctcagagtcggtgaacgagggacaccctgacaagctctgcgaccaaatctccgatgctgtcctcgacgcttgcctcgagcaggacccagacagcaaagttgcctgcgaaacatgcaccaaaaccaacttggtcatggtctt

SEQ ID NO: 38410 - DNA, 245 bp, Glycine max
  Clone ID: 700944463H1
gttctagatcgcgagcggccgcccttttttttttttttttttaacacaaattttagtatttaataaagcaaaatgcacacatcccccaaacaaaacaagccttattcaacccaaattggtttcatatcacagaaaccaacaggatgccgccttcctcctaacgggtcccacccactcgaacaaaccttctacagaattaaaaatggctacaattcttctaccaaaaatctgaaaagtctaacacc

SEQ ID NO: 38411 - DNA, 246 bp, Glycine max
  Clone ID: 700944464H1
tggaaattcaaccacaaattctgagagaaaattgaacaaattccagtggctatggaagtttggccggaataatggcgagtttatgtcagagaaaggaggtgatacttctgaggctgcaaaacctgccaacaattgtaacaatcaaagtaacacaacaccctcttctacagccaacaattgtaataatcatagtaacacaataacctcttctacagccaaaaattgtaattatccaagttacattat

SEQ ID NO: 38412 - DNA, 266 bp, Glycine max
  Clone ID: 700944466H1
gttaaatatcaaggaagctatcctggcagctctccaaacttcggtcatggatgttttactgccggatccattgacatttggcttcaggcttgttagagatggttctgaatcaggaaaaccttattctgataaagattctgaattagttgaatctcctgcttccaaaggttctgtgattgcacatgaaatgacaccaatggaagttctggttcgcaataacaccaaggatatgatcaaaatgagtcttaatattacatgcagagatg

SEQ ID NO: 38413 - DNA, 265 bp, Glycine max
  Clone ID: 700944467H1
aaagcctcttttacagttcagtctcttgttaaagcaaaatggtcttagaagagtgtgtagtgcatgatgtgaggctatcctcagttgggccaggccgggccaccaggtcggaggtgttccacagcccgggtggctcggacttggccatgaagcttcactatctcagggtggtgtacttctttgctagtgaggctgcacaagacctaaccatcatgaaaattaaggaggccatgttcactttgctcaaccattacttcatcacatg

SEQ ID NO: 38414 - DNA, 134 bp, Glycine max
  Clone ID: 700944468H1
caccctcataaattgcaaacaccgatcagaaagaaaaaatgagttcccttcgtctggcttatgctgtgtcgatcgagtgcttgacactacaacttctcatatgcacagcagatccttcatttacgtgacatgtc

SEQ ID NO: 38415 - DNA, 256 bp, Glycine max
  Clone ID: 700944471H1
aagaaggcgtcttcataaacgcctttcttctccgtttccgtttcctcgttcgaattcgctttttgatctgcgaaaatgagagagtgcatctcgatccacattggtcaggctggtatccaggtcggaaatgcttgctgggagctctactgcctcgagcacggcatcgggcccgatgggcaaatgccaagtgacaagacagttggcggtggtgatgatgctttcaatactttcttcagcgagactggtgctggaaagc

SEQ ID NO: 38416 - DNA, 256 bp, Glycine max
  unsure (1)..(256): unsure at all n locations
  Clone ID: 700944472H1
atagaatctcaactcaaccaatgtatttttggctttaattttttttggaccgatgtgtattaattacttgattgtagttatcgaatttcatcattctacagaatcaatggtttcccggttattgaaaaaaggcattaaagaaaagattcccttggatcattcatggcatcaagatcatatgttaatctactagacttagctggaggtttactggatattccacacaagatagncccctctcganggatgatgacag

SEQ ID NO: 38417 - DNA, 261 bp, Glycine max
  Clone ID: 700944473H1
gaaacagatagctgcttctttctctcacgcaaccgtcgtcgttcatcaatggctacactcaacctctcttcgttgcaagctctcgccttccatcgtttatcctcttcttttccccaaagtacccctaccctttccttcaatttccaaccaaaacccttcgctaacccgcgcccaatttctctgaaaccctacgtttccgagaaacctcgcgcgcgcgtggtggcgctggccgtgaagagcctcggcgaaacggaggcggtg

SEQ ID NO: 38418 - DNA, 83 bp, Glycine max
  Clone ID: 700944474H1
gttggtggtcaggacaagatccgtccactgtggaggcattatttccagaacactcagggtctcatttttagtggttgatagca

SEQ ID NO: 38419 - DNA, 259 bp, Glycine max
  Clone ID: 700944475H1
gtttcactttctttgcatagggcaacctcctttctctgtgactctgagtatcgtatcgttttattattatttctaattctctcttatcaggtccattgaatatgtctccgtcgttggatcttcctcccaagggtggcttcagttttgatctatgccgaagaaacgcaatgcttcaaaacaagggcctcaaagccccaacctttctcaaaactggcaccactattgtcggtttagttttccaggatggtgtcattcttgg

SEQ ID NO: 38420 - DNA, 258 bp, Glycine max
  Clone ID: 700944476H1
agccaacccaaatcgaagcgcagatcgaagacaaagaagaactcgaggaagctcgccgccgcaacgcttcagccaccaccaccgcccccgctggcaccgccgctcttctccgtcagctggatcgcggcggcgaagatccctctttccaggcgcatcgcatcggcctctcctcgtaaaaccctctccatactttcttccctactggaggtcgaagtcaagctgtgcctcgccgactccaacgcccaccgacacgtcacc

SEQ ID NO: 38421 - DNA, 259 bp, Glycine max
  Clone ID: 700944477H1
gttgtatccacttccccagttggatctgcaagtcctgttaggcacaatgaactgaatatgcgttttgcttctggaatgaggaatttggccggggtcatgggaccttggcatgcagatactgggaacattgatgaaagttttgcttcttctctgttggaagagtttaaaaccaatagaacaaagtgttttgagctctctgaaattgcgggtcatgttgttgaattcagtgcggatcaatctgggagtcgatttattcaac

SEQ ID NO: 38422 - DNA, 260 bp, Glycine max
  Clone ID: 700944478H1
tctcactcaaccaaatctcagttttgagttcaactcaactaaactatgtcttccttatccctatatgccaacctctcctctctaccatcctccctcaccattcgttcttcttcatccaaagatacctctttgaaacaggattggaggacaaagtccaaacctatcccaccaggtggcacataccctgcaaaagatcattgcagtcgttgtgggttgtgtgatacttactatattgcccatgtcaagaatgcatgtgcttt

SEQ ID NO: 38423 - DNA, 262 bp, Glycine max
  Clone ID: 700944447H1
gaaaagaggaaaggtcacattgatgctgacaagatggcagtgttgaatggttggcatagaatcgattgtagaacaagagatgcgcttcgccgtagttgtctttctgagctcattgagggttatgatcaatgtgtacgagctttcataacagaaagcacagatggagatattcttgaactacaaattcaggatccttttcatagattgttactgcatggagtttgtgagttctacaatctggcgtcggatacagtgtcaggtt

SEQ ID NO: 38424 - DNA, 264 bp, Glycine max
  Clone ID: 700944480H1
agtagatatagcatatgttcttttgccaagaagtcattgaagaaatccagaagagatgtaacagaggcagctggagatctcttagatgataagtttgttcagaatgacaacttggacacttctcttaatccagctgccccgaattctaaccctttaccttccaggagtgctgtgcttcaagcttgcataataacttgtggtctcatagctgctttgggaatagtgattcggcaggtgtctcatgttgcgtcagtggaaggattg

SEQ ID NO: 38425 - DNA, 266 bp, Glycine max
  Clone ID: 700944481H1
gtgaacgttccgaaaacaaagaagacatactgcaagagtaaggtgtgcaggtagcacaccctgcacaaggttacccaatacaagaagggtaaagatagcattgctgcccaaggaaaacgccgttacgatcgcaaacaatctggttatggcggacaaactaagcccgtcttccacaagaaggctaagaccaccaagaagattgttctgaggttgcaatgccacggttgcaagcatgtctcccaacacgctattaagaggtgcaagca

SEQ ID NO: 38426 - DNA, 269 bp, Glycine max
  Clone ID: 700944419H1
cctccatgctatgggtccgcgatcttcgccgtttcatcggatccggcgccggtctcggatccgaagccctgatggagcttgaaactaagagaattttgctcgacatttttaaggaaaagcagaagaaaaccgccgaagctgctacaattcccactttctacaagaaggaatctgcagatggatcaatcagtcatagagttcagagattggcaaagtatcgctttctaaggaaacaatccgatcttttgctgaatgctgaggatttagat

SEQ ID NO: 38427 - DNA, 268 bp, Glycine max
  Clone ID: 700944420H1
aggccctgatgatgtttacattaaagttcactactgtggaatttgccattctgatctccaccagattaaaaatgatcttggcatgtccaactatcccatggtcccaggacatgaagtggttggtgaggtactggaggtgggatcaaacgttagcaggttcagagtgggagagttggtgggagttggactcctcgtaggttgctgcaaaaactgccagccatgccaacaagacattgagaattactgcagcaagaagatctggtcttac

SEQ ID NO: 38428 - DNA, 264 bp, Glycine max
  Clone ID: 700944421H1
tgtccttctggcagttcccgcacttctgtatgccataaacaactatctgaagtttatcatgcagctgtattttaatcctgctactgtgaagatgctaagcaatttgaaggttttagtaatagcacttctgttaaaggtgattatgaagcgccggttttccatcattcagtgggaagctcttgctctactgctcattggtataagtgttaatcaactaagatctttacctgaaggaactacagctttgggtcttcctgtcacaat

SEQ ID NO: 38429 - DNA, 264 bp, Glycine max
  Clone ID: 700944422H1
gtgatgatgacacatggcaatgtcttagctgcactctctgctgtgatgaccattgttcctgacattgggacaaaggctatatatcttgcatacttaccgatggctcatatcttagaattagcagctgagaatttgatggcagctgttggggttcctataggatatggatctcctctgacctttactgatacttcaaacaagatttcaaaaggaacaaagggggatgctactgcactgaggccaactttaatggcagctgtgcca

SEQ ID NO: 38430 - DNA, 264 bp, Glycine max
  Clone ID: 700944423H1
gattcactgcaggattatgttcctcaggccagtacattatcatatggaaatggcaaggtagatgggatgattccaaaccaatggcaggttgctgatctatcttatctaggcatgagaaacactgagaatagttactcgtactatcaggattactcaaatatggcatgtggtgtcaatggttatactgtattcaggccttcaaatggtccgtagagggaaaagatgacaaaggttgcccacaaattagtggtcatcaacaaatgt

SEQ ID NO: 38431 - DNA, 266 bp, Glycine max
  Clone ID: 700944424H1
cattttagcaccacagaattgcccggtatctagatatgcatagataaagaggaattggatttcactggcgaacgttatgaatccttgcactattattatgaattccatgccagttccttctcctttgttgataaagtcctttaaaacatttccatcgttcaaatgctgcagcaagagctcagatgagaagggaagtgaagatgtgaaggacacattatctggggtggtggacgagcaagttcaagagttcttgagtagaaaagaga

SEQ ID NO: 38432 - DNA, 253 bp, Glycine max
  Clone ID: 700944425H1
ggctcgaggcaaagaaaccaaactccacgcaccctcctttgaaagtactcaatccatcatcgatcgatagccgttgcaacacccgtcactccaaagccgcgtgtcgttctagagcgaaacggcagcgtttcgaccaggtgattttattgcagtgcctcaactcgattagatcaactcacctggatgctgggtgggaacagaagagaaaaaccgaaatagaaacataaaaagtagctgccaatttcacgttctc

SEQ ID NO: 38433 - DNA, 265 bp, Glycine max
  Clone ID: 700944426H1
gttcattctctttgcgcagttccctacctctcctttcaagatgcagatcttcgtcaagaccctcaccggaaagaccatcacccttgaggtggaaagctctgacaccatcgacaacgtcaaggccaagatccaggacaaggaaggaattcccccggatcagcaacgtctcatcttcgccggaaagcagctcgaggacggccgtaccctcgccgactacaacatccagaaggagtcaacccttcaccttgtccttcgtctccgtggt

SEQ ID NO: 38434 - DNA, 261 bp, Glycine max
  Clone ID: 700944428H1
agacaacaaaacagaatgggtgtggtggtgatcgacggcagcaccgtgcgcgacttcgtgaacgacgaggcggccttcgcgaagagcgtggacgagcagttcggggtgctggacctcaacaacgacggcgtcctctcgcgctcggagctccgcacggccttcgagtccatgcgcctcatcgagacgcacttcggcatcgacgtcgccacgccgccggatcagctcgcgaactctacgactccatcttcgacaagttcgacg

SEQ ID NO: 38435 - DNA, 66 bp, Glycine max
  Clone ID: 700944429H1
ctcttattcataagttcatgcaccataatcataaatctcagaatatattttatctcaaatatttat

SEQ ID NO: 38436 - DNA, 266 bp, Glycine max
  Clone ID: 700944430H1
ctcgagccgcatcggctcgagagttcttctctatgccactcaatgcgaaggatacagcagagtaccccaagccatttgggactggtagctagagtattggacacaatggggatgttggttaggttgagtaccttcttctcaacaccaatcacgaacacaacttctctttctatggcaaaaatgctgaacaatctaggtgtctattatacagttacatgtcttctgtgagaactatggcatgcgagattcttgagttgctggcagaa

SEQ ID NO: 38437 - DNA, 267 bp, Glycine max
  Clone ID: 700944431H1
gtacaacttcaacttctgaaatgtaccccacttgagggcctcgatccgaaacatttctactccaaattgcttagtttccaaatggcagaaatccgagcacaaggatgaaactcgcaacagttacttgagcaagagaggaattgggcttgtcgctgtgtcaccctctgcgcgtgtcgtcgtcggcgcccgcgccgatgccttacccaaacgacaagatctactgattcacggcctctgtggccagatctgtggtcttcacggccagat

SEQ ID NO: 38438 - DNA, 267 bp, Glycine max
  Clone ID: 700944432H1
cagaatatcaagaaatggatgaatttgggacaataacaaatgttgagtataaggacaccggagagacttctggttctgttgatgttacatttgatttctatgttccagacgaaaggtcttgattttgagttgaaagttcttgaattttgatttctttgtcaaaagttagtgtctgaaatgcctaccagtgaaagctaatctggatttctgtatatatttttaaattgaagcttacattagggtgacactagattttgatgagaagtt

SEQ ID NO: 38439 - DNA, 270 bp, Glycine max
  Clone ID: 700944434H1
tgcttacacacctcctgaatatttaagaaatggaagggtcacgcctgaaagtgtcatttacagctttggaaccgttcttctagacctcctcagtggcaagcacatccctcccagtcgagcacttgatatgatacaggggacaaacaatatgctcttaatggattcacattgagaggggaagttttcaacagaagaggcaacggtagttgttaatcttgcctctaaatgtgtgcaatatgaaccaagggagcggcctgatacaaaggattt

SEQ ID NO: 38440 - DNA, 269 bp, Glycine max
  Clone ID: 700944435H1
ctcgagccgaatcggctcgagataaaattaatttgttttatgttagcattatttgtacgtgcagcacgagtactgaaagaaaaaagcaatatggtggatagcactagtagtgatgctagtacagctcatcatagtgatccgcatgatcacgtatttaagccaaaagaaggtaaatataatgcaaacgaagtgttctcaatggattacactccagccagaaggaagccgccgatccacaatttgaattgatggataaattttgtgccaca

SEQ ID NO: 38441 - DNA, 267 bp, Glycine max
  Clone ID: 700944436H1
caatcaatttaatatattcatatccttccacctgagttcttagtgctgaatgtccttgtctgtctcagtgtctctcttcacaacctcaccgatctgccatttcacactcataacaactttgtacaatttgactcgatatgttgaagtttctctgcagctaaattgaccaatagtttggtgcacttagatctaaaagctagaaagatgtcttttattggcactcaacaaaagtgcgaggcttgtgacaaaacagtgtaccccgttgat

SEQ ID NO: 38442 - DNA, 266 bp, Glycine max
  Clone ID: 700944437H1
atcacttccctcaccatggccgagtcctgcctcctctcttctccctcctcactcttccacaccaaaaccaaaccctctctctttacacccccctccaaacccctcacactcccattttcatgcctcaactcctccgtctctctctccctcgccgcaccgactcaccgttctccccttgtaactttcgtggcccaaacttccgattgggctcaacaagaagaagaacagagcctcgctgaaaccgaagcgggcctggaaagttggga

SEQ ID NO: 38443 - DNA, 262 bp, Glycine max
  Clone ID: 700944439H1
gaagaataagagcaccatcacattcactgccatcttcactagaaaacaatgtcaagtgtttcttttcttttggccttgttcatggtagtagctttgtctatctttccttccatagtgggtgcaataggtgagcaccggctaaggtgggtgcctgagacaacaacaccatgccaaagctccatagaagagtgcatggcagaaggtgagtttggaatggattcagagtcccaccggcgcattctagcgacctcacaatatataa

SEQ ID NO: 38444 - DNA, 264 bp, Glycine max
  Clone ID: 700944441H1
gtcctccgtctccgtggtggcatgcagatcttcgttaagaccctcaccggcaagactataaccctagaagtcgagagctccgacaccatcgacaacgtcaaggctaagatccaggacaaggagggtatccccccagaccagcagaggctgatcttcgccggcaagcagctcgaggacggacgtacccttgctgactacaacatccagaaggagtcaactctccacttggtgttgcgtcttcgtggtggtatgcagatcttcgtc

SEQ ID NO: 38445 - DNA, 262 bp, Glycine max
  Clone ID: 700944442H1
caacatgccatatttgctgaacatacagctgtgtcatctgccagccatccttgcccgtatattgcttactttggaccagtacatccatcctcctccaattctggtggaactgtatcagaagcttcaaacttcaaccattggaatggctctgtgcccagtgacatgccaacttcctacacatttcctgctgttgatcttcattatcgcagttgggaacaccactcccctcctttctctacagcaagtagtcgtctagttgctg

SEQ ID NO: 38446 - DNA, 256 bp, Glycine max
  Clone ID: 700944443H1
cataatcttgaatcacttttttttcttttggttttacaatggtgttttgggggtagtgttctttaggttgtctgtcaaattggctgatggcttgtgtttgaaattgcttttcctcaatcctagtctcctttaggttgtttgttagtgttttttgcttcattgtttttcgatcttatttgaaagtagcttttaaagcacatcacgttgattagaagcatgtttcttgaaaaggggataaatatactatgtttgggta

SEQ ID NO: 38447 - DNA, 268 bp, Glycine max
  Clone ID: 700944444H1
ggaatgcggctcgagaagaattgcagcagaatcgtggaggagttgtcttctaatatggaaaggcaagagcaatcataagaatctctagagaacaatgatgagaatattgaagaagactttaaggtatcagatgcatgcttctctttgatagattccctgaagtgagtaactgactgcacttcccaggcactattgatatcaaagatgggtacgtaaatgtaggggattttaatatctttgacaaggtagcaatatgtcactattttca

SEQ ID NO: 38448 - DNA, 262 bp, Glycine max
  Clone ID: 700944445H1
agagtaccgagcttttgatcaggaagctccccttccagaggctggttcgtgaaattgctcaggacttcaagactgatctgcgtttccagagccatgctgtgcttgcattgcaagaagctgctgaggcataccttgttggactctttgaggatactaatctgtgtgccattcacgctaagcgtgtaactattatgcccaaagatatccagctggcaagaaggattcgtggtgagcgtgcttgatgtggtggtggtggtggtgg

SEQ ID NO: 38449 - DNA, 86 bp, Glycine max
  Clone ID: 700944446H1
gagactttggggattggtagtttgccataacactactcccaggtttgttccctttacctctacaggtatagcttgtagcagtttct

SEQ ID NO: 38450 - DNA, 267 bp, Glycine max
  Clone ID: 700944417H1
aaaactacaacctttgtcaatttctttcttgttcgactctgcttctttctccaacttcacacacacacacacacacaaaaaaaaaaccttggcaaaggatagaacaattggtgtggctctggttttccccaaaagcagcaagaatcctctgaaatgggcacttgaaaatttagccgataaaggtgaccccatttatgtcatccacattaactccaactctctagaccattcccgaaacaagctatgggcaaaatctggttcccctct

SEQ ID NO: 38451 - DNA, 252 bp, Glycine max
  Clone ID: 700944383H1
ctcagctatgactaccagagaaatccttcaaaagatgaaggtaaaagttggtttgggttcatcagaccctgattcagggaaaggaaagagcaagatgtcaaagaacataactcatggctttcatttggtgaaaggaaaatcatatcatgacatggaggattacgttgtggctcaatttaggcaaatagataacaatgaattgggtttgtttgcaatatttgacggccatgcgggtcacaacgtacctaatta

SEQ ID NO: 38452 - DNA, 248 bp, Glycine max
  Clone ID: 700944384H1
atggataaagacaaaagttcaatgtcttgggtatgcatgaatttgacagtgacaggaagagaatgtcagttatattggggtaccctgacaattcagtgaaagtttttgtcaaaggagcagacacatccatgcttaatgtgatagacaggtcattcaaaatggacttagtaagagccactgaagcacatcttcactcttactcttccatgggtttgaggacacttgttattggtatgagagacttgaat

SEQ ID NO: 38453 - DNA, 232 bp, Glycine max
  Clone ID: 700944385H1
ccctagtcaaggagattcatctctgcaggttgttttagaaaagaaaaaatggtgaagatttgctgcattggtgctggatatgtggggggtccaacaatggcagtcattgctctgaagtgcccctccattgaagtggctgttgttgacatctccaaatcccggattgcagcatggaacagtgacaagttcctaatcatgagccaggccttaatggtgtggtgaagcatgtcgt

SEQ ID NO: 38454 - DNA, 163 bp, Glycine max
  Clone ID: 700944386H1
catctttaagccaattgcaatcaaacaaagtttcagtttttggtgttccatttttcttcctccatctttatcttaaacataacttgaactctccattccttaaattttagctacgagctagttccgacacagacaaagcaatggcaaagaccgagttagaggt

SEQ ID NO: 38455 - DNA, 244 bp, Glycine max
  Clone ID: 700944387H1
tttaaagttaaccttagaactcatttgaacgaaatttcactgaaccaaatggtagttgtcctatagaatatctttaaaactagagtcatataggatgccaccaagattgtaattaaattccatttgggtaataatctcagggaatcatcctcgtgctcacttaatgtcctttatttacatgtaggaagcgcttctattgtcttttaatctaattaattactgtttaatttccataccacttggt

SEQ ID NO: 38456 - DNA, 218 bp, Glycine max
  Clone ID: 700944388H1
tagatcgcgagcggcccccttttttttttttgggtcctcttctgagacacattggcttaatgtccatctttcctggtttaggacatcttgatggctaaaattataccaggaatttgttccatgggatgcctaatactttggagttttttaatggggcttggatccaatgtttaaaccggaaatggataccaatcaatgtgccatcccattgagctttt

SEQ ID NO: 38457 - DNA, 242 bp, Glycine max
  Clone ID: 700944389H1
gtgggagttctcacaatggctgggaaaggcgttcgtgttttggttacccctaccagtgatctgggcaagatcttagcctgcatgcatggactagatataggtggtgagatgaacctagctgctggcattcaggtggcacaattggctcttaagcatcggcaaaataaaaagcaacagcagaggattattgtctttgctggaagtcctgtcaagcatgaaaagaagatgctggagatgatagg

SEQ ID NO: 38458 - DNA, 234 bp, Glycine max
  Clone ID: 700944390H1
attccaaaccagttcaatccttttcagtcatctctttggtcacgttttcacagtaacataacatattctgtggaaatatggcaaaacttggagactgtgcagctcatttttttattgcagcaatggttttgagcacgttttacgtgaccaaaactgtggcacaatcagaaattgcacccacatcgcaaatggagactggtgcagggtttgctttgtctgtttctgggggtgacc

SEQ ID NO: 38459 - DNA, 134 bp, Glycine max
  Clone ID: 700944392H1
gcctttgagggcctgtggaagaagtgtctgcttaagccatctcttgtcactcctgatcgaaaaaccaaaatcaaagttaggtcaacttaggtgaaccacatgtaatacaaaaaacttttgaccaagtatctaag

SEQ ID NO: 38460 - DNA, 170 bp, Glycine max
  Clone ID: 700944393H1
tttcattaaaggcctagatattccagaagaagcaaagagtaatatgttgaagttaacacctgatacttatgttggagcagctgttgaattggccagaacagtggaaaatgtggtgaatactgtgattggaataaagatctaggaaacaaacaaatggttgaaacagtttg

SEQ ID NO: 38461 - DNA, 205 bp, Glycine max
  Clone ID: 700944394H1
ggcgaagatgttactgttggtaacttttttgctgctttacttggaaacaagtcggcacttactggtggcagtgggaaggttgtggacagtggacctgatgatcatatatttgtatactatactgaccatggaggtccaggggtgctcgggatgcctgctggtccttacttatatgcggatgatctgattgaagtcttgaagaaaa

SEQ ID NO: 38462 - DNA, 204 bp, Glycine max
  Clone ID: 700944395H1
tctcgagccgaatcggctcgagagcaattaatcatattcctctctcattctcactataaacaacaaaacccttcccatcctaattaaggtgaaaatgaaggcatcacccattgcttggttcactttggtggttgtgtttcttgtggctgaagttcaagtttcaatggcagtgacatgcagcccagtgcagctgagtgcaagtgt

SEQ ID NO: 38463 - DNA, 275 bp, Glycine max
  Clone ID: 700944401H1
ggatttgatcaaggcttggaggttgagtccttctgtaagtgcaattccctcaccattctgtgctgctcccatttgtgtaagaactttctcttttcagttttcaacttctccctacactcgtccaaagcctctagttcctattccacgtggcaaaagtagagactctgattctgagccgcttctagaatcttccatcgtgcaagaagtttcattcgacgacgacgacgaagaagaattccttgacgaatttgaatacgatgaagcagcggatggcg

SEQ ID NO: 38464 - DNA, 270 bp, Glycine max
  Clone ID: 700944402H1
ctagaatggaatttcgatgctcagtcatctcttttaccattctcttctctcttgctcttgcaggagagagccatgtccatgcatcgctacctgaggaagattattgggaagctgtttggccaaacactcccattcccactgcactgcgagagcttctaaagcctctccctgcaggtgttgaaatcgatgaactccctaagcaaattgatgatacacagtacccaaaaacattcttctataaagaagaccttcatccaggcaaaacaatga

SEQ ID NO: 38465 - DNA, 269 bp, Glycine max
  Clone ID: 700944403H1
agaagaggttgcataactgaacaaacaaagcaaccctatgtcgaaggtggtttgtgtcaccggagccagtggcgccagtggatcataggtggccctcctcctccaccagcgtggttatacggtccatgccaccgtccaagacatcaaggatgaaaatgagacgaaacatttggaggaaatggaaggagcaaagagtcgtctccatttttttgaaatggatcttcttgacatcgactccattgccgctgccataaagggttgctccggcg

SEQ ID NO: 38466 - DNA, 266 bp, Glycine max
  Clone ID: 700944404H1
aagagtgtttcttggggggaattacattggtggagctgaggaaattcagaggctgcatgaggatgggaagcttgagaagcttttggtttgttgtgagaagattgaggacagtgttggaggtgatggaggagggggagtgtgtgaggcttgtggggatataaggtttgttccttgtgaaacatgttgtggaagctgtaaaatttactatacaggtgatgaagaagatgaagaagaatatgttgatggtgaagtgggggagtgtggat

SEQ ID NO: 38467 - DNA, 266 bp, Glycine max
  Clone ID: 700944405H1
atcgcgtttgggagaagaagagcaaaatcgctgtgaaaatgagcggaacggtgaagaaagttagcgatgtagcattcaaggtgggaaggaacatcgattgggatggaatggcgaacttctggtctccgatgaggctcgcagggagttctccaatctccgtcgcgctttcgacgaggttaactcccaactccaaaccaagtttagccaggaacctgagcccattgattgggattactatagaaagggaattggcactcgtttggtgg

SEQ ID NO: 38468 - DNA, 264 bp, Glycine max
  Clone ID: 700944406H1
gtttctcttggtttgtggagtggtgttcaaggtgcaccacaagtgccatgctacttcatttttggtgattctttggttgataatgggaacaacaaccagctccagtctttggctagggctgattacttgccttatgggattgacttccctggtggaccttctggaaggttttccaatgggaaaaccactgttgatgcaattgctgaacttttgggattcgatgattacatacctccatatgctgatgctagtggcgatgctata

SEQ ID NO: 38469 - DNA, 266 bp, Glycine max
  Clone ID: 700944408H1
gagaaaaagagagaggtagagaaaagcgaagagtctctctcttcctatctctctctttcaatgtcagggcacaaatcttccacctactacttcttcttcttcttccttctaacctatatcagaaggaaacgcgaaaaaagaaaaaaaaaaaagaggcagaaggttctagaagccgccaatttttatttcttttaatttgtctgagtcaaaaacgtccgggattataaccatggattcttcgtgtgtcccaaacggcgacgtttctg

SEQ ID NO: 38470 - DNA, 264 bp, Glycine max
  Clone ID: 700944409H1
gacgcgccgctacatgaccgacatgataacctacgccgacaccgacgtcgtaatcgtcggagccggctcggcggggctctcctgtgcgtacgagatcagcaagaaccccgccgtgagcgtcgccataatcgagcagtccgtgagccccggcggcggcgcgtggctcggcggacaactcttctccgccatggtggttcgcaagccggcgcacctcttcctggacgagctcggcgtggcgtacgacgagcaagaggactacgttgt

SEQ ID NO: 38471 - DNA, 263 bp, Glycine max
  Clone ID: 700944410H1
tgtttctctctcaactctcacaacccatctttcatatccaaattccaatgcttcttcttccttcttatttcaatttcaatcactactattattactctttcacgcttttgcttctcgatttttaaaccctaaatctatctatctgtctaatagataagatagggcaaaaacaaaacaaaacaaaataaaaccctagccaaagaaagaccttgttgagcagcagcagcagagagagagaggcttatggaaggagtaccgcaccc

SEQ ID NO: 38472 - DNA, 264 bp, Glycine max
  Clone ID: 700944413H1
cacagcactagatcatggtgtcgtggctgttgggtatggtacagctaatggtcatgattattggatcgtaaggacttcatggggtcctagctggggagaagatggctacatcaggttagaaagaaatcttgctaacagcagatcaggcaagtgtggaattgcaattgagccatcttatccccttaagaatggtccaaatccacctaatcctggaccatcacccccttcacctgtgaagccaccaaatgtctgtgacaactacta

SEQ ID NO: 38473 - DNA, 266 bp, Glycine max
  Clone ID: 700944414H1
caaaagatttcatcaaagtaccaatgacagatatgagaatgagagcagatccagcatcaggctaccctgggagaacctacagattctacactggtccaaaggtctatgaatttggctacggcctaagctacacaaaatattcctacaagctcctctcactctcacacagcaccctccacatcaaccaatcatccacacatttaatgactcaaaattccgaaaccatacgctacaagctggtttcggagttggcggaagaaacatgc

SEQ ID NO: 38474 - DNA, 203 bp, Glycine max
  Clone ID: 700944382H1
cttgagctctgcgagatcttgagtcgccgatttgaaaagatgagtaagcttcagagtgatgctttgcgtgaagccatctcaggaatcatggccgattccaaggagaagaatcgcaaatttgtggagaccatcgaactccaaatcggtttgaagaactacgatccacagaaggacaagcgtttcagtggctccgtcaagttgcc

SEQ ID NO: 38475 - DNA, 265 bp, Glycine max
  Clone ID: 700944415H1
cttgggaggagttcaaaagacacagactaggcgctgcccaaaattgctctgccactcttaacggcaaccacaagctcactgatgctgttcttcctcccacgaaagactggaggaaagaaggaatagtgagtgatgttaaagatcaaggcagctgcggatcatgctggacattcagcacaactggggctttagaagcagcctatgcacaagcatttgggaagagtatctctctttctgagcagcagctagtggattgtgctggccg

SEQ ID NO: 38476 - DNA, 269 bp, Glycine max
  Clone ID: 700944416H1
accagtcacagtgaaaatttagcaaaatgatgagaatctctgggagtatattaaccattttggaggacttgctgtgtacatatttttgctgctgagactgtgtgaagaggccaaggcaagtatcagacatggtgtacttttttcccttgtcaagtttcttgtgacatagtaggcataagttagtttctccccaatctgttgtgctctttctttgatcaagatctttgctctacatgcatgcatgttctactaaactattcagaagtcta

SEQ ID NO: 38477 - DNA, 262 bp, Glycine max
  Clone ID: 700944349H1
ggaggagcaccaaagggtcctcaactgagagacattgatcgtggagcagatattgtggtagccactcctggtcgcttgaatgatattcttgagatgagaagaattagtcttaatcaggtttcttacctggtgctagatgaggcagacaggatgctggatatgggttttggaacctcaaattaggaaaattgtgaatgaggtgcccaatcgcaggcaaactctaatgtttactgcaacatggccaaaggaggttaggaaaatt

SEQ ID NO: 38478 - DNA, 251 bp, Glycine max
  Clone ID: 700944350H1
ttgtttgttgttgtaactcgttcttcttcttttgttgttctgtgtttgtgtttgttttttctctcacctgaaaatgtcttgctgcggtggtaactgtggttgcggaagctcctgcaagtgcggcaacggctgcggaggctgcaagatgtacccagacttgagctacactgagtcaaccaccaccgagaccttggtcatgggaatggcactgttaaggcttcatttgaaggttgctgaaatgggtgtgcccg

SEQ ID NO: 38479 - DNA, 250 bp, Glycine max
  Clone ID: 700944352H1
gagagagtgcatttcaatccacatcggtcaggccgttattcaggtcggaaacgcctgctgggagctctactgcctcgaacacggcattcagcctgatgggcagatgccaagtgataagactgttggtggaggtgatgacgctttcaacaccttcttcagtgaaactggggctggaaagcacgtgcctcgtgcgatttttgtagatctcgagcctactgttgatttgtgaagttaggactcggacataccg

SEQ ID NO: 38480 - DNA, 252 bp, Glycine max
  unsure (1)..(252): unsure at all n locations
  Clone ID: 700944354H1
ggacgaacctatattggagaaagccattgggtcggaaattgaatggtacccgggaaaatgtttgacttagaaagttttgaagataaagcctaagacgggttcaaagaatgctagaccaattaccaaaaccgagagctgtgaaagttctcttcaattttttcaaaccaccagaagtccctgaggatgatgagtctangatgaagatttggctgaggaacttcagaatcagatggaacaagattatgacattgg

SEQ ID NO: 38481 - DNA, 255 bp, Glycine max
  Clone ID: 700944355H1
gttgtaactcgttcttcttcttttgttgttctgtgtttgtgtttgttttttctctcacctgaaaatgtcttgctgcggtggtaactgtggttgcggaagctcctgcaagtgcggcaacggctgcggaggctgcaagatgtacccagacttgagctacactgagtcaaccaccaccgagaccttggtcatgggagtggcacctgttaaggctcaatttgagggtgctgaaatgggtgtgcccgctgagaacgatgg

SEQ ID NO: 38482 - DNA, 250 bp, Glycine max
  Clone ID: 700944356H1
tctcgagccgaatcggctcgagattcggatacatcttccagagttactctcaagtcttaacacggtggtcttccttgatgaacacattgtggtacaaactgatctttcacctctgtgggacattgacttgaatggaaaagtcaatggagcagtaaaaacatgcagtggagaagataagtttgtgatgtcaaagaggtgaaaagctatttaaattctcccaccctttaatatccaaatcttgatcccaatg

SEQ ID NO: 38483 - DNA, 229 bp, Glycine max
  Clone ID: 700944357H1
attccggataacctaccacttgatgctgctgctcctatcctctgtgctgggatcactgtgtatagccctttgagatactatggacttgacaagcctggtctgaatcttggtgtggttggtcttggtggactttgtcacatggctgtcaagtttgccaaagctcttggagctaatgtcacagtgattagcacatctcctaacaataagaaggaagccattgagaacatag

SEQ ID NO: 38484 - DNA, 235 bp, Glycine max
  Clone ID: 700944358H1
ctcgagccgcaccagcaccactgctactgccacgaagggccaaaacggacgtgcaagtctgacggctacacggtcccacaggggacacagatcctcatcaacgagtgggccataggaaggaacccggccatatgggaagacgcacataggttctcgccagaaagattcttggactctgacatagacgtcaagggtcgccacttcaagctcacgccgttcgggagcggaagacgaa

SEQ ID NO: 38485 - DNA, 219 bp, Glycine max
  Clone ID: 700944359H1
aaagtatttcttgtcttcgaatatgtaccaaatggcacgctcaggaattggatctctgatgagcatgctagaaaatccttgagttggactcaacacataggagctgcaattggagtggcaaaaggaatccagtttttgcatacagggattgtccctggtgtatattccaatgatctgaagatagaagatgttttattcgatcagaatcttgttgcaaaa

SEQ ID NO: 38486 - DNA, 247 bp, Glycine max
  Clone ID: 700944362H1
acacgctcttgtggaatatgagactatggaggctgctgagaaagcagtggctatgttaaataatgaacaagactggagaaatggcatgcgggttaaacttctcaagggaatggggaagtatggacacaaaaaacaagcttggaaaggacatcattctgagaagaatagctcaaggcctgaacaaacaggagatgaggagaatcatggctctaatgatcatcatgaagatacccatgaggaagaagat

SEQ ID NO: 38487 - DNA, 250 bp, Glycine max
  Clone ID: 700944363H1
ctcattaattgcaagaatggcacttcgttgcttggtgatgtccctttctgttctcttcactcttggtcttgcgagagaaagccatgccagagacgaagatttttggcatgctgtttggccaaacactcccattccaagttcattgcgagatcttctaaagcctggccctgcaagtgttgaaatcgatgatcaccctatgcaaattgaagaaacacagtacccgaaaaccttcttctataaagaagacctt

SEQ ID NO: 38488 - DNA, 253 bp, Glycine max
  Clone ID: 700944364H1
caaggatgtaaaagtacctctggatattctaatattcaagctcatgaaggcatatatgcgttcctcatctctacgaaaagcagctttaagggctctgtctaagatgttaactgttgatgagctattttatttgagggagcagtttgcacttttagagccaagcaaaaatggcactattagcttggaaaatatcaaagcggtcttgatggtaaatgcaacagatgctatgaaggagtcacgccatactgacttt

SEQ ID NO: 38489 - DNA, 145 bp, Glycine max
  Clone ID: 700944365H1
gttgcagctcctactgtctaacaactacgctgaagcagaaggtctagataaggagttcttctcttcaggcaaaaaaaaaaatggaggattcgttggagaattggatttcactgttggaaatggaagattatcatgatgggtcatt

SEQ ID NO: 38490 - DNA, 256 bp, Glycine max
  Clone ID: 700944366H1
acagaataatgaaaattttgattgtaactgtgaagactatgtggggtctgaaaggctgaagttcaaatttgatggtagtttcaagcggactttcccttcagaagacaattcctccagcagtccagattcatcaaaaagttttggtgagacacaattagatttatttcaccatcgccatggcttgttgatattgcatcttgttgcaacgatgatgtttgccccatccgttgtagcttggatccagaggttggcgtgg

SEQ ID NO: 38491 - DNA, 223 bp, Glycine max
  Clone ID: 700944367H1
caccgcccctcgtttcttcacactctgccgtgctctttcggcgcaggtcaagagattcgcaatagaaagtgagaaaaaaaaatgagtcgaggaagtgcaactgctgcgaagggcaagaagaatagagcgacattcaccattgattgcgcgaaccggtggaggacaagatcatggacattgcgtctctcgagaagttccttcaagagaggtttaaggttggtgg

SEQ ID NO: 38492 - DNA, 254 bp, Glycine max
  Clone ID: 700944368H1
cgattactcttgaggaaacaaaaatctaagatgagccgccatccttctgtcaaatgggctcagacgtctgatgtactctacttaacagttgagctgcctgatgctcaggatgttaagctcaaactggagccagaaggaaaattttacttctctgcaactgctggtgcagagaaaattccttatgaggttgacattgatctgtttgacaagattgatgtaaataatagcaaagctagtgttggttcaagaaacat

SEQ ID NO: 38493 - DNA, 193 bp, Glycine max
  Clone ID: 700944369H1
gcacagcttgtgacctcaaaaaacggaggcttaaccatccttgcaccagatgatggtgcattttcagaactcaaagcaggttactttaactccctaggagataggcaacaaaaagcactgatacagtatcatgttcttcccgtttatgtttgtcagctccaactttgatgctctgagcaaccctgtgctgaca

SEQ ID NO: 38494 - DNA, 188 bp, Glycine max
  Clone ID: 700944370H1
gcagaagacctccctatttttgcccttcaagatgacagggtggttgaagtagttggggatcccgctggagtgcataaggcattagagttaattgcctcccacctaaggaagtttttagttgatcgcggtgtaattccaatttttgaaatgaatatgcaacagccaatccccaccatgcagagcacatg

SEQ ID NO: 38495 - DNA, 252 bp, Glycine max
  Clone ID: 700944371H1
gttgatgctaataaaagagaaaaaccacatcagaactttcagccagaaggtttttacttaaattctgaagagcataaaggatttggagatcctttttctaacaatggaggtcttacacaggatatcttgtatggccttggggaacttgatttgtggttgctacccctgcgtttatctgatgaccacagttttgaggagttcatgtatttgcaaggaaatcagcctaatgactattacaaaaatgcagtgaaa

SEQ ID NO: 38496 - DNA, 252 bp, Glycine max
  unsure (1)..(252): unsure at all n locations
  Clone ID: 700944372H1
cacgtatggcctcgtagtaggtgccgttttgggagggaacgttgatccactgcgttttgataaccgtgcaaaaacggcatgaaatttgaaatgaaacgagtggaatgcgagccgagcaatgtacatgtactcttcaatttcattttcaacctctgttctcataaaccctagaaaaattcaaactcttgggattccatcaacaacgatgagagangnatgcaaaaaatgcacctttgtgaaccccccttctca

SEQ ID NO: 38497 - DNA, 204 bp, Glycine max
  Clone ID: 700944373H1
ctcgagccgggctggttcaactgaggtgatggctttgaatttgccttctcccgcccaagtgaagcccttatttttctcttcaaataactccacaaaacttccaggtcactgttctgtgaagatggtagatagtgacacaacagtagagagcacgattgtattgctctgccgctgctcaagcaccagcaccagcatggccaggaa

SEQ ID NO: 38498 - DNA, 184 bp, Glycine max
  Clone ID: 700944375H1
gtctctgtgtttgcggctgaggattccgaacgagtgaccttcttcgtttctcgcaaagtttaagtaatcatgggtaaggaaaaggttcacatcaacattgtcgtcattggacatgtcgactctgggaagtcaactaccacttggtcacttgatctacaagcttggaggtattgacaagcgtgtg

SEQ ID NO: 38499 - DNA, 75 bp, Glycine max
  Clone ID: 700944376H1
ggatttttcgagcaatattctctctctgtcacttcacctcacacgatctcgttccgattgcacgcgttttaatga

SEQ ID NO: 38500 - DNA, 177 bp, Glycine max
  Clone ID: 700944377H1
ccgaatcccttatcaagcaggggtttcgcggcccgagaccatgtcaaaccgagacggtgacactggctgagtggaatttccgccgccattcgaagctacagcgatggccatagccgccaccatttccgttcctctcacatcccccacccgccgcactctcgcttccgtcaatagcct

SEQ ID NO: 38501 - DNA, 251 bp, Glycine max
  Clone ID: 700944348H1
agacgaggttgcataactgaactagcaaagcaaccctatgtcgaaggtggtttgtgtcaccggagccagtggcgccgttggatcattggtggccctcctcctcctccagcgtggttatacggtccatgccaccgtccaagacatcaaggatgaaaatgagacgaaacatttggaggaaatggaaggagcaaagagtcgtctccatttttttgaaatggatcttcttgacatcgactccattgccgctgcca

SEQ ID NO: 38502 - DNA, 244 bp, Glycine max
  Clone ID: 700944378H1
cagcgctcctgaatctttccatatacgaaaatagcaaaggaagtattgtttcttcaggagcagttccaggtatagttcatgtgctgaagaagggaagcatggaagctcgggaaaatgcagctgcaacacttttcagcctttcagttatagatgaaaacaaggttacaattgggtctttaggagccataccaccactggtgacactgctaagtgagggtagccaaaggggtaagaaagatgctgc

SEQ ID NO: 38503 - DNA, 184 bp, Glycine max
  Clone ID: 700944379H1
cccgtcgtagcagaaaaacttgtcaccatggtttcttccgacaaggatccacgagaggatgtccttcaagcctggtacatggatgatagtgatgaagatcaaagactcccccaccacaaagaacccaaggagtttgtctcgttggaccaacttgctgaacttggagtccttagctggaaactag

SEQ ID NO: 38504 - DNA, 249 bp, Glycine max
  Clone ID: 700944380H1
taaggaatgaagcagtaagcttttgtgaagggtggaaatggagtctcaaaaatctcaaaatcatgctaaaaaggcaaacaagtacattattatggaagttaccaagcgcaacatagcaccatgtagcaaaaactgcctaccgccagcatcaaatccttacaacagaggatgctccaggatatgcaaatgcagaaaatgaagtcttcagttcgttcaatgggaagaataaggaaatcatatacctatttt

SEQ ID NO: 38505 - DNA, 215 bp, Glycine max
  Clone ID: 700944311H1
tgacaacctatgcaaggtgatcaaggatgttttgggtgacaaggttgagaaggttgtagtctctgaccgtgttgttgattcaccatgctgtctggtgactggagaatacggttggactgcaaacatggaaaggatcatgaaagctcaagccctaagggacaacagcatggcaggatacatgtcaagcaagaagcaatggagatcaaccctgagaa

SEQ ID NO: 38506 - DNA, 162 bp, Glycine max
  Clone ID: 700944312H1
ctcaggatcgtgcgactgctcattatggtgctgtgacagggttaaaagcgactgaggatggcatgtatctactaagtgcagggtctgattctagattgaggttgtgggatgttgaatctagctgcaacacacttgtgaactttgaaacagttcgtctgcaaa

SEQ ID NO: 38507 - DNA, 151 bp, Glycine max
  Clone ID: 700944313H1
ggtatctctgtaccaagatgctcatgtgcctgataattttgtacctaaaatacctcttgctggaggcaagaattatgaggctcataggtgttgggaggatatatttgatgcaatcactgatgctaaacacttcatatacattactgggtgg

SEQ ID NO: 38508 - DNA, 262 bp, Glycine max
  Clone ID: 700944315H1
agcatttcctaaacaaaccaaaaaaaaaaactctctcgtaataatatcatcatatctcactagacaaacacaaaaatgtcaccatacaattacactctcaaacacttggctctctttcttctcttcttgatcacttccacctcagcggcagccggaggcggcagaagaaagctccgttttgacatgtcaagtggcggtgcaccattggccggaacccccacaggggccactggctctggccatggtgcaaactgggactaca

SEQ ID NO: 38509 - DNA, 119 bp, Glycine max
  Clone ID: 700944317H1
attttcctttgtaatggaaagttagaaaccctcatcgtcaaagcacgcgttttttttaatctctctctctcaacaaatatttgtgggtagattcaattcaccatgtcgagctcatcgga

SEQ ID NO: 38510 - DNA, 269 bp, Glycine max
  Clone ID: 700944318H1
cttttagcaagttaacaacacttttgtcttcgttccattatctagttctcaattctcttcaccctttgcctctgaaagaaatgggtagtcttgaagcggaaagaacaacagtaggattggcagcaagagacccttcagggattctctccccatacacctacaatctaagaaacacaggccctgatgatgtttacattaaagttcactactgtggaatttgccattctgatctccaccagattaaaaatgatcttggcatgtccaactat

SEQ ID NO: 38511 - DNA, 120 bp, Glycine max
  Clone ID: 700944319H1
tgcagacagataaaataaggcaagaatccagtgaagacatgtctgtacttcgtggtctttcaatcgttttcgataggaagccagaactgaggttattatgggcataagaattaatttcca

SEQ ID NO: 38512 - DNA, 265 bp, Glycine max
  Clone ID: 700944320H1
gtggactttaaaatccgcactgtggagcaggatgggaagactattaaacttcaaatttgggacactgcgggtcaggaacgtttccggacaatcactagcagctactatcgtggggctcatggcattattgttgtttatgatgtcactgaccaagagagcttcaacaatgttaagcagtggctgaatgaaattgaccgttatgcaagtgaaaatgttaacaagcttctagttggaaacaagtgtgatcttacggcaaataaagttg

SEQ ID NO: 38513 - DNA, 264 bp, Glycine max
  Clone ID: 700944322H1
tgacatgatgcttctcgctcacaacgccggcggcaaagagaggacggaagagaactggaagtggctgttcaaagaaacaggtttcgcccgttacaacatcatcaagatcaacgctcttccttccatcattgaggcgtttccaatctaacgaagaggaagccactacacttcatgtgcgtggttttatgttgcatgtgttgatattattattaacagctatgtgatcttcgtgtgatgtggttttcatccctacccgtgttatgt

SEQ ID NO: 38514 - DNA, 254 bp, Glycine max
  Clone ID: 700944324H1
cgcaccctccccagatgcctctcttctccagagagtcctgagagtgatggtgcgcagaaagatcttcagtgcacaagaatcagagacaggagaaaccctcttcggcttgacacgagcctcgaagtggatccttcgcgacacgaaaatgaccctagcacccatgttgctgctggagaaccacccaattcacctgaaccctgcgcactacatcgtgagattattagagaaggcacaaaaaatggcatgctttcttt

SEQ ID NO: 38515 - DNA, 216 bp, Glycine max
  Clone ID: 700944325H1
gctcctattatcttggacttggtccttcttgctgagctcagcactcgaatcgagtttaaagctgaaaatgagggaaaattccactcattccacccagttgcgaccatccttagttacctgaccaaggcccctctggttccaccgggtacaccagtggtgaatgcgttgtcaaagcagcgagctatgctggaaaacatcctgagggcttgtgttgga

SEQ ID NO: 38516 - DNA, 257 bp, Glycine max
  Clone ID: 700944326H1
ggaatatataccgttgaagatgtcgtacaacttgtggtcagagatccacagagattgcggaatattcttgggagtggcatgtcaaacaaaatgtgggatgttctagttgagcatgcaaagacttgtgttcttagtggaaaactctatgtatactatcccgatgatgcaaggaatgttggcgttgttttcaataacatctatgagttgagtggtttaattaccaatgaccaatattactctgctgattctctctccga

SEQ ID NO: 38517 - DNA, 184 bp, Glycine max
  Clone ID: 700944327H1
ataaaacgcctcatttcctgttaagtaacacagtgcattttgatctgatatagtgaatagaaatggctaaaaacgagttgaggcttttgggtgcttggttcagtccatatgccctgagggtgcagattgcccttaacctcaagggtctagattatgaggttgttgaagagaccttgaatcccaa

SEQ ID NO: 38518 - DNA, 200 bp, Glycine max
  Clone ID: 700944328H1
acgtgagctcggcccaaattcaatggattcggtttcctccgaagcctccgttaatgataagattcctgccagtccacttcgggtgccgcccagtccgtcaagattctcaatgtctccaaaactcactagacttcaatcatagcatctcaatctgaaccaagttacaagagctacccaaaacttctcagaaacattacaaa

SEQ ID NO: 38519 - DNA, 171 bp, Glycine max
  Clone ID: 700944329H1
caccaaacttttctccggcacgatgtgttagtcctgcaaagggatcaaagtcaccattcatcaacagtagcaaccttccccaaagaggggtaggagttagcaaagttttgactcattttggtggcattgagaggaaagagaagtttgttccaaccttgaaaacattggatg

SEQ ID NO: 38520 - DNA, 257 bp, Glycine max
  Clone ID: 700944330H1
ctaaaaccttgatttttcccaatccattccacgcaccatatgactatcagatgctgacatggaggactacggtttcgagtactccgatgagtaggaagtggagcaagacgttgatatcgagaatcaatattacaattcaaaaggtatggtagaaagtgatccagaaggtgcgcttgctggttttgctcaggtagtgcaaatggagcaagaaaaagcagaatggggatttaaagctctaaaacagactgtcaagctat

SEQ ID NO: 38521 - DNA, 220 bp, Glycine max
  Clone ID: 700944331H1
gggatttcattaagaatatgattactgggacatcccaagctgactgtgctgttcttatcattgattcgaccactggtggttttgaagctggtatttccaaggatggacagactcgtgaacatgctctgctttcattcacccttggtgtgaaacagatgatttgctgctgtaacaaaatggatgctactacacccaagtattccaaggccaggtatgatgg

SEQ ID NO: 38522 - DNA, 261 bp, Glycine max
  Clone ID: 700944332H1
gaagttttcaaggaattttatcaaacaaaaactaagcacaggaaacttacttggatttattccttgggaacctgcaacattagtgggaaattcgatccagaaaactgtggagctgattgtaacaacttaccaggcttcggcattgcttctatttaattcctcagatagactgagttattcggagataatgtctcagttaaacttatctgatgacgatgttattagactgctccactccttgtcatgtgccaagtacaagat

SEQ ID NO: 38523 - DNA, 262 bp, Glycine max
  Clone ID: 700944333H1
tgaaagcattgtgatatggcgtggcggtttaggccgaggaagggaaggctgctgcgttttataaggattataggagatttgtgattgataggtctgcgaattgttcacttagtgttgttagcattggggagtaccatactggtgtcaatgcaaggaagaggaagaagcatcagaaagctgggttagagaagacgccactggatatgtaccaggcgaacacgttacctgttgttggagagattgttaatgacagcctccctgt

SEQ ID NO: 38524 - DNA, 264 bp, Glycine max
  Clone ID: 700944334H1
acgaaggtaaatttgatgtaagaacgactcgtttgacaacctgtgaccctcatgctaagcacacagttgtcaactccaacagtccccaagaggttgaagagggcaaggaaattatcttcacatatgatgttgaattccaggagagtgacgtgaagtgggcttcaagatgggatgcttatttgctaatgaatgatgatcaaatccactggttctctattgttaactcattactgattgttctcttcctttccggcatgggggaat

SEQ ID NO: 38525 - DNA, 135 bp, Glycine max
  Clone ID: 700944335H1
cttcttgctggctatgacaaagagacaggccctgaactgtactacattgactacattgcaacgcttcacaagcttgaaaagggggcttttggttatggctcctatttttcactctcaatgatggacagaccacta

SEQ ID NO: 38526 - DNA, 260 bp, Glycine max
  Clone ID: 700944336H1
gttgcggttgcttgggattaaaacaaagtccaagaaggttcacccgccaggtccaaatggacaaccgttgcctggacctggacctggacctggaccacacaatccttccggaaatgtaaactacatcgaggcaccaaaggctgctcctagtggttcttgggacaacgtttggggaaatgacgcaaatcaatgatacagtatgttgttctgctaaaagagtttgtccaaatacattgaaaagaagaaaaaaacagctgcat

SEQ ID NO: 38527 - DNA, 133 bp, Glycine max
  Clone ID: 700944337H1
atcagcagtaccaccaacaccaatggttgatgctggtagtggtagagagtttttcagatcatagacaacaaaacacaaaacaccgtagaagagaatctaaacggtttaaccttgttctttttaaaatatttcc

SEQ ID NO: 38528 - DNA, 257 bp, Glycine max
  Clone ID: 700944338H1
gtgttcactagtgatagtgaggtgttacaattgaccatggcagtgttacctataattggactgtgtgagttagccaattgtccacaaaccacaagctgtggaatcctcagaggaagtgctaggcctggtgttggggctgttataaacttttgctcattttatttggtaggagcaccagtggctattgtatttgccttttatcggaaacttcggatggtgggcctttggtatgggttgctggcagcacagatcgcatg

SEQ ID NO: 38529 - DNA, 256 bp, Glycine max
  Clone ID: 700944310H1
agatgtcgaagcgtggtcgtggtggttcggcggggaacaagttccgcatgtcgctgggtcttccagtggcggcgacggtgaactgcgccgacaacacgggggcgaagaacctctacatcatttcggtgaaagggatcaaaggccgtttgaaccgtcttccctcggcctgcgttggcgacatggtgatggccaccgtgaagaagggaaaaccgatctgaggaagaaggtcttgccagctgtcatcgttcgccagcgc

SEQ ID NO: 38530 - DNA, 190 bp, Glycine max
  Clone ID: 700944340H1
acaataggacgaatgagccgagagctagtaaagggaaccagctcggtctcgaagtcatatatgcaccagctgaatagactttcaagcttgcggatgctggaatgcggacaccataaaggcgacttaaatggattcgtcacttacgtaatacgcggtcctggaattagagtacctccagctatagtcacgg

SEQ ID NO: 38531 - DNA, 114 bp, Glycine max
  Clone ID: 700944341H1
atcaaaataggttgtcctcaagctgaaacccttgcagcatttgatgaagcaattgctgatggagttgatataatttccatttcaaccggacttgctagtatagtgtgcattccg

SEQ ID NO: 38532 - DNA, 251 bp, Glycine max
  Clone ID: 700944342H1
cttaactgccatatcagaacctccaaaactcatttgaatatatccattttgtttcctctcattaccttcttttttctaattagaaatgaagtttgttaagcttctgtaaagcagatatgtcagatcctcctcctcttcttcatcaagggtctggccatcctgccaccaagccataatcctctcttttagagtcaccaccaccaaaattatcaatgaggaagtctataacgacgacatcaacgtcgtcagcg

SEQ ID NO: 38533 - DNA, 126 bp, Glycine max
  Clone ID: 700944343H1
catattactactacatcactcactagcgactactagcctctctcgaaaactccaaaaatcatgatgccatatcatcgatattgatctccttagccatcagcatcccaagtgtccaaccttaagatc

SEQ ID NO: 38534 - DNA, 135 bp, Glycine max
  Clone ID: 700944344H1
caaacatggcaatgaagaagttcttgtgggttgttctgtccctttctttggtccttggagttgccaatagctttgattttcacgacaaggatttggtgtccgaggaaagcctgtgggacttgtacgatagattga

SEQ ID NO: 38535 - DNA, 247 bp, Glycine max
  Clone ID: 700944275H1
cgctcgagccgaatcggctcgagcggctcgagagcgaagaatcacacccgatggtgaggtgctgctcagctttaggacatcagttgttagttctgatggtatcctattacagtggaggccagaggatcctgacccatgtaaatggaaaggagtgaaatgtgatctgaaaaccaaaagagtaacacatctgagtctatctcaccataagttaagtgggtctatatcacctgaccttgggaagctagag

SEQ ID NO: 38536 - DNA, 206 bp, Glycine max
  Clone ID: 700944277H1
cgcgaagttaaacccctctccgacatagatgaccaacagggcttgcgtttccaaattccattcatactattctatggtaatgaaccatcaatggcagggaaagaccctgctaaggtcattagagaggcacttgcgcaaactcttgttttttactacccttttgcgggtaggattagggagggactcgtaaaaatttggggggggtt

SEQ ID NO: 38537 - DNA, 244 bp, Glycine max
  Clone ID: 700944278H1
agaaggttcaggatcttctccttcttgatgtcacccctctctctcttgggttggaaactgctggtggggtgatgacagtcttgatccccaggaacactactatcccaacaaagaaagaacaggttttctcaacctattctgacaaccagcctggtgtgtggacccaggtttatgagggtgagagaacaaggtctagagataacaacttgttgggcaaatttgaactttctggcattcctccagc

SEQ ID NO: 38538 - DNA, 177 bp, Glycine max
  Clone ID: 700944279H1
ctgatatctttaagacttggagacaaggtaggactggctttcctttggttgatgcaggaatgagagaactttgggcaacaggatggatacacaacagaataagagtaatagtttccagttttgctgtgaaaatgttgctactcccctaaaaggggggaatgaaatatttctgggaca

SEQ ID NO: 38539 - DNA, 215 bp, Glycine max
  Clone ID: 700944281H1
gttctattgggctatgcaattggtgtcgcaacaaattttaccatcttgagtcagattatagcatatcaaaagcctcaggttggaaaggagaagaaaacaaagtaatcgaattacattgcgtcgtgtatatctcttcatcctggccaactctcagcagacacagaatttggtcagtcttcaatcgaactttaccttgtttcaagtttcaactactg

SEQ ID NO: 38540 - DNA, 249 bp, Glycine max
  Clone ID: 700944282H1
gttccacacaagcaccttcacataaaattcaagtatcgaagaagaagatggctttaggtgttcctgctcttccgttgacatacgtggctcacgttctggcagttgttgccagcgtcttggtcgtggtctgggtcgtcaatttcaggggtggcttggcttgggattctgataacaagtccctcatcttcaacattcatccagttcttattgttattggcttactagttcatgggggtgaagctattataa

SEQ ID NO: 38541 - DNA, 247 bp, Glycine max
  Clone ID: 700944283H1
gggaaaagaactattacattacttctattgcaggggctaataatgggagctctcttgtggtgatgtcaaaaggcacacagtatacacaacaatcatacaaagtaagtgactcattcccattcaaatggataaacaagaagtggagagaaggttttcatgtgacctcaatggccactgctggaagtcgttggggtgttgttatgtcgcgaaatgccggattcagtgatcaggttgttgaacttgattt

SEQ ID NO: 38542 - DNA, 247 bp, Glycine max
  Clone ID: 700944284H1
tcttcttcttggaaaaggacttgcattctggaacaaagttggacttgcacttcaccaggagtacatctaatcaagccacgttcttgtcacgccaagttgcggattcgatacccttttcatccaacaaggtggactttatattcaacaagttttctgtcaaacccgggtcagaggaggctcagatcatgaagaatactattagtgagtgtgaagagggtggaatcaaaggagaggaaaagtactgtgc

SEQ ID NO: 38543 - DNA, 247 bp, Glycine max
  Clone ID: 700944285H1
ctcttgtccctatgattgctaggggagtgatgttgggtcctgaccagcccgtgatcctccacatgcttgacattcctccggcagcagagtccttgaatggggttaaaatggaattggtggatgctgcattccctcttcttaaaggtgttgttgccacaactgatgtggttgaggcatgcactggggtcaatattgccgtgatggttggtggattcccaagaaaagaaggtatggagaggaaggatgt

SEQ ID NO: 38544 - DNA, 248 bp, Glycine max
  Clone ID: 700944288H1
cccactccaaaaataacccaaactctcttttaaaaaaaaacccgaacacatagaaacagagaaagtgtgagtatcgccgccgtagccctaccctctcttcatattattctattgcctttctttaactccctcactttttcagttttgaagcgcttccagtggcgtatttacggttatacccttcttgttatgatagcttccaatcggcgtcagcactaggccgaagctcttggcttccacacatattt

SEQ ID NO: 38545 - DNA, 243 bp, Glycine max
  Clone ID: 700944289H1
ctttctgttctcttcactcttggtcttgcgagagaaagccatgccagagacgaagatttttggcatgctgtttggccaaacactcccattccaagttcattgcgagatcttctaaagcctggccctgcacgtgttgaaatcgatgatcaccctatgcaaattgaagaaacacagtacccgaaaaccttcttctataaagaagaccttcatccaggcaaaacaatgaaagtacaattcagcaag

SEQ ID NO: 38546 - DNA, 245 bp, Glycine max
  Clone ID: 700944290H1
atgatatcaacaacacagtcccaggcaaaacaaaactaacacaaacaacattaacaaaaggaaaaagaaaaaaaaaaatctctctctgtctctctttctaaaacctcaccctctggctgtggtgcagatctcaagggggatctgaggtgaggttttgattggggaggaggggacaagacgcctcctttttagggttttctgcaatggccacgcactttccatttcccctctccgctgctcaggtt

SEQ ID NO: 38547 - DNA, 240 bp, Glycine max
  Clone ID: 700944291H1
tttgggtttctcttcctcccttggagaaaaagaagagccaccgctgcgacgccgttcgtgcatttttgaggtgccgctgtcatgtttgggcgtggtggaccaaggaggagtgataactccaaatattatgatattctcgggatttccaaaaatgccagtgaagatgaaatcaagaaggcctatagaaaggcggctatgaagaaccatccagatagggggatgagctcctgaaatgtttag

SEQ ID NO: 38548 - DNA, 237 bp, Glycine max
  Clone ID: 700944292H1
caaaagtggaaagtaagcatgaggcatacgctggaccaaccaaacgcggccttccggatggtgggatattgatgagtggatgtcagactgaccaaacttctgcagatgcaagtcctgcaggcaacgctgccagtgcttatggtgcttttagcaatgcgatacaggctataattgaggagactgatggtgcaatcacaaaccaagaacttgttcaaagggcaagagagaagctgaaga

SEQ ID NO: 38549 - DNA, 242 bp, Glycine max
  Clone ID: 700944293H1
ctcagtttctctcaggagagtttgaagcaatatgctggggagttacacatgtcctttgagcttgagattctgagccttgaatctttaaattctgcttcctggccccagccacttcgtgactgtgaagctgtagtggttaacatgcctattggctctttctcaaattacccatcatatctacctttggtccttcgctttgtgaagcagctcatgccaaaaattgtggttacattggatagaag

SEQ ID NO: 38550 - DNA, 193 bp, Glycine max
  Clone ID: 700944294H1
gtttccattgccgcgacatctgaattcctccttgtcactcataatcaccaaatagaagccataaacaaatgaatgccatagcagcagaacaagtgctggagccatggcacaagctagacgacaaagtcgtttgggtgaggggttcttccgggggcctggggcaatatttctgcatccccccaaaaagggggtt

SEQ ID NO: 38551 - DNA, 179 bp, Glycine max
  Clone ID: 700944296H1
cagctttgcttacagttcctataattttttttctccattagattaccaagctctgcaactttgcttctcaacatggagtatcgtctcctacccatttttactttactcaatattgcactggtggcaacccatgctgctttaccccctgaagtttactggaagtcggggtttcctattag

SEQ ID NO: 38552 - DNA, 275 bp, Glycine max
  Clone ID: 700944301H1
ctgttccttcaccttctcaccacaattaccctcctacccctgcccctgctaagcctcctactcaccaccatcaccatcaccctcctgctcctgttaatccacctcctgttccggttcatcctccagttaaacctcctgttccggttcaccctccagttaaacctcctgttccggttcaccctccagttaaacctcctgttccggctcaccctcctgttaaacctccggttgttccggttcaccctcctgttaaaccccggttgttccggttcacc

SEQ ID NO: 38553 - DNA, 180 bp, Glycine max
  Clone ID: 700944302H1
accagctcaccgacgaccagatcgccgagttcaaggaggccttcagcctcttcgacaaggacggcgatggttgcattactaccaaggaacttgggactgttatgaggtcacttggtcaaaacccaactgaggcagaactgcaggatatgataaacgaggttgatgctgatggcaacggaa

SEQ ID NO: 38554 - DNA, 119 bp, Glycine max
  Clone ID: 700944303H1
ctcacattaatgtgtgtttgtcacgagacccatagtgctgccaaattatagtaactctctttctctatctgaagaagaagaagttctgaagaagcatgtgtggaggtgctatcatctca

SEQ ID NO: 38555 - DNA, 266 bp, Glycine max
  Clone ID: 700944304H1
gaaataagagcggatgtttagaattgtggaagcgaaaaaagcccgggaccggatggtttaaatttcaaatttattaaacagttttgggagatgttaaagcccaaaatcagccgattcattgctgaatttcatgctaatagggtattttcaaggggcaccaatgcatctttcattgctttgatcccaaaggtgaaggatccacatcatcttaatgaatatagacctatctcattaataggctgtgtttataagattgtggctaaact

SEQ ID NO: 38556 - DNA, 268 bp, Glycine max
  Clone ID: 700944305H1
tggttgtggtgagtgcacacatggcacatgctaggatcaactgcggccgtgtcgcggtcgcggtgtctccgtgccttggctaccttcgtcgcggtggaaggccacaggcgaggtgctgcaacggagtgagaaacctccacgccctggccaagaccaccgtggatcgccggacggcgtgcaattgcctgaaaacctttgccagaggtcttggtaggggtgtcaatgccaacaacgcagctgcacttccaagaaaatgtagagtcaacat

SEQ ID NO: 38557 - DNA, 266 bp, Glycine max
  Clone ID: 700944306H1
ccccaagctaaatgttgtggctccatggagggagtgggatattacaggtagagaagatgctatcgagtatgctaaaaagcataatatacctgttcctgtgacaaagaaatccatttatagcagggataggaatctttggcacctaagccatgagggtgatattttggaagacccagctaatgagcctaaaaaggacatgtacatgatgtctgtagacgctgaggatgctcctgatgaagcagaatatgtggaatttgagatagagt

SEQ ID NO: 38558 - DNA, 266 bp, Glycine max
  Clone ID: 700944307H1
gagtgagtgagtgagcaagagtgaagagcgaagagaatggctcccaagtgcttaatctttttggctgtgttatgcttctcagcactgtcactgagtcgttgtcttgcggaggataatggacttgttatgaacttctacaaggaatcatgccctcaggctgaagacatcatcaaagaacaagtcaagcttctctacaagcgccacaagaacactgctttctcctggctcagaaacatcttccatgactgtgctgttcagagttgtga

SEQ ID NO: 38559 - DNA, 263 bp, Glycine max
  Clone ID: 700944308H1
ctagcttccaaaccctaacactcctcttcctcttcgatcatcacctctccacaatgccgccgaagttcgacccctcccagatagtcgacgtcttcgtccgcgttaccggcggcgaagtcggcgcggcgagttccctggccccgaagatcggtcccctcggtctctcccccaagaagatcggagaagacatcgccaaagaaaccgccaaggactggaagggcctccgcgtcaccgtcaagctcaccgttcagaatcgtcaggcg

SEQ ID NO: 38560 - DNA, 214 bp, Glycine max
  Clone ID: 700944309H1
gcggcggcgtcttcgccggagagttctacttctagagtctcctccttccactcgtcgccgcgctggcagctctacttcaacgagatcaaagataccgataagctcgttgtgatagatttctcggcgtcgtggtgcggtccttgcaaattcatagagccagcgattcacgccatgcgcgacaagttcaacgacgttgacttcgtcaagatcgacg

SEQ ID NO: 38561 - DNA, 245 bp, Glycine max
  Clone ID: 700944274H1
gtgaaccctctctataaaagcgcttccttctcatttggaacctattccattctctaaaccctaaacgactctatctctcttcgttttgttcttccttgcgctcctcctcgttcgttcgttctccctcgcgtagatcggcaatggcggagaccgagacgtttgctttccaggctgagatcaaccagctcctcagtctcatcatcaacaccttctactccaacaaggaaatcttccttcgtgaactc

SEQ ID NO: 38562 - DNA, 249 bp, Glycine max
  Clone ID: 700944243H1
ctttgtcaattattggaaatgaatcagtgataaatattgaaactgatcgcacctcttgctttgaccgtaacaaggttgcactccgattggaggtgttatgtgacagcaaaggtgacaacatctgccccgctgatggtgttggtgtctataaccctggtttctggggcatgaatattgagcaagggaagaaatacaaagtggtcttctatgttcgttcaactgaatcacttaatctaacagtttcattaa

SEQ ID NO: 38563 - DNA, 250 bp, Glycine max
  Clone ID: 700944244H1
ggtaaagaaagaaagagaagagaagaatcgaagacgaagatggaggacgcatcagcatcaaagttcattccacaccaaatcggaggcgtccaaaacgacgcgcttcgattcggtctccatggagtcaagagcgacatcgttggttctcaccctcttcaatcttcactccaatctacaaggagaatggatgaagcgatgaagaggcaatgcaaagttaacctgtacggaactgcttttcccatgaaggagg

SEQ ID NO: 38564 - DNA, 249 bp, Glycine max
  Clone ID: 700944245H1
gattctttttgttccatcttccatgcttcaatttgaatgttttcccatttcaattctctctcacaccgctttagaaactttcctaaaccctgctctccattttcccttgtctcttcctttctctctctacaaagagtgtgtgtgagagagagaaggatttggaattttggataactagagcgaaaggttgacaccaccaaaaaccgaactgttcccagatctctctctctctctctctcttccaacaat

SEQ ID NO: 38565 - DNA, 248 bp, Glycine max
  Clone ID: 700944246H1
catttccttatctatattcacctccatcttaaaacagttcccctagaaacttcgatctgaagatgggtggcattgcatttggacgctttgatgattctttcagtttaacctcaatcaaggcctatattgctgagttccattcaaccttgctctttgtttttgccggtgttggttcagccatagcctatggtaagttgacatcagatgcagcacttgatcctgctgggttactggcagttgctatttgc

SEQ ID NO: 38566 - DNA, 169 bp, Glycine max
  Clone ID: 700944247H1
ctcgagccgtccgcggcttcaaccttgtagttattctctttcttcttttttagctatccctctcttgaaaaatctagatctcgttcttccttgatctacgttacgcttttagtgaccggatctgtatggatctgaaccagatctacacgccgatggtggttttggcctg

SEQ ID NO: 38567 - DNA, 250 bp, Glycine max
  Clone ID: 700944248H1
caaggatttcgcggcgtgggcaaaacccgaaaccgccgatgattccatgtgggaggacgcacaggaagccttcaccaaaagccccacactggttaggtcaaaccaagacctaaaagaagagttcgaagaagcttccaacggtggaattcagagccttgctttgggtgctttggacaacagtttcttggtgagtgataatgggattcaggttgtgaagaatttcgcacatgggattcatgggaagggtgct

SEQ ID NO: 38568 - DNA, 255 bp, Glycine max
  Clone ID: 700944249H1
ggtgacagttcgttctccgttggctacttcagccgcgagcggctctccgtgaccgccaccgacatcgtcgacaacttcctcttcggttgcggccaaaacaaccagggcctctttggtggctccgccggcctcatcggcctcggctgccaccccatctccttcgtccaacataccgccgccgtatatcgtaaaatcttctcctactgcctccccgccacctccagctccaccggccgcctcctcttcgacaccacc

SEQ ID NO: 38569 - DNA, 255 bp, Glycine max
  Clone ID: 700944250H1
agaaaaagcaaaaacactgaatacaccaaaaatggccaaaagcaaaaactgtcatgctttgcctcttctccttgccctgatcctcttcttcactcttcttggaacctctcacgcaggtggcatagccatctactgggggcaaaatggtaacgagggcaccctctcagaagcatgtgcaacaggcaaatacacccacataaacatagcctttctcaacaaattcggcaatggccaaaccccagaaatgaacctggc

SEQ ID NO: 38570 - DNA, 248 bp, Glycine max
  Clone ID: 700944252H1
gcaagtcctgacggtggcgcaagccgtggaggacaagatcgacgacgagatcgccgccctggagcgtctggacgccgatgacatcgaggccctccgcgagcgccgcctccagcagatgaagaagatggcggagaagcgctcccgctggatctccctcggccactccgaatattccgagattccctccgagaaagacttcttccccgtcgtcaaggccagcgaacgcgtcgtctgccacttctaccgcg

SEQ ID NO: 38571 - DNA, 249 bp, Glycine max
  Clone ID: 700944253H1
gtgttgcaaactttgttgggaagccagctgctatagtttttggtatgggctatgtgacaaactctgctattcttccagtcttgatggggaagggaagtttgattattagtgattcattgaaccacaactccattgttaatggtgcacgaggatcaggagcaacaattcgcgtttttcaacataacgagccatctcatctagaagaagtgttgagagaacaaattgctgagggacaacctaggacacata

SEQ ID NO: 38572 - DNA, 231 bp, Glycine max
  Clone ID: 700944255H1
gagaagggttagaaggcgaagaagcatggcttcactcaagaagaagaaaccctattacccgcttccgttaattcctatctattactacttcttattcaaagggtgatatgatcttcttcttccaagagtctcatgcatgctactttctctctcttctcggagaatgcagcgtgtggtcgattgttgctagatcagcacataactgtaactggttatatatctcacttgcac

SEQ ID NO: 38573 - DNA, 124 bp, Glycine max
  Clone ID: 700944257H1
cttgttctttctttcctaccccaaatttgtttttcgccttgtatctctcaattcctctgtttccttcttcgttcatctttgcgtcagggccagaggttcctctcagtctcagtcggccacacaa

SEQ ID NO: 38574 - DNA, 248 bp, Glycine max
  Clone ID: 700944258H1
gacgagaaaagaatgagtgaagaaggtcctccaaagctatataccaacaagcccggaaaagcgcaactgaagcagtttcgggggcaacagaaatcgaacgggttctcctcgccggcggcgatggatacacacgcggctgctccgccaccgccgccaaaggaaccctttattcggcgctacaagttcgtttggcctgtgcttttggctgtgaatctcggtgtcggagcttatttgtttatggggacaaa

SEQ ID NO: 38575 - DNA, 245 bp, Glycine max
  Clone ID: 700944260H1
ctcagaagaaaagaaaagcaaccaaaaatggttctcacatccactgccacacacccagatgaacaagaccagagcctaaactatacttttgcttccagatatgtgcgtgaacctattccaaagttcaagatgccggagaaatccataccaaaagatgctgcttatcagataataaacgatgagttgatgttggatggtgcaccaaggctcaacttggcctcgtttgtgaccacttggatggagcc

SEQ ID NO: 38576 - DNA, 246 bp, Glycine max
  Clone ID: 700944261H1
gctatgggttagagataagggctcagggtcatgaaaatccgaagagacaaggaggtgttgctgattttccattccgtgcctattttgtcccttctttatcagcagttcagctgtttaagaaccatgaaaatttatgtgtaaataacggtgacaggctcccaaattctgaggtttcagaggcatgtgaaatggttgacatttcagcaaactcatctactgccagtcaacattcaatattttctgttc

SEQ ID NO: 38577 - DNA, 206 bp, Glycine max
  Clone ID: 700944262H1
acttggtacacctctgtcacaaatgatatgtttcatacttgatgctttgaccccgtcattagtgaccacattgaggtccaaatgatgcgtgtttcgtgactatttctatagtattgtgacttgattcagaatgtggaactttgcatctagtgtaatggctgaaagtttgggtccaataatggatgcgggaaaacccaactcaccct

SEQ ID NO: 38578 - DNA, 151 bp, Glycine max
  Clone ID: 700944263H1
atttagcggcaaagcaatctacagccttcaattaccaacaagaatatgaagcaaactctcttcttctccttccttctactcaccaccattttctcaatcaccactttagctcagtcaccagctgaagcccctaaagccccagcaaaactgg

SEQ ID NO: 38579 - DNA, 251 bp, Glycine max
  Clone ID: 700944265H1
gtgcagtggagaaacaagacaaagcaccacaagttaacataggttcacttatatattactatcaagtcttattattaatacttgtaaatagagcattatcaggtttcacctttcattggtagcaaagtgatcattcagagaatagaagcctgatcaggttgaatgtacactcatcagcaacatcaaggatagaacattcactcttcttccagaatgccaatcccttctgagaggcagatgttccttcaaac

SEQ ID NO: 38580 - DNA, 252 bp, Glycine max
  Clone ID: 700944266H1
gtttattattattatacttatattgtaccattcctcttgagcctagtagtaatagtgaactggagtgatgctcaagtgtgttgtgtgtcagtgttttagggaccaatggtggagagtgagttttctgagttaagatataagatatatgctatctaatgcctagtgggatataggaaaggacctcaaatctgctatctttcgttcacatacgcatcatattcttttaattgttagttctgagttctgaccaaa

SEQ ID NO: 38581 - DNA, 248 bp, Glycine max
  Clone ID: 700944267H1
gagagagcagaggaaaaggggaagaaaaatgttgagtgcgacggcgatcggcgcgttattgggtttgggaacccagatgtactccaatgctctccgcaaactcccctacatgcgccatccgtgggagcacgtggtcggaatggggttgggcgcggtgtttgtgaaccagcttctgaaatgggaggcccaagtggagcaagacctcgacaagatgctcgaaaaggccaaggccgccaacgaaagacgtt

SEQ ID NO: 38582 - DNA, 157 bp, Glycine max
  Clone ID: 700944268H1
ctcgagccgaatcggctcgagcggctcgagaaagaaaattattgaactctaatttttatcactcttatttttgtggtacaatataagtaactttattttcttctacttggttgtatacattattataataagtctatgtatttaaacgtttgagact

SEQ ID NO: 38583 - DNA, 249 bp, Glycine max
  Clone ID: 700944269H1
tttcattcataccgttcgcaacacgatcactattctgcgacgatggtggcacattcgagttcttggggaagggcactcgtcgcgatctcgccctacaccttctccgccatcggcatcgccgtcgctatcggcgtctccgtcctcggcgccgcctgggggatctacatcaccggaagcagcttgatcggcgctgcaatcagggctcctcgaatcacttccaaaaatctcattagtgtaatcttctgtgaa

SEQ ID NO: 38584 - DNA, 237 bp, Glycine max
  Clone ID: 700944270H1
gttctagatcgcgatctagaactagagataagatgatgctatcattcatatctttaatttattatagcttctgcattgcatatgtcagctaatgtaaaatagaattatgcgtgtcaatttactttcgattgttgtcagacattcaacatgaaaattatagtttgctgaactggttatgatttcatcaaggtttttgaaaaaattagcttcaaaaaaaaaaaaaaggggcggccgccg

SEQ ID NO: 38585 - DNA, 222 bp, Glycine max
  Clone ID: 700944271H1
gatcaagacgcattctgagtccattagctacccaattgctctttggattgagaaaactactgagaaggagatctctgatgatgaggatgatgaagagaagaaggatgaggagggtaaggtggaggatgttgacgaagagaaggagaaggaagaaaaacagaaaaagaagattaaggacgtgtcacatgaatggtccttggtgaacaagcagaagcccatttg

SEQ ID NO: 38586 - DNA, 249 bp, Glycine max
  Clone ID: 700944272H1
cccaacgaagatatgtttttctctttttttcctacggtgtggccaggctgttcactttagcgaaggatcaaaaaccctgtgaaagtgtgtttgtttggtcgagttgattgaattcgctggcagcttacagctatgatcatcaacaacgccccttttcctctatgattgattcgattcgattgaagtcgattccgtagagagtgagaaatcagatcacaataatcatcgatgggtaatttgttcgtgaag

SEQ ID NO: 38587 - DNA, 249 bp, Glycine max
  Clone ID: 700944273H1
cgctcgagccgaatcggctcgagcggctcgagaaagctttggtttcagttttttgtcatcacactcagctggtcggtgcttaacgatccagcgccacagattcaatttgacactggaagcaacttttcatttcaaagattaagtgaaaacatggttgtccttgctgcttccattgtgagcaaatctggcaaagttctagtttctagacagtttgtggacatgtctcgtatcagaattgagggacttcta

SEQ ID NO: 38588 - DNA, 254 bp, Glycine max
  Clone ID: 700944241H1
ctctttcttcctcttcctcagtagtgattttcgattctcttctctgcaactatgcctaaccctaaggtcttcttcgacatgaccatcggcggtcaacctgccggccgcatcgtgatggagctctacgccgacgtgactccgagcaccgccgagaacttccgcgcgctctgcaccggcgagaagggcgccgggcggagcggcaagcccctccactacaaaggctcgtccttccaccgcgtgatcccgaacttcat

SEQ ID NO: 38589 - DNA, 258 bp, Glycine max
  Clone ID: 700944205H1
atcaaatttgcaacaaataacttctctgatgcaaataagcttggtcaaggtggattcggaattgtttataagggtacgctctctgatggacaagaaattgcaattaaaagattgtctatcaattctaaccaaggagaaacagaatttaagactgaaatttcgctaacaggaaagcttcagcaccgaaacttagttagactacttggcttctgttttgcaaaaagagaaagattattgatatatgagttcgttcccaat

SEQ ID NO: 38590 - DNA, 246 bp, Glycine max
  Clone ID: 700944206H1
cgaacgggaaatgagggcaccgcacatatttgaatttgcatattatcgagaaaggagctagtatgcatcgcttccatatcggggacaaattgtacaccagggtttttcatagggttctgagttccatctctcttcttacctttcactttttgactatttttccatgaaccctatggaaaacaacagcagcacaaatgccacatcaaaactaccccgcagagcaaaaagaaaaaagaagggtctggg

SEQ ID NO: 38591 - DNA, 216 bp, Glycine max
  Clone ID: 700944207H1
gataaagtcatatgtgaatctgcaatcatagtagagtacatagatgaggtttggtccaacaatgctctctccatccttccacaaaatgcttatgaccgagctaatgcccgattttgggtttcttacatcgatgacaagtggtatacgtccataaggaatactattttggctgaagcggctgatcaagatgatgaggcaaagaagccacactttgtg

SEQ ID NO: 38592 - DNA, 259 bp, Glycine max
  Clone ID: 700944208H1
cgccgccagcggagaatgacgcgatgaaagtggactctcgcggcggctccgacgccggcaccgaaaaggaaatgtcagctcctgtcgcagatggtaatgatgcactcactggtcacataatctcaaccacaattgcaggcaaaaatggcgaacctaaacaaaccatcagttacatggccgaacgtgttgttggcactggatcatttggcattgttttccaggcgaagtgcttggagactggcgaggcagtggctataaa

SEQ ID NO: 38593 - DNA, 195 bp, Glycine max
  Clone ID: 700944210H1
aacttgcttgcactacgctgcttattatgggcatatagactgccttaaggccattctttctgctgctcattccacacctgttgctgatccttggggatttgcaagatttgtcaacataagagatggaaacggtgccacccctctgcatcttgcagctcgccatagacggtcggaatgtcttcatgcccctttaga

SEQ ID NO: 38594 - DNA, 254 bp, Glycine max
  Clone ID: 700944211H1
gttaaggcaggccaaactattgcaacggccggcttcggtgccggtcttacttggggttcagcaattattcgttggggctgaatgcttttcttttacggcagaattgcaaatagagaagaatcagttgcaagtgcagctgtccaaataccccacattcttacacaattgtagaaaatggggtttggggaatttgcaaaaggattgatatcattaacatccagcactccctgaaattgtccctttcttttgtctta

SEQ ID NO: 38595 - DNA, 85 bp, Glycine max
  Clone ID: 700944213H1
agacatcattcccttgaaagtgactatagcattgggttctatgtatctgtacctgtaaaacttagatggcctgttcttgccatag

SEQ ID NO: 38596 - DNA, 254 bp, Glycine max
  Clone ID: 700944214H1
aactagtaatatttattagaatttgccagagaattagaagaataaacataataccccagatggcttcaaaaacttgttcctcccttgcccttttcctcacactcaacctcgttttcttctcacttgtctctgcatgcggttatacaccatgccctggtccaaacccaaagccaaggcccaaccccaaccctaaccctaaccccagcccaagtggctcgtgcccccgtgacgcactcaaactaggtgtatgcgcc

SEQ ID NO: 38597 - DNA, 195 bp, Glycine max
  Clone ID: 700944215H1
ctcgagccgctcgagccgattcggctcagggccgcgtctacaccgtagttatcgtgaactgcacatgcccgattcccgtaaacgccgacaactcaggcgggaagctcgtcctctttgcctccacctccggcggcgccgacgcagtttaacaacaacggcaggactggagctcctaacggaccaacttggaacctc

SEQ ID NO: 38598 - DNA, 127 bp, Glycine max
  Clone ID: 700944216H1
ttttctcactgtcttgtctctccagagaactgtatagagagagatggcagctgcaacatctggtgctgtgttaaatgggttgggatcttccttcttgagtggaggaaacaggagccaaacccttctg

SEQ ID NO: 38599 - DNA, 259 bp, Glycine max
  Clone ID: 700944217H1
aaagaattggatgaagtttcatgtcctatctgcatggaccatccacataatgctgttctcctcctttgcagctctcatgagaagggctgcagatcttacatttgtgatacaagttatagacattcaaattgcctggaccgttttaaaaaaatgagggacaattttaaggagaaccaaaatttacccagttctttagtaaacacaaacaattctggtaatagttttgatattaaccttactgtgcaatctgacatgcatg

SEQ ID NO: 38600 - DNA, 251 bp, Glycine max
  Clone ID: 700944219H1
aacaaagaaaaaaaaaaacccttagccaacacaaccatcatggccacctctgctattcagcaatcagcattcactggtcaaactgctctgaagcagctcaatgagttcgtccgcaagaccggtggcgccggcaaaggtcgcactaacatgcgccgcaccgtcaagagtgctcctcagagcatttggtatggccctgaccgtcccaagtacttgggtccattctcggagcagattccatcatacctgaccgg

SEQ ID NO: 38601 - DNA, 257 bp, Glycine max
  Clone ID: 700944220H1
attcagtgagcgagaaagtgagaagatgctggcaccaattttcattttcatataaaagaagaatcatcatctgtatagattactagttatttactaaacagacaaatgggtttcagagtattaggagtttctcttcttatcttcatctatctcattaatcttgctcctgcatatcctcttcaaaacaaattgttttcagaatttgtgcagaatagcaagtacgaagataagggaatatatgaaagtaagatagaagg

SEQ ID NO: 38602 - DNA, 271 bp, Glycine max
  Clone ID: 700944221H1
tcggcattcggctcacctcgagcgaatcggctcgagaaaagaaaagctagcgtcatcggaccttctccggcgtcgaccatcgccgtcgcagacaccgggcccatggctcatccgccgttggatccgtactacctttaccaacaacaagatgagcggacaacatcaacacgttatttgtctccggtctcccagacgacgtgaaggcgcgtgagattcacaacctcttccgccgccgccccggcgtcgactcctgccaactcaagtacaccgg

SEQ ID NO: 38603 - DNA, 256 bp, Glycine max
  Clone ID: 700944222H1
atccgaagctccaaaattcctcctaagtgcagtaaccgaaacccaatgacccacctagccatggtttggcttcaaacatggctccctgaaccctagcgtttctccctcttcgccaacaacgctgatccgatcccgatctgtttctgattccgatccgagccaatccaatggctggggcagcctcggctctgttcctccttgacatcaaaggccgcgtcctcatctggcgcgactaccgcggtgacgtcaccgccgt

SEQ ID NO: 38604 - DNA, 254 bp, Glycine max
  Clone ID: 700944224H1
ctcgagccgcaagaacaatatcaacgacaacgagttgaagagagtggttttttcaacttagaataatggcggtggagtatcagtgttgtgaaactcagtttttcttacggttattgataattctgctgcttgtgttgtatgctggattgatgtcagggctcactttaggactcatgtccttgagtcttgttgatcttgaggttctcgctaagtctggcacccctcaggatcgcaaacatgctgcgaagatatta

SEQ ID NO: 38605 - DNA, 236 bp, Glycine max
  Clone ID: 700944225H1
cttttggggtttctccagaaggcaatattgaaggcaggtctaaagggtttttcttctgctgttactgatgacacaatgcactcacaattctttcaatggggccgtcccaaatcacagtgtggcaatctgaataaaccccagcaaatgttacatctagaatcttaacaagaaaaacaagtcagttttgttcaccttgattccaggtcctcagcaagagtagcaagccatactcttta

SEQ ID NO: 38606 - DNA, 249 bp, Glycine max
  Clone ID: 700944229H1
gtccctttggtcttcatcttctgttctgatccaggtatggcttctaaacgcatcttgaaggagctcaaggatttgcagaaggatcctcctacctcatgcagtgcaggccctgtggctgaggacatgtttcactggcaagccacaatcatgggacctgctgatagcccatatgcaggtggtgttttcctagtttcaattcattttcctcctgactatcccttcaagccaccaaaggttgcttttcggact

SEQ ID NO: 38607 - DNA, 176 bp, Glycine max
  Clone ID: 700944230H1
tttcttcgttccttccccaacccaatcttcgccttcgcccacaacaactcctccttcaggatcgctgccaacgttactttccatttttacccttcatcctcgagaaaaaaatggcgaacgcagcatcgggtatggccgtccatggtgagtgcaaccaaagttttggggccctgggg

SEQ ID NO: 38608 - DNA, 85 bp, Glycine max
  Clone ID: 700944231H1
ctcgagccgattcggctcgagagatctttccaatgaattaggatctcttagttggataaagtatcctgtggagtgtttgccacca

SEQ ID NO: 38609 - DNA, 76 bp, Glycine max
  Clone ID: 700944232H1
tggggagcccgattatcgccatgacacgtgtgatctgtagctgcgtaggcctatccatgtacccaaggggaatcat

SEQ ID NO: 38610 - DNA, 257 bp, Glycine max
  Clone ID: 700944233H1
gcttcttttcttctggggggcaaaaggggtcacttttcagatccgagattgagctcctttacccatcatcatcatggagctcctcgggtacctgaatcagggtcacccttctagaggaacaacacttgttattactctttcattggtgctttcgacacttgtgtccttctcacatttcacacatgccttctcacattctgcgtttccggaactgaatcctataaaacctaggcactcacgtcttctcaggagtgccg

SEQ ID NO: 38611 - DNA, 257 bp, Glycine max
  Clone ID: 700944234H1
actggaagccttgttgtgagtaagggaaaggcttcctgcactgagcaccaagttgaaacctcttgattctttgcttagaattccacagaatatggaaagtattcttttcaatgactccccacctttggagttcaagggtatgagcaaggaggaggaagactcattgctagggcaagttgaaatatggaggtacatgacatgcttcacggactccgtggccttgaaatccgtcatagagctgcgcatagccgacataa

SEQ ID NO: 38612 - DNA, 250 bp, Glycine max
  Clone ID: 700944235H1
aattgggcaacttttagtgctggtgagaggtcgcgccacgacgattctccagattacaccatatttgttggtgacttggctgcagatgttactgattatcttcttcaggagacatttagggctcgttataactcggtgaagggtgcaaaagttgtcattgataggctaactggccggaccaatggatatggcttggtaaggttttcagatgagagtgagcaagtgagggctatgactgagatgcaagggg

SEQ ID NO: 38613 - DNA, 256 bp, Glycine max
  Clone ID: 700944236H1
atggcaatgactttaggtaccttccctttggggttggcagaaggagttgccccggaatcattcttgcattgcctattcttgccatcactttgggacgtttggtccaaaactttgagctcttgcctccccctggccagtcccagattgacaccagtgagaaaggagggcagtttagcttgcacatactcaagcattccaccattgtggcaaagccaaggtcattttagacttcaccacatgatcatatgattgtggg

SEQ ID NO: 38614 - DNA, 251 bp, Glycine max
  Clone ID: 700944237H1
cttttcttttttgtatgttaggctatatctccccatgaattgccgaaaatattcaaaaatgccttgtcttctaccatactaattgagatcatcaagtgtcttgcatctcttttcactgaggacatggatctggttgtcagttatttggagcatttgaccaaggtaccaagatttgatgtgattgtaatgtgcctttcatcaacaaataaggatgacatacgcaagatctgggatgaagtgttcagcggtga

SEQ ID NO: 38615 - DNA, 253 bp, Glycine max
  Clone ID: 700944238H1
atccctttgatcttctccgaactatattagcttctcaaggtgaaccaaaggtatatccaaacatgaggtctgcattcatggatatcatccatactcgtggattccaaggcttgtattctggattatcgccaactttagtggagattataccttatgcaggcctacaatttggcacatatgatacatttaagcgttggggcatggcttggaatcatagatactccaacacttctgcagaagataacctctctag

SEQ ID NO: 38616 - DNA, 261 bp, Glycine max
  Clone ID: 700944203H1
ggaggagacaacacaaagtgcaaaaaaacagaaattaaacactactagtagctagctagggtgagaaaatgggtgaagctaaggaaatatggtctgcaccaataacccctagaacagcttcagtagtaggaacacctgttgtggcatctccacctgtgtcatgtccaccctctcagcttcactcaccatctctaacaaggtcacctctacttcaccctgaggatggagatgcaccacgtcgtaaaacatctaagactccaa

SEQ ID NO: 38617 - DNA, 54 bp, Glycine max
  Clone ID: 700944239H1
ggtgaagcccaccaactcatctgtaaaatttgcactatatataatatgtatgtc

SEQ ID NO: 38618 - DNA, 74 bp, Glycine max
  Clone ID: 700944169H1
gcaaagtgtcttctctttctcttcctttgctttgcatccatcgttaataggattgcaatgcattgaattcaaag

SEQ ID NO: 38619 - DNA, 245 bp, Glycine max
  Clone ID: 700944170H1
cgatgccctggctaaaatggttgatcctacattggaaggattataccctgtgaagtccctttctcgatttgcggatgttattgctctgtgtgttcagccggagccggaattccgaccacctatgtcagaagtggttcaagcgctggttcggttagtgcagcgtactaacatgagcaagaggacgtttggaactgatcaaggaggatccaacagagggggtgatgaccaagatacacaagacatgt

SEQ ID NO: 38620 - DNA, 227 bp, Glycine max
  Clone ID: 700944171H1
agatcccaaagttattcatcatgcactggataatatccacaaccacaagattatcactgagataaaggggcagcaggaggagccaatttttgctgagaggatggacttggaactccatgactacccaccgtatggggctaatggtcatcacactccaaaaccaccatatccataatatgtgtacaattgcttcgtgttactggtaataccccaatgacacataatat

SEQ ID NO: 38621 - DNA, 245 bp, Glycine max
  Clone ID: 700944172H1
atcggatcgatcaagcatcagggagctttgagggttgattctctggtgtagtagcaatcagcacaatagaaaatgttttttgacggatatggatatcatgggacatcatttgagcagatatatcgatgctacccagcttcctttattgaaaagccccaaatcgaaagtggtgacaaaattatcatgcctccatcagcccttgaccgtctagcatctctgcatattgattacccaatgttgtttga

SEQ ID NO: 38622 - DNA, 247 bp, Glycine max
  Clone ID: 700944173H1
tgcaattacaattcctataatttgcaatcctttccaatatcatctaaaccttcatttaattaacaaaaccaaaatgatgaataggcaatctgtcttgcccttctcactagtactgctagtttcatttctgtattgcacctccaccttagcccaattatcaccagcttctgcccctctcaaaccaccccaacctacccctaccccaccagctgcggctcctcaacaaccattggttccttcattgcca

SEQ ID NO: 38623 - DNA, 246 bp, Glycine max
  Clone ID: 700944174H1
cggaatatcatatgataagtaatagttagggatagggatgacaggatttgaacccgtgacattttgtacccaaaacaaacgcgctaccaagctgcgctacatcccttttccatttgtttctagtgttattgtaaagaatctttgtcttgttttccacatttttatctgttgatatatagatatatatataatatatatctatcatttttctaattttctgccattttttttagtttcctatactat

SEQ ID NO: 38624 - DNA, 68 bp, Glycine max
  Clone ID: 700944175H1
cttgaagtgcatgacaattgatttttcatatatacttgtgatcttatatatgacaaatctatatggtt

SEQ ID NO: 38625 - DNA, 244 bp, Glycine max
  Clone ID: 700944176H1
agaacttcgtgaagaagcacactggtcccggcatcctctccatggcgaacgccggtcccggaaccaacggatctcagttcttcatctgcacgacgaagacggagtggctcgacggaaagcacgtcgtgttcggacaggtcgtcgaggggatggacgtcgtcaaggagatagagaaggtcggatccagctccggcaggaccgccaagccctcgtcgtcgccgactgtggtcaactctcttagata

SEQ ID NO: 38626 - DNA, 114 bp, Glycine max
  Clone ID: 700944177H1
cttgcgtatatcactatatgcgttgtgttctgtaggttgtgtgcatcacacaatcaattaagaagctgtgattctgattcagaatcagaatgttgcgaagatggagcaaagcag

SEQ ID NO: 38627 - DNA, 229 bp, Glycine max
  Clone ID: 700944178H1
gtttgttgttgtaactcgttcttcttcttttgttgttctgtgtttgtgtttgttttttctctcacctgaaaatgtgttgctgcggtggtaactgtggttgcggaagctcctgcaagtgcggcaacggctgtggaggctgcaagatgtacccagacttgagctacactgagtcaaccaccaccgagaccttggtcatgggagtggcaccggttaaggctcaatttgaggg

SEQ ID NO: 38628 - DNA, 118 bp, Glycine max
  Clone ID: 700944179H1
ctttttctacttaccttttctctgaatccaaatacgatggcagccatggcaaccacaaccctctcttcaaaccccaaactctcattcttcaacggaaagcccgtcacatattcttccc

SEQ ID NO: 38629 - DNA, 229 bp, Glycine max
  Clone ID: 700944180H1
caaccccgttgtccggagccaccattttgcgctccggcaatgttcttcccggtggccatcgtcgcgtaaagccaccaaacttcaaagtcatgggtaatcactgggacgaagtcgttgtgatccagcaagggagggatcacattgagccttgaatcgtaacggccaattgcccggaaaaggctggtctcggttttgatcttgcaggattcatctcgaatttgggtttcgg

SEQ ID NO: 38630 - DNA, 238 bp, Glycine max
  Clone ID: 700944181H1
actttttaggccaggctatattatgtcctaaactttgaaatgtttcagtcgtattcaatttgtaaaattggttgtgctttgtggtgaccattttgatctcgctagtttcctgtgtctgttttttcagacaagtcatttgcaatttgaactggccatattcaactggtttagttaggtgacatggcaggaaatggtgaggtccagatgaatggttagcaattcggaactgatttcacaa

SEQ ID NO: 38631 - DNA, 249 bp, Glycine max
  Clone ID: 700944182H1
ctccgaaccctcgatcactctcacgcgctcctatattcgctcctccaccgtcgctctctcgaacaaccacaacaccatcctcatcacatggcaaacgcagcatctggtatggcagtccatgatgactgcaagttgaggtttttggagctgaaggcaaaaaggacacaccgtttcatagtttttcagattgaggagcagcagaagcaggtcattggggacaacttggtgagcctgcccagggctatgaag

SEQ ID NO: 38632 - DNA, 246 bp, Glycine max
  Clone ID: 700944183H1
gggttctcctaacatcgagatggacgagcacagtttcatggtgaacagagaaagagctgttgattacttgaactccttggacaaggtcttcgtcaatgaccaattcttgaattgggccccgaagacaggatcaaagtccggattgtatctgccagagcttaccattcattgttcatgcacaacatgtgtatccgccccactcctgaagagctggagaattttggtactcccggacttcactatata

SEQ ID NO: 38633 - DNA, 246 bp, Glycine max
  Clone ID: 700944184H1
atcctattccctatggctggtgcgacttgcgaggtgtagacatgatgtgatgtgatgaattgaggggaatccattgaagaggcgaggcgagttaatcagaaatcagaatgcacttgagcgagaacgaagggatagaggggaaggccttcgtggtcaccggtggactgggattcgtaggatctgctctctgcttggagctcatccgaagaggtgctagagaggtgcgagcctttgacctccgcctct

SEQ ID NO: 38634 - DNA, 247 bp, Glycine max
  Clone ID: 700944185H1
ggaattggcactcgcttggtggatatgtacaaggagcattatgagagcattgaggtccccaagtttgttgacacagtaactcctcaatacaagactaaatttgatgccctattgattgagcttaaagaagcagaggagaaatctctgaaggagtctgagcgtttggaaagggaaattgttgaagtacaagagttgaagaaaaagctcagtaccatgacggcagatgagtactttgaaaaacatcctg

SEQ ID NO: 38635 - DNA, 218 bp, Glycine max
  Clone ID: 700944186H1
tgcccaaattttttcatagcattttcagaggaacaatggcgggtagggtttcgacgtgcttcttcttcgtgtttgctctttctctccttcttccttttcagatctccgctgaggaatcatcggagaaagagttcgtactcacattggatcactctaactttcacgacattgtcagcaagcacgatttcatcgtcgtcgagttctacgctccatggtgg

SEQ ID NO: 38636 - DNA, 243 bp, Glycine max
  Clone ID: 700944187H1
cttccaaatccaatgcaactttcaagtctgataacagtgttgtgagacatggggaggatttcatggctgctaatgaaactgcgtttggctccattatcaactcaactgatgttgacaacttggctagtgcggaaattattgatgccggcgatgcagctgcggctactcagtgtgatgtgagtggccctattgattgtaaggaccctgaggtatttcatttgatgatgagggcaacaattgaca

SEQ ID NO: 38637 - DNA, 249 bp, Glycine max
  unsure (1)..(249): unsure at all n locations
  Clone ID: 700944188H1
ctatcatcattttctctaaactttctccaatggcggttgcagccttcaaatcgtcttcgcgaagaggaacccaatcttccgctcattcgaacgcgcctccgaacacgacgtcgtcttctggcagatcttccaccagagctccgaacccgactcgcaggtcgaggagcgtgagcgcgttctccaggggcagtttcgacatttccaccatcaccggattcccgnacaagagggacaaccctctcttcttcg

SEQ ID NO: 38638 - DNA, 244 bp, Glycine max
  Clone ID: 700944189H1
cttggaatccaaaaatgagagaaatcatcagcattcacataggtcaggccgggatccaggttggcaactcctgctgggaactctactgcctggaacatggcatccagcccgatggcatgatgccaagtgactcctccttcggtgtagcccacgacgccttcaacaccttcttcagcgaaaccggatccggcaagcacgtccctcgcgccgtcttcgtcgatctcgagcccaccgtcatcgacga

SEQ ID NO: 38639 - DNA, 246 bp, Glycine max
  Clone ID: 700944190H1
tcgccatcacactgtctaggaaccgcaaccgcaatgcatttcagaattattttcttttttaatttttttttgtataagcatgttttttgatctgtttttctatgttagatttggaggagaagattggcggcgacattggcgatttttaagaagcgatgtttggcaatccgaagtttgcaacagattctgaaacctcgctctcactggaaactcgccaatttttaagttcacatgtgctcctcgctg

SEQ ID NO: 38640 - DNA, 243 bp, Glycine max
  Clone ID: 700944191H1
gagagaaccatggttagttcagcacatagattccctgtcccagtgaaccctatgcttccacaaccccttccaggacttgttggaaagagacaatacaattcctcagatgatgatgatcatagtccatctccttagctgtgtatcactcatgtcagtgtgacatcttttggctgcatcttctgttaggaaaaacctggaaccaggcgattctgacgggtctgggggtgcatgtatggtctggcc

SEQ ID NO: 38641 - DNA, 163 bp, Glycine max
  Clone ID: 700944192H1
gagccgtctttcaagtccaggaagcatggaaggctcagcgaaggggcgctgctgggagttattgttgctgctggtgttttagtcctcgtgtgttttgtttctttgatgtttgtgtgctgctcaagaagaggtgatgaagaataaggaaccattcagtggaaag

SEQ ID NO: 38642 - DNA, 245 bp, Glycine max
  Clone ID: 700944193H1
caaagttttattggtttggggagagatcgcacgggggttgcccggggtctcttcctcttgtgtggtgtggtgtttgctgtgctctccttttcgttatgccttttattattacctatctgtcgctccactccgtattacgactctggatcagaggatacatcagaggattcgctccaacccctatcgagtaaggtattatctgtcaatttacattcgaaagggttaggctattgaattttaaataa

SEQ ID NO: 38643 - DNA, 204 bp, Glycine max
  Clone ID: 700944168H1
ggggaagagaaatgagaagatgggcaccaccttgatgagatgctcccacgcaaacgctctcttcagagctctcaaacccaaaccccgcaattcttcactgccacttcctccaatggccatcaccaaaggtaatagtaataaggcatatgatgcattgctgttggatgctgggggcacctattgcaattgccaagccaattgaag

SEQ ID NO: 38644 - DNA, 172 bp, Glycine max
  Clone ID: 700944194H1
tctcgagccgaatcggctcgagcttctcaacccagtccgaggatgcgcctgccatcaaaaagaaggttgaggatgtaatgccaatcgctactggacacgagcgcgaggagcttcaggctgagctcgagggaaggaatattcttgaaatagaccatcccgaggttccattcgg

SEQ ID NO: 38645 - DNA, 156 bp, Glycine max
  Clone ID: 700944195H1
gtggatgaaaggccgcagaagtctttgcttccaccctttgaatctgcagaaatgcgagctttagcagagagcctaagtagggatatcattcgtggaagtccagatgtgaagtgggaaagcatcaaggggttagagaatgccaaacgtttataaaaa

SEQ ID NO: 38646 - DNA, 253 bp, Glycine max
  Clone ID: 700944196H1
gtttttcttcatagctaaagacacagcacgatgacgatgaagataatggtagcgataaagcgagtggtggactacgccgtgaaaatcagggtgaaggcagacaagacaggggtggtgagccagaacgtgaaaatgtcgatgaaccccttctgcgagatcgctctcgaagaagcccttcgcatcagagagtctggcttggcctccgaggttgtcgccgtcaccatgggaccctctcaatctctcgacactctcg

SEQ ID NO: 38647 - DNA, 222 bp, Glycine max
  Clone ID: 700944133H1
tggctatgcccctgttcttgactgccacacttcccacattgctgtcaagtttgctgaactcatgaccaagattgacaggcgatctggcaaagagcttgagaaggaacccaagtttttgaagaatggtgatgctggttttgttaagatgattccgaccaaacccatggtggttgaaactttctctgagtaccccccacttggtcgctttgctgtcagggatat

SEQ ID NO: 38648 - DNA, 251 bp, Glycine max
  Clone ID: 700944134H1
gtttcgtgattattggttgagccaacataaggaggcagaatttgaagttgccaatgactctagtaatgatgatattgagaatatgctctcagaaacttttgatctaggcatggaggaggacttcaatgttctagagaacgagtttgagcagttggtgatgtcctctgaagctctagatcattctggtgcctaatgctggaaaagtgtctcctcagggtcttaacaaagatgttaaagctattcttattaac

SEQ ID NO: 38649 - DNA, 248 bp, Glycine max
  Clone ID: 700944135H1
cgcaggcgcagagtagagcagcacagaagagggaaaacggcaccgccgccgtagaagaaaacaaccatggtgcacgtctccttttacaggaactatgggaagacattcaagaagccgcgtcgtccgtacgagaaggagcgtctcgacgcgaagttgaagctggttggtgagtacgggcttcggtgcaagagagagctgtggagggtgcagtacgcgctcagccgcatccgcaacaacgcgcggaacct

SEQ ID NO: 38650 - DNA, 247 bp, Glycine max
  Clone ID: 700944137H1
tgaatttaaaaaactatggcatgctttctgtttgtcctttggttattctgattcaatttatttatccccttctatgattactggtcggattgataagtgtgaaactgagattttagacttaatagtggttttggcttttgtgtttttggcttgtgcttatgttgtaagcagttcttgtggttgtgaattggtttaaccaggtgtttgaagaaaccaggtccggtcataggcgttgcagctggactgg

SEQ ID NO: 38651 - DNA, 246 bp, Glycine max
  Clone ID: 700944138H1
ggaaagggtgtgagaagagaatggagagtaaagaggaagatgttaacgttggagcaaacaagttctcagaaaggcaaccaattggtacagcagctcagggtggtggtgacaaggactacaaggaggcacccccagctcctttgtttgaacctggtgagctcaaatcatggtccttctacagagctggaattgctgagtttgtggcaactttcttgttcctctacattaccatcttaactgtcatgg

SEQ ID NO: 38652 - DNA, 247 bp, Glycine max
  Clone ID: 700944139H1
gcattgcgtaatggctctgattttccctatgtatctcgggatggtggcaggttaattgaagctaaagatgtagtatttgaatgtggtcccaaatgtggttgtggtcctggttgtgtgaaccgaacgtctcaaagaggacttagatatcgtctggaggttttccgtactgccaaaaaaggatgggctgttagatcctgggattttataccttctggagcaccagtttgtgagtacaccggaatacttg

SEQ ID NO: 38653 - DNA, 248 bp, Glycine max
  Clone ID: 700944140H1
agcgagttttccgaagaagaggaaatccggtgcatggcgaactgcaagcacattttccactgcgcgtgcgtggaccgttggatcgatcacgatcagaagacgtgtccgctgtgcagaagtacgttggtgccacatcagaagctcgaagaatacaaccagcgactatgggcggcttctggagtttcgccgttttattaccaagacgattacacggcttccctctgaatttttctttttctttttccact

SEQ ID NO: 38654 - DNA, 247 bp, Glycine max
  Clone ID: 700944141H1
cttcaactcctcctgggtccacttcaagctcatggactccatggagaaaggtccctcccctgttaaacccgaaaacgtttccgataatagtgataacgataacgaggatgatgacgatgatcaagatctgtaccaggagatcaaccacaacggccacatcaggagcttgaacaagatgtataggaatggctttccgggttctggtgccggttccggtgctggtgtctttaggattcgaattcctact

SEQ ID NO: 38655 - DNA, 248 bp, Glycine max
  Clone ID: 700944142H1
tgcagatccgaggagttaccctttcttttcttttttcttttttctctttcctcattctacttaaaactcccaccagtgatggcaggtttggctccagagggaacacaattcgatggtcgccaatatgatgctaagatgagtgaattgctttccactgatgggcaagaagtcttcacctcttatgatgaagtgtatgacagctttgatgcaatgggattgcaagagaatcttctgcgaggcatatatgc

SEQ ID NO: 38656 - DNA, 245 bp, Glycine max
  Clone ID: 700944143H1
ggaccggcgtcttcttgcctcggggtggtggagctactaccccatccgaatcaaccaacaagcacggtaaaggttgctccactgttcttatacctgccagagtagtccaggctttgcaactccatttcgaccaaatggctgccacgtctgggcccaaagctggtggcttccctcctctccatgatgttctagtgagtaacagggatggcatgtattcacttcagaagcccgagtcacggaaagcg

SEQ ID NO: 38657 - DNA, 171 bp, Glycine max
  Clone ID: 700944144H1
caaccctaacgcgtgcagagcagagagagacgcagccatggggcgaagacccgcgaggtgttataggcaaattaagaacaaaccataccccaagtcacggttttgccgtggtgttcctgatcccaagatcaggatttacgatgttggtatgaagaagaagggtgtgaatga

SEQ ID NO: 38658 - DNA, 247 bp, Glycine max
  Clone ID: 700944145H1
ctttctttacctacttggacgggaatgtaaatgtactttggttagcacctaataatgttattgattactattttgcactttctttgttttagactgcagtggcagtaggagtggagcctagtcctaagttgccttacaatgaatattatgaatattttggcccggactataatctccatgtgaacccatccccatgggaaactctaaccacacccagggatctggaaaaaattcggaatacattact

SEQ ID NO: 38659 - DNA, 76 bp, Glycine max
  Clone ID: 700944147H1
gaagtgtttgcgggatgccaagatggataagagtaccgtccatgatgttgttcttgttggtggttctactaggatt

SEQ ID NO: 38660 - DNA, 246 bp, Glycine max
  Clone ID: 700944148H1
aatgatccaagaatcaactggctctgcaacccagtccataaacacagggaactgcgtggcctcacttctgctgggaaaagtaacaggggtttacggggcagaggacatctctaccacaaaaatcgtccatcccgcaggcaaacctggaagagaaacaacactctttcccttcgtcgctaccgttgattttgtcaccattatcgtatgttgcttcattttccaagtatttggagtgcattatatgta

SEQ ID NO: 38661 - DNA, 230 bp, Glycine max
  unsure (1)..(230): unsure at all n locations
  Clone ID: 700944149H1
caaagccctcaaagcataatctcactcgtattagcgttgctgagagagacagacaaatggcaacaagcgaagaagtggttgtcgcggcgccgaggagncgcgccttgaggcccggctgaagcacaaacgggagagaaaatggacgttttggtgcggacaccaatccaaacccaaacagggcgctgcttagggtacctctcttcgcaaggtctacaccttcgacaccgttg

SEQ ID NO: 38662 - DNA, 247 bp, Glycine max
  Clone ID: 700944151H1
caaattcccacatggtttgcaatttctggttatgttgctattgctgccatctctactgccactctgccacacatcttccccgaactaaaatggtattccataatggccatctacttattgctcccaacttagcattttgccatgcttatggttgtggactaacagattggtcccttgcttccacctatggaaagctagccatctttacaattggagcatgggccggttcatcaaacggtggagttct

SEQ ID NO: 38663 - DNA, 213 bp, Glycine max
  Clone ID: 700944153H1
ggcaatttttgacaagtgaagtttcaagaatcaattatttaggatatagactttatcgtgctctgcctttcctttatgaattaagatgtgttcttgactggtcatgcacaactacgtccctcaccatgtatgactggctaaagctggaggacataaatgcaagtttgtaccttgtcaaatgtgattcagtcttaaatagagttacacacaacc

SEQ ID NO: 38664 - DNA, 242 bp, Glycine max
  Clone ID: 700944155H1
atctagagcaaaagaagaggcttctagcaggaaggctatcatggagaaagtggagaagtggatgttagcatgtgatgaggagcgctggctagaagaatatagcagggatgagaatcgatactcagtcagtagaggagctcacaaaaacttgagacgtgctgaacgtgcccgtataatggtcagcagaatgccagctctggtagatttgctaataaaaatgactaggagttgggaagaagaaa

SEQ ID NO: 38665 - DNA, 249 bp, Glycine max
  Clone ID: 700944156H1
gtacagagagagagagagagagagagagagagagagagagaggctgctatggggcacagagctatgttaaccttgctactactcctcttcttctcgaccaatttggttccttccgcccttgctatctggctgacgttacccaccactggcactaagtgcgtctccgatgatatccaacacaacgtcgtcgttttggccgactacgtcgttatccccagtgctcacgcacacaatctcaccatcgccgtc

SEQ ID NO: 38666 - DNA, 249 bp, Glycine max
  Clone ID: 700944157H1
ctgaggattccgaacgagtgaccttcttcgtttctcgcaaagtttaagtaatcatgggtcaggaaaaggttcacatcaacattgtcgtcattggacatgtcgactctgggaagtcaactaccactggtcacttgatctacaagcttggaggtattgacaagcgtgtgattgagaggttcgagaaggaggctgccgagatgaacaagaggtcattcaagtatgcctgggtgctcgacaagctcaaagctg

SEQ ID NO: 38667 - DNA, 248 bp, Glycine max
  Clone ID: 700944158H1
ggaaggaagatgagtttgagggcatcagagatagcgaagaagttgaatctgcaacctcacccagaaggtgggttttacgtggagacattccgagaccattccgtccagctttcgacctctcagctcccccccgaatacaaagtggatcgccctgtatcgacctccatctattttctcgttccttctgggagtgtgtctcgcctccatcgcataccctgcgccgaaacctggcatcattacatcggcga

SEQ ID NO: 38668 - DNA, 248 bp, Glycine max
  Clone ID: 700944161H1
ggccgccgcggtggagaacgcgctcccgtgcagcttggaggacctctacaaaggagtcaagaagaagatgaagatttccaggaacgtctacgacgcttttggcaaatgtggggatgtggaggagattttgactatcgagataaaacctggctggacaaaaggaacaaaaattacctgcccagagaaaggtcaccggtgcgccgggtcccaccccaacagatctcattttggtgatagatgagaagccg

SEQ ID NO: 38669 - DNA, 74 bp, Glycine max
  Clone ID: 700944162H1
tgcggatcaaccacaggatgctgcttcaaggcggcgagcaaagtttcggcatatagggcagttgaagggtcatt

SEQ ID NO: 38670 - DNA, 252 bp, Glycine max
  Clone ID: 700944132H1
atcaaattagttcattctctttgcgcagttccctacctctcctttcaagatgcagatcttcgtcaagaccctcaccggaaagaccatcacccttgaggtggaaagctctgacaccatcgacaacgtcaaggccaagatccaggacaaggaaggaattcccccggatcagcaacgtctcatcttcgccggaaagcagctcgaggacggccgtaccctcgccgactacaacatccagaaggagtcaacccttca

SEQ ID NO: 38671 - DNA, 226 bp, Glycine max
  Clone ID: 700944163H1
ggcattcgaaatcggtgaagatggttgctatgaggtttcatcagtaccaggtggtgggaagggctcttcctaccgaatccgatgagcatcctaagatctaccgcatgaaactctgggcaactaacgaggtccgtgccaaatccaagttctggtattttttgagaaaattgaagaaggttaagacaagcaatgggcaagtgcaagccataactgcgatttttgagag

SEQ ID NO: 38672 - DNA, 251 bp, Glycine max
  Clone ID: 700944164H1
ctggcttcgtcaaccttctcgaggctgccaaatccgccaacccccaacccgccattgtctgggcttcgtccagctccgtctacggcctcaacacccaaaaccctttctccgagctccaccgcaccgaccagcccgccagcctctacgccgccaccaagaaggccggcgaggaaatcgcccacacctacaaccacatttacggcctctccctcaccggactccgtttcttcaccgtctacggcccctgggga

SEQ ID NO: 38673 - DNA, 248 bp, Glycine max
  Clone ID: 700944165H1
ccgatacaagaaaatggcgtatttctggtctgatttggcaaatcatagcaatgtggccaatgcacttggggtgcttttcttctacattttttacaggactgtggtgcttagttataggaagcagaagaaggactatgaggacaggcttaagattgagagggccgatgccgaggagaggaggaagatgagggctttggagagggagatggagggaattgcaggtgatgatgaggcgggttagcagggga

SEQ ID NO: 38674 - DNA, 238 bp, Glycine max
  Clone ID: 700944167H1
caacaacgtgtcctccgacctgaaggcgttctccgccgcgctggccctctcctccatcctcctctccgcccctctccccgccggcgccgacatctcggggctcaccccatgcaaggagtcgaagcagttcgcgaagcgtgagaagcagtcgataaagaagctggagtcgcgctgaagctctacgaggcgggcagcgcccccgcactggccattaaggcgagcgtggagaagacgaaga

SEQ ID NO: 38675 - DNA, 236 bp, Glycine max
  Clone ID: 700944094H1
aaacagcgaaaattaaacaacaacaaaaaaaaagctcttccatccgaaaccgtaactcactgccggcgacgaggatctcgccggggaaatgaacattccggcgaaactcttttctctttctttgagcaatgcacgtctctcataccatcgtcgccatgtttttcacgaaagccttgacctcgaaacgtttttcacctcctctttctcctctactcgcgtagtagtctagaagttat

SEQ ID NO: 38676 - DNA, 254 bp, Glycine max
  Clone ID: 700944095H1
gtgctctgctcgtgcctctagggttatcatatctccatttccatttcctctctctcagtttccaagaatcttaagctatgggaaagtcttacccaaccgtgagcgctgattaccagaaggccgttgagaaggcgaagaagaagctcagaggcttcatcgctgagaagagatgcgctcctctaatgctccgtttggcatggcactctgcatgaacatacgacgatagcatgaagaccggctgactcatcggaacc

SEQ ID NO: 38677 - DNA, 248 bp, Glycine max
  Clone ID: 700944096H1
ctacaagctatctcagcttgttagcactttctttttcttcatttcattatttttctcataatgtcaactttcatgttgaaaatcttccttctaatttccatctttcaaatctctttcgccactaggaggttgaatgagttagttcaggaccaaactcagcttcttcgtaccacaatggcccatctcacacgggcaaaattaccattaacctcatttggaatggccaacattaaccaatccagaaggca

SEQ ID NO: 38678 - DNA, 52 bp, Glycine max
  Clone ID: 700944101H1
aaaaaaatagtaattatttccatgataaactcatttagaagtactccgtaat

SEQ ID NO: 38679 - DNA, 253 bp, Glycine max
  Clone ID: 700944102H1
ctaatttcggaaagatcggcgatgactgcctccaaggatcgcgagaacttcgtctacatcgccaaactcgccgagcaggccgagcgttacgaagagatggtggaatcaatgaagaacgttgcgaatctcgacgttgaactgacggtggaggagcggaatttgctttctgttgggtacaagaatgtgattggtgctcgcagagcgtcctggaggatcctgtcttccattgagcagcaggaagaaacaaaaggga

SEQ ID NO: 38680 - DNA, 249 bp, Glycine max
  Clone ID: 700944103H1
caaatcggtccatctttcactcgatgagagaacaggttcaggatttgtgtcgcatgatctttaccttcacgggtatttcagcgcttctattaagttgccttctgattacactgcaggagttgttgttgccttctatatgtcaaatggtgacatgttccagaataaccatgatgaaatcgactttgagtttttggggaacattagaggcaaagactggaggattcagaccaatgtttatggcaatggtag

SEQ ID NO: 38681 - DNA, 217 bp, Glycine max
  Clone ID: 700944104H1
aaagagttttaaagaaaaaattgatgatgaatatcgagtgaacatgattttggataaccttccagttgctgttcgtagacaaaggagggatggaggtcaatcaacaacatatgaacatggttttcgtgttgggttcaaaggaaactatcaagggagcaaggaggagaagtattttattaataaccacttgagtttcagagtcatgtatcacaaggat

SEQ ID NO: 38682 - DNA, 250 bp, Glycine max
  Clone ID: 700944105H1
ctcgcggatctaatattaaggaatagcttaagggcacattacaatgaaggcattgattctggttgggggatttggaacaaggctgaggccactgacactcagtttccctaagcctcttgttgattttgctaacaagcctatgattttgcatcagatagaagcccttaaggccattggagtgactgaggtagtgctagccatcaattaccaaccagaggttatgttgaatttcttgaaggattttgaatca

SEQ ID NO: 38683 - DNA, 234 bp, Glycine max
  Clone ID: 700944106H1
cgggaagtcattcttccccaattcgcctaacatatgcagaagatgccttacgaaccatgagtttacccgaagcatatgcagagattgtattaaacttaccacaggcgattcggcagacgtatcatcaaaaagccaccgcttagagctttgccctttcagtagcctagatgcatctgtaaaaattcttggtagagatgttaaatattagaaaaacaacttcagaattattaccta

SEQ ID NO: 38684 - DNA, 230 bp, Glycine max
  Clone ID: 700944107H1
ctcactgtcccaaaaaactgtggtctcaggcaacaaaagaggttttgctgacacaattgacccagagtttcctggcaatgcagggataaacatgatgctatcacctaaaccttctggagttaagcctaccacagtgaaagacataccaagcaaggtattacaagaacatccttctgcagaaaatggaacgggtcatacccatacgggagcttctatcagtagcagtgcac

SEQ ID NO: 38685 - DNA, 251 bp, Glycine max
  Clone ID: 700944110H1
aggaagaagcagtcaatggcaatgtcatcagattctgaggactcgtacagcagcaacagcgtccatggtcttaagaaaaactgcaaagtccagagcttcacaccatccacaccacccccaacttcggttaattacagaacggccaagagaagaaagggaataccacaccgtgccccaatggtgggactaatcatagaatattagtgatagtgggtatttttaggctatttgctataatgctcttaggtagt

SEQ ID NO: 38686 - DNA, 249 bp, Glycine max
  Clone ID: 700944112H1
tttcaaatgaagacctgcgtcaaatatttggggcttatggagaggtcaaagagataagggaaactcctcacaagaggcatcacaagtttattcaattctatgatgttagagcggccgaagcagcacttcaatcaataaccagggtgacctagtctgtaaccgcctaaagcttgacccaagtaggcctggaggagctcgtagaaatttgatgctccaattaaatcaagagcttgaccaagatgaatctcg

SEQ ID NO: 38687 - DNA, 105 bp, Glycine max
  Clone ID: 700944113H1
gtaatttcttgggaaaattaaaacaaaaactgttatttaacctcctctgttttaataattttgaattacctagtgttgcacctcattattacttgaaattttgat

SEQ ID NO: 38688 - DNA, 251 bp, Glycine max
  Clone ID: 700944114H1
caattatttgaattcaagaatgtctcaacccgactcgttggtggctgagattgaggtgaaaacctctgctgatcacttttgcgacaccttgaagggtaagaaacagcatcgtattcatgatgttgcccctcatcatgtccataaggtggaagttcatgaaggtgagtgggataaatctggcaatatcaaggtgcttacattcgctgatggggacactgttgagaccttaaaggagagagttgattttgatg

SEQ ID NO: 38689 - DNA, 238 bp, Glycine max
  Clone ID: 700944115H1
gccaagaaacttgaggatattgtgccctcttctcacaactgtgatgttcctcatgtgaatcgtactgattaccagctcattgatattgctgagggtggtttttggcgtgcgacttagtggaaagggttaccactagggatgagctcatgctgcccactgatgagagtctgctcactcagataaaggatggatttgctgagggcaaggatctggttgtgtctgtcatgtctgctatggg

SEQ ID NO: 38690 - DNA, 108 bp, Glycine max
  Clone ID: 700944116H1
gtaacattcctggtaaaatattattgagccagagggttgaatctcccgattacacaagcttatcctcaccgacttatataaggagctcctcatacagtgaaactggca

SEQ ID NO: 38691 - DNA, 251 bp, Glycine max
  Clone ID: 700944117H1
gctaattgcttcgaccgagtgattcagaggaggagaagtaatggctgcgatcgcgggagcgcacgtgtttggtgttgtgagttttcagctcaagcaagctgaaatgccctttgcatgttccagcttaatccgcaagcatattggagattctcctcagcgcaatgtggctctaagacgcagagcaaatggaacaattcttccccaaatcagagcccagaacgttcttccagactatgttccaaaatcggagt

SEQ ID NO: 38692 - DNA, 250 bp, Glycine max
  Clone ID: 700944118H1
gagggaatagggttagggttagggttagggttaggtggaggatgccgaagaacaagggaaagggaggtaagaacaggaagaggggaaagaacgaggcggacgacgagaagcgagagctggtgttcaaggaggacgggcaggagtacgcgcaggtgctccggatgctgggtaacgggcggtgcgaggcgatgtgcatcgacgggacgaagaggctctgccacatccgcgggaagatgcacaagaaggtgtg

SEQ ID NO: 38693 - DNA, 252 bp, Glycine max
  Clone ID: 700944119H1
gtttggttccccaaacatggttgctttggctcaggagaaggtgatacagtccctcctttctctccatgaagaaaagcagttagaaattcatctgagagggagggatctacctcctgatttaatgaagcaattaataagaattttgggccagatctccatggattgaaagagaaggtacctggggtagatcttacactgaacatacgtcgccacataatgcatcttcatggtagcaaggagttgaaaccgaga

SEQ ID NO: 38694 - DNA, 250 bp, Glycine max
  Clone ID: 700944120H1
tggaaaggccttgagagccacagcatgtgctacatcatgtgcattggcagcacacaaattgcggcgcccagtcaggatgtatctaaatcgaaagacagatatgataatggctggaggaaggcatcccctgaaaacaacttacagtggtgggtttcaagaatgatgggaagattacagcattagatcttaagatattggtcaatgcagggatatatgtggatgttagtccaataataccacgcaacatgat

SEQ ID NO: 38695 - DNA, 219 bp, Glycine max
  Clone ID: 700944121H1
gttgtttctttgcccttcatggcatctcaggctagccttctccttcaaaagcagctcaaagatctttgcaaaaaccccgtcgacggcttctctgccggtttggtcgatgaaaccaacatttttaaatggagtgtcaccataattgggcggccgataatctctacgaggggggatttttcaatgctattatgagtttcccatccaattacccaaatagtc

SEQ ID NO: 38696 - DNA, 249 bp, Glycine max
  Clone ID: 700944124H1
caagactctcatgaggacaggatcagctgcttaggtttgtcagctgatggaagtgccttgtgtacaggaagttgggacacaaacttaaagatatgggcatttggagggcataggaggacaacttaagccattgcgggaaggtcaaattggagacgaattgcgtgctaatttatataacccttcattttagccttgcaactcatgtccgtttgtccatgtgtgtgatcttagtactttttccattgtact

SEQ ID NO: 38697 - DNA, 249 bp, Glycine max
  Clone ID: 700944125H1
atttcctcatatggggaaattcattttaatatagttggtacagtttaccaggtcacaggcatatttgcagaagctttaagactggtcttaacacaagttcttctgcagaaaaaggggttgactttaaatcctattacaagcttatattacatagctccctgcagttttgtgtttctctttgtgccttggtacctactagagaagcctgtgatggaagtttcacagattcagttcaatttttggatcttc

SEQ ID NO: 38698 - DNA, 244 bp, Glycine max
  Clone ID: 700944127H1
ctgttctcttcaccattctctttcttctttgtttcaagtttcaacaacccagattcactctctctctcgtaattttctctcttattgaggctagaaaaagagagcaaaaaaactaaaaaatgcctgcggtcggaggtataaacaccggagggggcaaggagtaccctggaagcctcactctatttgtgacggtaacatgtatagttgcagccatgggtggtttaatcttcggttacgatatcgg

SEQ ID NO: 38699 - DNA, 106 bp, Glycine max
  Clone ID: 700944128H1
gatggcaggcagtggcaccctatattgatgaggatctcttcatcagagtcatcattcaaccagccactgttggaaacaaaactgagagaaccatcacaacatctta

SEQ ID NO: 38700 - DNA, 106 bp, Glycine max
  Clone ID: 700944129H1
agaatggcgaaggagatagtgaaagagcttcttcctctaattcgagtgtacaaggatggcagcgtggagcgtcttctaagctctgaaaacgtggcagcctcccctg

SEQ ID NO: 38701 - DNA, 254 bp, Glycine max
  Clone ID: 700944093H1
agatattagggtttttgagtgcggtgcggcgatcctagcactctcttctgcagctttcgccgacagcttcattcaccatggctgagcaaaccgagaaggcttttttgaaacaaccaaaagtgtttctcagctcgaagaaaactgggaagggaaagagacccggaaagggtgggaaccgcttttggaaatccattgggcttggatttaagactcccagggaagccatcgaaggaacctacattgacaagaagtgc

SEQ ID NO: 38702 - DNA, 250 bp, Glycine max
  Clone ID: 700944130H1
caaaccgtcactctatttcttttactccttctcaaaccttatctctttagttatcctcagccatggcgtctctactgctagcatcacctcctccactctccgttcaattgcacagttccacctctcacctttccttctctcactcccaaactctctcttcaccactctccacttccttcgcttctctctcagcttctgaaacttccactctttccccaaccccttctgtgtactgtggcagacgggaccg

SEQ ID NO: 38703 - DNA, 255 bp, Glycine max
  Clone ID: 700944131H1
gttagtgagagaaagttctctctgcttctctctcttagactcataaccctattgcgtgctttgcaatcgaccccgattatggccaacagtaacctccctcgtagaatcatcaaggatacgcagcgtttgctcagtgagccagcacctggcattagtgcgtccccttcggaagacattatgcggtattccaatgtgaccatccggggcccaactcagtcgccttatgaagggggcgtcttcaagttggtattcttt

SEQ ID NO: 38704 - DNA, 198 bp, Glycine max
  Clone ID: 700944048H1
cggagctggccaagctcctctccgtggtgcactgccacctgcaccacaagaagagcaaatgagagcttcacagttgtataattttgctgaccttgatgttggattgcctaaagaagttgaaaccaaggagaaaattgttgaagctattgttgagcctccaccacaggtggatactaatgcagttccgaatttgtctgc

SEQ ID NO: 38705 - DNA, 266 bp, Glycine max
  Clone ID: 700944049H1
aaagcgggttactgtctgttcaagctaccatctctctctctctttcttagtgcctccttgccagaagttaaaatggcccaagaaactttcctattcacatctgaatcagtgaacgaggggcaccctgacaagctctgtgaccagatctccgatgctgtgctcgatgcatgcttggagcaggaccctgacagcaaggttgcctgtgaaacctgcaccaagaccaacatggtgatggttttcggagagatcacaaccaaggccaacgt

SEQ ID NO: 38706 - DNA, 266 bp, Glycine max
  Clone ID: 700944050H1
gaaaacattctggagaagccagaaaagcctgagagcacttcttcccctagagcttcacatacagtaatttcaagtaccgttaagaaacctatatggtgctaagaaagcagtgaagagtggggggctcggcgctcgtaaactcactaaaaagccaagtgagtctctctatgagcagaagcctgaggaaccccctgctccagtttcatcttcaacaaacaatatgcctgctgggccatctccaacgtctcggtttgagtatgtagaaa

SEQ ID NO: 38707 - DNA, 261 bp, Glycine max
  Clone ID: 700944052H1
gatgaggttcaaactactggtaagcactcttcaggattgattgttttgcccctgtattcaggactttcacgcgctgaacaggatttagtgttctctcaagcccctcgaggaaagagaaaagtgatcatttctactaatatagcagaaacatcactgacgttgggaggaattgtctatgttgttgacagtggattctctaaacagcggttctacaatccgatttctgatattgaaaatctggttgtggcaccaatctctaga

SEQ ID NO: 38708 - DNA, 260 bp, Glycine max
  Clone ID: 700944053H1
aagaggaggcaccatgacaagcactcttctgtctttgctcttcttgctcttctctcttctcactccaactctaatttcctcttcaccagttctaaaccctcaagaggtcgtacaagaggtcaacaagaaaatcaatggctctatagcaagacccagaaggaacttgggctacctctcatgtggtagtggcaaccccatcgatgattgttggaggtgtgaccccaactgggagcagaacaggcagaggctagcagactgcg

SEQ ID NO: 38709 - DNA, 260 bp, Glycine max
  Clone ID: 700944054H1
gcagcaacttcgggacaagcttgctataactgagcgaactgcaaagtctgaagcacagttaaaagaaaaatatcaattaaggcttaaagtgctacaggagagtttgagagaaacttctaacagtattaatcgcggcacctcagagggaagatgtgtagcaatgggccttctcgacgtaatccccaaggtggactcttatcatctctcagaactatcatctaatgggtttttgaagagatcaccgtccactcaaattaggt

SEQ ID NO: 38710 - DNA, 260 bp, Glycine max
  Clone ID: 700944055H1
aaaaaacaagacaccaaccaaagtttcagtttctctctattctaacgttgttgaatggcagtagatctggcaaatattaggatggaagagaatatggcgattcaagaagcagcttccgctgggttgaagagtatggagcatctgattcgcgtcctttcttctcaaatcccttctgcttcgtcttcttcttctaacgcacaccaccaccgtcttaatctcaaccaccttgactgcgcggaaatcaccgacttcactgtctc

SEQ ID NO: 38711 - DNA, 258 bp, Glycine max
  Clone ID: 700944056H1
cgacgccggttcgcggttcgagaccgaggagaccaacggcaccgcacacttcctcgagcacatgatctttaagggcaccgagaggcgcaacgccgtgagctcgaggaagagattgagaacatgggaggacacctcaacgcctacacctcaagggagcaaaccacctactacgccaaggtcaccgacaaggacgtcccccaggccctcgacatccgcgccgacatcctccagaactcccgattcgaggaaactcgcatc

SEQ ID NO: 38712 - DNA, 258 bp, Glycine max
  Clone ID: 700944057H1
aaggaactcaatcgcattgctggagtggacaagacttgcaattttgtcaaggctgacttcatgaaaatgccattaccagacaacagttttgatgcagtgtatgcgattgaagccacttgccatgcaccagatgcttatggatgctataaagagatttttagagtgttaaagcctggtcaatgttttgctgcttatgaatggtgcatgaccgattcttttgatccccaaaacccagagcaccaaaaaatcaaggcagaa

SEQ ID NO: 38713 - DNA, 255 bp, Glycine max
  Clone ID: 700944058H1
tttggatcttcttttccaacgctatatgtgctctagccttgaatttctccattttcttagtcattggtagaaccggtgctgtaaccatccgggtcgctggtgtgcttaaagactggatattgatagctctttcaactgttatattcccagaatctacaataactgggttgaatatagttggctatgctattgcattgtgtggagttgtgatgtacaattacataaaggttaaggatgtccgtgcctctcaattgc

SEQ ID NO: 38714 - DNA, 242 bp, Glycine max
  Clone ID: 700944062H1
gcaaaatcttatcttagcaatagctacccctatcacaacaatactctattaggcaaaaacaccaaatgggagaggaaaaagagcagcctaagaatgaaaccgagaagaagcccgaggaggccgccgcagcccccaagaaagacgacggacccatccctgtcgtttacaaactcgacttgcattgcgagggatgcgtcaagaagatcaaacgcacatgtcgccacttccaaggtgtggaaacc

SEQ ID NO: 38715 - DNA, 177 bp, Glycine max
  Clone ID: 700944064H1
gttggaggggctagtcgtgaggttgggcctgataatgtgtataatagtgctaggttgattaggagtaagaatgattctgttcctaacgttaatatgacttgggtgtttccggttgttggagggtataagtacttggtccggttcacttcctgagatatcgctcgcatcgcggggggt

SEQ ID NO: 38716 - DNA, 262 bp, Glycine max
  Clone ID: 700944067H1
cttgtctctctctctcctgaaggtaaggcagagaagagaagaagagcaggaaagaggcttgtaccctggagaaaagaggaggcaaatacatggagaacgagggtgtaaacacggtggtggtggagcaacaacctgtggcatccacgtccaagtttccgttgagcttttgggaaaccacggtggcttcaacggtggcgctggttttcgcggtgggccttctcggcgtctacctcaccatgcccgattccgattacagcttcct

SEQ ID NO: 38717 - DNA, 219 bp, Glycine max
  Clone ID: 700944069H1
aacaatatcatatgctaataaatattgttgtaccaatccctttgaaagtgaaagttaataagggttcttgaaattattggtatgcaataattttgaactgcgtggtagtgtgggaattcattatatagcttttgttcgttgttatctagaagttttagtcatttgtaatatcatatgtcgtgaaaaatttgtatctggtatatatgtacgttatgggcg

SEQ ID NO: 38718 - DNA, 253 bp, Glycine max
  Clone ID: 700944073H1
ttcctctgttttcgaaaggtttcaacaaaacagagacatgtctctgtttctgcccttcctcttcggcttctctgacgccaccccaggacgaaatagcgacgccccagatcacgaaactgctcccacagaagccccacaccgtcaaagaataatcttggtgaaccccttgactcagggcatggtggtgatcgacggtggttcgagcctcgaggctctgtttcgcgaattcaccaacggaaaaggtggtcgacca

SEQ ID NO: 38719 - DNA, 172 bp, Glycine max
  Clone ID: 700944074H1
ctcgattctctctgcttctcttttcatctccgaaaacaatgaagctcattagcagcattaaccccaaaaatctcaaactcagtcccaaacgcttctttcgcaaaaaggaacgatctttagtctcacgctccgacccaccttcattcggatcctcgatcttcctccgacgact

SEQ ID NO: 38720 - DNA, 254 bp, Glycine max
  Clone ID: 700944077H1
tcccaccccacttacatacacactctcccactcctccgagccggtcgagttgaatcggtgagtcagtgaccgagttgaaccatgtcggacgaagagcaccatttcgaatccaaggccgatgccggagcctccaagacctatcctcagcaggccggaaccatccgcaaaaacggctacatcgtcatcaagggtcgtccctgcaaggttgttgaagtttctacttccaagactggtaagcacggccatgctaagtg

SEQ ID NO: 38721 - DNA, 231 bp, Glycine max
  Clone ID: 700944079H1
tttacttcccctatggctcgtcactccttgctcttagccctcctcctcttcgccgccgtggccaccgccgcgatggcggtggccgcgtccgacgccgacgacatcctgatccgtcaggtggtgccagatgttggcgagcgaagaggaggacaacctgctgaacgccgagcaccacttcgcgagcttcaaggccaagttacccaagacctacgccaccaaggaggagcacga

SEQ ID NO: 38722 - DNA, 253 bp, Glycine max
  unsure (1)..(253): unsure at all n locations
  Clone ID: 700944080H1
caatctgagggattaaatcagaagaagctaggaactcgcattgcagatttggaatctcagcttggtcaagcacaagtagagttgaaagttttaaaggaccagctagcttctgctgaagccgcaaagaaagaagctcaagatgagctagtgaagaaagctgtgcaatcagtagtgccagtggtagagaagctccaagagatnatccactccaagaantgctcagagacgtagtaaacngaaagcaaagtccaag

SEQ ID NO: 38723 - DNA, 258 bp, Glycine max
  Clone ID: 700944081H1
ctcgagccgaatcggctcgagcttattgcaatgaaccacacagacgctatcatcaccagcaccttccaagagattgctggtagcaatgacactgttggccactatgagagtcacactgacttcaaccttccaggactttaccgtgctgtgcacggtattgatccattcgatccacagtacaacatagtctctcccggtgcagacatgggtatatacttcccatacactgaaactgagcgtagttcacagttttccact

SEQ ID NO: 38724 - DNA, 258 bp, Glycine max
  Clone ID: 700944085H1
cttgctccgcgccaagtcgcaccagaaattggacccctctgccgtccacggcgtcaccaggttctccgatctcactccgtctgagtttcgcggccagttcctcggcctgaagccgctccgccttccctccgacgctcagaaggctccgatccttccgaccagcgaccttcctaccgatttcgattggcgcgaccatggagctgttaccggcgtcaagaatcagggctcgtgcggatcgtgttggtcatttagcgccgt

SEQ ID NO: 38725 - DNA, 260 bp, Glycine max
  Clone ID: 700944086H1
ctcaggatctccaatacatgttaagagaacctatttcactgggggcaacctcaaactatatgcatgggttgatcaaacgtaaccagacaatagtggccacatggacttgtagaaaaggtgtgatatatattgatggttctcatgtcaattatactttcaaagatggggatatcattgccataatctttccaaagcaccggttctgaaagttctcttgcctcataagtttttatagagatgtcaagtaaatttcacagcat

SEQ ID NO: 38726 - DNA, 257 bp, Glycine max
  Clone ID: 700944088H1
ttgcttttgatagttatatgattccagaagatgatctagaattagggcaattacgtttactagaagtggacaatagagtggtagtgccagctaaaactcatctgcgtgttattataacatcagctgatgtacttcatagttgggcagtaccttccctgggtgtcaaatgtgatgctgtgcctggtcgtttgaatcagatctctacttttatacaaagagaaggggtttactatggtcaatgcagtgagatttgtgga

SEQ ID NO: 38727 - DNA, 255 bp, Glycine max
  Clone ID: 700944089H1
aaagaaggcgtcttcataaacgcctttcttctccgtttccgtttcctcgttcgaattcgctttttgatctgcgaaaatgagagagtcatctcgatccacattggtcaggctggtatccaggtcggaaatgcttgctgggagctctactgcctcgagcacggcatcgggcccgatgggcaaatgccaagtgacaagacagttggcggtggtgatgatgctttcaatactttcttcagcgagactggtgctggaaag

SEQ ID NO: 38728 - DNA, 253 bp, Glycine max
  Clone ID: 700944090H1
tgcttctgtttgattccttggcagaaacatagatgcaccatcatctgagacatagcagctgactttgtctcagatgatggtgcatctatgcatctgtttgattccttggcagaaactgctgaatttgcaagaagatgggttcccttttgcaagaagtataacattgagccaagggctcctgagttttacttttctcagaaaattgattacttgaaggataaggtgcagcctacatttgtgaaggaaagaaggg

SEQ ID NO: 38729 - DNA, 226 bp, Glycine max
  Clone ID: 700944047H1
agttgaaacctggtgtcttatctgtacatgaagggaacgatgtgaccaagtactttgtcagcagtggctttgcattcatccatgcaaactctgttgctgatataatagctgttgaggctgtgccggtggaccgaattgatgcgaatctagtccagaagggtcttcaagatttcacccagaagctgaactcagccacaactgatttggagaaagctgaagctcagat

SEQ ID NO: 38730 - DNA, 84 bp, Glycine max
  Clone ID: 700944014H1
ctttgggtgtattcactgtcttgcttttgggatcaagttttctacacttggcatgagaatatgagacaagaagatatttgaatc

SEQ ID NO: 38731 - DNA, 233 bp, Glycine max
  Clone ID: 700944015H1
ctaatccctctttcttcctcttcctcagtagtgcgattttcgattctcttctctgcaactatgcctaaccctaaggtcttcttcgacatgaccatcggcggtcaacctgccggccgcatcgtgatggagctctacgccgacgtgactccgagcaccgccgagaacttccgcgcgctctgcaccggcgagaagggcgccgggcggagcggcaagcccctccactacaaaggctc

SEQ ID NO: 38732 - DNA, 236 bp, Glycine max
  Clone ID: 700944016H1
ggtatgcgtgtcgagtttagattgagatataggattgtcttttggtaaaagtccaggtttggagccttttcccatcaattggctgatcaggattaaccataaatccctttgatcagaatttttagtattctgttgcactatatactacaagggaaatatttcagatatctgaaggttgaagtccttttacatccactgaaaactttcttcatgatgcatagtttatagtctccaaa

SEQ ID NO: 38733 - DNA, 267 bp, Glycine max
  Clone ID: 700944017H1
tgacattccatcttctctcttttcctaccaaagcaagttttttatcagcaaaagcactgcttttccttttccttccactagctttacctttttgctcgtgtgtgatcatttgttaaagagcacaaaaaattaaaagatactatttgttgttattattatttgattattgattcatttacatttttttaaaaaactttataattgtcttagtgggaagccttgctaccttgctttgatttttgttgttaattaacgatcttcaacaat

SEQ ID NO: 38734 - DNA, 261 bp, Glycine max
  Clone ID: 700944020H1
cgactcctttgttgcgttgtattgcctctctcgccgaaaccctcgtttccaacttctacagaatccatttcttcgccatggatattgaggaggacatccgttctttgcagctcgattcggcagaagacaataatggggtggtaaatccagaggatggaaagccagaagaagttgagaaatatgataagatggatgaagatccaaagcaggaggttgaggctgagccaaaggctgttgaggctgagccaaaagtgaaagata

SEQ ID NO: 38735 - DNA, 263 bp, Glycine max
  Clone ID: 700944022H1
cacaaacacaactaagaagccaatccaaacgaatctgcggtgatccaaagaacctccactccccaccatcacatgtcacgtcgcccccacgcagcgccgccgccgccgccgcggtcactccacaagcaacagtcgtcgtcgccggacatgctccgcgacgaggcgtggcagcggcggaaggacaacaaccaccccgtgaaccgccgccagcaccggctgagcaagagcctctcggaggacgacttggacgaactgaaggcgtg

SEQ ID NO: 38736 - DNA, 263 bp, Glycine max
  Clone ID: 700944023H1
gaaaaaaacaccacctttctttttccgactaaaggttcgccggaaaatgcctctatcctcctcttcctcctccgccgtagactccgccgtctccggcgagatcatgctctttggcgttagagtcgtggtggactccatgcggaagagtgtgagtatgaacaacctctcgcagtacgagcttcctcgcgacgctgccaacgccaaagacgacgccgcaggatacgcctccgccgatgatgcagctccgatcaactccgacaaga

SEQ ID NO: 38737 - DNA, 262 bp, Glycine max
  Clone ID: 700944024H1
cttcttcttcttctcttaaaagttattaagagcttttgcttttctttctgcgcgcttttcccaattaagtagttcttccttttctcaaagcaaaaaaaatgttcatcgagagtttcaaggttgagagtcctaacgtgaagtacacagagactgagattcagtccgtgtacaactatgaaaccactgaacttgttcacgagaacaataatggcacttatcagtgggttgtcaagcccaaaactgtcaaatatgaatttaaaac

SEQ ID NO: 38738 - DNA, 260 bp, Glycine max
  Clone ID: 700944025H1
gaagagagcgtcctagtcgcaaccctaataagaagaaccacagcttcaagcgagtgacatccaccagccatgggtcgtatgcacagccgcggtaagggtatatcctcttctgctttgccctacaaaaggacaccccctagctggctcaagatctcttcgcaagatgtggaagaaaatatctgcaagtttgcgaagaagggtttgaccccgtctcagattggtgtcattcttcgagattctcacggtattgctcaggtcaa

SEQ ID NO: 38739 - DNA, 257 bp, Glycine max
  Clone ID: 700944026H1
atccactcacctgcctcttcctcacccctttctccatctaacgagtaaggaaaaatggcgcgtaagaagatcagagagtatgactcaaagaggttgttgaaggagcactttaagagactttctggcaaggagttgccgatcaagtctgcacaaattactgcatcaactgatttcactgagctacaagagaaggcaccctggctttcatcttctaaattggttgtgaaacctgacatgttatttggaaagcgtggcaa

SEQ ID NO: 38740 - DNA, 258 bp, Glycine max
  Clone ID: 700944027H1
ctcatggtgttagcatgagtcccatcaaaggtacacaatccaatttgtgagcagatcttttttggctttgatgggactcacggtgttagcatgggtatcgagagtgtggtggataagaatgaaaaaaaatcatctggtggcattcgggatgctggttgtactgcatgtgagatggctgttatttggatgcagaaccagctgaggcagaatcagacagaagataggataatagactatgccaatgagctttgtgaaaaa

SEQ ID NO: 38741 - DNA, 258 bp, Glycine max
  Clone ID: 700944029H1
atttgaaaagagcgatagacaaagagagaaatggcatcggtgtccggaaacataaagggtttttacagacagaagaaaaccaccgccaccaaaaaatcttccaaaaaatctccgattcccgccgcggcccaatcaccggccctcatatcccacggcggaaaacccgacctagaagatgagtacaaggagagcgaggtggcactgcggcaattcgacctgaacatggcgtacggaccttgcctcgggatgacgcggctc

SEQ ID NO: 38742 - DNA, 257 bp, Glycine max
  Clone ID: 700944030H1
attgtattgtagtagtagccatggggactttcaatcactatgtgattgttaagttcaaagatggtgtggcagttgatgatctcattcaagggttggagaagatggtctttgggattgaccatgtcaagtcctttgaatggggaaaggacattgaaagtcatgatatgctaagacaaggtttcactcatgctttcttgatgacattcaatgggaaagaggagttcaacgcatttcagactcacccaaatcatcttgag

SEQ ID NO: 38743 - DNA, 250 bp, Glycine max
  Clone ID: 700944031H1
atatgctctactatatatgcccaatgcacacgcttttcactttgatggtgtatggagcattgggtatatataacaagtataatgaaattccctctgtaatggctgcaaagattttggcatgctttcttgtggtgatcttggtttgggacatccctggattctttgacatattttggagcccatttgctttatttttgggttatactgatcctgcaaagcctgatctccctcgaatgcatgagctggcatt

SEQ ID NO: 38744 - DNA, 217 bp, Glycine max
  Clone ID: 700944032H1
aagaagcattcctaaggaattggagggccttcatgagaaatactcatccacttgcagattgttcaagtaccaagaacttgtattggcaacatcaaattttttgccagaaaatttgattgggaaaggaggaagtagtcaggtttatagaggttgccttcctgatggcaaggaacttgctgttaagatcttaaagccatctgatgatgtttgaaggagt

SEQ ID NO: 38745 - DNA, 266 bp, Glycine max
  Clone ID: 700944033H1
tgaatcttcattcacacaaactgatttttcttttctcttcacattcttctaaattttggccccttcttcctcaatgataccagggccactcggaaacacaacaacaacaacagcaacaagtgtgcataatggagggccaagatctctcgccacctcgcatggacacatctcgaccgtccctcggcttccccttgggcactgccctcctcttgatcatcatcttcagcctcagcggcatcttctcttgttgctaccactgggacaag

SEQ ID NO: 38746 - DNA, 265 bp, Glycine max
  Clone ID: 700944035H1
cggctcgagctcgagccgaatcggctcgagggagtatgaagcaggaaatgagttcgggaggctaacttgtacaacacatctatcactttcagtgtataaaacaatgggctgcacaaaaaaatttctgcccagtatgtaagcaacaagttgcggctcgacactgagtgacacaaccctactactgtttagcttccattctcatccataaatttgtgtatagttttccatatccaatacaagcaagaattttcattctctgctgtca

SEQ ID NO: 38747 - DNA, 263 bp, Glycine max
  Clone ID: 700944036H1
cggctcgagcggctcgagcggctcgagcaccgttcgctcttcctctcccagacaaacacatggctttgcccaagcagcaaaccgtcgattaccccagcttcaagctcgtcatcgtcggtgacggtggcacaggaaagacaaccttcgtgaaaaggcatctcactggtgaattcgagaagaaatatgaaccgaccattggtgtggaggttcatccgttggattttttcactaactgcggaaagattcgattctattgttgggat

SEQ ID NO: 38748 - DNA, 261 bp, Glycine max
  Clone ID: 700944038H1
gcttcttgttgttggaaagaaaccctagcaagcggaacaatggcagacgttgaggtcgatgtggcggctgcagcagcagcagggcagccgaagaagagaacgttcaagaagttcagtttcaggggcgtggatctcgatgcgcttctggacatgtccaccgatgaactcgtgaagatgttcagtgctcgcgcacgtagaaggttccagagaggcctcaccagaaagcccatggccttgatcaagaagcttcgcaaagcgaaa

SEQ ID NO: 38749 - DNA, 260 bp, Glycine max
  Clone ID: 700944039H1
caaaaaaatcacctttcccttattagggttttgaaatgtggagggagaatggaaggctctgaatccgattctgtgtcactttccatttccaatggcgaagagccccaattggggcgaccttcttcccccgccgctcctcctgagccgtcagatctcaatcatgcggcggaggaagagacactctccggggagcttcagagcaagttggatttgaaggatgtggatgaaagtgaggagaaagtttcggactttaacgatgg

SEQ ID NO: 38750 - DNA, 258 bp, Glycine max
  Clone ID: 700944040H1
caaaaattagggaggaatacccagacagaatgatgctcactttctctgttttcccatctccaaaagtttctgatacagttgtggagccatacaatgccactttgtctgtacaccaactggttgaaaatgcagatgagtgcatggttcttgacaatgaagcactttatgacatttgctttaggacattgaaactcagcacccctagctttggtgatctcaaccatctgatttctgcaaccatgagtggggttacctgtt

SEQ ID NO: 38751 - DNA, 257 bp, Glycine max
  Clone ID: 700944042H1
ctcgagcctaatcggctcgaggtaaaacgttggttttctctgagaatggcaatgcaggcaggcgaactctgtcagcaccaaagtccacattgccctctcattttcttcaacccgattcccgattttggttccttcagcggagggttgtttctcgagcccaaaatccccgattccttcgttcgttccatttcgctgaagatccactccactcccttttcagaatccaatcctcgccgccaccggagaagggttccggc

SEQ ID NO: 38752 - DNA, 167 bp, Glycine max
  Clone ID: 700944043H1
ctttactcctcttcaatcagttgcatattctttgctattccaatggccactgttgaggttgtgtcagccaaggttgccctcccagaggacacaaaagaggcatcattgaaggttgacgaggagaagaacacagaagaagttgttgacgactccagacaccacgaaac

SEQ ID NO: 38753 - DNA, 258 bp, Glycine max
  Clone ID: 700944044H1
gcaacacaagaacactctctcgaacatccatggatccagtgagcgtgtggggtaacacgcccttggcgacggtggatcccgagatccatgacctcatcgagaaggagaagcaccgccaatgccgcggcatcgagctcatcgcctccgagaacttcacctcgttcgcagtcatcgaggccctcggcagcgccctcaccaacaaatactccgagggcatgcccggcaaccgctactacggcggcaacgaattcatcgacc

SEQ ID NO: 38754 - DNA, 256 bp, Glycine max
  Clone ID: 700944046H1
acgctttctcatcgctgatcaaacttcaaaccctagctaggatttcaaggtacacttaacgatggcttcaaaacgcattactaaggagttgaaggatctgcagcaggaccctcctgtttcctgcagtgctggccctgttggtgatgacatgtttcattggcaagctacaattatgggtccaactgacagtccttatgctggtggtgtattcctggtgaccattcacttcccaccagattatccatttaagccacca

SEQ ID NO: 38755 - DNA, 260 bp, Glycine max
  Clone ID: 700944012H1
tcaatttccatcttcaacttcaacacttaaactccttttagtttcaataatccacaccccaaaccccaaatctttccctatttattttcatcttagttttccctaggaccatatattataccatatttatatatcttcacatacttaataatatataataatgggtgttgtacggacgtgggagagcaggagggcggagctggaggcctttcgccggagcctggtggcagccgccggcatccagcggcggaaagacgatg

SEQ ID NO: 38756 - DNA, 237 bp, Glycine max
  Clone ID: 700943975H1
atcaaggttaacccttcatttgtcagctgccgtggaggttatgctacatggtttagcagcaaaaggagcgaccccaacctgctcactggtgctcttgttggtggacctgatgcatatgatgactttgctgatgaaagagataactatgagcagacagagccagcaacatgtaacaatgcttctcttattggtattctggcaagctaggttgaagtcatggtggctataaccagcttc

SEQ ID NO: 38757 - DNA, 242 bp, Glycine max
  Clone ID: 700943976H1
caattggaattcagttttccaaccacacgctgcaaatcgagtcgaaggccgtcgctgcaaatctctctcccgaagaagaccgagtggatccaatttggagagcccgaggttaccgaaacggtgtcgcaagtaacccgaacgcagaagagaagaagcactacagaggagtgctacagagaccgtgggggaagtttgcagcggagatccgggacccgaacaagcgcggctccagggtgtggctt

SEQ ID NO: 38758 - DNA, 235 bp, Glycine max
  Clone ID: 700943977H1
ggtgcatccagaagcaaagcaaaggcatgatgaggttattagggttttagagatgatgaaatgagaagtcgaatggcatcatcgtcatcggcatttctggtgatctgcatcctgcactcgttaatagcagtgacatgtggggggctgatgatgttctacatgaaggaggtctacaccttcggccacggagtgcaggccgccaccaagctcttgggatccacgccgcacgacaagc

SEQ ID NO: 38759 - DNA, 155 bp, Glycine max
  Clone ID: 700943978H1
aattgacgttgttcctttgttttctttgtatttcagatatatgcagtatctattactatccgtatagtgtttggcttcatgttcatagcactgatatggaaatttgacttctctcctggtatggtcttgatcagtgctattctgaatgatggaac

SEQ ID NO: 38760 - DNA, 207 bp, Glycine max
  Clone ID: 700943979H1
aaaaggagttgtgtaatctaggttttggttgattgcgggatggaagtggaggcagtgcaacaacagcgcaaaggagcgcacctgaagaagagggctctgaagaacaaagctttgggcatcactttcaacgagacagatctcactgactacgtcaccggctttcacaagcgcagatgaagagaagaaggaagccagaagcaacagacg

SEQ ID NO: 38761 - DNA, 218 bp, Glycine max
  Clone ID: 700943980H1
caatgagttattacaaccagcagcaaccgccggtcggagttccgccgccgcaaggttatccgccggaggggtacggaaaggagggatatccaccgccgggatacccgccagcgggatcaccgccagctggatcacaccgccgggatatccgccacaacaaagctaatctccgccgccttaccggcgcaggggtatctccgcctacgctcttcaatagc

SEQ ID NO: 38762 - DNA, 244 bp, Glycine max
  Clone ID: 700943981H1
agggaatgacattgtggaattaagactgatggtgttcgcgatcggagactttgaaaccctcctttcacgcattcatcccaagcattcaacaatgtctccgttatcgaagctctcgttgctgatactgatggtgttcatctcctccgcgatggcctcctccgacgagagagtgagcgaattgctctccctgcaatctagatccaaatcgggcgtaatccggctgaacgaccaatccctcgcccgc

SEQ ID NO: 38763 - DNA, 240 bp, Glycine max
  Clone ID: 700943982H1
atggcctatacccatactacggatttataccaaactgagattcttggaatcaattatggaaatcgtcaactcaaatttgatggccacagcaaagtaggaaaagtgtttattgatagtggcagttcttatacatatttcccaaaagatgcatacttggatcttgttgcttctcttaatgaagtttctgggttaggacttgttcaagatgcttcagatactactttacccatttgctggcaa

SEQ ID NO: 38764 - DNA, 67 bp, Glycine max
  Clone ID: 700943985H1
cggctcgagcggctcgagcggctcgaggtgacacaacaagatatggatgatacattccaaacaccgt

SEQ ID NO: 38765 - DNA, 200 bp, Glycine max
  Clone ID: 700943986H1
agaatctgttctggctgtaatgctgatattggccatggaagatttttgagttgcatgggatgttattggcatccagaatgcttttgttgccatgcttgcaaacttccaatcactgattattttcgttctatgtctggaaatcgtcgttatcataaatcctgctataaggagttgcatcatccaagatgtgatgtttgcaa

SEQ ID NO: 38766 - DNA, 239 bp, Glycine max
  Clone ID: 700943987H1
atggcctatacccttactacggatttataccaaactgagattcttggaatcaattatggaaatcgtcaactcaaatttgatggccaaagcaaagtaggaaaagtgttttttgatagtggcagttcttatacatatttcccaaaagaggcatacttggatcttgttgcttctcttaatgaagtttctgggttaggacttgttcaagatgattcagatactactttacccatttgctggca

SEQ ID NO: 38767 - DNA, 240 bp, Glycine max
  Clone ID: 700943990H1
ctctcgcaaaccaattttcacattctttgtattgagttacttgagctagccgcaaccatggaaccatccaaaaactcgcagaagccctcacatttccatgactacctccccgtgatggcgaacaagctcggcggggacggcctcatcgatgagctctgcaacggcttcaagctgctcaaggactccgacagaggggtgataacctttgagagcctaaagaggaacgctgctctgctgggc

SEQ ID NO: 38768 - DNA, 240 bp, Glycine max
  Clone ID: 700943991H1
ctctccgctctaaattctctgtctctctctctctctctcgatcaatcatggctttgcccaatcagcaaaccgtcgattaccctagtttcaaactcgtcatcgtcggtgacggtggtacaggaaagacaacgttcgtgaaaaggcatcttaccggtggaatttgagatgaaatacgaaccgaccattggagtggaggttcccccattggatttcttcccaaactgtggaaagattcgcttc

SEQ ID NO: 38769 - DNA, 236 bp, Glycine max
  Clone ID: 700943992H1
ggatagttggagtcttccatgagctccttcatctcgcactccataagcaaaccgagcgcaagaacgttagcaacttgcgtagacccttggccttacctcagaagtttactaaagtatttgagcgtcatcctggtattttttatatttccaagaagagtgataccctacagttgttcttagggaggcctataatggtcaggaacctgtgcaagatcatgcccttgtacaaattagag

SEQ ID NO: 38770 - DNA, 228 bp, Glycine max
  Clone ID: 700943993H1
cttgcagatagtgcattggctgctgggcgatcagttgttaccaggcttctagtggcggatactctagcaggaagcttgattgggaagcagggatcaaccatcaaatccattcaagatggctctggttgcactaatacgtgttcttggatcagaaaacctgccaatatgtgctttgcgacatgatagtattgttgaattacaaggggaatctgctggtgttcacaaggc

SEQ ID NO: 38771 - DNA, 191 bp, Glycine max
  unsure (1)..(191): unsure at all n locations
  Clone ID: 700943994H1
cacgattatattcttgtcaggaagaacactggacaaacaggccgtaacagaagcaaacttaaagaaggctggctaccacacatgggaaaaattaattctcacggatccacnagatccttccactccaaatgcagtttcatacaaaacagccagcgcagagaggacacctgataaaggccaggggatacaaa

SEQ ID NO: 38772 - DNA, 165 bp, Glycine max
  Clone ID: 700943995H1
ctcgagccgctcgagccgtgctgcttcatactttttctcgcctataaaatgtccgcgactgcttcactctgggccacttccagaacaactttctcatcatcgaagcccgtcgcgagaagaagctgcttcgtcgcggttctccaaaatcgcgtttccccaaggctc

SEQ ID NO: 38773 - DNA, 215 bp, Glycine max
  Clone ID: 700943996H1
acgagagtcacatctacgccatgaacaaatcgcagtcgaagaactccaagtcctcgactcagttcgactcgccgctcagcttctactccccgatgcacggggacggtaaccgagtcgccggagtaccgggtcgccggaaaactggccggagaagcgcgacaactccatggccatcgtgaccgccggcaagctcaagcagttcacgccggagaagc

SEQ ID NO: 38774 - DNA, 271 bp, Glycine max
  Clone ID: 700944001H1
cgcttacaaggaaatgaccaaccttattgagaaggcaagaaacaatgcatcagcatatgagaagaggtctgagtatggtgatcgtgaaatcacaaaggcagatctggagatggtgactagattagatccacttcgggtgtatccttacagatatcgagcagcagttctgatggacagccataaggaagaggaagccatgcggaactctctagagccaattgcattcaaagctggatttgcacctcttgcatctacgtgcagcaattccatg

SEQ ID NO: 38775 - DNA, 268 bp, Glycine max
  Clone ID: 700944002H1
taaaaagagaaaaagaataaataaaagtggaggaggagggtgtaggtttggttgatttgattgttgtgcatccatcgttaagctagtggcgatcggatccagctacagcatagagatcaaggaaggaaggaaggaagatgttgggtgttataaggcacaagagtattcgccctgccttctccgcaatcagacacttgtcttctgcagctaaagagattactgtcagggaggctctgaactccgcactcgatgaggaaatgtcagctgt

SEQ ID NO: 38776 - DNA, 267 bp, Glycine max
  Clone ID: 700944003H1
gtcttgccatggtgggcttcttgggctttgcagtccaagccgccgccaccggtaagggcccgctcaacacctgggccacccacttgagtgacccactccacacaaccatcattgaagccttctcatcctcctcttaagaagaagagtctttcttgtgcctcgtcactattactagcatattgtaaaagtctgttcttcttcggcttttggttgtaattagaacattttcacttagttggattagtagtacttgtgaacaacttgtaa

SEQ ID NO: 38777 - DNA, 266 bp, Glycine max
  unsure (1)..(266): unsure at all n locations
  Clone ID: 700944004H1
aggatttggccctgcatgcatgcgccggggagcctcccctcacattcctcgactcacttcttcttggagagtgggaagatcgcatgcagagaggactttttcgctatgatgttaccgcctgtgaaaccaaggtgattcctggtgaatatggtntcgttgcncagcttaatgagggtcgtcacctcaagaagagaccaactgagttccgagttgacaaggtccttcaaccctttgatgaaaacaaattcaactttaccaaagttggg

SEQ ID NO: 38778 - DNA, 264 bp, Glycine max
  Clone ID: 700944005H1
cgttatcctaaatgtgatctattgatgaataatttgagtgaagctttcaatagcactattttagtggcaagggagaaaccaataataacattatttgagtggattaggtcgtatttaatggctaggtttgttacacaataacaaaagctagcaaaatatagtggtgacattatgcctaaacccatgaagaggctagatggggaaattgagcttagtcgtaactggagttcaagtactcttataagatattagagattacccatg

SEQ ID NO: 38779 - DNA, 262 bp, Glycine max
  Clone ID: 700944007H1
tgggatccagtataaagcttatacagattatgcactggacatgggcataattcagaaggctgactatgaacgcatcaacaaagtgatggttccagcctgcgaaatggcaataaaactatgtggcactgatggaaacatcgcatgcacggcatcatattttgtttgtaatacaatattcaattccatcatgtcacatgctggtgatatcaattattatgacatcagaaagaagtgtgaggggagcctttgctatgatttttcg

SEQ ID NO: 38780 - DNA, 264 bp, Glycine max
  Clone ID: 700944008H1
ctcttcttcccccaacaaactaaaccaaaccataccattaagaaacaacacatctatctcagtccccaaaccatgaaaccctaaattaaattcatgtgctcctccaggtctaccagtgctgcaccaacaagaccttgttacttggaacaaggccacggcttggcttccttaaaacacatggatgcgtgtcataatcgtgccaacaactttgtctctaggtccatgaccatgggttacggcacttcctaccacagaactagtttc

SEQ ID NO: 38781 - DNA, 262 bp, Glycine max
  Clone ID: 700944009H1
gaaaaaatgggttcttcttcttctatgtggacggtgtgtgtgattttggcatcactggcctctgcagcactctgtgccaacccacgcaggccagtggatgtacaatttggccgaaactacgtgcccacatgggcctttgatcacatcaaatatttcaatggtggttctgacattcagcttcatcttgacaagtacactggtactggcttccagtccaaagggtcttacttgtttggtcacttcagcatgtacataaagatgg

SEQ ID NO: 38782 - DNA, 260 bp, Glycine max
  Clone ID: 700944011H1
aaaaaagcacaatcaatgtattaatttatatagtaatgcaaactggaagacttgttttcctctaacaatatctcacttcaacttgttgtcattattaaatgagtgcatagtgttggtgttctggagttggtcatggaatttattcaattcacatcccatttgctactatatatgctctcagtgccatattaaatgatgaaattcttattagtctagtttgattttactcgtaaaaacaattcatgcagacagagaaaata

SEQ ID NO: 38783 - DNA, 236 bp, Glycine max
  Clone ID: 700943974H1
cttctgaactgcactctgcttcttcgtttctttgaattgtgcgttttgtgtatgcctgattctgaaattagctcttgttagaaagatggtcgattttctcagcatctcatgatgactccatggtttattattaccctgccaatggcatcttcttcagactcatgggtgaaggatataatgaagcactgaaacttgctgatgatatcagtggcatgatttctgagcagagttcattt

SEQ ID NO: 38784 - DNA, 239 bp, Glycine max
  Clone ID: 700943937H1
gcagaattatggaaacagcacctatggaggatatgggtctacaatgaattataattctgggtatggatctggaatgtatggatcttcttatggtggactaggaggaggaatgtatggatcatcttatggtggggggatgtatggtaacagtatgtacaggggaggatatggtggcatgtatgggtcatccgggatgtacgggggtggaatgtataacagtggcttagggggtccaatgg

SEQ ID NO: 38785 - DNA, 242 bp, Glycine max
  Clone ID: 700943938H1
gaacacatgcggcaactgtgactgcgctgacaagactaactgcaccaagggaaacagctatggtgttatagtagagactgagaagagctacatcgagactgttgacatggatgttccagcagctgagcatgatgggaagtgcaagtgtggcactaactgcacttgcacggactgcacttgtggccattaaggaatatgtatgaaaatgtaattgccatgtgtttggcaatacaaatctccaa

SEQ ID NO: 38786 - DNA, 241 bp, Glycine max
  Clone ID: 700943939H1
cctaaccgcacctctctctttcttcccgtgtgcgtcaaagcgaagaacgcgacacgatggtgttctacttcaaagcgcgccccgaagccggcgatttcaccatcttcatgggccttgacaagtacgagaacgaggaactcatcaaatacggttttcccgaagacatctggttccatgtcgataaaatgtcttcagcccatgtctatgtcaggttgcacaaaggccagaccatcgatgacat

SEQ ID NO: 38787 - DNA, 242 bp, Glycine max
  Clone ID: 700943940H1
ctctctcactcacaaacgcacactgaattcaaaaacatcgaaagagagaggcatggccgagtaaaccttcatcatgatcaagccagatggcgttcaaagaggccttattggcgagattattagcagatttgagaggaagggtttttacttgaaagggttgaaactcgttactgtggaccgtccttttgctgagaagcactatgctgatttgtctgcaaagcctttctttagtggtttggtgg

SEQ ID NO: 38788 - DNA, 169 bp, Glycine max
  Clone ID: 700943941H1
gagagagagagatctgattcttcaccataactgtcattgctttgcttctctcactcagcacaagttgacaagcagggcattgccatttcaatcacatacaaaaagcacacaccccaattcaccagcattatcctaacagttcagtcttttctctgctaagagaagacag

SEQ ID NO: 38789 - DNA, 180 bp, Glycine max
  Clone ID: 700943944H1
ggaaacaaggtaaaccaagattgaagccgcctttcccagccaatgctgggttgtatggatgtcctaccactgtcacaaatgtggaaactgtggctgtgtctccaaccattctaaggcgtggacctgaatggtttgccagttttcgtaggaagcacaatgctgggacaaagttgttgtgtg

SEQ ID NO: 38790 - DNA, 187 bp, Glycine max
  Clone ID: 700943946H1
tgctattatcatccgcagctgcttttattcgcaccgcaaacagtgagccatggccgtcggaaagagaaatcgcatctccaacgggaagaagggtggcaagaagaccgcagctgatccctttggcaagaaggattggtatgacattaaagctccttgtgttttcaagtgaaaaatgttggccaaaacc

SEQ ID NO: 38791 - DNA, 190 bp, Glycine max
  unsure (1)..(190): unsure at all n locations
  Clone ID: 700943947H1
ctcgttcttcttcttttgttgttctgtgtttgtgtttgtcttttctctcacctgaaaatgtcttgctgcggtggtaactgtggttgcggaagctcctgcaagtgcggcaacggctgcggaggctgcaagatgtanccagacttgagctacactgagtcaaccaacaccgagacccttggtcctggggagt

SEQ ID NO: 38792 - DNA, 58 bp, Glycine max
  Clone ID: 700943948H1
aaatcatatacaacattatttcattcattgttgctgtgttacacatgctcactgttat

SEQ ID NO: 38793 - DNA, 260 bp, Glycine max
  Clone ID: 700943949H1
gttgagaaataaggggaaaaaatggtgtcgctgaaactgcagaagcggctggccgcaagcgtgctgcaagtgtaggcagaggcaaaggatgtgagcttgagccccacatgcaagtgcaatcgaatatgctccatgagcacaattctgcgggcaaagacatgcaggaagttgggttcaaggcatgggtttatcatcagggaagccaacccaagattcacttcacgctcgcgtgcgtcgtaggattgaaggaggcaaagaag

SEQ ID NO: 38794 - DNA, 243 bp, Glycine max
  Clone ID: 700943950H1
cccgtcttcacttctttatggtggggtttgcacctctcacttctcgtgggtctcagcaatatgtctcccttactgtcccagagctgactcaacaaatgtgggatgccaaaaatatgatgtgtgctgctgatccccgatacggccgatacttgactgcatctgctatgttcaggggaaagatgagcaccaaagaggttgctggacaaatgatcaatgtgcagaacaagaactcatcatactttg

SEQ ID NO: 38795 - DNA, 241 bp, Glycine max
  Clone ID: 700943951H1
acttggagtccttagctggaaattagatgctgataaccatgaaaatgatccagagctgaaaaagattcgtgaagagcgtggctacacctacatggatgtttgtgaggtctgcccagaaaagttgccaaattatgagcagaaaatcaaaagcttctttgaagaacatcttcacactgatgaggagatccgcttttgtgctgctggaagtgggtattttgatgttagggattgcaatgatgct

SEQ ID NO: 38796 - DNA, 242 bp, Glycine max
  Clone ID: 700943952H1
cacaattcaagagtaactttgttgctgcttcatcaaactctcagaatcaaggctttggtaacaatacaagcatgactgctaataagagaacagcactccctggttttgtatccggtggatcaattggtggtgacataaatacttatcagagtactgcttcacccaatcctgctacatcagcggtaatttccaccagtcaaggttatggagtaaatcctggtcagaagagcacgaacagttct

SEQ ID NO: 38797 - DNA, 219 bp, Glycine max
  unsure (1)..(219): unsure at all n locations
  Clone ID: 700943953H1
ccttcttcttcttctcttaaaagttatgaagagcttttgctttgctttctgcgcgcttttcccaattaagtagttctcccttntctcaaagcagaaaaaatgttcatcgagagtttcacggttgagagtccttacgtgaagtacacagagactgagattcagtccgtgtagaactatgaaaccactgaacttgttcacgagaacaataatggcacttat

SEQ ID NO: 38798 - DNA, 238 bp, Glycine max
  Clone ID: 700943955H1
gagagttagaacacatatttctatgtcttttacctttttgctaggcacagcacacgccctctcaaatagacactgagagatgaattgtgatcagtttcaggagaacatgatgttcgtagaaagccctgaagatggtggcaaccacttcgacgatgatggacgagtcagaagaacgggtacatggataactgggagtggccatatgataacggcagtgatagcgtcaggagcgttgtca

SEQ ID NO: 38799 - DNA, 216 bp, Glycine max
  Clone ID: 700943957H1
cgcttcttccttctctcatcaacaacatgcagatcttcgtcaagactttgaccggcaagaccatcaccctcgaggtcgagagcagcgacaccatcgacaacgtcaaggccaagatccaggacaaggaaggtatccctcctgaccagcagaggttgatttttgctggtaagcagctggaagatggtcgcactcctgctgataataacatacaaaagg

SEQ ID NO: 38800 - DNA, 241 bp, Glycine max
  Clone ID: 700943958H1
gtgaagtctggcgtctgggctgactcactaagccgtggattgattgatctcaatataactgctcctaaaaaagtatcccttgcggacgttggaattgtgggtggattgagtgatggatccgatgaaagggagaaaggccctccaccttcattttacatggggagagctatgggttcaggatctggtcttggaatgggtaggtctggattcactccttcacagccagcagctggagacgact

SEQ ID NO: 38801 - DNA, 243 bp, Glycine max
  Clone ID: 700943959H1
atagaaagcacatagaagagaaagaaagaaaacaaagaggagaaagaaagtagttgaggaagatacaaacaatttttgcagattgttgagaatgcctttcaagaagcctcatcacacctcagacaagaactacataacaggggacgacggaggcaagttcgagatacaacctagaggactcaacattgtgtggggaaatgattctcgatactggaaaattccagaacaaggtcctgcggagct

SEQ ID NO: 38802 - DNA, 246 bp, Glycine max
  Clone ID: 700943960H1
tctcgagccgattcggctcgagtagagtgtttgctgattctctcggacgttgttcatttctgtatcagtgagagaaactctctatctagaaaccctattgcacgttttgcaatcgaactcgacaatggccaaagcaacctccctcgaagaatcatcagggaaacgcagcgtttgttcagtgagccagcaccaggaattaagtgcctccccttctgaagagaatatgcgatatttcaatgtgatgat

SEQ ID NO: 38803 - DNA, 238 bp, Glycine max
  unsure (1)..(238): unsure at all n locations
  Clone ID: 700943963H1
gcaagagcttccgaatcgagggcgtggagggcgagttcgaccagatttgccgcagcctcggcctctccggtcccgaggcattctccattccggccgccgtctgggaggccatgaagctccgttgctcctcggactacttcctcgncgcccgaagcacggcggcgcaggagaggaattcgacgaagagccgacggagaaggagaaagaggaagtggaaattgcagtataagcgagcgag

SEQ ID NO: 38804 - DNA, 266 bp, Glycine max
  Clone ID: 700943964H1
cacacttcggctcgaggtccttgtggaaaagatggagattttcaccttagatttattttcttgcttacttcctgtgctcacaggcttgctggatagcaagatagaaagacatgtaaagctgtcactggatatgctgttaaagcttgtagcatttttggtccaacaatacgtgcaactgtttcagcacctccctctgttggtgtcgatctacatcaagaagaaaggcgggaatgctgcaacaagtgctttatggaactgcaaaagat

SEQ ID NO: 38805 - DNA, 251 bp, Glycine max
  Clone ID: 700943965H1
ttcgtcgaagtgatccagattatgaccgtagttatggcgggtatgctaggagtatcccaacctctgctgttagacttggtgccatttaacttgcagaaagctcaaccttcatttgctcaatatgatgctacgtttaatcagttaggtcagatgtcacaaactcaggcctcacttcactatatacctccgtcaaccccgataatgggaccttttggcaccacaggattcaatcagacctgcgcctgagggtg

SEQ ID NO: 38806 - DNA, 239 bp, Glycine max
  Clone ID: 700943966H1
ttttgtttataaaattattgaccttgcattctaaggtgcagttctttttttcccttgggagaggggttaaaaatgtatttgtaaatttttttcgtttgagcatcataatttttattttaccataaattacgacttgcatgaaggattaattgaagcttttttacgcaagataaactacaaaaaaggtcggccactcctaacattgtccgtcgtccgggaattgaattccggccggttcc

SEQ ID NO: 38807 - DNA, 239 bp, Glycine max
  Clone ID: 700943967H1
tgttgttgtaactcgttcttcttcttttgttgttctgtgtttgtgtttgttttgtctctcacctgagaatgtcttgctgcggtggtaactgtggttgcggaagctcctgcaagtgcggcaacggctgcggaggctgcaagatgtacccagacttgagctacactgagtcaaccaccaccgagaccttggtcatgggagtggcacctgttaaggctcaatttgagggtgctgaaatgggt

SEQ ID NO: 38808 - DNA, 239 bp, Glycine max
  Clone ID: 700943970H1
cacttctttccttcaacttcagcctctacctcaaccttaacccccacttaacagttttcccaaattttcgtacttttttccttgccatgagtagatgcatctttttcaagctaccttaagcttgaactagctggtagggctttttaaatacgtcgataagttaacagtgttctgcttgtggcctctagtgtattttggttgcagattcaggtacaggtgtgtgacgagttgattgcttg

SEQ ID NO: 38809 - DNA, 239 bp, Glycine max
  Clone ID: 700943971H1
ctagaagtgattcaatgtgctacctgtgtgatgatcgaattcagaagattcaaacagttaaaatgatggaaggacatcctcatttgtgcggctcctcattgtctcaagtgcttcttgaagaaagctgattttgaatctcatatccaagacagccacggaaaccttcttcgacccaatgcagataaagaagctggaaatgagtcggaggcacagagtgttaggcaatcaacggcttcaga

SEQ ID NO: 38810 - DNA, 239 bp, Glycine max
  Clone ID: 700943972H1
cgagtccgtacattcagtcaaggcctcctcgccgatcaacttccaccaccgcttcttctccgacgccgacgctgatgctgacgtcagcaccgaggaggccgaggccgcgtcatggctgctacctaatccatagacagatctaaattcgtctcagtacttgttctccgagaccgaagcggttccttacatagatctggattacgcggccatggatccgcagactgagcagataagttccg

SEQ ID NO: 38811 - DNA, 178 bp, Glycine max
  Clone ID: 700943973H1
cacaaacgttggtggtgctggtgctgtggattgtgtttcaatcatgggttcaagaactggttggatgccaatgtcaagaaacttgagtcagaactggcagaggtataactagctcgatggtcaaagctctcctctcaggtcaccacgagtgatggcagaactattgtgtccaacaatg

SEQ ID NO: 38812 - DNA, 92 bp, Glycine max
  Clone ID: 700943936H1
cactggttctatccctgaccttgatgctccgccgctcgatgagttcaacgtgtcgtttaattcgctgaccggatccattccgaaccggtttt

SEQ ID NO: 38813 - DNA, 247 bp, Glycine max
  Clone ID: 700943904H1
atccaacaatgtctctcaccattccctccaacctctccaagcccgccgccctccgccccaaactaagcccaaagctaaggtccgccgccacaaccaccatcgtctgcagcaccaccaacaacaacaacaacaacaacgtgtcctccgacctgaaggcgttctccgccgcgctggccctctcctccatcctcctctccgcccctctccccgccggcgccgacatctcggggctcaccccatgcaagga

SEQ ID NO: 38814 - DNA, 246 bp, Glycine max
  Clone ID: 700943906H1
caaagaaaaaaaaaaacccttagccaacacaaccatcatggccacctctgctattcagcaatcagcattcactggtcaaaccgctctgaagcagctcaatgagttcgtccgcaagaccggtggcgccggcaaaggtcgcactaacatgcgccgcaccgtcaagagtgctcctcagagcatttggtatggccctgaccgtcccaagtacttgggtccattctcggagcagattccatcatacctgac

SEQ ID NO: 38815 - DNA, 246 bp, Glycine max
  Clone ID: 700943907H1
tgccctcagaacacctttgtcccagggctgattgatctggccatcaagaggaacagtttgattggaggagatgactttaagagtggtcagaccaaaatgaaatctgtgttggtggatttccttgtgggggccggcatcaagccaacatctatagtgagttacaaccatctgggcaacaatgatggcatgaatctctcagcccctcaaaccttccgctctaaggaaatctccaagtaccatgttgtt

SEQ ID NO: 38816 - DNA, 250 bp, Glycine max
  Clone ID: 700943909H1
gcaagagaactcccaaaaccagtgaacaatgtagaatccaagagcgtagtagagaatggcgaatcgccaaaaatggaaaatggagaaacacctgatgccaaagaatctgaagccgtcaatagtgaagaggtgaatgaagaaggcaccgaagaaggccctactttgcagacagatcggggaagacactaatcttgaaaagccacttgaataatgacattagagatgacagttttaattttcttgtttatga

SEQ ID NO: 38817 - DNA, 219 bp, Glycine max
  Clone ID: 700943910H1
gcgggcggtttgtcccacgcgcagtgctgatggacctggagcccggaaccatggacagcgtgcggactgggccgtacgggcacatattccggcacgacaacttcgtgttcgggcagtccggcgcgggcaacaactgggcacaggggcactacacggacggcgccgagctcatcgactccgtccttgacgtcgtgcgcagggaggcgagaaatgcggatg

SEQ ID NO: 38818 - DNA, 247 bp, Glycine max
  Clone ID: 700943911H1
aaatggggtttcatctccttcagtggctgcaagctcagactcgtctcccaatgaggaaaccaaagagaaaaatgtggatgtcaaagatggtgagactgattcctcgttccctaaacctcttgtgactgttaacatcgagccggagccgaatgtggtgcagcaggattttgtagacatgtacatgagattcatgcagcaattcaccgagtcattggcaaaaatgaagcttcctgtggactttgaaagt

SEQ ID NO: 38819 - DNA, 183 bp, Glycine max
  Clone ID: 700943912H1
attgcctccctctgctgccgtccctaatctgaaggctcccgccatctgcgatcggatttcatggctccaaagaaggacaaggctcccccaccttcatccaagcctgccaagtctggcggtggcaagcagaagaagaagaagtggagcaagggtaagcaaaaggcaaaggtgaataacatggtg

SEQ ID NO: 38820 - DNA, 250 bp, Glycine max
  Clone ID: 700943913H1
ctcttttctcttctcttcttcctccaaaacaagtaaacaaacaacactctcacattcaccacaacacaaacacaaacacaaacaaagacaacaaccttgtttgtctgcaatcaaaacctttcaagctggcgttcgagaaccaagacacccctgtccgagaaatcaagcccaagaaccggagattcatgggtgctggaggccctgatgacgaggacataggtgggccacatggctggaaactcttctcaag

SEQ ID NO: 38821 - DNA, 96 bp, Glycine max
  Clone ID: 700943915H1
ctcttggcatggccattcaaatgtcttcttttgtctttgtttctcttacaattttatgttgcttctcttccttggagaagagttttgccttgcaaa

SEQ ID NO: 38822 - DNA, 248 bp, Glycine max
  Clone ID: 700943916H1
ctcgagccgttcatgggctggtttcttatgaaaagaaatacttttgaagtatgaaaccatccaaaaatcataagcggtgctataatcccttgctgcagttcagcataaaagaaggggacacactgttattgggttagtcgcaacttgttgctactgtgtctagcgaattgaagtctatcacaatagaatatcgagggaaattttacctgagtttctgaaggaagaccatgatttcgtgggtttttttt

SEQ ID NO: 38823 - DNA, 247 bp, Glycine max
  Clone ID: 700943917H1
gatcgtagtgatccagattatgaccgtagttatggaaggtatgctaggagtatcccaacctctgctgttaacttggtgccatttaacttgcaaaaagctcaaccttcatttgctcaatatgatgctacgtttaatcagttaggtcagatgtcacaaactcaggcctcacttggctatatacctccttcaaccccgataatgggtccttttggcaccacaggattaaatcagacatctagtgagggtg

SEQ ID NO: 38824 - DNA, 248 bp, Glycine max
  Clone ID: 700943918H1
agactgcagaaatgaaccccactaatggtattgaggtagaaaagattccagcaaatcatgccaaggagaaactagtgattgaggatgatggtaaattcaatcaagaagaagcaaaagggatcgaagaagcaacaaaaacactgttactaaatactgcaacagagagcctaacagaggaagaagtccaggaaatattgcccactcctgcaattgtccaacgtgacacaaagcaaatcatgcaacaacaa

SEQ ID NO: 38825 - DNA, 244 bp, Glycine max
  Clone ID: 700943920H1
ggaaattgttaacattgattcaaagggtgctgtcatatttgtcatagcagcgtctacctttcttgtgctattgttcttcttcatgtcaacttggtttgtctgggtgctgattgtacttttctgcattggtggtattgagggtatgcacacttgtattgtaagcctcactttaagaaaatgccacaattgtggtcagaagacagtgagcttacctctatttggggagatttctattttctccctg

SEQ ID NO: 38826 - DNA, 233 bp, Glycine max
  Clone ID: 700943921H1
ggattccgactcgccgcattgactcggtccgggttggggtcgactcagttcggtatttcattctctcgcgaatctaatctataggaaaagctaagggcacatcacaatgaaggcattgattctggttggggggtttggaacaaggctgaggccactgacactcagttttcctaagcctcttgttgattttgctaacaaacctatgatttgcatcagatagaggcccttaaggc

SEQ ID NO: 38827 - DNA, 243 bp, Glycine max
  Clone ID: 700943922H1
gtttgatgatttcattgcagatgcactgcgaggtactggattctatcagaaagcaacactggaagcttaagcagatagaacttgcagattgtgaaatatatgcttcttgtgaaccttgccccatgtgccttggtgcaatccacctttctcgaataaagaggttggtttatggagcgaaggctgaggcagcaattgctattgggtttgatgatttcatagcagatgcactgcgaggtactggat

SEQ ID NO: 38828 - DNA, 244 bp, Glycine max
  Clone ID: 700943923H1
caatatcctctctttttctcttcgcactctccctcatggcaaggttgagaggctctatggtctcgcccctgttgctaagtacttggtcaggaacgaagatggtgtctccattgctgctctcaacctcatgaaccaggacaaaatcctcatggaaagctggtactatttgaaagatgcagtccttgaagggggtattccatttaacaaagcatatggaatgacagcctttgaataccatggaacg

SEQ ID NO: 38829 - DNA, 247 bp, Glycine max
  Clone ID: 700943924H1
caaattcagggtatctggcatccccatgcttgtggccattgcatcaagtggtcagacattgacaacaaaagctcgagatctggtttcactctatggagcagatgcatatcctttcaccgaggagagaataaaagaaatagagacagaacaagaagagactgcaaaggggtggccggagaagctgaagcatgaattacatgagcatgagcttgtgttgacgcgccgcagggtgtattactgtgatgct

SEQ ID NO: 38830 - DNA, 247 bp, Glycine max
  Clone ID: 700943925H1
aaagtgggtatcccttgtttttggaatcattctcatgactgtattctcatcataaaccattgcataccatgtagttaatattcaagagtgttatgattgtgagaaaggagtgagtactgagtgctttagtggtgagtttatcagagtggattagggatatgagattgttgtatccctctatgaatttattctgaggtatgctatatatgattgcttcatatattttttatgcacacttccacggtgg

SEQ ID NO: 38831 - DNA, 176 bp, Glycine max
  Clone ID: 700943926H1
accaaatcaaaccaatccgtttgtgaaaaaaatcatccaaatacgaagtgaaacacttgattaatatacggtagaagctagcttaggttcagcatcatagctgacatcgagggagttgcaagatttgccagaaggatgcattgccacaatactgtcatacaacagtcctgtggatg

SEQ ID NO: 38832 - DNA, 197 bp, Glycine max
  Clone ID: 700943927H1
cttcttcgtctttactcttttcttcaccgaagcgaaaaagaaaaggcttgacttgagagaaatagagcttcgaatcgaaactcagaattagaaaaaaacacaaatcacaatcacaatggcaaggtacgaccgagtaatcaccgttttctcccccgacggccacctcttcacagtcgagtatgccctcgtagccgtcc

SEQ ID NO: 38833 - DNA, 129 bp, Glycine max
  Clone ID: 700943928H1
gcagtcttaacaacagcacaaagcgggttagtgtctgttcaagctaccatctctctctctctttcttagttgctccttgccataagttaaaatggcccaatacactttcctatacgcatctgaatcagt

SEQ ID NO: 38834 - DNA, 253 bp, Glycine max
  Clone ID: 700943930H1
gggatttttgctggttatgcctctgcccgcatatataaaatgttcaaaggaacagagtggaagagtattgccctcagaactgcaatcatgttccccgcaatcgtttctgccattttctttgtattaaatgctctcatatggggacaaaaatcatctggagctgtgccatttgggaacatgtttgccctgatcttttttaggtttggggattccggttcaactgttttcggttggtgccaagctgggtttaaag

SEQ ID NO: 38835 - DNA, 245 bp, Glycine max
  Clone ID: 700943903H1
ctgagagaagcagagctgaagaggtgaagtgaagatgatgtccggaaaatatacgtcgattgacgcgcagagcttcagggatctgttcctgccgttccagattcacgacccgccaccgtcaatttcgcagattcaaatcttcagacttttcctccttctggagctcagggcaagatcaccgctgcttccgggcctcctcgtgacgctgatgattcattttcaaaacctgtatctggttctgatga

SEQ ID NO: 38836 - DNA, 221 bp, Glycine max
  Clone ID: 700943931H1
cttaatttctctctgccttgctcatttacacacctctccaacctatcactttcagctttatttgaatccctctctctcctttccaaatggccagcgttgaggttgcacatcaaacaccaacaacagttccagacaatggaacaaccgaggtaatcaagacccaggatacaacccggaacccatacaagcaatgaagctcctgcaacagaacaagcagcagc

SEQ ID NO: 38837 - DNA, 284 bp, Glycine max
  Clone ID: 700943932H1
tcgtaggttaggtcagatttcggttcgagtattatgctcactgtctctccagagaacttgatagagagatggcagctgcaacatctggtgctgtgttaaatgggttgggatcttccttcttgagtggaggaaacaggagccaaacccttctggcctctgctattggaggcaagttggtgctgctgttactgttaatcccagaagactcattgtggtagctgctgctgcaccatagaagtcatggctccctggtgttagaggtggtggcaatctcgtcgacccag

SEQ ID NO: 38838 - DNA, 246 bp, Glycine max
  Clone ID: 700943933H1
actggctcttgcaagttcgcatgtaataggggcactctctttcccccagacgaataggcaggccaagaaagagagtgaccctattacatgcgcactggctcttgcaagtatggagcaaactgcaagttcaaccatcctgatcctacagctgttggaggaggaggaggtacacctccttcagggtatggtaatggagggtctatttcattacaaggtgtatcacaaacatctgtaccctcctggtct

SEQ ID NO: 38839 - DNA, 243 bp, Glycine max
  Clone ID: 700943934H1
gaggaaagtccaagaccgaatctaagagagccgatcccaaacttgctgtgaataagaagggagccgccagcaaggctaggaaacccgccggcaaggggaaggcagcgaaagaccctaacaagccaaagaggcctccaagtgctttcttcgttttcatggaggagttcaggaaggtattcaacaaagaacatcctgaaaacaaagcagtgtctgctgtgggcaaagctgctggagcaaaatgga

SEQ ID NO: 38840 - DNA, 241 bp, Glycine max
  Clone ID: 700943935H1
gaaacagttgaggccgtacatggaatccatggttccactccccggaatctatgacccggatttcattgctgccaaccaaggagaccgtgccactaacgtaatcaggggcacaacgaaagaacaagttgaacaaatcatcaaagacattaaggagttcaaagaaagcactaaggttgacaaggtggttgtcctgtggacagccaacacagagaggtacagcaacgtgattgtgtggactaaa

SEQ ID NO: 38841 - DNA, 259 bp, Glycine max
  Clone ID: 700943864H1
cagctccaggcagaacaagagcactttgctcctcaaaatgaacccggttcacaagaaaatcccggttctcatccacaatggcaaacccatttgtgaatctctcgttgctgttcagtacattgaggaggtctggaatgacagaaatcccttgttgccttctgacccttaccagagagctcaggctagattctgggctgactttgttgacaataagatatttgatcttggaagaaagatttggacatcaaagggagaggaa

SEQ ID NO: 38842 - DNA, 227 bp, Glycine max
  Clone ID: 700943865H1
cgttgttgttgttgaagaagaagaagaagaagaagaggaggaggaggaggaggaggaggaggagaatgagaatgaagacgacgatgttttggggttgtcgatggagatgagggttttcgctgagaggtttattgggatggagactttgaagatggagatgatgaaggagacggaacggtgtaggttggagatggagaagatgcggatccagatgattctggaatcac

SEQ ID NO: 38843 - DNA, 262 bp, Glycine max
  Clone ID: 700943866H1
cttcttcttcttctcttaaaagttattaagagcttttgcttttctttctgcgcgcttttcccaattaagtagttcttccttttctcaaagcaaaaaaaatgttcatcgagagtttcaaggttgagagtcctaacgtgaagtacacagagactgagattcagtccgtgtacaactatgaaaccactgaacttgttcacgtgaacaataatggcacttatcagtgggttgtcaagcccaaaactgtcaaatatgaatttaaaac

SEQ ID NO: 38844 - DNA, 257 bp, Glycine max
  Clone ID: 700943868H1
ctttttctctctctacactctattcaacccttcacattttctctcatctttatcttaaattacttttccatggaggaaagcaagaaacgagtccgggacgagtccagctactcacccgagtcccaaactcagctggtcgactctcccgagtctgaaagtcagcgggtcgactcacctgagtctaagattcgtcgagttgactcgtccgagtctcaactcgactcggtccttgactcggaggtgcgtctacaagacga

SEQ ID NO: 38845 - DNA, 260 bp, Glycine max
  Clone ID: 700943869H1
gcaactgcaatgcaaggcatcggcggttgaattaatgaatcagttccatttgaatacgtaactagccagatattcccctgtataatcctctaattactaactaccaccaccaccaccactctcccacttcaaaattcatgtctccctcttccctccacgcgctcctcatcattctcttcctaggttccgcacacgcgctcaaggtccccttccgagtcaacgatgttctccccgttctcccccacggaatctcctggccg

SEQ ID NO: 38846 - DNA, 256 bp, Glycine max
  Clone ID: 700943871H1
aggagatcaagtatgcggacaagcttccagttataccttgggggccaaggtttactaaatcaagtcaaaatgacatgcgcatcaacttggcaatatctgctgtttttacagcttggatccttgtcaagcgcagtgctgaatataaacctttgcagtttttagcctttgcctttgtttataggctttttgagaagttaaaaacctttgaatctcctgtaacccccaaatataatgaagagggtgaagacacaggcga

SEQ ID NO: 38847 - DNA, 249 bp, Glycine max
  Clone ID: 700943873H1
acaaaaccctgaagaaagacacagccattgtttacttttcattgattgagccaaagctttgtattttctgcgataattttccattgggtggaagaaagtctcaacctttattcgaaagagcaaggatctgagttgagttgagtgatcatgtgtggtggtgcgattatctccgacttcataccggcaggtcccgccagcggggcgcggcgcgtgaccgccgacatcctgtggccgagtttgaggaagcgc

SEQ ID NO: 38848 - DNA, 255 bp, Glycine max
  Clone ID: 700943874H1
atcacctacacggtgtgtgtgtcccttcatcctggaaattagagccacaaacataacacattccgctttgactttggaggcaggtttttgtgctttgtctggttcccaatcaccgtgatatcatggaatccccacaatctgttgtgtcaccattcaagaggtctgtcttgggtgatgcagagaagtataggtctgatgttctgtctaaggacattgaagtcaatggaaaggaaggtgcggtgtgtaatgttggag

SEQ ID NO: 38849 - DNA, 246 bp, Glycine max
  Clone ID: 700943875H1
aagccagatctggaaaagggtgataaaattatcatgcctccctcagcccttgatcgccttgcgtctttgcacatagagtaccccatgttatttcaaattaaaaatccttctgctgaaagagttactcactgtggggtgctagaattcgtatctgatgaagggatcatatatatcccatactggatgatggaaaatatgctcctccaagagggagacattgtaaaagtgaaaaacaccaaccttgca

SEQ ID NO: 38850 - DNA, 253 bp, Glycine max
  Clone ID: 700943876H1
ggttgaacaacttgaacttgctgagcagaatgttaaatttatagcagagttaattgatttgctattgacaactttgcttcctgattggaaaccttgtgtagcaattgatcatttagtttcttctaatggtaaactaactcattcaagtaaacagaaagactcagaattagcaaaatacaggcaaagctcagaagattctagccaaattgtggctgaaattgtaggtctctcaacctcgcctggaagaccggca

SEQ ID NO: 38851 - DNA, 185 bp, Glycine max
  Clone ID: 700943878H1
acgcaaccccctcttttagcgttcgaacaaaattagggttttctcaaccctagggtttaccttctcttcccctgttcgaaattaggcaaatcaaaacagaaacacgactacaaaaagaagaaaagaagaaaaagaatcaatcattcattgatcgctgaaacgatacgatgacagggaaggcgaag

SEQ ID NO: 38852 - DNA, 252 bp, Glycine max
  Clone ID: 700943879H1
gaccgccaacgtcacgcctcagcagaccctccacgagatatcagtctcagcaagggtacttgagaagaagtctccatgcaacttccttgtgttcggccttggccatgacagcctcatgtggacatcgctaaattatggcggccggacggttttcctggaggaggacaagtcctggatcgaccaaatccaggagaaggtaccctctttggagtcctaccatgtcatgtacgacacaaaggccaccaggctgaa

SEQ ID NO: 38853 - DNA, 257 bp, Glycine max
  Clone ID: 700943880H1
ttctcactttacgaccactgcagcgccatcgcttttcgcggcaccgcgacccgcgccacctcttcagtcttcattcttctcacttcacgaatcacgaccgaaccgtgaaaaacgttcccagcctcccaccgtgccacctcttcaggtgtaaaaatggggttatctgccaagaaatctagaaaaagaggaaaaagggacagtgattcagatgaatacgataatatggagtatgaagaggtggaggatgattacgatga

SEQ ID NO: 38854 - DNA, 164 bp, Glycine max
  Clone ID: 700943881H1
ctcgttctctgaaattttaattgacttttctcccctcataaaaaaaacctaccaatggctcccgcaaaggcagagaagaagcccgcggagaagaagccggcagagaaggccccagcggagaagaagccgaagggttagaagaagatatcgaaggaaggaggaag

SEQ ID NO: 38855 - DNA, 256 bp, Glycine max
  Clone ID: 700943882H1
cgcaacaaaaagaaagaatcccaggcgaggagaaagatggacgggaaggagcaggatgtgtcggtgggagcgaacaagttccccgagagacagccgattgggacggcggcgcagagccaagacgacggcaaggactaccaggagccggcgccggcgccgctggttgacccgacggagtttacgtcatggtcgttttacagagcagggatagcagagtttgtggccacttttctgtttctctacatcaccgtcttaa

SEQ ID NO: 38856 - DNA, 255 bp, Glycine max
  Clone ID: 700943885H1
ggagggtatccccccagaccagcagaggctgatcttcgccggcaagcagctcgaggacggacgtacccttgctgactacaacatccagaaggagtcaactctccacttggtgttgcgtcttcgtggtggtatgcagatcttcgtcaagacccttacgggtaagactattaccctcgaggtggagagctccgacaccattgacaatgtgaaggcgaagatccaggacaaggaaggaatcccaccggaccagcagag

SEQ ID NO: 38857 - DNA, 255 bp, Glycine max
  Clone ID: 700943888H1
ggaataactttcacgtgcatgtgcctaaagtaattggttatgtctcagtgaattgaaacattcagagtagtacagatattttccttatgtatacttatatggctatttgcttccactgggatgttttgcagctttcttattttttcttggatctccttgatttggatgaggaggctggcatgatccagaagtcaactaaccaaactgatcaaaatgagaatgtatttacttattatttctttggcttttttggga

SEQ ID NO: 38858 - DNA, 251 bp, Glycine max
  Clone ID: 700943889H1
tctggagcttacaaagatgcgaaaggaaagtgttgaaaaggcttccataatttgctccctgaatgaacttgattcattaggcggttgtgaagggaataccccagagcaaatcagtgcacaattagaaagactaaatcagacaattaggcgtgagagccaaaggtactctgaatcaatcgatgatctcaggatgctgtataagaaaaaagagcgtaagattataaaaaggcagcaagtttacaaaactcttc

SEQ ID NO: 38859 - DNA, 252 bp, Glycine max
  Clone ID: 700943891H1
gggatgtgaagatggagtacaaaattttgaagcagaaggtgagagaacacaacaagaaggacgcacagttttacggcagcatatttgcaaaaatgaataaactagaacaagcaagaacagcaacagcaaagcaggagccggtgccaatgactattgacagcaaagcttaaatttaaatttgagagatatctctgtctgtggtcgtctctgcatagtacgatattccaattgttgtgtcgtaagtcttggtaa

SEQ ID NO: 38860 - DNA, 252 bp, Glycine max
  Clone ID: 700943892H1
accacattgatctttcaaaatcttcataaaacaaagttcttatgctccaaaattggatccctgacctgccattgaagatgaatctaatgaagctaagggtaaatcatcttctgagttgagttgattgggtacagaaacgcagcgtttagagcaccagcgaaactcttttgcacgaacaatgaagcttcagattttcacccaactaaaccaatctcaaaaatccgcattggcggtggttttcgtcattctctt

SEQ ID NO: 38861 - DNA, 227 bp, Glycine max
  Clone ID: 700943893H1
caaggaccagtatatgtgggaactggatgtgttttcaatagacaagcactttatggctatagccctccttctatgcccagcgtaccaagatcttcatgctgttgcttcccctcaaagaagtccaccaacgatgtctcagactttcaaagaaacgcaaagagggaagaacttgaggccgccatttttaatctcaaggaacttgacaattacgatgagcatgagaggtc

SEQ ID NO: 38862 - DNA, 249 bp, Glycine max
  Clone ID: 700943894H1
gccactggtccacttgggaaggaactctttgaaaaggaacaggatgatctactctcggatctgaaagatgtaccaaaagcagcttgtgatcgaagaatcaatgagtttgtaaaacgggcccgagcagccaagatacatgcttacattatcagccatcttaaaaaggagatgcctgctatgataggcaaagctaaagctcaacaaaagctcatcgataatttggcagctgaatttggaaaggtacaaagg

SEQ ID NO: 38863 - DNA, 254 bp, Glycine max
  Clone ID: 700943895H1
cgccgccggaggagctggtggccgctggcagcagaacgccgtcgccgaagacgacggcggggaagctgctgaaccggttcgtggagagcaaggcgtcggcggtgtcgctgcaggtgggggaacacgtgcagttggcttacacacaccacaacgaatcaccgtggcatcccagatcatttgctgttaaggatgagatattctgcttgtttgagggggctctagacaatttgggcagcctgagacaacagtatgga

SEQ ID NO: 38864 - DNA, 254 bp, Glycine max
  Clone ID: 700943863H1
gcgagtttaggcgcggcgggatcatcacgagattgcaaaatgaagttcaacattgcaaatcccaccactgggtgccagaagaagctggaaatcgatgacgacctgaagcttcgggcattttgggacaagaggatctcccaggaggtccttggtgacgccctgggtgaggagtttaaaggatatgttttcaaaatcactggtgggtgtgacaaacaaggattcccaatgaagcagggagtgttgacccctggtcg

SEQ ID NO: 38865 - DNA, 255 bp, Glycine max
  Clone ID: 700943896H1
ggggcagaataagttgttgtaataattgaagaattatgcttagaattgtgggattaattaggcataacaaattgctgaatatatatagagaaagttaagttctttcgaattcctagactaaacaagagggagaaattgttgttagcacaagataaaggagctttattagtttcttgttgctatattgtgaatagagctggcactatgtaccttgatctcaagagataaaagattttaatttgagagaatcattga

SEQ ID NO: 38866 - DNA, 265 bp, Glycine max
  Clone ID: 700943902H1
gtaggtattcggctcgaggtgatgatgtgataattgatgggcctgatacttcgtccttcactgcgtttctctattctctgttgtctacttcggattccggggataaagttggtgaagctgataagaagaatgatgatgaggtggcaggtgatgactctttactatcagactcagccacgaaggaaagttttgttgtgaagaaaagtttgttttccaggagcaaacattcacttggtagggccattcaccaaatgggtggatttag

SEQ ID NO: 38867 - DNA, 260 bp, Glycine max
  Clone ID: 700943828H1
ctcctttaccaccattagagaaagtagggatgccaggagtggaggagaaaccagtggatactttgtccactgcagctgaaggtaatgtggaagatgtaaaacttcctgataatggaaatgtggagttggtatcttatccagagttggtaaaactatgcaaagagatggatgctgctggacttcacaaattcatatctgataaccgtaagaaccttgctgctgtaagggatgaaataccaaatgctttaagagctgctcct

SEQ ID NO: 38868 - DNA, 262 bp, Glycine max
  Clone ID: 700943829H1
ccctcgagccgattcggctcagcttttaaaccttagtctcccacggaagacttcaacagaagaaaaaggaagaattaatatacactcttccatggttgccgacgaagcttcaccattcgagaccagcgatatgctggcaacgctcctggcgtcgacgccgctgttgtcagagtcatggcggctgtgcaccaccgtggccgccaccgcgccgaggagtttcatgactgagcagcacggttgcggcggtgtggtgtacgtcgct

SEQ ID NO: 38869 - DNA, 267 bp, Glycine max
  Clone ID: 700943832H1
tgttcaagaaagacggaagcaccactgctggtaattctagccaggtgaccgatggggcttcagctgttctgctgatgaaaagaagtgttgcattgcaaaaggggctacccattcttggtgtattcaggacttttgcagcagttggtgttgatcctgccatcatgggtgttggccctgctgctgcaattcctgttgctgttaaggctgcaggtctagagcttgatgatattgatctttttgaaataaatgaggcatttgcctcccagt

SEQ ID NO: 38870 - DNA, 265 bp, Glycine max
  Clone ID: 700943833H1
atcgctgtaacattctgtgtgacgctggctgcatcattagctgcacggcagggaccaacatctatggccgcatttcaagtatgtctgcaggtttggttggcagtgtctcttcttgcggatggtctggctgttgctgggcaggcaattcttgcaggtgcatttgctaataaggacttcaacagggccacagcaactgcatcccgagttctacagatgggtttggttctaggattggcacttgcattcattcttggaacaggattgc

SEQ ID NO: 38871 - DNA, 269 bp, Glycine max
  Clone ID: 700943835H1
ctcccatcataaaaaaccgaccctctcctttccctcttcaccaaccaatggctcccccaaaggccgagaagaagcccgcggagaaaaagcccgcagagaaggctccggcggagaagaagcccaaggccgagaagaagatatcgaaggaaggaggaagcgagaagaagaagaagagaacaaagaagagcgtggagacctacaagatttacatcttcaaggtgctgaagcaggttcaccccgacatcggaatctcaagcaaggccatgggg

SEQ ID NO: 38872 - DNA, 221 bp, Glycine max
  Clone ID: 700943836H1
ggaaaagccaaataccgtgggctcttgaatttgtagataagaatgcttttatgtcaagggtgtatttgtatcccttttgtttttaatttcttttttcttccaagtatttatcatcatgtgttcacttttatataatgtggaggatcattagccaagttttctttttgcctgtttcattcgtaagtggtgtatcttcatcatcatcatgcttccgcacaaaa

SEQ ID NO: 38873 - DNA, 178 bp, Glycine max
  Clone ID: 700943838H1
aaccatttccaagatgcgtgattaaacggctgagattgtgtacagttatccagaaacagataccgtagacaacccgaatcccttattaagcaggggtttcgcggcgcgagacggtgacactggcagagtggaatttccgccgccattcgaagctacagcgatggccataaccgccacc

SEQ ID NO: 38874 - DNA, 259 bp, Glycine max
  Clone ID: 700943839H1
tcgagcttctttctctgcgattttgtcttcaatttccagatcacgaaactaaagaagatggagaaagcgatcagcagacagaagattttgcttcatcatctcaacccttcatcgtctacccacgtcaacgaatcatcctccctctatgcttcagcatgtgtggcgggggacagcgctgcttatcaaaggacatcgacattcagggatgatgttgtgatcgtggctgcttatcggactgctcattgcaaaggtaaacgtg

SEQ ID NO: 38875 - DNA, 260 bp, Glycine max
  Clone ID: 700943840H1
gcaacttccaacaccatagtgaaatggcttccaaggctgcacttctcttgtgtttcaatgttctcttcttcaccgtggttagctccacatatgtgccatgcaacccacgccccaaaactccaaaacacccacctgtcccaaagccaccttccccaaagcaagcaagttgccccaaagacactattaagtttggtgtgtgtgctgatgtgttaggtttgatcaacgtgcaacttgggaagccaccaaagaccccatgctgc

SEQ ID NO: 38876 - DNA, 260 bp, Glycine max
  Clone ID: 700943841H1
agatgaccagaagacggtcattggctttgggcggctctggctcagagctttaccaagcgcccaatgaagggaatgcttaccggaccagttgagaatggtaacaggaccggtaagcattctcaactggtcctttgttagaaatgaccaacctagatctgagaccacctaccagattgctttgtctatcaaggacgaagtggaagaccttgaaaaggctggcatcactgttatccaaattgatgaagctgctttgagagagg

SEQ ID NO: 38877 - DNA, 256 bp, Glycine max
  Clone ID: 700943843H1
ttaacatatacaaattctctgtgttgtgttgtgtacttgtgttaattgtgttgttgttgtaggaaatttaagtgaagagagaatgatgatgaagtctgctatgtgtgcattggtgcttgtggcactggttgtggttgaagtggggcccatggctgaggctgcggtgacttgcaacccaacacagttgactccttgtcttccggcaattaattcaggttctgcaccttcgagtgcttgttgccagaagctgaaggag

SEQ ID NO: 38878 - DNA, 254 bp, Glycine max
  Clone ID: 700943844H1
ctaagatatctctgatatatatagtttctgtgtctgatcccgtttttaattcgggttaagattgaaagcgtgagaatgccggtgaagaagtattactgcgattactgcgacaagctattccaagacacaccagcagatcggaaacgacacgttcagggcattcaacaccaccaagccaaagctcgctgggattttgccgctacggcgactcttgcaaatatctccatcccgttcccaacaacaatgtccagcag

SEQ ID NO: 38879 - DNA, 257 bp, Glycine max
  Clone ID: 700943845H1
aagagaaatgttgagtgagagcaagctgagggatcttctgcatggttctgagtatgttctcacttatgaagataaagatggagattggatgcttgtaggggatgtgccatgggaaatgttcattgagacttgcaaaaggctgaaaattatgaagggttctgatgccattggtttagctcccagggccatggaaaagtctaaaagcaggatttagggtatcctggatttcctcttttgtctaatcaagtgtttattgt

SEQ ID NO: 38880 - DNA, 269 bp, Glycine max
  Clone ID: 700943848H1
cagctcgagacgcttatggtggatacctaggcacccagagacgaggaagggcgtagtaagcgacgaaatgcttcggggagttgaaaataagcgtagatccggggattcccgatataggtcaacctttcgaactgctgctgaatccacgggcaggcaagagacaacctggtgaactgaaacatcttagtagccagaggaaaagaaagcaaaagcgattcccgtagtagcggcgagcgaaatgggagcagcctaaacgtgaaaacgggggt

SEQ ID NO: 38881 - DNA, 266 bp, Glycine max
  Clone ID: 700943849H1
ccgttcttcgtgttctccattccctctctcactccttcatctacgtaatttccttccttcctttctttctttctttctttctttatcttctcatttttctcaatacaattttgttctttctgtctcaagttttgctacttttctcttcttaaccatagttcacatattatatcatcacatatcatagtgatatcatatcacaatgtgtggcatacttgctgtgcttggttgctctgattcatctcaagccacaagggtccgcgtcc

SEQ ID NO: 38882 - DNA, 106 bp, Glycine max
  Clone ID: 700943850H1
agccattgtcattgtttgggaaaacatgttctgtgttttggtgctactagatgatttttcatctattgagaataagaatatatatttttgccaaaaagcagaaaaa

SEQ ID NO: 38883 - DNA, 262 bp, Glycine max
  Clone ID: 700943851H1
ctcaactgcgcggtgagtgagtgagagacggaaagtgcaaagccaccgtcttctcttctcagagcttggctttgcttatcgattctctctcctctcatctttctcattcaaggtttgtataagatggccgatgctgaggatattcaaccccttgtttgtgacaatggaactggaatggtcaaggctggatttgctggtgatgatgctcccagggctgtctttcccagtattgttggccgacctcgacacactggtgttatgg

SEQ ID NO: 38884 - DNA, 189 bp, Glycine max
  Clone ID: 700943852H1
aacacacacatttctagtcctcaaaccctaaactagaagagaaaaagagaaagtgcaacatcataacatcaaattcgtatgtgcttttgcttaccctaaaatctccatccctacaaaaagaagaataaaaacaagaagaagtttaacatgtcagctgccgtggccgcttccgctgccgccgctaccatg

SEQ ID NO: 38885 - DNA, 261 bp, Glycine max
  Clone ID: 700943854H1
gaaattttgttctctctacatcattgaggctatttattctatctgagttcgtcatatataaaagctgtaggcctgtagttgttcattttgtgcctaattgtgacttgacaattagctataagactgttttgttgtagaacattttgaatatagctcgaagatttcattatttggaggtatgcagcagcggatagaatgtcaaaactcaaattcttaagcattcttccttattgtagcatcaggggtttttttctcgagccg

SEQ ID NO: 38886 - DNA, 263 bp, Glycine max
  Clone ID: 700943856H1
ctctctcagtgctctcgatctgcactgcaacttccttgtctgacagatcccgtgttccggagaaaggaaaaggcaagaaagatgtcggggcaaacgcagcgtctgaacgtggtccccaccgtgacgatgctgggagtggtcaaggcgcgtctagtcggcgccacgcgcggtcacgcgctcctgaagaagaagagcgacgcgctcacggtgcagttccgccagatcctgaagaagatcgtgtccacgaaagaatctatgggcga

SEQ ID NO: 38887 - DNA, 259 bp, Glycine max
  Clone ID: 700943857H1
cgcaaatacaataacactccatcttccaaaacaaagacttcgcgtccaagcaatttctgagtgataacaaaacaaaacaaatattatcaaaaggggcaaactttgaaaccagaatcagattttattttttatttttttgctcgaatctgaatagatcagaaggtgatgtcgtgttcgtcgtcatctgggtcggaggaagacgatgagggattcgactcttaccggaaaggaggctaccacgccgtcagagtcgccgatc

SEQ ID NO: 38888 - DNA, 259 bp, Glycine max
  Clone ID: 700943858H1
ggaagagtgagcgtgaaagatgccttgggcgaggctttcagggtctccaaggctcgacgttgctattgacatgggcaatccatttctcaatctcactgttgatggtttccttaagatcggagctgtcgcagccacgcgatcagctgctgaagatacttatcatattatccaaaaggggaatatctcaagtcatgatttcgagaaaacgttgaagaagatgtgcaaagaaggtgtatattggggaactatagctggcgtt

SEQ ID NO: 38889 - DNA, 253 bp, Glycine max
  Clone ID: 700943859H1
caaccccgttgtccggagccaccattttgcgctccggcaatgttcttcccggtggccatcgtcccttaaacccaccacacttcaaagtcatgggtattccatgggacgacgtcgttgtgatccagcaagggaaggatcacaatgagccctgcatcgtcaccgtcaattgccccgacaaggctggtctcggctgtgatctttgcagaatcatcctcgagttcggtctccgcattacccgtgctgatatttccac

SEQ ID NO: 38890 - DNA, 253 bp, Glycine max
  Clone ID: 700943860H1
cttatgaatcttgtgttgaagagaatgggatcagctataactgaaagtagtttgtcaccgatatctgataaatgcactcaacatacaaggaactgtttggatagagtgaatgctgtcacttctgtactttttttgatgcacaaggatgctaaattgcaaccgattatgtctttattcaaggaagatattgataacgtcatacataaagttttttctttaaagacatcagggcggatcagtacgacaattgaag

SEQ ID NO: 38891 - DNA, 262 bp, Glycine max
  Clone ID: 700943827H1
gcggctgtctttgttgaagcattcaaaagtgcgaggtgcgtattgtctaggggttttctcaaatggcaatgatccaactactcttttaggaggcattgttgttcgtaacactcttgtaatgtatgatcgtgagcattcaaaaattggtttctggaaaactaattgttctgagttatgggaaagactacatgtctcaaatgccccaccacccttgatgcctcctaaatctgaaggaacaaatttaaccaaagcatttaagccc

SEQ ID NO: 38892 - DNA, 152 bp, Glycine max
  Clone ID: 700943861H1
tgagaatgttctttatattcaggtgggtgatcctgttgcagatcacaagtgttgggaaaaaccagaagccatgactgaggaacgtccactcttacaagtgaatgcatcttgtccaggatcagacattgcagctgaaactgcagcagccatgg

SEQ ID NO: 38893 - DNA, 228 bp, Glycine max
  Clone ID: 700943789H1
agcaggttcatacgcagggtctcatgcaggatcaggatcatacggtggtaatggaaagtaattaattaaatgcatgccagttaaaccatatcaattatatgcatgctgtcctgtggagaaaagaacaagtcggtgtctttgttagttcactagaattatactttagtaagtaagcaaaaataagttgatgcatgtgttgtgtccatcctgttctttttcttttgtaca

SEQ ID NO: 38894 - DNA, 227 bp, Glycine max
  Clone ID: 700943790H1
caccataccaatcaaccaaccttgttgcttcttgtgatcactcctgaaccacactaatggatattgatgagtgggagtttctctctgatgatggctaccttgatttcaatgaagagggtgggaagcaaaagcaaaagcagaattcctttggaaaattggactccgagggcatctttgacatggactacttttgctcatcaccaccaccaccaagggtgagaactcaa

SEQ ID NO: 38895 - DNA, 229 bp, Glycine max
  Clone ID: 700943791H1
ctcgggcaacaaaagaggttttgctgacacaatggaccctgagtttcctggcaatgcagggataaacatgatgctatcacctaaaccttctggagttcagcctaccacagtgaaagaaataccaagcaaggtgttacaagaacttccttcagcggcaaatggaactggtcataaccatacatcaggagcttctatcagtggcagtgcaccggctgctaaggcacaggtt

SEQ ID NO: 38896 - DNA, 219 bp, Glycine max
  Clone ID: 700943792H1
tttcgctcacaagtgctcctccgaaaaccgaaataaaaccgttcccatcgtgcgaacaagttcaatcgattccaaagtctaaaactgtgaacgttctttattgtgaactctctgataaccgaagaaaaggacatggcctcaagaacagttgcaaaagacataatcactcttcgcggttccgctgcaattgttagcgagttcttcggatatgctgctaac

SEQ ID NO: 38897 - DNA, 229 bp, Glycine max
  Clone ID: 700943793H1
accccaattccgaagcaaaaactaccttcacatccacaaaccacacctcccgcataaacaaaagtaacctccctcatggaagagctctcagcggggcctctcgtccccgccgtcgtcaaacctgaaccgtccaaaggcgcctccgccgctgcctccggcggcacgtccccggcctccacgtcggagccggaccaggacttcctctgtccgatttgcatgcagatcatca

SEQ ID NO: 38898 - DNA, 228 bp, Glycine max
  unsure (1)..(228): unsure at all n locations
  Clone ID: 700943794H1
gccttgcgccggaaaactcctggggtctctaatggcctctgcaacattgactcttctatcggctctagtgtctctcagcttgccaacacaaatcttagctgataactacttgtactcatcacctccaccacccaccaagtacccaccggtgtctcctccataccactatccttccccacctccaccaccacaatattaacatnaatctccancaccaccttctccttt

SEQ ID NO: 38899 - DNA, 232 bp, Glycine max
  Clone ID: 700943795H1
gaaaaataaatttcagttttttctcataatgggttccaccaatgccaataatgaaacggtcgcagagattccggagtggatccgcgtcttcaaagatggcaccgtggaacgcccacttgattttccgatcgtgccacccactctcaacactggactctcatccaaagacatcaccatctcacaccaccctccaaaaccaatttctgcacgcatttaccttccaaacatcacc

SEQ ID NO: 38900 - DNA, 223 bp, Glycine max
  Clone ID: 700943796H1
ggatcatttgcttttttgcttccagttttgtccataatcaatgattacacagacaggacattcccttctgagcatgagaggtttatctacacaatcagaacaattcaaggatcccttattgtttcttctttcgtcaatatcttccttgggtttagtaagacgtggggaaatttgacaaggttgtttagtcccataatcatggctcactttggtatgtgtggcg

SEQ ID NO: 38901 - DNA, 271 bp, Glycine max
  Clone ID: 700943801H1
caatcatcatatttatctttgcaactaaaatggcgtcgtcacaaccagagatggagcatccaaagaaggtttttggttgggctgctcgggactcatctgggcttctctccccattcaacttctccagaagagaaacgggggagaaagatttggtattcaaagtgcaatactgtggaatatgccactcagatctacatatgttaaagaacgagtggggcaacacaacctatcctctggttcctgggcacgagattgctggtgtggtaacaga

SEQ ID NO: 38902 - DNA, 271 bp, Glycine max
  Clone ID: 700943802H1
cgagcttgctggccgtgatctgactgactctttgatgaagatcctcactgagagagggtacatgttcaccacctctgccgagcgggaaattgttcgtgacatgaaggagaagcttgcttatgttgccttggattatgagcaagaacttgagactgcaaagagcagttcttcagttgagaaaaactacgagcttcctgatgggcaagttatcaccattggagctgagagattccgttgccctgaagttcttttccagccttctatgattgga

SEQ ID NO: 38903 - DNA, 268 bp, Glycine max
  Clone ID: 700943803H1
aaaaaaaataaaaaatggggataggggtactatttgttgggtttttcttgctatcttgtgttgtgtgtgtgaagggtgtggagccaaaagcctcacccacttgtacatttccggcagtttacaactttggggactcaaactcagacactggaggcatatcagcttcatttgtgccaattcctgcaccttatggcgagggcttctttcacaagccttctggaagggactgtgatggccgtctcattgtagatttcatagctgagaagct

SEQ ID NO: 38904 - DNA, 268 bp, Glycine max
  Clone ID: 700943805H1
attgggaaccaaggagatcatggattgccattttagagctggattgtgtataaaggcaattggatctgaaaatcaccaccaatgagcaatagggactatctggatttgccaagccaataggatgcactatctggattctctggattttgtggtgctgtagggaagatttcttttctcccgataattggtgccttaatgtcacactgagatggtctattttcattacttttccatcaatgtctattttttttgtcttctctttgttagt

SEQ ID NO: 38905 - DNA, 215 bp, Glycine max
  Clone ID: 700943806H1
cccatttatttttcccttatttgttttctctcgatatttgtccataataacgttctctttgtccctcatcttatcctgcacccactcccttataaccccccctacttcaccacttcacaatcaatcttctttatccactctctctctctctcttaaaattaaaactaagcatgtgctctgccatatcccaagtggaacaagaagagttgctcgaa

SEQ ID NO: 38906 - DNA, 257 bp, Glycine max
  Clone ID: 700943807H1
gggatcttccagtacctgggcgggagctgtcaggagttcattttgctatggagtttcttcatgcaaatactaaaagcttgcttgatagcaatctccaggatggcaacttcatttctgccaagggaaagaaagttgtggtcattggtgggggtgacacgggcacagattgcatagggacatccattcggcatgggtgtagtagcattgtaaatctggaacttctccctcagccaccacaaactagagccccaggcaac

SEQ ID NO: 38907 - DNA, 269 bp, Glycine max
  Clone ID: 700943809H1
cttctctgctgaaagccacagatgtgaaatgaagcatgtgctgttggaaatggaccgaattttaagacctgctgggcatgctatcattcgagagtccgtttatattgtggatgccattgctactattggcaagggtatgagatgggtatgtcgcaaagaaaacaccgagtatggagttgacaaagagaagattctgatatgccagaaaaagctatggcactcatccaacaatggttcaagatgacaaactctggaacctgtgcagtggt

SEQ ID NO: 38908 - DNA, 264 bp, Glycine max
  Clone ID: 700943812H1
gataccccaaaatcgtagcaaactttatgctataaatctatttagatattgatttgagactttttcttcaaatcttatgcacaatttattatggacataaagacaagagtgaacttcctccctaccctctgtacccacgcaggcaagaagaacattacaccatctaaggggtgcagagaaattcgaagctttgattcaagaccacctggccagggagcaaacagcaactgcactaagctatatacattcatggagcagaataca

SEQ ID NO: 38909 - DNA, 190 bp, Glycine max
  Clone ID: 700943815H1
ctctctagaaccgtacggtcgtttctttctctctcctcaaccggagacagcgtcgccttcttttctgaatctcgcggtgttgttagttctgcggcggttgtagttccggcggcgatgggacagcaatcgttgatctacagcttcgtcgctcgcggcaccgtgatcctagcggagtacaccgagttcaccg

SEQ ID NO: 38910 - DNA, 260 bp, Glycine max
  Clone ID: 700943817H1
attcgctacaattacaaaccctaatcagctcacagacctctctttctcgcgtctttggagttatggaggagcaattcatacttagagttccacctaatgtggcagagcggatagagcgtcttctgaatgaaaacaatgcttcttcatctgaagacaagtcactagatttgtcatttagagaggatggaagaagtggtacgtttatgattgggaatgaacaattcccagcttctctattggatcttccttgcgttgttgaa

SEQ ID NO: 38911 - DNA, 267 bp, Glycine max
  Clone ID: 700943818H1
gtttggtttgattggcatgttatgattcttctttctttctttggttgaaccaacatgagcaacagaaaagacaagaatgatgatgagtctagtgagagagggcgtggggctggcatgggaggattgttggcagggggtgttgctgctgctgccgctgcctatggtgctcaccatatggctcatggatatcatcgttttggacacggagcctactatggtcatggaaagttcaagcatgggaaatatggcaagcgttggaagcatggc

SEQ ID NO: 38912 - DNA, 257 bp, Glycine max
  Clone ID: 700943820H1
agaaatgttaagaaatgacttggagcttatgaagaaatcacttgaggaatccgaggctcggttacaaactcaaacagtggaaagaaatgagctggtgagtgaaattgctttgttgaagaaggaagcagaaaggtcacttgatgagctaaataggatgaagaatctcaaggatgaaaaagagatggcaggtagagtgttgcagtcagagttagaagcacttagagctcaatacaatgacttgaaaagttctcttattg

SEQ ID NO: 38913 - DNA, 263 bp, Glycine max
  Clone ID: 700943821H1
aagagtttaaagtgcgagttaatgctttggtagcaaaggctcagaaaacaccagatgaaggatggactatgcaagatggaacttcatggccaggaaacaactcacgtgatcaccctggcatgattcaggttttccttggacacagtggtgcccatgacatagagggaaatgaacttcccaggttggtgtatgtttctagagagaaaaggccaggctaccaacaccacaaaaaggctggtgctgaaaatgcactggtgagggtg

SEQ ID NO: 38914 - DNA, 167 bp, Glycine max
  Clone ID: 700943822H1
tctcgagccgattcggctcgaggggattttctggtgattccttggatgtgaattgagtttagcggaattctcgattttgaacctaaagcaaagggatttactcaaaagttttactggatttcgtgtttttgttttttcttttgattttttgcattgagtagaccgaa

SEQ ID NO: 38915 - DNA, 265 bp, Glycine max
  Clone ID: 700943823H1
aaagggtccagaagtactcaacgctgttagaccggctggatcggcacttgttgatgactggcactgcctgaaaaccatggtgaggacttttgagacacattgtggatccttgtctcaatacgggatgagacacatgaggtcctttgcaaacatctgcaatgtagggataaagaatgaacaaatggctgaggcttcagcacaagcttgtgtcagtattccttccaatccctggagttctctgcaaaggggtttcagtgcataataa

SEQ ID NO: 38916 - DNA, 268 bp, Glycine max
  Clone ID: 700943824H1
aactttccttcttcttcttccttccttcctcgtttcgttaaccttctaattcaattcattcctcacttccttttccaaccgaaccttttctccgataatcagagagagataataatggattggggaaacgtaaccgcggaggatctgatcgacgcgctccgtgaggtggattggtcgtcgccgccgcgccctctgtcggaattcttctcgcgattcaccgttcccaggtcttcctccaaatggaacagccgcctcaaatgcaatctct

SEQ ID NO: 38917 - DNA, 262 bp, Glycine max
  Clone ID: 700943826H1
attcattctcagagtcacacacacgcacatatattttcttcatcttcgtacaccactgtctcatcatctccttttccttgttctggtggcgctcttgattttcagatgacaacagcaattgggtgaaacgtgaacgccaccaccgatcggggtttgccaaaaccttacaatggaggtcgaaaggatgagacagttgatgctgatgtggtgtagaatacgaagcaaccgtgtcgctcttgtgggtggaaccataccgctgcca

SEQ ID NO: 38918 - DNA, 234 bp, Glycine max
  Clone ID: 700943787H1
agaagaaggtgtgttggagaatgaaaactgaaacagagccaaatgaaaccgagtcagattggcgcgagttgactcgcgagtgcctcatcaacatcctctctcgactcagcgtcgaggatcgatggcgcggcaccatgctcgtttgcaagtcatcgttcagcgtcttcaaggaaccctactcttcacttcgtcttcaacctcgaccctcaattcgactcgcccaccgaatcaact

SEQ ID NO: 38919 - DNA, 239 bp, Glycine max
  Clone ID: 700943751H1
tctagggtttacagagaagctaagaggcgcacgaagcaaaagctcgtggaattgctagcaatggcgaggatcaaggtttacgagctgaggcagaagacgaaggctgatctgctgaatcaactgaaggacctgaaggcggagcttgccttgcttcgtgttgctaaggtcaccggtggtgcccctaacaagctttccaagataaaggtggtgaggttgaacatgcccaggttttgacggtg

SEQ ID NO: 38920 - DNA, 240 bp, Glycine max
  Clone ID: 700943753H1
aacgaagattcctgcggaatccgcgtcaccggcatgcaattctcctacgacgtgcagcaaccgccgctcttcctcgacttcaacctcaacgtctctcccggatcccgctgcctcctcgtcggtgccaatggatccggaaagacgactttgctgaagattctggcggggaagcacatggttggaggaagagacgttgtgcgcgtcttgagtggttccgcttttcacgacactcagctcgtt

SEQ ID NO: 38921 - DNA, 239 bp, Glycine max
  Clone ID: 700943754H1
ggcgtcgaagcgaattttgaaggagcttaaggatttgcagaaggatcctccaacatcttgcagtgccggtcctgttcatgaagatatgtttcattggcaagctacaattatgggtcctccagacagtccctatgctggaggtgttttcctagtgactattcatttccctccagattatccctttaagccacccaaggttgcattcaggacgaaggtgttccacccaaatataaatagca

SEQ ID NO: 38922 - DNA, 237 bp, Glycine max
  Clone ID: 700943755H1
gtattacaacgcaccatgatggttatgaggcactaccttctggtcccgagctagcataaaacagaagaaggaagaacataactttgcccttctatgattttcatttgtgcaaatgtcgctgaaattttggcctttgtgggcatactacaaatttaatctttttagtttctagttttaagaatttttttcacagaaaaatggagttcgaagtattttcggaaaattagatatgatcat

SEQ ID NO: 38923 - DNA, 236 bp, Glycine max
  Clone ID: 700943756H1
cgctcgagccgaatcggctcgagcttcctcacgcatttcctcgtttgcttcttcccttttctctttctccggcgacgatctacgattccggccactcctctcgccggcgagcccttactcttccctcctccgtcgagccctctccgattcgaatcgttcccagcctcgcaccaccatgaatcccgaatacgattatttgttcaagcttttgctgattggagattctggtgtaggca

SEQ ID NO: 38924 - DNA, 79 bp, Glycine max
  Clone ID: 700943757H1
ctcgagttgcttcgggtgcttcaagtcttcattctctccattcaagtggctctacaatcacgtgcatttccatgggttt

SEQ ID NO: 38925 - DNA, 225 bp, Glycine max
  Clone ID: 700943758H1
caaaactccccttcttggtcttcttctcttaatcctctccaccacattcgaaggggacgttacaaaaaaatcaccattttttctcattgttaatcaagttaagataagatcattcctctctatcaacaaacctttattgtgtatatatatatatattcccacaattcacatcactcttgtccttcactcattcactctatatatccacttcatataatttcctcc

SEQ ID NO: 38926 - DNA, 229 bp, Glycine max
  Clone ID: 700943759H1
ggcccaacttagagaggtgacgttgaaggaagagaatgctgcgttcgaaaatgcaatatcagattgtgagaataaaataaaggagaaattgcaggaggctgatttactgagggaaaagttgaaggagatggatgaaactgagaagaaactgaaagctgaggtggagaatatgaagcagccaagttgggtatctgatggttaggaggaagagaagaaggcacattctaaa

SEQ ID NO: 38927 - DNA, 232 bp, Glycine max
  Clone ID: 700943761H1
caccaactattacccggagaagtcccccagcaccacttgctggcgatattgctacaaccgattcagaagagccacaatcaccagcaccaagtcccaatgcgaatgctgcacaatcatactataggcaagggaatatgtggccaactattggactcactgccattttgttatctgttatcgcttgacacgtgcaacatgattcactctaagcagtggtttggtttgcaaaaca

SEQ ID NO: 38928 - DNA, 216 bp, Glycine max
  Clone ID: 700943762H1
ctcgagccgttttgccctggctattagtttctaatgcttattggttggcattttattacgcactttaaggttttgtatgaattaaatccattattaacaaattatgacgtggagattcaatgataatgggtttaaaaaactcttagaatagagtgaactcaacttcaaaagttaactcaaaaaaaaaaaaaaaaaaaaaaaaaggaaacacgatta

SEQ ID NO: 38929 - DNA, 246 bp, Glycine max
  Clone ID: 700943765H1
ctcgagccgatccaaccaaaaagggacattttgcgggtatttgtgagtgtgtgagagagagcgcgagcagtttcagacacagagagaggggtttgggattggagggattgacgctgcgtctcttcctcttctctttcgatccatccctcattcctaatcctccaatccaaccacctcagcctcacactcacatatacacatatctgaacgcgtatcgtccctcctatggcttcaaagcgcatcctc

SEQ ID NO: 38930 - DNA, 173 bp, Glycine max
  Clone ID: 700943766H1
atcataatgtaaataggaaagactaataccaaattcattaaaaaattcaggagaagcaaaaaaatgcaaggtcgtttgtcttcttggctagtcaaacatggactaattcatagatcattgggtttcgattaccaaggaatcgagactttacaaataaagcccgaggattggca

SEQ ID NO: 38931 - DNA, 220 bp, Glycine max
  Clone ID: 700943767H1
gcagatttcgtttcatttgtgaaaagacgaacctgaaagagagagaatcagagcaagaagaagaagatgatctatcggaagtggagtctccttaccggcccggtcaccatcctcggcggcgtagtcgtcgccatcgccgccgccaacgttatcttcgtcaagaatgatccattcctcaaaccagaggagaggaactatgagaatcagcctgctaccaagt

SEQ ID NO: 38932 - DNA, 231 bp, Glycine max
  Clone ID: 700943769H1
tggctacatcaggttagagagaaatcttgctaacagcagatcaggcaagtgtggaattgcaattgagccatcttatccccttaagaatggtccaaatccacctaatcctggaccatcacccccttcacctgtgaagccaccaaatgtctgtgacaactactacagctgtgctgatagtgctaacttgtacctgtatttgcgagttcggaaatgcttgctttgcctggggtt

SEQ ID NO: 38933 - DNA, 238 bp, Glycine max
  Clone ID: 700943770H1
aaagaaccaagaaaccaagcaaatcattgttctctctgtcctgtgttttgtgatttcccccttcaagccaccaccaatggccaacaacgagatgcaagttgagaggggtttggacttggaaaggtacatggggcgttggtatgagatagcctctttcccttcaaggaaccagcccaaggatggcgtgaacaccagagccacatacactcttaggaatgatggcactgtgcaagtgctc

SEQ ID NO: 38934 - DNA, 236 bp, Glycine max
  Clone ID: 700943771H1
ctcgagccgattggcttccggattttaaaactcgaagttgtataaaaaattaatcctcagaatttaatttctagaaatatatattttcagagttaatttcagaacataattttttctacatttagaaaccgagtttatcggatgatgtagacatgttgagattcaaattgattaatatttttaggacaaatatcacgataatcctttccttgccaacaaaggctttgaagtttcta

SEQ ID NO: 38935 - DNA, 235 bp, Glycine max
  Clone ID: 700943772H1
atagcatattcatcggtgccatcatcttctttttcttactcatcatcatacgcagcttcctatggattccaacccaacatcatgatgggcctatccgaatatcaaaaaacaaacatcagatatggagattctcagccaactaatacagcaagatgggaaactaccagcgtcatcttggagagccagtattctgctccatccaacatagctcgaccctttctaaacctaaatgaca

SEQ ID NO: 38936 - DNA, 231 bp, Glycine max
  Clone ID: 700943773H1
tgactaataaatctaaattttttaagaagtacgatacttataatcctacaggagatactgataacgctgaaaaaaaaaaaaatgaattggctttaatacgttattcccaacaatcggattttcggcgagacataatcaaaggatctatacgtgctcaaaggcgtaaaacagttacttggaaattttttcaaaaaagggtgcattcccccctttttttggataaaattgaaa

SEQ ID NO: 38937 - DNA, 230 bp, Glycine max
  Clone ID: 700943774H1
gcaccacacaccgtttcactccatttcccactctttctagggtttccctgctatcttcctcaattcgaacccttcgcctttccacccttcgatttcttctcttccaattcgtcaagcgtatccgcgagtctcgatttccttctctgcaagcggattggtcgcttgtgaaggaggaacatgtattcaagagggagcggcggttacggccaatcgtacactggtcaatccgt

SEQ ID NO: 38938 - DNA, 230 bp, Glycine max
  Clone ID: 700943775H1
gttataaatggcgtgtacttattttcccaaaagggaacaatgtggactatttgtccatgtatttggatgttgcagattcagctagtttaccctatggctggagtagatatgcacagtttagcttggcagttgttaatcaaatccataataaatactctgtgagaaaagacacacagcaccaattcaatgcgcgggaaagtgattggggtttcacatctttcatgccgctt

SEQ ID NO: 38939 - DNA, 232 bp, Glycine max
  Clone ID: 700943777H1
aacagcacaaagcgggttactgtctgttcaagctaccatctctctctctctttcttagtgcctccttgctagaagttagcatggcccaagaaactttcctattcacatctgaatcagtgaacgaggggcaccctgacaagctctgtgaccagatctccgatgctgtgatcgatgcatgcttggagcaggaccctgacagcaaggttgcctgtgaaacctgcaccaagaccac

SEQ ID NO: 38940 - DNA, 236 bp, Glycine max
  Clone ID: 700943778H1
atttaaagaaatcaacacacacaaacacaacaacatatggaggtgctaagggtgcaaaccatagcttccaaatccaaagatgctgccatcccagccatgtttgttagggcagagacagagcaaccaggcatcacaaccgttcaaggggtgaaccttgaggtgccaattattgattttagtgacccagatgaagggaaagtggtgcatgagattttggaggcaagtagggactgggg

SEQ ID NO: 38941 - DNA, 207 bp, Glycine max
  Clone ID: 700943779H1
aaagctaggtgtcttcagaaacgtgatccaggttttattgttctatttcgctagtcatattactatttcattatttttttttcctttgataccagccaagagggttatttttgatcccttaaagctaatttctcattttcttttctgggactgtagatgttgtctctttgaaatctccttcatcctttcctggcttgttgaaaagtt

SEQ ID NO: 38942 - DNA, 242 bp, Glycine max
  Clone ID: 700943782H1
tgcagtgacaggaaaaatcactaccaaagcagatgttttcagttttggggttgtgctaatggagttgttgactggattaatggcacttgatgaggatagacctgaggaaagccaatacttggcagcatggttctggcatataaaatcagataagaagaaactaatggctgctatcgatcctgcccttgatgtaaaagaagaaacatttgagagcgtctccatcattgctgagctagcagggc

SEQ ID NO: 38943 - DNA, 239 bp, Glycine max
  Clone ID: 700943783H1
ccaaatacatggatttctctgaagtctttccaatttattccctgcacgagcttcttgatatagtaggattgtgtcttccttcatcacactaaacaagtcacaagaagagcatcactgaactaacaaagcaaccctatgtcgaaggtggtttctgtcaccggagccagcggcgccatcggatcatgggtggtcctactcctcctccagcgtggttacaccgtccatgccaccgtccaaga

SEQ ID NO: 38944 - DNA, 235 bp, Glycine max
  Clone ID: 700943785H1
agctgctgttcctgcgcgtgaacaagcctcaggtaagccaaagccatggttaagcataacaatgttatccccaacggacacttccgtaagcactggcagaactatgtgaagacctggttcaatcagccagcacggaagacaagaagacggttggctcgtcagaagaacgctgtgaagattttccccagacctagagctggaactcttagacccagtgtacatggtcaaactttga

SEQ ID NO: 38945 - DNA, 219 bp, Glycine max
  Clone ID: 700943750H1
gttagaatgaagctcctgcacaaacaagggaacaagcctcaacaagacaaaaacaacaactgctttcacacatattacaaaagacgttctctggttttctttctccctctatttcttcacttcctatctcatcactagcaaccccaacaacacaccaacctctgcagacacatcccatgtctcaaactccgaatccaacgttgtctctcctacccttgt

SEQ ID NO: 38946 - DNA, 207 bp, Glycine max
  Clone ID: 700943786H1
ggcaaggttacgtccaagaataaaataaacattggaatcgagagctttttggatagcttggcctccttgatctctagctctaatattggaaaagttgttgttcaagttaatacggcctagtaatgtgcttgatcttgatctcaacaatagatcagcaccagatattgaactctcttccatatgtctgtccggattgtaaactcgtct

SEQ ID NO: 38947 - DNA, 226 bp, Glycine max
  Clone ID: 700943722H1
cgaaggaaacggaacgagtggacttgaaaaatttctcttttatgtgcagtcacgagccaaggcttagggtttggtcatttcatgtttttgcgaattagggtttgtgatttgaactccatcttcaccaatcaccattaccataacttgatcttctctctcgacataacggacggcttcttaactcggcaacagaagcagcggcttcaacctgcttccggtcatgcta

SEQ ID NO: 38948 - DNA, 240 bp, Glycine max
  Clone ID: 700943724H1
ctcttctctaatttgcttgttggaaaggaattgaaatgggtgcacttaactacatcatctccaacttttgcacagttcccagcaaaaagatcaaaacaatgcagacagttgagatcaaagtcaaaatggactgtgatggctgtgaacgaaaagtcagaaatgcagtggctacaatcaaaggagtgaaatctgtggagataaacagaaagctaagcagggtgacagtgaatggttgcgttg

SEQ ID NO: 38949 - DNA, 239 bp, Glycine max
  Clone ID: 700943725H1
gacccaggcaggtgtcgcagtacgcggagaaaggacgctatataaatatatttgtccccgatgctctctatttcagccactcgtatattcttcctccgctcaacaactataagattatcttcttcttcttcttctcttcaattcttctccaatcccaaccgcaccctcttccgtccctttcttcacacttccttcaaaccacttccttcgtctttctctttccgaacagatcacactat

SEQ ID NO: 38950 - DNA, 231 bp, Glycine max
  Clone ID: 700943726H1
gcaacttccaattcatttgcaatttagcggcaaagcaatctacagccttcaattaccaacaagaatatgaagcaaactctcttcttctccttccttctactcaccaccattttctcaatcaccactttagctcagtcaccagctgcagcccctaaagccccagcaaaacctgcccctgccacaccggctccagcgccggcaaaacctttagtcccttcattaccccagtca

SEQ ID NO: 38951 - DNA, 231 bp, Glycine max
  Clone ID: 700943727H1
aactcacctgcttcttcctctttttgtcatttctcttcaacttcctcttctttcaattctcttcagtctctctccgccttcccaaaatggtgaaccctagatgcttcctcgacgtcagcatcggcggcgcgttagaaggccggatcgttgtggagctcttctccgacgtcgttcccaaaactgccgagtccttccgcgctctctgcaccggcgaaaagggcatcggtccca

SEQ ID NO: 38952 - DNA, 237 bp, Glycine max
  Clone ID: 700943728H1
ttaattgcaagaatggcacttcgttgcttggtgatgtccctttctgttctcttcactcttggtcttgcgagagaaagccatgccagagacgaagatttttggcatgctgtttggccaaacactcccattccaagttcattgcgagatcttctaaagcctggccctgcaagtgttgaaatcgatgatcaccctatgcaaattgaagaaacacagtacccgaaaaccttcttctataaa

SEQ ID NO: 38953 - DNA, 238 bp, Glycine max
  Clone ID: 700943729H1
gttctaagatcgcgagcggccgctcggatctagaactagcactcactcttctattttccaactttacaatttcatttcagatagcttcttgacacgttactgactcactcaatggctgaccgagttcaccccagccactcgccttccgtttccgccgattcacaaccgccatcgcctcaagactcccccgtcgttccgaaaccgccgtcgccaccgtcaccggagaagccagtgcctc

SEQ ID NO: 38954 - DNA, 238 bp, Glycine max
  Clone ID: 700943730H1
ctcattaattgcaagaatggcacttcgttgcttggtgatgtccctttctgttctcttcactcttggtcttgcgagagaaagccatgccagagacgaagatttttggcatgctgtttggccaaacactcccattccaagttcattgcgagatcttctaaagcctggccctgcaagtgttgaaatcgatgctcaccctatgcaaattgaagaaacacagtacccgaaaaccttcttctat

SEQ ID NO: 38955 - DNA, 242 bp, Glycine max
  Clone ID: 700943731H1
tcttcaaactagggttttacagaatataagcgctctctatctttggttttcgtcattcaaatccaatccaatatcaaatatgagtcgtcatcccgaggttaagtgggctcagagacttgacaaggtctatatcacggtgcaattggctgattcaaaaaatgccaaggtggatcttacaccagatggtatttttaccttctctggtagtgctggtgctgaagaccatcagtatgagctaaaac

SEQ ID NO: 38956 - DNA, 244 bp, Glycine max
  Clone ID: 700943732H1
caagaacactctcttgaacattcatggatccagtgagcgtgtggggtaacacgcccttggcgacggtggatcccgagatccatgacctcatcgagaaggagaagcaccgccaatgccgcggcatcgagctcatcgcctccgagaacttcaccgccttcgcagtcatcgaggccctcggcagcgccctcaccaacaaatactccgagggcatagctggcagacgatactacggcggcaacgaatt

SEQ ID NO: 38957 - DNA, 217 bp, Glycine max
  Clone ID: 700943733H1
gtgagaaagagaaagagagaattcgtaaaccctaatttcggaaagatcggcgatgactgcctccaaggatcgcgagaacttcgtctacatcgccaaactcgccgagcaggccgagcgttacgaagagatggtggaatcaatgaagaacgttgcgaatctcgacgttgaactgacggtggaggagcggatttgctttctgttgggtccaacatgtgat

SEQ ID NO: 38958 - DNA, 158 bp, Glycine max
  Clone ID: 700943734H1
ctcggttctgccttcacaaaaaaattatcgggatcccctttttctcctaagaaaagccatggctaagggtcccggtctctactctgacatcggcaagaaagccagggatctgctgttcaaggactaccacagtgaccagaagttcaccatcacactta

SEQ ID NO: 38959 - DNA, 243 bp, Glycine max
  Clone ID: 700943735H1
cggctcgagctcgagcgattcggctcgagggtttctgcgcttgaaaaaaaaaatctgggacacatcgagccaaataattggtccggtactagatgtaacttttcccccaggtaagatgcctaatatttacaacgctctgatagttaagggtcgagatactgttggtcaacaaattaatgtgacttgtgaagtacagcaattattaggaaataatcgaattagagctgtagctatgagtgcgac

SEQ ID NO: 38960 - DNA, 243 bp, Glycine max
  Clone ID: 700943736H1
gtgagcctcttaaggagtctgaagtgaaggtgctctgcctcaaagccatggaaatcctcgtcgaagagagcaacgttcaaagggtcgacgctcctgtcaccatatgtggtgatattcacggtcagttttatgacatgaaggagcttttcaaagtaggaggggattgccccaaaactaactatttattcctgggggattttgttgatagagggttttactcggttgaaacgtttctgcttctgc

SEQ ID NO: 38961 - DNA, 240 bp, Glycine max
  Clone ID: 700943737H1
ctactcgccagaaaacggtctggcaactttgtctataattgtgctgtgatgggatgttgaagaattgaattgtgaaaggtatcacacagtttgatgcttcaaatccaatgagttgcacaacattgattcatccattgacacaggattcttgctaattggtactttcccccttctttttcgatgatattttcctttcaaaggcgggggaggacggggaggagattcagatatttctcaaga

SEQ ID NO: 38962 - DNA, 241 bp, Glycine max
  Clone ID: 700943738H1
ggggaccgaatttcataactgagtgctttaggggaagaagaagcgaaacacagtgtcagtatctgagttttttcttcaaactcaaaccctaacaaacaaaaaccatgtatcgttttttctcttccattcgccatggccgtggatcttccctcgcatctcttctcgcgccgaaacctgcacttccattcaacgccgctctctgacctcgccgtttacctcaaaacgacgggcatgttagagg

SEQ ID NO: 38963 - DNA, 239 bp, Glycine max
  Clone ID: 700943739H1
atcaaaacccgcttcaggctggagtgattcaccaagaaaagggatccaactaaccaaggcaacgaataatatcgtcgaggccatggagttgttgatgaaagaagctgcaaaattgcgtgaatatgagaacaaggcccatcaaaatgggccaggccagtttgggagcaggcccgcgccaccaccagcaagcacatgtgacaggaccatgaatccggtgcgacaacgcttcaatttcggtg

SEQ ID NO: 38964 - DNA, 237 bp, Glycine max
  Clone ID: 700943740H1
tggttaagtacagtgagcttgctattgtatgcactcttgtgtagatattaccctaagaagagtgattcggacaatgaatattgagggttttttttttccttcctctttagttttcaagtgttatcttcccaaacccactgggttggcctagtggtgggaaacttgggatagaatacatgagatcataggttccaaggcgtacacccaaaaaaaaatgttatcttcccacattccttt

SEQ ID NO: 38965 - DNA, 237 bp, Glycine max
  Clone ID: 700943741H1
gttcgagtttctgctgtgcttacaaatgcaccattcatgttgaatctggattgtgatcactacgtcaataacagcaaggcagtaagagaggccatgtgctttttaatggaccccaacctagggaagaagctgtgttatgtccaatttccacaaagatttgatggtattgatcgccacgatagatatgctaaccgaaacacagtgttctttgatatcaatatgaaagggcttgatggg

SEQ ID NO: 38966 - DNA, 230 bp, Glycine max
  Clone ID: 700943742H1
gtactcatgagattcctcaagcattcctgtctggaccggacacaaacctccgaagggtaaccgagttggttgtatttatcttaaatcacattacttctgcagccgatgccgaattctttgacttgtcccttagacggcataaccaacctccagaaaaagtaaacagaggcatgatattggcacctctagtagggattctcttaaatttattggatgctacaaattcagca

SEQ ID NO: 38967 - DNA, 234 bp, Glycine max
  Clone ID: 700943743H1
ggattgggaacgagtccttttcccaaaccattttcaaagaaagatggggtggcaacttctgccacgtggtgtcaaagcatgacataatgccaaggttgctctttgcccctataacctctctctctacccagctaaattccctgctacagttttggcacttgtccatgacttcaccagattttgggaagcttgcaaatcagatatctgaacaagagaaagataagttgttcactg

SEQ ID NO: 38968 - DNA, 235 bp, Glycine max
  Clone ID: 700943744H1
tgcagctgcagaagaagccaaaaagagtaaccatgtgcagagaaaattggagaagcgccagaaagatcgaaagacttgatgctcacattgaggagcagtttggtggtgggcgtttacttgcttgcatttcctctagacctggtcaatgtggcagagctgatggctacattctggaaggtaaggagttggagttttacatgaaaaaactccagaagaagaagggaaagggtgctgc

SEQ ID NO: 38969 - DNA, 235 bp, Glycine max
  Clone ID: 700943745H1
gctttcactgggggtcgtacacaacctgtaactaccaagcctgatgagggggaccgccacccatactctataatagagtgtgagcctaagcgtgaagtcattttaccatctgtaatctacatacaaaagattttgcggcgaaggccatttctcatcaagaaccttgaaaatgttatgcggaaattccttcagtccttggaactttccgaggaaaatgagaggaaaaagttggcaa

SEQ ID NO: 38970 - DNA, 238 bp, Glycine max
  Clone ID: 700943747H1
gcacccaattctattaacaattcttggtcatcaatcagcagcagctacaccaccacgtccaattccctgttagtgtttgcttcctacttccctctccagtcctgcaaaaaccaagttcctgccctcactttctagattttctgtcaagcgtccgtacttcctttcccaaacttatccgcgcattgctgtgaacaagccctccatgaacctgttgaacagactcgggtttggcagcgca

SEQ ID NO: 38971 - DNA, 239 bp, Glycine max
  Clone ID: 700943748H1
gaaagaaacagtcagaatcagaatcagaagaagcgagcaaagatgtcgggtcgtggaaagggaggcaagggtttgggtaagggaggagccaagaggcacaggaaggtgctccgcgataacatccagggaatcacaaaacccgccattcgccgtttggctcgcagaggcggcgtcaagagaatcagtggcctcatctatgaagaaacccgcggcgtccttaagatcttcctcgagaacgt

SEQ ID NO: 38972 - DNA, 237 bp, Glycine max
  Clone ID: 700943749H1
cactaccactggtcacctgatttacaagcttggaggcattgacaagcgtgttattgagaggtttgagaaggaagctgctgagatgaacaagaggtctttcaagtatgcctgggtgctggacaaacttaaggctgagcgtgaaagaggaatcaccattgatattgctttgtggaagtttgaaacaacaaagtattattgcacagttattgatgcgcctggacatagggatttcattaa

SEQ ID NO: 38973 - DNA, 241 bp, Glycine max
  Clone ID: 700943721H1
attgggcttgcttcacgattaggctctgggtgtgtgacacctgatggtctggggctggaatccaggttaggttctggctgtttgacacctgacagtgctgggccaatcaatcaaaacaacatctctgtgcaaaaccagatatctaaggaagcaactcttgcagatacggacaatggacattcaagtaatgcaacattgattgatcacagagtttcatttgaattaaccggggaagatgttg

SEQ ID NO: 38974 - DNA, 265 bp, Glycine max
  Clone ID: 700943689H1
catagaagctgcaaaatggcttcataaagtggttgatcgccccaatgtgtatattaagattcctgctacagaggcatgtgtgccttcaattaaggaagttattgctaatgggataagtgtgaatgtgacgctgatattctctcttgcaagatatgaagctgtaatagatgcttacttggatggtcttgaggcatctgggttaaatgacctctctagagttacaagtgttgcctctcactttgtcagtagagtggacactctcatt

SEQ ID NO: 38975 - DNA, 264 bp, Glycine max
  Clone ID: 700943691H1
aacagctttcatggttccattggtggctggtgatggaaccaaaactcaggcacttgctatttgccactcaaatacttctggaatgaatcatcaaatgcttcatcaacttatgggcgttgatcctggaactaaccctgtttgccatttccttggaagcaaggccattttatgggtacccaatttatctgtggacactgcctatcagaccaacattgttgcttaattagtccatgcatcttgagcaccatgagaatgagattgtgt

SEQ ID NO: 38976 - DNA, 262 bp, Glycine max
  Clone ID: 700943693H1
gttggtgctttttggtacttgttagctattgaacgcaatgacacatgctggcagaaggcttgcagtgacattgggtgcaaagaaaatttcctatattgtgggaaccggcacatggaaggttatagtgcttggaataaaacaagtgaagatattcagtcaaggtgctctgcagatggtgatcctgcacattttgattatggaattttcgggcaagtcttgtcttctggcatcatttcatctaagaagttcatctccaaatact

SEQ ID NO: 38977 - DNA, 263 bp, Glycine max
  Clone ID: 700943694H1
tgagcatgaacctgttagaaatcttgtagatgctgttaataaaattaagccaacagtgttgattggaacatcgggacaaggaagaacatttactaaagaggtgattgaggcaatggcttctattaacgagagacctattattctttctctttccaaccctacgtcacagtcagaatgcactgctgaagaagcttacaagtggagccagggacgtgccatttttgcaagtgggagcccatttcctcccgttgagtatgagggga

SEQ ID NO: 38978 - DNA, 262 bp, Glycine max
  Clone ID: 700943695H1
ctctttcttcctcttcctcagtagtgcgattttcgattctcttctctgcaactatgcctaaccctaaggtcttcttcgacatgaccatcggcggtcaacctgccggccgcatcgtgatggagctctacgccgacgtgactccgagcaccgccgagaacttccgcgcgctctgcaccggcgagaagggcgccgggcggagcggcaagcccctccactacaaaggctcgtccttccaccgcgtgatcccgaacttcatgtgcca

SEQ ID NO: 38979 - DNA, 260 bp, Glycine max
  Clone ID: 700943696H1
ctcttatcgtggaatggggttatctgttggtaccatgattgctggatgggatgagacgggtcctggtctatattatgttgatagtgaaggaggaagacttaaaggcactagattctctgttggatctggttcaccatatgcttatggtgtattggacagcgggtaccgatatgacctgtcagttgaggaagctgctgaacttgctcgacgagcaatttatcacgcaacatttcgtgatggggccagtggtggagttgcta

SEQ ID NO: 38980 - DNA, 228 bp, Glycine max
  Clone ID: 700943701H1
aattgaggatgtggaaacaaccgacgaagtgggtgttagttgcgaaattggtgacgtggcattgaaggttttggagccgtgtttatgtgatgaagatgtttctgaatgcaagattagacctagccgaagtggtaggtttaggtccaagatggtgaagcttgtttctaagaaatttcgtgggtctaagacagagttaaagggtgaggtgaataaacactatgagggtga

SEQ ID NO: 38981 - DNA, 253 bp, Glycine max
  Clone ID: 700943702H1
atcactctcaactctgcttcttttcaatcagttacattttctttggtattccaatggccactgttgaggttgtgtcagcaaaggtttccctcccagaggacacaaaagaggcatcagcgaaggctgatgagaagaagaacacagaagaagttgttgagactccaacaccaacaccagaaaatgtcgtcactgagcaaacaagggaggaaagtactgaggccccacaatgaagattcaaaaaaaacacccgggg

SEQ ID NO: 38982 - DNA, 114 bp, Glycine max
  Clone ID: 700943703H1
atgcccaggctgaacatcatcaaagaacatcagctctcaaaggcaaagaaactgttctccggctcagaaacatctccatgactgtgtgttcagagttgtgatgcttcactgttg

SEQ ID NO: 38983 - DNA, 246 bp, Glycine max
  Clone ID: 700943705H1
gaggaagttgtgtctgagaccatcacacaagagccaacagttgagaagcaagaagctgctgagggaacaaaagaaaatgccgatcctgctgagattaagacaccagaagctgcagaagatgttaatattaaggaagagaaagaagctgaggctgaggctgaagctaaggaggaagaggccccggcagagaaaaaggaggagaaggttgagacagaagggtcagctgaaaagaaagaggaggaagtg

SEQ ID NO: 38984 - DNA, 246 bp, Glycine max
  Clone ID: 700943706H1
gctaaagcttcaagcagaaatggcccttagaaataatgataaaaactatatgtagtttcaaaacttcaaaattatgtagtatgtattatgttgcactctggtgttttgtgtctaaacaaacacccttagaataaagtggtcatttcttgcccttgagcaagttcaagtgttttggacttgtgatgggtgtgttaaggtcatggttgccttttttttatatatatatatatatataaatgtttggta

SEQ ID NO: 38985 - DNA, 243 bp, Glycine max
  Clone ID: 700943707H1
ggaaaagactcacatcaacattgtcgtcattggacatgtcgactctgggaagtcaactaccactggtcatttgatctacaagcttggaggtattgacaagcgtgtgattgagaggttcgagaaggaggctgctgagatgaacaagaggtcattcaagtatgcctgggtgcttgacaagctcaaggctgagcgcgaaagaggaattaccattgatattgctttgtggaagtttgaaaccaccaa

SEQ ID NO: 38986 - DNA, 243 bp, Glycine max
  Clone ID: 700943708H1
gatatagcaagcaacttttttcatctgtgttgtgccgaactttcaatgtaaaatcgattcatctgtttgcccaaaagaaaaacgaacatattcttgttgagtggctcttgatagctgataaaggtgacttttctggtaaaaatctctcccagatgtcaaatgttgcgaactcgacaaatattatgtggcatgactgtccaattcagaaacaagatagacagcagctgcttcagcaaaaaggct

SEQ ID NO: 38987 - DNA, 242 bp, Glycine max
  Clone ID: 700943709H1
caagtgttcaccacctaccaggaccagcagactaccgtctccattcaggttttcgaaggtgagaggagtctcacaaaggattgtcgccttcttgggaaatttgatctgtctggaattccaccagctccaaggggcacccctcaaattgaagtgaccttcgaagttgatgccaacggcattctaaatgtgaaggcagaagacaagggaactggtaaatcagaaaagatcaccattacaaacga

SEQ ID NO: 38988 - DNA, 239 bp, Glycine max
  Clone ID: 700943710H1
cattaaataggtcattttgtcttcaagtacgtggtctgtgaccaaaccggtaagagacatggaaatttgtggtatcagacttagggttttttgaaagtggtgttattttgtcaaaaaagaagaaagtggtgttatttgctccactgtcttgtttcacatttttagggttttagtatatatggatgatatttccaagcctgtgttcatcatcaccatggttattcagctattcatgattt

SEQ ID NO: 38989 - DNA, 238 bp, Glycine max
  Clone ID: 700943711H1
ggattacttgggactactacttctcttcacgagaacataccttgaagtttgactcgtgggaagagcctgcagagttggaatatgtgaagcagcatggggtttctgtgtttctcatgccatccgggatgcttggaactctgctttctctgattgatgttttgcctttgttctcgaacactggttggggtcagaaagccaacctggattttctgaagaaacacatgggagctacatttga

SEQ ID NO: 38990 - DNA, 238 bp, Glycine max
  Clone ID: 700943712H1
ctcgagccggctcgagcaaacacaacaacactctctcttctcgctcttggcttttcgcacttcactcactctcattcattcatttccaccgttcatggatcccgtaagcgtgtggggtaacacgcccttggcgacggtggatcccgagatccatgacctcatcgagaaggagaagcgccgtcaatgccgcggaatcgagctcatcgcctccgagaacttcacctccttcgccgtcatc

SEQ ID NO: 38991 - DNA, 239 bp, Glycine max
  Clone ID: 700943713H1
attaaataaataaataaaattaaactaagctaaattcctttctctctctttctttctcttcgagggtttgggtttctcttcctccctggaagaaaaagaagagtcaccgctacgacgccgttcgtgcttttttgaggtgccacagtcatgtttgggcgtggtggaccaaggaggagtgacaactccaaatattatgatattctcggggtttccaaaaatgccagtgaagatgaaatcaa

SEQ ID NO: 38992 - DNA, 190 bp, Glycine max
  Clone ID: 700943714H1
tcttcatcaagctccgctccaacacagggggaaatgagggaggtccttcacgtgcagggatggcaatgcgggaaccagatcggttccaagttctgggaagtggtgtgcgacgagcacggcatagatccgacggggaagtacgtcggaaactcagatctgcaactcgagcgcgtgaacgtctactacaatg

SEQ ID NO: 38993 - DNA, 246 bp, Glycine max
  Clone ID: 700943715H1
gatattgcaaaaaacccaaatgtggtgtctgtgttcttgagcaaagaacataagttgcacactacccggtcatacacgaatttcttggactacacagacgtggccagaactccgcatggcaaaagggaagatttggggaaaatacgataattggtaacattgacacaggtgtttggcctgaatcccaaagcttcagtgataaaggatacggtaccgtcccatcaaaatggcgcggaggcctttgtc

SEQ ID NO: 38994 - DNA, 246 bp, Glycine max
  Clone ID: 700943716H1
aggtgctaactaatcaactgtctttagggtaccaattaaagattttaaaatatttttttctagaaaaatattcccaacatatctcaccatagtttttcatgattttttcattaattttttaactagtgttgttagaacacccaattacaggactcttttgttgatcattatccttaagaaaatgatttttttggcttgtaacatttaattgttactaattcattaaatatcatgatttaaaataac

SEQ ID NO: 38995 - DNA, 253 bp, Glycine max
  Clone ID: 700943717H1
caaagagggcgtcttcataaacgcctttcttctccgtttccgtttcctcgttcgaattcgctttttgatctgcgaaaatgagagagtgcatctcgatccacattggtcaggctggtatccaggtcggaaatgcttgctgggagctctactgcctcgagcacggcatcgggcccgatgggcaaatgccaagtgacaagacagttggcggtggtgatgatgctttcaatactttcttcagcgagactggtgctgg

SEQ ID NO: 38996 - DNA, 205 bp, Glycine max
  Clone ID: 700943718H1
cgcaaaaccaaaagagaaacaaatcaaggttcaaatcaaatgggttcaaggacacagccagcagcagctgatcgtgtctacgaagactttgtaccattgtatgaatgggatagaaatgaaaggcttgtcaatgttatgctaccaggttttagaagggatcaattgaaggttcaagtgacttcaaagttcaccctaaggctaatgg

SEQ ID NO: 38997 - DNA, 247 bp, Glycine max
  Clone ID: 700943719H1
gcagaaacgcaatcagaggaagagaagagacactgaggtcgttggcgagaatgggaagaaagaaggggtatgttgagttcgaggagtcgccgccggacgattttgatccggcgaatccgtacaaggacccggtggcgatgctggagatgagggagcacatcgtgagagagaagtggatccaaatcgagaaggccaagatcattagggagaagctccgctggtgctaccgcatcgaaggcgtcaacca

SEQ ID NO: 38998 - DNA, 267 bp, Glycine max
  Clone ID: 700943687H1
ccctacttgtgctaggctttggacattgttcaacgaaaattcagtacacccaacaatttacaaagaatcagccctcgcttttccaagtcccaacccctaagatgaaggtaagattccttgctttgttcctactcatttcaggcattcaagccatatcaacctcagaaggtaaaggcctaatccagagcaatggacaagcacaagaacttcttgggaagttatatggaagcatagaagagtcaataaggttgaacgacaaagttgagg

SEQ ID NO: 38999 - DNA, 239 bp, Glycine max
  Clone ID: 700943720H1
accgagtccgagaggcatcatggcgacactggattccgacgtgaccgtgtttccggtcggcgaagctccagcagcgccggtcctgtctcgtccaccaagaagccgaagcgtttcgagatcaagaagtggaatgcggtttccctctgggcttgggatattgtcgtggataattgcgctatttgtcggacccatatcatggatctctgtattgagtgccaggccagccaggctaacgccac

SEQ ID NO: 39000 - DNA, 270 bp, Glycine max
  Clone ID: 700943655H1
attcaaaaaaatttatagaactttctatttttataaatgattgtataattttatcataccaaaaaaattctccttttttcattttcccacgtggttgtttgtgcaacaagttaagcaacgtgaaatgcagcagcaggcccttggtatatataaccagcatttgagcaaaagttagaacaggaagctttttggtaacattaactaagcacaaagcattatcattactactataagcttatagttgaaatctttgagcatagaaaaaagatg

SEQ ID NO: 39001 - DNA, 271 bp, Glycine max
  Clone ID: 700943656H1
cttacttgtggatgtgtcaaattctttgtctgtgccatacgatatgacacttatcgacttggatgcatccagttatcctgaaaaagttcctgcagctgataaagccggttctaggtgacaatgaggaacattcagagccaagttagtgggaaaattgtcattgttgaagagagaagagagtaatagaggcatcctatatctttctcttctaggagagaattatgagtaaagtgtggtttgtttgattcccaggaaagcatgtaagcaggtc

SEQ ID NO: 39002 - DNA, 266 bp, Glycine max
  Clone ID: 700943657H1
caaccaataaggttccaaggggaatcccaaggcgacttttcagtccaaatccatggtctcctggtgcatactcaaattggactgtaattaaggaaatgttgaatgtgcctctcatctatattattggagcatttataccggcaactatgattgccgtgctttactactttgatcatagtgttgcatcacaacttgcccagcagaaggagttcaatctaagaaaaccctcatcttatcattatgaccttcttctcttgggcttcttg

SEQ ID NO: 39003 - DNA, 266 bp, Glycine max
  Clone ID: 700943658H1
tcatttgataagtctgttgctcatgtttttaaggagtttgggtatggtatggaggatgttgttaaggggaatttggaggttaagcatccctgcttgcaaatcgggtacaaggagaggtattcgtgctcacattgttcttctgctgtgaagaaaggaggggagagtctgatggttgagggaaatgggaatgtggtggggaagaaggagggaggatcaaggactgtggtgacgcttgttggcgccccaaattggttgaagtgtagcac

SEQ ID NO: 39004 - DNA, 266 bp, Glycine max
  Clone ID: 700943659H1
tgtcaacatctcaccattgataaccattcatgatatatctgggtctcagtcatcatctgcttgccccacttctcctccacattttcaagaagaccttcttcatcgccggcaacacttggtggaggaaattttgcagctttcagcagattccttttcagtggcatcttctgatagtaacacaagctgtagtgaagttgattgcagtgaatttgagtcatcagtgcctaaagttgataatttcccgtgcaaatattatatgaatggaa

SEQ ID NO: 39005 - DNA, 267 bp, Glycine max
  Clone ID: 700943661H1
tgagaattggagtggatggtttcttccgttcggtggtgctgttccttaccggcctgtggaagatcttgcatttgccgtggcacgatttttccagcgaggaggaacatttcaaaattactatatgtaccatggagggaccaactttgaccgaacttctggtggacctttcattgctacaagttatgattatgatgcaccaattgatgagtatggaattattagacagcctaagtggggccacgtcatagaagttcataaggccataaa

SEQ ID NO: 39006 - DNA, 267 bp, Glycine max
  Clone ID: 700943662H1
ttcgtgcccgccgccgccacggcgttcgtgagcttcttcgtgcccgcgtttatgtttatacagagatggctccctctgttctatgttccttctctggtggtcttgcgccttgccgtcaaagatattcccgctgcctccggagccaaaattggcctcattttagttggaggatggctggctacattttgtgttgctggttacgcggctatcgcagttagaaaagctgtgaaaacgggattggtagaagctgaggctatgggaaagcct

SEQ ID NO: 39007 - DNA, 248 bp, Glycine max
  Clone ID: 700943664H1
tagcgttctcggcgcgttgcatgcgttgatgcacgcgcttcgttccgagtccgagctgactctgcacgatccagcgctcgcgctgtatcatttgtcacttatacagagtaacagattgacattggttaaactcagggctgtccccacgctcctctcgatggtgcccgctaggaatatggcctgccggttgatgctgatgctctgcaacctcgccgagtgcttcgtcgcgcgcacttcgatgctggacg

SEQ ID NO: 39008 - DNA, 267 bp, Glycine max
  Clone ID: 700943666H1
ccttcacgtatgtctgatatttctgcgaaacctactttcaagcatattcctaagaaagggatgcttgttttcgatgcagctcagtttgacgggatccttaaaaagatttctgagttcaattgtgctttacagtctgaccaggaaaagcagaacttgtctttgactgagctcaatgtttccagactgggtgccattgttaaaattctgaaagatacttcacattatcattctagtaaatttgcagactctgatatagccttgttactg

SEQ ID NO: 39009 - DNA, 268 bp, Glycine max
  Clone ID: 700943667H1
gttcataatttcttccaacaaattatatttttcttacaaaaaaaatggcaggtgaggtggtgaagaaggaagagtctctcaacctgaaagtcactaacaagagccatgttcaatcagaggagaaaattggaagaaaagagtaccaattggtcacttttgatcttccctacttggccttttactacaaccagaagctcttgttttacaagggtgaagatttcgagggcatggtccaaaaactcaaagttggacttggagtggtgctgaa

SEQ ID NO: 39010 - DNA, 265 bp, Glycine max
  Clone ID: 700943668H1
ggactgggcatagattacgacggttccaaatcgtgtgactctgatatttccgttgagtacagtctcgaggattatgcagtcgcggttgttcacgcggttcagtgtgtgtgcgaccgaaggtccgtgaaacacccagttatctgcagcgagagtgggagagccatcgtgtctcatcattcggtcttgattttcgaggcggttggcaccagcagcaccaccgggggaggagcttcccctgcattgtccgctcaatatctggcggagg

SEQ ID NO: 39011 - DNA, 70 bp, Glycine max
  Clone ID: 700943670H1
cgttatagtaattcattactccaaagagagcacaggagaggaaaggaggagaagagaaaaggggagaggg

SEQ ID NO: 39012 - DNA, 268 bp, Glycine max
  Clone ID: 700943671H1
cgaaggaacattttccatgtttggaagcaaaaagatgcactcgcagcagaacgactttctattacacaattggctggttgatattcatggaagatagccctgtgaaatttaaatcttcaatggatccactccagcaggtttttctcagtttggaatcaactcctgatgcagtatttcgaacagatgctgtaaggtatgcacttgttggtttgatgagggaccttagaggaattgcaatggccacaaacagccgtcgaacgtatggatt

SEQ ID NO: 39013 - DNA, 268 bp, Glycine max
  Clone ID: 700943672H1
gaaatgtccaccgacgaacgcaaagtgccctggatgagagggaagtgaggcccccaaactcagaggctgctgctgcagttgcaagtgctgcaactgccacttctcatgggattgaagtggctgtggagtttaagccagttgaacatccaattgaaccacttgacaatgataggcccattcagtgcccgttgccagaaccatctattcttaatgatggaagaatatgccaagaacgagtatctgctactgcgtagaagaggggatctgc

SEQ ID NO: 39014 - DNA, 266 bp, Glycine max
  Clone ID: 700943673H1
ttagtttccaacctgcatctctatgatattgcgaatgtcaagggagttgccgctgatatcagtcactgcaacacaccctcacaggtcagggatttcactggagcttctgagttgccgaattgtttgaaggatgtgaatgttgttgtcatacccgccggtgttccaaggaagcctggcatgactcgtgacgaccttttcaacatcaatgctggcattgtcagggacttggtttctgctgttgcggattactgccctgatgcttttgt
